United States Patent Application Publication US 2026/0103690 A1 - sequence listing, part 29

SEQ ID NO: 131597 - protein, 441 aa, unidentified
MGAQSTSTALTDYWGGTAPAGSRLYVGIDAGRRQHVVAGIVQERMENGSWERVGVHRIPTNGQGFRELITWLQASGHSPAQVRIGCEPTGLWCAETVVAWLERNGYQVQWLQTWALHERRRLAIGKQTKTDALDARLIARLLYEREFHAQHRGFLKGGPRSTDALRLLVRSRVRLIEQRTRLRTQLTNVEDALFPELKDFFKTSITSPAVRKLLEAFPTPESVAAAAPSDVYRVLVVEGRVRIYAARIDELRRLAAESAGLIEAAPIRHAQSWLLRQLNTVDHQIEDVERSIVGTLKAWPEAPRAVLESFPCMSDMRQAVLLAAIGDVNGFRNDGQLRKLLGWYPEARESGTTVSSHRLGYSGNRLARREVWFWAMQLITPQQSATPFSAYYRRLRARGVTGHAAVGHLAGKLISVLFFCLRSGRPYDPAHHARALGLGDA

SEQ ID NO: 131598 - protein, 348 aa, unidentified
MTKRLLKQVVGIDVAQKELVVSLGNMDEEASSNVYAYKTFSNTEKGFMALVLWVKKHNIEGPPLRYVMEATGVYHEALAYFLSENGYVTSIVMPNKISNFFKTLEVKTVTDKSMSEAIALFGLSKKLEDWVQPQKAFRELRQVTRERDQLVVERTMLKNQLHAEEVEAHPSKMTISRIKSRIRLINTQIRATQTETAAIIRNDAEINRGVTLVTSIPGIGIVTAAVIMAETNGFALIRSKKQLTSYAGLDVKEKESGTSVKGKSRISKRGNRYLRKAMYMPALAAIRHSERYKAIFVRIVSRNGIKMKGCVAVQRKLLEMAYTIYKTNTSYQANYLQTRQENELVLNN

SEQ ID NO: 131599 - protein, 339 aa, unidentified
MVQVTTLGVDIAKNGVCLHGVDAQGHVLVQKRLARQKVLPFIARLPPCLIGMEASGGAHYWAREFTQLGHTVKLMSPQFVKPYVQSQKNDPNDAAGICEAVARPRMRGVPVKSVAQQDVQALHRIRERQIKARTALINQIRGLLTEYGIVIPQRASQVRHKLPFILEDAENGLTATAREWLQALAEELQALDQRIATTDTQIEAVCKGDDACQRLAQLAGIGPLTATALVAAVGDATTFKNGRQFAAWLGLVPRQHSTGGKTTLLGITKGGNRYLRMLLIHGARAVLRVVERKTDAWSRWLQGVQVRRGTNGASVAQANKTARVAWAWLAKGDRYRRAA

SEQ ID NO: 131600 - protein, 423 aa, unidentified
MISAVLECCAGIDVGKKWIAVCVLSGPANGDAQAEIRKFETTNACLERLSEWLVECGCTHVVMESTGEYWRPIFNILEEATDVEIILANSQQVKGLRGHKTDPQDAHWLAHLLRHGLIRPSYIPPLPIRQLRDLTRRRKQLVRSEAQERNRVQKILESANIKLGSVLTDVFGLSGQLMIERLLEGNATVEEIADLAQKSARKKIPQIRASLQGHRMNDLHRRLINLSLDHMAFLEDQIGELDKAIVDHIQRHGLEKPYQLLQTIPGVKEEGAASLLAEFGPDMKVFGTCKKLSSWAGVAPGNNESAGKKKRAPALRGNPWVRATLTEAAWSASRKKESEFRLAYERWKPRLQHKRAIVAVAHSLAKTVFEVLSTGQPYTKPGADPMPENTADRLIRHHTRRLKNLRKRLKPKYKHGQVQSTTR

SEQ ID NO: 131601 - protein, 350 aa, unidentified
MQQFIGCDAHKKFSVFVAVDERGKTSKPVRVEHKRDEFRAYLESLPANSEIALESMGSWYWIVDEMERARHIPHLTNPLEAKKRMGKPNKTDNLDGRGLGILLRNGTLPECWIPPRELRDQRELLRTRMALRDLRTKLKLRIHAALDRYGLQAEGISDLFGKTGRTYLAEAAAELPTETRRMVVTQLEAVDEMTEKIEAVERRIQEQIAPSAEVQLLLSLPGVGAILAPVIWLEIGDVNRFPRAEQLASYAGLVPRVIASGERMRLGSVSRSVNQYLKWAFVEAATCAVKLNAYRSEHIGRLYRRLLQKRGHGRAIVAVARHLAEASYWVLRKRQGYRSPQAKLTSSRNG

SEQ ID NO: 131602 - protein, 377 aa, unidentified
MTNCTRYLGLDVHAETITAAIAEGRGRIRNLGKFANRPESVRKLIEKLGCAKNLKVCYEAGPTGYALYWQLTRLGVDCEVIAPSLIPRKAGDKVKTDRRDAEKLAHSYQSGDLTPVWVPTPEHEALRDLVRQRAAAKHDESRAKHRLVTLLLRHASREPNGARAWTHPWWRWVQALKFEHEARQIVLADCIAEVLHMGERLARVDKAIDRMVESAPPHMKAVIEALQALRGVAKLTAVTVVTEVGTFQRFHRPTQMMGYTGLVPSEHSSGARQAQGGITHTGNAHLRSVLVEAAWHARHRPWLNRRLKQLLPTLPAEVAEVAWKAQERLHRKFSKMMYSRKHAGVVAAAVARELVGFIWAIGTMVEAKQKSAVVRAA

SEQ ID NO: 131603 - protein, 334 aa, unidentified
MVRYVGMDVHREFAQLAVVEDGIVRDEGRIAVSPEALRQWAGGLRADDEVALEATGNSDAIATLLTPLVGRVVVSNPSKTRAIAEAKVKTDKVDARILAQLLAADFLPSVWLPDDRTRRLRRQVTRRAHIVRTRTRIKNQVHAVLARNLCPTPPVSDLFGKKGRHWLSCQDLPADEAATVAALLRQLDFHAGELALVDRELAIEALSDPVVARLMTIPGIDAIAGISIVAAVGDFTRFSDPDKLVSYLGLNPRVRQSGNSAPVHGRIAKTGRAHTRGVLVEAAWSAVRAPGPLRAFYRRVQARRGFPKAIVATARKLTILAWHLGQVRAGGVRG

SEQ ID NO: 131604 - protein, 425 aa, unidentified
MHLTAISPTSMPPATIACDVSSDKLNLFCRELSSPGSIAEWEIANRTEAITSTLNAIHEQATARGIAALRVIVEPTGVYHKLLLRIAVSLGFQTALVDASHVKKMRSVIFGDSGKTDERDPRAIEAVAAQGRLIADRRHAEVYQLLRQWGKLYHDAEVAMIDAKSRVHRALTLLFPDFDFTTDFLYGPSGQAIVRWFGLDPHVIAEQSESRMYERLRKHSKIRRSSVTRLLTQARQTIVAVTRSRVTDLLACELAYAWEDVEFAIRRRETARTELQALYDEARTTDPRLPDTAGSAISKVALARFLGEAGPLSGYASWRQLLRMGGVNLRERKSGKYVGKTMIARTGRALFRSIINQMALPLVKRDRLYGTYYHHKTGVQKMPGKKAMTAVSRKIVKMIWGWYRSGAAFDATRVFMCQGEHQRAA

SEQ ID NO: 131605 - protein, 493 aa, unidentified
MGACELESGDVALAAIPIRKMTIGIAQTLLLIIDWRIAMPKRTTGDRPELKPINVGAAAIDIGSRMHMAAVNPASTDVPVRSFGTFTQDLHDLADWFKACGVTSVAMESTGVYWIPVYEILEQRGFDVILVNARYAKNVPGRKTDVSDAAWLRELHSYGLLRGSFRPDAEIATLRAYLRQRERLVEYAAAHIQHMQKALMEMNLQLHHVVSDITGATGMRIIRAIVAGERNPDVLATYRDVRCHSSMETIRAALVGNDRHEHVFALTQSLELYDVYQAKMLDCDRKLEVLIAALNNKGAKPVGKLSEPRIKTKQVNTPTFDVRTALYGVLGVDLTEIHGLGPSLALKLVGECGTDLKAWPSAKHFTCWLCLAPGNKISGGKVLSSRTRRSSSRAAALLRLAATTVGRSDTALGAFYRRLSSRAGKSKAVTATARKIAVLFYNTIRHGMSYRDPGADHYEQQYRNRVLANLQRRAKSLGFVLQAIPGNADPAVS

SEQ ID NO: 131606 - protein, 418 aa, unidentified
MFRRACLNNLPPQRLEICVTTRTTAWAGIDIGKTHHWICAVDGDGRALMSVKVANIEADIVAALATVTDLADQVVWAVDIVGAPSALILALLARAESPVCYASGRVVNTMSAAYTGEGKTDAKDAYVIAETLRLRRDLPMVDTVTDLTRELALLTAHRSDLIADRVRMINRLRDVMTSVFPTLEQQFDYSSHKGALILLTEYASPKRLRRLGETRLTQWLRRRQVRDAARVAARALAAARGQDIELPGQQVAEMIIAELAASLLQLDQRIHGFDQQIAATFRRHHQAMIIESMPGFGPILGAQLLVAAGDLRGYPSAGHLAAAAGLVPVPNDSGRRSGNLHKPRRYSRPLRHVFYLSAQTSMMRAGPNRAYYLKKRVGGHTHAQAVITLARRRIDVLWALLRDDRTFSIDPPRPAAAA

SEQ ID NO: 131607 - protein, 357 aa, unidentified
MLSSNVKYIGLDVHKEAIAIAVLNGAGKLVMESIVETKASTLLDFLHGLRGELHVTLEEGTWAAWLYDVLKPHVQKIVVCNPRRNALLKEGSKSDKVDARKLAELLRTGMLRAVYHGENGLRTLREFARSYLTISKDQGRGMSRLKALYRSWGIPCAGRQVYAPRHREQWLSKMAHAGVRRRAELLYQQLDGLLVLRHTVRGELLAESRKHQAVKILRQVPSIGPLRATLLLALMQTPHRFRSKRQLWTYSGLGVETHDSAQHRYVDGQLQRSKKPQQIRGLNQNHNHEMKEIFKSTALSASRCAGPLQDFYAGLLAKGIKPDMARLTLARKIAAITLTLWKKGEHFDAEHLKSQAA

SEQ ID NO: 131608 - protein, 341 aa, unidentified
MHVTTIGIDLAKNVFQVHGVDANDKVVFNKPLRRSQVLPFFAKLGPCLIGMEACASAHYWGRELKKLKHNVRLMPAQDVKAYVKRNKNDAVDSAACCEAVRRPTVRTVPVKTPEQQAQLMQHRVRDLLIRQRTQAINALRSHLGELGIVAPQGYEGLRVLLAIVADSSDTRLPEHARASLSALVAQIASCQAQIGAIDKLLLAQHRKNADSKRLETIPSIGVLGASAIVATVPDATIFKRGRDFAAWIGIVSREDSTGGKQRLGPISKQGDRYLRRILIVGAFAVLRQARAHPEKYPWVTQLLARKPAKVVAVAIANKTARIAWAVLTKKEIYRVQTTVAA

SEQ ID NO: 131609 - protein, 326 aa, unidentified
MSNIIGIDVSKANLDCAYLRDPDQKKAKRLSCKNEVSSFASLVSWAETKSDLSVKSLTFVIEPTHVYHEPLVQFLHNSGATVYLVNPGRVRKFAEGIGILSKNDLVDADLLAARNLIAYAPAAQEVNDLRSLLNRLDVLERNLRSELNRQEKVGKTMIFHRLEQQSIARAVKWLKAEVITFKRAIRECIKSTPSLQQPFNLLCTIPGVGAKTVWIMIVILASRPFMSAPEVASFLGLNPIEKRSGNSQYRRPRMSKSGSGHYRQKLYFPAMVATRKNPDIKALYERLLAADKTKMCALGAAMRKLVHICYGVMKNQTPYQAQTTPS

SEQ ID NO: 131610 - protein, 410 aa, unidentified
MAASRRVVIGVDTHLDTNHLAVITDAGKPLADAEFPTSPAGYDDAVSWAQSFGTIVIAGVEGTSSYGAGLTRVLQAAGIEVAEVSRPDRAARRRQGKSDPLDAYAAARTALAGNGLAVPKDEHTTTLRALLIARRSAVKARTAATNQIHALLVTAPAELRERHRHDSTTALVKALARCRPTTYRDATTAAVLTAAKALARRVEFLDHQEHDLTAQLDALVRQINPALRAAYGVGPDTAAQLLVTAGTNPHRLRNEASFAALCGAAPVPASSGKITRHRLSRGGDRAANSALHRIALVRMSGHPQTRDYVEHQGGKNRTKKEILRLLKRAIAREVFRLLTRPGPIDDYNDLRPARQAKKLTLAAVAHHFGVPIITISRLERGHQRNDTLVNLGVVDPSGRVGVGDRERARR

SEQ ID NO: 131611 - protein, 366 aa, unidentified
MKKISTVAKRGNEISKEPKLTIGLDLGDRSSHYCILDEAGSVLLEHSLPTTPKGIRQVFSRIPRSRIALETGTHSPWVSRLFTQSGHEVIVAHARDVRLIGESRRKDDRIDARTLARLARIDPQLLSPVQHRSAEAQIHLTVIRARAGLVSARTALVNAARGLVNSCGQRLRKCGTQQVSREMAAGLSAELRGALEPLLREVESLNERSKEYDRRIEEMAKQTFPEVALLQQVKEEGELIALTYVLTIEDPHRFRKSRDVGCFLGLRPGRRNSGQSEPQMHISKEGDRYLRTLMVQGAYYILGPFGEDSDLRRWGRKLAERGGKNAKKRAVIAVARKLAVLLHRLWVSGEVYEPLRNSQKAVRAAA

SEQ ID NO: 131612 - protein, 349 aa, unidentified
MKHRLPFSQKGGVMKSNKMEVPAIQWVGIDLAKLTFQVALWGHLDFPEMQTRSFDRTRKAMKPFLAWLKEQAPAGARLGLVMEATGTFAEEVASWVLDLDPTLWVAIVNPGQTSAFIQSLGFRNKTDDLDAKGLAKYGHERRPAPWERPTPEMAVLKDLVRIRMNLINTRTAMHLRLRDHQRASKTASSAMRKVILSLKAQIQVLDLAIKDHVAANKEIAHQVRLYTSICGIAQVTATTVMVELGDLRRFPRSRQMTAFAGLSPKKKQSGTSVHGKTRMCKQGSSRVRAALFMAAGSAVRFNPDMRATYLNLLAHGKEKRAALGAVMRKLLVLMRAVLMADRNWQGKAA

SEQ ID NO: 131613 - protein, 401 aa, unidentified
MNAVGIDVSKGKSMVCVMRPFGEVVLEPFEVLHTAQSLNDLAGKLKALDGETRVVMEATGNYHKPVAFVLHDAGLFVSVVNPVLIHDYDNNSLRRVKTDRKDAVKIANYTLDKWTRLRQYLPEDDTRLALKNCYRQYQQAVAVRTMLKNNLISSLDLTFPDANKLFSSPAKSNGCEKWVDFIGDFWHSECVSSLSSDAFAKKYLKWCQKHGYNFTRSKSDTIYACAVNAASLPKSPTSKLLIQQQVAQLKAVSQSVAAFQQEMLRLSQQLPEFDTVMKMYGVGPSLGPQLMAEIGDVRRFSSKKSLIAFAGIEPQPNDSGMIVGNDSGISKVGSAVLRRTLFLIMTVILKTQPQDEPVFQFMNKKRSEGKPYKVYMMASANKFLRIYYARVKAVMDSKHSK

SEQ ID NO: 131614 - protein, 342 aa, unidentified
MTLYIGVDIHARQQTLSYLDTEDGTTGQVVLDHEVDDVPGFYRKFQGEVLIGIEACGYTNWFEELVERLGHKLLVGDAAEIRRLARRRQKNDRRDADLLLELLVHDEFPALYRYCKESREVLRQLRYRHKLVKLRTMVANTLHALALNAGLRLRAKLLTKGGRKQLSALTLSAISQQQRNELLSLADELTRRIQMVEQWLEVQAASDGRVQRLQTHPGIGLLTSLCVVHTLGDVQRFSSTRKVAAYVGFDPMEDSSADRKAYGGISKAGSRLLRYLLIEAGQTAAKDDEQLKQFYRRLLPRRGKARAKVAVGRKSLIRCFIMWRAEIDYAEFLRRGQKEETE

SEQ ID NO: 131615 - protein, 343 aa, unidentified
MRYFAGLDVSLEETAICIVDEAGEIVREARVASEPDALVRFFDALGMAMERVGLEACSLSAWLHEGLSEAGIPAVCVDTRQAKAAMGAMPNKTDRNDARGLAQIMRTGWYRAVHVKSPSCRSWRALLMARRMVLNKRRDIENGVRALLREAGLKVGTPSRKDFPARVRELAAGDAILTGLTESLLAVISSMTDEVAKLTKRVLDEVRVEPTCRHLMTVPGVGPLTALAFRATVDRPDRFRRSRDVGAHFGLTPRRYQSGETDLQGRISRCGDELARTALYEAAHSLLIRSTKWSALRAWGMQVAKRRGMARARVAVARKLAVILHRMWVDRSEFRWGKQAAAA

SEQ ID NO: 131616 - protein, 378 aa, unidentified
MNYVGIDIHKKQCVLSAQNEAGERVREAKIATDDRAGFEEFFRGLGGPSRAVIEACWGWGKVHDRLEAIEQIEEVVLAHPYKTRIIAEAQIKTDKVDARALAFLLRLNAVPRAHVPAAATRRRKEVLRQRLFWVRERTKIRNRVHALLDRQHEELALPVCSDLFGTKGMRALEGLAATLSTPDDTLLRQDLEMMRELKAKVGELEKMIGEANAADEPTTLLSSIPGVGLVIGALVACEIDGIERFPHPRKLVAYAGLAPTTYSSGEKSYHGKLLPQCNAWLRWGFVEAAWVAIGCDAYFGTLYRRAREQGRHGANTAIIIVARRMVEIAWQILSKKRVYESRALKPASLQGIKTQATPTSTKTKTFPARSRISLADSK

SEQ ID NO: 131617 - protein, 428 aa, unidentified
MERENCNRLAEFRQLRKDIRGSDKHLIVGIDVAKERHNAFFGTATGETLYRRLIFDNDKDGFERLLLQAEAMKVQHGLKKVVFGLEPTANYHKPLGEYLIKNGYAVVLVATDAVKKNRSLLDGRWDKNDKKDPANVADLISQGKCLFYEHPRHEVRDLRNLLSFQRKLKKLEHSTRMRIRNHLVAQYFPEMDTCCNWGVNEGLAIVKSCLDPAAISALQYDEFLRKIQTRGVTLAQQRRLSTVWQRAFKSMGCECGLSVEYEARMMVKILEQLRMSIADTQQQIKTICEKFFEYEYLLSIPGFGTDISAKALGAIGYPFRFDNASQVLKLVGLDLSASRSGKNSNNITPSISKKGKSELRYALYQAALIASSKDKHFIAYFTNKLRGREKEKGIKTKMRVKLSAKMMIIAWTLMKKKEFFDPKYLNME

SEQ ID NO: 131618 - protein, 376 aa, unidentified
MSDSIIYVGMDVHKDFVMMAVLPADAARPTRVERVPNEPTHLRRFFRRWVPQGRVRACYEASGAGYVLQRTLEGWGVECAVIAPALMPTRPGHQRKHDKRDAIELARLHRAGELVPIRIPTASEERVRDLVRCREVLQRELIRARHYLVKFLARRGLVYREGTPWAGPHERWLQALARSGALSAEDATVFGEYRALIAYVAQRRAELDRQIAALALTPAYAASVARLRCFRGLETHAAMVLASEIGDWRRFTSPRPLMAYLGLVPREASSGTHERRGSITKAGNSHCRHVLLQAAWSYRHVPARSERLQQRQQGQPAEVVAHAWKAQQRLHRLYGRLAYRKRPAVAVVAVARELVGFLWAVMQDVAPAAEALAHVA

SEQ ID NO: 131619 - protein, 411 aa, unidentified
MVHPRCAGIDISKRDAKVCVRVQGVGKRRTASTVTTWGAVTNQILALREHLLEQKITCVVMEATSDYWRPFYYLLEEHFEVMLVNARDVKNVPGRKSDVSDAAWLADLGAHGLVRASFVPPEPIRVLRDLTRARTVITQERTREIHRLEKLLEDAGIKLSSVATDITGVSGRLMLAALIDGRDDPAVIADLAKRRLRSKIPALTEALNGHFTAHHAFMARLFLDRIDAHTADIDRLSTRIDEAMEPFRAARELLCSIPGFSTTVAEVFVAETGAQMSEFPTAGHLASWAGTAPGKNESAGRVKSTKTRPGNRYLKGALGIAALAASRSKGTYFSAKYKRIAARRGPIKALVAVEHAMLVAAWNMLRNGEFYRDPGADYFTRHVPAKTKARAIGQLESLGYQVTLQPLADTA

SEQ ID NO: 131620 - protein, 398 aa, unidentified
MKTSGLDVHKDTIFCAIYDGKNYSAVKEFSTTTVSIRSLGAYLQSEKVKKVAMESTSTYWVPVWDILYEMEFELKLVNPLHIKQLPGRKSDAKDAQWIAELLHKNMLRGSLVPSPLIQELRSYTREYRTLVNQRTKVLTQMDRILVMCGIRLSSCISNIDSKSFMLIVEALICGETNPDSLVKLVYGNRENKESGKLKECLTGNMKAHHRLKLTTCKQQLDLFESQIQLYLNEMQKLCEEHFSEEISNLTTLPGVSQISAMIIVAETGGDMSVFENSGKFTGWTGLRPRNDESAGKFKSTATTKGNKHLRAIIVQVAWAASRTKGSFFMDKFTKLAIRKSRKKALVAIGRKMLVIIWHILNEKTQYNPNLVHIYDPVKVEHKIKYHEREIERAKKLIA

SEQ ID NO: 131621 - protein, 367 aa, unidentified
MKKVSTAAAKQSRNISQQKLTIGLDLGDRNSWYCVLDEAGRIQLEQRVRTTAKALQEVFGAMPRSRIALEIGTHSPWISRLLSELGHEVIVANARKVRLIGESRKKDDRLDAQTLARLVRIDPQLLYPVKHRSVQAQADLMTIRARAGLVRARTALVNTARGLAKSYGERLRGCNVRDMDPEKAEGLSPELQRALEPLLATIEELSERIVEYNDRIEALAETNYPQVKLLKQIKGVGTLIALTFLLTLEDPHRFRKSRDVGGYLGLQPGRRKSGESEPQLHISKEGDPYLRTLLVQGAQHILGPFGIDCDLRRWGLKLAERGGRNGKKRAIVATARKLAVLLHHLWVSGEVYEPLHNSSRITVAAAA

SEQ ID NO: 131622 - protein, 353 aa, unidentified
MEQFIGCDAHKKFSVFVAVNEKGQAGEATRVPHDRQLYREFLARLPARSAIAVEASGSYSWLVDEMERLGHRPKLCNPHEAKRRMGLTNKTDKLDARGLAILLRNGTLPEVWIPPSELRDQRELLRLRIFLVRLRTRVKNRIHGALARHNVQVPGADLFGVAARLELGARLPELPVHSREAVEQELATLDFLEIQIESTEQRLEAIREVSVEADLLKTLPCVGTILSMVLMLEIGRVDRFPTAAQLASYAGLVPRVHSSGGRTRMGQVCGNVNRNLKWAFVETGNLIALNQRRLAGTHAVRLYQRVKRAKNHQKAVVAVARHLAEAAWWVLTKQEGYREPQNARPKVLSSTHG

SEQ ID NO: 131623 - protein, 443 aa, unidentified
MSKNRSTHLRGERGQAFADLIRGVPSEQLLCVSLDISKYFHVAMIHNGLGEIVTPTFEVDIYQSGFDQLCRAIEHAKTRTQAQVVLVGMEPTSHYFENLARHLLMCQQSVKLINSFAVKQNREQQLMRREKTDQIDVAAIGDLLRRGEGTPYKPPTGIYLQLQQLDRVRLGKVKIERMLKNQIIGHLDRIFPGLVLLDAAAKQRYPPLFTTDFWQCQTLQDLIRVCLNPHDLVRMSPQQLVQAFHAQQRRLGPATAAKIIAQAHKTLLPDPEWAAIRCELLQHDLALLETVQNHLTTLEQRLVALVAQTPYQVWTKLKGLSAVQVASLAAAIGDPANYTDAAQIFRRSGLVSGRNDSGNRQRKGQGNHVIKAGDVYLRRALMSAMATLILHQPVLRRYDQKLQTTKPAPVARVATARKTNGILWAVLRDQSSNTLICCKGAEM

SEQ ID NO: 131624 - protein, 338 aa, unidentified
MNYVGIDHHRQYSHMTLMDQEGQVLRSGRVPNLRSEIERFLEGGEAMEAVIETGRSSYTMVDVLEEMGVAVKIAHPNEVKAIARAKIKTDKRDSEVLAHLLRMNMVPEVYRRSTENRQAQRVLRQRSFYVSAMTALKNRVLAFLAQQREEIREEVARETNIFSDKGQKALLGLDLAPGEKRLLEALLKTYRHLETRIHESTELVEKLYEKSREAQLVRTIPGFGKFLSVLVTVEIADLARFADAAHLHAYAGVIPSTHSSGDRTHHGKIIRAGNRRLRWAAVEAVWPAIRADFDLRCFYERLARGKGANKAKVATARRLLTIIYKVLKEGRNYIAYPR

SEQ ID NO: 131625 - protein, 366 aa, unidentified
MISVAPAAERIYVGMDVSRDKIAVAVLGPGEDVPAVEVISHDGEMVRRLIGKFADRSVLAACYEAGPGGYELYRLLAAAGVACDVVAPALIPKAAADRVKTDRRDCVRLALSHRAGLLTAIRVPSEQEEAVRDLVRTRADLVDDRKRMMQRIGALLQRHGRVWRAPRWTYQHRARLDQQSFTEPALQAALRTYLAALDARDAELAVLESQLRGCWASVDPLASMVRQLGCYRGIAELTALTLAAEVADFRRFASAPAFMGFTGLTPSEYSSGARTRRGAITKAGPQLVRGALIEAAWSYRHRPAIGATLRRRQAGCAAETLARSWKAQQRLHATYAKLTRRGKIPSVAVTATARELAGFVWAEMTS

SEQ ID NO: 131626 - protein, 354 aa, unidentified
MDKITTVGLDLAKQVMTVHAVGPDGRRVLRKTLRRDQLLAWSAALAPCVVAMEACGGAHHWARELTRQGHTVRIIAAEYVQPFRLGGKNDGNDAEAICTAAQQANMRLVAIKSVEQQAALCVHRLRQGLVEERTALLNRLRGLLTEFGVVAPLSPEKLRRELARCQDPDDPRLPPTVRQLVSEQVGALDQVEERITTYAEHIAAQARGSTVAQRLQTIVGVGPTTAAALVATVSAPQEFSNGRQFSAWLGLTPKQHSTGGKTRLGRITKRGDAYLRTLLILGAKSALQAALRKPPALRYQLQRWIVATLDRIGYHKTLVAIANKHARIIWALLVKGEDFDVQRMTPKAVVVAVA

SEQ ID NO: 131627 - protein, 433 aa, unidentified
MAMLFVGIDVSKDSSSSRGLNDNGDDRFATVFDMNSEGFAKLYKAITEHSTDLSEVMVAMESTACYHINLFSFLTAKGINAVIINPLLIANFSKLSLRKTKTDKKDALTIAQFLMAHKDSITQLAVPPALQDLRDIARERESVIQMISTQTVEMKRLLQTTFPELEKICNITTKVMLDFIEEFPSARLVGAAKAKIIEKALNRKGVSTRLTFTAKDIITAAKSSVATVSPGKELILKGKVSTFQHLGKRRDELTKALTEYCKQTMIEDLKIVTSITGINIGTATTFLAEMGSIDNYASHKKLIAFAGIDPSVYQSGKYEGTGRISKRGNRHLRRIIWLMTKNVIQHNSLFRNFFLKKRQEGQAYKKAMFATSHKLIRVVFALLSKKIYFDQTGDSDESGHLFRCKLATCSGQSATHSDLFRPPVPAQTDHPWL

SEQ ID NO: 131628 - protein, 385 aa, unidentified
MRAIGIDVHRDFCEMAVSEGGRLRSAGRVPSTPAELELLGASLAADDVVALEATGNALAIARILEPHVAQVIVASARELHAISDAKAKTDRLDARTLAKLLAAGMLAGTWLPGEEMRALRRRLAHRAQLVRARTRLKNEVHAALYRNLVGAPSATDLFGALGRRWLEDLVLPADERETLESCLRTIAFLDGEVARFEVAIARYARCSPEIRRLVTIPGVGLISAATVVAVVEDVRRFRSARKLVGYLGLDPRVRQSGSSPARMGHISKEGPAAARQALCEAAHAAMRTPGPLRAFGHRVAARRGRQVAVVAVARKLATIAWRLLTSGEDYAYANPAQVRLKLRRIELLAGAPSQKGHRTGVSLEVQQERELALAAERAYQRILLP

SEQ ID NO: 131629 - protein, 412 aa, unidentified
MKRIYQRCCGIDVHKATLTACVRVHGAGRKLSQEIRSFGTTGDELLSLHDWLMTHRVSHVAMEATGVYWKPVFYVLEQGFTLLLVNPADVQRMPGRKTDVSDAAWLAQLLENGLLRPSFIPPRAIRELRDLVRYRSELKHDHTRVANRLHKVLQDADLKLSSVMSDILGVSGRQILRQLAAGHSEPAALAELARGSLRAKRPALRQALTGRFSEHHAFLIGQALTELDNLEESMRALAARVEQHLVPFAQQIEQLTTIPGIKRVAAAVILSEIGTDMSCFPDTAHLASWAGMAPGNHESAGKRRRAKARHGNRWLRTILVECGHAAGRTRNTALAAIYRRMIIRAGRKHAAFVTGRHILNIAYHLLTQHDTYRELGPSYFEQRRAEQLKRRCLDQLRNLGFQATLTPLQKAA

SEQ ID NO: 131630 - protein, 388 aa, unidentified
MQVVADRAAAPTAIQTDLRAIFVSLELSRSTWLITSLSPGGGEKMSKHSVQAGDIAGLLRRFAQLKEKARARTGRDFPIITIQEAGLDGFWIHRVLQSEGIESHVVDPASIATSRRRRRAKTDKIDGETLVRTLLAYKRGEPRVCAMVKVPTPEEEDSRRLCRERKVLTAERVLHVNRIKGMLFCQGISGYEPLRRDRHERLEELQTGDGRLLPQHLKAQVNREIDRLELLLKQVKAVEAERDALLVAGHTPAAVPASMLLNIKGIGPEFAAVLWSEGLFRHFDNRRQVAAYAGLAPTPWQSGAVDREQGVSKAGNPRLRTTLIQLAWLWLRNQPHSALTLWFHERVSRNGGRLRKTTIVALARKLLVALWKYVTAGVVIEGAAMTAA

SEQ ID NO: 131631 - protein, 312 aa, unidentified
MEKLSYGGIDVSKDRLDVVVLPEGWFFSVSNDTAGWTELVARLRPLAVCAIGLEPSGGYERGIIRALLAARLSVRRINPNKLRQFARARGVLAKNDRLDARLMAEYVAIMPTRAVQRDDAVDRLAEVVTMRRQLCDEHVTVENQTAHLEDAMLRRLSKRRLVRLEADIRLLDKRLAEMVATNAAFARLYELLTSMPGVGPVLAFTLIALLPELGKMGRKQIAALVGLAPYDFDSGKLRGHRSIYGGRMPIRNVLYMAALSASRYNPALKTFSNRLAHANKKSKVIIVAVMRKMITTLNAMLRDNAAWQPQSN

SEQ ID NO: 131632 - protein, 370 aa, unidentified
MRIIGCDLHARQQTLAMLDTETGEVVNLTLMHEGNNVREFYSKLPRPVLVGIEATGSMHWFLNLMEELGIECRVGHPAQIRAAEPRKQKHDRRDADLILKLLAQNRFPAIWLPSKELLDLRALLLHRHQWVRMRVRMQNALQAIALANGLRRGPALWSYDGQAKIAFLPLLPHAAYRRSALQSMYKNMQSEIENLTRRVAEQAGNRCGARLLMTHPGVGPVTALATEVFLGDPQRFTDSKTLASYVGIIPREYSSGEHQRLGGVTKQGSPLLRFLWGEAGAHAARRDPELKRFYRRKLVQKGLGKARVAVARKLGIRLWIMLRDEIDYQEFCRRGQIQQKTVRPVVGMPETGNGAKSHRPSDEATRLPES

SEQ ID NO: 131633 - protein, 310 aa, unidentified
MPDKPIVGIDVSKNWLDIAVCEGPLLRIDNAPEAIGAWLDRNAPGLAAFEPTGGYERALATALRERNILFVRIHPNDIIAFRKSRGIKAKTDRIDARLIAAFAANELIRRGVRQTIAGNEILKELAARRRQMVASRHAERCRLAMAESPAVRQSIELIVTALSQSIRSIEVEIVSQLDADANVKDLARLLQSLRGIGPVVAMTLIADLPELGYLSGKAIAALVGLAPQTRQSGKIDGRGRIGYGRPSVRSVLFNAARAAISSPSPHRAFYDHLITDNRRPGKVALVAVMRKLLVTANAIARDRQPWRHAA

SEQ ID NO: 131634 - protein, 366 aa, unidentified
MKKISTVAMEEIQIFKENQLTIGLDLGDRTSHYCVLNEAGEVIWEDKLPTTPKGIEEVFRRTPRSRIALETGTHSPWVSRQLSELGHEVIVAHARNVQLISESSRKDDRLDARTLARLARIDPGLLSPVRHRSAKAQIHLTVIRARATLVSARTALVNAARGLTKSYGARLPKCGSEQMSREIAQGLSEELREALDPLLAEIESLNERIAEYDRRIAKVAKEVYPQVALLQQVKGVGPLIALTYILTLDDPHRFRRSRDAGCFLGLRPGRRNSGMSEPQMHISKEGDGYLRTLLVQGAHYILGPFGQDSDLRRWGLKLAKRGGKNAKKRAVVAVARKLAVLLHKLWVSGEVYEPLRNNHTVVAAVA

SEQ ID NO: 131635 - protein, 357 aa, unidentified
MMNILAIDLGKFNSMCCFYNTDTNEYRFQVAATTRHYLSSVFKNHKIDLIVMEACGPSGWISDLCQQFGLKTLVCSTNDAAWMWKNVKRKTDKDDSLKLARMAMMGQLTPVHVPKHQVREHRALIKYRKTIVGRLNRTKNLIRARFADHGIEIDRGQKAWRTGRELIDSHRKPLAECSLEELWRGQLDLELTQLDSLAQQQADVERRLDLIAKDDERIQRVQTIPGVGRRTAEAIVTTLDDVDRFDNARQVSSYIGLVPRQYQSGETDRNGRITKRGSRLLRTLLLECAWISMRYNEWSRTTYDRIHGGQQTRKKKAAIALARKIAVVAWSMLKHKTDWDPQRAGIVAEESSEPRPL

SEQ ID NO: 131636 - protein, 375 aa, unidentified
MSASPISRPVVHLALELSVTSWVVAYRLPWSDKVRLQKVSAGDNAALLALVSGLREKVAARVGPDVTLASCFEAGRDGFWLHRLLTDNGVVNHVVEPTSILVTRGARRAKTDRLDAQGLLRVLAAAFAGDREICRMVRPPSVAEEDDKRPHREREYLVQERVRIENRIAALLATQGVRKRPSLRTWAADLDALRTGDGRPLPPCLKAELDRLRRRLVLTLEMIREVEVAREQAMEAHDNPANQTAKVLCKLRGLGGNFSAVLAKEVFYRTFDNRRQIAAYLGLAPTPFQSGGMDRDRRINRAGNSRARKTMVQLAWLWLRYQPESGLARWFRERVGELQGRTRRIAIIAMARKLLIAIWRFVTAGVVPEGAILAA

SEQ ID NO: 131637 - protein, 436 aa, unidentified
MKRKDVPMKQYYYNINDNLKQLTENTLIIGVDISKAFHVARAIDYRGMELSSTITFNSNRKGFSQFHEFITDISNIQGKSDIIVGFEPTGPYGDTFVQFMLSKGIKVVLILGAQVKAAKELDDNTPSKNDYKDALLIAGLIKDGRFRIYRRFDSEILELREAMANSYQLTKKITCVKCQIDNWLCKYFPEFSLVFKDWTLKTAYATLRTFPMPSMIQAETVTSIVRSWRASGVIRGVGVKKAQMLKLYALRSTGLKYAGKSALIHIRSLIAQYELYLLQKEEAWLLIDEIVEDIPFYNTLIKIPAIGKTAACGIIAEIGDITDFSHPRQLIRLAGLSLRESKSGGKRGTSEITKRGRPLLRRYLYIAVLNMIKSKDGAFWQLHMYHTTFKKSPLKPMQSVVALMCKLLRVIYGMSISGKPYDPNLVTSGIADSEVF

SEQ ID NO: 131638 - protein, 343 aa, unidentified
MKIIRVGVDLAKSVFQVHGVDRSEKVVWRKKLSRAEWLPALLEKIEPGCEIGMEACGGAHHWARQLQKRGFMVKLIAPQFVKPYVKSNKNDANDAAAICEAMSRPSMRFVAVKSVEQQDLQAIHRIRAELVSQRSAKGNQIRGLCSEYGLVAPREMIQLRAAIPLWLEDLENGLTQRFRRLLRGLWLDLLNLELRVKELDQEIEIAASTDPVATRLQQLRGVGPIIATAIVANVGDAKQFSSGRQMAASLGLTPRQNSSGGKERLLGITKRGDAQLRTLLIHGARSVLRTAASKNDRMSRWVTHIAETRHHNIAAVALANKTARIAWAMMTKGTDYQPELEAV

SEQ ID NO: 131639 - protein, 329 aa, unidentified
MRTVCGLDVHKDSVYLCILSSTGEIYEKKFGVLTTELIEMRDLMLSHHVLEVGMESTSVYWVPIWRVLEPHFKLKLINPYFIKQLPGHKSDVKDAQWIAEYMLKELVNGSFVPPERIQQLRQYDRRIYDLDDEIIRKLAKLDAAVQRCNIRLSNYVSNTDSVSYKAVIDKICEGVTDPNVLVEEIHGRIINHHGKETIIASLTGSITECDIDIMRQLKAEIDLAEQHKQECMDKMLAICENEYSTQLHNLQTIPGVKMRAATSLIAEIGTDMSHFETANHLASWSGLKPRNDQSNKTIKSRRITYGNRYLRRTIIQCSWGASRTKNCFF

SEQ ID NO: 131640 - protein, 324 aa, unidentified
MDLDSGEVFRGRIAPADRAQLRQWLDRFLGRTDVAFALEGCTGWRYVVEELHRAGITAHVAEPAETAARRGPKRRAKTDRSDAQLLRDLLLEGRIPESWIPPQPVLEARALVRLYKDLLDERTGWLQRVHASMFQMGVPDLDVSTMSAAGRDRITAAELSVATRTAVDVAMRQVDRLTAEMTMVREQIHAIGRRQPACRALQAAHYGIGPLTSVVIWAEMGDTRRFRSCDDAVRHAGLDVTVYSSDGRRSAGHLARQGPPMLRWALYEAAVYAGRPSSPDHAYFQQVKARLDGQLALLSMARKLARRCHHTLRNLDDQVLAPAA

SEQ ID NO: 131641 - protein, 432 aa, unidentified
MPSTTAKTNPTQPDFAALIGLDWGDKAHAIALACADGQREQQTLQHSAENLHRWLEQLQQRFGGRPVALAFEYHTGPLLHVLVQYPWLTIYPVAPVTSARYRQAWKPSGASDDGPDALHILDLLEHHRDKLSPLVQNELLTRKLEGLVQARRGAVDARSALTNQLGSVLKTYYPQALELVGKDLASQLALDFLAKWPDLISLKASRTATIKGFFHRHNLRRPERLEEHLQAIDQAVALTTDEAIVTVAMAQVALLIEQLGVLQKHIATFDDAIKTAFAQHPDAALFRELPGAGPALGPRLTVAFGDDRGRYPSSANFSQYAGVAPVREKSGQREWIHWRWNAPVFLRQTLVEWAAQTAVWCPWAGEFYRMMQKRGKSRQTILRALAFKWARILWRCWQDRTPYDEAKYMAALRKRNSPYAVSLPKAGAAQTG

SEQ ID NO: 131642 - protein, 351 aa, unidentified
MRFYDQRHQYTCGIDLHARTMYLCVLDRDGRIVFHRDLPTRPQSLIEAIEPYRQDLVVAAECMFAWYWLADLCQDQGIAFVLGHALYMKAIHGGKKKNDKLDAEKIARLTYGGNLPVAYAYPARMRATRDLMRRRCYFMRRRAELLAHIQMTAQQYNLDPFAKRLCHRRNRSGVSDHFGMLDKSVQDMVEADLQTIDHLDEQIRHLELSITRRAKGHDAHTYHLLRTVPGIGKVLALVLLYEIHDITRFNRVQDFVSYCRLVRGRKESAGKASGGPSGRKIGNAHLKWAFSEAVLLLMRESDAAKRFVERKSRRHGKGKAISILAAKLGRAVYLMLRDRKPFEIDRFFAQG

SEQ ID NO: 131643 - protein, 370 aa, unidentified
MLDTTTFIGLDVHARSIKAVSLDVMTGEVRAATFGYDAGAVAGWVRSVDPRARCVYESGVTGFDLQKRLSGLGVDCVVGAVSKMIKPSADRRRKNDRNDAEFLARMLSVGNVVEVWVPDDECEAARDLTRALEDARDDLSRSKQRLSKFLLRHGLVFDERTPTGRRKGNWTRAHWSWIESIRFAERADEEVLAYYVDAVRRAAEEKARLEGLVEAEARKPRWRKRVDSLRCLKGVDTATAADLVFEAGEFSRFRNARSFAAWVGLTPSEHSSGESDRRGAITKAGNKHLRKALVEAAWHYLTCSGRPKDLARGQAPDRVARRHAAKGVRRLVERREALLARGVHGNKANVATARELACWVWAVGLMAEEA

SEQ ID NO: 131644 - protein, 343 aa, unidentified
MALFVGLDVSVKETAVCKVVCEQKVPTEPDDIVRLLASIGEDYGRVGIEAGPLSQWLVNGLTAAGLPVVCVETRHMMALLKAQQINKSDRNDARGIAQMMRVGLFKPVHVKTQLAQEQRMLLTSRKLLQRKLLDVESDLRGTLRNFGLKVGVVSTGKFEARIRELVVGSPRLALVVEPILAVRRVMRQQFAVLHKMLLDTVRHDPVCRRLMTAPGVGVVVALTYRATVDQPQRFVHSRAVGAHVGLTPRRHQSGEIDYDGGVSKSGDTMLRTMLYEAAQSLLTRPGKWSWLKAWGMRVAQRRGMRRAIVAVARRLAVILHRMWVDGTEFRWSNSPAAVVPQAA

SEQ ID NO: 131645 - protein, 344 aa, unidentified
MDITTIGLDLAKSIFQVHGVDANGRVVIRKSLRRAQMLPFFARLPSCLVGMEACGTSHYWARELIKLGHEVRLMPPAYVKPYVKRSKTDAADAEAVCEAVTRPTMRFVPVKSPEQQAALSMHRARDLLVKQRTQLVNMIRGLLAEFGINIPKGLERALLMARRIVDDEAPDVPIEAARIVGTLSQQALDIHVRLRQIDRDLLVWQRGNDVARRLMTIPGIGPVGATALAASVTDPHQFRSGRQFAAWLGLTPLQKSSGGKERLGRITKMGDKYLRKLLIVGMTSLVRRAKDNPPTIDPRLANLLVRKPVRVATVAMANKTARIIWAIMTRGETYRASHQPALAA

SEQ ID NO: 131646 - protein, 464 aa, unidentified
MTKRSKTSTKKPTAATATSLPTVQAMVAGIDVGSSQHWVCGPARDADGKPAIRCFGTTTVDLEALADWLAAQGTTSAAMESTYVYWIPLYELLESRGIEPVLVNARQLHNVPGRKTDVSDCQWLQLLHGHGLLRGSFRPSEAISRLRALQRQMGNLVAERSRCVQWMQKSLDQMNVQVHRAVTDLTGKTGMAIVRAIVAGERDPARLAAHRDGRCRKSPDDIVKHLTGHWREDHLFNLASTLQIYDVLEGQIAAYDARLVRELQALQPPERRDQEVPRHPSKGKEIAIKARGEQSCRLALWRFSGVDLTRIDGISAGAAQIVLTEIGASIVSFPSEDHFASWLRLCPRTPISGGKPLKKRRNGLGANRIAGVLRMAATSLQRSKTALGAAFRRIARHKGGAVAVFAIARKLSQLIYRMLRYGQDYVDIGEKAYEAQFEARRLASLKEAARGLGFTLVQETLAEG

SEQ ID NO: 131647 - protein, 341 aa, unidentified
MKVSTLGIDLAKNVFQLHGVDHEGHIILRKKLTRAKFVQFVIQLEPCLIGMEACSSSHYFARLFTRYGHEVKLIPPQYVKPYVKTNKTDAADAEAICEAVTRPNMRFVQIKTEEQQAVLALHTERGILIRERIACANSLRATLAEFGITIAAGQSHLTRELPAILEDSENGLSPFVRTSIYRQSKHIRELEEQVKQVEEALASWYRTQEACQRMAKIPGVGMLTATYVVAAVGNARQFSTAKQFASWLGLTPKEHSSGGKQQLGGISKRGDGYFRYLLVHGARALTAWVNRNGAVEENSWLQGLLERKHYNVAVVAMAAKTARIMWSMLSHNTEYQPRQLA

SEQ ID NO: 131648 - protein, 441 aa, unidentified
MSHATVVTPEPAWAAFIGLDWGSQKHAWILEPAGGGKCERGVVESTPEAIADWAADLGRRFGSLPVAVALEQKRGSVVNLLLSYPHLVLFPVPASMSAAYRKTFVPSGAKDDPSDAALILDLLLRHRDRLRRLQPDNVDTRLLLMLVEDRRQLVDDKTRLTLRLQDCLKQYFPQMVKWFEVNTALVADLLQRWPDLQHLQRCHDGTLRSFFRQHCYGEELTAKRIDAIRAAVPATNDPAVLEAGSTKARHLSESIATLRTQITRLERRRNELVAQHPDAPIFASFPGAGPATVPRLIAAFGTLRDRYRSAFEVQCDSGIAPVHIRSGKIDLVSMRRACQEFTRQTFHEFAGQSILRCQWAKDYYQAHCKKPGQHHAAVRSLAFKWIRILFRCWKNGKPYDEELYLTSRRRRSALVGPALASVTELKWNTVVGFSKLSENHA

SEQ ID NO: 131649 - protein, 418 aa, unidentified
MSAEKVAPTRFVGLDVHKFYLIAVAVDAQLHEVFGPVRIPLANLLPWAQKNLSPQDAVVLEMTTNAFQLYDDLLPYAGAVSLVHPPHVALITRARVMTDKIAARILARLHAAGILPPVWVPPQEVRDRRALLAQRTKMVRLQTQAKNRLHSTLHRYHLAAPQGEPFASAQRAWWLALPVTPLERVRIQSDLETLAFAQGQVAFLEKTLAELAAHDDRVPLLIQLPGISLVSAMTILAALGDVTRFPTAPKLVGYAGLGVCVHDSGLTRRTGRITKAGRRDLRFVLVEAAQVAANTHPHWQAELARLEPRLGRNKAIVAIARKLLVAVWHVLTKGCADRYAEPERLARKFLQFAYVLGKDNRPGRQMAAEFVRDQLDRLDLGHDLVAVPRGKRPVPLPPSKKLFLKLPAKMAIPELVEV

SEQ ID NO: 131650 - protein, 389 aa, unidentified
MPSTMPTPATALDHESTIITAVELSASSWLVGAQVPSVLRQCRQKLAPSAEALLEHLGRLRQRAERAGKRVSRVVVAYEAGRDGFWLARWLIAHGIEVYVIQPSSVPVDRRARRVKTDAVDVEMLLRTTLAWLRGEPRVCSMVPIPSEAEEDGRRPLRERQELIKERLAITNKIDGLMATLGIGGYRPLRRDRREQVATLRQPSGDPLPVHAQARLTRLLDRLELVLEQIKGLEKARDAVVAQDDVVSGGEADSMIRKLAGLKGIGPELATLLAWEAFVRPFRHRRALAGYAGLTGTPFASGGRQREQGIGKAGNRRLRAALVELAWLWLRYQPDSTLAAWFRERTRAAGSRTRKVMIVALARKLFVALWRFCRDGVIPQGAAFKTATA

SEQ ID NO: 131651 - protein, 391 aa, unidentified
MVCVGIDVAKDKHDCCILDSDGMVRADCFTIPNNMDGFKQLLQTIRNCTKKSDKIKVGLEATGHYSYNILGFLLDNGLPTYVINPLHTNLYRKSLSLRKTKTDRVDARTIATMLLSDVDLKSYTDIAYHNEELKSLTRYRFEKVRERAKLKQSVSRLVTILFPELEKLVPSLHGASVYALLSEYPGAKQISEVHLTKLTNLLVTASKGHYGKEKATLIRETARASIGSVMPAKSLELKHTIKLIQELTSEINEIEDSIQKIIDELNPPILSIPGMGVNSAAVILAEIGDFSNFSSPDKILAYAGCSPSTYQSGKLTNCYAHMEKRGSRYLRHALYNATKYVCYWNPVFAEYLAKKRAEGKHYNVALSHAMKKLVRLIYALQKSGKTYLTAA

SEQ ID NO: 131652 - protein, 426 aa, unidentified
MWDAQRRVLKIKSLKHGIIQDKRGNVMRAVFGIDVSKTSSEVAILVNGEKVHGYTILNDAIGFNRLLGDLKTVHNPEIIFEATGVYSRRLQAFLEEYGYAYTRLNPLEAKKQLDSLRVRKTDKIDAEKLAKSQLVHNRKPTYVQEEVYQHLRDLSRFYQNLTEDLVRAKNRLHKVLQITFPELENLLSTPTGEQYWNLVMAFPCKEFVLRLSQSDLCEIIRQSTSKRISEKRIAYLTDKLIKLAKQSFCAVKKNSPMLEEVRYYAQELLRLSERRQVVLNDMVTLAQPLPEYDILRSIPGIAETTATSIIGELGDIRRFQSSNQINAFIGIDLRHYESGNFLAKEHITKRGNPYARKILFKCIHNIASASHTNPCHIADFYEKRKRQSTIASTKPHTIASIHRLIRTMYYLITHNKLYDYSLTQNR

SEQ ID NO: 131653 - protein, 343 aa, unidentified
MQTITTIGLDIAKSVFQVHGVDTGGEVVIRRQLKRRSVLAFFEKLPPCLVGIEACASSHYWSRELQALGHTVRLMPPAYVKPYVKRQKNDSTDAEAICEAVTRPNMRFVPTKTVEQQSCLMLHRARHLFIRQQTAVINSIRAYLAEFGIVAPVGRRGVEQLLEVVANTADRRLPEVARMCLAALGSQLRALKAQILEFDRRIMAWHRSNATSKRLDAIPGVGPALATALVASVADPMAFRSGRDFSAWVGLVPKQNSSGGKDRLGSISKQGDRYLRSLFTAGALAVIRYAKIHGTGHRPWLAGLLARRPTKVAAIALANKLARMVWAMMARGERYKEPAALMA

SEQ ID NO: 131654 - protein, 434 aa, unidentified
MSGREAVQPEVKFVAFVGIDWADQKHAWCLQAAGSTQRESGELEHRPETVEAWVGELCRRFGPGPIAVAVEQVKGALVCMLRKYEYLHLFPVPSTMSAAMRKALYPSGAKDDPRDTDLLLDLLLQHRDRLRHLQPDNEGTRRVQNLVEERRKLVDEKTAQLNRLIGYLKIYFPQMLEWFGRLDTKLVCEFLERWPSLEELKKVSTAELRKFFRQRQGRHHELTEDRIHGIAQAMPAIQDRAVIEAKGAVVQVIVQLLRSLLEGIANLDRKIAEAAEAHPDFFIFQSLPGAGAALAPRLLAALGSQRDRYDSADEVQKHSGIAPVTETSGKKKWVHFRWACATFLRQSFHEWAGHSIAQSVWARAYYQQQRERGNDHHAAVRALAFKWIRIVFCCWQDRVAYDENKYLAALARRGSPLSSVLATIATPLCNPCGS

SEQ ID NO: 131655 - protein, 410 aa, unidentified
MEVMFDRVAGLDVGKESVTVCVRTPGSRRGRHSETRTFKTMTGSLRVMRDWLVESGVTIAAMESTSTYWKPPFYCLEEVMEVWLLNAGHMKAVPGRKSDVRDAEWIAQLLEHGLLAPSFVPPPEIRRLRMLTRYRVQLMGDRAREIVRLELMLEDASIKLSSVASSLKTVSARAMLTAMINGESDPLRLADMAKGKMRRKIPDLAQALTGHFDANHAQLAHSMLRRLDLVEQALVELDQVIVAACRPWQHQIELLQTIPGVGPKVAETIVAETGADMTRFPSAAHLAAWAGVAPAMKESAGRQMPAGKRHGNKWLTAMLIEATGSVGRMHGKNYLAVQHARLTKRRGMGRAQVAVAHSILVSAYWMLKRDEPYHDLGADWHSRRNDEAHTRRLIAQLEHLGHTVIIDPAA

SEQ ID NO: 131656 - protein, 400 aa, unidentified
MVSIGIDISKEKSTVCMLRPYGEVVEPPYDVAHNESELNALIEHIQSFDEDVKVVLEATGGYHHVVVSKLISVGIFTVVVNPYIMKKYCDATLRKAKTDKIDSVKIAHYGIDHWFSMTAYCPPDEVYAELKLLGRQYEQYVRLKVGCKIHLADLLDGVMPGIKKILTGNVPAFSTKDKLCDFVEKYWHYDNIKKLSEKQFLASYEKWSKKKGYRYNESQAIAIYQLSKNNIPTLKSSTPSTKMLVLQAVKSVRDAELTLSLIISQMQEIASALPEYSVVNEMKGVGTVLSVRLIAEIGDVRRFHNGSALVAFAGIDAPPYESGAFVGINRHISKRGSATLRKIGYEIMHALKVTKPTEDSAVYDFMIKKENEGKPKRVAKIAGLNKFLRIYYARVMEIYC

SEQ ID NO: 131657 - protein, 340 aa, unidentified
MNKSLDFDPCGIEVSARTLVVERRRPGQPDAVREFANTAAGHQALLRWLESAGRAVRVCLEATGLYGLDLALTLEAAGVALMVANPRAVRHFAQALMRRSKTDRLDAAVLTEYAARLPFQPWRPPSASALKLLAVARRLEALTDMMAAEKNRLHAASLSEALPAIIRRDIQRSIQTQQRAVQRLTRAAQEFIAADPSLAERYQLLLSIPGLGPTSALHVLAELLLLGPDLDVRQWVAYAGLDPRQYTSGSSVHKKARISKAGNKHLRRALYMPALVAVRHDPHLRAFYEHLVERGKTKLQALVAVMRKLLHAIYGIFKHHQPYDGAQLFALPSPQEVICP

SEQ ID NO: 131658 - protein, 336 aa, unidentified
MDYFAGLDVSMEETHVCVVDRDGAVIHEVKVPSTPADIKTALAGAPACRRVVFETGRMAPMLHHGLTGCGVPVICIESRQARQALKSFATHKTDRNDARGLAHLARTGFFKPVHVKSLSAHAIRSLIIARKKLVGQRVTLENQIRGLAVVFGVRLPRALSSAFIAKALRASEGIDGLSAAMRGLVAARAAVLSAIAAIDADMKKLVRASHACRRLMTIPGVGHLTALAFAAAVDDPERFRRSRDLGAYLGLVPRRYQSGVDYTGSISKCGDRRMRTLLYEAANVILTRYKQPLKLKDWALAIARRSTLRKARIALARRLAIIMHAMLRHGTEFKPA

SEQ ID NO: 131659 - protein, 404 aa, unidentified
MNAVGIDVSKGKSTVAVLRPYGEVVVSPFDVAHTGSDLRALVDLIKKLPGETKVVMEATGNYFESIARYLHEQNIFVSVVNPVLISDFGGNTLRKPKTDKKDSVKIASYALTYWLDLKEYTPQEDLRKSLKLLNRQYQQSIKLKTMMNNNLISLLDLTFPGINKLFTSPSRESDGHEKWVDFVLEFSHCDMISKLTIKAFAKKYKKWSDKNSYHFTESSCEKIYAFAKDCVSSVSSDKAIVFSVVQAAKMLISATENCHAIQSEMNRVASKLPEYDTVMNMYGVGKAVGPQLMAEIGDPRRFHSRKAITAYFGYDSENNDSGQKTTRSNPMTKKGSGALRRTLFIIMQVLLQTKPQDNPVYDFLIKKKSEGKHYYSYINAAANKFLRIYYARIKEVLNVSEQMT

SEQ ID NO: 131660 - protein, 289 aa, unidentified
MPIVAEHFESVVGVDTHAATHTLAVVTAASGAERARATFPTSAAGLARALAWIQGHAGPTSLVVIEGAGSYGAGLLERVSAAGMPTAEAAAMPTRRGIGKNDDLDAVRIARSVLAVDVERLRRPRSEQGPRVAARVLVVAREQMAAERTRTVNALTALLRSIDLGVDVRRALTASQITAITAWRSREEPDWLAVCRGEAVRLARQIRDLDHALVVNRAQLDQIVAAQAPELTDLPGVGSVVAAAVYVAWSHPGRVRSEAAFASLAGTCPIPASSGNTQRYRLNRAATAA

SEQ ID NO: 131661 - protein, 415 aa, unidentified
MKFNTQNAKIEAITEKTLVLGIDVGSEMHYARAFDYRGIEYTKKPFKFSNTEAGFMSLQAWILDLKEKHEKDKVVPGMEPTGHYWFNLGKFLQDNEMKPVLVNPHHVKKSKELDDNNPTKNDCKDPKVIAGLVREGRYMIPYLPDGVYADLRTASNIRFQLQAELTRIQNRISRWFNIYFPEYKKVYGKPDAKSGILILKTAPLPEDILTLGIDGVNQIWRDAKLRAVGKARAKTLIEAAEHSVGSKEGTVSARMEIRMLLEDYESRNIRLQEVMALIEELVAQIPMAEKLLEIKGVGIRTVSGFLAEVGDISRFNNPKELQKLAGLALVENSSGKHKGETTISRRGRKRLRYLLFEVAMSLVAKNPEFRELHVYYTTRRLNPLKKMQSLMAVAAKLLRIFYVMLTKSVDYDPKM

SEQ ID NO: 131662 - protein, 402 aa, unidentified
MNSVGIDVSKGKSMIAVMRPFGEVVCSPFEVPHTSSELSALAKRLKSLDGETRVVMEATGNYHLPIAFALHEAGIYVSVVNAMLVHDYGNNSLRRAKTDKKDAIKLANYGLDRWLTLPEFSPEEEIRMQLKTCYRQYQQYSKVQTMLNNNLISLLDTVFPGVNRLFSSPVRADGSEKWVDFVETFWHCECVSGLSQKVFETKYQKWCQKHGYYFREAKALVIYTAACGAVGVMPKTETTHLLITQAVSQLKAASTALAELKKEMLRLAELLPEFPVVQKMYGTGPTLGPQLMAEIGDVRRFHSKKALVAFAGIDAPPNDSEQIAGNHKAMSKIGSSALRRTLFLIMGVYLQKAPVDEPVYQFMDRKRAEGKPYRVYMMASANKFLRIYYATVKAYLDTLEAS

SEQ ID NO: 131663 - protein, 338 aa, unidentified
MKITTCGLDLAKSVFTVQGVDEHGKVVLRKTVRRAKLLELFTQLPTCVVGMEACSGAQHWARELRKLGHDPRIMAAEFVEPYRQGGKNDANDAAAICEAVSRPKMRFVAIKSVEQQAVLAVHRLRQGLVEERTALANRVRGLLSEYGVSISVGLDRLRRALPEVLEDGANGVPGIAREVFADAAQQLRELDDRIAVFDRRIAALARASEPVQRLMKIEGVGPVTATAVVASVGDAKVFHNGRQFAAWLGLTPRQHSTGGKQRLGAMTKHGDVYLRTLLIHGARAVLRVTVKRSDAKSRWVESLRRRRPDNVAAVALAAKHARIIWALLARAREYQPAP

SEQ ID NO: 131664 - protein, 350 aa, unidentified
MAKAMVAQADEIVVGVDTHGDIHVAVVLSGVGARLGSISVPTTPPGFAELMRWAEGFGRVRCFGVEGTGSYGASLHRHLVHHGQVVVEVDRPDRRTRHLKGKSDAGDAEAAARAVLSGEATGAPKAADGRVEMIRALRVARRSAMKARTQAANQLGAIVLTAPEPLRTSLRGFTVPRLVDVVARFRPGALVSPEAAAKLALRHLARRHIALSAEIAELDRDLVPLVAQAAPTLLALPGIGTDVAGALLVAAGDNPGRLSSEAAFARLCGVAPLPASSGKTNRHRLSRGGNRIANNALWRIVIVRMSHDERTRSYVDRRTKEGLSKKEIIRCLKRYVAREAYRCLEGVDGL

SEQ ID NO: 131665 - protein, 342 aa, unidentified
MQIHSVGIDLGKTTFHLVALGAAGKVLVRKKFTQKQLLTFTANMQTSLIGMEACSGAHFLGRALRSQGHDVRLIAAKFVNPFVKSNKNDFIDAEAIAEAVERKNMRFVPIKTDDQLDLQAIHRVRDRLISRRTAVINQLRAFLLERGLVFAKTPSKLREAMPEVLENAGASLTPQMRNLIDLLWGEWKMVEQQIEELTDELERISAADAGCTRIRKIPGIGPVVATAIVAAIGNGAAFRKGRDFSAWLGLVPGQYSTGGKAKLLSISKRGNVYLRKILIHGARAAVLRIKRDRAPIGAWLDALDLRAHKNVVVVAMANKLARIAWAVLSSGEEYKPLASGVS

SEQ ID NO: 131666 - protein, 319 aa, unidentified
MSKSDSSEVTIGVDVSKSRLDVGVHPSGTRQSFDNTEEGGGLLKAFVRSLKPVLIVFEATGGFEMLAVSVLSADQQPVAVVNPRQVRDFAKASGKLAKTDDIDCGIIAHFGAALKPKVTPLKGPEAQELDALNARRHQIVQMLTMEKNRLVTAQTWTRKDIQSHITWLEERLSKINDDIRQSIRNSPAWRTKDEIFQSVKGIGPIMSLTLLTDLPELGMLNRKQIAALAGVAPLNRDSGRIRGKRTVWGGRAHLRAVLYMSTLVATRHNPTIKTFYQRLIQAGKCKKVAITACMRKLLTILNVMVRNNTKWQNPVLKAA

SEQ ID NO: 131667 - protein, 377 aa, unidentified
MKRVKFVGLDVHAETIAIAIAEQDGEVRSLGVIPNREDSVRKLVRKLGPVEELRFCYEAGPTGYVLYWQLTRMGAKCEVVAPTLVPVKAGDRVKTDRRDALKLARNYRAGELTAVWVPDAAHEALRDVVRAREAAKKDQLRARHRLNKFLLRHGRRPPMGIKPWTMKYLEWVKREVHFEQMAQEATLLDYLHEVEHAAARIARLDGAIEEAVKSAPPKMRAVIEALQALRGIAHVSAVTVVAELGELSRFGRATQLMGYGGIVASEDSSGERTRRGGITKTGNAHLRRVVVEAAWAYRHRPAVGTTLRKRQEHVSEEVKEIAWKAQQRLHQRYRKLLAKGKNKGVVVTAVGRELLGFIWAIGTKVETAQKESLQQAA

SEQ ID NO: 131668 - protein, 370 aa, unidentified
MSHVTSVGLDVHARSVAACAFNPYTGEVRQKTFGTDAQEIASWIKAFEDPRAVYESGPTGFALCRELRGLGVDCIVGAVSKMQKPAADKRRKNDRRDAAFLARLLATHNIIEVWIPPVEVEAARDLSRALDDARIDLQRARQRLSKFLLRRGYAFDEVDALGRKRGAWTRAFWRWVEGLRPQEAAAAHAFDHYVTCVRCAESDKRALEKLVLAEARSGRWKDRVGALASIKGIDVISAFSLAAEAGLFSRFPTAGAYASWVGITPSEHSSGEREARGGITKTGNGASRRVLVESSWHYMSCSPKPKAAPSGYEVPRHVKSRADDATARLAHRHESLRAAGKRTCVANVAVARELACWVWEIGRRAEGTLG

SEQ ID NO: 131669 - protein, 342 aa, unidentified
MQYPIIRFGVDLAKNSFSICGVDVHDKVVIRKTLRRDELLNFFVQAPPAVVAMESGSGAHHWARALQALGHDARIIDPRLVAPYRHQGHVGKNDSNDAEAICEAAGRPHMRFVPIKSAEQQALLVVHRLRASAVTDHTRTINQMRGLLAEFGIVVTQGADHFKRQWPSLRQQHAEALPALAWACLDELYTELLRLHQRILAYDRQIKAFVRDSEPAHRLAQVPGIGPITASAIVATVGNGRDFANGRQFAAWLGLVPRQFSTGGKPRLGRITRRGDVYLRTLLVHGARSELMRSTRRQDRKSRWVEKIRQHQGWNKAAVALANKHARIAWSMLAHNQSYQSA

SEQ ID NO: 131670 - protein, 391 aa, unidentified
MLICGIDIGKNHHEASIIDQTGRLLSKSLRFANSTQGGQSLLDYINDRNSEKEVVVIGMEATGHYWLSLYCFLFDAGFQVNVINPIQSDAIRNLFIRKTKNDAKDSFLIAETIRIGRFSNTSLADEDILSLRQLCRHRTDLVDYIADQKRKIIGVLDRVFPEYQRFFSDTFGKTSTELLNKAVTPEEILALPTDELCHLLRENSRGRFGEAKAEEIRTAAKTSFGITIGTTAFTMQLRQLLEMIQLLEKQLSELETEIEQYLHKLDTPITTCPGVGKVLGAVILSEIGDISRFSEPKKLVAFVGIDPSVKQSGEFTGTQNKMSKRGSPHLRRAIWLAANVAAFHDPVLSAYYQKKRNEGKHHFTAVGAVARKLTFIIFAVLRDNKPYVPLY

SEQ ID NO: 131671 - protein, 372 aa, unidentified
MIQRFHGLDRHKKHSTISVLNREGQEVEFVSKCPDLRGYVEQLGPEDTVVMEAATGSFFWADLVESTGATCHILHPYKFKIIRDSWNKTDKHDARNMAKALWVYLVTGEFGIPTVYKPSVAVRELRRLFCQYNLLNRQVTALKNTIQAILADNGVSLTCRQKTMLSSETDAKEVLNAYDLSPASLLSIQINLEILWKVEEQKNNLKKEILLAGEPFAAEVKLLITVRGITPLAALAFLADVADIRRFKTLRKMNAYLGLVPRVKESGGRSRTGHINRESRRLTRTLFTQSVMHFAAASPYLRLCYSNLVSRRGVGRARIALIRKICGMMRRMLLEQEEFHWMQPSNFERKLKRYENQLKKIKKIKEEERKSA

SEQ ID NO: 131672 - protein, 367 aa, unidentified
MKEVSTVGTQQTRNISQQKLTIGLDLGDRNSWYCVLDEAGQIQLEQRVRTTAKALGEVFGAMPRCRITLEIGTHSPWISRLLSELGHEVIVANARKVRLIGESRKKDDRLDAQTLARLARIDPQMLCPVKHRSAQAQADLMMIRARAGLVRARTGLVNAARGLAKSYGERLRGCNVRNMSPEKADGLSPELRTALEPLLGGIESLSERIRECNEGIEQLARESYPQVAQLKQVKGVGTLIALTFLLTLEDPHRFGKSRDVGCYLGLQPGRRNSGQSEPQMHISKEGDPYLRTLLVQGAQHILGPFGVDCDLRRWGLKLAERGGKSGKKRAIIAVARKLAVLLHHLWVSGEVYEPLRLSKLRAMPAAA

SEQ ID NO: 131673 - protein, 339 aa, unidentified
MKLYAATDLHSSNNYLAIIDENGERRFKQKLPNNPALILEALMPYKKEIAGIVVESTYNWYWLVDMLMAEGYKVHLANPVAVQKYSGLKHADDKHDAFWLAEMLRLGILPEGYIYPKEERPIRDLLRKRGHLVRLRTSLIISLQNIISRNCGKELDCNSMKRLKTNHVAPLLKDNEDLALAGSVSKESIDFLTRRIKEIESAVENKVKLQEPYSNLQTIPGIGKIIALTIMLETGHVERFADTGNYVSYCRKVHTKWMSNGKQKGKGNRKNGNKYLAWAFSEAAELARRFDSKAKAYYQRKKQQTNFMVAHNALAHKLARAAYHIMKDNVSFMPEKLFA

SEQ ID NO: 131674 - protein, 403 aa, unidentified
MNAVGIDVSKGKSMVTILRPFGEIVSSPFEIKHTSSDIHSLIKLIHSIEGESRVVMEHTGRYYEALAHQLSAADLFVSAVNPKLVKDFNNDSLRKIKSDKADSVKIARYALDKWQSLEPYSITDELRAQLKIMNRQFHFYVKQKTAMKNNLIGLIDQTYPNANTYFNSPTRSDGSQKWVDFVSTYWHVDCIRKMSLNAFVEHYQNWCKRKKYAFNKSKAEEIYTKTKELVPVFPKNEITKHIIRQAIDQLNSTSVTVETIRTLMNETASKLPEYSIVMQFKGIGPSLGPQLMAEIGDVTRFTHKGALTAFAGVDPGVNESGSYAQKSVPTSKRGSSNLRKTLFQAMDVLIKTMPQDDPVYQFMDRKRTQGKPYYVYMTAGANKFLRIYYGRVKEYLSVLPDPS

SEQ ID NO: 131675 - protein, 345 aa, unidentified
MQIKSIGIDLGKTTFHLIALGIRSQVVIRKKFSRSQLLVYTANLPASLIGMEAGVGSHFLGRALRAQGHQVRLIPAQFVRPFVKSNKNDYRDAEAIAEAVERENMRFVPIKTEDQLDLQALHRVRDRLVARRTSVINQIRAFLLERGISFRKGPASLRRQMPEILENADEKLSAGMRRLLDFLWQEWRGLQVQIESLNADLEQIASCDPACVRLQQIPGVGPLVSTAVVSAIGNGAAFKKGREFAAWLGLVPRQWSTGGKAKLLGISKRGNPYLRKMFIHGARAAVLRVKREGSSLGTWMSGLETRAARNVVIVATANKLARISWAVLASGKDYHPRHKALVVSN

SEQ ID NO: 131676 - protein, 406 aa, unidentified
MEVYTGIDWSENKHDVLFMNESGAVVAYLVIPHTPDGFRKFDDARKKLGFSTAECLVGLETAHNLIIDFLWSRNYSQVYVIPPNVVKSCQGRYRQSGAYTDKSSALLLADLLRTDRQRLQPWRPDLPLTQQMRAKISFLLYLTRSAVRLSNRLRAVLLRYYPAAVDVFSSLDGVVTLEFIRAYPTPQAAATLSRDDFEVFARRHGYIQTKYLPACFARLRAPQPEASTAVVESYRMEAISLVTLLLNTVRTKKAAYKELGKLFAQHPDHDIFASLPGVGKLLAPALLVKFGDDRDRFPAPSSVQALAGTCPVTKQSGKYKYVQFRKACDRDFRYIAQQWALHSLDDSVWANTYLQRARSRGHSKSHALRCLANRWLAVLWKLWQSRHCMVRSITFGNKPSGASRSS

SEQ ID NO: 131677 - protein, 334 aa, unidentified
MDKVTTVGIDLAKRVFALHGVDASGRVVLRKTIRREQFVETVAKLPPCLIGMEACSGSHEWARRFQALGHTVRLMAPVFVVPYRKSGKNDGNDAEAICEAVSRPNMRFVPVKSAEQQALLALHRVRQGFIEERTALINRLRAVLTEFGVVLPNRTQWVRRDAVAVAEPLPVLARQAVEDLRAHLTQLDERIGAYDRQLEQQARQSEAAMRLMQVRGIGPLTAVAIVATVGSARDFASGRQFAAWLGLVPRQNSSGGKARLGHISRRGDAYLRMLLVQGARSVLNTAARHTDRLSLWALSLQARRGMHKALVGIAAKNARIAWALLSKDQTLRTA

SEQ ID NO: 131678 - protein, 347 aa, unidentified
MRFYNQTHEHYCGIDLHVKTMYVCILDAAGTVLVHRNVPSTPEAFREIVAPYRQGLVVAVECMFTWYWLADVCANDGIAFVLGHALAMKAIHGGKAKNDKIDSHKIAVLLRGGLLPQAYVYPATMRSTRDLLRRRLHLVRKRGELLAHIQNTRAQYNLPAFEKRLAYAANRVGVLAHFPDPSGRKSVDVDLSLIEHYDGLITDLEWTIVREAKRHDANAFHQLRSVPGIGKILALTILYEIHDITRFDRVQEFASYARLVKGRHESAGKVVGGGGAKQGNVHLKWAFSEAAVTFLRQNREGQRLKARLERRHGKGKALSILAHKIGRAVYYMLARHTVFSMEKFLAA

SEQ ID NO: 131679 - protein, 351 aa, unidentified
MWIIGVDYHPSVQQIAFVNTDTGECGERRLSHGDREAEKFYRGLKAEGCKVRVGMEATGYARWFERLLAELGFELWIGDPAKIKAKRVRKQKTDRLDAELLLQLLLEDRFPRVWVPSPENRDLRQLLWHRHRLVQMRTRITNQLQAVAMNEGVRRKKALWSKPGRAQLESLPLAPWAARRRQDLLELLDRLNPTIEELSAAVEQQVKHRPEVLRLMTHPGVGPITALAFVLIIDSAERFACGKQIASYVGLIPGEDSSSDRRRLGHITKQGNSLLRFLLVEAAQAVVRRDPDWRRRYTHLAMRRDKRIAKVAMARKLAVRLYWMMRKEWNYEQLKKFGSYAGESEHGHGVQ

SEQ ID NO: 131680 - protein, 465 aa, unidentified
MGKGSGGNGMTRGDRRRNAQRERLRELLPRGGAVIGIDLAEDKQALAVIDHDVRVLARKTVRVKAFRLGEALDWAAGQAKVKGFERLAVACEPTGPRWMQVQRLCAERGLPLVCIQPLVSHIAREQQDYTPHKTDESDCVLIGRLATELHCYIPEELDETWAHLRHLGRRRAQLITAATASVQRIRDFLSVAWPVVTEACAQPFESVTWLAALQVVTARCGGDPARLAVLGLEEFTVLVRGAVPGWGGQKGLSRICRRVFAALTDTEGVVTWSRRGLLRRCADELGDLARTRAQRRTVEAEMVLVLGELGLSRLGEIPGLTAVGAAAILAETGDPRRYDSSSSLVKHAGLSPSENASGAFEGQARMSRRGRPGLRLTAWRAIWPMLQFNPVMAAKYAALTQTADAAAADPGSQQVRRAAAARVRRAKARVACAASLLRWIYSMVVHGTSWDAAVASGASCQPEAA

SEQ ID NO: 131681 - protein, 343 aa, unidentified
MIYVGMDVSSKEFVVDAIDQRQQKIFEGRVVPSRAGLRKLVSDLGVGPKLFAFEAGNQMKWIALTLMKQEGVQIHVVHPNEVKWINQSSGKTDKIDARKLAQLARGNLLPRPVHVVEGRTRQLREMVSARGQLQSKRVALINTVRGYMKQEGVSLPEKFFQRLDWENALEAKPLGSTQKVILKSFMGGINALECSEEEITEKMIEIKDKRCELLETIPAIGKIASRVLVSALDDAGRFDNKKCVANYGGLAPTIYQSGNTTNLGRINRDGRQEVRKVLLQCAHTIQRMISHDARPIREFFERIEKRRGKKRAVVATARKLLTIAYGVLKSGVPYDPMRLRAFA

SEQ ID NO: 131682 - protein, 323 aa, unidentified
MQGKVSFEEDAMPVVYAGVDVSKEWLDIHLHPLGESRRFSNNKTGIRQLKRLLARHRPKSIVMEATGKFHRPAHRSLWLDGFAVAVVDPLRARMFARACGYLAKTDRLDARFLALLAESLRPPADTPPSPHVEALQELVNARSAAKCDITALQNRSKTATTALLRGELNRLVRRLEQHVERLDKEIERRVGEDPQLYRKAEILTSIPGIGRVTALALMAGMGELGTCSGKQAAMLAGLAPIANDSGARTGRRSIRAGRPAPRRALYMAALSACRYNPALARFADTLKAAGKPAKVILVAVMRKLLVLANCLLSQDRLWTPTPP

SEQ ID NO: 131683 - protein, 343 aa, unidentified
MNITTTGLDLAKSVFHVVCFNNQFKEVKKRMLRRSQVLHFFTQLPSCRVAMEACASSHYWGRELRALGHDVKLIPPQHVKPYLRGNKNDYNDARAIAEASTRPGMPFVAIKSTEEQDMQAIHRMRSQCIRDRTALSNSTRGLLGEFGIALPKGLATLRKRIHGILEDADNGLSDRFRKLLARRYDQFVALDDHIAFYTNELEILSQQDDACQRLQTIPGFGPVISSAFRSVIGDGRAYDRGRDASASLGLVPRQHSSGGKNVLLGISKRGDRYLRSQLVHGARAVVIQAARKDDPLSKWINRIREERGWNKAVVATANKMARIGWAILRHNTIYQPDSEQSIH

SEQ ID NO: 131684 - protein, 459 aa, unidentified
MSKAKRPSRKREMSPVHAHAHAAAVDIGATLNVAAVGPDRDPEPVRSFGTFTADLHRMADWFERCGIRTVAMESTGVYWIPAYEVLEQRGFAVVLVNARDAKHVPGRKTDVSDAQWLQRLHEYGLLRASFRPDAGIAALRDYLRQRERLLDYAASHIQHMQKALTQMNLQLHHVVTDITGTTGLRIIRAIVAGERDPAALAALRDYRCKASEETVRQALVGNDREEHVFALAQALELYDTYQAKVAACDARIEAALNRLQADCPVPATPLPTPRYQTQTHNALAFPAREALHRILGVDLTQTHGLGPYLALKLVGECGTSLAAWPSAKHFTSWLCLAPSNKISGGKVLSSKTRRSNNRAAALLRLAAVAVGRTETALGAFYRRLSGRVGKAKAVTATARKIAVLFYNTLRHGTAYTDPGASYYEERYRQRVLANLRRRAKSLGYVLQTTDPTPPVAAVS

SEQ ID NO: 131685 - protein, 454 aa, unidentified
MKDYGYLGADVSKGMCNFVLQNFEGDELEPNFQLDDNRSGHESLFELIKDFKSNHHLSKIVIGLESTGGYENNWYVGLRRQSKKLELEVHRINPKRIYHEAKTEGRRTIDDGVSARVIAGYISKNYTKITRPNSEMETEDRELQGLRRFHKYIDSLVKQNARNKNALEKLLYQMLPELLTLKGDKYPTWFLDLLIKYPTKSKIIKAGSEGLMTIKRITKEKAKTILEAIRVSVGGLDSQLDQNVIRAMAEDIKLLNQKIISLRQELQQAANKSLEKPIKLVTSIHGIAADTAVGILLEMGSVKRFLKARSLVAFWGINPTFKQSGDKKVYIGMSKHGSPRARSLLFSAARNVVIHEPYFKAIYAKQRQKGKSHYDAIGVIMSKLTRVLYGLLKNDSVFEAGIDRFNQEKKLIEPKSSMKSVPNKTERRYQETKSGAPISWRQRKKRRQETSALS

SEQ ID NO: 131686 - protein, 348 aa, unidentified
MQIATIGLDIAKNVFQVHGVDASERVVVRKQLRRGQVLGFFKALPPCLVGMEACATAHYWARELTELGHQVRLMPAKDVKAYVKRNKNDAADAEAICEAVRRPTMRFVWVKTAEQQSRLMLHRARDLLMRQRTQLINALRAHMAELGIVAAQGREGVRELLRIIASERDARLPIDAHASLVVLAAGVQAVQTMIGSIEKRIVAQHRSDEASKRLRSVPGIGIVGATAIAATIPDPKIFRSGRDFAAWIGLVPRQDSTGGKQKLGPISKQGDQYLRRILVVGAHAMLKRARHQPEKYPWITRLLGRKPFGVVAVALANKMARVAWALLARGGTYRAPALAVAAQGSSQN

SEQ ID NO: 131687 - protein, 369 aa, unidentified
MNKNILFIGLDVHKESIEIALAEGASQEVRRYGKIGGTHDAMRKALRKLVSTGKSLHFCYEAGPCGYELYRYLISEGHDCWVIAPSLIPKKTGDKVKTDKRDAIQLARLFRAGELTPVYVPDREDEAIRDLSRAREDAMLVQKSARQRLKSFLLRHDIRYQGKTSWNEAHLRWLADEVRCPSAAQQIVFQEYVNTVTESQHRLQRLNEQIEIFVKQWRLYPVVEALMSMRGVKIIVAVTVVSELGDLSRFDDPKQLMSFLGLTPSEYSSGPRQTRGRITKTGNGHVRRILIEAAWCYRYPAKVSREIQLRQDQLPLRIRDIAWRAQLRLTQRYQHMQRKGKPHNVTVVALARELAGFMWAIANEVDYPR

SEQ ID NO: 131688 - protein, 347 aa, unidentified
MKFYTTQHPYYCGIDLHARSLYVCILDANGETILHREIKALPEPLLDLLAPYIGNIVVGVECMHCWYWVSDFCAEHGIDFILGHALYMKAIHGGKAKNDRIDSYKIAHLIRGGNFPLAYVYPPEMRAARDLLRRRTRIVRHGADLKAHVKNTTSQYNLPPMDLNLRYDFAREAMRNRFDDDCVQRNIDLDLNIIAFYKHELSSVECFIEKHAKHHSGSDYHILTSFPGIGRILALTILYEIGDIARFSTVQDFASYSRLIKCKAESAGKSYGTQGNKIGNAHLKWAFGEIAVLYLRGNDKAKAHLLKLQKRMSKAKALSALAHKVGRCVYYMLKNQKVFDEKRFLAG

SEQ ID NO: 131689 - protein, 361 aa, unidentified
MHDSITWVGMDVHKESIVVAVVNGAGGTAARWETPNTAKGKERLAKRLSEFGTIRCAYEAGPCGYDLRRFLEAKGIPCDVIAPSLIPKKPGDRVKTDKKDAEKIARMHRMGELTAICVPTPAQEALRDLLRAREDANEDLVRRRHRLQKFLLRQGRRHEGKNWTRDHWRWIRAQKFEDRNSETVLSEYTAAIDQEIERIGRLDAQIEQESKNPEIAPSIARLKALRGVQTLTAMTILSELIDLNRFPSARKLMDFVGLVPGEHSSGQKQWRGSITKSGNSHVRRVLVEAAWHYRHSPRSTGAAIKKRREGQPPEVIETARKAELRLYKKFTRMVMRGKKTTVAATAVARELVGFVWAIGRI

SEQ ID NO: 131690 - protein, 331 aa, unidentified
MGNVTTVGIDLAKNVFSLHGVDASGAVVLRKTVSRARLMELVAQQPACVIGLEACSGAHEWARRFQALGHTVKLMAPRFVAPYRKNGKNDGNDAEAICEAVSRPSMRFVPIKTLEQQAVLCLHRVRQGFIEERTATINRLRGLLAEFGFVIPQKAAEVRRRATEWLEQLPPRAACAIRDLHEHLRVLDARVKEYERSIEAHARDHDGAQLVQQRLGIGPMTASAIVASVGDVREFKNGRQFSAWLGLVPRQHSTGGKQRLGHITGRGDPYLRTLLVMGARSVLQRASSQSDPLSRWALAVRGRRGYHRACIAVAAKNARVVWAMLNQHVCA

SEQ ID NO: 131691 - protein, 495 aa, unidentified
MRVSKSRRNPTPTIRPAQHLPAIHAHACGIDLGSREHFVCVPADAVPEGQSPVRSFGVFNPQLDQLVEWLKQCGVTTVALESTGVLWIPLFQKLEAAGMEAVLVNTKKLKHVPGRKSDVLDCQWLQQLHSYGLLSGSFRPQDAICQMRTYMRQRDSLVKRAAEDTQHMQKVLAEMGVHLYVVLGDITGVTGLAIIDAILSGQRDPEELVKLRDYRIRRSTVEQMKDALRGDWREEHLFVLRQHRESYQHVQDQIRQLDLRLYGLLEQMALETEKKNLEPSVAGPVPTVEVPGAPNGVVSSDGSASSPPKRPVKRKAKAKGGNTPTLNFTPQLKSIYGTDLTQVPGLNVLGALILLSEIGTDMSRWRGPDAFVSWLGLCPGVKISGGKKLGNKTPEVVNRVSTLLRLAALVVGRTDTCLGSFYRRLQAKRGSPKAITATARKLAELIYMLIKEGKQFKEPNRDQYEAKVIRYRLARLKKQAEQLGFELVAKEEVPA

SEQ ID NO: 131692 - protein, 426 aa, unidentified
MKSNTQNSKIAAITEKTLIVGIDVGSETHYARAFDWRGIEFSRHPLEFSNTEAGFQTFKAWIDELKEENGKTRVLPGMEPTGHYWFNLGKFLQDNGMQPVHVNPHHVKKSKELDDNDPSKNDRKDPKVIAALVNEGRYSYPYIPEGIYAEVRNLSNLEVQNQSQLIRIKNRIARWFSIYFPNYKSVYRDPGAKSGLMILEKAPLPQDIVKLGVDGVNRIWRDAKLRGAGMKRAKTLVSAAEHSVGNHEAPESARLELHMLLEDYKRLAERETELMNLIETKITEVPNIDKLMEIRGVGIKTAAGFVAEVGDISRFDNAKELQKLAGLSIVSNSSGKHKGESRISYRGRKRLRYILYEAAISLVAVNPEFKAVHQYYTTREKNPLKKMQSLIAVACKALRVFYAVLTKGVTYDAERLTADIRRPEAA

SEQ ID NO: 131693 - protein, 351 aa, unidentified
MSDYYMALDVHCAFCEMAVMTRSGKLVLRDRCETRIRALREAIAKVRRPRRLTFEEGPLADWLARELRSTVDELVVCEPRRNSWIARDGDKDDPIDARKLADLYRGGYLKTVHQSESLGRSLLKQQVSLYHDRVKERVRQGNQLVALFRRHGVFVKATHTLQEEPWHLCLKQLPTSPVLHQGLTLVRQTYALLSTQEESLRAGLIGLAKQEEPIRRFEKLPGMGWIRGVTFYAYIDAPQRFRSKAALWRYSGIGLERRHSGRGPVQTRLSRQGNRRLKNVLLGAAQTAIAQAENAYADKYRHWTQEEGIPAPNARRNVARAIAATLWSLWKTGQTFDAKRVAMPAVSCEQL

SEQ ID NO: 131694 - protein, 414 aa, unidentified
MTEHFQWFVGIDWASEFHAVCLLDATGAIREERTVAHTIEAVNEWLTTLLEQTGADPSAIAVAIETPRGILVDTFLARGFAVFAINPKQLDRFRDRYTVAGAKDDRRDAHVLADSRRTDPGAFRRVQLDAPIVLELRELSRAEDEWQRDLGRLTNRIREQVARIAPALLSLCPAADEAWFWSLLEIAATPAARQRLTRTDIRALLKRHDEVWTRLSAADFVPAPGVIAGVQVRLDGLVEQVRVTYAQRQRCLKEIDRVLAALTEREPTAEEPCEHRDVEILLSLPGVGRLITATMLAEAARPLADRDYDTLRTHAGAAPVTKRTGKRFCVVQMRRACNERLRDAAYHWARCSLRQDARSRAYYAQLRRCGHTHGRALRSVVDRWFRILIAMLTHRTLYDPTRFSSCAGTVPVTA

SEQ ID NO: 131695 - protein, 437 aa, unidentified
MEEVRDEPLYRDRVCGIDIGKAGMAATIRVPSDGNPARRAAETRSFGTTRREVLALADWLRSWQVPAVVMEASGDYWKGPFYRLEAEGLECVLADAKQVKNLPGRPKHDPGDSRWLAACFERGAVTSCFVATPEFRIIRLHTRYRRDLTEERTREKQRAEKLLESAAIKLSSVVTDLHGVTGRDIMDHLIAGERSPKVLAQLARARARRKLSELEQALEGAEFFTPAHAALLAAMLARIDRVNAEIARLSEVIETLLAPHEEQLAQAGSMPGWGRRAAQDALAETGTDMSRFRTGAHLASWAGRTPLDNSSGKRKGKAKSKKGNRYLGGLLGETAVAAGKTQTREGARYRRLARRRGKAKAQVALGNTQLKVYHALLSNPGARYEDLGPDYYERQASTRRQIAHHVSKLGDLGFEVTLCRLPGADPDPSGPGNTQAA

SEQ ID NO: 131696 - protein, 369 aa, unidentified
MTAHAVAGIDPHKHTATVAIVDVLGVLVTSLSFPVTRSGIDALTALLTDSGLTIDRIGVEGSGGLGRPVMLALAAAGHDVREVQANRTAERRKRRRRAKTDIDDAEAIARETLADPELPPAGKNHTPPPAADQLAAIRDWRESLVLQRVRLLNEAESVLVSLPLHLREQLPASSRVAASLRRLAQLDDISGDMGAADQVKLDRLAQTRADVDSIAARIKELDAQVPTLLKALGCTLTAIHGIGVVTAMTLLTEIGDAHRFTTEGRLARWCGIAPVALSSGEGDGPPRRHRLDLGGNRRVNSVLHIVHVTQARCHPPAQAYMAKRETENKSKRAVRRSHKRQLANVIIRHMWNDADRLAQASSTFSSTAA

SEQ ID NO: 131697 - protein, 370 aa, unidentified
MGNSTEVFVGIDVAKARNAVAIAEGERGGEVRYLGEMDASEECMRRLVKRIAAKHERVHFCYEAGPTGYGLYRLITALGYSCMVAAPSLIPRKPGDRVKTNRRDSVALAKLLRAGELTPVWVPDEGHEAIRDLVRARAAAVETVRVHRQQVSAFMLKHGRIFPRKTAWGARHLRWLQEQRFDHPAHQIALQEMVEAVRISKERVVRLEAAIEEFVPTWSLAPIVRALQALRGVDLIVAVTFATEIGDLRRFDSPRQLMGYLGLVPSERSTGDTVRRGGITKAGNGRVRHMLVESAWTYRHPPRIGKAKLYKLEQAPPKVREIAWKAQTRLTARYRALSGRGKKTTVVCTAIARELVGFMWSVAREVSPAA

SEQ ID NO: 131698 - protein, 339 aa, unidentified
MLIIGCDYHPGFQQVAIFDNRTGEYEERRLSHRVEAEEYYRSLGGQEVRVGMEACGHYPWFERLLAELGIELWLGDAARIRAGVVRKQKTDRRDAEQLMRLLVEERFPRIWVPSLEERDVRQLLVHRHKQVQARTRTKNQLQALALSQGVQRKWKLWTAAGRAELEKLELLPYAAVRRERLLAMLEQLEGEIGRLNRQVEEEVKRRPAAEKLMTHPGVGPVTALAMVLTLGPAARFANGRKVGSYFGLIPSEHSSGGRQQLGRISKQGSSFLRFLLVEAGQSAARYDGELGRFYRRLAVRRHRALAKVAVARKLAMRLYLMLREDWTYAQLCKAMGGRA

SEQ ID NO: 131699 - protein, 343 aa, unidentified
MQTITTIGLDIAKSVFQVHGVDAAGQVVVRRQLKRRYVLAFFQKLPPCLIGIEACASSHYWSRELRALGHTVRLMPPAYVKPYVKRQKNDATDAEAICEAVTRANMRFVPTKTPEQQSCLMLHRTRHLFIRQQTAVINAIRAHLAEFGIVAPVGRKGVTELLHVVADPSDGRVPEVARACLAALGTQLLGLKEQIVEFDRLIMAWYRSNETSKRLHYIPGVGPLLATALAASVADPQTFRSGRNFSAWIGLVPKQHSSGGKDRLGSISKQGDRYLRSLFVAGALSVIRYAKIHGTKHRPWLTALLARRPTKVAAIALANKIARMAWAMMAKNERYKEPVALAA

SEQ ID NO: 131700 - protein, 329 aa, unidentified
MKLQHIIGADLSKESIDLACHQLQTHLKITNSASGFRQLLKWLKQQKISYSDIMIVMEHTGLYSYHMENFLHKHQIRFTKVSALAIKRSLGLIRGKNDKLDAERIARYGFEKRDQLQSEKPMDKGFQRLQMLHSTRERLTKHRSSLICALKEYRIVLSPVDPIMRSHEKLIEELSVQIKLIEEQIKQCIQTAAPSVNRNYKLLTGITSVGPVIAIATILKTKNFTAFKDGRKFSCYCGSAPFDHSSGKSIRKKTRVSHLADKRMKTLLTLGARTAIQHDKELKIFYERRLLMGKSKNSTINIVRNKIILRMFAVINRQTPFVKQYSKAV

SEQ ID NO: 131701 - protein, 428 aa, unidentified
MDQVNHNRLEEFRQLRQEVRHSEEYLIVGIDIAKDRHHAFFGTATGKTLLRRLVFSNDYEGFRKLLDQAEALRVRHGLKKVVYGMEPTANYHKPLGEYLITQGRTVVLVSGVTVARNRESLDGRWDKHDVKDSANVADLISQGKCLYYEYPAAGLRGLRGLLSLKRRLKKQEHGYRVRIRNHLIAQYFPEMDRDFERLGAEGLSIVKWCFPPSQITELDVDPFIQRVTSRRIRMEKRRRLEGVWEKAGESIGCDGVPGVEHEARAMVEGLRQIREMIQETEDKIQELCKQFPEYKYVLTIPGFGPDLSAKVFGAIGEPDRFQNGKQVLKLAGLDLSADRSGKDSDKAIPEISKRGKADLRYALYQAALIASVKNRDVMIYYTNKLRGREREKGIHIKMRVKLAAKLLVIAWTLMKKKEAFDPAYLNVE

SEQ ID NO: 131702 - protein, 340 aa, unidentified
MNNLNVVGVDLAKNIIQVSVVTPAGKELRNKALTRKKFSEFLARQKPGLVAFEACAMAHYWSRIAQLHGHMAKIIPAKAVTPFRQGHKTDSNDALAVAEAARRPNINEAPMKTIEQQRSRELLVHDRTALSNHIRGLLMEFGIVIPQGFAALHRRIPEVLEDAENGLPDLYRPTLNLLYGRLITIKEDIDVLNEQIAAIVKQNVACDRLTKLEGVGPISSVLLYATLGTGEAFANGRQFSAYLGLTPKQYSSGGKTVLIGLSRYVANKRLRSVLIQGARAYVHRLKDPKTPKERWLWALIQRAGYGRAAVALANKNARTAWALLTQGVEYKREYEVPLAA

SEQ ID NO: 131703 - protein, 356 aa, unidentified
MSRGIQYIGMDVHKEAIVIAVLNSSGKLVMESILETKASSLLQFIHGLQGELHVTWEEGTWAAWLYDLLQPRVQQVLVCNPRRNALLKEGNKSDKIDARKLADLLRTGMLRPVYHGEHGLRTLRELARSYQTISHDLIRVMNRIKALYRGWGIACGGTQVYAARHREEWLGKIEHAGVRRRAELLYQQLDGLQVLRQTLRPELLAESRKHKAAKLLRQIPCIGPIRAARLLALMQTPHRFRSKRQLWTYSGLGIETRDSAQYCFVRGQLQRTKKPQQIRGLNRNHNHEMKEIFKGAATRASCGVGPLRDFYVGLLDKGMKPEMARLTLARKIAAIALTLWKKEERFDAEQLKPQAA

SEQ ID NO: 131704 - protein, 452 aa, unidentified
MVWLKKGASAVTEIRHARRGPNFPCSEKGAGMAVIIGVGPHKASHTAVAIGAAEQVLGELRVRSSADQVGRFLSWAAAWPERTWAIEGASGLGYLLAQQLVAAGEAVVDVQPKLGSRVRLLATGNVNKNDPNDARSVAIAALRCKDLRPVAAEDHAAVLKLWSKRRRNLGSLRTQAACRLHAVLCDLVPGGHPKKDITAAQAARALEAIEPAGAVAAARYELAMDLLEDLRRIDTQMREAMRRLTVAVKASGTTVTEVFGVGPYVAGTVIGYVGDVARFADRDHFAAHNGTAPIEVPSGGHKVFRLSRRGNRRLNHAVHMAAVTQVRSRHSEGRAYYDRKIKEGKTHKEALRCLKRRISDAIFAHLVAAAKRKAEATKPEVMNAEAATPEAAEAGPGGQMGNGSIASVTGSHPEHRLFGEATPGPLSNIRPKATPVRPKTPPRVEKKTRKAS

SEQ ID NO: 131705 - protein, 404 aa, unidentified
MLFVGVDWAEDHHDVCVMAEDGAVLAKRRVPDSVAGIGELHALIAEHADDEESVVIGIEVDRGLLVGSLVSAGYEVFAINPMASARYRDRHAVSGAKSDPGDAKVLADLVRTDRHNHRPVAGDSHLAEGVKLLARAHQNAIWGRQRQVNALRSALREYYPGALEAFGTDLASTDALAILEIAPTPELGRGLSRSKIAAALRRGGRQRNIEKRAEEIQVVLRAEQLEAPVLIANAHGLVTRSAVTLIGTFNDQITELEAGLAEHFEQHPDAKVVLSLPGLGTVLGARVLGEFGDDRTRFSNPKSRKNYAGTSPITKASGHSRVVLARCARNRRLGDACDQWAFCALKPSPGARRYYDELRARGKTHHQALRQLGNRLVGILHVCLERGVLYDEIIAWPTESEIAA

SEQ ID NO: 131706 - protein, 401 aa, unidentified
MVSDFMKGRYNLMKIFVGIDIAKLNHFAAAISSDGEILLEPFKFTNDADGFQLLVSKLESFDKNSIIIGLESTAHYGDNLVRYLVAEFYQVCVLNPIKTCQMRKNNVRKTKTDKVDTFVIAKTLMMQDDLRFITFFDLDMMDLKALGRFRQKTIKQRTRLKIQLTTYVDQVFPEIQYFFKSGLHQNAVYALLKEAPSPKEIASMHMTHLANLLKVNSHGHFTKEQAKELRVLAQKSVGANDSAISIQITQTIQQIELLDSQLEKTEAEMTDIMKFNDSVIMTIPGIGYINGGMILGEIGDIHRFSNPNKLLAFAGLDPSVYQSGNFQAKTTRMSKRGSRVLRYALVNAAWNVVRNNATFKAYYDAKRAEGRSHYNALGHCAGKLVRVIWKMLTDEVEFNLE

SEQ ID NO: 131707 - protein, 351 aa, unidentified
MKPEMSVLGIDIAKRVFHAVGMDERGKIVLRKRLSRHDLMPFLAKLPPVRIGIEACGGAHYWARRFREHGHEVKLMAPQFVKPYVKSNKNDSRDAEGIAEAVTRPTMRFVPIKDVDQQDIQALHRVRERLMGERTALVNEVHGLLHEYGIVIPKGVSKFRQAVVGKLESEKDKLTPLSQEMFWKLVEEFAALEAQLAYYQEKLDTLAQSHPECQRLMTIPGIGPLTATALVAAVSDASAFKNGRQFAAWLGLVPRQYSTGGKERLLGISKRGDTYLRKLLVHGARATIRWVGLKTDRRSQWIRQLVERRGKNRTAVAVANKNARIVWALLTSHQDYQPATSSGEQTRVSAA

SEQ ID NO: 131708 - protein, 386 aa, unidentified
MKRNDLSRSLVAFDQASTMVAVVELSFRSWLLAGLVPGLTRQPLKKLGPDAQALLTLLRRWQGEATKAGSTINRIVVAFEAGRDGFWLARWLRARGIEAYVIHPTSIPVSREHRRAKTDRLDTGLLMRAVIGWLRGEPKHCSMAAIPTIAEEDARRPNREHQTLVQERTRIVNRMKATLIRFGIRTFKVKLRKASDRLAALRSPEDESLPPNTVAELRRDMARLQLIRDQIKVIEEARLQQLKHAPRKGTHPMLLMLAEIIGVGVETADMLVHEVLSRKLRDQRAVARYGGLTGAPDESGTKRREKGLARAGNARVRRGMIQLAWRWLTHQKNSELAQWYQTRTTGAKPAARKTMIVALARKLLIALWRYVTTGEMPAGVTLHPAT

SEQ ID NO: 131709 - protein, 387 aa, unidentified
MGVIIGMDPHKRSATIEVIDERAGVLAAGRYGTDKAGYAEMLRAGRKFEDRVWAVEGCNGVGRHIAHRLVASGETVLDVPARLSAQVRVFATGNGRKSDPVDAHSVALAALRSPRLVQVEVSPDLLVLGMLADRRDELGRARTQTINRIHRLLLELIPGGAKQFLSAAQARALLATTRPRDIVGKTRRRLAAELITELEAIDRKIKTCKKEITAHVQAQGSTLLQLHGIGPSSAARLLADVGDIRRFASRDHFASWNGTAPLDASSGQQLRHRLSRAGNRRINRALHIMAIVQLRNATEGRAYYDARKAAGKTSMEAMRCLKRRLSNVVYRQMLHDQHNRQVTGPGGHSGTTLKSSVTDLTPDIGSSDKPLPGPAAPQPRTPVRAAS

SEQ ID NO: 131710 - protein, 422 aa, unidentified
MLEETQDTEEIIARVAALDIGKAELVCCVRVPGARGSGKRLQEVTTYKTMTRSLLVLADRLAGLGVTRVVMEATSDYWKAPFYLLEAQGFAVWLVNARDVKHLPGRPKTDRLDAVWLAKVAERGMLRPSFVPPPAIRRLRDLTRYRADLVAVRTAEKQRVEKLLEDAQIKLSVVASDIFGVSGRAMLAALIAGERDPKALAQLARTRLRAKRSQLEEAFTGHFSDHHAFLLQTMLARIDQASADIAELEAKIDQEVAPFAPAVDRLDEITGVGRTAAQVIIAEIGLDMARFPTPGHLASWARFAPGVKQSAGKTKGKATTGHGNRYLARVLGEAAVAAGKTDTFLGERYRRLAKRRGTKKAIVAVGRSILIIVWHLLADPTARFHDLGAGFYDTRINPERAKRNHVRQLEALGYKVTLEPAA

SEQ ID NO: 131711 - protein, 413 aa, unidentified
MPMPKIVYPICCGIDVHKSFVVACIAKTDATLVTTYSNPKRFSTFTGDLRRLAKWLADNNCKDVCMESTGKYWIPVWNILEPTCNLVLSHPKYLKAIKGKKTDKRDAKWIADMFKHDLLNGSFIPPAEIRQLRDLCRYHTKLTSYTTGEKNRAQNCLTVSNIKLDDVFSDVFGKSASAITARLLENNEPFDVSPFVHKGCKKTIEEIQAAVDGIICANQAEKLRIIRSHMDSLALCKANLESEILSVAEKFLPQINLVSTVPGIQSFSAVSVIGEIGADMSVFETSRHLCSWAGLAPQNDNSAGKKKTTRVSRAGVYLKPILVQCANAAIKSNKHPEVRNRYNAIKKRRGHKKAIIAIARMLLTAIYNILKKNEPYNAELYRQSDKPPVQREVTVEQAIFILQRQGYLVTASI

SEQ ID NO: 131712 - protein, 327 aa, unidentified
MNREKSMSAILGIDVAKSKFDVALYRDGKYKHKVFDNNPAGFDTLAAWLQQHNVPEVHACLEATGAYGDGVARFLFEAGHTVSVVNPARIKAYGKSELLRTKNDKTDAKLIARFCEAHKPPAWRPDPPEIEHLRLLGRRREALIGMRTQELNRLGGPDYAVNESVEKVIAFLNQEIEQISTSIKEHIGKHDGLRKKRELLKSIPGVGEVTIEAILSEINGFEGFDTVEKVVAFMGLSPKDHESGTSVKGKPKLCKIGNARLRKVLYMPTLSAIQHNPFVTALYNRLMAKSKNGMIIACACMKKLVHIIYGVIKTGKPFDPAYNIKTA

SEQ ID NO: 131713 - protein, 346 aa, unidentified
MTIVEATRSVVGGIDTHSQVHVAAVLDDLGGLLGSDAFAADPHGYAALLSWFCSFGTLSKVGVEGTGSYGAGICRFLMRAGIEVVEVDRQNRQARRNAGKSDPLDAVEAARAALSGKASGRAKSRDGWVEALRVLLVAKRSARSARVKALTQMRQVTYSAPDELRTRLEGLSISAFVSTCQGLRASRTRDRVLAATKASLSSLAHRVAGLEAEIDELDAKITPLVRSNAPKLLAVGGVGIDTAASLLVAAGDNPERLRSEAAWAHLCGVSPLEASSGKVTRHRLNRGGDRQANCALWHIVITRLASDPDTQSYMERRVKEGRSKREAVRILKRYVAREVYRVLPRV

SEQ ID NO: 131714 - protein, 351 aa, unidentified
MFFAGIDAHTRYVVVVIINKMGERVAGPTRVKVSHPERLLEVLAPYHPLDAIMETSSSWPWLHELLSGAGVHFVLAHARRLRAIAEANYKRDDIDAELLARMRLAGLIPEVYPTPVAQREWATLIRHRTTLVTQRTALVNRIHAQLHMRGLSLERGELLTRAGRQWLRTEAWPHLGLEQRALVRSHLRVIAGLRPLIRALDRHIAQVAETIPQAQLLRTIAGIGAHRALVICAEALPISRFRTPGHLASYAGLVPTSKQSGERRVRHGEIPAAANRWLRGTLVRAVVSHVQHAPDSWLSRYYVAQKARLGWPTARVAAARKLARVIHAMLRTNSCWKNDPVRGELEETHAA

SEQ ID NO: 131715 - protein, 431 aa, unidentified
MDEVTDEPLYRDRVCGIDIGKAGMVATIRVPSDRDPARRAAETRSFGTTKNQVLALADWLRCWQVPAVVMEATGDYWKGPFYRLEAEGFDCVLADAKQVKHLPGRPKHDPGDSRWLAACFERGAVTPCFVAAPEFRVIRLHTRYRRDLTEERTREKQRAEKLLESAAIKLSSVVTDLHGVTGRDIMDHLIAGERNPKTLAQLARARARRKITELEQALEGAEFFTAEHAALLSAMLGRIDQATAEIGRLTAVIERLLAPYEEQLTQIESMPGWGRRSAQDAIAETGADMARFPTGAHLASWAGRTPLDNQSGKRKGRSKSKKGNRYLAAITGETAVAAGKTQTREGARYRRLARRRGTAKAQVALGNTQLKVYHALLSHPGTRYQDLGHDYYERQRDIRRQIAHHVGKLGALGFEVTLARLPDPEPTDQAA

SEQ ID NO: 131716 - protein, 393 aa, unidentified
MTVVIGVDPHKGSHTAVAIDEHEQQLARLQVRSGPRQLEQLLGWAAEFDDRVWAVESAGGLGYLLAQQLIGANERVLDVPPTLASRVRVLATSKSQKTDSHDALSIAIAALRARNLRPVERADHAVVLRLLAKRHRDLGRARNRTACRLHALLIELVPGGISKEITVNAAQGLLDRVAPADPVAQIRHDLAAEHLDDLRHLDGQMRASKRRLETAVRASNTTVTDIFGVGPVVAAMVIGHTRNVDRFADRDHFAAYAGTAPIEFESGGRSIRRLSLRGNRQLNHAIHIAAITQIRHGHSPGRAFYDRKLAAGKTKKEALRALKRRITDAIYRQLRADAARQHAGPGGQAGTTHQSSVAGFEPRTPTLRKNHSRTRPNARTRPTPTPSAAAAAP

SEQ ID NO: 131717 - protein, 342 aa, unidentified
MDRLSPVTRICKVGFTMENELHFIGIDVAKAKLDVDILRPDGRHRCKKFDNTLSGHEALVRWLRGHDVNRAHVCMESTSTYMEDAAAYLSDAGYTVSIINPALSKAFAQSEGLRSKTDKVDARMLAHFCREKRPSAWEAPHPTERALKALVLRHQALTEMQTQEKNRRETAPEVQLASIDILLGCLSAELARIEKQIKDLTDNDPDMKRRRKLLNSIPGIGEKTAAVLLAYTGLRLKFGTARQFAAYAGLTPVQHESGSSVMRASRMSKAGPVQLRKALYMPALSALYHTAWGKAFRKRLEESGKRAKVIIGAMMRKLAQVAYGVLKSGKAFDASQHELLIA

SEQ ID NO: 131718 - protein, 402 aa, unidentified
MTYDYVIGMDVGKYFHHACVLDIDGTQVLSKRINQNEQSLRALFSAFSAYDHKVLVVVDQPNNIGRLTVAVAQDIGIDVRYLPGLAMRQLSRIHAGNAKTDIRDAYIIAHAAKNLPESLRSVDRVEEAFLQLKVLNGIDEDLARSYTRLINHIRSALVGCYPQFEQALRGQIIHRKWVLHLLARYGGPTKIKRLGKAKAAAFARRYKARNPEPVLDAIFAAISEQTVTIAGAHYAEMGVAMSAKDALLKLEHRQQIEKEVIELINDIPHTQFLLSMPGIGPKTAAQILMTAGDMSDFPSAGHLASYAGLSPRTNQSGTSIMSNSLNRAGNKKLKNALWQSSFASIRFHERSRQFYERKRREGKRHNAAVVALARRRLNVLYAMMRNHEHYHDPAPSQEDLAA

SEQ ID NO: 131719 - protein, 450 aa, unidentified
MARRIKAAVPAMTTTAAAITLTTGALTGALTGALTGALTGALTGTLAGTAAAEVVKKEAVVYAAWIGLDWSDKKHAWSLCTADGKRRYGQLKATPEAIGLWAAELAREFSGRPVAVALEQTRGALTGMLCKYAHIVLPPVHSTTVANYRKTFTPSGAKSDPRDSALILELLMKHPEQFQPQPQDSVATRSLQFLTEERRKLVDQQTGEVQRLTGWLKQVFPQILEWFDDVSIPMVADVLKRWPVLEKLQKASRKTLEDFFRSHNSRSEEKIAARIAQIRVAVAATHDPAILQTAGLCIQNCLREMELKRGAIAAFDRLIAENLSEHPDRFIVESFPGAGPVLEPRLIAAVGTMRERFDSADSLACFAGIAPVTESSGKDCWIHWRWNCPKFIRQTFHEWASCSIQHCEWAHQLYEKKRAAGKNHHSAVRAVAFKWIQHLLPLLARPRSLL

SEQ ID NO: 131720 - protein, 370 aa, unidentified
MGEYSEAYVAFDTSKTKHAVAIADGGRRGEVRFLGDVASSPARVERLTRKLAERYDKLHFCYEAGPTGYGLYRHIRELGHDCTVVAPSLIPKKPGERIKTNRRDAVTLARLLRAGELTAVWVPDAIHEAVRDLVRAREAAAQDLRRKRQQLLSFLLRHGRIFDGRQHWTLAHRRWLAGQSFAHPAQQIVFQDAIEAIEEALARLRRLEQQLVAIVPSWSMAPVVAAYQAMRGASFLVAVTVAAEIGDLRRFDHPRQLMAFLGLVPRERSTGDTVRRAGLTLAGNRRARRVLVEAAWSYRHPARVSETLRARLEGLPKPVRDIAWKAQIRLCARYRRLSAAGKKLPVVIAAIAREMAAFLWAIARQVAPVA

SEQ ID NO: 131721 - protein, 378 aa, unidentified
MPESTTLDVGMDIHKESMAVAYVAQEHGAEVIYLGTIGTRHADIDQLTRQLQAKATPLVFVDEAGPCGSWLSRYLTKKGYGCWVVAPSLIPKKAGDRVKTDRRDAVQLARLMRSGDLTPVDVPEVEDEAIRDLSRAREDAVRDLKAAKFRLNAFVLRHDSRYTGRASWAPAHLRWLSDVVCATPAQQLVFQEDVRAVNAPTERLQRLEQARQEQVTSWRRPPVVAALEGLRGVPCTVAVTLVAELGDLTRVEHPRHVMTYLSLIPSAYASGERRQQGSITTAGNTPARRALVAGAWASRDPANVSRHLPLRLAQLPKPIQDLSWQAHVRLCQRFRRLMARGTHANQVVVTMARELAGFLWAMAKAVTVTPSRQKIDRV

SEQ ID NO: 131722 - protein, 341 aa, unidentified
MKSTTIAVDVAKEVLEVAVSVRPGQVSEQKRLSRAAFMKFCTDQPPATVLLEACGSAHYWGRRLQSIGHRVVLLPPHATRPYVFRNKTDRTDTRGLLEAFRNEDIHPVPVKSVSQQALTALHRLRSTWLATRTARINTVRGLLREFGCTIPVGAHHVLAKTWDLLADPESGLPDALRPGLAAACTEIRDMEGRIRVVEDQLQALADQTPAVARLRSIPGVGLITATALVAFVGDIQRFPSGRHFASYLGLTPRERSSGLVRRLGAISKRGDVYLRMLLIHGARAVLWAAKKRPTPDRLRVWALHLEKLRGHNKAAIALANKLARIVWAVWKHEVDFREVAA

SEQ ID NO: 131723 - protein, 391 aa, unidentified
MTMYFVGIDISKYKHDCCIISAADQKVVSKFTFKNDKSGFEQLTLILNSLSTPEDIKIGFESTAHYALNLELFLENANHSFMEINPVLIKDFKKSQTLRRTKTDSIDCELIARWLMTVEYKPHSKGFYHAYSLKSLTRLRDRLVRQRSFYLVKITNVLDHTFPEFKPFFQEHLSKTALYLLENYGSAEKMARMNSASYEKLRSISRGKFSPQQFIRLKELAANTVGVNNSIFDVELNSLLTLYKSLVAEIKTLESEINRLVDEVHPHYMSIPGIGPISAAIIYAEYGDISNFSSPNQMLAFAGIEPSVHESGTEAYNGRMVKHGSSQLRYVLINCCLPLIRFDVTFATYYARKRSENKPHRVAITHVAKKLVRVIYALESQDIDFDPKKLR

SEQ ID NO: 131724 - protein, 377 aa, unidentified
MLNTKTFIKTADKLFIGMDLHKNTSTFVVKDKEGKLVNSAKVLTDKNDVTRYIYSLKRNNGNKELSLVVEPVSQWYYYADLLEALDIDVHLAHPMNVKAIAHARIKTDKIDAGVLADLLRTNFLPEAYFAPAEVRSWKEQCRFRASVINLRTQVKNKIHAILFKHSLRHNFSNLFGKSGRRWLAGLDLKEPFKGNLDKYLLLIDQLTEQVVRAEEIITNTVINCPQAYLLISIPGISYCSALTIMAEIGNIDRFISVKHLQSYAGLIPSTYNSGDKQIHGKITKRGSKWLRWIMIEAAYHQMNCKRIPGFGSYYNTLKKRKGSKTAAVATARKLLAVVWRLLKDNRPYEAIDPRCWKSRPIASKYSSVSTVVNTTED

SEQ ID NO: 131725 - protein, 362 aa, unidentified
MNTRVASFAGKRVYIGLDVHRTFFVASSICEGELVKRCRMPASSEAVISFISKYFPESEVETCYEAGFSGFWLHRELEASGISNLMVHAAAIEVAANNRVKTDKRDSLKMATQLSAGTLYGIRVPTLQEEYRRLLFRTREQLMGAKRRAQIQIRMRLHQFGLFPAEIKRVITLKDVKKILEDLEGELKFAIELLYDQWVQLVEKIKQLEQRLKDQAKLDPLEEIYRSVPGIGLLTARALSSELGDMSQFRNIRGLYSFTGLTPGEYSSGEKVHRGRISRQGSPRLRHLLVEAAWKAIRKDDSLRKSFENIAGRAGKKRAIVAIARKLIGRIRATLRDSKLYEVKYEHKKAAELSTRIDETEK

SEQ ID NO: 131726 - protein, 506 aa, unidentified
MQKTKQCKQLSLSDLIRNNGSFVEDFNVIPDDSDSEYVKDYGIGIDCHSKFIEVCIRYRKGKQIQKAQAHFSTAWDDLIAAREWCLNILKTKSDPVPDLSEPLHYLVESTASYHMPVCMAFDGNPTIINPTIAGATKRKTDVLDSRLLALHDQLNIWRECYIPDEDVKTLRVMIAQRDRYLHDATVAGNRINNIMTRFGFTVGRNGSVVKDSTIRAIVEDQISDAPSKLEGLCPIPIPMEVRVVLREEYEKYDHYTAKASECKAKIFEKARSMEWETDTSTLPGTEMIRILSTAPQVGELTAIIWLARVVTPRRFRNAKALSAYCGLDPSLKISAGKVTSTTMRSGNKALHKALNMSAHRLIHRHSEMFGIWGFNLQQQTGKKKKAANAVARKLSVAMYYMMKTGTEFTYENYHSIRNIDVFDIPVEDLVLINPDFKRYIRILKENEIFTTVDLATAYISCSLGSCHGLGKKFYGLLKDFLDHHVTYKEMYEEIQAKLNKEDIAHE

SEQ ID NO: 131727 - protein, 384 aa, unidentified
MNTKLPEGARIIGLDLAKKSFVGCILSGEGFVNRQIFHGTMSQDETGWQQINRKIKLNDLVLMEAGTATFSLARYLFSHSDASQVVVLNPGMLRIIWMSQKKNDKADATKIACIARDMAEEAWPTVTVPSEEEQAERSTVSSYVFITKQETQVVNRLYALFNSLGFPEIKRSVVRDNPELRRIVAEKLLTHYPKALQEAHLMFDQLDLIQLQREIRLENLREICLDHPKEALSWFSLPGIGLINAATLVAFIGNGSRFSNGHQLLNYAGLVPKQDQSGPVDKKLGISKQGNRVIRRNIVQGAWTVSTSMKPTCPITKYAYRKKAEGKTRQKVAIAVANKMLRTGLALLHSGKLYSPMIADGRDKLKAKLRYYKTEALMNFIPQD

SEQ ID NO: 131728 - protein, 436 aa, unidentified
MRGCRCSMIMGFTKPIEHFNLQRKKVITMNTLYVGIDVSSKSNVIYLMLPNGDKHSNFSVANSHEGSTQLVKRILSALTSHSLDTVLIGLEATSVYSDNLVYFLREDATLAPFNRKIHVLNPKQVKKFHDSYNDLPKNDYVDSFVIADCLRFGRINKEVYLGDYRYKALQNLTRARYFAVQNLTKEKQRFINVLFKKYSTMTQEKVFSNAFSTTALAVYDEFESAEALANMDLQELTDFIIEKGKNRFPDPDAVAKAIQKAARSSYRLPKTVNDSVNQVLSISITSMKALESQIKEFDKAIKAQMELLPNVLISIPGIGPVYSAGIMAEIGDINRFDNQAALAKYAGLAWKQHQSGGFESEVTRLIPSGNRFLKYYLCEATFSLVRCDKEYSDFYHLKYKEVNRCQHKRALALTARKFVRLVFRLLKDNRLYCPAK

SEQ ID NO: 131729 - protein, 322 aa, unidentified
MSVSVLGIDIAKQKFDAALLVEGKTKHKTCKNSAEGFEVLRLWFEKQGVQEIHACMEATGNYGEDLAIYLHKAGHMVSVVNPARIKGFAQSELLRTKTDKLDAALIARFCLAMKPGAWIPPSPEIRSLRALVRRVDSLIDMRSQEKNRISTAHQSVSLLIKEHIAYLDQEIEKIRKQIADLIRKDPNLKRKKDLLDSIPAIGKVTIPHILAELDDLEKFNHVSELVAFIGLAPKETLSGSSIKGKPRLCKIGHARLRKALYMPALVSIQCNPVMIAFYNRLKDKGKNGKVIVCAIMRKLVHVIFGVLKSGKKYDPNFQPISA

SEQ ID NO: 131730 - protein, 335 aa, unidentified
MERYVGLDVSLKQTSICVVNQTGSVMREGVVDSDPEAIAAFVRSQAPGVVRIGLETGPTTTWLWTELKRLGLPVICIDARHAKAVLKMQINKSDRNDAAGIARIMQTGWFKEVRVKNLDSHAIKALLTSRALLVKIKRDLENQIRGLLKNLGLVIGRAKFNVFAVRAGELITDRPELVAAVRPLLAARLSIEQQIGDLDRKVLKLAREDAQVRRFMTVPGVGAITALSFKATIDDPTRFKRSRSVGAYVGLTARRHASGEVDWSGRISKCGDAMLRMYLFEAANVLLTRVPKWSALKAWGTKIAKRCGLRKAKVAVARKLAIILHRLWIDGTEFN

SEQ ID NO: 131731 - protein, 353 aa, unidentified
MKLEKHIGMDVHQATAVVAVLNGDGKVVLGTIVATEASAIVRLLQYLSGPRQVTFEETTQAAWLYRSVRAFVSEVIVCDRRRNRLLSEGSKGDKPDARKLAELLRAGLLRSVYHGHEGTQKLKELVRGYETLSVDTERTMLRIKALFRARGIRTPGTSVYQAKQREHWLGFFNEEGVRQRATWLYEELDYLRGLRKQAKRAMLVESQRHRATSLLKTIPQLGPIRSALIVATVDTPHRFRTKHQLWSYSGLGIVTHTSAEYEIQGDRVVCRRKPLATRGLNDNFNRRLKNVFIGAAVGGSQIEPYRKYLDGLQQKGIRAEMARLTLARKIAAIALRIWKKGETFDSKKLKWTT

SEQ ID NO: 131732 - protein, 337 aa, unidentified
MKTTLIGIDLAKSIFQVCGVNQAGKRVFNRQVRRAKLMELLIQHPDATIAMEACSGSNYWGRELQSRGFQVKLIPPQHVKLFVKGNKNDRNDAFAITEAARRPNLRCVEPRTLAQTDMIQVHRVLDRMTRQRTALINQIRGLLNEYGIVVSRGKEKLLAALPDLLEDANNGLTSSSRALYQAMVDEWRLLNEAIDRVEKVLRGQAKADEAAQRLMKMKGVAERIATATIAQVGNGHGYQNGRHFAANLGLVPKEHSSGGKQRLGGITKRGNRYLRRMLIQGAWSVIRNVDKNDDRMSRWARQLIERRGKHKAVVAVANKMARIMWSMLYHQTEFRAN

SEQ ID NO: 131733 - protein, 320 aa, unidentified
MSGYIGIDVAKSELVVAISGIDGVRSFPNSEHGHAEATKWLKKLDAPPGLIVLEATGGYERGITAALGNAKLPVVVVNPRQVRDFARGMGKLAKTDKLDAAVLAEFAARVRPEVRELPTEEQEDLRELLIRRDQLKQMLLAENTRLLQAAGKRYHRRRKEIKSHVSDLEKRMRMLESDLDDTLRRSSLWREHDDLLQSAPGIGKQTARSMIGFLPELGTVNAAQIASLVGLAPRNRDSGMMRGQRHIGGGRSRLRATLYMATLAAIRTDPVVKGWYEHLLAAGKPKKVAIIACMRKLLVILNAMTKTNTRWQPQTQPLPA

SEQ ID NO: 131734 - protein, 341 aa, unidentified
MSNVCMIGIDLAKNVFQVHGCDQFGTVVLRKKLRREGVIAYLAKQPICTVAMEACAGSHFWGREIGKLGFEVRLIPPAYVKPFVKRQKNDAADAEAICEAALRPTMRFVAVKSKESQAAAIVFRTRDLLVRQRTQTINALRGHLAEFGIVVAQGPAHVGKLVTAVADQTNKLPDLARPILGVLIETMEALNTRIAVLNVEITRRSKEDDVARRLMTIPGIGPLIATALPALAPAANSFKRGRDFAAWLGLTPLQHSTGGKQKLGRTSKMGERTLRRLLIIGASAVVRWAARKGAVPGSWLESMLKRKPIMLVTVALANKTARIAWALMAKGGVYQAPVAVA

SEQ ID NO: 131735 - protein, 346 aa, unidentified
MEHYAGLDVSLKEISICVVDRDGKTIARGACPSDPESVAGWFRNRSLMPRRIVHESGNLSIWLQRGMTRLGLPAACIDARKAHKSLSARLNESDASDAEGLAQLARTGWFTPVHIRSEDADRLRSLVGARERLIRLRKDLEGHIRGVLKTFGIRMIGIGQGKQRQAFRDQLAAAGKTDPVLRAIADAFIATHAKLCQVADDLDKAVRKTAKVHPVARRLMTIPGVGPVNGLSFIALVDDPARFSRTSDVGAFLGLTPKRHQSGEMDWSGRVSKCGDGAMRGLLFEAASSVIHQVKRFSRLKSWAVRLAGRRGFRKAAVATARKIAVLMLTLWKNGTDYQWTKEATA

SEQ ID NO: 131736 - protein, 338 aa, unidentified
MVNPTTLPDRTLEQACTMVLFMALELSDKKWKLALSDGTKRRIVTIAAGDLVALGEAVAKAKARFGMHGVVPIVSCDEAGRDGFWLHRYLLHCGVANVVVDASSIEVNRRARRAKTDRIDVEQLLRLLIRYHHREKRVWSVVHVPSVEEEDARRLHRDLERLKKERTGHRNRIQALLVSQGSRLQPRHDLLERLEAARLWDGSALPPDLQAEVRREEARLRLVDEPIRALEAEQARRLEAAATPCHQQIAHLMRLRALGLTSAWVFVMEYFGWRQFHNRKEVAALAGLTPMPYASGDSARDQGMSKAGNRRIRTLMIQIAWGWLRYQPHSALSIWFIA

SEQ ID NO: 131737 - protein, 334 aa, unidentified
MKSDIVHIGVDVSKEKLDVFVPARREGMRPTMREVGNCVAGFREIRDFARKAEATVCVEPTGGYELELIAFLHKFEVPVAYADAMRVRQFARAEGCLSKNDTIDAALISRFADKIGVRVLEAQEVEAVELKRKAKFRQAMMDSRTAMANRLETEIDPEMRALLKEQVKHMDKVIDKAERLCLEAVENDKRMNTLRERFTRVGGVGDLTAIAILAGLPEIGTLPDAKLNRLVGIAPEERQSGTKEWQRRIWGGRGDVRNALYMASVASIIWNSTLGTYYRKKRAEGHPHKWAIVPTMRKLLSLLNRIARDPDFTPRPEPASTKLNARVGRKKIVA

SEQ ID NO: 131738 - protein, 330 aa, unidentified
MNSICLSTDQLTAALPVLGLDVAKKSVQAELRTNGKRVRFGFENNAKGFAQLARMLKEQGAPKVWAGLEATGPYSHALALWLHGQGHRVSLLNPRRVKQYARSAGNRNKTDLLDAAIIADFVCAHLPAAWQPPTLEVAQLQALVRRREELSLMLQAEKNRLEGVASHVRCSLERIIDTLSAEKTRLEKLITQQIRSHQQLSRDHQLLCTIKGIGSLTAAILLAEMARPGQVERARQAAAHAALAPRREQSGTSVRRNRALGKEGNRYLHKALYMPALVAIKYNAPLRHFASRLRTAGKPKMSIVCAVMRKLIHIAFGVLKHQKPFNPSLA

SEQ ID NO: 131739 - protein, 317 aa, unidentified
MTQTSITTAGIDTSKARLDIAVHGRIERWQVANALPGWRALAANLTRAGVTRIGIEATGGYERGVVRHLQAAGFTVLVLQPIQVRAFARVHLRRAKNDALDAVLIAACAATMNEPRIAPDRRLTELADLLTFIEQIEEDIARLKIRLEHIGEPRLRRMVLTDVARLKARRLAQLRFIAKRLRAHHDLAARLELVLSVPGIGERTALALIIRMPELGQVSREEAAALAGLAPFDDDSGKHKGQRHICGGRGRLRRSLYAAALPAAFRWNKSLISLYGRLIARGKAHNAALIACARKLLIYANTVVARGTPWVENAAQL

SEQ ID NO: 131740 - protein, 342 aa, unidentified
MTFVGCDLHTRMQQVAVLDTRTGEVSECQLAHDGTAVEEFYTALPRPVTIGIESTGYALWFHTLMQRLGHTLLVGDAAKIRAMVVRKTKTDRRDALHMLDLLRHDRFPTIWVPDPATRDLRALLTHRMRLVRIRTMVKNGLHAIALNYRLARGSKLLRQAGLAQLQALALPPHTAQRRDQSLELLAGLTTQIRELDDAITTAALAHPDAPRLITHPGVGALTALATIVVLGPVARFHDSKHVVSYVGLAPALNASADKYHLGHITKQGSTLLRFALGQAASHAARMDADLKRTYFTLVHRRGRPKAKVAVSRKLLVRLFIMLRDQIDYDEFRRRGRTAPASA

SEQ ID NO: 131741 - protein, 335 aa, unidentified
MNTVAIIGIDLGKHSFHVHCQDKHGKAILRKKFTRNKLFEFLGSTPSTCIVMEACAGAHFMARKMSALGHEAKLISPQFVRPFVKSNKNDFIDAEAICEAASRPSMRFVQPRPEAQQAMRALHRVRESLIKDKVKTTNQMHAFLLEFGVSMPKGIAIIRRLSGVLAENELPPYLVQLLMRLHAHYLYLVEQITELENELTQELFRDDTSQRLMTIPGIGPITASVLSSQLGDGKQYAKSRDFASSTGLVPRQYSTGGKNTLMGISKRGDKNLRRLLVQCARVYIQRLTHQTGRLAEWVKNQLQKKHSCVVACALANKFARIAWAITTQRTEFNPS

SEQ ID NO: 131742 - protein, 417 aa, unidentified
MVNDVQWFVGIDWATQSHCVCLLDAEGRPAGQRDFAHGGAGLTELRDWLLEKTKAAPGQIAVAIETPHGPVVEMLLEHGFVVFAINPKQLDRFRDRFTVAGAKDDRRDAHVLGSSLRTDCAAFRQLAADNPVVIELREWSRMAEELQQERTRLANRLRQQLWRYYPQATKLTDDVADDWFLALWQKVPTPDSAAKAGEKAIARILGAYRIRRLDAATVLKTLRETPLLVAPGTTEAACVHIRSLAARLHLVNQQIKEAQQSLDRLCAKLEEEESPAGQNPEQCDVTILRSWPGIGRVVLATLLVEATEPLRRRDYHALRALAGVAPVTRQSGKQRFVIRRLACNRRLQSAVHHWSRVALQHDAATRRRYDALRQRGHGHARALRGVGDRLLFALCATLKHQMPYDADHNSAKTPAAG

SEQ ID NO: 131743 - protein, 323 aa, unidentified
MNTNTLQNINIGVDTGKSQLDIYIRPFDVFFTVPNNEKGIKQALATIKKHNPQRIVIEATGRLEMPFVLACTEAKLPIVRANPVHIKRFAGAIGRRAKNDRLDAQLIAHYGEAIKPDLTVIKAKNIRLMSDLVIRRNQLLAMQTMEKNRIQILPKHLHSTMTPILTAIKNQVSKIENKLVKLIEDCPEYQTKNTLLQSVPGIGNIAAASIISNVPELGYITNKQAASLIGVAPITRESGRYKGKRVIQGGRAQVRTVLYMAMMSAMQCNPVFKDTYARLLEAGKPKKVAIIACVRKMVVILNSMLRDGIMWDQNIAQNKGLTP

SEQ ID NO: 131744 - protein, 409 aa, unidentified
MELFVGIDWAEDHHDLCVMDTAGKVAAKGRVSNDLAGLARLHDLIASAVPDGVEDEDVEVVVGIETDRGLLVRALVVAGYRVLGVNPLAVDRYRDRARVSGAKSDPGDARVLADMARTDAHQHRPVAADSELADAIKLVARAHQSAIWSRRRLANQLRSALREFYPAALEAFDDLCHPDAIAVLAIAPTPERGRALSRSKIASALRRGGRKLNIERRAEAIQAALRADHPAQPAAIADAYGAIAESLTKVIEAHTRQISELDAVLTEHFGRHPDAAILRSLPGLGVVTGARVLGEFGDDPTRYQSAKARRNYAGTSPLTVASGTRRTVRARHIRNRRLADALHWWAFNAITRSPGARALYDHRRAAGDTHSGALRVVANRLVALLHGCLRTRTLYNETTAWAHRSDLAA

SEQ ID NO: 131745 - protein, 346 aa, unidentified
MHYIGMDCHISNLEFAVIDGAGRLVKAKSVSTSVNNFMQFIRGITPPRVIYMEEGTLAAWALETCIRYGEKLVITDAKKNHWIGSAGQKDDAIDALKLAQLARGGYIKEVRHPVGHRRRFRELMIAYHDTVRSTTRLKNKIKAKFRQNGIQCTGTTVYSETCRAEWQDKLPRETTLMLILEGLWRQLEQSEQTEKDLLAAARDQAKHYPEIKHFEVLPGIGFISAATVSAILETPHRFADKRKVWMYAGSGIMKRSSSGKLYSEKLTTDYNRLLKYTLKQAAEAAIQAKDNPFRHKYLDMTLLRGIAPYRAKLTIARDMLATMWAMWRKGEQYNPEIREKAVCKQG

SEQ ID NO: 131746 - protein, 378 aa, unidentified
MDRATNSTAPADRLFCAVELSKNSWLLGIQFPDRQKASVYPLRGGDSEGLMAKLVAACDRWTKVSGKKPSIILCYEAGYDAFWLARFLRARGIECLVVDSASMQVNRRSRRAKTDRIDLGKLLRALIAWCGGERHVWSVVRIPSVDEEDLRRSHRERSRLITERTAHINRIKGLLFAQGIRGINVKARYRTLRVDKLVTGEGRPLPPRLAQEITREIDRLGLVQQQIAAIEQERDESPTTCKETEKKRAQLLLLKGIGPTGSAVMAREVYYRQFSNRRQVAGFLGLATSPYDSGQMERSQGISRAGSGPVRATMIQMAWLWIKHQPKSALAQWFVQRTEGQNGRIKRIMIVAVARKLAIALWRYLEHGLVPQGATLTR

SEQ ID NO: 131747 - protein, 388 aa, unidentified
MYLVGIDISKYKHNCFIATKSGVPLKEFVFENNLEGFKLFHQVLSELDQGQEIRTGLESTGHYGTNLKQFIVASGYTYLEFNPYLTHQFSKAMSLRRTKTDKVDAKTISNMLGSVDYKTLHTQFYHINELKQLVRDRDDILTHRSKTLVKLTNLLDIIFPEFKPFFNHRLGAIALFVLKKYKSPTRISKLTMNDFDDLRSKSKGRLTYPKFSRLKSLAKDTVGVQSDIYNKRMLVLLRDYEYFDQSLGEIDQEIIHLFNSVNTKLRTIPGLGIIQAATIYAEIGDIHLFSNPQKLIAYVGFDVSISQSGMSEHHGKIVKRGSPLLRKAIWTYALPSLRFIPQLNDYYHKKKAEGKHHKVALTHVCRKLIRMIHHIEYNQIDFDDKNIK

SEQ ID NO: 131748 - protein, 314 aa, unidentified
MKALKTHVAGVDVHKDMIAVTIMLGAGDEDPNIEHFECSTMTDDLRALALVLIEKGVTDVAMESTGVYWKAVYNVWMPMGLKVIVGNATHMKNVPGRKTDMNDSHWIAQLHRFGLIRPSFIPDGVYQRLRLLSRHRTNLVGDLGRVKNRVEKVLQDGNIKWSSIVSDTFGVAGMQILDLIADGVTNAQTLAASVTTKIKRKEDAVKALTNCLTNEHLFVIKELLKQYRSIQAQILEAENEITEKMLPFAHLVDELDKIPGIDKILAMAIIAEASTDMSSFPDERKFAAWAGVASGNNESAGKKKDQNADMATRT

SEQ ID NO: 131749 - protein, 387 aa, unidentified
MKYIGIDVAKDSHMVCILNEKKEKLQTFKIKNSNLGILEFQKKLSKHDTEFRIGMESSGVYHHCILHHLQQKYKNVAVINPQRTKAHRKSLGFEFKTDKIDSYIISDYVKERALSNNILPDKYPLIKQLCRTRTKLIRQKTRLKNRIKGDMHILFPEYAKCFSDMFCNASLSFLKQFTNPKKVSKLTEQKIRDILIKTSKTVSYNHAKKILLAAKDSFGISKQGMDIEIKFAIENLQLLEKQIAILEYKIDYHFEKLFNPLADVKGMNKIYAAGIIAESGDIDYFKNRDQYYNFTGFVPRFAQSGNFESKFNHMNKCGSSYLRHYFFQAAISMKRFNPYFMKLFIKKHVVEKKSKDEAHVYCAKKLCHIVFKLLKSKTRFCPDKLAQ

SEQ ID NO: 131750 - protein, 514 aa, unidentified
MSEGTAISPFSRLSPRLLFEHSAWHIRHIPLTQNFHPQPLAPAKKADWVHAHCARVRSPYAAQDKPFASGFTNPHRNGGDIMLKLNYMSTLFVGIDVSSKTNAVYAMDFEENKYISSSFGNNQPGADQLVTMIAQCMHKHKNLDTVLIVLESTSVYSVHISNFLSASEVLMPYRPYVFCVNPKAASNYRKSYIGMEKTDPTDAYLIADFGRVGRTKKLEPWRGGQFIALKRLTRHRMHLSECITREKTYMVSNLYLKFSELQLLEGDDKPFGSLYGATSSAVLTEFLSPQEIIDMPEEDLLTFLAGKSRNRISDLSKTSELLRKAARDSYRLDKCMYEPLSISLASSFNCIHAYQKEIKLIEQAIEKCINGMNPNALLILQSIPGIGPIWASGILSEIGDITVFHSSDALAKYAGLYWPKGDSGDFTSEDNKMSKAGNPYLRCYLGEAANSVRKHIPEYADFYARKYAEVSKHQHKRALALTSRKFVRLVFGLLAKNQLYTGEKLDAEYNIKSN

SEQ ID NO: 131751 - protein, 414 aa, unidentified
MKKIIHYVGLDVHKNSMAVAIAVEDGGELRSYGTIGGKLADIDKLIKKLEHPEVELRFCYEAGPTGYVLCRHLKKRKYVCEVIAPSLIPQKPSDQVKTNRRDAKMLARLFRAGELTSVHVPDEADEAVRDLERARFSAVKDQRRARQRVKGLLLRQGFAYEGKTSWGPAHLNYLARLKMPHPAQQIAFEEYKAAVTVASQRLQRLSQALEAQLDGWKWKPVVLALMTLRGIQTINAMTLIAELGDLSRFTDPHQLMSYLGLVSSEDSTGDKRHQGGITKAGNEAARRALIEAAQHYRLPARLTPSIQERQHGQTQAVRAIAWKAQQRLHGRYHHLKAKGKTTQVVVTAIARELAGFVWAIACTAMGKAPAARPQPESKTKTPQNSPAPNCQKKTYQLKPTMNYSGSRKSKAAQA

SEQ ID NO: 131752 - protein, 331 aa, unidentified
MEQIYGIDLSQTKFDVNFQDQNGNLKSFIVKNTLSGIEKFLDRIEPGSILCAEHTGVYGELLLFLTNLRNIKISLVSGYQIKHSLGLKRGKSDKLDAMKIREYAERFTDKLHFLAPEIEDLKELREIYSLRAIMVQERKMILTRERGKAFLPYNSILVKQVTNDMLLKMDEQIDKLEKEIIGIISSNEVLNNSYALITSIVGIGKVTSCELIIKTGNFNRIPTARTAASYAGVCPFPNSSGKMVKKSRVSPLSDKSLKSLLFLCARIAVRYNKEYRLYYTKKELNKKHYYLIMNNVANKLLRTVYAIIKSGKPYDPNHICMDPREEIKKVA

SEQ ID NO: 131753 - protein, 424 aa, unidentified
MDRLQQFRELRSTIRGNESILVVGVDIAKEKHYAFFGTAKGRTLKKKLIFGNCIQDFNGLRSLASDLQVQNNLNSCVYGLEPTASYHKPLAEYLVRHGEQVVYVSNVAAKNNRALLDGRWDKNDTKDAANIADLVGQGRCQFYDLAENDVLELRSLLTYRAKLKKQEHGLRMRIRNNLLAQYFPELDKQMPQSGADGLVLDIIANDFDPVQIAKLSLAEFRQQYQMQKRHIVQENRLCSIWEASRESIGCALPEAAAWEGRMLVEQLRQTRTIRRELEKRLKEVGQRSPVYACLLTIPGFGPIVSAMTLAAISDAGRFTSRKQILRLAGLDLSASRSGKTSHAAIPVISKQGKAGLRYALVQAAQIASYSDATIRSYYTNMLKGRELERGIKLKMRVKLAAKMLIVAWTLMKRNEPYDSDHFRI

SEQ ID NO: 131754 - protein, 343 aa, unidentified
MLHAGLDLSRKKIDVCLLSAAGEVVDEWASPPDSDGLRGLAARAVMWGGSVRGVIESMNGARFVHDRLEEHGWEVLIADATKVKGLAPLACKTDKIDARVLATLSARDLVPEIWLPDPSVRRERELARFRLHLVRHRTTLKNRIHAALIAFGHPCPVSDLFGHAGRELLDRLEIPDPWRSNIDVSLELIDDLDLQIATLTVQLKRQGADHRYIPLLVTAPGIGWINAYTIASEIGDIGRFASPAKLCGYTGLCPRVKQSGATDARGPISKHGPKYLRWALFEAALNACKHPYYAERYQQTKRRLGRRRGPKVAQIDLSRRLTEAIWHMLTRNEPFAPAGAPVV

SEQ ID NO: 131755 - protein, 490 aa, unidentified
MSLRSELRGRLWSNHFGWQSLFDVGHAPVGEHWTKSRPADQSLTGHPMSFDRLKRTQRRKRLPGHKLKPSRATLFVQNSKPHLSMKPTYFLGIDAAKHKMRATLSNRSEHVLFEKDLSVEATGLRQLLAAIKRQLNDPEQLLVLIEATGLLHLNWSAALTKAGYAVAVINPLIARRLYTLQNSIRDNKSDPIDARGLCTIGLLHGEKLLVHYRFSLRPEQFTLQRAQSVRKALRSALTNLKKTYQSLMDLSFPELGGLLQLDGVGIRQLLIQAPTPAAIASKRLSTLEKNWMVRPKAAALKALAADSMADPDLAAASGPALVALLQSVAAMEGRLHALDQQIAKLACTAVDPQSKALIETLPGFGPVNAAKTQAWLPIEILHSGSNRKVAARLQAFMGNDPRLRQSGQWKGHTKMSKRGVEMLRTAFFQSAFSAAHNDPELRAYYQCKRAQGKTHEVALSHLMRILTRRLVAVLRSGKPYQSHYNLKNAA

SEQ ID NO: 131756 - protein, 429 aa, unidentified
MSEEKSIELRVSVDVGYRRHSVAMGLSSGEVLEEFEIDHRIEGFEEFFSRIEKQRKKKNCAVAVAMEGYNGYARPLDSMVRQSGYRLYNLNNLKFARFKEIFPAAAKSDRIDARKGLELFQLSDHLPLAKEVLQEVTGTPPENEVLKRLTRRRRRLVNERVRVVNSLQADLQAVCPGLLEITAEASNQWFLNFLLSADTLPQLARLRHSTLLKIPSVGVKSAAIIENWQKRAHFSQEVEWVGEMIQEDAQRCLDLDGKIKRLEAKIAEVAKGSKITKILRSIPGFGAVCTSELAGEIGTIERFASEASLSLYLGMSTLDNSSGKYQGTKTPKHVNTRAKAAMMIALDRHRKYVPESQRYYEKKRSEGKKHNQAIRALGRHLSRIIYRMLKEERDYEIRPEKSNTKTKVASRSSIKTQIRRPKISGKKTK

SEQ ID NO: 131757 - protein, 428 aa, unidentified
MHGKDNSKQITRRQRIKKTTLVIGLDIGCEFNAMCLMNQEGEVLGTYPRIYNSRKGFDYFHQVVEETKAKKGFRSVLIGLEPTGHYWRKIASFAQEKGYEVRFVRTTALRHQRELDESSSAKSDVRDAVTIANITREGKYLDTVIEDGVFRQLRTLVHVRERIQRYNTGCKHALKAVLEDDFPELKGIFWSMKSKGLWAVLEHCPFPEQVVRMGIEKLTELIAQSTRRRKKAQDKAMQVVQAARESIGLKSIGIADRYRVKMYLQEVKDSEEQLKDLEARMKGLLPEIPSARYLLSVPGIGILSCAVLLGELGNPSHFRSPKQIIKYAGYDPQENDSGQRIGRRVISKKGRWLLRKYLYFMSMRAIHRSSFFREYYQRKVQSCNRWGQPLSKKEALCAVAIKLIKVIFALLRDRRIFSIQAPQWALAA

SEQ ID NO: 131758 - protein, 393 aa, unidentified
MLYVGIDIAKNKHDCCILDSDGVVHFDNFQISNSSLGFSTLFANICNCLPQNDLKNVQIGLESTGIYGANLESFLFGKGISVVIFNPLATNLFRKAQTLRKTKTDKSDAIFLAKMLVSGDYKEHLPVSKQISEIKALTRHRHRLVSQQSVLKISINRILDIVFPEFADIVSSIHQKSSYALLLELPNTTAISTCHLTKLTNLLKSSSKGRYDKLKAIEIKQLATTSIGANSPAIALELQQTIRLICNIQAEIDIVDKHIKLAMTEVSSPIVTIPGIGNTLGAIIISEIGDISRFDTPAKLLAFAGLEPSTYQSGNFTATKTPMVKRGSTYLRWAILTATRLVAMRDVTFKAFLNKKRAEGKHYNVAISHAGKKLVRVIFHLLKTDTAFTSQSK

SEQ ID NO: 131759 - protein, 454 aa, unidentified
MAKRKEKAVRRSALLEPNAAGIDIGVQEIYVAVPPDRDEHATRRFTSFTCDLQALADWLQGCRIRTVAMESTGVYWIPLYQILEQRGFEVYLVNAHYLKSAPGRKSDVSDCQWIQYLHSVGLLRASFRPPDAICAVRSLWRHRSSLLQMASEHTLHMQKALSQMNLQIHHVLSDITGVSGLAILDAVLVGERDPMRLAHLCHAFVKTPHEIVAKALVGDYRPEHLFTLKQSLDGYRFYKKLITELDEENARLMQAVPSAGKQLAPMPARTKHTVYQRNGNDPRFDLRSELYRIAGVDLTDVPGVSAITAQVILTEIGPDVSRFRNASAFASWLGLCPEKRVSGGKVLSCKTRKVKSRAALALRMGANSLCRAKGYFGEFFRRMRAKLGTAQAITATAHKIARILYHVLLSKQPYTESIFRLCDEQAQFRAETRLRKQAALLGFHVVPIPAGPRM

SEQ ID NO: 131760 - protein, 344 aa, unidentified
MLYVGVDLHKHSISLCVVDLVGRERKVIERKRFCCDDEEAILAYFARLGPYEAVVEATASYEWFVQLIEPTAKRVVLAHPGKLRVIAESKNKTDKLDAQTLAEFLALDQVPESWRPTPRVRDHRTLVRLRAYVQGRITSAKNKLRWIVASYNADRTDLFSRAGRAYLEQIDLSAADRFAADLLCEELDQHAVRLRTVDKRLKQFAQAAPIAEQEARAVLASIPCVGPVTTEVVLAETGDVRRFGSQRKATAYAGLAPGIRQSDKRTKQLPITKAGSRLLRTALVELAWRLTNKTRRWGLLYERLKKRCGAKKAIVAVARRAWCVIVSLLHSGQAYRPIGEPPAG

SEQ ID NO: 131761 - protein, 353 aa, unidentified
MNYTGIDYHKRYSVACTLDVQGRLLRQARIEHNAPEAFAAYFAALDGPSEAVIEACWNWATLYDLLEDTPGVAKVVLSNPAKNRIIADAQIKNDKVDAKALATLLRGNFVSTVHVPGKEVRQKKNTVRQRLWLARVRTMVRNRIHTVLDRHPRIERPAVKDPFCNQGKAWMKRVELPAPDRKLLDEDLEMHELLERHIRALEERIEEDNAAHADALRLRTLPGVGKVLGPVIALEIDGIARFKTADKFCAYAGLVPTTHSSGGKTSHGRMLPFCNRWLKWAFIEAAWVAIGCSDYFGSFYKRHRVRGKGANEAITITARRLAKIAWKMLTEQRDYSKVPVVNRTLSPAALATD

SEQ ID NO: 131762 - protein, 316 aa, unidentified
MTMVGIDVSKASFDAAWESEGRHHTQCFDYTDEGIKALLAQVGGEAHFVMEATGVYHSRLALALYQGGSPVSVVNPLVIKRYAQAQLSRVKSDKADAQLVLSYAHHTPLTPWAPSSEEVEALRQAHSYLDDLIGERTRLINRQEAHRHQLTPSAFVRQGQARRLKALERDIRACEAHLEVLVKKSFPELYARLLSIPALGPKTAIEMIIITEAFDRFTDIKALCAYVGVSPTTWRSGTSLKGQGHIAKLGQGRMRQLLYLCSWSAKRCNPPCRALHQRLAAAGKPRKLINIAIAHKLLRQAYAVATQKTVFNPNFA

SEQ ID NO: 131763 - protein, 311 aa, unidentified
MATYVGIDIAKHHFDLAVEGQSNVQQCHNDLKGIRHCVKRLVELKPELIVMEPTGGYEIPLVAELQAAGLPVAVVNARQIREFARAAGQLAKTDKLDAQIIARFAAVLQPPAQEALDQQTLAMKALVARRHQLVQMHTAETNRMEHARDKVIIRSIRTILKTLQRQMDDIHRQIRDHIDSQPELKRKQEQLESVPGIGETTASLLLTELPELGRLNRRQIAALVGVAPINRDSGTYRGKRMTGGGRCHLRARLFMPTLVATRHNPTIRNFYQRLVANGKAKMTALIAAMRKLLTILNVMIARNETWNLKIA

SEQ ID NO: 131764 - protein, 350 aa, unidentified
MIIIGADYHPGFQQIAFVDTETGDCGEQRLEHCEGAEKFYRDLATQGKKVRVGMEASGHARWFERLLPELNIELWVGDAAVIRAKRGRKAKTDRQDALHILNLLLKDDFPKIWVPSWENRDMRQLLWHRHRMVQVRTRIMNQLQAVALNEGLRCKKKLWREHGREQLETFRLAPWASRRREDLLQLLDRLNPTIAELTQAIEREAETSTPARLLMTHPGVGPLTALAFVLIIGKAERFRCGKQISCYLGLVPLEESSGERRRLGHITKQGNSLLRFLLVEAAQATTRTIPEWRRKYMHLMMRRGRKIAKVAMARKLAMRLFWMMRQGWNYQQVMKFGSHVGQPGNRHGVQ

SEQ ID NO: 131765 - protein, 345 aa, unidentified
MNIIRVGVDIAKSVFHVHGVDRHSQTRWQGKYARSKWLDTLSKKVPVGAEIGMEACASSHYWARELQKRGYCVRLIAAQFVKPYVKSNKNDQVDAEAICEAMSRPNMRYVAPKTVAQQDVQAAHRIREELVGQRTAKANQIRGLVGEYGVVAPVGIQQLRRALPEWLEDAENGLSASFRVLLHGLADDLRYLDDRITALDERITESVKQDPVARRLMTLRGVGPLTASALSGALGDGKAFRKGRDFAASLGLTPRQHSTGGRDRLLGISKRGDSYLRKLLVHGARAVLRHIGGKDDGLSHWLQALVSRKHVNVATVALANKTARIAWALVHNGTAYDDKLAAVGT

SEQ ID NO: 131766 - protein, 331 aa, unidentified
MKNVTQTIGVDVSKLTLDVYIKTIKVHHQFSNDNKGFNQLISWLKKQKVTLEETLFCFEHTGWYCLLLSYFLYENKYTYCCVNAIEIKRSMGLKRGKSDKADAWEIANYAWLRREELEPSRPPAKKLIELQRMMSLREQLVKQLTASKNLYKGMLELVDDEVNDASMVILKENMAQLNNQIVTTEKAMNELIKQDETMITNYKLSKTVKGVGMVLAIQMLLHTHNYTRFESSRQFASYCGLVPYPYQSGTSIHGRNKIHPISDRKMKSLLSMSAISAIQHDSELKLYYQKRVEEGKPKMVVLNIIRNKIVSRVFATVNRGTPYVEINKFYA

SEQ ID NO: 131767 - protein, 342 aa, unidentified
MKIIGCDFHPGFQQIAMVDTETGEHTEKRLTPEEAVQFYRQLQDPVVVGMEACGNTLWFERLLAQLGHTLWLGDAGKIRAMEVRKQKTDRRDAELLLQLLIEGRFPRLWVPNLEQRDLRQLLLHRHKLVGMRSQVKNQLQHLALNQGIQRKSKLWSRAGRKLLEELPLSGWTARRREELLLLLDDLDPKIGELDVAVEQAAEKDAVAQLLQTHPGVGPITALAFSLTLGQIERFAHSRKVVSYLGLNPSEHSSGGRQRLGSISKQGNSMLRSLLVEAGQSAARLVPELKRAYQRLKHRKHCAVAKVMVARKLAVRLYWMWKTQQPYSATRMQGSPTGPVAER

SEQ ID NO: 131768 - protein, 351 aa, unidentified
MVVIGVDAHKRSHTLVAVDQAGRKLAEKTVPATSDGHLAAISWAARWPERIFALEDCRHLTRRLEIDLLTSGEAAVRVPPHLMAGVRRGGRERGKSDPIDALAIARAALREPDLPIARLDGEARELRLLVDHREDLVAERTRIQCRLRWHLHELFPGLLVPSRGLRRYRVLAELEERLCGLEGTVAAIARELVMRCRELTLRARNLEREITTIVRRLAPSLLAMPGCGPLSAAKLVGETAGAGRFRSRAAYARWNGTAPIPVWSGNSTRHRLTRGGNRQINAALHRIAVTQLRGVGGLGQAYVERRMAAGDTKVEALRALRRRLSDEVFRRLLADETVGAGVAHEELNAAA

SEQ ID NO: 131769 - protein, 313 aa, unidentified
MGTQSVYVGIDVAKATLDVAVHPTGARWTLAYTEREVAGLVTRLTGLAPALVVLEATGGLEEPLVGALAAAGLPVVVVNPRQVRDFAKATGRLAKTDALDATVLAHFAAAVRPTPRPLPDAATQSLAALVTRRRQLVEMLTAERNRLGSAPRTLRAEIQAHITWLKRRLGRLDTDLGQAIRTSPAWRVQDDLLQSVPGVGPVLATTLLASLPELGTLNRRAIAALVGVAPLNRDSGTRQGRRRVWGGRAAVRAVLYMGTLVAVRHTPVLRAFYQRLRAVGKLPKVALTACMRKLLTILNAMLKQQTRWTPRHA

SEQ ID NO: 131770 - protein, 345 aa, unidentified
MEIRTIGIDLGKTVFHFVGVNARGEVVVRKKGSRTQLLRFTANLRGCLIGMEACGGSHFLGRALREQGHDVRLMPAQYVKPYVKTNKNDYIDAEACSEAVTRPTMRFVPIKTDDQLDLQSLHRVRERWVGRRTAVINQIRGMLLERGITVRKGRHYIEESLPGILEDADNKLSGALRVLLSQLRLEMEYLHGQIGETDKLIARICGELEQCRRLVAIPGIGPITATATVAAIGNGAAFKKGRGFSAWLGVVPGEHSTGGKQKLTGTSRRGNKYLRKLFVQGAHTVLLQKTKQSSGLSTWLVNLTSRKRPQVATVALANKMARIAWAVLFKGEAYRPPTAPQVIAA

SEQ ID NO: 131771 - protein, 347 aa, unidentified
MTEAYDGRQVVGIDLHRRRSVIVRMTEDGRKLETARITNSPAALRAVIARAGKNPKVVIEATYGWYWAVDVLEAAGAEVHLAHPLGVKAFSYRRVKNDERDATDLADLLRMGRLPEAWIAPPEIRELRELTRYRHKLVKARTSVKDQVHGVLAKLGIPVTHTDIFGVHGQAWLDGLKLPQPYAGKVASLRQLAGALTAEIGLLEQVLGDLLAGHEGYAAIQQLPGIGPVLAAVIVAEIGDIRRFPGPGQLGSWTGLTPRHYESDTKVIRGHVTKQGSRILRWAVVEAIQRQPAGSRPRQVRDDIIARRGKEAKNIAKVAAARELLTLVFYGMRDGHVRRALQRGQAA

SEQ ID NO: 131772 - protein, 348 aa, unidentified
MITTVYCGVDFHARVQTVAYCVIADGEIHLHELDHRKDDVRGFYSQFSGEVVVGLEASGYSPWFEQMLEELGHTVWLGHAAEIRRFAKRRQKNDRRDAELILDLLLKEEFPKIHRPSTNSIEILRMLRYRHRMVKMRTMIVNNLQALAISSGLSLQSRLLTRPGRQRLLAAQMSPVMGRQREEWLSLLDNLNARIASVVKWLEQQAQTDSKVQLLRTHPGLGLLTSIGLVHSMEPVSRFANQRKVAAYFGMEPMERSSAEKKRYIEISKAGSRLVRFLLVEAAQTAARHDQELKRFYQRLVARRGRPKALVAVGRKLLTRSYIMLRDDIDYAEFLRRGVEARPAREDA

SEQ ID NO: 131773 - protein, 319 aa, unidentified
MNTLKNPSEQPVTDAIIYIGVDVAKASLALAHPGLKAEYPNNPKGHAALIKALPPNAHIIMESTGGYQRAFARSLHAHDVTLSVVNARQVRDFAKSMGQLAKSDAIDAAIITLFAQSKKPRADKKPSPNQFALEEIMTRRGQLVTLHNIESNRLEHYFDARIARDARKMLASIKTQIKKLDAMAAELIAADELLKHKASRLTQVEGIGPVTSASLLAFMPELGNLKRNQAAALMGLAPFVCDSGTERGRRHVWGGRSHVRAALYMSALHAMIRNPVLRKFYQRLKAAGKPSKVAITAVMRKLIVLLNHLLAKPDFLLAS

SEQ ID NO: 131774 - protein, 347 aa, unidentified
MDHYAGIDVSLEDSSVCVVDADGNIVREAKVLSEPAALVGWLKGLGLSLKLVGLEAGPLSQWLYAAMKKEGLAVELLETRRVRDAFKSMPVKTDRKDARGIAQLVRLSWFRSVHCKSAAAQEVRALLTARKLVQSKLFDIEMSLRGILRGFGLKVGKTNPNRFALRVEELVAGHSTLEIVGKALLAAHEVLLREFKGFERRMRQQARADERVRLLMSAPGVGVIIGLTFVAAIDDPARFKSSKQVGPHFGLTPKKYQSGQTDYTGRISKIGDASVRTALYEAANAILTKPLKGASHLKSWGMKLAKRAGMAKAKVALARKLGAILHRMWVDGTPFADKASAPKLAAA

SEQ ID NO: 131775 - protein, 393 aa, unidentified
MVCVGIDVAKDKHDCFIISSEGEILADVFTIPNNAEGFDTLLQAIRRSTRPEDKIKVGLEATGHYSYNILGFLLDKGLPTYVINPLHTNLYRKSLSLRKTKTDRVDARTIAAMLMSDVDLKSYTDTAYHNEELKSLTRYRFDKVRERAKLKQSVSRLVTILFPELEKLVSSLHSASVYALLSEFPGAKQISSTHMTHLKAVLKNASQGRYGQEMAETIRNAARSSVGSVMPAKSLELQHTIRLIRELDAEIEDIETAIQAIVDEMQSPITTIPGMGVRMGAVILAEIGDFSRFDSPDKILAYAGMSPSTYQSGQLSLSGAYSHMEKRGCRYLRYALYNATKHVCHWDPTFAAYLAKKRAEGKHYNVALSHAAKKLVRLIFAMEKSQRPYCAAA

SEQ ID NO: 131776 - protein, 356 aa, unidentified
MSRILAIDLGKFKSVTCLLDSDTNQTEFWTMSTDRHYLLAVLKNYRPDLVVIESCGLAGWVHDICTEEGYEVLVCNPNQEAWKWKHIKRKTDRDDALKLAKLAALEQLVPVYIPCRQQREYRRLVKYRQVVLGRINRVQNNIRAIFAQRGMEMVRGQKAWALERLELIAQHRKPLVECALDDLWRGELDLELIQLEHLRQHQHQIHKQLQAIARADERVQLLQTIPGVGRKTAEVVVAYLDDPHRFQNARQVSSYAGMVPRRYQSGEMDRQGRIHKRGPRQLRSAVVEAAWLMLRYNPWAKSVYDRLTSGQKTRKKKAIVAVARKLLVRCWVMLLRKEPWNKETAIRQPAGIAVAV

SEQ ID NO: 131777 - protein, 385 aa, unidentified
MEIETFIPRDYDVFAGLDVDKKSISVTFTNHQGLLKSMRMPYSVEHLVNHVRKHYGDKKVAFVYEAGPTGYGLYDGLVAEQYPCLIVSPSMIPKAPGQRVKTNRLDSRGLAENLRGGQLKSIHVPTTLYRELRHLTQLRDALVSEVVAMKQRIKSLLLMEGLEFPPAPPGSQWSFLVKAKLRKLPCSSVVRFKLDQLLDNLEFGEKQVLKTTREIHRFCQNDPELSQCIGYLKTLPGIGWIVASQMLARVGDWRQIKNIRQLPAFLGLVPTERSTGERTARGSITHSGDPRLRSKLIQASWSAIRQDGELREFFRSVCKTHTRPAASRVAIVAVAHKLCVRAAVVLMKQRPYEVREKVQSAPLTQEETVPQGTTRRPAVPGEKTS

SEQ ID NO: 131778 - protein, 223 aa, unidentified
MICVGIDVAKDKHDCFILNSEGEVLADVFTIPNNLEGFNCLLQKIQSCFTLHDKVEVGLEATGHYGYNILGFLLDNGLPTYVLNPLHTNLYRKSLTLRKTKTVPAKSLELRHTIRLIRELDAEIKEIEKAIQNIMDDLHSPITTIPGIGTRMGAMILAEVGDFSRFDSPDKVLAYAGLSPSTYQSGQLTNCYAHMEKRGSRYLRFAIFNATKFVCLWDPTFSA

SEQ ID NO: 131779 - protein, 459 aa, unidentified
MAKKKKKVVRNEKTKRLDTLERINFNAAGVDIGASEIVAAVPAGRDEIGIRSFGTFTRDLQEICQWFRKCEVQTVAMESTGVYWLNLFELLESYGFEVYLVDSRKTKNVSGRKSDVDDSEWIHQLHTYGLLPKCFRPPEDIRKLREMVRFRETLITDRTTHIHRMQKALICMNLKLCNVISDITGTTGMAIIRDIVAGKRDALSLAKHRNRRCKNSEEELVKSLEGNYQDQYLFILKQELKTYDYLGDQIKEIDEYIETLYGKIESKVDVKKNPLGELPSKKKKKSKNSPDFDLRSQLYRIVGVDLTAIDGLNESSVQIIISHIGVDMSRWPSHKEFVSWLNLCPNNEITGGKVFSSRTKRSRNGASQALRVAAMSLAKNNSALGAHYRRMKAKHDAATAVISTAAKIARIIYTMISKQEEYRDVGSDYYEKKNLNKVIKSLKRRAANLGFELVVKKAA

SEQ ID NO: 131780 - protein, 407 aa, unidentified
MEVLYARCAGLDVHAGSVTACARIASGPQVTYEHRTVPTTTRGLLDLAEWLATHGCTHVGMEATGVYWKPVWHVLEAHFTLVLANAMHIRNVPGRKSDMNDATWIADLLAPGLIRSSFVPPAPIQELRDLTRTRRQLVREVARHVLRIQKTLEDANLKLTQVMSDIVGVSGRAILNALIAGETDPHRLADLTRGRLQATRADLVEALHGRVTDHHRFMMQLHLTQIDTLEAAVATIEARIGDALGPFRAAVSLLTTMPGLSETTARVVIAEIGIDMTRFPSVGHLISWAGFCPRLDESAGKRRSSRTRQSAPWLKPTLVNAAWAATRKKDSYLRAQFLRIKTRRGAKKAILAVASSMLTAAYFMLRDGVEYHDLGAHHFEQRDKEQLAKRLIQRLRDLGVAVEVKAA

SEQ ID NO: 131781 - protein, 323 aa, unidentified
MELCTFSMNPSPEELVKHMQKHYPKGKYFSVYEAGFSGYWIDRKLRAHGIENIVVSPADIPTRSKERSTKSDTIDSRKLARELENGTLDSIYVPDNLQEKLRSYCRLRYQLVGNQVRLKNRIKGYLMFSGIQIPENYKIRNWSGKFINHLEKIEFENEVGRECLLIYLEDFKQSRARLAKVLIRLRKYSEEYNFKPLINKLMSIPGIGFINAVTIYTELMDIKRFRRPDDLASYVGLVPSVSSSGEKEKILGLSHRYSKFLRSLLVEASWIAVRKDPAMTLKYNELIQRMSKQKAIIRIAKKLLCRIQHVWNSNEVYEYAVVA

SEQ ID NO: 131782 - protein, 455 aa, unidentified
MEKVFFGIDIGGKTHCVHFIDEKKRPLCKDLVIDDDIVGYHQVIEAIRRLKEKHPGASFHGGAEATGIYWRNLFFFFQNELPDVPLSLINPLQTKKFKDLELDRVKTDATDARSIARYTATFEPEAAPSVPEYLADLQELCRYRKAKLKEQSKYTNLLHNYLKQAFPELCGKVKRKAGLRTLAMLSRFPTARDVREVNASEIASIRYGKRNFRVGAEVASEMKNLAESSVASRTGPGMGFAVRSVAANILRIRGELAALEEKIAELYSACPATYLITIPGIGPLSAAVIESEIKNISRFNTAKKLNGYIGAYPELKESGEFKLMKPRMTKCGNRYLNHAVYMCVLAAISPKAPDNPIKHMYWRQVAQGKERMVAIGSCMRKMNHIIFGILMSGKPFEATYEFPEDSFEVRFVDRETGCVVPEELAASCETVVAVRWKRAAAPKPKRRKKEVARPS

SEQ ID NO: 131783 - protein, 337 aa, unidentified
MKHTVIAMDIAKRVFQVHAVDAQTGEIERVKLRREAVREFFAQRTPSLVAMEACGSAHYWARELRGLGHEVRLLAPKSVRPFVRSNKTDAADAQAIWTAVQQPEARLVAIKSEPQQAILTLHRMRAQLLKFRVMQTNALRGFLYEFGQVLPEGYRAMAKAWPTALAALAELLPAMLLDSLREQWVRVQQVDAEIAALERRLASALRANGSCQQIAAIPGVGLLTATAAVAAMGDPTTFKSGREFAAWVGLVPRQTGTGGRVRQLGLSKRGDTYLRTLLIHGARSILARGKPWPWLEALLRRRPYSVAVAALANKLARTIWAVLARGRPFDPAAFGVA

SEQ ID NO: 131784 - protein, 342 aa, unidentified
MNDMIIGVDLAKSVFQLHGVFLAEGEVFRKKLTRTQFEKFLKDTAPCLIVMEACGSANFWARQLAEMGHEVRLIAPQYVRPFVKRQKNDAADAEALVIAARQPEMRYVEPKSREQQAQAVLFRSRERLVRQRTELVNALRATLFEFGFTLPQGPAAMKRAKELLDDPTVDLSDLVVTECRDMLCQLAEKTDRINKRSKEIKQLAEQTEALRRLTSMPGLGPITAFAIGAFAPAMTEFRRGRDFAAWLGLVPRQNSTGGKAHLGSVSKAGQSDIRRLLIIGAMSRLNWLGRKTIPDGGWIDRLMQRKPKMLVAIALANRMARQIWAMTTRGELYNEPAKAVAT

SEQ ID NO: 131785 - protein, 423 aa, unidentified
MPYRIAGIDVHKKKLAVVVADVEVEDEYQFERRWYGSNPEQLQRLAEWLIQQQVEEVVMESTAQYWKPVWGALEQYWKPSCEKREGAGRMSGTLHLAQALSNRGRRGRKRDFRDAERLLKRLVSQELTLSFVPNAEQRLWRTGTRTKDQLRRNKVRLHNQLEALLEEAHIKWSSLVSDLLGASARRMLQALADGETDPAALAALADQRLRATSAQLCDALGACTELNPVYRRLVKMAIEELQLIEQRIGQLDQEMASLLRQHQDAVQRLAEVPGLGVDSAQQIIAEVGAKAATFASAKNLSSWVGACPGEEESAGVNYSPRSPKGNRHMRRLLNQAANAAAKHKGSIFEIVYRRLVPRLGHNKTIGAIAHRICQLIWMILNQGVRYEERGPAVSENSRRARTSRMIRTLRKLGYRVELLGDPA

SEQ ID NO: 131786 - protein, 410 aa, unidentified
MDMLHRRCAGLDVHKKTVVAAMRLAVENKLVSEVRTFATTTAGLLALSDWLTENSCTHAAMEATGVYWRPVWHVLCDGELELIVANAAHVRNVPGRKTDVSDAAWLAELLAHGLIRGSFVPDAETQELRTLLRTRKQLVRERSRHVQRIHKALEDANIKLEAELSDVLGKSGRAMLDAMVAGETDPVRLAALAHPGVKSSQARLQEALHGRLTRHHRFLLQLHLGQIDGLDAAVTTLDREVDVNLAPFRTAVELVSTIPGVSKLSAEVIVSEIGLDMSRFPTVGHLLSWAGLCPRNDQSAGKRRSTRLRKGAPWLKTALVQCAWAAKNKKASYLQAQFRRLLGRRGPQKAICAVAASILTAAYHMLKDGTVYQDLGPDHFNRRSNTTQSQRLVKRLQQLGYAVDIKPLAV

SEQ ID NO: 131787 - protein, 448 aa, unidentified
MSKLHVGLDVSQKTVATCFVLDDGTEPVKRFSFEHNPAGVDKLVARINATAAELGIDQVLIGMETTGLLWWHLSEALRNSESLQHLHPQVYAINAKLVAHFKKAYVEMDKTDPGDAFVIADRLRFGRLPRLAEPDERYLAIQKLTRHRFHLIQSLAAEKNRFLTHLFLKFSGFCQEEPLSDPFGAASSALLTEFLSVDDIAQMPIEDLTDFLVEKGRNRFADPEAVAKAIKQAARNSYRLSKCLADPVNIVLAMTLENIRFFEKQIAAIDKAIARELAAFPGAKVLLSVPGLGPVFVAGIIAEVQDVNRFDTDAQLARFAAIVWKRSQSGAFEADDTPMMRSGNEYLRYYLIEAANSLRMHNEEYAAYYQTKYREATTHHHKRACVLTARKLVRLVHTLLRKGQLYQTPDQRKESRAVLPAGMTPGELTRHVVRRRQAKGRFKVHPDH

SEQ ID NO: 131788 - protein, 499 aa, unidentified
MEWDWRASEVGARRKTKQKPAMVEPVEIPDAEHELVVDRGAAIDVAKAAGKVCVRLPGKSGRRFSRVWDVPARTGAITELAEQLVELGIEKVTVESTSDYWRIWYYLLEDAGLDVQLVNSRDVRNVPGRPKTDKLDAVWLAKLTEKGLLRPSFVPPAPIRVLRDYTRLREDLIRERTRYWQRLEKLLEDAAIKVSAVASKLDTLSTRDMVEALIGGERDSRRLADLARGRMKTKRSELIAALDGRFDDHHAELARLLLGQIDALTAQIGALSARIERLIDAMDESDHPTGDRGRSGGGGPQVTGAPSTGGQATAPARRTTTAIGVDSDTATVVEPQRLTAVERLDEITGVGQCAAQTIIAEIGLDMARFPTPEHLVSWAKLCPRTIQSGPVIRGGKTGKGNPYLKGALGEAAAAAARTDTFLGERYRRLVKRRGRLKALVAVARSILVIVWQLLSDPTARFHDLGPDYHTSRVVTERKIRNHIAHLTAMGFHVTLQPAA

SEQ ID NO: 131789 - protein, 321 aa, unidentified
MNKYTEIYGVDISKDVFDVMNSKGAYIQYANGLKGFGQFSKKLPKGSLVVMEATGYYHYRLAQYLYEQGHCVSVVNPLSVKRFIQMKLAKVKTDKSDARAICEYASVNEVPLYTAKNKDQAECLQLLRLMDTYLKHGTAIKNKLHGERTLGIPSKTVYRSLERSLKSLKKEIGLLETRLAELVKAHQQEQLTLLKSIPGMGNKTAMVLLVLTDGFTKFENAGQLCCYAGITPTIRESGSSVRGRSRISKVGNRKLRNLLFLCSFSASKHNRACREIYQRITSKGKSKKLALVAVSNKLLKQSFAIATSGLPYDEKYVSRLT

SEQ ID NO: 131790 - protein, 337 aa, unidentified
MKLYGGIDLHSNNCVVVLLDEQDRVVYQKRLDNDLGCVLAEIEPYGDSVEGLVVESTFNWYWLVDGLMEAGYKVHLANTAAIQQYAGLKYSDDHHDARWLAHLLRLGLLPEGYIYPKEERGVRDLLRKRSQLVRERTTHLLSVQNLFARNTGRRMSGNEVKRLDFEALGKLFDELQAVAAGSSLAVIQTLEELIGLLEKEVLSKARLKPAFKPLLSIPGVGKVLALTIMLETGDIARFPGAGHYASYCRCVGSAHLSNGKRKGRGNTKNGNRYLAWAFIEAAHHAVRYYAPIRRFYQRKSAKTHTVVALKAVAHKLARACYYVLRDHVAFDMHKAFA

SEQ ID NO: 131791 - protein, 295 aa, unidentified
MEHAPDIYRLFVGVDIAAATVTAAWQPPRGGPGTPYTYDQTPAGHAALQRQLRATGVSAAETLVVLEATGSYWVALAVALHAASYHVAVINPLQAHHFAKAHLRRAKTDNLDAQALAQLAVALRPAPWTPPPAVYHEVRQRLVARDGLLAMRTQARNQRHALLQWPVVVAAVRQHLDAVIGDLDARIADLTAEIAAVLKEGAWAESLACLTSAPGIGRVTAAWLLVATLACSLGAGPAAVTAYAGPAPMPRESGRSIRGRPHIGHGGNARLRTALYMATRSAARHNPVIKPFYDR

SEQ ID NO: 131792 - protein, 353 aa, unidentified
MITFLLSPFISNSCKKQSDSDELTHKPDLNNGDFSAQPQPRQNMSEKYELEVGVDVAKSELCASIGTRITSFANNPAGIKALFAAIKKASGNARITCEATGSYQDLLVRSCLEKGFPISQCDARQIKHYIMSFGQRAKTDPIDAGYIAAFAKDRSPATLGKEWVRQLDMRELKRRQDFLVKQCAQCKTSLDSYQDASIKAEIRREIKAKEKVIASYQLKLVKLVDADPVLKKKRELMMSVVGIGERTSLALLMLLPELGTTNRRNICSLAGVAPMHKSSGLMDAPRTVTGGGRKKVRTALYMASVSAIRHNPHIREFYLGLKSRGKKGKAIVMAVARKLLIHLNGLLEKQAAQ

SEQ ID NO: 131793 - protein, 399 aa, unidentified
MQLWAGIDAGKAHHHCVVIDGEGNRLLSQKVPNDEAALIQLLGTVLDLSDGGPLVWAMDLNHGGPALLIALLVGHGQNLLYIPGRTVHHASKIYRGDGKTDAKDAAVIADQARMRTDLQPLRAGDEISVGLRLLTARRADKSADRVRSINRLKAQLLEYFPALERTFDYSRSKAALMLLTKYRTPDGIRRAGQARIQAWLKKHGARSSAAVAAAAVEAAKSQQTVVPAQRIGEVIVAALAREVASLNEELEELDALISEKVTEHRHTEVLLSMPGFGPVLAAEFLGATGGDMTVFQSADRFAGVVGLAPAPRDSGRISGNHHRPRRYDRRLLRVFFLSGLSALKSCPASRAYYDRKRVEGKSHIQAMLSLARRRLNVLWAMLRDGTTYTLVSLAPPLTA

SEQ ID NO: 131794 - protein, 359 aa, unidentified
MQRNKISFSGQKIFVGIDVHKRKWSVATITESGFERVHTQNASAQELIDFLHRHYPDGDYVAVYEAGFTGFSTYYSLAEAGIECLVIHPADVPTTQYENVMKTDKVDCLKLAKSLRAGLLNGIYIRPKDSIDERGVVRIRRAIIKDLSRYKIRVKHLLMSNGVILPEQFDKRRGSCWSGAFIAWLKSDIKLLSSTRRSLDLLIAQVERMRLAQLQATRELRSLSRTEAYRENYDLICSVPGIGGIVAMTLLTEVHDISRFSNERQFASYLGLVPTSHSSGDKTIHGEMTFRGNKELGPMMIEAAWIAIRNDIGLASSFSQYCRKMKSQQAIVRVARKLSNIIIAVLKNKRKYVPYAING

SEQ ID NO: 131795 - protein, 490 aa, unidentified
MKSEPWQKSPKGKNRRQKAIVSPKPSKWGEMNRQQRREMMRKMQSQDLSLEVVHPDAAGIDIGNDIHYVSVPPSRDPQSVRCFGCATAELKTMADWLKRCGIRTVAMQSTGVYWIAVSDILEQAGLEVYLVNARDTKNLPGRKTDVQESQWLMKLHTYGLLRNSFRPSRGVRTLRTYWRQRQDLVQAAGEHVQRMQKVLTQMNLQLANVISDISGLTGQTIIKAILNGERDPRQLAGYRDRRVQASEEEIACSLEGNWQDDLLFVLRQENAGYEFCQQQMAECDRQLEQYLQQMENRSQGASLPEEKRKCRLRKKTGKNAPGFDVRALLFRMTGVDLPQIDGIEVMTAMTIFSEVGWDMSKWKTENHFVSWLKLCPNNKISGGKIIGKDRMPTNNRATTALRMSARSLRLSDSYLGAQFRRLRSRLGAPVATKAMAAKLARLVYHMLRHGMKYVDKGAEVYEFQHRQHQINSLKRKAAMLGFQVTEVPAA

SEQ ID NO: 131796 - protein, 365 aa, unidentified
MQTVTAAGLDVHARSTEAAAINVVTGEVERQRFGGSEPGPIVGWLAERPGPVRAVYEAGPTGFGLYRAALEAGIAIEVCAPSKVPRAPGERVKSDRRDAELLARLLLAGQLKAVAVPDARTEAARELARAHDDVRVDLMGARHRVSKQLLRHGQVYSDGSTWGSARHRQWLAARAFADPLSELAYSEALAHVDALTHRKAVLAERLSRLASDEQWSPTVARLRCFRGIDTLTAMMLHLELGADWQRFATPARLMSWLGLTPSLHQSGESRTQGAITKTGSRLARRLLVEAAWHYGRPPGSARRCAAAKPASPKRSSPPPGAPSTACTASTTASVSAASPPTSRPSRARASSQASSGRRPLLSSTS

SEQ ID NO: 131797 - protein, 400 aa, unidentified
MNPVIGLDISKGKSDGQVFLDKGNPMGHPFCFQHNQVGLSQLLDVVSTVQETAGKAPVVILESTGHYHQAVIQFLEEHDILFLVVNPLISHQAKKSSLRKVKTDAVDAYRLCELYYKEEFEDHMQRGVQLLNLRHLTRQFDSLTQMYVQVKLQFQAVLDQVFPDYRGIFGDLYSKVSLLLLKQFMTPGAFQTAGVSTVTHTITCLCPSRSNHWASDKASCIMVAAANNPFPKVSYSSHLISLALFIDLLLQYQEHLSRLQSQIDALAEEVESYQIIQSIPGIGSKIAATILSEIGEVHRFNHAKKLVAFAGIDPSVYSSGKFTATTNRITKRGSKKLRHALYLAVLCGLKKTGSKRLREYYDKKREAGKPYRVALIACVNKLLHWIYALLVKQERFVDLD

SEQ ID NO: 131798 - protein, 351 aa, unidentified
MPRTTTLHAVTAIGIDMGKNTLHLIGLDARGAIVFREKVARGRIALRLANLPPCLIGIEAGMATHYVARELAALGHNVKQVPATYAKPFRQGHKNDFRDAHAVAEAVQRPTTRFVPAKTNEQLDLQALHRVRSRLVSERTAVINQIRGFLLERGIVVRQGLRFLRQQLPDILAKRADVLSPRMVRIVAELAGDWRRLDERIETVTDEIEALAKSDDSCRRVMTVPGIGPIISSAMVAAIGNGAAFARGRDFSAWLGLVPKQMSTGDRTILGRISKRGNGYLRTLFMQAARVILLRSANWPKHGFGLWLVRAAQRLHPNVLAAALANKLARIAWTVLAQERSYEARVTKAAA

SEQ ID NO: 131799 - protein, 358 aa, unidentified
MEQITRGECGRVVVRVGVDLAKRVIQVHAVDAAGRLVTGRALARDRFIAWCAQLPGGCVVAMEASSSAHHWARKLCSLGLDARIIAARLVKPYRKQGSSGKNDANDAAAICEAASRPSMHFVPIKSVEQQSMLCVHRLREGIKEERTACINRIRGLLAEFGLVFAQSPKVLRLALADVIEDASNEMGTLARLTLQRAHAQWRELDEHMAWCDERIAEHACTNEQVKTATALLGVGPVTASAVVATVGDFRQFRNGAQFGAWVGLTPKQHSSGGKARLGRITKRGDTYLRTLLIQAAKSAVLTAHRRSDRISNWLCMLRERSGWQIAAVALANKNARILWALMTKGAAFNANHLSAKPA

SEQ ID NO: 131800 - protein, 403 aa, unidentified
MERVFGIDVHKNVLVTTIITEESEETRWSGVGAKDLQSLMEWLKEKNCLKGVMESSGIYWVPIYVTLADNGFQITVANAHQVKAIPGRKTDELDSQWLARVFSAGLVKPSYIPEKKIMELRSLTRLRVTLLETQTAFKNRVHKVLQICNIRLASKLSNIFGRDGQMLLNALMKGESIDEVIDKYASERLKKKREEVKESILGALGEADIIELKICLENINRLEEQIRQLNAKIATLVNKKDVERVSKVPGLGEVSASAVIAEIADPERFQNEKKLYSWSGLAPSTYQTAGKTAKTGHITKKGNKWLRRIMAQCATVAIKARNSQIRQFYLRIKGRRGHKIAIVATARKLLGIIWHLLITGEEYIDRHYVKKTITKSRKETLKLALEEAIPLLRQAGYTIIGPG

SEQ ID NO: 131801 - protein, 379 aa, unidentified
MASIGDSVRSNTTIYAAIELSKKSWVVAIAHPDRDRPSMHRIAGGNLADLIGRLRKAAGERRIVVCYEAGYDGFWLARSLLKIGIDCRVLDPASIQVNRRARRVKTDRIDSLALLRSLIAVDRGERHVCAVVRVPTVEEEDARRSHRERQRLVRERTGHINRIKGLLFAQGIRGIEPKRRRTRIDFGKLTTAEGRPLGERLRRELEREYQRLELVQNQLRIVEKERDTADAQDPAVERKRELLCALQGVGSTSAAILAREVFARPFASRRHLASYLGLTPSAYDSGSMTRCQGISKAGNSWARRVLVEVAWLWRKYQPASDLSEWYVRKTAGQSPRIRRIMLIALARKLAISLWRYVETGLVPDGAVMAKTALHQGAAT

SEQ ID NO: 131802 - protein, 398 aa, unidentified
MTRFIGVDLHRNCFTVCMIAENGREYESEYRLTQLPLFVRKLRSSDEVAVEATGNTRLFYDAVASHVAKVVVVNPSQFRVIRQSLKKTDRHDARMLAFYLSKGMLPEVRMKDKQHVQMASLTQTRDTLVKQRTALKNKINNILSAHGVNLPKEAISSEKALQRILGMKFDLLVEVELRVIAGQIRSLNESIAQLDKTIKSEGAKLEGHGNLKSIKGIGDLGATILLSVIGDIRDFADEGKLAAYFGIVPRVSNSNETERSGRITKRGAKLGRTALVQCSLIAMRYSPYLARFYHKIQARRGTGKAIIALAKKFLGVIYQTLKHNWVFEDFPNFVIAGARPADSCAAGDLSHKGSKIKVLSETNEGAPSAARPRRSSSPGAALGLRPRIALSSAQAAQL

SEQ ID NO: 131803 - protein, 341 aa, unidentified
MSKVTVYVGLDYHKDSIQVCVMDPAGAVLLNRSCQNEAHAVALLVAFHGDDVHGAIEACTGAADLADELITHHHWDLSLAHPGYVHRMKQSPDKSDYSDAKMLADLVRVGYLPKVWLAPADVRQLRTLVRYRQQLVNERRTVKLRITALVRDARIVGPAVRRWGRSWRAWLATVAGLGSEARFVVDCHLADLRRLDEAITRVEARLAAVTAEDPVVAQLVALRGLGPVTAWALRAEVGRFDRFRTGKQLARYCGLSPRNASSGQRQADAGLIKAGNELLRTVLLEAAHRLIRFDDRWKTLAASLQVAGKPACVVAAAVANRWVRWLFHHVEGGSIELKTAG

SEQ ID NO: 131804 - protein, 462 aa, unidentified
MNNKATQRTDRKRKSKRIELNEQWEKINPDAAGIDIGAREHYVCVPARRHQPSVRRFGTTTPELEQLAQWLLDCGIKTVAMEATGVYWMAAFQILERRGFQVLLVNPRQVKNVSGRKSDVLDCQWIQKLHTFGLLAGSFRPADPYCVARSYARLRDDLVARRSTQVQLMQKALHQMNVQLSHVLSDISGESGMAIIAAILAGQRNPVALAALANKRVRSSKERIVQALVGDYRDEHLFGLQTAYDLYMAYQAKIDQCDERLVAELAKLPDKVDRKSKPLPPADKKKQIDQELRAGLYLKLGVDITAIEGVGARAGLAMLTEVGPDLKAFATEKHFCSWLGLCPDNRISGGKVLSTRTRRVVNPLADALRIAATTLERSQSALGAFYRRMKAKLGAAEAITAAAHKLARLVYRLIKHGEAYVREGLEQYEKKNHQRKLKAVLKMAENLGLKVLEPQPLACSVS

SEQ ID NO: 131805 - protein, 441 aa, unidentified
MAMRKRDEEVVFPNAAGIDVGASSHWVAVPRHATAEPVCEFGAMTDDLNAMADWLLGCGVDVVALESTGVYWIPIYEVLERRGLQVWLVDARQMKYVPGRKSDVQDCQWLQKLMSLGLLRAAWRPGDEVCVVRAVVRQREVLLSEQASWVQRMQKALVQMNIQLTEVLSDVMGMTGQAIIRDIVAGQRDPHALARHRSGRIKASAEEVRKALTGNWREEHLFVLTQALAMYDSLAQRIGECDAKTQALLAPLGRQDVDLGKAPKERSKQRAAFAVRQALANWAGVDLTRIDGLGVAAVMKILSEIGPDLSRFANVKHFCSWLGLCPGTKISGGKVLSANTKRSANRVRQALKMAAMSLSRSDSALGAFYRRLCGRMDKPRANTAVAHKLARMVYFMLTRGESFVDKGQQHYEYQQRQRSIAALKRRAATLGFNITPSSATA

SEQ ID NO: 131806 - protein, 348 aa, unidentified
MVLIGCDFHPSWQQVSWLDRETGETGDEKLVHAPGAAEKFYGKFPAGSRIGMEATGNCQWFLETLKRLGHEVLVGDAAKIRASDSRQQKHDKRDARLLLQLLVEDRFPRIWVPSREQKDLRQLLIHRYKLVRIRAQVKNGLQHLAMNQGLQRKKRLWSEAGQKALCELPLAPWARRRREDLLKMMGELGAKIDLLDQAVVQAAEKDERARLLMTQPGVGPITAMAFVLTLGEVSRFPRGKQVASYLGLIPREYSSGGHQRLGAISKQGNSFLRMLLVEAAQAAVRYDPGFRKEYLHRCHTKAKGVAKVAAARKLAIRLYWMLRTMTKYPEIVRIESSSRVPLVVPQAG

SEQ ID NO: 131807 - protein, 343 aa, unidentified
MQTVSTIGLDIAKSLFQVHGIDAAGQVVIRRQLKRRYLLAFFEKLPPCLIGIEACASSHHWSRELQALGHTVRLMPPAYVKPYVKRQKNDMADAEAICEAVTRTNMRFVPTKTPEQQSGLVLHRARHLFIRQQTSVINAIRAHLAEFGVIAPVGRKGIEELLCVIADPSDKRVPDVVRACLAALGSQLLSLKKQILDFDRMILAWHRSDQTSKRLNCIPGVGPLLATALVASVADPKVFRSGRNFSAWIGLVPKQHSSGGRARLGSISKKGDRYLRGLFVAGALAVIRYAKLHGTKYRPWVAALLARRPTKVAAIALANKLARMAWAMMARGERYNYPAALRV

SEQ ID NO: 131808 - protein, 366 aa, unidentified
MPSVTSPAGLIHLGMDTSRNTIVVGVLMPGEELPVADRIFNDEASVRRLICRFPSRGLLRACYEAGPGGYDLHRLLASMGVACDVVAPSLIPKGGSDKVKTDKRDSFRLARLHRAGELTPIRVPTPAEEAVRDLCRVRAAVLSDRKRAQQRLTAMLMRHGRIWRSGSYWTGPHRAWIAAQSCDEPALATALAHYRATLDTRETELACIESELAPWARREPLAPAVRQLGCYRGIAELTGLTLAAEVVDWRRFPSARAFMGFTGLVPAEYSSGQRTWRGHITKAGSGPVRTALIEAAWAYRHSPAIGVTLRRRQEGATAETIARSWKAQRRLHGKYRAMTARGKAAPEAITAIARELAGFVWAEMTS

SEQ ID NO: 131809 - protein, 348 aa, unidentified
MMNDSESTVLDASAKDNDVHAQAAVFAGVDVSKAHLDLAFTGAGSLGAAAQSGRFTNDAAGVKLLLAELKKLTHLGAVLFEATGGLEREAAGSLCAAGLAVMVVNPRQAHDFAKALGYLEKSDAIDARALAQFAQTLAASPKFEALRMRLPEPEQEALQVLVTRRAQLVEMRVAEGNRLERAPKLVRKSVTAVINLLERQIKALDGDIDGALKAHFAEKLALLKGLKGVGPGTQAALMAGLPELGRLTHKEIAKIVGVAPLSHDSGKMRGKRTTWGGRADVRAALYMGTLTAVKHNDVMKAFHQRLLVNGKPKKVALVACIRKLLSIMNAILKSGVPWNPNFNATQIA

SEQ ID NO: 131810 - protein, 349 aa, unidentified
MRFYNQQHRFYCGIDLHARTLSLHVLDAQGQTALAKTLPAGPDAFLQAVAPYRDGLAVACECMFAWYWLADLCTDEGIPFVLGHAPYMKAIHGGKAKTDPIDARKIAVLLRGGMLPQAYVYPKGMRETRDLLRRRTFFVRRRAEALVHLTNTNSQYNLPPFPKKLAYAANREELDLPERFTDPSVRKNVELDLALIDTCDAQIRAVELYLTRAARVDDPQAYARLRSVPGVGPVLALVLLYEIHDIRRFPAAGQFLSYARLVRCTHESAGKKQGTGGNKIGNAHLKWAFAEAACLFLRESDQAKLWLTRREKKHGKARALGALAARLGRAVYHLLRKKEVFDAKRFFAS

SEQ ID NO: 131811 - protein, 263 aa, unidentified
MAMRSFCGIDVSKDRLDVMVLPEQQCSSARNDAAGWFQLIEWLRGFSISAIGLEASGGYERGIMRALLAAGMSVRQINPFKLRQFAKASGVLAKNDRLDARMIASFVAVMPTNPVQRQGPAAERLAEMVTVRRQLSDAKIAAENASRMLENAMLQRLSRRRIARLAADIAEIDERLVEIVMSDAALARRYRLLTSMPGVGAVLACTLIALLPELGQLSRTKIAALVGVAPYDFDSGKAQRNALHLGWPHAHSQCALHGGLERE

SEQ ID NO: 131812 - protein, 460 aa, unidentified
MAKRKKSPVNAPALDVLEQINLHAAGLDIGSEEIWVCVPADSDEPSVRVFPTFTVDLQALADWLAACQIETVAMESTGVYWIPVYEILESRGFEVYLVNARHVKNVPGRKTDILDCQWIQQLHTYGLLRASFRPTEDICALRALARHRDNLIRYRSAHIQHMQKALQLMNVKLTEVVSDITGVTGLSIIRAIVAGERDPHELARFRQSGCKKSEEQIAKALQGNYKLEHIFVLKQALAQYDFYLQQIQECDAQMEAMYAALPPSDPDSRVSPPPKPKGGKPRKNQAHFDLAASLYDVVGVDLTAIDGIDALTAQAIITEIGTDVSAWPTVKHFTSWLGLSPHNDKSGGKVLRSRTKKTKNRANLAFRIAAHSLSRSQSAVGAFYRRMKAKHGPAKATTATAHKLARMVYFMLKNRSAYVDPGVTYYEQQYRDRTIRNLKRRAAALGLELVPVPAQSATVS

SEQ ID NO: 131813 - protein, 409 aa, unidentified
MPDYTLYVGIDWATQTHQVCCLDSAGQVRAHAAVPHSGAGLAALVARLTELVAEPARIAVAIETPHGAIVDALLAHGCHVFAINPKQLDRFRDRHTVAGAKDDRRDAFVAADALRTDRGAFRQLRPDDPHLIQLRDMSRLHEELGREVSRLTNRLREQLLRFYPQGLTLCPAADEPWLWSLLDRAPTPAQARGLRLSTLRALLADHHIRRFSADELHAALQASALPVAPGTCEAAREHLALLLPRLRLVHEQRRHCERRLEQLLTALAAEPVAERREHRDVTILRSLPGVGRVVAATMLAEAAQPLAARDYQTLRTHAGVAPVTRQSGKSRLVGMRRSCNGRLRAAVFHWARNAIRLDAYCGAHYARLRQTHGHARALRGIADRLLGVLVGMLMAGTLYDSGRRHALAT

SEQ ID NO: 131814 - protein, 435 aa, unidentified
MANYYHLPVVGIDVAANFSVVTALKPNGDIFIKNVKIIHSLDGFSKLLTLIQKIEKEFNVKSKVFCESTGIYHLTLLHYLINQKIDISVINPLITNSNKNSNIRKVKNDNLDSLSIARLGKFDDIKVSSYTSEEFLHLKFLVREYYKIVDLRANLKKSFSNNLYIHYPGFNKAFTDNTGKSALSFIKTYPTPDDFFNAPKLEVIELLKKSSRKGSKWAATKYNTIFAIATSASKIGLNTALFGTKVKRFIESYTFYSNQIDVLFAEIMDYIDNATFGETFKTNIQLLKSFKGVGDISAITLLTEMSSIDNFSKPSQLVAFFGIDPSVNQSGKFVGDRNKMSKRGTAIGRRALYAIALASIRKTKNKVPMNQVLYDYYHKNLKSKKKKVRLVAIMNKLLRYIFSILKNQKPYVVRNPKFHQRMFLESKTRLDKKTA

SEQ ID NO: 131815 - protein, 294 aa, unidentified
MNTKTKQNINVGVDTGKYQLDIYIRPLDIYFTVPNDDKGIKEAVKTIKKYKPERIVIEATGRLEMPFILACANANLPFTIANPIHVKRFAGAIGQRAKTDKLDAQLIAHYSEAIKPKLSQLKPDTMQAMSDLVTRRNQLLTMQTMEKNRLQIMPKALAMTIKPVLTLFNNQIKKIEEKIVKLIESCPEYQAKNTILQSMTGIGKIAAASIISNLPELGYINSKQASSLIGVAPMNRESGRYKGHRKIQGWSTSSENGFIHGYDVSDAIKPSFQSNISTFIGSRETQKSSHHRLY

SEQ ID NO: 131816 - protein, 314 aa, unidentified
MTIQTPIIGIDVAKENLSLYRLDTQQSATLANDRRAIVTWLKTLPADCAVAIEATSTYHVLLADLAYQCGHRIYVIDGYRLSNYRKGIGGRAKTDQSDARLLARYLAHEQNQLHPWNPACKAYRRLQLLLRRRATLVRSATALRLSFAQDRQMARELKPVLERIKRLERRLNEQVHKALQDAGLAEQAKRCQAIEGIGPLTAAALNLAFLRGSFRNSDAFIAFLGLDVRVKESGRYSGRRKLSKQGDSEIRRLLHNAAMAASRTAAWQQRYQQYLQRGLKRTEALVILARKLARIAFALMKTQQPYRPAVDTVG

SEQ ID NO: 131817 - protein, 421 aa, unidentified
MTEDIEWFVGFDWASQTHVVCLLDRNGRTIGERKVVHGGAELGEFCDWLIAKTGAPPARIGVAIETPHGPIVEMLLERGLAVFAINPKQLDRFRDRFTVAGAKDDRRDAQVLGDSLRTDRRAFRLLAVDDPTVIELREWSRIADDLTQERTRLANRIRQQLWRYYPQMLQVADDLTAENFLALWECAPTPARAAEIDEARLAKVLKAHRVRRIGAAEALGILRQKPLQVAAGATEAATAHIRVAAERVRLVNRQIKEADRKLEALCARLEHPGKTPGESEPGQSSEQRDVTILRSLPGVGRTGLATLLVEATEPLRRRDYQVLRVLSGVAPVTRRSGEARLVTRRMACNERLRQAVYHWARVAMQIDQACKSRYAALRKRGHSHGRALRTIGDRLLAVACAMLKSQTPFDPDHKTPKRALA

SEQ ID NO: 131818 - protein, 310 aa, unidentified
MTILCGVDVSKSWLDAWIEPAGHQRFANTAEGVAELGAWCRAHHAALVVMEASGGLEQPAYLALWQAGQPCAVANARSVRKFAEAMGYLEKTDRIDAMMIARFADAKRMVATPPPSADQQRLVALAVRLRQVTADLGVQKQRLHSVRDPFARQSIQEAIAFFTTQASQLASEIAALIEVDPLWVALDRTFRSIKGVADRTVAYILAELPEIGTISNRAVTKLVGLAPLPDDSGQRRGRRSIRGGRAGLRSILFLVADVARRYDQSLTDFRERLLARGLSKMEVRIALARKLLVRLNAKARDVRAELAHAL

SEQ ID NO: 131819 - protein, 367 aa, unidentified
MKKGSTAAKQRVRNISGQTLTIGLDLGDRNRWYCVLDEAGRIQLEQRVRTNAKALQEVFGAMPRNRIALEIGTHSPWVSRLLSELGHEVIVANARKVRLIGESRKKDDRLDAQTLARLARIDPELLYPVKHRSAQAQADLMMIRGRAGLVRARTGLVNTARGLAKSYGERLRGCNARHLNPEKAEGLSPELQAALEPLLNAIESLSERIVEYNERIENLAQQDYPQVALLKQVKGVGTLIALTYLLTLEDPHRFQKSRDVGCYLGLQPGRRNSGRSEPQLHISKEGDPYLRTLLVQGAQHILGPFGIDCDLRRWGLRLAERGGKSGKKRAIVATARKLAVLLHHLWVSGEAYEPLHNRNRVAVAAAA

SEQ ID NO: 131820 - protein, 346 aa, unidentified
MEQISRIGMDTSKRFFQLHGVNTAETVVLRKKLGRKEMVTFFEKLVPTVVGIEACGASHHWARLLQSFGHTVKLIPAQLVKPYVKRGKNDMADAEALCEAMSRPTMRFVPIKTAEQQAALMLVGLRDRLIRNRTQLCNAIRGYAAEFGFTAAKGVANLRPLLERIQADEGVPDLARELFAAQAEEYAQLEEQIAEISGKLMAWHKADECSRRLAKIPGIGPIGAALLMMKTPAPELFRSGRQFAAWIGLTPRDHSTAGKVKLGVITRAGDEALRAVLVSGATAVIKHAVGCKGRASPWLIDLLKRKPPKLAAVALANKLARIAWKLMVTGEAYAATSTPIASAAAV

SEQ ID NO: 131821 - protein, 361 aa, unidentified
MSQVFQSFVGVDLHKCTVTLTAVDAAGEITRLKISTKSTGKIEAWLQALPGPVWMAVEACPFVEWFIDRFRACVGRIDIADATELANRRGKRRKTDFNDSLDMAVRLSRGECPLGFIADEELMQLRKLGRHWRHLSRLLSRTKHSMKSLLNAANIRGPKFDGAAAQRWLLANRDLLQPVQQQTFADLLDVVLLTERHRERLRREIIFATRSPRFAPIVSLLMSVPGIGEIWAALIAAEIGPFDRFPNADALEFWAGLTADMKESAGRTQSGNITKAGSVTLRWALCQAAVTLCQCDQRQEATRARLAARIGKPKANVAMGRRLLRVLYAMLRDGKTFERGPARDRTAAANQARLGRKKQVA

SEQ ID NO: 131822 - protein, 361 aa, unidentified
MTHPDTVELFGGVDTHSRTHHAAVIDPLGRHLADAEFPATAAGYQDLEAWLRSHGQLVAVGVEGTGSYGAGLARHLSSAGLVVVEVDRPDRRARRNKGKSDPIDAYAAAAAVACGRATGTPKSRDGAVEAIRALRVARNSAIKARTQAINQIRALLVTAPEPVRGPAAGLGTASLIGHLSRLGPGTDLRDPAAAVTTALRTLARRHQSLDTEVRDLDKAIKTLVDQVAPQLLDLPGVGVETASQLLTTAGDNPHRLRSPASFAALCGAAPVPASSGKTRRHRLSRGGDRQANRALHIIVLTRMSHDPRTRAYVHRRTTEGLSKKEIMRCLKRYVANEIHRTLNDPRPAQIYPAATEHTPAA

SEQ ID NO: 131823 - protein, 368 aa, unidentified
MSTKLKYVGLDVHKDTTVVAIADGGRDGEVRVYGTISSDLHAVEKVMAKLRADGSALRVVYEAGPTGYGLYRRLLQLKIECIVVAPSRTPHPKGTRQKTDRRDAIMLARLHRAGELEGIHVPDAADESIRDLTRARADAVHDLTRSKQRLKSFLLRQGYRYTGKANWSAAHQRYLRELVLPLPALKAVLEEYLLAIDQSVQRVSRLEELIATHVPAWSRYPMVEALMCMRGFQLTAAAVLVAELGDLKRFEHPRHLMAFLGLIPREHTTGNSRKLGEITKNGNTHARWILVEAAQHALLPPKVSTQLSLRQQGQPTAYRELGWKAQVRLHKRGWSLLQRGVMKPKVMIALARELSGFIWCLLRQVPQS

SEQ ID NO: 131824 - protein, 428 aa, unidentified
MSNQELIRRKQYCQIVNEITGSDQYLVVGTDVGKDKHHAFMGTATGKSLFRKLIFENDLDGFSGLLKTAEAIKSQNSLSKIVYGVEPTGNYHKPLARHLIRCACNVVLVSGVAVKRNRELLNGRWDKNDTKCAANIADLVSRKRCLYYDCPSPSIIELRSLLSLRRKLKREEHGLRMRIRNNLLAQYFPELDRFYNACESESLAIVQWILNPDTISAMEFGEFFHMVTTTHRGIAQTLRLRKIHGLATKSVGCPMGPATEFEADLLVEKLKQVRRQVKKTNDLIEDFCLEFTEYSYLLTIPGFGPYISARVLASIADPFRFENRKQLVKLAGYDLCAERSGKKSAEAIPVISKKGNGELRYALYQAANVAATRVDLFRTYFARLIRGRERERGIKTKMRVKLAVKMLVIGWTLMKKREVFNPAYLNIE

SEQ ID NO: 131825 - protein, 382 aa, unidentified
MNRIVKIGMDVHSTNYTLCAMEPVLDGEDRIFTNIQVTPDYKNVLQFIENLKNKLGPDDSYSIECGYEAGCLGYSLYNQLTSAGVKCVILAPTTMLTQQGKRVKTDKRDAVMIAQCLSYGGYHAVHVPTDKDDSVKEYLRMRDDHKLALKKIKQQINAFCLRHGYFFPDTKWTIKHLSWLRKLEIPGLLRETLDEYLASYDEQTAKIERFDQRIEELASDPDYKDNVKKLGCLLGIKTHTALSLIVETGDFTRFRKGSTYAAFLGLAPGESSSGAHINRTGISKAGNSHLRRLLIEGAKGICKGQVGHKSKELRSRQAGNSAEVIAYADRGNTRMRSKYYRMLRHDKKKNVAVAAIARELACFVWGIMTNNMEPRTSGKKAA

SEQ ID NO: 131826 - protein, 414 aa, unidentified
MDQIYDRVAGLDVHRDNVVACIRSLGPRGGVVFEKERFTTTTAGLRELEAWLTDRRVELVAMEATGVYWKPVLYALESRLTVWLCNARNVSKVPGRKTDLSDAEWLADVAAHGMIRPSFVPPPPIRELRELTRYRKTQIDARAAEIQRLEKVLQDAGIKLTSVASRVLTQSGRAMIEALIAGERDGARLAELAKGKMRPKIPALTEALTGHFDSHHAVACRRILAHLDFLKESIAALTEQIDSRTATFAPVYTLLSPVPGFDRLSIDVIIAETGADMSRFPTPRDLASWVGLCPGSHESAGKHRRVATAKGNPWLRGALIESARAAARTKRSYFGAQYRQIARRRGPNKAAVAVAHSLIELVWHLLSTGELFTDLGDTYFTRRQDPERRARRLVAQLEELGFNVTLKAAAALPA

SEQ ID NO: 131827 - protein, 348 aa, unidentified
MNTTAQLPVIGMDIAKNVFQLHLVNGETAEIERRKIRRTKIAEFFANRPPSLVAMEACGGAHHWARIFQHMGHRVKLIPPKHVRAFLLRDKTDALDAQAIWVAAQQPHIREVPVKSEQQQVCLSLHRIRAQLMKMRIMQTNALRGLLYEFGIVLPEGHEKLLATVQDELAKAQQGNQLSEVVVLSVQEQLHRIGALQFDIDRLDKRLAAMVKQNQQMLAVQAIPGIGPLSATALVATATDVASFKSGRQFAAWLGLTPRQVGTGGKTQQLGISKRGDSYVRSLLIHGARSIVSRSEANSWVGRLKMRRHFNVAVAALANKMGPTAGEGLAKGTNFDRLKWAARESAAA

SEQ ID NO: 131828 - protein, 485 aa, unidentified
MVLGHVGESGETVEAVIPIERVSTTTYPNRRGIPMTIMEEAMAVRKRAVLELAHPNAAGIDIGSASHYVAVPADRDDESVREFKSFTDDLERLADWLVACGIDTVAMESTGIYWIPLFELLESRGFTVYLVNARHVKNVSGRKSDVLDCQWLQQLMSYGLLSGAFRPKDEICALRAVSRQRDMLLSYQARHVQHMQKALAQMNVQLANVISDIVGETGQKIVRAIIAGERDGARLAQMKNVRIRASEAEIAKSLRGNWREEHLFALRQAMALYDAYGERLAECDQQLEALLAALQPEAAGDPGKNRRRSRARNAPKFDVRAYLFGMCGVDLTRINGIDTTTALKVISEVGPDLSRFKSAKHFTSWLGLCPGTKISGGKVLSGASKRTANRAAQALRMAAAALRSSQSALGAYYRRLCARLDRPKAITATAHKLARLIYTMLTKGTEYTDQGQDYYEERYRQRVMHHLAKRAEKLGFQLTPLAVTT

SEQ ID NO: 131829 - protein, 349 aa, unidentified
MSKQKNAIAVRTIGIDTGKNTLHLIGLDGRGEVVLREKVSRNRIAARLVNVPPCLIGIEAGMATHYMARELVALGHLVKQVPPAFSKPFRPNHKNDFRDAHAVAEAVQRPLTRSVPIKTDDQLDLQALHRVRSRLIGDRTAVINQLRGFLLEHGITVRQGHRFLRQQLPQILATRTDVLSPRMVRIIGDLVGDWAHLDERIESVTDEIEGLARTDVSCGRLMTVPGIGPIIASAMVAAIGDGASFAKGRDFAAWLGLVPRQMSTGDRTILGRITKRGNRYLRMLFIQGARAIQLHPASWAKHSFGRWLTAAARRLHCNVLTVALANKLARIALSVLVQGRNYETRVVAA

SEQ ID NO: 131830 - protein, 368 aa, unidentified
MKKRITFVGLDTHKNSIEVALADDGRNTEVRLYGSIGGDLASLDKMIRKLQATGTELRFVYEAGPCGYQIYRHLRAQGLQCDVVAPSMVPKRSGDRIKTDRRDACNLARLYRAGELTAIYVPQEDDEAMRDLVRGRQDAINAQRKVRQQLGGFLLRHGFRYPGKCVWTLAHRRWLAGVRMPHPAQQIMLQEYIHSVEECTQRVHRLTEQILQLMPDWRMHPLVGALQALRGVAPVVAATAVAEIGPMGRFEKPRQLMAYLGLVPSESSSGGSVRRGAITKTGNGHARRALIEAAQAYRHPARISRVILKRQEAVPEPIRQIAWKAQLRLCARFRKLIARGKSRNRVVTAIARELSGFMWAIAKQVPVP

SEQ ID NO: 131831 - protein, 315 aa, unidentified
MSKKLYVGVDVSKDHLDVATEPNAESCRFTNDPTGIDRLIDWLDQRQPTLVVLEATGGYEIPLATALHIAQMPALVANPRQVREFARASGILAKTDRIDAAVLARFGPGTDAQARPVPDEQARQLKALVARRRDLVEMIGAENNRLKQAPPVVAKQIQWHITWLKQQLDKLDDDISNEIRRSPVWREKDDLLQSMPGIGPVSSFALIAELPELGNVSDKAIAALVGVAPYNCDSGQFRGQRRCWGGRADLRRTLYMSTLSATRHNPVIREFYKRLIDSGKPFKVALIACMNKMLSHLNAMLRNNTPWQPSACQNT

SEQ ID NO: 131832 - protein, 438 aa, unidentified
MKPNAGGIDVGAREIFVAVPADRDKDSVQSFPTFTEDLHRLADWLKRCRVDTVAMESTGVYWIPLFQILEARGIEVCLVNAQHVHQVPGRKSDVLDCQWLQYLHSVGLLKASFRPEQDVCAIRSLLRHREGLVQMGSTHVQHMHKALDQMNIQIHHVISDITGVTGLAIVDAIVEGKRNPKELAKLRDHRIKAGAETITKSLVGDYRPEHIFTLKQSLTAYRYYQQLIADCEQEVQQRLHAFDNREDDNKADPGSTATTVSDGSTITPQAPFHLPSHLERIFGVDLTRIPGFQVLRIQTIFSEIGADLSKFPSDAHFISWLNLCSKDGFSAGRRIRNRNMKTKNRVTTAFRLAAQSLHNDKSYLGGFYRSQRARHGAPKAIKNAAHKLARIFYHLVTTRKSYDESVFAQQEVRNQKRRLHKLQSLAKQMGYSLVEAHA

SEQ ID NO: 131833 - protein, 337 aa, unidentified
MPTLTIGLDIAKNVFQIHGVDRHGKVVIQRKLRRSDVLKFFAKLESGLVGIEACHGSHFWARELTALGHTVRLLPTQYVKPFLIGGKNDANDAAAICAAVTRPGIHFVAIKSAEQQSLQSVHRMRQRLILERTAKSNQIRSMFAEEGVIFPIGLPQLRKGVVALVNDPDSGITTLLRRLGSMYLEQLKALQQWLDELATEIAEIFKSNEACQRLATVPGIGPVIATALVSSVGDPSQFRNGRQFAAWLGLTPMQRSSGGKTRLGGITKRGDTYLRTLLVQGARAVMHFVSRRNDRHSQWIKSVMQCRHVSIAAIALANKTARIAWAILTGNGCFRAA

SEQ ID NO: 131834 - protein, 456 aa, unidentified
MKNDNLPKTKRFVEMALVNPNAAGIDIGDTIHAVAVPIDRDTECVRTFGAFTCDLKAIVAWLRQCEIDTVALESTGVYWKNLFSMLVQNGFEVYLVNARQTRNITGKKTDESDAQWIQRLHSCGLLSSSFLPDDKIESLRTLVRHRRNLSNDSSSNILRMQKSLELMNLKIHTVISDLTGKTGTAIVEAIINGERNPENFLPLVDSRIKADSETIRKSLEGNWRIEHLFLLKQSYTMYQFIRQQITVCENEIEGVLQQLVAQNNDGIIEKFPIPSTPSGRISKRKKTKNQPVFNTREYLKRIHQTDVMEIYGVSETVALEATAETGTDLSKWATEEKFVSWLNLCPNRKISGGKLISSKVLKKRPNLAAQAFRIGANSLKSANNWLGDYFRRMKAKGGNKYAIVATARKIAIIYYRMVRYKQKFHPFDLEEYKEKFKLARIATLERALKRLKTEAA

SEQ ID NO: 131835 - protein, 275 aa, unidentified
METKVFVGVDVSKDSLDVAIGPEKDIITFANDQKGVDALVKKLSRIDPQLTVFESTGGYELMAASSLAGAGLPVVIVNPRQVRNFAKATGILAKTDAIDARVIAHFAEAVKPDVRPLKDRATSELTARVTRRRQIVEMIVAESNRLKLANKRNIKDIKDHIRWLQKRLDKIETDIGKTIQNSPIWRCKADILQSVPGIGPITSATLICDLPELGLLSRKKIAMLAGLAPLNCDSGKFKGRRRIWGGRGSVRSGLYMATLAATRYKGILSTPDCCR

SEQ ID NO: 131836 - protein, 330 aa, unidentified
MQYLGIDISKNKFDCCIFLNKQKKKTKVFDNNHSGFIKLNEWLQKLEIEILELVAVMEATSIYHENLAYFLYSNNIKVCVANPARVRKFAAGISVLTKTDEVDAEVLVKYGELAPYNIWQPDSDQLRLLKQLILRRDAYTSELNREKNRLDQAYSNNTNSKLIEIIQLDIENIYNRIQYLDKLIDETIDDDISLKQDLCLLESIPAIGKRTALTLLTLFKGKSFTNAGQAAAFCGLVPLQRQSGSSIRGVSKISRSGSSKIRSKLYMAAVVAIRHNPHIKIVYDRLLRNGKAKMAALCAAMRKLIHIAFGVLKHQTPYNENLIGFAKIPC

SEQ ID NO: 131837 - protein, 331 aa, unidentified
MHYSHYIGVDISKNTLDAVIYAAEMRRSDTKHLTNDKTGLKELVAWAKAAGAKPNDMLICAEHTGVYGNELQLFCEKKGFALCLESPLQIKRSMGLVRGKDDQIDAIRIAQYAYDHKDKLKLFHRPSGNIITLANLLRERRLYVRQKATLMAQQAEIGSYETATSRNRRESLIDRHAAAVRSVEKQMMEIIKGDKALKKTYDLISSVVGIGPITAIDTIVYTNNFQNFETPRQYASFIGVAPFDHTSGTSVNGRTRVSQFCRKQQKVSITMAARSAIVNDPWMKNYYHRKMKEKGEQRNQHGVVLNAVKFKLVLRMFSVVKSGTPYKVMKY

SEQ ID NO: 131838 - protein, 338 aa, unidentified
MTTSFSLYVGVDIAATSFAATWAQDPAIAPRATTFDQTADGYHAFQQQLAATAVAPAATLVALEATGSYWVTLATQLHQTGYAVAVLNPGQVAQYARSLPRRAKTDALDAQLLLRFAAERKPPRWEPPEQVYHELRQRLVVRDGLLHMRTQARNQRHAVQQWPVQITSAVEALDNIIAELDEQIRNLDSEIGQVLADGAWAASATILLATPGLGPITTAWLLVGTLNFSLAATPEQLTAYAGLVPMPHESGSSVRGRRRIGHSGNSRLRTALYMATLNAARYNPTIRTFYERLRAAGKPMKVARCAAARKLLHLAWALVKKQQHYCAPQAAQPDALAA

SEQ ID NO: 131839 - protein, 402 aa, unidentified
MNCVGIDVSKGKSMIAVMRPFGEVVVSPFEVRHTANELSELAGLLKSLDGETRVVMESTGNYHAPVAWLLHGAGFYVSVVNAMLVHDYGNNSLRRGKTDKKDAVKLANYGLDHWLTLPRYVPEEDTRLMLKTCYRQYQQYSKVQTMLKNNLISLLDTAFPDANRLFTSPPRADGSEKWVDFVATFWHCECVCGLSKKAFTAKYQKWCRKHGYNFSQDKALDIYASACGRFGVMPKTNTAKLLVEQAISQLQTTSAALAALKQEMQSLAASLPEYPVVMEMFGVGPTLGPQLIAEIGDVRRFHSKKALVAFAGIDAPPYQSGQIDVRSRSISKRGSASLRRTLFLVMGVLLQCAPMDEPVYQFMNKKRSEGKPYRVYMMASANKFLRIYYASVKAYLDSLEHD

SEQ ID NO: 131840 - protein, 478 aa, unidentified
MIDLKKIISENEIKEVKKEEDRKERKRLFIGIDIAKEKNFAVILMNENNNKILMKNKFENNPYGFRMFLLEVEKLMKEKEILLDEVIIGVESTGHYWEGLHYFFNKRNFEVGIVKNNLVKLKREAKYPNKGKNDLIDSHCIALNLVDRDYVFVKERDRLMISLKRLTRTKYNLLKSSTQNKNLLRAWLDSYNSVYLGVFTEPFCKTGRSILREFPSPRDIIDKNMEEIKEILKKDKRNKGIHYRLIEEYLYRVREVYMDIQEVEAGSRKQVELYLKIYENLEMEIENIKINIKEVAEKANLDYEKIIKIKGIGEQDIISILAEIGDINNFNTPRELQAFLGLGITGKSSGTGIIKKPKINKAGNRRARSILIFMTINLIDKNSDWKKVYCYYKAYNRKSPKANKKMVVAVACKLIRVIFGMLKNASEFDRNIVFKNLDFKKCNKEQFIEEYTGGKRKSVLTEEELEELFDRANTDKLF

SEQ ID NO: 131841 - protein, 335 aa, unidentified
MKHYAGLDLSMESTQVCIVDESGRKLVSEKVESSPEAISKFLERYGPVERAVIETGRMSPAICLGLRELGVPVVCIDARQAHQSLKAMKANKTDPHDAAGLAQLARTGFYKEVHVKSPAAHGVRSVITARGHLVEARVRLDNMIRGLCATFGYRPGPGQGKAFIERIMQAAHIPGLGEAIASLLAVRGELVEQIKEMDRRLRIIANQSQACEILMTIPGVGVQTSAAFAAAVDEAGRFRQSRNAGAYFGLVPRRHQSGEIDWTGRITKQGDGTVRKLLYEAANSILTRSRESFALKTWALKIAKRRGLKKARVALARRLAVIMHAMLRDGTLFQA

SEQ ID NO: 131842 - protein, 355 aa, unidentified
MSQEKYIGMDVHAATISVAVLNAQGKVLMECVLETKSATILEFIQGLRGTLALTFEEGTMATWLHDLLKPHVSRLVVCDPRKNALMRDGNQNDRVDARNLAELLRTHQVHAVYHGQHGTRALKELGRSYLTLTKDSTRVMNRIKSVYRSWAIPCAGTSVYSRRHRAEWLAKLVEPGVRIRAEHLYQQLDSLEPVRQAARRELLRESRKHAAVKLLRQIPAIGPIRSALLVAILQTPHRFRTKRQLWAYSGFAVQTYDSGEYRVVRGKLQRNRERITVRGLNRNHNHDLKNLLKGAAISAIQRPGPLQDFYAARVEKGMRPSLARLTLARKMAAITLIIWKKGVSFDPKQLQRQTA

SEQ ID NO: 131843 - protein, 316 aa, unidentified
MNTQNNTQINVGIDTSQSQLDVYVRPSGRFFSHPNNPDGIKALIQGLRELRPDRITIESTGRLEFPFFEAAHRAKLPVAVCNPSQVRHFAQSIGRCAKTDKLDAMDIAHFGEVTQPRITGLKPEKLRLISDLLAVRCQCLDMSTMQKNRLKRMPASVHAPIKAILKSIQSQIASIDKKIDKLANDVPQWKAQRDLLMSAKGVGKVLAYTLLSELPELGRLNSKEIAALVGVAPMNRDSGNFQGRRFIRGGRSKVRTVLFVSMLSAIQCHPKLKPMYERMVAAGKPKKIAIVACMRKQLVILNAMMKNGTAWDPEMP

SEQ ID NO: 131844 - protein, 309 aa, unidentified
MLSSVGIDTAKATLEICIKPQKIRFEVANNSAGFEVLLERLKDFNISRVLIEATGGYEKDVLIALASAGLETICINPARARKFADAMGKKAKTDKIDAEVLADFAAHLSAPQGQPVSPEREELRELVKQRAQFVQSRDDDKRRRQQCRSATVMAHFDEHIEQLKVLIKRLDEEIDQAMVQLDDTRACQLLAVTGIGRVTAANLLASLPELGQLDRRQIAALVGVAPYNNDSGSHRGHRQIWGGRAHVRRVLYMSSWIIIRHNTEFKARYEALRARGKCAKVALVACMRVLIVRLNAMLRDNTPWREQTA

SEQ ID NO: 131845 - protein, 320 aa, unidentified
MEQTYIGIDVAKDSFVVATRVEGKVTTSLHSNDRKGISSLLKGLPGSSWCIMEATGVYSLQLAIALYEKGIKVSVVNPLQIKRFAQTKLKRTKTDKVDAALIAEYGERMQPKLYEPPAPFMRKLQQQRMSLKLLVKSKRSFLNQLHALAQLDKADKAAVRACKTVLASIEKQIVELERQMQQTAEEQCQELFSLLQTIPGISTKSAIELIVVSGGFRNFTSARQFSAFIGISPCINESGTSIRGYRGISRIGDKNIRATLYMCSMAARVHNKACRELYERMVKAGKAKKVALVAVMNKLIKQVFGIVNSGEVYSAECQAQ

SEQ ID NO: 131846 - protein, 427 aa, unidentified
MEAILERCCGLDVHQASVVACLLVGEPGKKPHKTVRTFSAMTRDLMALRDWLRDEKCTVVGMESTGVYWKPVYAVLEDDFEVVVGNAHHIQNVPGRKTDVKDSEWIAELLRCGLIAKSFVPPKPIRELRDLLRYRRKLVENRTAERNRLLKLIETANIKLSSVASNVFGVSGMAMLKALVRGDATPQQMAQLARKKLRSKISELELALDGKIEDHHRFILEMQLSRLDQLDAHIAKLEERIDHKLVSYRDQHERLMTIPGVERITAAILIAEVGVEMKVFKSSAHLAAWAGVCPGNNESAGKHKSTDVRKGNINLKTALVEAAQSAARTKGTYFKDKFFRLKARRGHKRAAMAIARKILQAAYLILSSEDATYHDLGDAYLDRLNTTRVASNLVRRLERLGYVVTASPKAELSEHLPTETTCNAALT

SEQ ID NO: 131847 - protein, 423 aa, unidentified
MAESFTFFVGVDLGAERHHVVVLNATGETVGRRSVEHNGADVLELFSWLAKITGDTIASLIAIAAETPRGSLVESGLERGHPVFSINPKQLDRFRDRFSVAGAKDDYRDALVLAASLRTDQHCFRSLQLGDPRLVLLRELSRTGDLLQRDLRRNCNQLWSLLQRYFPALLSLSPAADDPWLWTLLQSAPLPTQAARLKPRQLEKILADHQIRRVSASQLSDLLHQPPLPLAPGAAPALAESAGLLLPHLRLLHQQTAQLARRIDNLIEELQQDPDFAEHRDIEILRSFPGLGRVFTATVLAEAHRPLVDRDYHALRALGGAAPVTRQSGKTKLVLLRRACNHRVQHAVFHSANVFVQKDPRARQQYQRLRLKGNTHARALRGVADRMLALLFTLLKNGSCYDPDRRLASNHPEGTPPQKNLDK

SEQ ID NO: 131848 - protein, 341 aa, unidentified
MTKHSVIGLDLAKNSNALVAYDGTGKPLWRKTKSRTQLRQFLAQQPVSTVVMEACSGAHFLAQQIEQMGHTAVLYPPKHVKSYQRGQKNDYNDARALVEAHQHGHLRPVPVKSVEQQDAALVVLQRKQLKEEQIRLGNQMRALLAERGLALPVGVGALKAGVPRVLEDASNSLTNVVRHILAQAYTRYLGLLEELAWYDRQLARQAREDDVCRRLCGVPGIGPIVAGVLQAWMGDGRQFRRGRDASAALGLVPRQFSTGGREVLLGITKRGNRYVRSQVVNGAQAVLRYAAGKDDALSRWVMRLKQARGHNKAVVALANKLVRIAWVVIARGETYQPRMAA

SEQ ID NO: 131849 - protein, 350 aa, unidentified
MTTLARSVTGSVDTHLDVHVAAALDEKGTLLGVEYFETTRRGYKKLLAWFENFGPVVLVGVEGTSSYGAGLTRHLHAEGIAVVEVDRPNRQWRRRKGKSDPEDAISAARAAFSGDACGAAKTQDGNVEAIRVIRVARLSARRARTQALNQMRSLISTAPDPIREELRHLSVARLLERVASFRPGTKTDVVSLTKWTLRTLARRAIELEDEVKAFDAILEPLVAETAPELVSTLGIGTDSAAALLVAAGDNPHRLRSEAAFAHLCGTSPIDASSGKHERHRLNRSGDRQANSALWHIVITRMVYDPRTTAYIERRMKEGLTKKEAFRCLKRYIAREVYGLLPMDRLTLDSP

SEQ ID NO: 131850 - protein, 340 aa, unidentified
MKLYGAIDLHSTNNVTVVIDEQDRVVYQKRLPNDLALILNELSVYQAELQGIVVESTYNWYWLVDGLMEQGYQVHLANTAAIQQYNGLKYTDDNSDARWLAHLLRLGVLPEGYIYPRAERPVRDLLRKRSQLVRQRTTNLLSIQNLMTRNTGSSLSAKHVKGLDVQQVDELLPNGDLALAVKANLAVMLSADEQTEILERTVIERVQLRPQFCFLKTVPGIGKILSLTIMLETGDIRRFASVGNYASYCRCVGSQKISNGKKKGKGNTKNGNKYLAWAFVEAANFAIRFNAKIKSFHQRKKAKTKGVVAIKAVAHKLCRASYYIMRDRVPFDITKAFGQK

SEQ ID NO: 131851 - protein, 377 aa, unidentified
MGNYNEAFVGFDTSKSRNSVAIADGGRRGEVRFLGEIENTAAATAKLVRKLSAKYKRLTFCYEAGPTGYGLHRQIKGLGFGCVVVAPSLIPKRPGDKVKTNRRDALSLAKLLRADELTAVWVPDGGHEAMRDLTRARETAMLDLRTKRQHVSAFLLRLGRPYPEGKKTWTKAHLSWIAGQKLEHPQQRLVLEEMMLAIRQAQERLARLEQAIAAAVPEWSLAPVVTALMAMRGMDLISATTLLAEIGDLSRFRTPTELMAYLGLVPSEDSTGDAVKRGPITKAGNRRARRMLVECSWSYQHPPRVGQAKQPKVDAAPPAVREIAWKAQCRLYRRYRTLIRKGKLKTVAIVAIARELAGFVWAVARAVSAARVAAATA

SEQ ID NO: 131852 - protein, 401 aa, unidentified
MKRLSGGIDVGSGSHHILILDDEDNVLYNKKISHKLNEFTENIKLFRKIEKKEGGKISFALEGKNGYSAPFDRILLDQGFTLYNVDNFKLKRFREAFAGEWKDDGRDSLMLSKMLKLKEHINSKREKVFIKIEKPSLVAESLKLLSRHQQTLINEKVRLINRLGKKLLEVCPQILKLGKLKNKKIIAVLAKYPDFSKYKRITIKSLLKIKGIGKIGAPFLLKRLNNIEYMPGLTDIYKTIILSYAKRILELQKEIEDIDKKLDEIGEKSKEVNHLKTIPGVATKLASRLIGEIGDINRFLSEKQLAVYCGVACVDNNSGKVTKAKAVYKANKICKKALITMAGGSIRLSLQCKAYYLKKRTEGKNHNHALRCLARQMIKVIHRMLTEDREYIVRKELKKVA

SEQ ID NO: 131853 - protein, 384 aa, unidentified
MTTEWYGRLPSSAAALVHMSASCCAAARVSVRAPFSQDGGSEMNAVHTVVGVDVAKNVFQAYWVVAETGEIRNMQIKRAKFLEHFAGRPRCLIGMEACGGAHHWARELSKHGHDVVLLPAKAVGAFVAGNKSDAIDARAIWTAAQQGGIKRVAVKSEAQQAVLALHRMRQQLVKVRTAQSNALRGLLMEYGEVFRQGRASLARGIAAALERIEQRLPRVVVESLMELWQRVGQIYGQVKQIERRLKSLLTEDRNAQRILQIPGVGMLTATAVSATMGQASAFKSGREFAAWLGLVPAHTGTGGKTRMLGISKRGDSYVRTLLIHGARSVFSSTKHPGPWLQKISQRRPLNVAVVALANKMARTIWALLAHGRTYQPDYVSRAST

SEQ ID NO: 131854 - protein, 365 aa, unidentified
MWEAPVEIHRTSVGFDVHARSVVACGLDRSTGELFERRLTPDHQEILAWIGSLPAPVAAVYEAGPTGFGLARFLEAAGIECSVAAPSKLQRPAGDRVKTDVRDARHLARLLHLGQIVDVAIPSVEQEAARDLVRAREDCRGDLMTAQHRLSKLLLRQGIVYYGGNAWTGKHEQWLRTHRFEVPGLQVAYDAAFDAMLATLDRRGRLDQAITAMAADSVFTPVVGRLGCLRGVSTLTAFGLAAEIGDWERLSGRSIGAYLGLVPTEYSSGSTRSQGGVTKTGNSHARRLLIEAAWHHRAPYRPGRDLRRRWEAASPAARARGQAANRRLHARWARFDERKKRSVVANAAIARELAGWCWSLAVLDD

SEQ ID NO: 131855 - protein, 370 aa, unidentified
MISVGIDVSKGKSTVCILKPYGEIVSKPFNITHTHKDLSELSSMLFRLNDEVKIVMEATGIYHLPVLTYLQEKGFFVSVINPYLMKSYRNESLRKAKTDKIDSRIIANYGIDHWFKMKEFQISGVIYEELKLLGQQYRHYMKLHLLSLAELTHLLDLTMPGIKNLLASWNETNRKDKRSDFVERFWHYDVITSMSEQEFTEKYILWAKEKKYVPSQEKAKVIYTLAQESIPTLPSETSSVKMLVTEAVRVLKEVDATLGLILSRMQEIAKTLPEYSVVREMGGVGNTLAPKLIAEIGDVRRFRNGKALVAFAGIDPPPYESGQFVGCNRKISKRGSASLRKVGYETMRSLKMRSRPEDPVFPADPPADSG

SEQ ID NO: 131856 - protein, 318 aa, unidentified
MKTMKSAVHIGVDVGKFDLDFHCHESCEHFSVSNTCEGIGQAFKQLTRYTIERLVVEATGRQEQRLVGVAQKLGVPVVIAQPIAIRRFAGALGLLAKTDKLDSRVIAQYAAVIQPQVRELPDKNTRKLKDLTIRRKQIIGMLTMEKNRLQVMPRFLRAEIRKSIASLQRQQQRLDAHILELSEQVVNAWREQRQIMESMTGVGVTLSTTLLSDLQELGTLNQKQIAALVGVAPMNRDSGKMRGKRRIRGGRAHVRTVLFMATLSAIQHNPVIKCFYQKLVAKGKNRKVAVVACMRKMIVLLNAMVRDQTYWGEMKSMA

SEQ ID NO: 131857 - protein, 390 aa, unidentified
MLLLGIDIAKLNHVASLVDSSSGELIFSNFKFQNNILGFSSLLEKISKFSINEIVIGLESTGHYGENFINFFFQKGFRIAVINPLQTSHLRKANIRDSKNDRLDSINIARALLFGEHRYISQKNLTNFALKKLTRFRKSLIKQKTKTKIQLVSLLDIIFPELQYFFKSGVHSNAVYTLLKKYPSTEKIAALREKTLFSILNKASKGHYKEEHALQLKSLAKSSVGIKDTSVSMHIPQLIELIEMLDSQIKSIEKEINSSVGEESPILTIPGINTVAAASILGEINDIDNFDSSSKLLAFSGLDPKIRQSGNFSASSCRMSKKGSSYLRYALIFTAWNLVRNSETFNRYYLSKRAQGKSHYNALGHTAHKLVRVVYTLLKKNISYQENLIV

SEQ ID NO: 131858 - protein, 437 aa, unidentified
MITQTVVHPDAAGIDLASEVHYVAVPADRDPQPVRNFGPTTDQLIVLADWLQQCGIRTVAMEATGVFWIPLFELLEARGLEVCLVNAQHVRHVPGRKSDVQDCQWLQFLHSVGLLHASFRPALEVCAVRTLLRHRDSLVQVASAHLLRLQKALDQMNVLLHRAVTDITGTTGLAILDAIIAGERDPRKLAAHRDHRCKKSEAEIAAALKGDWKVEQLFALRQSLAAWRFHHQLADECLQEVHRLAAKIESRTKATPPAPTKRGKQPDEAVRTLLFQKFGVDLTAVDGVNTHVGYTFLTEVGPNLDRFASPENFASWLGLCPNNKVSGNRQLSVSTRPVSNRLATALRMAAQSLNRVESPLGDWFRRMRAKLGPAGAITAAAHKLARILYTMIKTRTAFDPTKLGNPTLIRQRKERSLRKQAALLGFALQPADAGAVS

SEQ ID NO: 131859 - protein, 397 aa, unidentified
MRRVIGIDIHRTFGEVVFWEDGRLRHGGRVDMTRTALEGFGKTLTSTDDVVIEATGNCMAVSRVLSPFVRRVVIANPLQVKAIAQAHVKTDKIDAGTLANLYAAGYLPEIWTPDAATERMRRLVARRYQVVRHRTRIKNEVHSILNAHLIPKCPHADLFNGRGREWLKRQPLPDDEQIAVQRHVRELDRLGEDLAVLDRQIAEGTIDDPAAKRLLTITGVDLTVATGLMAAIGNISRFESPQKLVSYFGLNPRVRQSGLGAAHHGRISKIGRSHARAMLVEAAWAAAKAPGPLHAFFVRIRAKRGHQVAAVAVARKLAVLVWHMLTKQADYLWARPSLVTHKIRAMELQAGKPQKKGNKPGPAYAYNVKKLRDQEMRVAEQAQKGYERFVDTWRPRP

SEQ ID NO: 131860 - protein, 411 aa, unidentified
MNPVVGLDVAKGESQVQAYLERKKPYKKSFKVKHDLDGLASLLDFIKEIEDISGERPPLVMESTGHYHTPVVQYFEDKGYLIIIVNPLISYKAKSSSLRKVKTDIIDAHHLCELYYKEDLEPYKKRGIQLMNLRHLTRQHDNITSMFVQTKLQFQAVLDQVFPEYSKVFGDLYSDVSLKTLQAFPTSEDVLKTDIETLTTKIKEFCNTRSLQWANKQAEKLMTAAAQNPFQKALYSSLALSLDMYINMLFEYKKHLSMLENEIDALAKSIEESKIIRSIPGIGEKIAATIISEIGEIERFNHPKKLVAFAGLDPSVFESGTFKGTYNRITKRGSSRLRQALYMAVKCAIRDCRKQKTTDEILPRNKRLRAFYNKKREEGKPFRVAVIACANKLLHWIYALLKNKTSFQDLA

SEQ ID NO: 131861 - protein, 596 aa, unidentified
MMKPQEIEDEEHEQVLDRVAAVDVAKASGMVCTRVPHPSRPGKRRTRVWTVDATTNAVLELAGHLVAEQIEKVTLEATWDYWRIWFYLLESAGLDVQLVNARDVKAAPGRPKTDKLDSVWQAKCTERGMLRPSFVPPKEIRQLRDYTRLRTDLTRERTRHYSRLEKLLEDALIKVSAVASSLTTVSARDMIEALIAGERDPKVLAGLARGRMRAKRAALIEALTGQFDDHHAELARVLLDQIDGLSAQVDRLTDRIEELIGAIPAAQGVDPDGSTGPHAGLREDAPVIPALERLDEIPGISRATAQGIIAEIGLDMTRFPTPGHLVSWAKLSPRTIQSGPRTRAGRTGKGNPYLKGILGEAAAAASRTDTFLGELALPADRTAPRQAQGPGRRRPHHPGHHLALAQQPDRPLPRARRRLLRQPHRQRQESPQPHPAAGSARVHRHPRPGRMTRRTAHPAGDHRPGFAAALWLRQVIYRLGGSASVLSGLPVTLSDAVEGVAQGRPLSGSSVSDLPVRACQGLPPPPADAEPAGSTAMREIRHPMAISSANGAMVSKPWWSIQHKNTVSARLGYGVRATTVTRAKDSSHGDGSGHRG

SEQ ID NO: 131862 - protein, 372 aa, unidentified
MICLLKQLNHKERKTAMSKYITIGMDLGNKKHTVCALDQAGNVLWRRDVANTPEALKPFFDANAGATVAMETGLCCRWISALAKSCGCDVLVGNARKLAAIWQSKRKNDENDALTIAELARASHRLFHPVELRDDERHEMVQVIELREVAVSQRTQAVNSVRGLCKAHGVFIPKCDASCFHRVAKQSIPAGMAWKFGPMLRHLKEIAATIKRYDAMLEKYAQAHFKEEVDLLRTIPGVGQITSCAFVAHVADPRRFGSARDAGAYFGLAPGQDQSGDRDAPKRITKTGSTLVRHLLVTAANYIMRDSSADTALKRHGERICARGGKVARRKAKTAVARKLAVLMMAMLKSGKPYDDGLAAMAEMPGKGSAVA

SEQ ID NO: 131863 - protein, 355 aa, unidentified
MKNQAIQYLAFDVHQATVVATVRDEHGAIRMRATVPTEAKAILGLVRGLGPRVHIAFEEGTQAQWLHDLLQPHAERVVVCNVRGRSETSNKSDRIDADELSEMLRVGSIKSVYHGASGILTLKELVRCYTNLVDDSTRVMLRIKALFRARAIPTPGTSVYRARERAKWLARIESRGGRMRAESLLRQLDTLLELRPKAKAAMIAEASRQPGWKVLRSMPFFGPVRVALLLAIMATPFRFRTKRQLWPYVGLAVVTRSSADQEFVNGKLRRRRRAPLTRGLNRNHNPVLKNVFKGAANAAAAKPGPLKDVYDACVGRGVREELAKVTLARKIASIALRLWKKGELWDPDKVAMQTT

SEQ ID NO: 131864 - protein, 345 aa, unidentified
MVVLGADLHKRSHTIVVVDETGRKVAEKTVAATDAGHLELRRWASQWPDRTWGLEDCRHLSRRLDAELVRAGEAVVRVPPKLMAGARQSSREPGKSDPIDALAVARAVLREPNLPVATLDGPDRQVRLLIDHREDLVGERTRHESRLRWHLVELALAEPAPRSLGRLVVQAGLETALAERTAPVARFARDLLARIVELSTTIRALEREIETLVRTLASTLLALPGCGPLTAAKIVGEAAGISRFRSKEAFARHNGTAPIPVWSGNTVRHRLNRGGNRQLNVALHRIAITQIRLGGLGKTYFDHRMAAGDTRTEAIRALRRRISDEVFRRLRADEAAGSIDLAVAA

SEQ ID NO: 131865 - protein, 449 aa, unidentified
MHIRWGAAPRAPVQGTIRHRGGLAAKGSEGVVTEDVEWFAGIDWASQTHQVCLVDAGGKIVGEHGFAHGGAGLAELCSWLLTMTRAAPTAIAVAIEVPHGPIVEVLLERGFQVYAINPKQLDRFRDRFTVAGAKDDRRDAHVLGDSLRTDRHCFRRLSAENANVIELREWSRMSEDLQQERNRLANRVREQLWRYYPQALAISDDLAADWFLQLWAAAPTPATARRLRESTVGGILKRHRIRRITAAEVLASLRQKPLTVAPGTAEAASAHIRTVAQRLTLVNRQIKQAHHRLDALSDRITENEGDSDAMGQKSEQRDVTILRSLPGVGRIVLATLLAEASEPLRRRDYRTLRTLSGVAPVTRRSGKYCIVVRRQACHMRLRSAVYHWARVATQHDQHSRHRYAELRKRGHSHGRALRSVGDRLLAVACAMLTRQTPFDPDQPLKQMAA

SEQ ID NO: 131866 - protein, 374 aa, unidentified
MSNLSEAFVAFDTSKLRNAVAIADAGRAGEIRFLGEIDNTAAATAKLVKKLAAKYERLTFCYEAGPTGYGLYRQISSLGHECTVAAPSLIPRKPGNRVKTNRRDALSLVKLLRAGELTAVWVPDRHHEAMRDLTRAREAAVMDLRSKRQQVSAFLLRQGLHYPCKNTWSKAHMNWLASQTLEYLEQRLAFEEMMLAVRQAQERLVRLEQAIHAAVPDWSLSKAVTALRAMRGIDLISATTFLAEIGDLSRFQTPSELMAYLGLVPSEDSTGDKTKRGPITKAGNRRARRMLVECSWSYQHPPRVGRDKQEKVAAAPSAVREIAWKAQCRLHRRYRALTRRGKLKTVAITAVARELAGFIWAVSREITTVCAVGR

SEQ ID NO: 131867 - protein, 327 aa, unidentified
MLKALSVNEPTLCVGADVHLDEIVLRAVDKTDGHEVLERFHVTNNLPGAQSAATTLAQAAAQKGYTHLEIGWEATGLLWVPFHRFLSASPLLHLFTPELVCFNPKLVANFKDGLVLRRPKNDERDAWDVAARVRFGEWPVSYVPADFWQGLRRLTRYRYQLSRNLSREEMRFQSYAFLKASDWKRVKPFSNVFGATSIALVTEVGDIRRFPDGEHAASFLGLTTSKHISGATLYQSKHITKQGSPNGRYAAVNMALHLSQRVPKYRAMYKAIKSRKPPRKGHFVALVAIARDFVTNVLYDMYRYQRPFFGEVEDYRQYRREHPRTEA

SEQ ID NO: 131868 - protein, 411 aa, unidentified
MWALSKILFKDGDSVMLYLGIDIGKRSHVASLMSQEGKVLFKAFSFANSTDGGESLLAKLGEHVTSVCDVEIGMEATGHYWLSLYSFLVEHGYAIHVVNPIQTDGWRKGVEIRKRKTDTIDSVLIADLIRYGDFLETALADENTMSLRNLSRFRHSLVSSIGDLKRKTIAVLDQVFPEYASVFSDVFGKTSKAILMEFGSPEDLEHITSEQLENLLSQLTLKKFAAEKVQTLAHLSKRSFGVSFCRDSFTLQLRLLIQQITFIEEQVLEIEREIAELLNRINSPITTVPGIGPVNAATILGEVGDITRFSSPAKLVAYAGIDASVTQSGDFHSTRNKMSKRGSPYLRKALFQAALVASNSDPVFNAFYQKKRNEGKHHLTALGAVARKLCYTIHAILKKNCPYEVQPPPEL

SEQ ID NO: 131869 - protein, 399 aa, unidentified
MLAVGIDISKSKSVAAILNQDGSMHTSPFEFHHTQPELDAFIKYILNSNQSATILMENTGHYHYPVLKAFREAGLPVCMVNAYQIKKFGDMDLRKAKTDKKDAVRIARYALEKSYSLVPYTSMEQKYEDLRFLARQYNQRMLTLKNNKVFLLNLLDETMPGITNILPLTTRAPGTSLSVLFINRFKSYDRIKKMGKSRFLDAFEKIARKSRNRQTKTYGLAIYEAALRNITTRGENEYTLAAQDQCLELVCESQKAADSIILKMQTLAETLPEYAVLRSMAGVVDRLGPLILAEIGDIRRFHSGKALNAYAGNDAPPYQSGTFESHNRHISKRGNAALRKYCFEVMQALKLTRPQDDPVYLFLLKKEQEGKPYNVAKMAGVNKFLRIYYARAMETLKQQ

SEQ ID NO: 131870 - protein, 354 aa, unidentified
MTTQHSVIVGIDLGDRYSHLCLLDAGSGEVIEESRIATSREAFGRRFSGAEPMLVAIETGTHSPWVSRILKDHGHEVLVANARKVRLIYGEGRKTDKVDAEKLARLARLDTRLLSPIEHRGESSQCHLALVHSRDALVGTRTKLVNHVRGTVKAFGARLPKCTAQSFHHKAAEYLPQELVAALGPVLETIRVLSERIREYDRKLEKVADELYPETRLLRQIHGVGALTALAFVLTLEDPSRFAKSRQVGPYLGLVPSTDQSGGSDPQRRISKHGNELTRKLLVNCAHYVLGPFGEDSDLRRHGEKIAARGGKNAKKRAVVAVARKLSVLLHRLWVTAEVYEPLYNASRRGCQAA

SEQ ID NO: 131871 - protein, 415 aa, unidentified
MAMLVLYARCAGLDVHKKTVVACLMLTAASGKVSREVRTFATTTAGLQALAAWLESFGVTHVAMESTGIFWRPVFNLLEGRFEVILVNAQHMKAVPGHKTDIRDSEWIADLLRHGLLKASFIPPKPIRDLRDLVRSRKTLVRQRAQAINRVQKVLETANIKLSSVATDVLGKSGRDMIEALLAGISDAEALADLARRRLRAKLPALREALDGRVEATHRILLRHLLDLIDFLQGKLDTLAEEIDQLLAPYERLLTRLMQIPGIGRLAAATILAEIGTDMSRFPSAKHLASWAGVAPGNKQSGGKRLRASTTKGNTHLRAVLAEVVWVISHTKDNYLSAQYHRLARRMGEKRAIVAVSHSLLTIIYQMLRTDQDYHDLGPHFFQTLDTTRQRDTAVRRLEALGYKVLLEEKTEVLA

SEQ ID NO: 131872 - protein, 345 aa, unidentified
MGVTIVGIDLAKSVFRLHGCDEQGRAVIRKQLTRGQLLAFMAQVPACTVAMEACGSAHYWARELEQLGHRVRLVNPRFVKPYVKANKNDASDAEAICEAASRPSMRFVAVKTAAQLEVQALHRVRQQLVKNRTALINQVRGLLAEHGIAIPRGRAQLQRSLAQILEDADHRLSGLMREILSESSERLKFIEARLRQYELHIERLFRQDPRCRRLAEVEGVGPLIATALVAAVGNAAEFKHGRELAAYLGLVPRHRATGGRTIMLGISKRGDRYLRSLLIHGARAALWTIERRRDQRSAWAGRLKLRRGPNVAAVALAHKNARVLWALLRSGEAYRAAPLSLQAAG

SEQ ID NO: 131873 - protein, 435 aa, unidentified
MPMSTNLYKPFISVGVDVGADISWMSIALPNQMFVGKPFKITHSDLASLEKAISAMKEAEEAHSLESRIFLESTGVYHYPLFCYLRDRGFHVAVINPIITKNSTNINIRKVHNDRFDSKKVALIGLKADLKTSVMPSNLVLELRHLVREYYNLMDNRSAYVNKLNGQLRMVFPQFINIFSKLTTATSLALLDKYTSPESFLAADKQEVIALIRKVSRFGLAYAEGKYDAIIAAAKSASVFGHSTNSNLSLIRLYISFIRKYDDEIEAILKAMNGLVDANPGELFVKQIRLIQSIKGAGFLSAVTVMCEIGDFSVFKKPKQLFAYFGLDPSVRQSGNFTGTKNKMSKRGSRLARRAIHTIALVSIGKNKSGEPHNHVLSAYYQLKCKSKPKMVALGAVMHKVCNIIFAILRDNKGFVILSPDEHRANYQSRFNQAS

SEQ ID NO: 131874 - protein, 364 aa, unidentified
MSDGICFAGLDVHARATAAAAVRLGSGEVFRARLSGGPVATIDWLRSLPGPVRAVYEAGPTGFGLARAARAAGVEVMVCAPGAIPRQPGDRVKTDARDALKLARLHAAGQLRPVVVPAPELEALRDLVRAREDLRGDLMAARHRISKLLLRRGLVWAGPGETWSERYLGWLSRVSLDAPLADVVLGEYLACHEALLARRERLDALIAEQATREPWAPTVARLRCLRGVDTLTAVGLVAEIGDIAAFAHPKHLASYVGLVPSEQSTGERRRQGTITKAGSGHARRLLIESAWHYRRAPRVSRTLRRRQAGQPAATIDAAWRAQLRLHRRWTHLDATRGKKRTTVAVAVARELACFVWEIARQPEG

SEQ ID NO: 131875 - protein, 340 aa, unidentified
MSAITIIGVDLAKRVFQLHGAQADGSVAFRKKLSRGRFLSFLAEQPPCVVGMEACSTAHGWGREIEKLGHTVRLIPPIYVKPFVKRQKNDAADAEAIAEAASRPTMRFVAVKSEEQQARAMLFRTRDLLVRQRTQLINAVRGHLAEHGVVAAQGPAHLKRLADAVVDEPSPLPAMVRELGKLFLEQIDVLDTRIGELDKKLRTVAGQAETTRRLQTMPGVGPITAVAVETFAPAMGSFTRGRDFAAWLGLVPRQHSTGGKQRLGKVSKMGQRDIRRLLIIGAMAVVQAASRSGAPKDSWLARMLAKKPRMLVAIALANKMARGLWAMMTKQENYRNPAAV

SEQ ID NO: 131876 - protein, 342 aa, unidentified
MTEVSTIGLDLAKLVFQVHGADASGAVVFRKTLRRARVLEFFRDLPRCVVAMEACGGAHHWAREIGRLGHEVRLIPPIYVKPFVKRQKNDASDAEAICEAAQRPTMRFVAVKSESAQASAAIFRTRDLLVRQRTQLINAVRGQLTEYGLVAAKGTANLPRLLALVDERGSDLPQATRAMLDVLIGMVMMLAEQISALDREIARRAKEEDMPSRLMTIPGVGPITATAIAALAPPVATFRKGRDFAAWLGLTPVQRSTGGKQKLGATSKMGERTIRRLLIIGAAALVRQTSRREPPPGSWLARMLARKPRMLVITALANKMARTVWALLAHNEVYRAPAVAAT

SEQ ID NO: 131877 - protein, 352 aa, unidentified
MNYYIGCDSHKKYSVLTAISDAGEFIPLGRVEHDKTTFRNFLHTLPPASQIAVETTGNWYWIIDEMEKAGHKPSLTNSGKAKLMMGQINKTDKLDARGLAILTRNGTLPAVWIPPGDIRDQRELPRMRMAMVNTRTKFKNRVHATFAKYGIVFDEVSDIFGKKGRRLVEEAMKELPPETQYSVREQLQLIDEVEQSIAQVEKRIKEVIKEDHAMQLLLTMPGVGPILAIVIALEMGDVNRFMTGENFASYSGKVPRVSSSGGKTRYGKARSDVNHYLKWAFTEAANSIVLQQHKMPDCHVLRLYFRIKKNKGHAKAVTAMGRHLAEAAYNMLKNDVPYREPKIKQLVSSDPG

SEQ ID NO: 131878 - protein, 343 aa, unidentified
MKINRVGVDLAKNVFQLHGVDRKGKALWKRRLTRGKWLAVLCDTVEPGTEIGMEACAGAHHWARQLIQKGYVVKIIPPQFVKPFIKGNKNDANDAAAICEAMGRPNMYPVRVKTVGQQDLQAMHRIRDEIKGHRVAKANQIRGLVTEYGLVAPQQLPSLRRAIPGWLEEADNGLTFLFRQLLQGLWGDLYALDQRMTELDKQIAVIAQEDPTARRLQQLRGVGPLIATALVATVGDARQYRKGRDMAAALGLTPRQHSSGGKDRLLGISKRGDAYLRCLLVHGARSAVRTAKDKDDRLSRWITNLQARRHSNVVAVAMANKIARMAWAMMTKGTDYDPDFTAC

SEQ ID NO: 131879 - protein, 320 aa, unidentified
MLSFCGIDVSKDRLDVMVLPDEYSSSVPNDPAGWAILVEQLRGFSITAIGIEASGGYERGAVRSLQAAGMPVRQVNPFKLRQFAKASGVLAKNDPLDARMIASFVGIMPTRPAQRTTPAAEQLVEMLAVRRQLSAEKIAAENASRLLEDPMLQRLSRRRIARLAADIELLDKRLVEIVATDATLAHRYRLLTSMPGVGPVLACTLIALLPELGGMSRKQVAALVGVAPYAFESGTLKGRRCIWGGRANVRQVLYMAAMSASNWNPVLKLFHDRLKGAGKLPKVVIVAVMRKMITTLNAMVRDDIAWADRLSGRHSVTTAR

SEQ ID NO: 131880 - protein, 418 aa, unidentified
MKVVYPICCGVDVHKTFLVATIITSQGITPHYSKKRFSTFNNSILQFKQHLIDNNCFDLCMESTGKYWVPVYNLLEDTIRITIANPKWVRAVKGNKDDAKDSKWIGDLFRLGLVPGSYIPDKPIRILREYTRYRSKLVSCKSSEKNRFQNAFTVCNVALDAVVSDMFGKSATSITDYLISSDSFDPEYCSSLLQKSLKKKADTVIESIEGYQMTMEQKERIVMVRSHLDFIQQSIFTLDEKLDKMVAPYESAITLLCTIPGVDRASAITIISEIGTDMSQFANSKRLCCWAGLTPGNNESAGKKKSVRITRAGVYLKPALVQVAHAAVKSNRSPYYRVKYERICKRRGKKRAIIAIARMILTAIYQMFVTGEEFNPSDLYKIDVPQEMLEKQKEKAIKQAAKLLISHGLIKAADISVV

SEQ ID NO: 131881 - protein, 342 aa, unidentified
MALYAGFDLHSTNSYLGIIDEDGKRMWNKKLRNDPSLILGMLSPFKKDIAGVVVESTYNWYWLVDLLKEEGYDVHLANPSRIQQYSGLKHGDDKHDAFWLAEMLRLKILPEGYIYPKEQRPLRDLLRKRSHLVKLRTSLIVSLQNILARNVGKKINTDHIKALRTDHVTPLFSGNDDLSLAGKVSKDAIDSLTIQIKAIEAVVEKKIDIRKPYDLLLSMPGVGRVLALTIMMETGPIERFPKVGNYVSYCRKVPAARYSNEKKKKKKGIGNRKNGNKYLSWAYAEVAELARRFDPEARAYYERKRRHSNAPIAYNALANKLSRAAYYIMRDGVTFMPEKMFA

SEQ ID NO: 131882 - protein, 490 aa, unidentified
MSNSKAYSARDVNRVRFDEVLKGRAGRDAWTGVDIGKYELRLVLHWGPADFARPWKVANPRDVAAAVALLERVGQGRKLVVAMEPSGTYGDVLRQACGDAGLTVHRVSPKVAHDYAEVFDGVPSQHDGKDAAVVAELARLGKSSPWPWVVPDEREQQIAYWADRLDARRRLAQVYCGRVEALLARHWPEVLRLLKLTSATLLEALAEYGGPAALAADPDAAAKLKRWGRTPLTADAISGVLDAARRTVGVRQQPTDLTRLKGDAAEALAARKEVRRAKKQLAALAKGHGAIEAMAAAVGTATACVLFTHLGDPRGYHCGAAYVKAMGLNLAERSSGVYQGRLKISKRGSSTVRYWLYLAALRLTKKRSPVRRWYLRKRKRDSGEAGRALVAIMRRLALALYHVAALGEAFDARQLFPGKHVPGKHEHEHEHKGTHRHKGTHRHKGTHRHTHDGNGRHPRDADRPRDADRPRDADRRPMKLAMSMKGGRRR

SEQ ID NO: 131883 - protein, 375 aa, unidentified
MKNKTGTVSDNKQVQARVRSQSKARVKLGLDMHYRQVTVAMQEEDGAIKALGKMSHDGFSNWVEQKLQAGFELYSCYEAGASGYWLHRDLEGLGVKNLVVAPKAMGQDRRQKTDRRDSAELVDALDRYLRGNGKALNPVAIPSVEVEEKRALIRYHRQIMADRNRCEARGKGLLCAQGIEVRGKWWQSQSWQELKTHPRLKSWMQAQLEGWRKKRLALEREQQSLRRQIEALAPALLPKGVGAYSAVALEYELKGLARFQRARALSSYTGLCPGIHSSDGRGREGSINRCGNAAVRWNLVEMVWRLLKWQPQYEPVRQLARGLLKSKRARKRLAVKAARQLAIDLWRLHTGRATAQELGLIMQPTTQKPTSRTQY

SEQ ID NO: 131884 - protein, 388 aa, unidentified
MAGNVVIGMDPHKRSATIEVMDQAEVVLGDGRFATDAAGYRAMVAYARQWPDRVWAIEGTNGIGHHIAARLVRDGEHVVDVPAKLSARARVFISGQGRKTDAWDAHCVALVGVRMGGLHPVVNDEQLGLLRVLVDRRRALGEDHTRMIAQLHQLLLELIPGGAKKDLSAAQAKVLLASVRPRDAVGKARRRVAAELITDLERIYQRSKAADKELTQLLAATGTTLTDLEGIGPSGAARLLVEVGDIHRFPSKAHFASWNGTAPLDASSGDQVRHRLSRKGNRQINRVIHIMAIVQLRNQTVGRAYFDRRTADGKTSMEAIRALKRHLSDAIYRQMVLDAQRAGTSPGGQPGNDSDSSATGSHPIAGSSDKPLPGPVTTEPRTASLAAS

SEQ ID NO: 131885 - protein, 392 aa, unidentified
MSKTIMIGCDLHDRSMLVRYAIDAGEPQQKSFRNDFEGRRKMIQRFSELAAKHQIERIVFAYEASGQGYGLSDLLEENGIECYVLSPTLLPKTPKSAKLKTDAKDAQMLLEQLRGFVLAGNRLPVVWTPPQRLRDDRELIRNRIDIADESTRIKLQILSMLKRRGIEKPSFYGTWSKRFVKWLRDVANQLDPVVGPVLESLVCRFELFRDEMTKLEKRIRELSRAPRYADAHDALRKLPGVGLLTAMTFLSEMGDLTRFHNRREVGAYLGLCPASFESGETSNRKGHITRQGPSRLRRMLCQAVWVSLSRDAQISAAYDRIKGGKPQRNKKAIVALMRQLGIKMWHRAIACGVSTELAGRGGPHDPRTLARAQQRGTVPYVSPSPQPLASTG

SEQ ID NO: 131886 - protein, 411 aa, unidentified
MYYVGIDIAKKTNVSSIINDKDVFIKKSFKFNNDEKGFKEFTNLLSSIDKNIDNFIIAMEATGLLFENLYLYLKGKGYNVILLNPYQTSKFREMNTMKKVKSDNIDAIMIASLIKSGRYSKAYVSEEVYASLRALHRHRASLEEELKKHKRQVSSLLAVVFPEFEQVVKNPFSVSGLALLEKYPTAKHYKHASAQRILNLFRKIKGNNFNIQKAEKLLELAKSSIYSGNAYDERAFVIQSHIRAIKFLQKEIESIDNEMLKLFNASPSFTKEEEQEVIDIIDNLRTIPGVSDKTLFTIMGECGNLDRFKNINAFIGYLGLYPTLEQSGNKTSYGKLAKRGSKLAKKALYQAAVAAIRHNDEMKKLYCDKVSQGKAKKEALVIVARKLAAIILAIYKNNTPYNPARVFNQNT

SEQ ID NO: 131887 - protein, 404 aa, unidentified
MAKYHIGVDVSKRRHKACIRNLFQDSYSEVFSFDVNRQGFEKLLVTLEKLSQNKEDFIIGVEATGNYGVTLVYFLLSHGYKVVEINPYRANQFRKAEGKKAKSDRIDARSLATIISLENHKPLSLPDPVLDNLKELTRFRADMVRDRTSLVNQLHETLTTIFPELATIFSRLDSPTCLSLLIAYPGPEYISRAGEAKVAESLRIASRGRVGQTLVKGLVKVAQNSVGVLQKQPSLAIRVFILGERIGALTGAIERVEKEIADLFHKLPYKPEDFPVGDITSLAALISEIEDINRFPTLKQFLSHFGWCPQSFQTGNYNREHPRMSHAGNKYVRRLIWMLSIVSVRTVPRYRAYFQRRVAEGKSKMHIIVAVGRKLLSAFYAILKKGIPFDPNWEVNCQFALVRH

SEQ ID NO: 131888 - protein, 428 aa, unidentified
MNDVDRNRLEEFRQLKQEIRHSEQYLIVGIDVAKDRHHAFFGTANGKTLLKNAVFDNTYEGFRRLLDQTEALRVRHGLSKVVYGMEPTANYHKPFGEGLIELGRNVVVVSGLMAKRNRESLDGRWDKHDRKDSANIADLIAQGKCLFYDYPVPELRGLRNLIALKRRLKKQEQSYAIRIRNQLIARYFPEMDRDYRGLGAEGLPIVRWCLPASEIAQFEVDAFVERVSSKRIRAEKRRRLEALWEKAAESIGCEPVPGLDHEAKLMVEGLKQIREMIQETEQKIQELCKSFSSYGYLLTLPGFGPDISAKVMAAVGDPERFVKGRQVLKLAGLDLGADRSGKNSDKAIPEISKRGKADLRQALYQAALVASRRNPEFMRYYRSKIRGREKEKGIHRKVLVKLSAKMLVIAWTLMKKQEAFNPAFIKVE

SEQ ID NO: 131889 - protein, 344 aa, unidentified
MKNTTIAIDLAKSVFEVGVSDRPGHVAAKHRLSRAEIAVFMANQPATTVIMEACSSAHYWGRTFQGFGHEVKLLPPLYVRPYVQRGKTDRADVKGMLEAWRNSDIRPVPVKSESQQQLTSLHRIRAGWMTTRTMRINSARGLLREFGMVFPLGAAGLADRVGEVIADDNTNLTMPVRELLHLLILEIGELEERIEMVQKQLQALAAQTPVVARLRTIPGVGLLTATAMVGFIGEVQRFPSGRHFAAYLGLTPREHSSGSRRRLGRISKQGDVYLRTLLIHGARAVLVAARSKSNPDRFFAWALQLQRRCGHNKATIALANKLARIVWAVWKLDQPFESRPQSTD

SEQ ID NO: 131890 - protein, 422 aa, unidentified
MFAESADEEQIIERVAALDVGKEELVCCVRLPAPEGRRRRLQEVSTHSTMTGSLAELAERLVDLRIERVVMEATSDYWKPVFYLLEAHGLDPWLVNARDVKHLPGRPKTDVLDAVWLCKVAERQMLRPSFVPPGPIRRLRDLTRYRIDLVGARTAEKNRVEKLLEDACIKLSVVASDIFGVSGREMMAALIAGERDPRVLADLARTRMRVKIPQLREAFTGHFDDHHAFLLNRMLHRIDGIDADIAALDVQIEALLAPFAPEAARLDEIPGIGPVAAAVIIAEIGVDMSRFPTAGHLCSWAKFAPGVKTSAGKNKGNGSTGHGNRYLARVLGEIAVTAGRTDTFLGARYRRIVRRRGKKKAMVAVGRSILVIVWHLLSDPDTRFHDLGADHFDRHVTTDANKRNHIRQLEALGYRVTLEPAA

SEQ ID NO: 131891 - protein, 278 aa, unidentified
MTSENAKYVGMDVGKSWLDVAVWGEAKSNRVSNDREGVSELVEQMSELEPALVVVEATGGYERLAVEELFSSGFPVSVANPTRVRALAKATGKLAKTDDIDAALIAEYAAKVQPAPVASKTESELHLRALVTRREQLLEMRTAEKNRLKTAYRRMKVDIGEHIDWISARIQELESEMLRLIQSLPDWQEQVQLMESIPGIGFITAITILAELPELGRLNRQKIAALAGLAWPPSTGIVARNAANGVSSGGEKGCVECCIWPVSLQSNITRSFASSISI

SEQ ID NO: 131892 - protein, 414 aa, unidentified
MLPPDIECVVGIDVAKQAHVVCALEVPSGVVRHPPSRIEATAEGVALLRSWLETWGAPERILIGLEATGPLWEPLYEHLTQAGYGVLLLNPRQTSSWASSLGRRAKTDGLDAQTLARGLLAGWARASTLPSESVQALRTLTRTRRDLIQSRTATRQRLHDELVTLFPEFVRFLSTLPGRTDLGAPAVLALLRRYSSAQALAQVSLAELTTTLDQLSGGRWGGAQAQALQDLAQQSTASSRALAARSLVARTLAQQLQELAAHLTEVEAAIAALLQDDADGQRLQAIPGSGPQTGATIQAELGDASRFARVDEVVAYAGLDPRTRQSGAFMGQKQLSKRGPGALRHALYLAAFVAARCAPEWRVRYQRLLDRGRAKKEAYLILARALLRVIYHLLRTGEAYDPALLKQPTAPSAA

SEQ ID NO: 131893 - protein, 376 aa, unidentified
MNQFIKYVGLDTHKDTIAVAVADASGGRPRFYGEIANTSEALSQLMKKISPSGEIVSYCYEAGPCGYGIYRQISDSGHDCSVVAPSLIPTKPGDRVKTDRRDCESLARLHRVGELTSVWVPDQEQEAIRDLTRAREDMKHLERQARQRLSAFLLRHSHRYDSGKSKWTQAYWRWLEHVKFNHRVQQIVFQEYIDSVKQQQQRVADLEQAMHEAMADWTLAPVVEGLMALRGCRLITAMTVVAELGDITRFDSPRQLMKYLGLVPSESSSGPKTRRGGITKTGNGHVRRVLVEAAWCYRFPARKTKALQRRAEQTSEEVQAIAWKAQKRLCGRYQALSNRGLPVQKTCTAIARELTGFIWAIACETMPQTHMKQAGS

SEQ ID NO: 131894 - protein, 350 aa, unidentified
MIIIGCDYHPGSQQIAYVDTETGAGQERRLGHREEAEKFYRDLATRGAEVRVGMEASGHGRWFERLLGELNIELWTGDAAKIRAKRVRKQKADREDARHILKLMLKDDFPRIWVASWDNRDLRQLLWHRHRMVQARTRIMNQLQAVALNEGLRWKKRLWRESGREQLQSLRLAPWASRRRQDLLEVLDRINPTIDVLTQAIEQEAEKCPEAQRLMTHPGVGPLTALAFLLIIGEANRFACGKQIASYLGLVPAEDSSGERRRLGHISKQGNSLLRFLLVEAAQATVRSDPRWRNQFFHLAMRRGRKIAKVAMARRLAVRLYWMWRRGWNYEQLEQFGSHVGQRGNPHGVQ

SEQ ID NO: 131895 - protein, 469 aa, unidentified
MKKQKRKKTKSEASKPLHEPRPDAAGIDIGATEIWVAVGPDRDQQPIRRFDAFTDDLKAIVQWLQECGIRTVAMESTGVYWIGLYQLLTDAKLDVYLVNARHVKNVPGRKTDVQDCQWLQYLHSVGLLRASFRPDQAICALRSIYRFRQTLITLSAQHIQHMHAALEQMNIKLQHVIDDLSGQTGQAIIEAILNGQRDPRQLAKHRDRRIKATEETIVKSLEGDWRAEHLFVLRMAWENWSQVQQQIQKCDQNLLDYTRQLEASTVIAQPIKIVSLSAEPAVPNPAAQPSKPRRKTSKNQPQGPWREELQRFFGVDLTAIPSISVLTGITLMSELGNDLSAFKSAQHFSSWLCLCPDNDTSASKVLRRATRQSQNRLRQALRMAASTLHHDKSYLGDKYRRLRAKLGAPKAITAMAHRLARIIWHLLTHRVSFDMSIFETQEKAHQIRRFKSLSSAAHQMGYQLIPLPA

SEQ ID NO: 131896 - protein, 353 aa, unidentified
MKTYYVGMDVHRASIVIVVLNGAGKVVMQSVIETGAERVRGFLKQLCGRVYVTFEEGTQANWLHEVVRPLVTEVVVCDPRHNKLLQSGNKNDRVDAQKLAELLRNGALKAVYHGDNGVRALKELVRTYDCLVSDTTRVMNRLKAIYRGRAIGCAGHDIYRHDRREQWLKKLRERGAKQRASFLYQQLAALKPLRHEAKRMMVKEARRQPAYPWLMSVPQFGSVSVAQLLAIVGTPHRFRSKRQFWTYVGLAVVTRSTADHEVVNGVLRRSQRPVSTRGLNRNHNHLLKRVFKNAAKGACHGGPFKAAYELRVTQGMVPSLARLTVARQLAATTLAVWKRGEQFNPERMNQQTA

SEQ ID NO: 131897 - protein, 368 aa, unidentified
MEKDSEVFIGVDVAKARHAVAVAEDGRQGEVRYIGEIGADTESVRRFVAKLEKRHGQLHFCYEAGPTGYGLHRQLTTLGHRCTVVAPSLIPRKPGDRVKTNRRDALQLARLLRAGELTAVWVPDEAHEAMRDLVRARQVAVDDIRRKRQAISSMMLRQGRSYPGKKTWGARHVQWLQTQRFDQLAQHLVLQELLLAVRHAEERRERIEAAIVELLPQWSLVRVVEALQALRGINLVTAVTVMSEVGDLRRFENPRQLMGYLGLVPGERSTGESVHRLGITKAGNGRVRQALVESAWCYRHPPRTGRAKYYVHERVPHAVRDIAAKAQTRLCARYRALSQRGKKLTVAITAIARELAGFIWAIGREVQA

SEQ ID NO: 131898 - protein, 423 aa, unidentified
MNTAENNTSLQSSPIVWIGLDWGDQEHAFALQEATGKSEMGTLPHSAENLHAWLKTLGERYGARPVALAIEASRGPVIHALLEYPWLRIYPINPITSARFRSAFTPSGAKDDLPDAKVLLELVRDHAAKLRVLESQDPATVKLAGLVEARRKLVDRRTQLILQVQSLLKSYYPQALEVAGDLKSEVALAFLNRWPDLISLKSAKPATIKRLYYLHQVRSQDLVKQRLALIAQATALTTDAARVEVAVLHLRALLDQLKVFRQHIPRLDDAINQAFAGHADRALFSNLPGAGRQLAPRLCVAFGTLRSLYPDPASLQKYAGVAPVREKSGNQVWTHWRWQASTFLRQTFVEWAGQTVHYSEWAKIYYQRMLKKGKKHAVVLRALAFKWIRVLWKCWQDRQPYDEARYLKQLLHRKSPNAVPAKS

SEQ ID NO: 131899 - protein, 409 aa, unidentified
METLYQRCAGLDVHKDTVVACVRIATGRSAKREVKTFATTTSGLLELHDWLQGDEVTHVAMEATGVYWKPVWHLLEDSFELILANASHIKAVPGRKTDINDATWIADLLAHGLIRASFVPPMAIQELRDLTRSRKQLVHERTRYVQRIQKVLEDANLKIDSYITDLLGRSGRAMLNALVEGYTSPEVLVSLTTGRLKASRAELLEALRGRVTKHHRFMLKLHLRQIDQLDRSIEELEAQARAAIEPFRHRVEQLTAIPGISETAATVLLAEIGTDMNVFPSAEHLRSWAGMCPRSDESAGKRRSTRLRHGAPWLKATLIQIAWPATRTKDSYFRTLFHRLKARCGPKKAIVAVAASILTTAYHLLRDGTVYEDLGPGHFDAINRDRAAKSLVRRLNALGFDVEVRPAAA

SEQ ID NO: 131900 - protein, 416 aa, unidentified
MEIYPNTRAIQRYIALDIHREYVLAGGMNASQEWVLSPHKIEMGKFREWARKNLSGTDAVVIETTTNVWDIYDIVQPLVGHAVVAHAGAVRQIAEARVKTDREDVKRLIRLLIAGIVPEVWVPPQHVRELRGLVAYRQQLVKTGSMIRNRLHSLLHRHNLCLPEEGLADREWWTQQEKICALEKLQIRQELSMLQQIETHKAEVDHELGRQSLGETWGKAAVRLMQLPGMGIVVAMTVLSAIGDIHRFESADKLVGYSGLGAGVHDSGKEHIEKRITKSGRKELRWAMVEAAWRAVRMSPYWKEQYEKFLKRMRRPNQAIVVVARKLLVAVWHVLSKDETDERATEEDLAYKMLLWSWSLSEEARQGLTHKQFAKYALMRLGVQTDLTRFVRGKVPRRIASREEVLVRMAELGLNG

SEQ ID NO: 131901 - protein, 348 aa, unidentified
MTMVGGFDVHRKQITFDYVDDDGLVRWGQIRPATRKTLRAWLGEHCPDGDAEFALEGCTGWRYVTEEVASAGVGVHLGDPAEIAGLRGPKKRAKTDRADARLLRTLLLEGRFPESWIPQAHVLEVRTLGRLYCTLMDERRAWQQRIHAQLFHQGCPPITALLSAAGREALARAELSATGRQYADTALRRIDELSTEIGPLRTQLVNFGRRQVGCQALQAHYGIGWLCAAIIWAEIGDARRFTSSDQLVRFAGLDVTVYSSDGKRSPGHLSRQGSPELRWAAFEAAKCAARRGSPDYAYYHQLAAKRDGHNGKNPTLAVERKILRRCYHTLRELGDAALALPIPEEVAA

SEQ ID NO: 131902 - protein, 522 aa, unidentified
MVTTRSRKRSRSPQEVLQKPRGVIHPRVQKVGPEHFGIVSVDCAKARSKWMLGDFYGNVIIPPTVVEHNQARLDVTIAQIRQALPVHGLHDCLVAVERTGRYHRPVQRAFAAAGFEVRIVHPFATKQFRQPSDPGYKTDDTDLAAIHRAAVNGFALIETGLDDTWKTLQLLIRHRRDLVFKMSLVCCQIREHLEAAFPGFAACFDKLWERACAWHVVQHFAGPKELVAAGLVELRRSLDAAKVRYQTPMIQRMLDWAAMAAAPDQAAAQHRAIVLALNDDRTRKSQEIMGLERQIAARLVRTPYILLLSFPGINVVSAADYAGEMGPMEHYANPRCINGRAGLRPCRYQSDQVDRANGPLVKNCNRKLRAAILGIADNLICCNHHFNVLGHHWKAAGKDPRDVRIRVANRFNRIAFQMVAGRQVFRHPGLQGRHYILEKLIAFHRDHDTSGADMLRDLEAAVAQLPRKEYQAEAGPLHEELKKIEAGGRRGPQLLGNILPIVLARLGVGAVQSTTSGEEDPH

SEQ ID NO: 131903 - protein, 338 aa, unidentified
MIVIGVDVHKQSVTAVAADEVGRLVAERTVASGSDELLEWAAALDAERLWALEDCRRLTRWLERQLLAAGEQLVRVPPKLMAPERRHGRTRGKSDPIDALAVARAAIREPALSRPRPDEEPYRELKLLVDHRDAIVDERRRVHQRLRWHLHQLDPTYQVPLRMLARSVQLERVGRWLARQEQQLQLRLARELVASCRRLNREIAELDRELELRTATLAPALLDLPGCGAITAAKLLAEIGPIDRFHTDAQLARHSGVAPLEASSGRIQRHRLDRGGNRQLNAALYRIAITQARVHEPARAYLERKRTEGKSRREAIRCLKRLLIRLIFQTMKASPALT

SEQ ID NO: 131904 - protein, 319 aa, unidentified
MNTTTAAHIDHRERNVGIDIGKSMLDICIFEPDVYLQYPNTPEGIRELLKKLSRYNLTRILVEATGGYERDLVEACAEKELPIIIVQPTHVRQFAKAQGIIAKTDKMDSRLIAQFSAVMKPEVRPLNSKKVRYIRDLLSRKRQLNEMRTQELNRQHKAPTALAATHKRLLKVLDKEIESTNKLLAKAVNEVTEWQRTYEILSSVPGVGDGVTFTLLGELPELGQLSPRKIAALCGLAPLNRDSGIMKGRRRIKGGRAPIRTVLYMAMLSAIQCNPIMKKFYKKLVEQGKHKKVALTACMRKMMTILNAMVRDNCEWQAN

SEQ ID NO: 131905 - protein, 373 aa, unidentified
MADTITYVGLDVHKETISVALADGGKRGDVRAFGQIVNTPTALARMLAKLSQPGRTLKFCYEAGPCGYGIQRQLSAAGHDCVVVAPSLIPRKPGDRIKTDRRDANNLARLHRAGELSAVWIPDPAHEAMRDLVRARLAAVRSLRQARQQLSGFLLRHGCHYGRPAWTQMHRRWLAGLRFAQPAHYIVLEDHIATIEAATDRRDRLTKQIEIMLGDWSLAPVVHALQSLRGMALVTAATMIAELGDLSRFTNPRQLMAYLGLVPSEHSSGATRRQGGITKAGNGTARRMLIEAAWSYRFPARVSRDQLLRQEQLPKTIRDTAWKAQVRLCGRYRKLTKAGKPATTVTTAIARELSGFVWSIACQVARPLNTAKV

SEQ ID NO: 131906 - protein, 324 aa, unidentified
MEQFSFFTGIDVSKLWLDIAVFNPTDGLVHQTKINNNVKEIRGFLKGLKKQLKTEITEHLFCMEHTGKYGHAFLTASFLEKAKVWVELPVQIKRSQGLVRGKTDQWDAVRIAKYAHRFADKAVFWIPADKTIQDIKDLQVKRSRLVKAYSQLSQENKNDPIFKKPLLALKQGIQSIELKMEQLLEHNQVARQQYDLLTSVPGIGKQTAMALIVVTNGFTRLTESRKLSCYAGLAPFPYSSGSSVRGRTKVSKMGDMKLKVLLNLSAWNAIRAIPALKDYFKRKVAEGKHKMSVINAVRNKLLALALAVIKRNSPFIKENSFSFS

SEQ ID NO: 131907 - protein, 470 aa, unidentified
MKHNRRRSLGKPRVSPTVLDRINPNVAGIDCGAAEHFVAVPPDRDATPVQSFQTFTGDLVRLAEWLTACRVQSVAMEATGVYWIPIYEILEARGFEVLLVNARHLKNVPGRKSDVSDCEWIRELHSVGLLRGSFRPPAALVALRAYLRHRQTLIESAGTYVQRMQKALIQMNLQLSVVISDITGVTGLRILRDIVAGQRDPEHLVQHRDHRCRASKPELVAALTGHYRPEHLFVLQQNLELFDTCQAQLAACDVAIEAHVRTLIADVTTPATPVPAPRVTRKPRENEPHFEIRTPLHRLTGGVDLTQIDGITPYTALKLISEIGIDMTRWPTEKHFTSWLTLAPKNKISGGRLLSSRTQPSANRAAAILRMTVMSLGRTDTTLGAFYRRLAARIGKPQAITATARKLAILVYRTLKGDLAYRDLGADAYEAQQRTRTLRRLRHRAASLGFELVNRVTGEILPPNVSYSAP

SEQ ID NO: 131908 - protein, 390 aa, unidentified
MIYAGIDVAKDKHDCFIVDDNGIEFYPVFTIPNNRIGFGDLLERLTACSKDLSEIKVGLEATGHYSDNLLEFLISSGLTTTVINPLHTSLFGKSLSFRKTKTDKVDAHSIVTLLRTECLKPYSQPSYQIRELKSLTRYRHSLVQDCGRLKTSHARLCAILFPELEKLVPSLHAASVYALLSEFPTAADIAKCHLTRLTNLLSAASKGHYGKDKAIEIRDAAKASIGTYSPVKALELMQTIELIKMMETQVKQVEAKINPVIDSLSSPLMTVPGISYRMAAIIIAETDNFACFSSAEKVLAFAGLEPSVYQSGQLTSTHAKMVKRGSKYLRYALFNAAKYVCHWDPAFGAYLAKKRAEGKPYNVAVSHAAKKLTRVLFHLVKTDQPFIKRG

SEQ ID NO: 131909 - protein, 411 aa, unidentified
MLDVKVENCAGIDVGKKFLAVCVLTGPADRKPVAEVRRFGTSVRELERLRAWLIETKCTEAVMESTGSYWKPVFNILEGALKMILANPEQVKALRGKKTDPNDSRWLASLLRHGLVQGSFIPPRDIRELRDLTRRRRTLVGEGASERNRIQKVLEDANVKLGNVLSDVFGTSGQAMLEALLENKQNAAEIAKIGHWSLAPKIPQIMEALEGHRMNDHHRFLVRQGLRHMQYIESMIEELDREIAAKLKPYQKEMELACTVPGIQRIAAASILAETGTDMSPEGPFPDCHHLASWAAICPGNNESAGKRRSGKTRQGNRWLRGMLTQTSWAAAGQKNSLFRTRYERIKLRRGGQRAVIAVAHAQLIAIYWAIRNGTPYPEQVQRLEQDRREAQIRHHLQRLTQLGYEPNMNS

SEQ ID NO: 131910 - protein, 377 aa, unidentified
MKDTTFVGLDVHKETIDIAFTRGRWGNIESRGRIVNTPEALWKQLRALGPKKQLLVAYEAGPCGYGIYRQLSRRGVTCVVVAPSLVPRRPGDRVKTDRRDACLLVQMLRSGDLPVVWVPDEAHEALRDLIRAREDAKVARHRLRQQLGKMLLRLGHRPPSGVTTWTVRHQQWLNALKFEQPAQQIVLGEYIHGVDEASQRMQRLDRKLEQLARTGPHASLIAALQSLRGVKVLTAATWVAELGDLTRFAHPKGLMAYAGLVPSESSSGARQSRGSITKTGNQHVRRVTVEAAWHYRHQPRVSQTLRKRQEDLPESIKQISWTAQDRLNWKYRRLVGRGKAKNKVIVAVARELLGFVWSIGQEVARETYVTQTAERAQ

SEQ ID NO: 131911 - protein, 315 aa, unidentified
MEQATTIGLDIAKHVFQVHGADGAGHVLFRKRITRAKLLGFLAAQARCVVAMEACASAHYWAREIAKLGHHVRLIAPAYVKPFIKRQKNDAADAEAICEAAQRPSMRFVPVKTEEQQANGIVFRARDLLVRQRTQCVNALRGHLMEYGYVFPKGITHVETLVAVVEDLQSSLPDSVRVILKLLVDTFTALEAQISALDAEINQRSKSDPTARRLMTIPGVGPITSTAVTALVPAAEGFRAGRDFAAWLGLTPLQKSTGGKQKLGAVSKRGERTIRRLLIIGASAVVQQASRRGAPKGSWLAQMLGPVVNYFEGCT

SEQ ID NO: 131912 - protein, 430 aa, unidentified
MSPKEWDISKIRISNQRRQEAELLTGDKAPSEEISPIALLPTYHLGRKCRIGVWVISHLKRLLKITFGGDIIEEKIVYIGIDYHKNSFTAAFLDSATGVLLTNKYTDIENFKSDISKYKEEGYKTKIAVETLTGVKHFIKQIREDNEVYLINTNKFKNVLKGVNTDKKSDRLDAQTIAIYLEKGLLPTVYIPEEDIERLRQLLKARENYIDQRKSSMNQTHSLLLEYGIKIKNRQLLTDKGIKEVEDNLKDIPLEIQGVIKSYIGTIKHLTKEIKKIEEIINQYVEENQEIKEKKDILKSIPGIGEITALTFISVIGDVNRFEGSRKVGTYIGLVPKVYGSGDSVKIGKITKKGDSILRNKLLQAAISLLKAKKENSLKEFFNRLIKSGVSKNKARIAVARKLATVMFVLLKENRKFENYFNKKIATFTG

SEQ ID NO: 131913 - protein, 483 aa, unidentified
MPELSHNTTLKWPSPPQPAGKAKRRRSKGRKRTLDPTAGLQVANPNAAAIDIGCAEHWVCVPAGRSGKPTRAFGCCTADLNQLADWLADCAVDTVVMEATGNYWVVLYDILEERGLHPVLVNPRYAKNMSGRKGDIPDCQWMQKLHTYGLFANSFRPTQDIRVLRAYLRQREMLVAAASQQIQHMQKALTEMNIQLANVISDISGESGLAIIDAILAGQRDPRTLARLKNARIVASLGTLARALEGHWKDEQLFGLEQARLSYAHFQEQLRQCQQRIELQLQAIQSSLPGSPAKECPPQSADSPDSKGAIQSRRLDVPGHLKRILGVDLTKIDGIGPVAAQVILSEVGNDMSPWPSEKHFASWLGLCPDHRISGGRILGRATRPVVSRARNALRLCAYTLSNSKSWLGAKYRRLKHKLGAPKAIVAMAHHLARLIYRMIKSGQAYVDKGVAAYQEKYRLHRIKWLTKQAKDLNLQLVELPPVA

SEQ ID NO: 131914 - protein, 328 aa, unidentified
MTQIICGIDISSTSLEARIGRDGAAGTFANNPEGIAELAAFCQSHHVDLVAMEATGGYEKQPFALLSEQGLAVTLLNPRAVRRFAEGMGLLEKTDALDAGVIAWFAEVKRSQPQALASASQQQLRALVNRLRQLTALRTAQRNQCRLVTDAVVLAWFAELLEVVARQMRELESAIAALISQDPLWQQLDQAFRSIKGVADRTVARLMAEMPEIGTLSNKAISKLAGVAPLAHDSGKLQGKRSVRGGRASVREILFVVAGVSGRYEPDFIAFHQRLQAAGKPGKVIRIALAHKLLVRLNAKAREVRQQFNAEPIAQQTAVLTAQMKAVA

SEQ ID NO: 131915 - protein, 397 aa, unidentified
MYIVGIDIAKRKHEAAVIDGEGTVIIKPFSFTNNCSGYNRLLAMLAKAKLPLDEVSFAMEATGHYWLALFTRLQKEGFRVQVINPVQTNSIRSFYIRQAKTDPRDALLIAEVIRFGHFSESTLHPENIYELRELCRGRHAIVSMQADVKRKVVALLDQVFPEYETAFTNMFGDTSMAILQTCPTPKELSKMPLEELCHLIEVSSHKRFRMAKARELQELARNSFGFAMAGDVFSTMIRLYAKHLDFLKQQVREMDRKIAEIMDTLDTPITTITGIGPTLGAYILSEIGDISRFSSAAKLAAYAGIDPTMRQSGEYNGVRNRMSKRGSPYLRHAIWLAASSAVLHDPALKLYFQKKRDEGKPYMASVGHACRKMVSIIYAVMRDNKAYTPCIPNEISA

SEQ ID NO: 131916 - protein, 349 aa, unidentified
MQHYAGIDVSLELLSVCIVDAKGKIVKEAKVGSDPDTLVAFLRGLDLAIERIGLEAGPLSQWLHAGLTSAGFEAVLLETRHVKAALSAMTVKTDRKDARGIAQLIRMGWFRAVHCKSAGSQEVRALLVARKLLLSKLLDVEFSIRGILRGFGLKMGMVTRKRFEARVRELYAGHAMLEQICSAMLTARSALQTEYAKLHKALLVIVREDEVCRRLMTTPGVGPLVAITFKTGVDDPSRIHKSKAVGALFGLTPKKYQSGETDVTGGITRAGDEMVRTALYEAASVLLSRVTRFSALKRWGMDVAKRRGTKRAKVALARKIGVILHRMWVDMTSFRWTKGAPTTMRLARV

SEQ ID NO: 131917 - protein, 313 aa, unidentified
MYYIGIDVSKKDLSVFNGKKDLKFINQEGLRPFKKYLKGKYKNFSDLVIIFEPTGIYSFNLKEFCAENSIKAYIVNPKRSHSFARSLGIRPKDDKIDARILYQFHKLIDSKDIKVPKIDQQAKVLSSYLTSYEFAVKQRVAISNHLESLRDKKLVSLLKKELKRAQKLEDKIFNDIKEYIRQNQNLREDYQRLLTISGVGEKMAIALLTLFKTYQGTNRAQITALVGLDSTKRESGSSVRGRAKISKNGKAIYRKVSYLPAVCATVHNQKIKIFYQRLLANHKPKKLAIIASMRKILLIAHAMYRDKTEYVAA

SEQ ID NO: 131918 - protein, 338 aa, unidentified
MAIVTLGIDLAKNVFALHGVDATGKVALNRPSVARAKLLELVASLPPCLIGMEACSGAHHWARLFQAHGHTVRLMAPKFVAPYRLSGKRGKNDAADAAAICEAVTRPSMRFVPAKSLQQQSELMVHRARQGFVAQRTATINRIRGLLSEFGIVLPLKATTVRREAMCQLEDLPGWTNTVVGDLLSEVHRLDERIAQYDRHIEQIAKESAPARQLMRLPGVGATTATALAAMIGRGQEFKCGRQLSAWLGLVPGQYSSGGKQRLGRITKAGDPYLRMLLILGARSVLQSAKKKTDPVSRWAVQLAARVGYWKAIVAIAAKNARMCWAVLQRGESFKLPA

SEQ ID NO: 131919 - protein, 402 aa, unidentified
MNAVGIDVSKGKSMVAIMRPFGEIVSSPFEIKHTTSDINSLVELINSVEGESRIVMEHTGRYYEVLAHQLSKANLFVSAINPKLIKDFDNNSLRKVKSDKADAVKIARYTLDKWQNLKQYNVIDELRNQLKTMNRQFGFYMKHKTAMKNNLIGIIDQTYPGVNTYFDSPARSNGSQKWVDFASTYWHVDCVRKMSKNAFIDHYKNWCKRKKYNFSKSKAEEIYEKAKELVPVLPKDNITKLIIKQAVDQLNSVSTTIESLRTLMNETASKLPEYPVVMAMKGVGTSLGPQLMAEIGDVSRFTHKGAITAFAGVDPGVNESGSYEQKSVPTSKRGSSVLRKTLFQVMDVLIKTHPQDDPVYQFIDKKRAQGKPYYVYMTAGANKFLRIYYGRVKEYLSSLPES

SEQ ID NO: 131920 - protein, 410 aa, unidentified
MRVIGLDVHRSFAQVAELENGVLRQCGRVDLVRAKVLAFARTLRAEDEVVLEATGNTMAIVRLLKPHVGRVVIANPLQVRVIAEAKAKTDRIDAAALARLHAAGYLPEVWQPDEATEKLRNLVSRRASIVQGMTRTKNRVHAVLHANLIPPFPGKLFMGPGRKWLTEQPLAEHERAAVDRWLAGIDAMEEELATAEAAIATACLGDDRVRRLMTIGGINMIVAAGVLSAIGDITRFASADKVVSYLGLDPRVRQSGDRAAQHGRISKQGRSHARGMLVEAAWAAAVTPGPLRAFYLRIQARKGKQVAAVATARKIAVLTWHLLTKQEDYAFARPALVAMKERQMQLKAGAKSRRGGNAPGAARDYSVKELRAKERALVEQAEKAYTRFVSAWSEKPKPNHGRMAQSNDTT

SEQ ID NO: 131921 - protein, 323 aa, unidentified
MSQPNPLCVGIDVSKTTLDIATANNEFAPFTAGNDTDGFELIIAELRKHSVALVLMEATGGLEAAVACSLQAEGFDIAVINPRQARNFSRAMGYLAKTDRIDAKVLSQMAEVINRHPERERFIKAIPDAERQILAAMVVRRRQLITMLVAERNRLHPAHPQNRKSINTIIKALEDELSRIDEAMNNHIKTHFKELAARLSSIKGVGAMTVATLLSEVPELGSLSRREISALIGVAPVNRDSGTMRGRRTIFGGRAGVRTALYMAALVATRFNPVIKAFYTRLITAGKVRKVALVACMRKLLTILNAMIRKNEEWSDSYHKFSL

SEQ ID NO: 131922 - protein, 424 aa, unidentified
MENTAARKRRQVPEGYLVVGIDPHKKRHAAVAITQDFTTQAKFKFDNTREGLEMMLDRARVEMLKSGCRGVMFAIETGGHYWRNIAYYLDERGIPFRFINQYTLKRRREGKDLNHKKNDYRDSEVAAQLLCTGEFVESVIPQGVYAELRASHNAYQRLVKERTRITNLVKGLLDALFPEFTRVFKDPGGLTALSVLSTCPIPRVIAGMTEDEFVATIEARHKGRRLMRKKLRALHYSAKTSIGIDAGARSLSSEIAFLVDKFELIRRQICIMEGTLVRLVDETEEGKYLLSIRGLNYIAVAGLLAELGCFKLYRSAKQMIKMAGSNPTESESAGKKRSKTPMSKQGRPLLRYCAWTSVIPMLRFNSDFRAWAKQRRERPAHANPLSGREVVGAALNRLLRLAFALVKNQTYYQDVKPALIPVAV

SEQ ID NO: 131923 - protein, 403 aa, unidentified
MAATRTAGIDWASEAHEVCISEEGRVAERFSAAHEEQGIAALTTKLARAGVARVAIERPDGILVERLLAAGLEVLAIHPNQVKAARPRFAVAHGKSDRFDAYVLAELARTDAHRFRALVPDTDETKALKALTRAREDLVGVRVELANQLRAQLAAFWPGALIFANVDSPISLAFLKRCPSPADAKGLGPKRLAGFLARHRYPGRRSAEELLERMRSAPAGRAGELEAEARRAVVVGLVAALEPIVAEIADLTSQIRGALAAHPDAKVFAPLFRDAKTAISPATLIAELGDCRGRYPTEAAMAADAGMSPVALESGKLRVATFRRACDKRLRTAVARLADSTRHWHPWAKEVYQRARERGQDHPHAIRTLGRAWIRVLWRCWHDRVPYDPARHGNFGRLQTTGG

SEQ ID NO: 131924 - protein, 433 aa, unidentified
MHEVEDEPLFAERAAGIDIAKAGIEVTVRVPSDTRAGRRQQETRSFATTRRELLSLADWLRAWGVTKVGMEATGDYWKPVYFVLESQGLGCVLYHAAQVKALPGRPKTDRADSVWLARITERGSLPSSVVPPAPIRALRTHTRYRRHLTQARTAEKQRVEKLLEDGHLKLSAVISDIHGVSGRAMLEAIIAGERNPAALAQLARGTMRGKIARLEQALDCSFLTEEHVAILAMMLAAIDSFTTQIDKLTARIEILAEPYWRQIQQLDAVHGAGVTSAQDVIAEIGVDMTVFPTAAHLVSWAKWCPQVSQSGGKRKGSNAAGRGNPYLSAALGEVSMSAARTQSFLGAKYRRLVKRMPKKKALVATGNSVLTIFHALLSDPAATYHDLGPDYYEQRASTRHQARNHVRSLERLGYHVTIQAINPDTGELLIATA

SEQ ID NO: 131925 - protein, 365 aa, unidentified
MGVPTMAQARTFVALDVHVSGTVAASIERESGELRRRRLSGRAAEVVEFVAGLPGPVRVTYEAGPTGFALARRLEAAGVSCVVCAPGLIPRGPADRVKTDRRDAERLVRLLIAGELHAVAVPSIEAESLRDLVRAREDLRGDLMSARHRVSKLLLRHDVRFEGTERNWTGAHLRWLAGVRFAQPGTQAAFDDYRGAVEALIVRRTELERLIAEQLPASPWAQTARRLMCLRGVDTLTAAGLCAEIGDFGRFAHPEQLMSYLGVVPCEHSSGTRRRQGSITKSGSRHARRLLVEAAWHYRQPPRVSEPLRRRQAGADPMIVALSWKTQRRLHRVWSRMEQRGKRRTIIAVAAARELAGFCWAVATA

SEQ ID NO: 131926 - protein, 331 aa, unidentified
MDTLSLDIAQDNFVAFLTDDAGHPVHQQPRTFTYSPRGLRQLTAWMRDPAATRVVFESTGVYGKRIIKAFDGVVASIHELNPQIIRRFATSMVQTKTDHADVRAIAMVVHTLALQRPEKLAQSRISFEESRENLALWLAEYARLSRAAARLKNQIKNLGYAIAGVAATINQRRRAELRELQGKMREVKRAIVAAFDDREARQDVEHLCTIPGVAELTAAAVITTIRDINRFRSADALKAYLGIYPRRRQSGIKEGPARLATHGSKLVRHMLWNAARSAARFNPVCKDLFDRLVARGTHQAAAYGAVMRQLVQIIYGVLKSHQPFTIIPHRT

SEQ ID NO: 131927 - protein, 376 aa, unidentified
MQNDITLFVGLDVHKDSITVAYALGSGEVELLGKIGTSARDIDRLCKKLQSKARHVKIVYEAGPLGYDLQRRLAAKGFDCMVCAPSLIPRKAGDRVKTDRRDALKLVRSLRADDLSAVHVPTVEDEAFRDLARVWAAARDALKRARQALKSFLLAHAVRYTGTANWGPSHRRWISSFSFGNAWQDLAFSELRRAIEDRFAQCERLESALREAVTQWRFYPAVLALQTMRGIQFTTAVGLLSEIVDVTRFAHPRQLMAWLGVTPSEYSSGGSRRQGSITKTGNSLARKLLIEAAWSYRHTAKVSPEIQQRHEGVPKVIVDRAWDAQLRLCGRYRRMVAKGKNKNVAVVAIARELAGFIWDIGRLGIEQAINTPKPAV

SEQ ID NO: 131928 - protein, 388 aa, unidentified
MDVLYQSCAGIDVHQATVVVCILHGPLTSTRPKREMAQFDTTTKGLKACHDFLTQFHVEAVGMESTGVYWRPVWHELCDDFELILAQPAHMKAIPGQKTDKKDAHWIAQLTRIGLLPRSFVPDETIQELRELTRQRKHYVESRNRETNRIHKILQSGGIKLTTYIEDIMGASGRNLLQLLIDETPLTPRMIHQSVYTSLKRKVPQLLEALDGYFSAHHRFMLGQSLEIYDFYQKQIDCLEERINGYLNLYERPVEILDSIPGMDLITASVIIAEIGVDMSQFPTAGHLASWAGLCPGNNESAGKKRSTKIRHGNSYLKRCLCQAVFAAKRQKGSPLAERYYQIQSRRGPQKATIALAHQLLKIAYILLKENLTYQEFVLQKRLLETSQ

SEQ ID NO: 131929 - protein, 487 aa, unidentified
MHPRTTNKSTQTSDVRRFSFESAGALALDNEYSGFAVLPAHYIAFAERKRARPWRSIYHFGSCDVKPIATHRFTAYVGIDWADTKHDVCLQASGNESREFDCIAHRVAAIDQWAQSLRQRFGSPIAVALELAKGPIVYALQKYDFLVLFPINPATLAKYREAFKPSRAKDDPTDAELALDLLMRHPERFAPLQAQSQDMRTLLSLTEHRRELVGDKTRFTNRLTHTLKQYYPQALDWFDQRDTVLFCDFLTRWPTLTQVKRARPASLKAFFYAHNGRRAHVIGARLDAIKAATPLTQDLGVIAPCRLQALVLVEQLRTTLQAIDRFDREIAELAPRLPDYCLFQDLPGAGPHLAPRLLTAFGEDRRRFGHADELQKYAGIAPVTERSGKKSWVHWRWQCPTFVRQTFVEWAGQTINKSFWAGAYYRQQRDKGSSYQAAVRSLAFKWIRILYRCWQTNTPYDESRYLNALRKRRSPLLKNLDLDAQND

SEQ ID NO: 131930 - protein, 393 aa, unidentified
MPQPNDLSRSLTALDQDSTLIAVVEMSQSSWLVGAIIPGVERRPAKKLEASEGMLLALLHRWRDEAAKAGCTIDRITVAFEAGRDGFWLARWLRQRGIEAHVIHATSIAVSREHRRAKTDRLDAALLQRAFLGWLRGERGHCTMVAIASLAEEDAKRPSREREALVGERTRIGNRMKSTLARLGIRGIRPGLRKAAERLEQLRTPEGAPLPPNTLAELRRDLARLRLIHDQIGEIEAARLERLRQQPDEARHPMILLLARVVGIGIETADMLVQEVLSRKLRDRRAVARYGGLTGSPEESGARRREKGLARAGNARVRRGMLQLAWRFLMFQKDSALAQWYRARTADARGATRKTMIVALARKLLVALWKLVTTGELPNGVVLRPAIQAAVRR

SEQ ID NO: 131931 - protein, 318 aa, unidentified
MTQDLFIGIDISKAKLDVAVSPGEHSWSVSNTEEGIQELIAKIRQLGTPKIVLMEATGGFERRPLAMLGAAGLPVAAINPRNARDFAKSLGLLAKTDKVDAKALALFAEKIQPPCRPLPDAQTRALQDLIVRRRQMVDMISAEQSRLAIVENPKVRRELVQHIAWLKKRIHIADYDLDQAIKNSPAWQPKSDLLKSVPGVGPVTTSTLLALLPELGALTNKQVAALVGVAPFNRDSGTMRGRRCIWGGRTSVRNVLYMATLAATRFNPTIRAFYQPLCKLGKLRKVALVAAMRKLLGILNAMVRDQTPWRSDNVEISS

SEQ ID NO: 131932 - protein, 389 aa, unidentified
MFYLGIDIGKNTHVASLVDDKKKVIFKAFSFSNSIDGAESLILKLEAFKNELEVGMEATGHYWLSLYSYLVEKNFTVRVINPIQTDGWRQGIEIRKRKTDIIDSLLIADLLRYGDFVETSLSNEDYLSLRNLSRFRSYLISSIGDLKRKTIALLDQVFPEYASSFSNIFGKTSKEILSNFSTPSDFEDINSDDLNTFLESVSKKNYASKKIDELSKKASSSFGINFCLDSFSLQIKMLIEQISFIQNQVSDVENEIEVLLEKLNSPITTIPGIGSVNAATILGEIGDIKRFSNPSKLVAYAGLDASVSQSGEYESTYNHMSKRGSPYLRRALFQSSLRAEFCDPVFSDYYQKKISEGKHHLVATNAVARKLCHTIFAVLTKNEPYQVQS

SEQ ID NO: 131933 - protein, 366 aa, unidentified
MKKVSTAAANASKNCSQQKLTTGLDLGDRSSCYCVLDEGGRIVLEQRVSTTAKALREVFGKMPRSRVALETGLHSPWVSRLLGEFGHEVIVAHARNVRLIGESRKKDDRLDAQTLARLARIDPQLLSPVKHRSAKAQADLTVIRARAGLVRARTALTNTARGLAKSYGEPLRGCNVRNLNPEKAEKLSRELQKALEPLLTASAALSEQIAEYNRQIEEIAKQRYPQTALLKQVKGVGTLIALTYMLTLEDPHRFRKSRDAGCYAGLQPGRRNSGQSEPQMHISKEGDPYLRTVLVQGAQHILGPFGVDSDLRRWGLKLAERGGKNGKKRAIIATARKLAVLLHRLWVSGEVYEPLRNTNRTMLAAA

SEQ ID NO: 131934 - protein, 340 aa, unidentified
MKGTIIGIDLAKNVFEVYVEDGVKQTGTRTRLSRKKMLPWFANRSSALVGMEACGGAHYWARELEQLGHTVRLIAPQYVKPWVQTNKSDQADARAICRAVQEPEMRFVRIAGEAQQAVQALHRVRSRHMGNRTALVNQIRGILLEYGVAIPKGVASVRKALPLLLAEERWAPLIRQFLTDQQAELTDWDTKIEAVTAQINQESATQPVCQRLEQIRGIGPLGASALWLKVAGQPYQNGRHVAAAVGLVPKHTGTGGKIKLGGISKRGDRYLRWLLIHGARAVVAQVGEKQDRLSCWLRALVARRGMNKAVVALANKNARVAFAMIHEDQTYDVTKMCRPV

SEQ ID NO: 131935 - protein, 420 aa, unidentified
MKRERDTRVWEEGKRYIGLDVHKHYITVGGMNAQQEIVLRPRDVEMERFQRWAESNLRKTDEVVLEATTNTWDVYDTIVPLAKRVVVAHPAEVKQIANSRVKTDNQDVIRLVRLLIADIVPEVWVPPVAVRELRAMISYRWRLVKMSTAIQNRMHSLLHRHNIQAPQGKVDTGENREWWERLKLSELETLRLKQEIKTLRLIRENIVEVERELGRLSNGERWGDQAVYLMQLPGVGIIVTMTILSAIGDIRRFESPKKLVGYAGLGAGVHDSGQKHQGKGITKFGRKELRWALVEAAWQAVRSNPKWRAEYDALCKPKHQNQAIVAIAHKLLVIIWYLLNRQEVYKKSTEEDLAYKMLTWAWHMDKSALNGMNNQQFAKYGLLRLGKGAELTRIVRGGVPRRIASKEEVLAMKPELHLKQ

SEQ ID NO: 131936 - protein, 364 aa, unidentified
MLIIGCDYHPSVQQIAFVDTDTGELSERRLGHREQAEQFYRELKQGNLAVRVGMESSGHSRWFERLLRELQFELWIGDAAEIRTKRVRKQKTDRQDAQLLLRLMLENRFPRIWVPDAENRDLRQLLWHRHRLVQMRTRVMNQLQVVALNEGMGRKKALWRPAGRAELESIVLAPWARRRRQDVLELLDQWTPKIEERTRALEQEVEKRPVTRRLMTHPGVGPLTALAYELVIGTPERFHCGKQIASYLGLVPEEKSSGERRRLGHISKQGNVLLRFLLVEAAQVTVRSHQEWRNKFFHLAMRRGRKIAKVAMARKLAVHLYWMWRQGCDYGPGQKLGSYVGEPGHPDGVQSITAVMIGHPAPGK

SEQ ID NO: 131937 - protein, 448 aa, unidentified
MFFQDAIMKMMIEKVASFLYNQILNKVSIERRHYMNRRNIVLKRASVKNVVVIGVDIGKFWHFTCAFLPSGEFTKPFKFFNNAYGFAEFIGFITRLKSTLQSDVIVGIESTGHYWENLAYFLDSKGVKLVQVNPAHTKKSKELLDNTPNKADPKDSIVIADLVAQGKFLSLILPKGDYAKLRRLAKARERVTKELTALSNAINYIIDMVFPELTQIFPDVKSKTVLYLLSNYPRPKDLLTISLEELTKQLKKVSRGQARKDKIEQLYRAASNSVGITQGNEQLELILEPYLSRIHDLTLHKISLEKVITEVVERLPETKHILSLKGVGIITVAVILSETGDLRLYHNAWEVIKLAGLNLYRLSSGKYQGQVKITKRGRPLLRWVLFFAALRQARLGMPLYSFYQRLRNNGVHKMKALIAVARKLLCIIFALVRDRRDYVLERSGNLAA

SEQ ID NO: 131938 - protein, 347 aa, unidentified
MRLYTKQHKHYCGIDLHTNKMYLCILNQEGDILLHRNIKTEPATFLATIAPYREDLVVCAECMFSWYWLADLCAEESIPFILGHALYMRAIHGGKSKNDKIDSQKIAALLRGGLIPMAYVYPQRMRATRDLMRRRNHLMRKRAELFAHTQNTASQYNLQVPLGRIAKPQNREGLLDRFDDPSVCMSMAANLDIIDAYDRVLAVLEQDIIAHAKEHDPTAYALLKSIPGVGRINALNLLYEIEDISRFPRVQDFASYCRLVKCVKESNGKKYGSSGRKIGNAHLRWAFSLAAQLFLKSNEPGRQLHNTLVRKHGKGKALSILAHKLGRAVYFMLKNRPGFSMQKFLTA

SEQ ID NO: 131939 - protein, 311 aa, unidentified
MKSILSVGMDVHKNSFSLCAYDGYTGEIVSESTFASDVKLVIKFIETLKSRHENDVEIKCGYEAGCLGYSLYKSLTARGVDCVILAPTTMQVSAKNKMVKNDRMDALNIAKNLASGSYKAVYVPDEEVVEIKEYIRMIHDFKKELKRVKQEICAFVLRHGYQYDGKSKWTIRYMNWIRELEMSEIQRETLNEYIAEMENLNDKIDRFMNRIDEMYQSDRYNEKVSKLRCFKGIDTFAAMTIQVETADFERFPSAKAYASYTGLTTGEHSSGDKNNQIGITKQGNTVIRKTLVECAQSLVKGNVYGAPVRCS

SEQ ID NO: 131940 - protein, 338 aa, unidentified
MKIKRIAIDTSKHVFTLHGVDEQDRPVLRRELKRGQVEAFFRKQDATEVVLEACGGSHHWGRLLGRLGHRVRLIPPQYVKPFVKRGKNDRNDAEAINEAASRPTMSSVAVKTTEQQADAIVLRHREMLVNQRTQAINALRGHAAEFGVVAAKGTVNVAALLGVLAADSTIPAAARAMFEQMGAHIDALDQRVAALDGELAALHKTNPVSQLLAEIPGVGPIGAITMALTVAAGNFASGRHFAAWLGLTPKEHSTGGKQRMGKISKAGNERLRQLLVAGATSVVRFAKPGSKSASAWLLQLLQRKPRKLAAVALANKNARIIWAMMSRGEAYRRQPTAA

SEQ ID NO: 131941 - protein, 368 aa, unidentified
MNSIKFIGMDVHKKTITIAIANLGSRGPARSYGTINNDLSALDKFCRKMVSTASQLHFVYEAGPCGYGIYRHLTEKGFDCMVAAPSLIPKKSGDRIKNDRRDAKMLARLHRAGDLTTVYVPDCQDEAMRDLSRAREDAVIATRKAKQRLKAFLLRNGIAYSGKSRWSKAYFNWLSDIAMAHPAQQVALQEYIDTVHESIERVIRLTDQIRQLVPNWRLGPVATALQAARGVSLIVAVTIMAEIGDLSRFENPSQLMAYLGIVPSEHSSGDRIKRGGITKTGNGHARKVLVQAAWAYRMKPRISRILLKRQQHVSKEVRQISWKAQLRLCTRFRRLAAMGKPKQVVVTAIARELSAFLWAIAKQVQPVV

SEQ ID NO: 131942 - protein, 368 aa, unidentified
MKKCTLFIGLDDSKDTIEVAVAEGVPGGEVRDFGSVPNTPESLAKLVRRLGRPKDLFFAYEAGPCGYGTYRTLLGLGASCLVAAPSKTPRRPGERIKNDRRDARTLAKLHRASELTPIWVPDAPTEAMRDLTRAREDAKYAQTRARQRLFAFLLRHGRRYPGRTTWSAPHFRWLRTQSFDHPAQQICMEEYLLAIEEATNRVARLDQQIEQLVPQWTMRPVVRALTAHRGVNLLAASTLIAELGDLTRFDEPRTLMAFVGLVPSLTASGLERRTGRITKTGNAHARRCLIESAWAFRHPARRSNHLQRRLEGQPQDVQDLAWKAQVRLCGRYRRLTARGKQHNKVICAVARELVAFLWATARTVAVPA

SEQ ID NO: 131943 - protein, 332 aa, unidentified
MYSIGLDVSKSSINVFISSEELDLEIENSLKSLKSFYTKLKKIYKKEIDKVVFVFEPTGSYSVLLHQFCASKNIQIFMINPKQARNFSKAIAQRNKSDLIDARVLSQAISIARKGEIAVPTIDPIVEEIKELMSYYKLKVKQRVQLSNHLEALFVKNSNKVLVKTIEKELKTLKKQEENILESIYSIIKNDETLLNKYNSIISIKGVGNIAAIVLLHLFIKYPNANQRQIVSLTGLDPIVRESGTSVRGKDRISKAGARIYRGSLFMAVMSATRFNKQMKLFYERLKENGKHTTVAQIAVMRKLVIIAHSLYKNEELYNENKYMKATGASNV

SEQ ID NO: 131944 - protein, 418 aa, unidentified
MKKHSNSRKKSEATTKRAKSRGPVQRDTKEVLAELVGKLKEKLDPKKAAAASAGDGHPRGELRPNLDRLTVGVDLGDQWSHYCILGLEGETLAEGQLRTTQEDFATFFQGLNAARVVVEVGTHSAWVQEVICGCGHEVLVANPRLMEGSKRRKRKNDRIDANKLARLGRVDPESLYPIQHRSREVRQDLVMLRARDALVAARTEIINTTRGLVKSMGTRLPKCSSRSFAQKGEETVPVEMREALLPLVRLAAALSADIKEYDKKIESLGREKYGHTTLLRQVKGVGPITALAYVLTLENPQRFAKSRDVGPYLGLVPKQEDSGESQPQLGISKAGDTMVRKLLVGSAQYILGPFGPDTDLRRYGLRLCERGGKNAKKRAAVAVARKLAVLLHRLWVSGEVYEPLRPGMSATMTPAAAA

SEQ ID NO: 131945 - protein, 337 aa, unidentified
MKFSGIDLHSNNSVIVVSDEQDRVVYQRRLPNELEQILAVLAPHREELVGVVVESTYNWYWLVDGLMAAGYRVHLANTTAIKKYEGLKYSGDMEDAAYLAQLLRLGLLPEGYIYPRDERAGRDLGRKRMQLVRCRTAQILAMENLLARQTGGRMSSKQIKRLTNEQIDRLGFAPDVALAFKANLAISAALQKQIETLEKRLQERVRLRQDYRLLKSVPGIGQTLATTIMLETGTVARFAQVGNFSSYCRCVDSIRKSNGKKKGEGNAKNGNKYLAWAFVEAANFAVRFCPEAKRFYERKKRKTNGIVATKALAHKLARACYHMLKLQQPFCVERCFA

SEQ ID NO: 131946 - protein, 326 aa, unidentified
MQGKEASEQETKVNSTVGIDVGKDWLDLHVLPAGAALRVANTVGGIRRVKRWLSQFDIALVVVEATGKWHRQVQRSLAASAVRVAVVDAFRVRMFAKAQGILAKTDRLDARLLAQFAAVMAPPVRAPAPQALDELRELVVARASAVEQQTALKNQLAAATVNFLRRQLQRRIERGDRDIAALDAAILKRIRLDHTLAKRYAILSSIAGIGFVAAATLLASLSELGSGTNKQIAMLAGLAPIADQSGRREGVRVVWGGRPSVRRILYLAALSAARVNADMRTCYQRMRAAGKPAKLALIAVARKLAVLANTLVKEDRTWLPQSPKHA

SEQ ID NO: 131947 - protein, 419 aa, unidentified
MTASYSTASTLLVAIDISKYRHEILIGIPGKKRRRKLTVTNALEDFQRLVGILASYDLPVRIGFEATGNYHRTLAHHLGQAGFELKLVSSVSLARTREALHNSWDKNDPKDAQVILHMLEIGAVQFFHDPLVTGTADIQELSKTHEIVSHSKTELWHRILTHYLPLYFPEAERFHRSSRTDWFLAFLDRYPLPHMISAMSREDFIKDAWQVVGRKVGKEQMLSDIYATAVASVGLPVHPESDAIHMFRLVLAEGRSLIRQRDEIEARAVELLSDLPDYQLLTTIPGIGPINAMTILAEAGDLRRFQHHRQFLKFCGLDLATMQSGTFRGQSKISKYGNARLRRTLWMAGQTAVLKRTNSFRDKFERYISKDRHNAHLRRKAYTAISAKMARTVHAVVKHGEPYRPFFEAGVPRRKDLSL

SEQ ID NO: 131948 - protein, 346 aa, unidentified
MKIATVGIDLAKNVFQVHGVDGRGKAVLRMSLKRAEVVKFFAKLEPCLVGMEACGSAHFWARKLIELGHTVKLMAPQFVKPYVKTNKSDARDAEAICEAVARPNMRFVPVKTAAQQAVLALHRARQGFVKARTAQANQIRGLLAEFGIVMPQGIAHVVAKLPDILEDGENGLPGSLRQLLAGLLAHFKELDRQTGELEREIKLWHREHEASRKLERIPGIGPITASALVASVGDAKSFKNARQLAAWLGLVPRQHSSGGKSTLLGISKRGDVYLRTLLIHGARSVLRHLQRHTDQAEGWLARLAARRNPNVAAVALANKNARIVWALLAHGRDYHAGYGAVAAKAA

SEQ ID NO: 131949 - protein, 326 aa, unidentified
MQGKEASEQETKGKSNAGIDVSKSWLDAHVLPAGATLRVANTREGIRKLKRWLIQFDLALVVIEATGKWHRDVRRSLHAAMVPVAVVDPFRVRMFAKACGVLAKTDRLDARVLAQFAAVMAPAVRAPASEVMEELAELVTARASAVAEQTALKNQLSTATGTFLKRQLGRRIQRLAKDIAALEREILKCIQADQGLARRYAILTSITGFGPVVATTLIACLAELGTCSRKQIGMLAGLAPVADESGQRQGIRVVWGGRPNIRRVLYLAAITAARFDPDMKAFFNRLIAAGKPAKLAIIAVARKLVVLANILISEGRMWQPHSPKHA

SEQ ID NO: 131950 - protein, 408 aa, unidentified
MTVVGIDVSKGKSMVAAMKPGGELVAAPYKVRHSDIEMSHFALDVLCMEPDTRVVMEATGRYHEPVAALLHSEGIFVSILNPLLIKQSGAGSLRKVKSDPKDALKIAKYGLDNWSTLREYTPMEAIRQQLKLCARQCDLYNKNIVMLTNNLISLSDKTFPRVNELFSSPEKADGHLKWVDFYRSFWHCDCINRMSPDAFEERYKKWCKRKGYHFSTDAADALYAASCGSYTTLPRDNNAKLLVTVAADQLIALRENQSKLEAEMLNVCKQLPEYETVMAMYGVGKSTGPHLMAELGDVRRFPHRSSIVAFAGVDPGVVGSGKMQLSSVATSKRGSPQLRKALFQVVSTYVKCKSENEAVYQFYTKKRDEGKPFFVCTTAAANKFLRIYYARVKECLNAAESVTQAEEG

SEQ ID NO: 131951 - protein, 384 aa, unidentified
MNESSTLFVGLDVHKDSIDIATADAPRDGEVRHVGSIGGDQASLDKSLRRLISRGHRLHGVYEAGPCGFVIWRHLTAQGLHCEVVAPSSIPRAPGERVKTDRRDAMLLAKLARNNDLKAVRVPDAVDESVRDLVRAREDAVRECRNARHRLKALLLRNGVGYSGRSAWTAAHLRWLAKVSLAHGAQQIALQEYLHSITEATARIARLEQALRDAAPGWGLAPVVQALQAMRGVQLIAAMTLVAELQDFLRFESPRQLMAYVGLVPSEHSSGPKRRQGGITKAGNSAARRMLVEMAWHYQHHARVSPVIALRHDGLPQAVIDIAWKAQLRLSAKFKRLLARRVMKTKAVVAVARELAGFVWAIGREVQTSGWRGTKTASATDVPA

SEQ ID NO: 131952 - protein, 482 aa, unidentified
MKAKQKEPPEKSTGQSTQLNWRRMNRKQRRDLERKIQSADLTLQLVHPDAAGIDIGNESHYVAVPPDRDSQPVRHFGCTTAELRAMADWLRQCRIRTVAMQSTSVYWIAVYDVLEQAGLEVYLVNARETKNLPGRKSDVQESQWLMKLHTYGLLRNSFRPPQEVRTMRTYWRQRNDLVRSAARHIQRIQKTLTQMNMQLANVLSDVSGVTGQAIIKAILAGERDPQKLAAFRDPRVKASEQDIARSLEGNWQDDLLFVLQQEQAAFEFYRKQMTECDRQLERYLQKMEGRSQGATLPEEKRKDRLQKKKGNEPHFDLQAQLFRMTGTDLTQIDGIDVMTATTILSEAGWDMIKWKDEDHFVSWLRLCPDNRISGDRIIGKGRLPTNNRVTVALKLAASNLRTSQSYLGAQFRRLRARLDTPVAIKAMAAKLARLIYRMLRYGTKYVDQGSPFYELQQRTREIRRLKVKAASLGFQLVQRNAA

SEQ ID NO: 131953 - protein, 449 aa, unidentified
MAKKKRKYRKLERSLPVMRPNAGGIDIGATEIFVAVPADRDTESVRSFPTFTQDLHALADWLQQCRVDTVAMESTGVYWIPLFQILEARGIEVHLVNAQHVHHVPGRKSDVLDCQWLQYLHSVGLLRASFRPEHAVCEIRSLMRHRENLVQMACVHVQHMQKSLDQMNLQIHHVISDITGVTGLAIVDAIVAGNTNPKELAKLRDHRIKASIDTVTKSLVGDYRPEHIFTLKQSLTAYRHYQKLIADCDQEVQQRVEAFQSNDDGPTAAADSSSATSPTAPSFDLHSHLERIFGVDLTAIPGFDVLRIQTIFSELGADMSPFPTDDTFCSWLNVCPKDGTSAGRRIRAPKVKTKNRVTQAFRMAALSLHNNKSYLGDYYRSQRARHGALKATKNAAHKLARIFYHLVKTREPYDETVFAKLEARNQKHRLHKLQTLARQMGYSLVQANA

SEQ ID NO: 131954 - protein, 360 aa, unidentified
MMHDNGSSAVVVGIDTHADTHHVAVITDYGRPLVDVKVPATASGYRKALALVGEYSQVLKVGIECTGSYGAGITRKFLDAGYTVVEVNQPNRFERRRRGKTDQFDAYAAAEAALSERATAAPKGGDGLVESLRVLRATRSSAVRDRTATINQIRAMLISSPEPIRQKYRGMTTSKLVAALAVSRPPAQPVTAAESTAICLRHLARRYKFLDEQVADLLRQITRLLDDHAPALMAVYGAGPDSVAQLLITAGDNPERMRSERHFAALTGASPIPASSGKTNRYRLNRGGDRQANSALHHIVLVRMHYETRTREYVERRVAEGKTKREVMRCLKRYVAREVFPILRSTLEPNLGTQNLDEAI

SEQ ID NO: 131955 - protein, 400 aa, unidentified
MMTPDDIDVWVGLDVGKSAHHAHALDHDGNTLYDKPLKQDEKAIRTMLGKLSKHGRVLLVVDQPNTIGSLPLTVARNMGIAVAYLPGTAMRRTAQLLPGDAKTDRRDAHVIAWAALKLPETLRDAGPDDETLAALKLLAGHDEDLAHESTRHINRLRSLLLQTHPAFERALKGERITRDATLALLERYGGPMGVKRAGIEDVKDWAKSNGLRAGRIIDDMFKAIGEQTVTVPGTLMAETIIPSIAHDIKTIRDRRREVDRQVEKLLEDHPLLTVLTSMPGIGVRTASNILLGIGGDIANFKSSAHLAAYAGISPVTGQSGTSIKGERPSRRGNKRLKNALWQTAFVASTKHPPSVAYYKRKREQGKHHNAAIICLARRRCDVIYSMLKNGTLYQEPALVA

SEQ ID NO: 131956 - protein, 441 aa, unidentified
MSREPEQVHDSDQEVRLERVAAIDVAKASGKVCTRLPHPSQPHRRVTLVWDVAATTNAICMLAQQLVTDGIERIVLESTSDYWRPFYYVLEAHGLTVWLVNANDVKQVPGRPKTDKLDAVWLAKLNERGMLRASFVPPKAIRDIRDYTRLRHDLVADRTRYKLRLEKLLEDALIKLSTVATNFLGLSGRAMIDALIAGQRDPQKLADLARGKLRVKHAALVEALTGRFDDHHATIAATLLRQIDTLDTEIDATTNIIDQLITQIPTGHTGDGQATPDADAPSTLQRLDEIPGIGPRIAQIIIAETGADMTQFPTAGHLVSWAKLSPRTIQSGPKNRRGPTGKGNPYLKSALGEAAAAASRTDTFLGERYRRLVKHRGKGKALVAVARSILVIVWHILAHPTTKFVDLGAEHYTTRINTDRKIRNLVRQLEALGHTVNLTTT

SEQ ID NO: 131957 - protein, 337 aa, unidentified
MMYGAIDLHLRYSQIRIVDADGRVIHEKRVVTSRETLTAAFAGVGAIRVLLETGTESEWVAQTLEAAGYAVIVADPNYAPMYGEVRRRVKTDKRDVAALAEANRRGWYRAAYRRSAAQRAVQQILRSRRQLVAMRTGTISVLRAVLRQEGYRLPSGSSGQVSARLARLAIPPALTATLAPLERTIGQLTTEIATIDTRLAAQAATDAVVQRLQSVPGVGPVVALTFRATLDQVERFAHAGQVSALLGLVPREDSSAERRHRGHITKAGSGELRSLLVQAAWACQKSRGSGALRAWAEQLAARRGRRIAVVALARRLSRILFAIWRDETVFTPKTVAS

SEQ ID NO: 131958 - protein, 412 aa, unidentified
MDIVVERCAGLDVHKDTVVACVRTPGKGGRREQTTRTFKTMTIDLMALRDWLVAMGVTLVGMESTGVYWKPVFYVLEDAMECWLLNARHLRNVPGRKTDVQDAEWICQLVEHGLVRPSFVPPKPIRELRDLTRYRKAQIDERGREAQRLDKVLQDAGIKLSSVATDVLGKSGRDMLAALISGTRDPQVLAEPARGRLRTKIPLLRRALEGRFVSHHRLIVEKILAKLDFLDETIEDLSAEIDRLIAPFAAEVDLLDTITGVDRRAAECIVAEIGADMARFGSSARLASWTGRCPGHHESAGKHKSGKSRPGSKWLAATLAQCAEAAGRSKGTYLGAQFQRLRGRRGHAKARKAVEHSIVVAAYHVLNRHVPYHDLGADWFQRRRPEAHARRLAHQIEALGFRVTIEPTDQAA

SEQ ID NO: 131959 - protein, 318 aa, unidentified
MNIIGLDISKDTIDATLHKINGSIHYIKFKNNDDGLKQFRLWIKGNRIRKAYIGMEATGIYYEKAADMLSSYYTVYVINPLKIKDYGKSRFNRTKTDKADSNLIADYIKRHQDTLIPYQIPKNKALQKLINLKNQLQQQQKQIKNRLHSTEEDFIRNIHQDLIDTIQDKMEQVKIAISEQIKKQTDNNHYRNLQTIPSIGKDTASVLYAQLTEKHFKTANQFVSYAGLSPAIIQSGTSVRGRGRLSRYGNRRLKSTLYMPALCAYRFNAFPKLINNLKKAGKPKMVIIVAIMRKLAKLAYYIVKTGQPYDAERHRLNQ

SEQ ID NO: 131960 - protein, 338 aa, unidentified
MERQYVAIDLHRRRSLILRQNEHGEELGVVRIDNDPIALAAALAEAGPDPEVAIEATYGWYWAVDVLEAQGANVHLVNPQGLHWDSRRVKNDYKDCQGLAARLRLGELPEAWIAPPAVRELRELVRYRAKLVALRTGLKAQVKAVLAKFGLRAPVDELWGPVGSAYLDSVDLPHGYTVRMESLRDLVGALDAEVAMLEREISAWLKDDAGYWAIQAINGVGKTIAAIFVAEIGDVTRFSSPQALCSWAGLTPKHHESDLKAHRGKVTKQGSKMVRWAAVEAVSHLHGGPKLQRDYHRLADKRGRNIARVAVARKLLTLVYYGLRDGEIRCLAQADRAG

SEQ ID NO: 131961 - protein, 391 aa, unidentified
MNAIRSTESTTSTVRLHLAFELGWTEWKPAFTIGQAQAPRLRTIAARDLDSLIREIAKAKERFHLPADAPVVSCYEAGRDGFWLHRYLNAGGIRNIVVDSASIEVNRRSRRAKTDRLDAVKLVVMLLRYHGGETKVWSVVTIPSVLDEDHRQLHRELLELKQERTRHVNRIKGLLASLGLAVATVNAAFPAVLPTLRLWDGTALAEDSQQRLLREYARWQFVDRQIKDLENARKKRVRQDETPHVEKVRQLLSLAGVGLSGSWLLVFELFGWRKITNRKQVGALAGMTPTPSQSGDSMREQGISKAGNRRLRTMMVELAWCWLRYQPQSELSQWYQRRFTLGGTRARKVGVVALARKLLVAFWRYLEQGEVPKGARLVPWRPKTGGGLAAA

SEQ ID NO: 131962 - protein, 470 aa, unidentified
MKRKPQAKTRQRHSKRAKREQKLLEKIHLNAAGIDIGSGSHWVAVPEDRDEQPVREFRSFTHELIELAVWFEACDIDTVAMESTGVYWIPLYEILEERGIEVLLVNARHVKNVPGRKSDVFDCQWIQQLHTFGLLRGSFRPNAEITAIRTLVRHRDKLVEEAAACIQRMQKALTLMNLQLHKVISDVTGVTGMLILRDIVAGETDPAVLARHRDPRCKASEEEIAASLTGHYRDEHLFVLRQQLEVYDFYQEKIHCCDEQIEIRIHALEAPCESSARDLPAPRRPSPKRKPQDNAPSFEIRSPLFKLSGGVDLTELPGIGPYGALKLISEIGLDMHCWPTEHHFTSWLTLAPSNKISGGKLLSSRTQPSANRAAKILRIAAMALHRSDHALGAFYRRLAARTDKPKAITATARKLAILVYRMLRYKMPYHEPSAAEYDKRQHTRILRGLRKRAKSIGFDLVDTSTGLVMS

SEQ ID NO: 131963 - protein, 337 aa, unidentified
MKFSGIDLHSNNSVIVVSDEQDRVVYQRRLPNELEQILAVLAPHREELVGVVVESTYNWYWLVDGLMAAGYRVHLANTTAIKKYEGLKYSGDMEDAAYLAQLLRLGLLPEGYIYPRDERAGRDLGRKRMQLVRCRTAQILAMENLLARQTGGRMSSKQIKRLTNEQIDRLGFAPDVALAFKANLAISAALQKQIETLEKRLQERVRLRQDYRLLKSVPGIGQTLATTIMLETGTVARFAQVGNFSSYCRCVDSIRKSNGKKKGEGNAKNGNKYLAWAFVEAANFAVRFCPEAKRFYERKKRKTNGIVATKALAHKLARACYHMLREQKPFDVQRCFV

SEQ ID NO: 131964 - protein, 424 aa, unidentified
MISVGIDVSKGKSTVCILKPYGEIVSKPFNITHTQKDLSELSSMLFRLNDEVKIVMEATGIYHLPVLTYLQEKGFFVSVINPYLMKSYRNESLRKAKTDKIDSRIIANYGIDHWFKMKEFQTSGEIYEELKLLGQQYRHYMKLHLLSLAELTHLLDLTMPGIKNLLASWNETNRKDKRSDFVERFWHYDVITSMSEQEFTEEYILWAKEKKYVPSQEKAKVIYTLAQESIPTLPSETSSVKMLVTEAVRVLKEVDATLGLILSRMQEIAKTLPEYSVVREMGGVGNTLAPKLIAEIGDVRRFRNGKALVAFAGIDPPPYESGQFVGCNRKISKRGSASLRKVGYETMRSLKMRSRPEDPVYRYVVKKESEGKSKKSAKIAGLNKFLRIYYARVTELYKNIILYKINNFLDCQSDSLFVVRKYIL

SEQ ID NO: 131965 - protein, 328 aa, unidentified
MCEQRMVGIDVAKATLDVAVRPSGEQHSAPNDSEGIAALVNWVGMLEPTVIVVEATGGYEAALVAALGVAGRPVAVVNPRQVRAFATAAGYLAKTDRLDAPVLAHFAAALRPTPRPLPDAQAQELAALLERRRQVVAMRTAEQNRLGATRVERVRARIQAHLAWLDADLQEVDDDLRRSRRASPLWRARDDLLQGVPGVGPVVALTLVADLPEVGRLSHAQIAALVGVAPPSRASGTLRGRRTVWGGRAAVRAALSRGPCAPRAATLSFKGSTSASWRRARRRRSPWWRAGTSCSPSSTPWSGMAPPGGLRPPEPARWRTSRVTVAPL

SEQ ID NO: 131966 - protein, 326 aa, unidentified
MRLPCVGVDISKEWFDVDVPGSKFRERFEYTTRGLNLFLKRLKKLGIIKARICMEATGLYYERLAEFLYAHGHEVVVVNPQCIKSFARSELRRSKSDPLDAALIGVYCEEKYDRLHLWQPLPEEYKRVREILRRRQALVEERTMEKNRLQAGFTCAQVLESIREAIRFFDEQIKQLECLAFRLIEENPELARLVSLAESIKGVRRLTVATVLVEVPRVLWTGRLAAVFAGVIPAKDSSGKSRSRSYLSRVGSSRLRHALYMPAVSGSQHNPVLKEFYQKLLQRGLHKKQALAAVMRKLLHLIFGVIKTGQRFDPAYETKRRAEAAI

SEQ ID NO: 131967 - protein, 365 aa, unidentified
MKIIHWIGIDDHADKWTIAHLQGQEGKPANEFELRADENGYRKLIAFAKSLEGEVRIVYEAGPCGYEMYRRLTKAKLQCQVAAPSLTPYKPGQRVKTNRRDAEKLAGYLRSNELTFVVVPDRERESLRDLVRARGAVQKDLVSIRHQIVKFLLRYGHRYREGKAWTVRFWTWLGTIKLEEEYGPVVLEEMKTTHKERVERLARYDEEIEAAAKKPEYASYVAALSVLRGIGTLSAMTLLSELGDLRRFASAPQLMAAVGVVPAEHSTGDKTTRLPITKTGNAHVRHIVVEAAWHYQRRIANGPTITRRRKGQAQALLDIAHKCDLRLNRKFFRMTSRGKRSTVAAVAVGRELIGFIWAIGQLVHP

SEQ ID NO: 131968 - protein, 431 aa, unidentified
MCFAPAFGDEEESMGKINERCGGIDVGKRFLLCCVLTGAAHEEPRSQTRRFDATVSDLVRLREWLAAERITHVVMESTGSYWVPVFNILEGHFIIVLANPEEVKNRKGHKTDRKDAEHLADLLRHDHIRASFIPPKPIRDLRDLTRRRLQLIQDATRERNWVEKLLEHVNVKIGNVLSDVFGVSGQSMLLALLDGKTTAEQIAHLARGQAKRKIPQLTEALEGHGMRDHERFLIRSCLRHLACLEEEVEQIDGEILQRMQEPPFQGAFQRLQTIPGVGQLAAASILAETGVDLTTFPTAEKMASWAGLCPGNRESAGIKKGSQTTQGNSYLRTTLVQCAWSATRKTGCIFQTRFRELSPRRGQKRAIVAIAHQMLTVLHFMLKNDVPFNGAANAPTQRRRQRRAHHHLRCLRRLGISVQIVEPTESAPQTG

SEQ ID NO: 131969 - protein, 417 aa, unidentified
MAREIKSTQTQDELYYERCCGIDVHKKMIVACFRNGRTQTVKAFGTQSKELRELAAWLLEGQCEMAAMESTGSYWKPVYNILELLSVEIIVVNAQHLKTVPGRKTDVGDAEWIAKQLSAGNLKASYVPDREQRELREVTRYRKSLTEERAREINRLGKMLEGANIKLTSVVSDVLGKNARRLLMKYSEGVDITQETIGSYLDSCMVGKAGALAEAMDGMMSGTQRKLVKAVLNHIDDMTRRIADLSKIIEDEMSRYDDAIKRMDKMDGIGEQSAQVILAEIGLDMNRFPTAGHLAKWSGLCPGNNESAGKRKGGRASQGNAILKATMVQCAQAAVLKKGTFLRAQYDRLVVRRGKNRAKVAVAHSMIVAIWHMLKYDTEYKDLGGDYYNRFNKEKKISMHLKKLAELGWSPPVQATA

SEQ ID NO: 131970 - protein, 483 aa, unidentified
MAAKKDAKADTDWKSAGAAPEHGGDGAEVAEDRVQVVERAAAIDVAKGFGMVCTRVPGSRPDRRLQKVWRVEATCAGVTALMDHLRCEGIQRLVLESTSDYWRIWYYLAEAAGLEVWLVNARDVKHLPGRGKSDRADCVWHCKLNERGMLRRSFVPPEPVRDLRALTRTRARLAQDQARHQSRVEKILEDALLKISVVISDLFGASGRRFLDALVAGERSPKALAALGDSRLKATRRELEDALTGRFRDIHAFEIQTHLRLIDAINDEIARLDEAIEQQLAKVPGTAPACTACGLAGGGHAPGCAGEGTPLLSLARRLDEITGVGECNARVLIAELGTDPSQFPTPGHAAAWARLTSRTRQSGETARPGRTGKGNRYIRGALGQSAMAAASTDTRLGALYRRIARKRGKQKAIVAVSRVICEIAWILICDPGARYQELGPDYYSPRSPARQTRDKIREIERLNPGKKVILAPIAPGPEADAAA

SEQ ID NO: 131971 - protein, 342 aa, unidentified
MQVTTYGLDLAKRVMQLHWVDMETGEIHRKQLKRRALLEFFANRQPGIVAMEACGSAHYWARELRKLGHEVRLIAAQFVRPFVKTNKNDAADAAAIWEAVQRPDMRFVVVKSEEQQSVLSLHRIREQLIKIRTMQVNQIRGLLYEFGADLPQGRQKGLKEVPDALADLEKSISPILRDTLRRQLQRLRELDTDIADIEKRLTLWKKDQEAVARLMAIPGVGLLTATAIIATVGEMKSFHSGREFAAFLGLVPRQSGTGGKVRLLGISKRGDTYLRSLLTHGARAVVNRQIKNRNPWIDKLLSRRPHNVAVVALANKMARTIWALLVRDTEYDAHHAAIKAAS

SEQ ID NO: 131972 - protein, 341 aa, unidentified
MYYIGLDVHKKTISYCVKDASGLVHQEGKIGATRRELDGWIKALPQPRMVAMEATIFTGWIYDHLLPHAAQVKVAHPLMLRAIAAAKKKNDRIDAGKIADCLRCDFLPECHMAPIEIRDRRRTLRYRQLLVRQMVQMKNRISGLLMETGVEYNKRRLHKVGYFGELLSTNEEVKESIRPLLKLSRETIVRLQKTEYALVSSLQRDPLLAERIRRLRTVPGVGPITALTWALEMGDVSRFRSVKQAISYCGLCGDEKSSADKVIRTPLSKQRNKHIQRVLVEAAKLAPREDHKLALVYEAEKQKGNANRATLAVARKMVSYLLAVDRGARSFVPAEEHSTAA

SEQ ID NO: 131973 - protein, 413 aa, unidentified
MELEVMVERCAFLDVHRDTAVACARTPDGRGGRTEEVAEFGTTVSQLLALGDWLCERGVTRVGMEATGVYWKPVHWVLEAMIEEVWVINARHMRNVPGHKTDVADSVWGASLLEHGLVRASFIPPPPIRALRDLTRYRKSVIEDRTRETQRLHKVLEDAGVKLSSVASKVLSKSGREMIDALIAGERDADVLAELAKGRMRSKIPRLKDALAGRFNEHHALLCQAMLARVDQADATIDALGVRIGELLDPFEAAVSLLVTIPGVSQRTAQVIIAEIGADMSRFPDAGHLASWAGMCPGNNESAGKHRSGRTRHGSKWLRKALIEAAHAASRTKDTYLAAQYAQIRYRRGPQRAAVAVGHSILVVAWHLLTNGEPYNDLGGDYFDKQRNSAARQRRLVAQLEAMGNTVTLTQAA

SEQ ID NO: 131974 - protein, 403 aa, unidentified
MNNVAGIDVSKGKSMVSVLRPFGEVVAKPFSVGHTGSELKELADYLKSLDGETRVVMEHTGRYYEPVARFLHDEGVFVSAVNPKLIKDYGNNTLRKVKTDKADSRKIARYGLDNWAELRQHTPMDTIRMQLKTLNRQQSLYTKTKTMMKNNLIALLDQTYPGVNALFDSPVREDGSQKWVDFAMTFWHVDCVRNMSLTAFAERYRKWCKRHGYNFSQSKAVEVHAGAQDLIAMLPKDALTKTMVRQAIDALNAVSASLERLKAEMCTLAAQLPEYPVVMAMHGVGDSLGPQLMAELGDVTRFTHRNAITAFAGVDPGADQSGTHEAKSTRVSKSGPPELRRALFLVMDCLLKTQPQDDPVYRFMDKKRAEGKPYLVYMTAGANKFLRIYYGRVKEYLASLEGN

SEQ ID NO: 131975 - protein, 337 aa, unidentified
MRFCGIDLHSNNSVVVVTDETDKVLVSRRCPNDLAKILALLAPHQGELSAVVVESTYNWYWLVDGLIAAGYAVKLANTVAMKRYDGLKHSDDETDAAHLAHMLRLGILPTGYIHPPAERGLRDLARKRVQLVRSRTQHVLAVENILARSLGSRLSATAIKRLDAAEADTLGLAADVTLAVQANLAVINTLNQEIGKLEARLLESVKLRPEYVHLLSIPGIGKVLATVIMLETGDVNRFAQVGNYASYARCVSSIRLSNGKKKGEGNTKNGNAYLVWAFVEAANFARRYSDEARSFFDKMKAKTNSIVATKALAHKLARASYHILKEGQPFDVKRCFA

SEQ ID NO: 131976 - protein, 416 aa, unidentified
MELLVERAAALDVGKDEVVACIRVPDPAGAGRGRGRRRQEVRTYPTFTSSLEALADWLQAEGVTQVVMEATGQYWKPIWYVLEERGFQLLLVNARHVKILPGRKTDVGDAAWLAELLECGLLRGSFVPPPAIRQLRDLTRYRKRLIQAHGAECQRVQKTLEDAGIKLDSVATDVLGVSGRAMLAALVAGERDPQVLAELAKGKLRKQLPQLRQALRGRFGEHHALLVGLALDHLEHLEGAIAALDGRIDEVIAPFAVARDRLDTITGVGKRAAEVIIAEIGVDMSVFPTAGHLASWAGRCPGNNITGGKRRSGKPTKGNRWLADVLTECAWAAARSRDTYLAAQFWRLARRIGKKKAAMAVGHSILVICWYLLDGDCDYHDLGGDFFIRRDSDRARQRAVAQLQALGYQVTLQPAA

SEQ ID NO: 131977 - protein, 370 aa, unidentified
MSNATTFVGLDVHARSVKACAFVPETGETIRRSFGYEPCEIASWASSLPQHAKCVYESGVTGFHLCRELRSMGVDCVVGAVSKMHKPAADRGRKTDRRDAQFLAVQLALGVVTEVHVPDAECEGARDLTRALADARDDAVRAKQRLSKFLLRHGFVYDERNSAGQRRNRWTRDFWAWVGRIDLGDGAAMATLDHYCVRVREADAAKAALEAKVKALAQQPRWKPTCDALKCLKGVDAVTAVSIACEADGFARFAAASGFAAWVGLVPSEHSSGESQFRGGITKAGNKHLRKLLVEAAWHYKGASRSPKGLVKGQIVDEATRRHANAGVRRLVDRRRAMDDAGKQSSVANVAVARELACWCWAVGRMAEGA

SEQ ID NO: 131978 - protein, 354 aa, unidentified
MNSVRYIGMDVHRDTISVAVLDESGRLMMQSVMATRAGAILDFIHGLRGRLHVTFEEGTHSAWLYDVLARRVEKLVVCNPRKNALMKSGSKSDAIDARNLAELLRAGMLSPVYHGETSALEVQQMARSYSQLTEDTTRVMARLKAVFRGQAVSCVGKKLYGKRHRDASVAQLSGGLRRRAEHLYQELDALQPLRHAVRRELMAECRKHAAAQWLQSVPFLGPIRAALLIGRVQTPHRFRTKRQFWTYCGLGLETRDSGQYRVVNGQVERRRKPVLIRGLNWNHNHEMKNLFKSTATAASVREGVWREFYLGLLAKGMRPEMARLTLARKIAAVTLKIWKKGEPFHAEHLKLQAA

SEQ ID NO: 131979 - protein, 350 aa, unidentified
MLIIGCDYHPGFQQIAFVDTETGELGERRLIHREEAERFYGELERQNLKVRVGMEASGHSRWFEHWLRNLEFELWIGDAAEIRTKRVRKQKTDRQDAQLLLRLMMEDRFPQIWVPDAANRDMRQLLWHRHRLVQMRTRVMNQLHVVALNEGLRRKKALWRPAGRKELESIALAPWATRRRQDLLDLLDQLTPKIQELTRALEEEVEKRPVARRLRTHPGVGPLTALAFELVIGTPERFHCGKQIASYIGLVPSEESSGDRRRLGHISKQGSALLRFLLVEAAQATVRSQSEWRSKFFHLAMRRGRKIAKVAMARKLAVHLYWMWRQGLDYGQMHKLGSHAGEPGNLDGGK

SEQ ID NO: 131980 - protein, 319 aa, unidentified
MKTIGIDISKLTFDVFSEELGHEQFSNNKEGFKALKKLLNKEDHSVMEATGCYHIQLANYLFEKGFKVSVANPLVVKRFIQMKRQKVKTDKSDALMIAMYGQEQNPKLWEPEPAFIEEGKLITTLIQLYVKQQTQFKNKLDNLLSGGVERGVMVRSLNLQLKRIKVEIKKLETNLENLLKEHAPDVLTNIRSVPGIGKKTAMLMMVTTNNFRDFDNAKQVTSYVGLAPVERSSGSSIRGRSYISKKGDPMLRHHLFMCSFTACQNNPQCRALYERIVAKGKSKKLALIAVCNKLIKQAYGVCKNDLVYDENFRRRKVEF

SEQ ID NO: 131981 - protein, 419 aa, unidentified
MTKSNIARQFVQVQPGTLHVGVDLALEKNVAIVINEKAQRLDHFSFLQDRGGYDYFLQRMEGLRQKEQAAGFIVAMEPSNYFWKLLAKELEEKRIPYRLVNAYTVKKHREGNQLDRSKDDQRDAGQIAELSRNGHYTETRLQKGAYEELRQYATLHDQLIQAIVREKNVLWGLVGQVFPELSQVFKELTGETCSAFLGSFAAAASLRQLHVDDFIAQVRTAFSGKKLCVSKLRQVHQLAASSIGVTEGLQAIQLAIQVHLAELQVIREQLNRVTTAMTACLAPMPESLYLLSMKSLNTVSAAIFLAEVGDPIRYHSAAQWVKLAGIQPAPNTSGKKQRSKTPMSHQGRPRLRTMLYYTCLRLVHQDEFFSQLYAHLQRRQNNPLTKMQALGVLMNKLLHILWALIHNQTLYNPSFDQSI

SEQ ID NO: 131982 - protein, 415 aa, unidentified
MERVYERCCALDVHKQQVTACVHVPDRTGARSELRAEFATMTGDLLGLRDWLQGLGVTHVAMEATGVYWKPVYYLLEDDFELLLVNAQHVKNVPGRKTDLLDAQWLCQLLEHGLLRSSFVPPKPIRELRDLTRYRKSLTWERGREANRLQKVLEDANIKLASVASRPLGASGKAMLRALCEGESDPQALADLAKGKLRAKLPALRAALEGRFRAHHAVLVSHLLAHIEYLDETIEQLTAEIEERMRPFERQRELLCTIPGVAERTAEVIIAELGPDVERFPSHRHAASWAAVCPGHDESAGKRRSGKTRKGDRWLRVALIEAANSAAGRTKDTYLRAQYLRIKRRRGHKKAIVAVAHSILVSAYHVLAEGQPYDELGGDYFLRREDRERVAQRLVCQLERLGHSVTLEPVAEPAR

SEQ ID NO: 131983 - protein, 337 aa, unidentified
MKYYAGLDVSLKETFLSIVNETGQVVKEGFALSDLESLSTFLKESGFKYEKAGIESGQLSISLCKGLSKKGFPMVCVDARHMAAVLKAQAINKNDRNDGRGIAQMMRVGLYKEVQIKSDRSCEEKIILGSRRQLVKNRQQLMLTIRGLLKIYGIKIGTQSQFSIKVRGAIEDLSQDVILSMEGLLKALEAIDVSLQDITKKLIEIGKKDEDCLLLMTVPGVGTITAMTYKGVLDDPKRFENSETVGAYLGLTPRQYSSGETNRHGSISKMGPKECRNLLYESAFVFLTRSNTSSKLKKWGLKLVKKKGMKKAVVAVARKLSVIMHRMLIERKEFCHK

SEQ ID NO: 131984 - protein, 323 aa, unidentified
MNKGIKFFGIDISHLVFDVTDSDGNYYQFKNNVSGFRKFIKLLDSQSHCVMEATGYYHYQLAYYLLESGIKLSVENPLAVKRFIQMKLSKIKTDKSDSKLICEYAKQMELKLWQGNSKEETECLQIVRALSVYTKQSTMLKNKIHGEAVLGNPSKIVVTSLKRSLRQLTKEMKTLEEKLLALVKQSHQDLFTRLKTIPGIGPKTAIMLVVLTGGFDRFTSASELCSYAGLTPVIRQSGSSVKGRPRISKIGNQKLRNLLFMCSFNACKYNKACRDLYERIVAKGKSKKLALIAVCNKLLKQAFAIAKSGLIYDAEYKSTLVKN

SEQ ID NO: 131985 - protein, 345 aa, unidentified
MKKVMAGIDLHSNNLVVGIVDQDGKRVGQKKLPCDLKEVVKFLGPFKRRLEQVAVESTYNWYWLVDGIKALGYPVVLANPAAMEQYSGIKSAGDTHDAFFLAEQLRLKILPTGHIYDAELRPVRDLLRRRLLLVHQRTALMLRFKSLYTRTTGQEMTLSGLKELEIKEAQELYDHPANQMIAGMQIKHIDHLSESIEKIEKAVLASARELPFYSKLTSLPGVGRILGMTITMEVGDIKRFADAGNFASYCRTVAAQRTSNSKKKGENNSKCGNKYLAWAFVEAANFARRYDAQCRQWSDRKAAKTSKVIATKALACKLAKAAWHVMSQGSDYDAERMFGQPATAK

SEQ ID NO: 131986 - protein, 445 aa, unidentified
MLPIMYKRVAGLDVHKKTVVATRMRVTDEDRVEWETETFGTTTPDLLRLHDWLEAWQLTHVAMESTGDYWKPVYNVLEDTFGILVVNARHVKHVPGRKTDVKDAEWLAELMMHGLLKASFIPPKPQRALRDMTRYRTTLVQERTRLVNRVQKLLEGANIKLSSVATDVLGVSARAMLAEIAAGQTDAALMADLARGRMRKKISELEKALTGIVQPHHRFLLAQQLGHVDFLDEQIEKISAAIGQQLESMSWPDRPSGPGTSADAEEEARVTDETELPLTWNTAVALLDTIPGVERRAAEVMLAEMGLDMCQFPTAEHLASWAGLAPGNHQSGGKRYSGRTTKGNRSLSCIMVQAAWSAVRTKDTFLKARYHRLAARRGKKRAIVAVAHSMLVSAWHMLTHQQPYRELGGDYSDERKKEAKVSYLVRRLEKLTGGSVAIEIQPAAA

SEQ ID NO: 131987 - protein, 369 aa, unidentified
MKKIVKYVGLDVHKDSITIAIADQGRDGEVRVYGKIANDFDQIDKVMRKLISQNAQLHCVYEAGPCGYPLYRHLTDKGIDCAVVAPAMIPKKSADRIKNDRRDAIKLSTLHRSGELTAIYVPDQEDEAIRDLVRARADFQKSLRKVKQQINAFLLRHGTPYPGKTKWSKAHLAWLTTIKMSHAAQQVALTEYLDAMENSQNRVARVTSQLESFCETWRLRPVVQALQSMRGISFVSAVTIVAELGDLSRFDKPGQLMAYLGLIPSEYSSGPSVKKGGITKTGNGQARRALIESSQAYRLPARKSVAIRKRQQNVSEEVLDVSWKAQLRLCSRYRLLKARGKNHNVVITAIARELAGFIWAIARMVPIAA

SEQ ID NO: 131988 - protein, 410 aa, unidentified
MNPIIDRCAGLDVHQATVMATVRIPGEAGGRRGVTEQFATTTASLLILRDWLHAHGVTHVALESTGVYWKPVYYVLEDDFSLLLVNAQHVKAVPGRKTDVRDSEWLAQLLECGLLRASLVPPRPIRDLRDLTRYRKQQIRDRAREVNRLHRFLEDAGVKLSTVATDVMGASGRAMLDALLHGTTDPAVVADLAKGKLRKKLPALREALQGQFRAHHALLIGQLLAKVDFLDEMITNLTVEIDRLVVPFEPMLANLDTIPGVDRKGAIAIVAETSGEMTRFETADRLCSWTGICPGHAESAGKRRSGKTRKGNPYLRTTLIESGLAASRAKNTALQACYRRVKRNRGHKKAVVATGHQILRIAFHVMRDGVPYHELGARYLEERQRERAIRRHVRQLENFGYQVLLVEPAA

SEQ ID NO: 131989 - protein, 399 aa, unidentified
MTPDDIDVWVGLDVGKSAHHAHALDHDGNTLYDKPLRQDEKAIRTMLEKLSEHGRVLLVVDQPNTIGSLPLAVARSMGIPVAYLPGAAMRRTAQLLPGAAKTDRRDAYVIAWAALKLPESLRDAGPDDETLAALKILAGHDEDLAHESTRHINRLRSLLLQTHPAFERVLKGERATRDATLALLEHYGGPMGMNRAGIEQVRQWAKDKGLRAGRIIDDMFRAIGEQTVTVPGTAMAETIIPSIARDIKTIKDRRRDIAAQVERLLDGHPLLTVLTSMPGIGVRTASNILLGIGGDAARFKSAAHLAAYAGIAPVTSQSGTSIKGERPARGGNKRLKNALWQSAFVASTKHPSSIAYYKRKREQGKHHNAAIICLARRRCDVIYSMLKNGTLYQEQTLAA

SEQ ID NO: 131990 - protein, 374 aa, unidentified
MTRESPVSPEATTQDTEVRMVTIGVDAHKRVHVAVALDAAGRELGVWKGANSGRAWQELRDWAAALGAQRVWGVEGAWSYGRGLAQHLVAGGEVVYEVNSRWTALGRRSARKRGKTDRLDARSVAAFVRQEAATLPRVGEEDETAVLDLLVRERENAMAEVTRLRNQIHALLMQIDPEYDLRLRNRRVRTRFRLLESYEPPVDGSALHRERVAAVRRLAARARVAFEHADELAKRIRALAKDRFAPLTELVGVDLLTAGQLAAILGPGRRFAGEAQLAAYAGAAPLEASSAGLVRHRLNRGGHRQLNWILYRIVLTQAQHSEQARTYLARRRQEGKTTREAFRALKRYIVRAIWRLWQLCPGIQPQEVTASVAA

SEQ ID NO: 131991 - protein, 347 aa, unidentified
MQSITIGLDIAKHWFQVHGVDAAGKVVVRRKLRRTDVVPFFRDQPPCLVGMEACATSHHWARELIALGHEVRLMPPAYVKAYVKRNKNDAADAAAICEAVTRPSMRFVPVKDIDQQAVLMMHRARNLLVRQRTMAINALRAHMAEFGVIAPQGAAHVARLVKAIEEDTAGLPELARSILRLVVAQLNDTQAKIIEVEAQLAKWHRHSEVSRRLATVPGVGIMGATAIAATVADPSLFRSGREFAAWLGMTPRQNSSGGKERLGRTSKRGDKYIRCLLVAGAVAVLRHAREKATKDGQWVRDMLARKPAKVVAVALANRTARIVWAVMARGDGYQAKPPTKEFAGQAA

SEQ ID NO: 131992 - protein, 400 aa, unidentified
MSQQLWSGIDGGKSAHHCVVIDSDGRRRLSRKVDNDETALRGLIEDVVALADGGQLVWAIDLNHGGAALLITLLAEHDQTLLYIPGRTVYHASASYRGDGKSDAKDAAIIADQARMRRDLQPLRAGDEIATDLHILTARRTDLTCDRTRAFNRLRAQLLEYFPALERAFDYSKCRAAVLLLTNHNTPDGLRGLGIEALTAWLRERKARNAAKVAATAIAAAKAQHCVVIGQHIAAQMVTRLAEEVIRLDEEITDTDAMIEQRFRRHHHAPILLSMPGFGVLLSAEFLAATGGDMNVFTGPDRLAGVAGLAPVPRDSGRIRGNLKRPRRYDRRLLRACYMSALVATRHDPASRAYYQRKRAEGKRHIQAVIALARRRLNVLWAMLNNHTPYRTPSAATTPA

SEQ ID NO: 131993 - protein, 402 aa, unidentified
METAIEGWDVHQEFCAAVRLNAEGIVLARRTIPTRREDLLAEARRLSKEGIIVTMEASSTAAFVRKVLAEGGARVVVGHPAAIARFRDPKVKDDWIDAKLLAELYRLGAFPAVHDPSEWALRARDICRYRHRLGEEATEVKNRIRSVIARQGLAEDVRSPFSRTGLTSLRRRMHNGQLPHEVGVVLRGELELLGQLQSLTESVDLEVARVGADRAHEVDLLLSLRGCQIQLATTILAEIDGIDRFPTPGKLAKYAGLTPGRHASAGISREQGITKTGSATLRWALTMLAECAKRWEPRVTALYDRHREHGKKPKEAITAVARKMVVWIWNMLRRNEPFRHEEATREEARRKWAEKTRARQRRTNQAKAAVKVSAHSLGRIGRILEGLVEETSDASTSTRVAG

SEQ ID NO: 131994 - protein, 438 aa, unidentified
MACRYAGIDWATEKHDVLVSDEDGSEVLAGTFAHDEKGLSGLCRMLVRMEVVLVAIERPDGLLVERLLDAGLQVLALHPNKVAAARDRFRVSRGKSDRFDAFVLCELARTDHHRFRVLEPDSDQTKAIRALTRAREDLVKTRTGIVNQLRAELERFWPGPLRLFSHMDAEILLAFLERYPSPEDARGLGVARMQAFLERERYSGGQHATSLMAKLRSAPRVRIGELELAVRRRLVLSYVAMIRTLNAQIKDLEREIRAQVRTHPDGPIFLSLFKSPNSVLTAAELLAEIGDCRERYPDRDALAADAGQAAVAVESGKWRTAGFRRACNKRLRVAFCRLADSSRHWHPWAQSLYAQGRQRGHEHPRAIRTVGRAWCRVVWQCWRNHTPYDPARHRALQRHITVIIPTSSGPVPDLAATQRTAGAAVTPKAARTGRARSA

SEQ ID NO: 131995 - protein, 371 aa, unidentified
MEHTRFVGLDIHKERISISVAESGRSGTVEYLGEIANDPGAISKLCERLRHSGKALAFCYEAGPCGYGVHRQITKLGHRCDVVAPSLIPKKPGDRVKTDRRDATMLARLHRAGELTAVWVPDADHEAMRDLVRLRSVVRQIVTRARQHLQGFLLRHGRKHGRGTAWRMAYRRWLSTLTFEHPAQQIAFQDYVDAVTDGERRLQHVEEQISRLLPEWNLRPVVDGLQSMRGISLINAVVLVTEVGDFTRFSNPRQLMAYFGLVPGEQSSGEIARRGGITKTGNSHVRRALIEGAWAYRMRARIGRHKVDRIEALPKAVRDIGWKAQVRLCARYRRLAARGKSANIVNVAIAREMVGFIWSIACTIQSGGKAG

SEQ ID NO: 131996 - protein, 356 aa, unidentified
MAAGDTAIVVGGVDCHAEVHHAAALDGTGRRLGEQAFPATRPGYERLLAWLRGFGSVTAVGVESTGSYGAGLTRFLLQAGVRVVEINQPHTHLRHRRGKTDAIDAEAAARKVLSGEATVVPKETTGAVEAIRQLRLTRRSAVKARAVALRQLGDLIVTAPADLRERLACKTLPGQAAICARFRPDRQRLTDPAQAAKLALRTLARRIAALDAEIAQLDEHLEQLVGAAVPRTIALFGIGPQHAGQLLVTAGQNITRLQGEAAFAHLCGVDPIPASSGKTTRHRLNPGGDRAANSALHMIAVVRLRYCARTQNYAKRRIAEGRSKREILRCLKRYIAREVYRTLCADLAHLDVAPAA

SEQ ID NO: 131997 - protein, 422 aa, unidentified
MMDKERRWFVGIDWGSQEHVVSLYDEDGNKIGQRKFPHGGTGLTDMIAWLLKASGGKPSEIHVAIETPHGPIVEALLERGFVVYSINPKQLDRFRDRFTVAGAKDDSRDADVLADSLRTDMRAFRKLSVADPVIVELREWSRIDEELKVEHVRLTNRLKHQLWRYYPQMLELADDVGANWFLDLFEAAPTPEKAANVREKTIARILKSHRIRRFDAAYVLAELRKRALTVAPGTIEAATAHIRSLIERIRIINGQLADAQRQLDRLCKKLSEPVADENGETTQGQKNEQPDAAILDSLPGVARTILATLLAEAPDPLQHRDYHALRALCGSAPVTRRSGKSCMVVRRYACNRRLTNAAYHWAQNAIQRDPTSRAKYDALRARGHGHARALRSVIDRLLGVACAMLNNGTLFDPEFASKRAAA

SEQ ID NO: 131998 - protein, 343 aa, unidentified
MHEPYHYIGLDIHKRTISFCAKRPDGKTVGAGTFRASRACIAQWAAERTLPWIGGMEATLFTGFIYDVLTPYAMELQVGHPLALKAISCAKHKSDRIDAETLANLLRADLFPACHMPSPLMRELRRVLRYRNFLVRQAVAMKNKTTGLLMEVGVQYDSERIHRQGYFYDLLDNIEETPNSVRELLRTTRCGLEMFQSAQKQLLGALKKHGHLRERVTRLMSIDGVGETTALTWALEIDAPARFSNLKKVQSYCGLCSGRNESAGKNKRAPLSKQRNPHLQTILIEAAKLAPRWNTQLAQLHANVIECGYNRNRATCAVARKLVAYLMAVDKSGQDYRERRIAT

SEQ ID NO: 131999 - protein, 454 aa, unidentified
MKNNKPKNPKTPAFFNKDAAGIDIGGAFHFVAVPGDRDEKPIRKFDNFTADLYQLANWLLACKIKTVAMESTGVYWLPIYEILEARGFEVILVNARHLKNVPGRKSDVIDCQWIQQLHSYGLLRASFRPEQPVCQLRAYMRQRESLIQYASNHIQHIQKALALMNVQLANVVDDIMGVTGLKIIRAIITGERSPEKLASFRDGRCKKSEVVIAKSLNGNYRDEHLFALQQSLELFDTYQAKIVECDLAVENLLNQYSSEEQDLPAPTGKSKKKKRRKNELHFNAENHLKQMTGVDLTKIDGLSTHSVLRIISEIGVDMSKWPTAKHFGSWLGLSPGTKISGGKKLGSKTKPSANRAATMLRIAASTLHRSNSALGAFLRRLKSKVGAPKAITATAYKIARLIYSMMKHGQDYVDAGQDYYDQQYKERIIKNMQKRAHMLGFELAPIQTLTSEVP

SEQ ID NO: 132000 - protein, 344 aa, unidentified
MEYFAGLDVSLRSCALCIVDTNGKVILERELACEVDDISECLSQFQYPIERVGFEAGTMSQHLFFWLTNKRFDVVCMEARQVNAALSAMRNKTDKNDARGIAQVLRTGWFSPVHMKSREAHGLRALLSTRKALLKKTMDLANEARGLLKIFGIRLPRTVKHGSFDGVARPMIEMDDVLAHALVPLLDARVVLYQHFLELDRRVKRAASQDEVCMRLMTVPGVGPIAALTFKGAIDDPARFKRSRTVAAHFGLTPRRYQSGEHDNPGRISKAGDKDVRATLYAAANALLMRTMASSQIKSWGMRLMRTKGRRRAVVAVARKLAVLLHRMWIDGTEFRQDQVGGRV

SEQ ID NO: 132001 - protein, 419 aa, unidentified
MNRATFNEPAAIAPLEHVVSLCDEQGKKMGQRKFAHGGTGLSDMISWLLKTSGGEPGEIHVAIETPHGPIVEALLERGFTVYSINPKQLDRFRDRFTVSGAKDDSLDAYVLADSLRTDMQLFRKLTVSEPLTVELREWSRIDEELKVERLRLANRLRDQLWRYYPQMLELGDLDEDWMLDLWEVAPTPEKAARASKAAIARVLKKNRIRRFDATQVLSELRRPALSVAQGTIEAATAHIRVTIERLRLVNRQLADVKLQLDRLCKKLAEPVAGNDGENVPGQRQEHRDATILDSLPGVGRVVLATMLAESPDALRRRDYHALRILCGTAPVTRRSGKSCIVTRRYACNRRLRNAAFNWGTIAVRYDPISKAKYEALRARGHGHARALRSVVDRLLYVACTMLEKRTLFDPSFVTRGSAA

SEQ ID NO: 132002 - protein, 395 aa, unidentified
MSAEGEAIRSNDYRKDTTVKAPSTRPAAVLGLDVGKSSHWACLIDRDGEVLASAPVRNREAELDALFASAPAGTLVVVDQFRNIGSLAVRRARAAGLGVAHLPGLAASRAAGLFAGEAKTDERDAAVIAPTALGVPDSLSGVPGRGEALEAARALSSQRDHVVACATRDKNRLRAVLLESCPALEAAVDLSDRRWLELLAGFGGAWGIARSGAEGPRAEAAGEAAAASTAPPPALVEAENKQVRFLAARISEALDEAGALEAETAALLEGDETYACLLTVPGIGPRTAAQLAVSVDIGRFPDHDHLVSYCGIAPRVRSSGTSVRSVRASRRGDARLKSLLIFSCNSLVRSSGRYGEYYRACRARGMGHGRALKAVARKRLRAIYAVMRDRVPYRE

SEQ ID NO: 132003 - protein, 355 aa, unidentified
MNSEKYIGLDVHQATISVAVMDSTGKVVMESILETKAATILEFFAGLRGTLSVTFEEGTWAAWLYDLLQPHVQKLVVCNPRKTALLKDGNKNDRIDARKLAELLRLDNLKPVYHGETGVRMLRELARSYLTLVKDLTRVMNRLKAMYRSWAIPCAGRDVYYTRHRAQWLSKIREAGVRRRAEHLYQQLDMLQHLRQQARRELLAESRKHSITAKLRQIPSLGPIRSALAVALIQTPNRFRTKRQLWAYSGLALETRTSGEHCYVRGQLRRSKKQVCIRGLNKDHNHDLKGLFKAAATRASVQPGPFQDFYQRSLAKGIKPTMVRLTLARKIAAITLTLWKKGENFDAEKLKSQAA

SEQ ID NO: 132004 - protein, 370 aa, unidentified
MNSITYVGLDVHKATVSVAVAEGYRGGEVRQLGVFENRPEVLSKLAARLSNKNCRISFCYEAGPCGYGLHRLLTSYGHDCVVVAPSLIPMKAGDRVKTDRRDALMLAKLHRAGELTPIWIPDAGHEAMRDLVRARATAGRVLSKARQHLQSFLLRHDRIYHGLRAWTSAYRRWLTTVRFDHPAQQIVLQDYIDAVQDAEARRDRLTRQINELLPSWSMAPVALALPAMRGVALVVAVTVVAEVGDFRRFANPRQLMAYLGLVPSEHSSGGSIRRGAITKAGNSLARRVLIEGAWTYRMPARVSRKLHDRLEPLPAAIRDIAWKAQIRLCARYRRLAAAGKPKVVVTTAIAREMTGFIWAIAQIAPPPLSA

SEQ ID NO: 132005 - protein, 339 aa, unidentified
MEYFCGLDVSIDETAVCVVDEQGEVHLQATAVTDAEALFAVLKPYLPRLRRVGHEAGSLSPWLHPEMLKLGLPAICLETVHVRAAMSAQRNKTDKADALGIAHIMRTGWFRRAHVKTEGCYRMRLLLTHRRNLKRKFLDLENAIRHSLKAFGIRLGGIGRGKFDAAVREAVADDPFTTDLMEVMLTARAALWKEYCRLHDLVVKMVAQSELCRRFMAIPGVGPVTALSFMTAIDDPSRFRRSRDVAAYFGLTSRRWQSGTSIDVKGRISKAGDADVRRALYEAASALMTRFKGKDSLKMWGAALAKRSCHRKAVVAVAQAGGDHARHVERWHVLYRRSE

SEQ ID NO: 132006 - protein, 387 aa, unidentified
MPQPDDLSRSVVALDQDSTLIAVIEMGQASWLVAGIVPGVHRHPLKKIAADQDLLLQILRRWKDEAEKAGRTIKRIAVAFEAGRDGFWLARWLRAREVEAHVIHASSIPVSREHRRAKTDRLDTELLKRAFIGWLRGEPDHCSMAAIPTLEEEDAKRPGRERESLVGERTRIINRMKGALARLGIRNFKPMLRKAPQQLETLCTPEGAALPPNTLAELQRDMARLSFVKQQIQDVETSRIERIQQAPGERRHAMIHLLARVVGVGVETADMLVQEIFSRNLRDRKAVARYAGLTGAPDESGKKRRERGLAKSGNARVRRGMLQLAWCFLMHQKHSPLAEWYRARTADARGGTRKTMIVALARKLLIALWRLVTTGEAPKGLVLRPAT

SEQ ID NO: 132007 - protein, 342 aa, unidentified
MYYIGLDVHKKTISYCVKDAAGKIHQEGKIGSTRRELDAWIKTLPQPRMMAMEATIFTGWIYDHLLPHAEKVKVAHPLMLRAIAAAKRKNDKIDASKIADCLRCDFLPECYMTSTEIRDRRRTLRYRGLLVKQMVQMKNRISGLLMEAGVSYNKQRLHKVGYFTELMAGNEEIDCVRPLLKLSRETINRTQKLDYALVSSLERDPLLAERLKRLRTVPGVGPITALTWVLEIGDVARFQSIKQAISYCGLCGAEKRSADKIVRTPISKQRNKHIQQVLVEAAKLAPRYSHELALLHEKEKQRGDRNRATLAVARKMVAWMVAVERRKQDFVPAEERGGMAAA

SEQ ID NO: 132008 - protein, 328 aa, unidentified
MGNVTTIGLDIAKNVFQVHGVDADGAAVVRQRLTRGRMLKFFAKLPPCLVGIEACATSHYWARELVALGHDVKLMPAQYVKPYVKRGKNDAADAEAICEAVTRPTMRFVGIKSPEQQSAMMLHRVRLILNRQGTQLSNAMRAHLAEFGITAPIGRNGIEQLLDVIADPTDERVPADARFCLEMLAAQLRIVKEQILENDRRILASARETELGRRLMEIPGVGPLLASAIVATVPDPAIFRSGRNLAAWIGLVPRQNSSGGKERLGGIYTWVLLSRPVLSVTSAKARTSLKRWSLEPGRRGSLRLRVDTPAFVKRTHDRCHCQAMQQDR

SEQ ID NO: 132009 - protein, 429 aa, unidentified
MRKKVQNHKRRKQKISVDQAWPLINPNAAGVDLGSRVHWVAVPEDGDAQRVRCFGTFTSDLEELAGWLKKCGITSVAMEATGVYWIPLFQLLERRGFEVLLVNARQIKNVSGRKSDVLDCQWIQRLHTYGLLGASFRPADPYCVVRSYLRYREELVAARSTQTQHMQKALQQMNVQLTQVLSDVTGQSGLAIIEALLQGERHPLKLAGMVDRRVKSTQHQIAKALIGDYRAEHLFQLKTAFELYHTYEEKISACDEQLARELGNLPDRVDIKVKPLPAKSHPKAIDENLRTGLYLKLGVDLTAIEGIGALVALTTLTEVGPDLSRFKTEKHFTSWLGLCPDNRISGGKVLSCRTRRVVNRLSDALRLAATTLERSQTALGAYYRRMKAKLGGAEGVTATAHKLARIIYRMLTHGDEYVRQGMEEYEKKH

SEQ ID NO: 132010 - protein, 348 aa, unidentified
MAHFVGLDVSVKETSLCVVDDAGKVILEQKVPTEPADIIALLTSLGVSYGRIGIEAGPLSQWLVNALTAVELPVICVETRHMKALLTAQQINKTDRNDARGIAQMMRVGLFKPVHVKTLAAQEQRMLLTSRKLLQRKLLDVECDLRGTLRNFGLKVGVVSGGRYEARVRELVEDFPRLAAIAEPLLNVRRVMRQQFAVLHKMLLDTVRSDPVCRRLMTAPGVGAVVALTYRATVDQPQRFVHSRAVGAHVGLTPKRYQSGETDYDGRVSKSGDALLRTMLYEAAHSLLIHSGKWSWLKAWGVRVAQRRGMRRAIVAVARRLAVVLHRMWVDGSEFRWSKDSAAVPAVA

SEQ ID NO: 132011 - protein, 368 aa, unidentified
MNNYTLEVARTAGAKELKNQKAAKAKRIVMGTDVHSRSYQAARKIDNGPIGAVAKFRSQEELLLYVEKQKEQAEEVVVVYEAGPLGYVLYRALKARGLRCYVCAPDSREQKRKRRKNNTIDTRTLTSNLFNYLHGNERALQLVRVPTEEQEQARWQSRQHDQLVEERKRLGAKGNALLLSRGFGSWKNWWRPKAFSRLSQLVPGWLLELLETWVDLLRKLDEKIRRAKVALAQRCSGLRPKGVGAPSLVQLQSEVLDWGRYSNRRKIGCLAGMVPSEWSTGDTQRRGSITKVGVGAIRRIITEMVWRIILFQPQYKAVQKWQEVLRGSNRGLKKKAVVAIGRQLMVDLWRLQTGRISAQELNLVMIGG

SEQ ID NO: 132012 - protein, 341 aa, unidentified
MDTETGDYGEQRIEHSEGAEKFYRDLAGQGKKVRVGMEAIGHARWFERLLAELTFELWIGDASEIRAKRVRKQKTDRQDAQHILQLLMENRFPKIWVPSGENRDLRQLLWHRHRMVQMRTRIMNQLQAVALNEGLRCKKRLWRQHGREQLESFRLAPWASRRREDLLQLLDRLNPTITDLTQVIEQEVEKCPDARRLRTHPGVGALTALALVLIIGRAERFQCGKQIASYLGLVPLEDSSGNRRRLGHITKQGSSMLHFLLVEAAQVTARSIPEWRSKYFHLAMRRGRKIAKVAMARRLAIALYWMWRKGWNYEQSRKWNYEQSRKFGSHAGQLGTGDGVQ

SEQ ID NO: 132013 - protein, 489 aa, unidentified
MAKRASSPTDPTRPRKRYRRRKATAHAKAQAQQEAEARRVEGLAVSNPHAAGVDIGSRSHWVCVGADAATHIREFPAHTDGLYALLDYLHEHQVSTVAMESTGIYWIPLYELLDTHGFEVLLVDPSYTKQVRGRPKTDRRDCQWIYRLHSVGLLAAAFRPDEKTCQLRAYLRQRANLIRYAAQHIQHMQKALEQMNLKLTEIISDITGRTGQDILKAILRGVRDPAKLAKYRQTKCRASEAEIAQALTGTYRDEHLFALRQAHQAWEFYQKQRDQLDAQIDQQLARMKQDRALPPLKARARSAGRKPNEPCFDVRTALYYVVGIDLTELEGIGPMTALTIISEIGPEVSKFATVKHFCSWLGLCPQLKKSGGRVLSSRTRPGVNRAAVAFQMAASGLHGSKGALGAFLRHKKAQLGAPKAITATAHKLARLVYLALKHGMTYVRQTQEEYQAKMREHQVKSLKKKARQLGMTVIEKQLPETADKTMATT

SEQ ID NO: 132014 - protein, 417 aa, unidentified
MTETFQLFVGIDWATEAHQVCALNAHGEVVGERSVIHAAPAVNELVTWLLQLVGGSPAAVAIAIEVPRGPLVETLLGRGLTVFSLNPKQLDRFRDRYFPAGAKDDRRDAFVLASSLRTDRPCFRAVRSDDPDILRLRDLSRLEEELGSSFHRYSSQLREQLHRYYPQLLALCPSADEPWLWTLLEMAPTAAKAQRLSAARIEKLLRAHRIRRVQPSEVLEQLRAPSFPLAPGTIEAASEHALLLLPHLRLLAGQRAQLAIRIQAVLDQLATSSEADADKRQHRDVTIILSLPGVGRVVAATMLAEAAQALGERDYHALRAYAGIAPVTRQSGKKAVVLMRRGCNGRMRNAAYHWARVSVQRDPVSRQHYHRLRARGHSHGRALRGVADRLLAMLCAMLRRRTLFDPKRRHRSPPCAA

SEQ ID NO: 132015 - protein, 311 aa, unidentified
MTDDTIGIDISKATLDIHRLSDGKITSFNNCPAGFKDLSRFCNETAVTRVVYEATGAYHRELERALGAHFPLVKVNPLQARRFAQAQGVRAKTDAVDAKMLAVMGDAFALVADEPVSETQHVLRELRVFRSGLVKDRTRILNRQKVQTLPIIRRHNKARLAQLDKQIIEIDTEIDSLIKSSDTMARSMEILRSIPGIGAVCAATILIEMPEIGCMDRKQVACLTGVAPMTRQSGQWRGKSFIQGGRKVVRDALYMPALVAMRFNPDLKAKYQAMIKAGKPPKVALTTLMRKLIELANVLIKENRNWENKRT

SEQ ID NO: 132016 - protein, 314 aa, unidentified
MTQISEHERFVGIDVAKKHLDVHLLPDGKSWRIDYTPAGLARLLDQLEKLGPALIAMEASGGYERACADCLAGAGLAVAVINPRLVRRFAGSLGKLAKTDQIDAAVIARYAAFAKPANHHTPDPAQAMLMALTTRRRQLVGMIVMEKQRTDPGHVHPVILAGIKRHLRVLEKEQAKLEAQIDALIASHPLWARMTAALQEVTGVGPQTATALITHLPEIGTLNRRQAAALAGLAPLNRDSGSHRGRRFVQGGRQPLKTALYLAALSAARHHPTLKLFYKSLRNNGKTPKSALIAVARKLLIILNAIARQTIITA

SEQ ID NO: 132017 - protein, 369 aa, unidentified
MQTVRSFVGMDVHKETISISVAEDGRNGPVRFLGVIPNQPDEIAKMAKRLAKHGELDFCYEASCCGYNIHRQLTALGHRCTVVATSLIPTKPGERIKTDRRDSQKLAVLHRSGDLTAVWVPDATHEALRDLVRARVDATMHLMRARQQLLAFLLRHGRSYPTGKHWTMRHRAWLALQTFAEPVHQIVFQDYIEAVWTAQQRRDALVQSITSTVENWSLGPLVEALRGLRGIDLISAATLVANTGDLSRFESPRRLMGYLGLVPSEHSSGSSIRRGGITKTGNREARRMLVEAAWSYRYPARVAKEKAEILVRLPKGVRDIAWKAQTRLCVRYRKMIARGKKPTVVIAAIARELAGFVWAIGQEMRVGTT

SEQ ID NO: 132018 - protein, 390 aa, unidentified
MVSVLRPFGEVVAKPFSVGHTGSELKELADYLKSLDGETRVVMEHTGRYYEPVARFLHEEGIFVSAVNPKLIKDYGNNTLRKVKTDKADARKIARYGLDNWAELRQHTLMDTIRTQLKTLNRQQGLYTKTKTMMKNNLIALLDQTYPGVNDLFDSPVREDGSQKWVDFATAFWHVDCVRNMSFAAFTERYRKWCKRNGYNFSQSRAIKIHTEAQDLIAMLPKDALTKTMVRQAADALNAVSKSLERLKAEMRSLASQLPEYPVVMAMRGVGDSLGPQLMAEIGDVTRFAHRGSITAFAGVDPGSDQSGTHEAKSPRTSKSGPPELRKALFLVMDCLLKTMPADDPVYRFMDKKRSEGKPYLVYMTAGANKFLRIYYGRVKEYLASLENAD

SEQ ID NO: 132019 - protein, 417 aa, unidentified
MEVLYSRCAGLDVHKDTVVACVRVAVEGKVHREMRTFNTTTTGLLALSTWLAESGCTHVAMEATGVYWKPVWHILAADGFALILANAAHVKNVPGRKTDIADAAWLADLLAHGLIRASFVPEPALQEIRTLLRTRKQLGREKTAHVQRLQKTLEDANIKLDSVITDVIGVSGRAMIEALIAGESDPAALARLAHRRLKASPGKLSEALRGRVTPHHRFLLRLHLQQVDAVDTAIAQIDQEVEANLAPFRAAAQNLTAIPGVGALASRIIVSEIGIDMSRFPTAGHLLSWAGLCPRNDESAGKRRSTRLRKGAPWLKTTLVQCAWAAIRKTGSYLQAQFRRLRARRGTKKAICAVAASMLTAAYHMLKDGTEYQDLGASHFDQRSKQSQARRLIKRLQDLGIAVDIKPSHEPPVLVSC

SEQ ID NO: 132020 - protein, 404 aa, unidentified
MNAVGIDVSKGKSMVAVLRPLGVVVAKPFEVNHTAAELGKLADFLQSLDGETKVVMEHTGRYYEPVAQVIHDRGLTVSAVNPLLIREYGGNSLRRVKTDKADAKKIARYGLDNWAELREYTPMDTIRYELKTLNRQFHLASKNRTACSNNLVALLDQSFPGVRGWFDSPVRKDGSQKWVDFAMTFWHVDCVRSVSLAAFTERYRKWCKRHGYNFSAEKAEQIHREAGEMIALIPKSVTTKLLVQEAASQLFSLSRMVEVLRAEMNRLASQLPEYPVVMGMYGVGESLGPQLMAEIGDIRRFAGKQSLVAFAGVDPMPNQSGMKDSRSNRSSKRGSPYLRKTLFLVMTVLLQKAPPDEHVYQFLDRKRTEGKPFFVYMTAGANKFLRIYYGKVRDHLAAIEQDPV

SEQ ID NO: 132021 - protein, 392 aa, unidentified
MYIVGIDIGKNHHEASIVSPEGKQIGHSLRFATTHKGADSLMSFIFNNIGNSSCIFGMEATGHYWYPIYSFLKARGYTIYVINPIQSDSLRKMYIRQTKNDSIDSFLIAEVIRFGQFTTTSMADENILAMRQLCRYRDSVISSRTEIKLRISTIMEQIFPEYEKQFSSLWLSTSMGILEKYLTPENIENAPIDELFEIIKDKSHNKLTMKKAISIREAAADTFGIKIAQDAFSFQLKQLIDRMNFLDKQIEALDCQILEYYEKFDCYLHTIPGIGMIAAATILAEIGDINRFKSSSALVAFAGIDPTVRQSGEFSNTHNHMSKRGSPYLRHAIFLAATTCSFHNSPLNAYYKKKREQEKHHLTATGAVARKLTTVIYAVLRDGKPYEPKSFC

SEQ ID NO: 132022 - protein, 314 aa, unidentified
MDPCYVGIDVAKDTLEVAWSTDHTQTWRTPNAADGWAALTARLADRQPTLIVLEASGGYEVGAATAVALAGWPVAVVNPRQVRDFAKACGILAKTDALDAHVLAAFAGRIQPPARPIADALHADLTALVTRRHQLGEMLTAERNRLGLARSSVQRSLRTHIRWLERRLQDTDDDIATRIKHSPIWRTRDALLQSVPGVGPRTASRLIVSLPELGALTPRQAAKLVGVAPLNDDSGRHRGYRAIGGGRPLVRRALYMATVVAVRHNSVLRAFYQRLRAAGKPPKVALVATMRKLLIILNAIVKHQTPWTLPAVGA

SEQ ID NO: 132023 - protein, 343 aa, unidentified
MHTITTIGLDIAKSVFQVHGTDAAGQVVIRRQLKRRAVLAFFQKLQPCLVGIEACASSHHWSRELQALGHAVRLMPPAYVKPYVKRQKNDMADAEAICEAVTRANMRFVPTKTPEQQGCLMLHRTRHLFIRQQTAVINSIRAHLAEFGIVAPVGRKGVMELLQVVADPSDKRVSEVARACLAALGNQLLGLKEQILEFDRMIMAWHRSNEPSKRLRYIPGVGPMLATALVASVADPKTFRSGRNFSAWVGLVPKQHSSGGKDRLGSISKQGDRYLRSLFVAGALSVIRYAKIHGTKHRPWLTALLARKPTKVAAIALANKLARMAWAMMARGERYRNPVALAA

SEQ ID NO: 132024 - protein, 346 aa, unidentified
MYNAVGIDVSKGKSTIAVLQPGGVIVRKPFDVFHTSQSLKELSNYLASLEGDTRIVMECTGRYHESMANSLSNAGFFVTVVNPHLIKNFGNNTLRKVKSDPADAKKIARYTLDNWAELRQYSCMDNTRNQLKTLNSQFSFFMKQKVAAKANLIALLDNTYPGVNKLFNSPAREDGSEKWVDYAYSFWHVDCVRKTGLKAFTVRYEAFCRKHHYIYQPSKPEELFNASKELVAVFPKETSYKLLIQQSIQQLNLASAHIEQLRREMNALASTLPEYEVVMGMYGVGKTYGPQLIAEIGDVSRFTHREAITAFAGVDPVWSSQGSTTQRATKLPNVEPAGSVRPCSRS

SEQ ID NO: 132025 - protein, 415 aa, unidentified
MRVHRNCCGLDVHKKIIAACLIKEDAEGNSIYEKRLFGSMTRDLHELAQWLCAAQVTAVAMEATGVYWMPVWNVLEPYGLQLLLINPEHYKAVRGKKTDLKDGTRIAELLQDGRLEGSYVPPVAIRVLRDLTRYRTKLVQYQSSIANRIQKLLEQGNIKLASVVSDTLGVSAMAMLRALAQGETDVMRMADMAKRQLRKKIPALQIALHGCLLPHHRLLLSEMIEDLDHVGDKITRIEETIEQQMRPFQEAVNRWLTVPGIKHRLAWTLVAEVGPTVDAFPSAADIVSWAGVCPGNNQTAGKRKSGTTRAGNPWLRRALCEGAWAASKSKGTYLQAQFRRLAALRGPKRALIAVASSILTAGYYMLQRATTYQELGPDYFDKRDTVRATHRLVKRLEALGHRVILQPSFDSDPSS

SEQ ID NO: 132026 - protein, 431 aa, unidentified
MNYNQNHKITQITSETLIVGVDIAKHNHVARAQDFRGLELGKTCFFENTKAGFHSFLDWINQLVKECKLNQVIVGMEPTGHYWLNLAHLLKENNIKFVSVNPLHVKRSKELDDNSPTKNDVKDAKVIAQLVKDGRYAEPTIPQGIYAELRVAKKLRDLLNVDLQVVQGQVHNWLDRYFPEFLTVFKSWEGKAAIHFLKLEALPYELVKYTDEELLLSLRQVVKRSIGLKKIRALKEAANRSIGIRQGAAMAKLELRALLEKYDFIQMKFEELDYQLDQLLDHIPGVTQMLEVSGIGRDTVAGFFAEVGDLRGYQHPRQIVKLAGLSLKENTSGKHKGQTKITKRGRKKLRALLFRAAMILVAKNNAFKALHIYYTTRSHNPLKKMQSLIALCNKLIRILFSIGKKQFTFQEDKMLKDIPHMATFVDHQTVA

SEQ ID NO: 132027 - protein, 403 aa, unidentified
MRMFVGLDWASTEHAVCVLDDRGRVRAQLTAPHSAAGLAALVTQLRRFGEPTTLPIAIERPTGLLVDTLVDAGFPVYPVHPNSVKACRARYRAAGSKSDPHDAYVLADVLRTDGHRLRALRPQRDATRALRALVRGRDDLVATRVALANQLRALLESFWPGAATIFADVDSPTALAFLTRYPTPRSAAHLGPKRLAAFLAQCGYSGRRTPEALLARLHAAPLGCAGAAEADSKGEVVRALVAALVPVVRELQRLTAAVKHAIATHADGPLVMSFPRAGRVNAAQMLAELGDDRTRFTSEDHLAAEAGVAPVTYRSGKQHGVGFRWACNKRLRQAIVCFADNSRHRSPWAAAVYARARARGCDHPHAIRILARAWIRVLWRCWRDRVPYDIARHRTAKHILDAA

SEQ ID NO: 132028 - protein, 348 aa, unidentified
MRIIGCDFHPSWQQVAWLDAATGETGECKLVNGDGEAEQFYRSMAEPALVGVEACGNSQWFVELLQQLGHEVWIGDAAQIRASYVRKQKTDKRDAAHILRLLLENRFPRLWMPSAEQRDVRQLLIHRHKLVEIRTRVKNGLQHLAMNRGMQKKSRLWSAAGQQALRELPLAGWAGRRRQDLLGLLQSLDQQIGELDQAVEETAQRDKMAQLLMTQPGVGPITALAFVVTIGEVSRFRRGKQVASYLGLIPREHSSGGRQRLGAISKQVNRFVRMLLVEAAHSANRLDEGFRKTYQQRCHRMAKGVAKVAAARKLAVRLYWMLRTNTGYPEIVRIESSPRVPLVVRHGG

SEQ ID NO: 132029 - protein, 346 aa, unidentified
MTIVETRAITGGVDTHADVHVAAALDPIGGLLGVQEFPATPAGYGQLLGWLGGFGTVCLAGIEGTGSYGAGLARHVSRAGVRVVEVDRSDRQDRRRQGKSGPLDAISAARAAQSGRARGASKGRDGAVEAIRALMVVKRTARSERTQTISQARSLVLTGPDDLRIRFIHHTTSGLVADLAGLRPRPGATVGYATRIALRELGRRAQFPGGQLESLDELIVPLVTAHAPGLLARYGAGPDTAALLLIAAGDHPERLRSEAAWAHLCAAAPIPASSGKTVRHRLNPGGDRQANHALWRIVITRMSSHPPTRAYVERRSKEGLSKTEIIRCLKRYVAREVYPHLRPPAS

SEQ ID NO: 132030 - protein, 337 aa, unidentified
MEQYVGLDVSQETTSIAVRQDGRRVWRGKCPTDPKALSEVIRGQAPHAVRVVVETGPLATWLYHALQAENLPVVCIDARHAKAALDMAPNKTDANDADGLAQIAEIGFYREVRVKGYGPMLTRTLVGARSQLLRISVQLSNQIRGIMKTFGLIVPKGAGRIFERNARALLETNEAVARVVLPLLETWQVVRARAAELDRQLIAAARTGPSYRLLMTIPGVGAITAVSFVAAIGVPENFKRSRAVGAWLGLTTRRYQSGETDYDGHISRRGDRYLRALVYEAAVAVLTRTRTDCALRSWGLKLKAKVGFKRAAIAVARKLSVIMHTMLKTGAAFAAAA

SEQ ID NO: 132031 - protein, 344 aa, unidentified
MSTFAALDVSQEATAVCIVDDAGRIVAERKIPTCPEAISSFLTRHAPGLDRVGLETGPLAVWLWNELHDRGLPIICIDARHANAALKVRPNKTDRNDAAGLAQIIRTGWFKQVRIKSRVSYELRSLLAAREVLVRSRVKIENEIRGLLRTFGVLFGKAAGGFANRTDQIVAGELDASPMMRAVIESLAKARAAMLERIKDLDRQVLAAARVDTTVRLFMSVPGVGPITALSVASAFDDASRFKRSSSAGAYLGLTPKRYESGEISRNGRISKHGNKMTRKHLYEAATTMLTRTTRFCSLKAWGLRLAKKVGFKKARVGVARKLAVILHAMWKTKTPFRWSVGAA

SEQ ID NO: 132032 - protein, 357 aa, unidentified
MGKSIIDTSSVTRVGLDLAKRVFRIHAVDATGFVVIARSVNRRTLLKFFDTLPRCVVAMEACSCAHHWGRQLLDLGFAVKLIPPAHVKPYVRRSKNDAAAAAAICEAAGRPGQRFVPVRSVENQAALMRHRARELMVGQRTAALNALRGHLSEIGVVAAQGVQNAYALKDMAAEGFDANGEIVVPDCVRLALAPLVRQIDALDEAIEAIDRELEASARTDETARRLMTIPGIGPVTAMALLATIQDFAAFSSGREFAAFLGLTPREHSTGGKPRLGRITKMGDRYLRKLLVQGACSALGHRKGHNDALRRWASGMLERKTVKYKFKLTAVALANKLARIVYALATKGGHYDDRPVAA

SEQ ID NO: 132033 - protein, 392 aa, unidentified
MPKPKKQNKLDDLSRSLTPFDPNRTLTAVIELSKESWLVAGIVPGVERQPLKKLAPDEKGLLKLLERWLAEAEKARHKIDRITVAFEAGRDGFWLARWLKARGIEAHVIHAASVAVSREHRRAKTDRLDTEQLKRAFLGWLRAERNHCKMCAIPTFADEDAKRPHRERETLVGEHTTIINRIKSTLARLGIRNLNPRLKNAVERLGHVRTPEGEPIPPNTLAELQRDLARKQFVAQQIQQIEKARLEQLKQAPKAGPNLMVLVLMRVIGIGIETADMLVKEILSRNMRDRRAVARYGGLTGSPHESGSKSREKGLARSGNARVRKGMIQLAWRFLDYQKESALAKWFEARTANGRGSRKKMIVALARKLLIALWHFVRDGVVPEGVVLRPAH

SEQ ID NO: 132034 - protein, 392 aa, unidentified
MSQQHCHFDASRSLTALEQDSTIIAVIEMSQSKWLVAALVPGVARHPLKKLDAQEEGLLNLLHRWRNEAGQAGREIKRIVIAYEAGRDGFWLARWLRARDIEAYVIHPTSIAVSREHRRAKTDRLDTELLMRAFLGWLRGEKRHCSMVAIPTIEEEDARRPNRERQNLVTEQTRIVNQIKAIFARFGIRTFRPTLRKAEEKLNGLRTAEGTLLLENTRAELCRHLARLWVVREQIRAVERERLRTLAAAPAAENGPPAMVRLIARVLGVGIETADMVVNEVLSRRWRDRKAIARYAGLTGSPDESGKRRRERGLARAGSARVRCSMIQFAWRFLRFQKNSALARWFAARTTDRRANTRKTMIVALARKLLIALWRLATRGEVLQGVILRPAS

SEQ ID NO: 132035 - protein, 457 aa, unidentified
MNHYYLGIDVSKGYSDFILLNSAKQCVEENFQLDDTFDGHQKLYNILSMFCTHHAKAQIYAAVESTGGYENNWFDALVKFQSALPLNTARLNPCGVHNNSKAGLDRNITDKISAENVAKYMIEHPEKVLYQQQDPLTSLRKQWSFIKMLTKQKTQLLNQLESNLYTANPEILAYCKHSTPNWVLSLLSRYPTAVKLARARKSSVALIPYVTPKKAKELVETAKRSVASANDQITEQIIKATVKQIRLISKSIEAQTKMMADKCDVPEVKLLKTFTGISDFSAIGLILEIGSVERFASAKKLASFFGLHPVYKQSGDGAWGFHMSKKGRTVPRQILYMVAMVAIQSNPLIREIYLKHTEKGMEKMAALGLCMHKILRIIYGMLKYNKPFDPEIDRKNRAKTTQGKTNNHRDKSRRFQGFDAKAPISRRQTQKRTERKLSQSDNNAKCGIKAPVPSCLT

SEQ ID NO: 132036 - protein, 361 aa, unidentified
MGDGSTEHSRITVGLDLGDKYSHICALDTDSGELLEEGRLRTTPEAFGRRFGYERGLRVAVEVGTHSPWVSRLLEDCGHEVLVANPRRTRLIYGEGRKTDKLDAQKLARLARADPELLYPIEHRGEGSQANLSLIHSREALVRSRSQLISHARGTVKSFGSRLPGCSAPSFHKKVREHLPSELAEGLGPIVDTIASLTEKIGDYDRRIEQLATERYPETELLRQIQGIGTLTALTFVLTLEDPKRFAKSRDVGAYLGLVPGRDQSGDKDVQRGITCAGDKMLRALLVSSTHYILGPFSQDSDLKRHGQKIASRGGKNAKKRAVVAVARKLSVVLHHLWVSGEVYEPLHNARCMEAIGEEIA

SEQ ID NO: 132037 - protein, 351 aa, unidentified
MDTEVSPKLFIGIDVHKRQWSVCIITANCHHKTFSQAPDPKALKSYLDKFFPKYQIICCYEACKFGFWIYRDLKSFGYECLVINPADLPTTNKESSEKTDPVDSRKMAKALRAGLLRGIHVPTLETEGDRQLFRYRKRLWADLVRVKNRIKDKLLQNGIETPPKYDNPYWTKDFLDWLAIVELPSDSSRLVMDLLLDQFEFTYRHFLKVSISVRALQRKSKYKANSKLLRQIPGIGPLTTVQLLTEIEDVNRFRNFKHFNSYIGLKPMVHSSGESDRKGYMTYRHHQGLRSSLIECAWTTVQRDPVMLNRYEELLQRHTGKRAIVIIARKLLSRIYHVLKTGEPYQVGYST

SEQ ID NO: 132038 - protein, 430 aa, unidentified
MNNFINDYVVGVDVSSTSSVITILKPDGEAYGKTFSITNDLIGFNKLISILNDINSKHSKRAKIFMESTGMYHLLLHNYFTNNNFECFIINPISTKNFAKQSIRKVKNDKIDSLRIAQLAQSPTFSIQNTFNENFFLLKKLCREYDSIIDHRSHFKKKLNSLLNLVFPKFDKVFSDTFSPIPLAILSKYPTYNDFLATPKSDVIKLMKSTINHSNEWAEKKYNLVLNIALEAKSLKIPTSYLGSEVCCFINIIESFSKTSDILKEQIYLLHKEMPNLEQNLKLLCTHPEVGFMSAVTLLAEIGDINNYKSAKKIVAFLGVDTSVSQSGNYNSTHNKLTKRGSRLARKTLYNLAIGSIKTRRNGAPANPILLAYYKRLTKSKPKKIAICAIMHKLINHFFAILRDQQPFELRLPEIHEKNYLSKQLTLTAI

SEQ ID NO: 132039 - protein, 353 aa, unidentified
MFPIVSEKYKFIVGVDTHSRKHVSTIINNLGVVLARREFRVTNSDINKFIEWTLKVAGVEIANMLFAIEGTSSYGETLTRALLLRRLEVVEVKPPKTKSRGGDGKTDQIDSELAALNVLRLPVNKLVKPRLGEKRKTLRILLSSRHLMVAQQTMNKNALIALLRSEHLGIDARKPLRPAGYFTISRWKLKTSDDHYDIKHEARRMAIAVVAQAEDLTSNKQRLYDIVSVMAPALLNETGIGPVTLAQILCSYSHKGRIRSAEAFAALAGTTPIPASSGNTNHFRLNHYGDRQLNHALNVIALIRMRVDTTTKEYVEKRLEQGLSQRDIRRSLKRYIARSLYRKLEACNIRPTM

SEQ ID NO: 132040 - protein, 299 aa, unidentified
MSKTKTETNNPKGIAHTIEYLKKHKVALVVTESTGGLEIPAAKAIRRAGIAVIIANPRQTHQFAQSQPLTKTDAKDAKMPAFFAQMTAQKEDSQTMPYQPPTEAEEVLEALVNRRNQPADMRTAEKNRLHQVHETQVGSVKQLIAHFDRLIDELDKQIDDHTHTHFDGKAQVAEQIKGIGSITTATLMAMLPELGRLSHKRIASLAGIAPHPRESGETKFKSRCFGGKSAVRKALYMATVAATRFEPLIRDFYQRLLSEGKPYKVAVTACMRKLLETFAKFLSLPTAETQTQVFVYFRS

SEQ ID NO: 132041 - protein, 341 aa, unidentified
MGLSRKRLDFRLLDSEGATVEVGAAPPDADGLLGLTQRLDRHREPIQAAIESMNGARFVHDRLELAGWQVEIADAQKVKGLAPLACKTDRIDAWVLAELTRRDLVPAIWLPDPMVRAERERARWRLHLVRHRSSLKQRVHAVLLTHGKPCPVSDLFGARGRQLLARLGLPEPWQGTIEASLRLIDELDREISDCERELRRLGADHRYVPRLLTVPGIGWVLAYTIAAELGDISRFASPRKLAGYTGLCPRVYQSGERDLRGLLAKQGPKYLRWALIEATSHACRHPAYATRYQQTKQRLGTQRGASVARVQLARTLAHAIWHMLTRNQPFAPASAAGPLAA

SEQ ID NO: 132042 - protein, 339 aa, unidentified
MDIKTIGFDLAKTVFQVHGADGEGRPVLRRKLRRGKVLAFFAELPSCLVGMEACASAHYWARELQGLGHEVRLIPPQYVRPFVKTNKNDAADAEAICEAVTRPTMRFAAMKSAEQQSVLMLHRSRELLVRQRTMLINALRGHCGEFGIVAAQGASKVAELIEVIEDPEDERLPALAREALGSLVGQLRVIQIQILGLEKKLMAWHRSNEASRRLATIPGVGVITATALVATIGDGSQFRSGRQLSAWLGLVPRQHSSGGKNRLGRISKRGDGYIRRLLVHGARTVLRWRRAKPGTHPGWADRLLERRPTNVVLVAMANKTARVAWALLRYERIYQPTLA

SEQ ID NO: 132043 - protein, 355 aa, unidentified
MNESKFIGLDVHKTSVSAAVIDADGKLVMQSIFATGAVAILGFVHGLRGTLRVTFEEGTHSAWLFDLLRPHVSEVVVCNPRKNALLKSGNKSDQIDARKLAELLRAGLLSAVYHGETSTLTVKELGRTYLALTEDTTRVMSRLKALYRSQAIATEGKKLYSKRRREQWLTQLAQVGRRYRAERMFEQLEALQCLRRKARRDLILECGKHSATAWLTSIPFMGPIRAALLIARVQTPFRFRGKRQFWAYAGLALETRSSADYRFVEGELRRAKKPVFIRGLNLNHNHDLKNIFKGAATSASAMPGPFRDFYENLLGKGMEPEMARLTLARKIAAVSLTVWKKGERFDPEQLKSQAA

SEQ ID NO: 132044 - protein, 312 aa, unidentified
MEHISLGIDISSKRLDCYWSHLGKHQSFDNTLSGIHQLLAKIQQEKPTWIVFEPTGGYEMDLAFHLAEKGIAFSMVQPHRLRSFARSCGKLAKTDKLDAKLMATYGIKMTPKSTILGTKAQQELSGFVTRRRQLVDLLSMERQRIDQGRDLLIQKDIKDHCEYLKQHILNLEKQIQDCIHQDANLEEVNQTLQAFRGVGSTSAAVLLADLPELGHIGPKEISALVGVAPFNVESGTMIRKSRIRGGRQSVRCILYMVALVAIRHNTIIKEYYNRLRTQQKPPKVAIVACMHKTLIILNAMTRDHFINKMAHS

SEQ ID NO: 132045 - protein, 349 aa, unidentified
MHSTTVAVDLAKNVFELAIANGEWKITERLRLNRKNFSALFVQLAPSRVVMEACGSAHHWARYIAALGHEVQLLPAQYVRAYVKRNKTDRTDAAALLEALRCADIHPVPVKTLEQQQILGLHRLRSQWMSTRQRYVNTLRGILREFGIAIAPGVGAAKRQIAQQLAQSPSEVPPAIRPLLTQMLEEIAHLERDVEQVERQLTSLSRSDERVQHMRQIPGIGLLTSTAIRATVGDIQRFPSGRHFASWLGLTAREYSSAEHRRLGGICKRGDVYLRTLLVHGARSALLAAHQAQRAGRPMDYLRRWALECERQRGHNKATVALANRLARIIWATWKYERSFDGNWAVAVA

SEQ ID NO: 132046 - protein, 333 aa, unidentified
MLNFNFFLGIDASKDFANVALLSGASPKKYKDFKFDQNANGFKSFLKWLLQQSQNDLSKLFVCVEHTGIYIVEICNFLEEHEISYTLISPIALKRSLGLQRGKSDKVDARRIATYAFKNRDDLPIHRLATADLRELQALVTYRKRLQKSLQAIRISAKELALVETFGSVAHISADSERITKELAESMKQVEQKILALIDTCQDIKKKFDIIKTVPGVGWLTAISFIIYTQNFVAFTNPRKFACYAGTAPFEHSSGSSIRGKTGVSQMANKKMKTLLTTSAWSAINHYSEFSDYFNKKVDKKGKNKFSVLNAIRNKIIHRVFAVVRKNKAYVPA

SEQ ID NO: 132047 - protein, 308 aa, unidentified
MNIHPGFVGIDVSKHHLDVFDGGRLERVANTQESVAALVGRWHGSFVLFEATGRYDACLRKVLEAEGIQFARVNPARARDFTRATGRLAKTDAIDARMLAAMAQSLLFARERRSDPEREALARAHKRRDQLVHVRKQERTRLTECDDGELRADIEDHIRWLDQQIARWDAEIDRPVRQSAALTQSASRLRSIPGIGPVAAATLLALVPELGSLSPKKIAALVGLAPFNVDSGQFRGIRRIKAGRKRVRDALYMAAVAAARCNPRLKAVYVRLRSAGKPAKLALIAVARKLAVIANAVLRDQTHFKPAV

SEQ ID NO: 132048 - protein, 306 aa, unidentified
MRIIGCDLHARQQTLAMLDTTTGEVVGVTLKHEGDNVREFYSSLPRPVRVGIEATGSMQWFVNLMEELGMECLVGHPAEIRAAEPRKQKHDRRDADLILKMLVEGRFPAIWLPSKELQDLRSLLRHRHQWVRMRTRIQNALQSIALANGLRRGTALWSHDGQSRIASLPLAPHTAYRRSELQAMYEKFEAEIEKLNQRVEEQACQRPGARLLMTHPGVGPITALATEVFLGDPARFADSKALASYVGMIPREYSSGGRQRLGGLSKQGNPLLRFLWGEAGAHAARKDPELQRFYRRKLVQTATIAH

SEQ ID NO: 132049 - protein, 341 aa, unidentified
MDEVSTIGLDIAKSVFQVHGVDAAGAVVIRKRVSRAKVLEYFGELPPCLVGIEACPSAHHWGRELQGLGHTVRLIPPSYVKAYLKRGKNDANDAAAICEAVTRPSMRFVPIKTKEQQTALMLHRARQLLVRQRTMLSNALRGHLAELGVVSARGRNGTAELLRIIADGRVSPAVCGILTVLARQYGAIGTEIASIDKSIMALHRGCEASRRLAEIPGIGPIGATALVAEIGDWKTFSSGRSVAAWIGLVPKQHTTGGKDRLGSITKQGNRYLRWLLVVGAMAVIRYARKYGTQKRPWLGRLMERRPTKVAAVALANKIARIAWAIMVRGERYKEPKLLLAA

SEQ ID NO: 132050 - protein, 418 aa, unidentified
MKTYLLREPKTVQQTVRSQTRPKSAAAPPPPAPAPAILGTAAPVPKGPTLFVGLDVHTESIAESLAPSDSVEVRRYGLIGGTHDDVLRLAKKLQAAHPGVRLQFAYEAGPHGYPLCRCLQAHGYDCRIVAPSKIPRAPGERVKTNRRDADQLARLSRAGELTAIYVPDPQDEAIRDVIRARYQVQRQQHRARQQLKSFLLRHNLRYAGTKAWTAAHVRHLATIKMPFAEQQFVFQEMGNVITEAGERLERYEAQLPRVVAGWRWEPVVKALMSLRGLALLSAATLVAELGDLHRFGTARQLMGSLGLVPSEDSTGDQRHQGGITKMGNAIARRALIEAAWNYRMPARLSRELLKRQEGLSKEVKDLAWAAQTRLHHRFQHLTGVRHKKSQVAAAALGRELSGFVWAIGQLVRPHARPA

SEQ ID NO: 132051 - protein, 306 aa, unidentified
MDYTTIGIDVSKAKLDIFFNSTGEWMTLSNNFQDFDKLILYIQKYSLQIERVVVEHTGSYQKELVSFLHSHNIPVCLVHPVKVRNYAKAVGRLAKTDKIDAQILADYGQVMHPELSEIQNPKINKLRELIKYRRQLTDNLVLTKQWIEKKPAPQILQRIKLLVDHLNLQVKEIETEILDFIKSDKILYKKFQILMETKGIGKKSASTLIAELPELGHTSRNKIVALCGLAPMNRDSGTMRGKACIQGGRKIVRNALYMSIISAIRTNDVIHQYYALLKGKGKPSRVAMVACMRKLIIHLNQQLQSS

SEQ ID NO: 132052 - protein, 340 aa, unidentified
MSEITTIGLDLAKHVFQVHGIDGEGTTVLRKRLRRSQVLGFFSRLPRCVVGLEACATAHYWARELVALGYEVRLMPAQYVKAYVKRNKNDAADAEAICEAVQRPTMRFVPVKTAGQQAAGLLHRGREQLVRQRTMLVNSLRAHLAEFGIVAAQGLRNVAQLIAIVRDAGDLRLPDVARQVLQVLSAQLEHIEAAIASLEKQLMAWHKTNPVSQRLASIPGIGPIIATAIATTVADPGVFRSGREFAAWLGLVPRQNSTGGKIRLGGITKRGNRYLRRLLINGASANLLRSKATKADPWVIGIRRRRPPLVVAVALANKTARIAWAVMLRQREYRPRAVAA

SEQ ID NO: 132053 - protein, 457 aa, unidentified
MPRTIKQRRKCTSSVVSLPVLRPNAAGIDIGAREIYVAVPPHRDPHPVQAFPTFTSDLLELADWLKQCGVETVAMESTGVYWIPLFQILEARGFQVFLVNAHYVKNVPGRKSDVSDCQWLQYLHSVGLLRASFRPPQAVCQLRAILRHRDNLVQMAATHVQHIQKALDQMNLQLHHVISDLTGTTGLAILDAILKGERDPQVLAQLRDRRIQASTETLAKSLVGDYRPEHLFVLRQSLASYRAYQALILECDKEIQAVLAHFQTQADPASMPTSTQKPHKPQRNQFHFDLHAEHYRILGVDLTRVPGLETLSVHTLLSEVGPDLSAFPHEGEFASWLGLCPHRRITGGRLLSSRTRKVRQRLARALRMAAESLHHSQSWLGEFYRRMRAQHGAPKAITITAHKLARIIYHLLKARRPYDESVFAREEEHHRRRTQARLQRQAKTLGFQLVPIDAPTT

SEQ ID NO: 132054 - protein, 396 aa, unidentified
MNKLFVGIDVSKDSFSATGIDLNGNVSFSLSALMDKAGLSELIKVITSKCNDLSAILAGMESTGCYHINLFSFLSAKGANTVIINPLLISNFAKMSLRKTKTDKKDSLTIARFLLAHQDSIKQFSISQDTKDFRDVARERESISNLIASTKNEIKRILQSTFPELESICNIFTVTMLLFLKEFPSARFIKATKLKAIEEALERLGRGRKVSVNAQDIIRAAKNSIASNSLAKELILPQKISTLLHLMEQLDEITEIISNLCKSIAIEEMEIVTSIDGIGDSTGAAFLAEIGDISNFPSYKSLIAFAGLDPSVYQSGKFQGTSRISKRGNRHLRRLVYLMTIGVIRCNAFFKAYFLKRKQDGLPFRKAVMATAHKLLRTIFAMLSNKTHFHVKGYSL

SEQ ID NO: 132055 - protein, 423 aa, unidentified
MPVIDDDEVYCERVAGMDISKRDVKVAVRLVENGRVKRLKVRTFGTTTRSLLVLRDWLEELDITLVAMESTGVYWKPLFLVLEDRFECWLLNPRDVKRVPGRKSDVTDAQWISRMAQLGLVEPSFVPDLPVRELRDLTRYRTNVVRDRTRAVQRLQDLLESAGIKLSSTVSDITGKSATAMIQALIDDPESVAKNPGKVANDLALRAMRNKIPELTDALIGRFTDHHGRMAATMLKQIRDLDAVIAELDKQIEDEVAPFERVVEHLKTIPGVSDRAAAIIVSEIGIDMSRFRGSDQLASWAGLCPGNNESAGRHLSTRIRKGNRALRAVLFECASSASRTQGTYLSAKYHDLHGRMKATKALVALSRIILETCHHLIVKDTDYKDLGPTYLDEYRRRDLDKDRIRRARNMLEDNGYTVTPTVA

SEQ ID NO: 132056 - protein, 343 aa, unidentified
MQIRSVGIDLGKTTFHLAALGASGKVLVKKKFTQKQLLAFTADMQTSLIGLEACSGAHFLGRALRQQGHDVRLIPAQFVKPFVKSNKNDFVDAEAIAEAVERKNMRFVPIKTDDQLDLQAMHRVRDRLVSRRTAVINQIRAFLLERGMVFAQKPAKLKAAMADVLENADNALTPMMRNMIGILWDEWKSVEQQIDELADRLEQIAASDAGCCRIRQIPGIGPIVATAIVAAIGNGAAFRKGRDFAAWLGLVPRQYSTGGKAKLLGISKRGNIYLRKVLIHGARAAAMRIKRDRFPIGAWMNALEARAPRNVLVVAMANKLARIAWAVLSSGEDYRPAVSIAGA

SEQ ID NO: 132057 - protein, 356 aa, unidentified
MVCVGIDVAKDKHDCFILSSEGEVLADVFTIQNNAEGFNTLLQTISCCTNPKDKIKVGLEATGHYSYNILGFLLDKGLPTYVINPLHTNLYRKSLSLRKTKTDRVDARTIAAMLLSDVDLKSYTDTAYHNEELKSLTRYRFDKVRERAKLKQSVSRLVTILFPELEKLVPTLHMASVYALLSEFPGAKQVAEAHLTHLKAVLHDASKGRYGRDMAVTLRDAARCSVGSVMPAKSLELRHTIRLIRELDSEIQDIEAAIQTMIEEIASPITTIPGIGVRMGAMILAEIGDFSRFDSPDKILAYAGMSPSTYQSGQMSLTGAYSHMEKRGSRYLRYALYNATKYVCHWDPIFSAYLAK

SEQ ID NO: 132058 - protein, 354 aa, unidentified
MSQTLNAAIAVIGIDIGKNSFHIVGHDERGAIVLRQKWSRSQVEARFANMPPCLIGMEACVGAHHLSRKLNSLGHDARLMPAKYVRPYSKGQKNDFRDAEAIAEAVQRPTMKWVATKTADQLDLQALHRVRERLVSQRTGVTNQIRAFLLERGIAVRQGQRFLRAELPRILATPPDVLSPRMVRVIEGLAGDWRRLDERIEGLSGEIEAIARQEPGCERLMSVPGIGPIISSAMVAAIGTGDAFSKGRDFAAWLGLVPKQMSTGDRTILGKISKRGNRYLRVLFVQAAWVVLIKPMSWERHGLKPWIEAAKKRLHRNVLAIALANKLARIAWSVLARGRSFEARTITNVAAQAA

SEQ ID NO: 132059 - protein, 422 aa, unidentified
MSYCPVAGIDVSKRFSDMCILSPDNKIFAQEKIYHDETSINRANALLQKAERLFFSKPVIVMESTSHYHLILFQFFSEHGYDVIVVNPLQSNSMKDFSIRKRKTDRVDAFKLAMMYRTKTLRPSQIPQTATRALRQLCRHRAELLNDVSSYKNRLTALLDQTFPGYDKVFSDVGGVTSCAVLVRFPTPTILLVEEESELVEVIAAASKSGYSFAKKKAGLLISAAQKAQTLGIHSCADETLIVCTIQMLRTLSESVLQIETAIDNLLAQIKEMRNNVSLLQSIPGVGSHSAALLLGEIGDISLFKKPKQLAAYFGLDPTERQSGSFRGTKNKLSKRGFPYARAALHMGVVNSICKRGKDSAANPVLLSYYEKKCKNKPAKVAQAASMHKLVFIVFAVLRDQKPFELKTPEQHAVEQGFVKAA

SEQ ID NO: 132060 - protein, 420 aa, unidentified
MRNAGIHANSLLEVRRMYNAVGIDVSKGKSTIAVLQPGGTVIRKPFDVSHTSQNLNELADYLSSLDGTTKIVMECTGRYHEPMIKALSEAGLFVSIVNPHLIKNFGNNSLRKVKSDPADARKIARYTLDNWTELRQYSGMDNTRTQLKTLNSQFSFFMKQKVAAKANLIALLDNTYPGVNKLFDSPTREDGSEKWVDYAYSFWHADCVRKIGLKAFTERYMSFCKKHHYIFQQDKPEKLFNASKELVAVFPKEKTYKLLIQQSIQQLNLASEHVERLRREMNELASTLPEYSIVMGIYGVGKTYGPQLIAEIGDVSRFTHREALTAFAGVDPGVDESGQHKSKSNRASKVGSARLRKTLFQIMTTLLQNAPEADPVYRFPDKKRSQGKPYYVYMTAGANKFLRIYYGKVKECLRNLEQTE

SEQ ID NO: 132061 - protein, 388 aa, unidentified
MLSYVCPRHNKTKETAMNNYDFEIGLDLHKEFSMLALVDNKGTCLRYDRLENIPDYLDNYFKQINGSFRVTFESTRNWYWLADYFQQRNIPFILSNPVLNRAIAHVHAKNDKYDARTLAHLTRADLIATCYVPDLDIRNLRELLYHRHRLLNIRTKLKNRIHVTLAKHNFRAPYKYIFGPHGIKWIESCSLPDPMKLIVTDLIPMISQLDPRIEEYYNKIKDKIEDHPYYKILKSVYGIGVIHSATIIARIADIKRFPTVEGFIRFAGLSVNTRASADKTTYGHLSRQSDKYLRTTFVEAAYLVIRYDPGLRAFYEYLRAHKGHGCAICATARKLARSVYWMLKNSTPYRVRRIQPQYLLKPSQKSSIKWSAKSTKPEAASFRRVTGE

SEQ ID NO: 132062 - protein, 346 aa, unidentified
MMIIGCDFHPSWQQVSWLDTETGETGEQKLVQASGDAERFYRQVAAPALIGMEATGNCHWLVDLLSELGHELWVGDAAQIRASYVRQQKTDKRDAAHILKLLVEGRFPRIWMPSSEVRDLRQLLLHRYKLVIMRARVKNELQHLCLNKGVQRKHKLWSQAGQQILRELPLQPWAGRRRDDLLKLMAMLDQQIEPLDQAVKAEAQRDKMALLLQTQPGVGAITALAYVLTLGDVSRFPRGKQVASYLGLIPREHSSGGRQKLGAITKQGNRMLRMLLVEAAQIAVRYDPEFRREYLHRCHQKPKAVAKVAAARKLAVRLYWMLRTQQPYPAVVRIESSPRVPLVGAS

SEQ ID NO: 132063 - protein, 400 aa, unidentified
MRVVFGIDVSKASSEVAILINGEKVHGYTIPNDAIGFNRLLGDLKTVHQPEIVFEATGVYSRRLQAFFEDNSYAYTRLNPLESKKQLDSLRVRKTDKIDAEKLAMSQFILNRKPSYVQEALYQELRDLSRFYQNLTEDIVCSKNRLHKVLQVTFPELENILSAPTGEQYWNLVMTFPCNSFVLELDDAALRAIIRQSTSKRISEKRVTYLVDKLTKLANQSYCAVKKTSPMMEEVKYYAGELLRLSEYRQSVLEEMVTLAQPLPEYEILLSIPGIAETTATSIIGELGDIRRFHSANQINAFIGIDLRHYESGDFLAKEHITKRGNPYARKILFKCIHNIASASHTNPCHIADFYEKRKRQSQVTSTKPHTIASIHRLIRTMYYLITHNKLYDYTSTQNR

SEQ ID NO: 132064 - protein, 345 aa, unidentified
MEDGTVAYQLYVGIDIAADTFTATWRTRAGTPPLPFTAEQTPAGFAALQRRLAASGATPADVLVVMEATGNYWVALAVTLHEADYRVAVVNPRQAHHFAKAQLRRAKTDALDARDLAQLAAALRPAPWTPPPAVYHEVRQRLVARDGLLAMRTQARNQRHALLQWPVIVAGVRQHLDELITDLDRRVAALETAIAAVLRESVWAESLVCLTSAPGIGLVTASWLLVSTLNFALCSGPEALTAYVGLAPVPRESGRSIRSRATIGHDGNGRLRTALYMATLSAARFNPAIKVFYQRLRAAGKPMKVARCAAARKLLHQAWALGSKLQRFDPVLNQHQHEALPVLAA

SEQ ID NO: 132065 - protein, 415 aa, unidentified
MTDHRQWYGAVDWASESHHVWLADDSGRKLGEKAFQHSGEGLAEMAAWLMTTSGATNPSQIHVAIEVPHGPVVETLLERGFKVHAVNPKQMDRFRDRFTLAGAKDDSRDAEVMSSALRTDPHCFRLLAPADPVVIELREWSRITEELSAERNRLTNRFRDQLWRYFPAILKLEADLGAEWLLDLWETVPTPDKAARIRQATIAKLLKRHRIRRLDAAQVLGILRGPPMTVAAGTAEAASAHIATLIVRIRLVNRQLKRAHHQLDALTAGLMPSQEAEPGQQKQHDVEILASLPGVGRIVLATLLAEGFDALQRRDYAALRSLTGVAPVTKRSGKSCIVVRRLAYHHRLANAVYHWARVAVQHDPKSRSKYAALRSRGHSHGRALRSVADRLLNVACAMLKTGTPFDPSISAKQSP

SEQ ID NO: 132066 - protein, 619 aa, unidentified
MGRRAQEIELTEAQKQILEHLSASRSQPYSRVQRAKVILEAATGEQNKRIGAHLGMHARHVQKWRVRWAEQAERLGVIVTVAELEAAIQGVLSDRPRPGCPPAFSAEQMCRIVELACRSPEDLEYPVNYWTPKELARAAVQQGIVAIASPFLAKPFGTSQSPKGAKHGRRVIAFGAPAVPIANVALIATFPARLVRTQPGVRTSLADDSTPGRNALWVAYDRATARPSATHPALVLCLSPESLSGKSPRTPTRRLAFETVPEILAPEAHPFSERSNSIFGPARPAACIHKVDCAGIMNEIIPTCLGIDVAKAKLDCALLNGGKYRHKTVANTPEGYAVLVQWLAKQGVDQTHLCMEATGIYWENAAQALAEVGHLVSVVNPALVKAHAQSNGIRTKTDAVDARVLADFCRQKQPPAWLPPPASHRTLRALVMRHQALVEIQTQEKNRLESSREEVRDSLDAHLVWLAEELKRVEQAIAKTLADDPDLRTQRDLLDSIPGLGERSIATWLAFCAEPARFTNARQVAAFAGLNPKHHESGSSVRGKPRLSKIGHAFLRRALYMPALVTLYKTDWGKRFRERLVANGKPAKVIIGAMMRKLVHVAFGVLKSGKPFDPALHRT

SEQ ID NO: 132067 - protein, 360 aa, unidentified
MAKARSLVGLDVHAAKIVAAVLDAETGELQTFSMGGGSAGAGAFCAGLARPVRVAYEAGPTGYGLARELTRRRVECVVAAPSKIPRAPGDRVKTDRRDAELLARLLLAGKLHPVRVPGDEEEALRDLVRAREAVRVDLMRARHRLSKLLLRHGIRFDDGHAWTARHRTWLATITLPWPAAQATLLDNRGAIDALCHRRDGLEREILGMLPASPWAVQVGRLRCLRGIDTLTAVGLCAEIGDFERFARAEQLMSYVGLVPCESTTGQQRRLGAITKTGSGHARRLLVEAAWHYRARPNIGRALSDRQELQPPEAIAIAWSAQRRLHRTWTRLEARAKRRTIIAVAAARELSGFCWAITQIE

SEQ ID NO: 132068 - protein, 347 aa, unidentified
MTIVEAARGVTGGVDTHLDVHVAAALDPLGGLLGTERFETNSTGYKALLAWLETFGDVTKIGIEGTGSYGSGLTRYLRRVGVEVIEVDRPNREERRRSGKSDPLDAVEAARAALSGRASGSPKSRDGAVEAIRVLVVAKRSARQARVKALVQMRHLGYSAPEQLRCRLKGLSVPALVAEGTKLRPTRSPDPVTAATKAALSSLAHRIEALDDELAELDARIEALLVATVPDLLELFGVGPDTAAALVMAAGDNPERLHSEAAWAHLCGVSPIPTGSGKNSGKVRPHDGGDRQANSALWRIVMVRIAHDSETQLYFERRVKEGRTKHEVIRILKRYVAREVYRYLPRG

SEQ ID NO: 132069 - protein, 357 aa, unidentified
MKYIGCDFHPSFQQIAMLDKDTGELVERRLLHTEEARTFYEGLRGPVVVGIEASGNTHWFESVLARCQHELWIGDAAAIARQEGRKQKHDRRAAALILKLMLENRFPQIWVPTVAERDLRQLLIHRQHLVRMRTRVKNQLQHIALNQGWQKKRKLWSETGLELLRSLKLEPWTQQRRDTLLEMLEELEEKIRPLDLAVAKEAEACEAARRLATHPGVGPVISLATVLTMGDVRRFADSRSWVSYLGLNPSEESSGQRRRLGAISKQGNPFLRYLLVEGAASAARGDKSLARMYARLKAKKHHGVAKVAVARKLAVRLYWMARTQKSYPEIVRTQGNQSHSVAEVMADLLNRPPASHQ

SEQ ID NO: 132070 - protein, 357 aa, unidentified
MRQQSYKKDFNGQNIFVGIDVHLKTWSVSVALPGGYLKTHTQKASPKELFEHLNKNYPNGTYHAVYESGFSGFSTCYALRELGVDCIIVHAADVPTTQKEKVTKSDPTDSRKLAKSLMNGELEGIYVHSKDNLDDRGLLRHRTMLLKLMGGIKSRIKHLLYNNGVSYPEEFAQKSKHWSRRFISWLQHDVQLLSGTRVTLDLLIEELLYFRARVLDVNKKIRVLAYTDRYREQYENLISIPGIGAIVSMCLLTEIDDIWRFNNQRQFASFLGLVPVMMASGDNSYVGEKTFRGNKILGPKVIEASWITIKHDSELAAKFGYLCDKGMKRNKAIVRIARKMSNIIFTILRENRKYVCR

SEQ ID NO: 132071 - protein, 372 aa, unidentified
MKTKNKTDHTPSVVSTSTAPVHAGGFTIGLDLGDRSHYVCVLDAQGQIIHEGPMLNDRVALALLLTRYPAATVALEAGTHSPWISRYLTGLGATVIVANPRKLHAITRHERKCDRRDAVMLARLARADVALLHPLQHGSAQAQLDLLGLKLRDSLVRTRVNLINTVRFTLKSLGHAVANPSSEAFHKSILTAVPAECLPVVQPVLAVLTLITDQIKTLERDLVARSKRDYPVTQRLQQIAGVGPLTALCFVLKIGEPTRFGRSRDVGPYLGLCPGRDQSGGMDKQLRISKCGDGLLRRLLVSAAHYILGPFGPACALRAYGQHLMGTSVREKKRAVVAVARKLAVLLLSLWKHGTDYEPRVPATPTLVMIPA

SEQ ID NO: 132072 - protein, 419 aa, unidentified
MKTWTELTHFAGLDWAGDHHDVAVVDQQGQVVAEFGFEHSAAGWTEFRQKMGAYPAWGIALETRSGAAVEELLQSAGTVFPVQPKAAARYRERTAPSGVKDDQRDAWAMADVLRLDGRNWRALAPEDPLIQELRLLCRDEVALIEQRTALVNQLRAALREYYDAALQAFDNWTLPAAWALVGQFPTPEVLSKAGKRAWEKFLHVHKLWRPATVEKRLELFAHAADWKRNEAVTRAKSRLAVSLAKMLQTLERQLGDYRAAIEALFAKHPDHDLFGSLPGAGSKLVPRLMSELGEDRARFASAQALQCLAGTAPVSFQSGQIFRVKMRRCCNAHLRHAVHRWADCRRAVCGWAQAYYQAQREKGKSHACALRCLGHRWLEGLWKMWQDRTVYDGELHARNQQKHGSWVFPILTQPAAKPG

SEQ ID NO: 132073 - protein, 374 aa, unidentified
MARTARRPSARQHHTRRSSRGRSAPLAQMHLNAAGIDVGATEHWVAVPEDRDEEPVRRFGAFTADLYVLAEWLRQCQIETVVMESTGVYWIALFEVLEERGFDVKLVDAHDARQVPGRKTDVKDCQWLQELHTYGLLRGAFRPEDQICVLRSYLRQRSMLVAMASRAVQHMQKALEQMHLQLPEVVSDINGKTGMEIIHAILAGERDPQRLASHRDRRCKHDQATIAKALEGHWRAEHRFALQQALEQYEFLQQQLQACETQIEGCLQTFVTHVEVAPPQPTPARQRRARPRQAPSFDVHGYLHAMTGVDLTQMDGIDALTALKVISESGLDMTRWPTGKHCASWLGLCPGNKLSGGKRYRRRSKPTANRAASA

SEQ ID NO: 132074 - protein, 402 aa, unidentified
MNAVGIDVSKSKSVVAIMRPFGEIVSTPFEIKHTASDIHSLIELINSVEGESRIVMEHTGRYYEVLAHQLLEANLFVSAINPKLIKDFDNDSLRKVKSDKADAVKIARYALDKWQNLKQYNVMNELRNQLKTMNRQFGFYMKHKTAMKNNLIGILDQTYPGVNTYFDSPARSDGSQKWVDFASTYWHVDCIRKMSLNAFIDHYQNWCKRKKYNFSQSKAEEIYGKAKELVPVLPKDAITKLIIKQAVDQLNSASTTVESLRTLMNETASKLPEYPVVMAMKGVGTSLGPQLMAEIGDVSRFTHKSAITAFAGVDPGVNESGTYEQKSVPTSKRGSADLRKTLFQVMDVLIKTHPQDDPVYQFLDKKRAQGKPYYVYMTAGANKFLRIYYGRVKEYLASLPES

SEQ ID NO: 132075 - protein, 404 aa, unidentified
MNGPIVSVDVSKGKSDYQAFKDLNVKFTDVRSIKHTKEGFDKIVNLVKDMERKLETEVCVVYEATGVYHRVLKKVLEDNNIKQFIINPLLSAKTRKNDSLRSPKTDKLDPKSIAKTYYNQSLHSSYKPQTTYHELRELSRYYEDILVHIRKDKVAFRAQLDIVFPGYDTLFDDLYGAVSLTVIEKYPHPELLQKKSINTVSKIIQKKTRHRQAVSNKMAFKAIEYSKTIYSGCGKDDIDVLILERLIKKLNEDLNEAERTINEMIRLVQELPDFIIIKSIPGIGDNLAARIIAELGDMTRFKKKNELVAYAGLDPRIYESGQKDGAHMHITKKGNKRLRCLLYLAVTCSIRLKRDDNSIKDFYIKKMQQSNPMCSKAAKTACASKLVRIIYSMCKTGELYQYNK

SEQ ID NO: 132076 - protein, 316 aa, unidentified
MSPAKVYVGIDVAKDWLDVAQRPGGEAWRVASDETGVAALVERLKGVRPTLVVLEATGGLQIPAVAALAAAGLRTVVVNPRQVRQFAGATGRLAKTDAIDAQVLAQFGEAVRPEVRPLPDAATQELSALVARRRQLIEMLTAEKNRLRLAAEKVRPNIGAHIRWLEGELLDLEGGLGDVIRSSPVWRERDNLLRSVPGVGPVLSSVLLADLPELGKLSRKEVAALVGVAPLNRDSGLFRGRRQVWGGRSHVRTALYMATLVASRHNPAIKSFYQRLLSAGKAKKVALTACMRKLLTILNAMMRHQAPWQHALLLDR

SEQ ID NO: 132077 - protein, 374 aa, unidentified
MENTITYLAMDTHKKQHKIALHYPCQEEIVEFTIKNTVRDIKKMVNKIKKQAPGKVEFCYEAGVCGFILKRRIEQFDCRCNVIAPSLVPRKPGERVKTDRRDARKLLMMFKAGLLTEVHAPNEHQEAARELTRLRETAKDNLKRIRHQLLKFLTRHGYIYSNGNHWTQRHIIWLRTLEFTAPMLTSVFESYFNEMIYCIGRLEALDKEVELLAGSQEYKEIVGLLRCFHGIDTLTAITILTEIFEFGRFESPRHLMSYLGLTPSENSSGDKQKKGSITKAGNKRIRRLLNETSWHYRHRYVPSKALKKRRRGQPRWAIEIADAAGRRLSKRHRYLINNGKMPCKANIAVARELAGFIWFVVTQYHARKSTKDAA

SEQ ID NO: 132078 - protein, 348 aa, unidentified
MSQSKHYVGLDVSLKETSICVIDDVGKIVWRGRTESTPEAIASAVKQHAPYAVRIGLESGQLSSWLFHGLKVAGLPVICIDARHAKAALSLKVNKTDANDAFGLAQIMRVGWYREVTVKGLDCQAVRALLVARAQIVSQITTTKNCVRGILKTFGRVLPKGLRSQFSGRVRAAIDGDPILGAIIEPTLRVLEAMRAQLLVYNKAVIQRARGDDTARQLMSAPGVGTVVALAYMTGVEDPARFKRSSSVAAYFGMTPRRYQSGEVDHAGRISKCGDGMVRGLLFESAKVLLSRSARPSALKTWGEALGKRIGPKKATMAVARKLAVILHRMWTTGTTFQWNAEAASPAA

SEQ ID NO: 132079 - protein, 343 aa, unidentified
MPRYVGLDVHKHFIEAYLIDEQGKQLHRCRVAVTRESIQTFAAKCLQPSDQVVMEATTNTWEVTELILPRVAKVAIANPLKVKAIAEAKTKTDKVDAEVLAQLFRCDFLPEVWIPDKKTRLLREMCARRAALVADQTRIKNRIQSLLAQRLIPIPVRVLFNGHGRNWLSHLELSTEDRAVIDGYLRILDQIESEEISLQKASTQLSYDNEQIRLLMTLPGVGPAGAQALYAALGDWKRFKDGAHAASYLGLTPSTRQSADHCYHGSITKAGNSLARWLLTQAARQVTPHPGPLGVFFRRIQKRKNYNVAAVATARKLVTIAFLMLKNNEPYRYSLPGPTQRNL

SEQ ID NO: 132080 - protein, 316 aa, unidentified
MTDPPDDAAGLNRIQATLSDYRRMLTWAGQFERRRWAVENAEGLGRHLSSWLLSRGEQVVDVPSTATARVRQLSRGGGRKNDQIDAAAAACVAALQGDGRPLEAEGTTDALALLDEARMNLSQSRVRLVNQLHALLRELLAGGAPRDLSASTAAALLRRIRPAGDVERVRKQIAAGLVTQIRSVDALLKSNAKQISELVAASGSTLTGTVGIGAITAGRVIGRTGRAGRFPTSASFANYAGAAPIEVASADKARHRLSRGGDRQLNAALHTIAITQIRTPGSRGHAYYNAKIAQGKTAREARRCLKDASQTTSGAP

SEQ ID NO: 132081 - protein, 490 aa, unidentified
MGDVLLLREYGLGVPNASREDVLVSKASGISRSERRRNARKERLRALVPRDGAVVGIDLGEGKQALAVIDHDVRVLWRKTVRVPAHRLGEAIELAAGAARAAGFASVTVACEPTGPRWMQVQRLCAERGLPLVCIQPLVSHIAREQQDYTTHKRDESDAVLIARLAAELHCYVPEQLDAAWAQLRDLGRRREQLVTAQTASVLRIRSFLSVAWPSAVTAAVHPFGSLTWLAAVQVVTGRCGADPARLGLGEQEFCALVGDAARAWGAVRADKRIARKVLAMADDPDAVGWSRRGLFRRIGDELADLARTRALLRAVEADMAAVLGDELGLARLGDIPGLTLAGAAVILAEAGDPARYETSSSLVKHAGLSPADNASGAFEGPSHISRRGRPGLRTAAWRAVFPLLAHNPVMAAKHQALIAAAEQAAAAVGAGPGSARAARAVKAARARARVACAASLLRWIYFMAVHDAGWDPVAASGGRLSPDEPAAAA

SEQ ID NO: 132082 - protein, 354 aa, unidentified
MRNSSNAQQGLTVGVDLGDKYSHVCVLNAHGEIVEEGRIATTREALERRFAGMAPAAMAIEAGTHSNWVYDLLTSLGHDVVVANPRKLRAITANERKSDQMDARMLARLRRADSQLLSPVVPRAEHMRRDLGVMRARAALVQARTMLVNHVRGVAKSSGSRLRKCSAESLHKAELPADLVSVLAPLLQVLERLTEQVHVYDQHIAKLSKESYPQTSLLRQVQGVGPLTALCFTLTIGDAGRFKNARAAGAYAGLTPRRDQSGDRDPELRITKCGDEMLRTLLVQCAHRILGPFGPDCDLRRFGLKLAERGGKNAKRRAVVATARKLSVLLLALMRSGEVYEPLRNSPAARRASA

SEQ ID NO: 132083 - protein, 315 aa, unidentified
MNQVPPSVGIDVSQGTLDVAVCPSGEQWQLTNDDAGIGQLVERLRTLQPIRIVLEATGGYELAAVAALGIGGLPVVVVNPRQVRDFARSTGQLAKTDALDAQVLALFAARIQPQLRPLPDATTRELSAVLARRRQLIDMRTAETNRLKLALEAVRGDIREHLRYLDKRIQDFDRELHDRLRNSPLWREKDNLLRSIPGVGPILTTTLLADVPELGTTDHKQIVALVGLAPLNRDSGRWRGKRSIWGGRGHVRAVLYMATLSAVRRNPVLKALYQRLLQAGKPRMVAIVACMHKLLRICNAILMHGIPWRYQPLDN

SEQ ID NO: 132084 - protein, 418 aa, unidentified
MNSIAWKERNYFGALDWACDHHDVAVIDAKGAVVCELRFEHTAAGWQTLRDKLRAYEPLAVAVETNQGLAVEQLLAAGYTVYPVNPKSAQRYRERKAPSGVKDDQRDAWSLADALRVDGHGWKPLVPDDPLVAELRLLTRDEIALIEQRTALINQLQAALRAYYPAAMEAFDDWTSPAMWAFIEAFPTPELLVKAGRRKWEKFLHVHRLWRQSTAEKRLAIFAQANALQGGAAMVAAKSFLALALAQVLHTLEAQLSAYRERIEARFRQHPDHHLFGSLPGTGPKLAPRLLAEIGDQRARFDQAEGMQAFAGTAPVTFQSGQIEKHLVRRACNPLLRAAVHLWADHSRHKCAWADAYYRAHREKGQSHACALRCLGQRWLKILWKIWQTRTPYDEALHMCNQQKHGSWVLALQPERTA

SEQ ID NO: 132085 - protein, 369 aa, unidentified
MDHHTEVFVGIDVAKSRNAIAIADGERGGEVRFMGEVDASPEVMRRVVQRIAAKHERAHFCYEAGPTGYGLHRLITSMGHPCDVVAPSLIPRRPGDRVKTNRRDAVGLAKLLRAGELTPVWVPDEGHEAMRDLVRARAAAVETQRVHRQQVNAFMVKHGRIFPRKKSWSMRYLRWLQEQRFEHPAHQIALQELVDAVRVSRERIERIEAAIEEFLPSWSLAPIVRALQALRGVDLIVAVTFATEIGDVGRFDSPRQLMGYLGLVPSERSTGDSIRRGGITKAGNSRVRHMLVESAWTYRHPPRVGAKKLYRLEQTTPRVREIAWKAQSRLTARYRTLSARGKKTTVVCAAIARELAGFMWAVAREAKPA

SEQ ID NO: 132086 - protein, 344 aa, unidentified
MKNDFGIKVVGIDLAKHIFAVHATDNYGNVLKKGKMTQAKLVKWLATLSPSLVGMEACGGANYFARVIEQLGHKVKLMAPNHVKPYIQGNKDDNKDAEGIAEAVTRPRMRFVIPKTPAQQQLQSWHRIRSAKLKQRIAESNGLRALAYEFGLVIPKGLKGLRKKMEEIIRGDLDDKIGWVREDIILLWNQFEQLQEIIFQYEAKIKIAFNNEEFCKRLETIPGIGYLTATAIFAAIGRNADRFKSSRDFAAWLGLAPRHVGSGGNIQMLGISKRGDRYIRCLLVHGGRSVVANAHKKKDSYSLWISRLKERAGTNKTSVAVAHKNARIIWSMLKNGGVYKAIVA

SEQ ID NO: 132087 - protein, 346 aa, unidentified
MNKVIGLDLGDKRHVAVIFDADGTEHAADGMVNTMQQVKNYFEPHAGAVVVMEAGTHSGWISRLLERMGFEVWVGNPRKLRAIWDSTDKSDARDARVLGLMFRLEPRLLHRVTHRGEQAQCDLALIKSRGILVETRTKLINHVRGVVKGVGARVGACSGESFHKKASEQVPVALKDALDVVIEQVKQLTAAIKELDQRIEKMCGEKYPETQRLTQVSGVGSLTALAFVLTIEDSKRFAKSRSVGPFLGLTPRRDQSGVTDKQLPITKAGNTYLRQLLVGCAHYILGPFGRPCDLRACGERIAAQGGKNGKRRAVVAVARKLAVLLHRLWMDGREYVPVRKEARKAA

SEQ ID NO: 132088 - protein, 346 aa, unidentified
MNRMNYVGLDIHKKSISCCVRRADGTIIQEITITATRQALDEWMQQLPQPWMAGMEATLFTGWIYDHLESCGATVKVAHPAMLQAIAAGKKKNDRVDARKIADLLRCDYFPECHMAPREIRDRRRVLRYRNLLVRQAVQMKNKVSGLLMEAGVPYNQQKVHQKKYFAELLQKQKKEMPPSMPELLRLSRSTVEALTGMQRQLIRALERDALLAARVERLASIPGVGRVVALTWALEMGDIRRFASVKKAVSYCGLCGAEKSSGGKTERTPISKQRNKHLQTILVEAAKLAPRWSTELALVYEREKQRGNRNRATLAVARKRVAYLMAIDREQRPFDTQLRVAGNAA

SEQ ID NO: 132089 - protein, 459 aa, unidentified
MRRDKPVVSTWEGLKVIHPNAAGLDIGSAEIWVAAAPGRTAEPVRKFGTFTPDLHALADHLVGCEVDSVVMESTGVYWIPVYEILEARGLEVFVVNARHVKNVPGRKSDIQDCQWLQGLHSVGLLRGSFRPEGEIVTLRAYLRHRAGLIEHRAAHIQHMQKALQQMNVQLPLVVSDITGVTGLAIVRAIVAGQRDPQQLAALRQPGCKKSAAQIAEALTGNYRREHVFALQQALTLYDCYTEQMAACDVEIERQFTNLKPICADLPPLPPSEKRDSHSKNAPSYDARSYLYQLTGVDLVAISGLNESSVQTIIAEVGTDLSAFPTEGHFCSWLGLAPHNDVSGGKRLRSRTLKTNNRAGQAFRMAAQSVAKSPDSAFGAFYRRMKARLGAKQAIVATAHKIARAFYHILKHRTPFQDLGGEEYERRARAREIKNLQKRAAKLGLAVLETPTPPALAESF

SEQ ID NO: 132090 - protein, 407 aa, unidentified
MTDAPNRYIGLDIHKEYFVAVGVNDKLETVFGPQRGSNYQLDDWISRYLTPEDAVVLEMSTNTYQFYDALLPHVHSVMAVHSPNVAMVTNVRVKTDKKAALALAQLHATGLLTGVWIPPCPIRDLRSLVARRDKMVRLSTMAKNRLHSMLHRHHLIAPEKPFEPEQRTWWENLPLSANEQLLVSCDLEMLDFAQKQAAQIEGCLKQASAEDVRIPLLIQLPGIAMLTAITILAAIGDITRFPSAKKLVGYAGLGTRVHNSGLTCSSGRITKAGRKDLRYAMVNAANHAVEHHVHWKKELARLAPHLGRSKAIVAIARKLLVAVWHVLSKHTADRFADPRDVASSFIRYAYRIGVKNLPNQQPATVFTRDQLDRLDIGKELKEIPWGSKRFKLPPSKLLLEKSERRPK

SEQ ID NO: 132091 - protein, 419 aa, unidentified
MDETFDLFVGVDWGGSQHQVCVLDRFGKIKGQRSFAHSGQALADMCAWLLSFCHDVGGVAAVAIEVPYGPVVETLLDRGFAVFFIHPKQLDRFRDRFSASGAKDDRRDARVAGEAVRTDRVHLRRLDVRDPMTICLGEWRRILSEVTDESVVLTNRLRSQLWRYYPAFLEVASDLSAAWVIALWALIPTPAAAANVTLIAVAELFKNYPVRRINAENALAKLRQPAPMVAPGTVEAAEAHCRLLFERLRLVLAQQKEAQRVIDELLAQWDCAHCVDCDKLPAPDASPHLGDAKILRSFPGIGRVVLASILCDASDLVKNRDYHGLRLRAGTAPVTRQSGKTKHVVRRRACSRPLRDAIYHWARITCINGGISAARYRSLREAGHSHGRALRTIGDRLLAVACAMLRSGTLFDPQRVKQV

SEQ ID NO: 132092 - protein, 410 aa, unidentified
MRIIALDVHRSFAQMAILEKGNIRDAGRIDLERSRLLQFAKKLKPDDEIVIEATGNTSAIVRLLSPFVGRVVIANPILVRAIAWAKVKTDKIDAAVLAKLHASGFLPEVWMPDEETETRRRVVAERTQLVAQRTRLKNRIHSVLHANLIPPYKGTLFSKRGKVWLMAQPLAEDQRRVVLRHVGELERLGGELAQVDKSLAQTALQEPRVKRLMTITGVDVTVALSIVAAVGDIERFSSPERLVSYFGLNPRVRQSGDKPAYHGRITKQGRAHARSMLVEAAWVISGVPGPLRAFFMRIRDKRGKQVAAVATARKLAVLVWHMLTKEQDYTWIRPALLQWKLRHLELAAGQPSHRGGKRKGPAADYSNKAVRDSEREAMGNAEEVYRRFVAAWKQQPPDRCPGAANEVRQT

SEQ ID NO: 132093 - protein, 339 aa, unidentified
MKITTIGLDIAKKFFQLHWVDMTTGEVHRKQLKREQMAEFFANCEPSVVAMEACGSAHYWARKLSGFGHEVRLVAAQFVRPFVKTNKTDAADARAIWEAAQRPEMRFVAIKTEGQQGVLTLHRLREQMVKFRTMQTNQLRGLLYEFGVVLPVGRAKGMPAALEALGELEDTLSAMVIDALRQQMARIQKLSDDIADIEKKLMLWKKTECSAMKILEIPGVGILTATAAVATMGEASAFKSGREFAAFLGLVPKQSGTGGRVRLQGISKRGNVYLRTLLIHGARARINLQKQREPWIEQLLARRPFNTVVVALANKMARTIWALMAHDRSYQKNYAPSIA

SEQ ID NO: 132094 - protein, 415 aa, unidentified
MVVCRANNTSCRTEKDVAQPTLWAGIDAGKAAHHCVAINTGGQRVLSERVINDEGALLDLIRAVKELADGGSVQWAIDLNSGGAALLITLLLDDDQDLLYIPGRTVHHASGAYRGDGKSDAKDAAIIADQARMRRDLLPLRHRDKTAVDLRILCARRTDLASDRNRAINRLRAQLLEYFPALERAFDYAHRKAALILLTGYQTPDGLRRMGAPRLERWLRDRQAYNAGDLAARAIEAANLQRTTVIGQHVAAAVVARLAQTILDLNTELADVDTMIEETFQQHRLAAIIVSMPGFGSLLGAELLAATNGDLASFNTADRLAGISGLAPVPRDSGRISGNLKRPRRYDRRLLRVFYLAANNSIKTSPESRDYYDRKRSQGKRHSQAILCLARRRLNVLWAMQRDQTSYQPGMPRAA

SEQ ID NO: 132095 - protein, 349 aa, unidentified
MDRTTYGLDIAKNVMQLHWVDAQTGEIGRKKLARAKLAAYFAQLQPVRIAMEACGSAHHWARALGGLGHEVELLPAAQVRPFVRSNKDDAADARAIWVAAQQSDIRRVPQKSVEQQAVLALHRTRSHWVSVRTATVNSLRGLLYEFGVVLRGGRQAGLKALAEQRVVIDEQIPATMRTLVDGQLNTLQHIGQRIEQLEREIAALHKQLAGARELDQVPGIGVLGSTALAATLGDGKAWRSGREFSASLGLVPAHAGTGGKVRIGHLSKRGDPYLRTLLIHGARSVIEHAKNKPKWLEQLLARRPKNVAVVALANKMARTAWALVAHGRAYQRDWQSARPGSAAAQAAGA

SEQ ID NO: 132096 - protein, 401 aa, unidentified
MKRLSGGIDIGRYTHHMIILDEKEQILYQRSLPHQLGEIKETMKQLKSLQKKENAHLSFALEGKNGYSNPLDRLLLSEGFTLYNVDNYKLKRFREAFAGEWRDDNRDALMLSKMLNLKEHINAKKEKVFIEITKPSLIPESLKLFSRHQQLLIDEKIRLTNRLGKKLLEVCPELLTLGKLKYQKIIAILAKYPDFSRYSRITLKSLLKIPGIGKKQAPHLLAGLHELAYMPDLTDIYKTIISSYSRRILQLQKEIKEIDTKMDEIGQQDNSIRHLKSIPGVATKLASRFLGEIGDISRFPSEKNLAIYCGIACVNNASGKTNKIKAVYKANKIAKQTLIMMAGCSIRVNPQCRDYYLKKRTEGKAHNHALRCLARQMIKVIYRMLTEDRDYQIKREALKVA

SEQ ID NO: 132097 - protein, 365 aa, unidentified
MQYVGIDYHKQYSVVTSIDKETGERKTARVSNTLEAFQGCIPHIDESHVVFEASRTWPYIYELLKSHVGQISMAHPLRVKAIASARIKTDKIDSRILAELLAADLIPEAHIRDDANRTHQSIVRQRIFFVESRTRVKNRIHVLIDRQPNPVKKQVAGLSDLFGKAGREWLRHHAPLSHVDRILMNQLLAIYDTLTEVIGQSDRQIDRMYREDPVAQLLASIPGIGKFLSVVISVELDDISRFADANKLASYTGLIPSTYSSGSVTRHGRITKQGNKWLRWAFIEAAVTAKNHNAQLNEYYTGLLARKGNMKARVALARRLVKIAYSIITHNRAFQPYMKAGFHAIPLESPCCGTNGTKGSRSQKG

SEQ ID NO: 132098 - protein, 424 aa, unidentified
MCRAIGLDVHRDFCEVAIAAGRQARSGGRIQTTPEALELFAGSLAPTDRVALEVTGNAAEIARIIAPHVAQVIVVSPHDTGISRARAKTDRLDALTLARLLAAGELDAVWVPDEWTRAMRRRLSRRSQLVRSRTRAKNEIHAVLIRRLKGRPPVSDVFGVTGRRWLAALELPDDERETIAGCLRHVDFLDTEIGELDRVIAGQALSSDQVLRLMTVPGVSVITASTFIAAIGDIRRFRSARQLVGYLGLDPKVRQSGNAPARHGRITKQGSAPVRHVLVEAAWVAVRAPGPLRAFYERVRARRGAQVAAVATARKLASLFWCLLTREQDYAYAQPSLTRRKIRQLELATGAPSRKGQVRAGHGDRNTAIRDSERALALQAENAYRRTIADWKASGPAKTGASVTPGRASQRPSKGKAARQTTSP

SEQ ID NO: 132099 - protein, 343 aa, unidentified
MQAIATVGLDIAKSVFQVHGIDATGNVIIRRQLKRRYVLTFFQKLPPCLVGIEACASSHHWSRQIKALGHTVRLMPPAYVKPYVKRQKNDATDAEAICEAVRRPTMRFVETKTPEQQSCLVLHRTRHLLIRQQNAIANALRAHLAEFGIVAPVGRRGIEELLKIVADASDARVPNVARACLIALGEQLRVLKAHVLKFDRLIMAWHRSNEMSRRLDALPGVGPALATALVASVADPKAFRSGRNFSAWIGLVPRQSSSGGRQKLGSISKQGDRYLRGLFTAGALAVIRYAKIHGTGHRPWLSALLARRSTRVAAVALANKIARMAWAMMARGECYREPVALAA

SEQ ID NO: 132100 - protein, 349 aa, unidentified
MIWIGVDAHKRIHQAVAIDERGIRGERRIANTPEAWAELHAWAMQWPARIWAVEGAWYLGRGLAQYLAAQGEPVHEVSGRITARRRGGMVRRGKSDRLDAHAVATVLREDAARLPRVLPEDDASATVQLWSRMQAEVTKDLTRLMNRLHDLLLLCDPEYKGKLPALTSKAAIAALRTYVAPGSTTLARERELVIRQTAEQLALLDAHDRELRRKLERASRSTFRALRQIEGVGTVISCGLVAEVGRPRPGFGEEQLAALAGVSPLEASSAGALRHRLNRGGNRRLNMFFHQIVLTQGRMYPPAQTYLARRRAEGLTEREARRALKRLVVRRVFRALCSCFDRSLERVAA

SEQ ID NO: 132101 - protein, 279 aa, unidentified
MSTRPVLKQCLGIDVSMKKIDCCLSFYTQELKVKVVSSRALENNLEGFTKLLEWVNRKRDPSLDLQVNMEATGVYHEEAAYFLYDQGYRLSVIQPAKGKQYAKSLDEKNKTDQIDAAMLARMGLERDLSPWNRPDGTLRVLKRLSRGRIGLVRDKNALTNQLHALSHAHDTFQDSVDRLKDRIELAKKQLVCIEEQMRSMTGSDPVLSEKMRHVATVPGVSFVTAATVIAETDGFANIGNRRQLVSYAGLDVVVRTSGTLTWRPPHISKRGNAYIQAAL

SEQ ID NO: 132102 - protein, 392 aa, unidentified
MYIVGIDIGKNHHEASIVSPEGKQIGRSLRFATTHKGADSLMSFIFKNIGNSPCVFGMEATGHYWYPIYSFLKAKGYTICVINPIQSDSLRKMYIRQTKNDSIDSFLIAEVIRFGQFGTTSMADENILAMRQLCRYRDSVISSRTEIKLRIGTIMEQIFPEYEKQFSSLWMSTSMGILEKYLTPENIENAPIDELFEIIKDKSHNRLTKAKAISIKEAAADTFGIKIAQDAFSFQLKQLIDRMNFLDKQIEALDIEIMKYYEQFDCYLHTIPGIGIIGAATILAEIGDISRFKNSSALVAFAGIDPTVRQSGEFNSTHNHMSKRGSPYLRHAIFLAATTCSFHNSPLNAYYKKKRDQGKHHLTATGAVARKLTTVICAVLRDSKPYEPKKFC

SEQ ID NO: 132103 - protein, 341 aa, unidentified
MEYCGIDLHAEYSQICILDEDGEVMETSRVRTSQKALERFFRRDPMRVVMEAGGSSPWVSRLLDSFGHEVVVCSPRRVRLIAESKLKNDKVDAEVLARLVRLDPEFLKPIQHRSEEAQLLRANLKVRRAMVDARTKWINTVRGLLRSFGYKVAGKAPHTFVDRVDRMKLPEELRAPIEPLLEQLDLLSGEIRRRNEHLEEMVKDLPEVDHLREIPGVGVVVATYFVLTIDDPNRFRNSRDVASFFGLRPSMRESASVSHYGRITKEGDPEMRRLLVQAAHACLLTKADSELKNWALALAERKGKGKAVVALARKLAVLMHHLWVTGEVYQAFPNKKASQAA

SEQ ID NO: 132104 - protein, 386 aa, unidentified
MQQNDLSKSLVAFDQDSTLVAVIELSASSWLVAGLVPGLTREPLKKQGADPVALLKLLYRWRDEAAKAGKAIARIAVAFEAGRDGFWLARLLLAQGIETYVIHPTSIPVSREHRRAKSDRLDTQLLKRSFVGWLRGEAKHCGMVAIPTIEEEDARRANREHETLVGERTSLISRMKATLVRFGIRGFNVKLKKAAERLEELRGAEGVPLPPNTLAELHRDMARLRLIKEQLKEIEKMRLERLKQTPQDGPHPMVLMLARMMGLGIETADMLVHEILSRHLRDRRAVARYAGLTGAPDESGGKRREKGLARAGNARVRRGMIQLAWRWLMFQKGSALAQWFQERTAGAQRNVRKTMIVALARKLLIALWRYVSAGEVPDGAILRPAA

SEQ ID NO: 132105 - protein, 311 aa, unidentified
MNQQDFFIGMDTSQDLLEVAVRPTGERMSFANQEDGISLLRDFVKPFSARLIVLEATGGLERAAVCALAAEGLPVVVVNPRQVRDFARSKGILAKTDKIDAQVIAQFAESIRPEVRPLKTEEAQKLEALLNRRRQILQMLTAEKNRLHSAPAWTRKDIQIHIQWLEKNLAKFNKDLDLLVKKSPIWRAQDKILQSAKGVGPVLSQTLISRLPELGTLNRKKIAALVGVAPLNRDSGKFRGRRTIWGGRSEVRSILLMATRVAIRFNPVIRAFYERLEKAGKKRKVAETACMRKLLTILNAMMKNRTCWQAV

SEQ ID NO: 132106 - protein, 393 aa, unidentified
MICVGIDVAKDKHDCVILNSEGKILAGVFTIPNNADGFDTLLQKIRSCTSSDDKIKVGLEATGHYSYNILGFLINQGLPTYVINPLHTNLYRKSMSLRKTKTDRVDAKTIATMLMSNVDLKSYTDTAYHNEELKSLTRYRFDKVRERAQLKQSVSRLVTILFPELEKLVPTLHMSSIYALIIEFPGAKQITEAHLTHLKSLLKDASKGRYGRDMATEIRDAAKHSIGSVMPAKSLELRHTIRLIRELDSEIEDIEAAIEAIMEELQSPITTIPGMGFRMGAMILAEIGDFARFDSPDKILAYAGMSPSTYQSGQLSLAGTYSHMEKRGSRYLRYALYNATKYVCHWDPGFAAYLAKKRAEGKHYNVALSHAAKKLVRLIYAMEKSRQPYKRAA

SEQ ID NO: 132107 - protein, 443 aa, unidentified
MDDERVEVVELETRSEHVARVAAIDIAKASAMVCTRLPGEKNPDRRVQRTWPVKATTAAITELADHLAVAGGELVVMEATGVFWKPFYFLLEARGLRCQPVNARDVKNVPGRPKTDRLDAIWLAKLAERGMLRPSFAPPKPVRQLRDLTRLRKVLTEERSRYRTRIQDVLEDACIKISDKDEAVSDLFGISGRAMLDGLVAGERSPKVLAELARGRMRRKIPALEQALTGQFEDHHGRLIGRMLRLHDASSGQIEELTVEIDALIAGLDPTPPPDGDHPGRMPLLDRLDEIPGVGRDAAQTTLGEIGFDMGVFPTPGHLASWAKLTPRTIQSGARSTHGPTGKGNRWLKGTLGNAAVGTSRTKTFLGARYRRIVKHAPKKKAVVAVSRNILEIAWVLIGDPDARFVDLGVDWHDRHLNTARKTRQAVRELEHLGYTVTLASAA

SEQ ID NO: 132108 - protein, 416 aa, unidentified
MDVLFKHCAGLDVHKRMIVACVLLASSEGVHRFVKKFATTMADLEALDAWLTSLEVTHVAMESTGVYWKPVFNVLSATFDVWIVNARELKQVPGRKTDINDAEWICQLMSIGLLKRSYIPEVAQRDLRDLTRYRKRLIEERTAASNRLEKILEDSNIKLAAVVSHIQGVSARAMIEALIQGETDTTAVAALAKGSLRKKLPELEAALVGKIREHHRFMWRELLYHLDELNLRLAAINERIGELVAPHEAVIERLDAIPGINRWTAEVILAEIGPDVSAFPSAQHLASWACLCPGNDISANKRRSGRTRHGQNWLRPALVEAAWATAHSETYFGSQFHRLRARRGDKRAAVAVAHSILVVVYHLLANPEASYTELGADYFVQRNKEQEQRRAVRKLEKLGFAVVLTPASPAVTPAPS

SEQ ID NO: 132109 - protein, 344 aa, unidentified
MDHFAGLDVSVKETSVCILDDAGKIVKEVKVASEPQALLKVLGNPIYRFKQIGLEAGPLSQWLFSALAGAELPVICVETRHMQAMLKAQINKTDRNDARGIAQMMRVGVFRPVHVKTVRSQKLRMLLTHRKLLQSKAIAIENDLRGTLRNFGLKVGMVGTVRFEGRVQELVETIPDLAVLVEPMLVVRRALREQIVILHRRLLAIVRDDEVCRRLMTIPGVGPVVALTYRATVDVPARFRKSKSVGAVFGLTSSRYQSGEIDWSGRISRCGDEMMRSMLYEAAQSMLHSKKWSWLKAWAMQIARRRGMKRAIVALARRLAVIMHRIWIDGTEFRWTREPATAAA

SEQ ID NO: 132110 - protein, 470 aa, unidentified
MTPRKDNFPHPDPPARSPSLQVVNPHAAAVDIGAVEHWVAVPPDRDAQPVRRFGTCTLDLEALADWLLACDITTVAMESTGVYWIPLFEVLEARGFQALLIDPRQAQRAPGRPKSDPRDCQWLQRLHAYGLLAGAFRPDDQVCVLRAYLRQRQMLITHASQHIQHMQKALEQMNVKLPEVVSDVTGVTGMAIIKAILAGERDPVTLAKLRDRRCKHGEEQIAKALQGTWRAEHLFALRQAVELYEFSHRQLATCDAQIAAQLATFPDQSGGQSLPPKPRKSQRKANAPRFEVRTPLYRMAGVDLTALEGIEEETALVILSEIGTDMSRWPSVKHFCSWLGLCPQHKVSGGKVLSRRVRPGANRVAVALRLAAGSLHHSQSALGAFFRRLRARLGAPKAITATAHKLARLVYSLLKHGTAYVQQGMEEYEAQYRERKVKAMARQAKAFGYTLVALAAPDGQAMHAVPASTP

SEQ ID NO: 132111 - protein, 386 aa, unidentified
MRRAAKRGPGPSHLLITPDHAGNVVGIDPHKQTLTATVVDPCGGIVASEHFKVSGDGHRALEAWAKQFGAIARWGVEGAAGWGRHTAMFLTGRGYDVRDVCANRTARNDRGRQRGKSDVLDSERIAREVLAHPLLPKAFKRAGQDQGPDEQHQLLAIWHNRRQSILKSRQHLVNEAEHLLCELPLELREQLPASKAVRPRLTALAARNRRRRYDPPTKLRLQMLDEYHAQIAALDREEKQVVAHLTELVRESGSTLAELCGLSVRSVAELLVEVGDVRRFTEGGFARFNGTAPLPASTGEGPGEPIRHRYNPGGNRRINAVLHRMAITQLRCEPRAQPIYANARASGPHTKKEARRVLKRHLSDVVYRRMTRDLAAHTTTEPLLAA

SEQ ID NO: 132112 - protein, 375 aa, unidentified
MQKKVRFLGLDVHAETIAVAVAETDGEVRSLGVIANRAESVRKLIKKLGPAEHLRACYEAGPTGYVLYWQLTELGVECAVVAPTLVPVKAGDRVKTDRRDAAKLARCHRAGDLTAVWVPDASAEALRDLVRTREAAKQDQLRARHRLSKFLLRTGQRRPFAGKAWTLPYMAWVRQLRYEQPAQEWTRLDLLHEVEHMAERVKRLEEAIREAVKLAPVAMKEVIRGLQALRGVAEISAVTLVAELGQISRFEGARQLMGYSGAVPSEESTGNRQRRGAITKTGNGHLRRIAIEAAWSYRLKPGIGPVLRKRQQGVSEEIKEIAWKAQMRLHKRYMKLAAAGKDQRKIVTAVGRELLGFIWAIGVRAETGARQTMAA

SEQ ID NO: 132113 - protein, 397 aa, unidentified
MYLNIGIDVSKNKHDACILNENGEQIGKFMKLTNTKTSLDKFLEQIKIISEKHDAKIRIGLEATGIYWYSLFSKISEDHKISIYNPVQIHAFAKVNVRDSKTDKIDAKTIANMLRFGNAPQTDYSDKQRLELREYVRFYLKLTSQKTNLKKRFRRNLHLVFPGYDQVFKNVFTRTSKEILSQSPTPDDILEMGEAKLFELMKKASKNQIYKEKARELIAKAEDTIPSEFLKESSLFELQIMLDLIENIERHINSLEERIFAIWENVKDKHYIQTIPGISEFRAAMIWAEIGDIENFKHPDQIVAFAGLDPKVKKSANKEVIGGPNKRGSSTLRWALGWAVQESKNVNPVLASYFKKKIDEGKHYNTARCAASKKLIRIIWSVEKNKKPFQIPSNLQS

SEQ ID NO: 132114 - protein, 442 aa, unidentified
MPKSEVSQQAQEPEFAAFVGIDWADQKHAWCLQAVGSTQRESGELEHKVETVEAWVTQLCQRFGGDRPIAVALEQTKGALLYMLAKYECLHLFPVPSTMAASMRKALYPSGAKDDPTDSDLLLDLLLLHRDKLHRLTPDTEATRRVQNLVEERRKLVDEKTAQLNRLTSNLKIYFPQMLEWFEALDTELVCDLLEHWPTLEELQKVSSEDLRRFFHQHHCRNRELMERRLQGIGQARPAIQDRPVIEAQRVVVRVTVQLIRSLRAAIAELDGKMAEATATHPDFFLFASLPGAGEVMAPRLLAAFGSQRDRYSSADEMQIYSGIAPVLERSGKTKWVHFRRACPKFLRQSFHEWAGHSMVKSAWAQAYYRQRRKQGQGHHAAVRALAFKWIRILFRCWKDRVAYDEKKYLAALAKRGSPLRELLVASAVRTCEIPSEIVVNP

SEQ ID NO: 132115 - protein, 316 aa, unidentified
MSDPQVLVGIDVSKAQLDVALRPTNDCWQVDNDESGIASLVERLRTVQPTLVVLEATGGLEVPVTGALAEAGLPVVVVNPRHARDFAKATGRLAKTDTLDARGLAHFAEAVRPTPRPLPDAQAQELSALLTRRRQVVQMLTAERRRLQTAPQPIRADIQAHITWLTRRLACTDDDVAAASHASPLWRAKDELLQSTPGVGPILSRMLVAEVPELGGLNRQEIAALIGVAPLNRDSGTVRGKRAVWGGRAHVRAVLYMSTLAAVRHNPVLKAFYERLRAVGKAPKVALTACMRKLLTILNAMLKHRTPWHENYATHS

SEQ ID NO: 132116 - protein, 433 aa, unidentified
MRLDPRAFVKVNVPHIQSRKEVIVMPNSLLVGIDVSSCDNKVRLLDSSGKSVSKFTVSNNQPGAKTLAYKIVSAMTLNRFDSLVIGLEATSVYGEPLVHFLKQDADIGSFKPRIHVLNPKQVNAFKKAYSDLPKTDDVDAWIIAENLRFGRINQEVYMDDRITALKKLTRARYYAARNLTREKNHFLNSLFLKFSSLTQEKVFSDTFGTTSLAVVEEFLSVDEIAYMPIEELSAFVNEKGKGKFDVPEDVAKLIQKAARSSYRLPKTVNDSVNQVLAISLVAIRALKDQLKLFDKAIEEQMKVVPNTLTSVKGIGSVYAAGIIAEIGDINRFKNQAALAKFAGICWSKYQSGKYTADNTHLISSGNRYLRYYLMEAANKVRVHDPEFKRFYDLKYRETPKTPHKRALALTARKLVRLVFALLHDNRLYIPPKE

SEQ ID NO: 132117 - protein, 391 aa, unidentified
MIYVGIDVAKDKHDCFITNSNGEVLFHAFTIANNREGFKILLQRIQSVSDDLTKVKVGLEATGHYSYNLLGFLLDSGLPTFVINPLHTNLYRKSLSLRKTKTDKVDAHTIASMIMSDVSLKSYSDTSYHNEELKSLTRYRFDKVKERSKLKSSVSRLVTILFPELEKLVPSLHLASVYALLSEFPSANAIATAHLTRLSNLLYESSKGHYGKETATMFREAARNSIGSNMPAKSLELKHTIKLIRELNSEIKEVEDEIKRIMDEINSPILTIPGINYRMGAMIIAEIGDFNRFDSPDKLLAYAGMSPSTYQSGQLSNCYAHMEKRGSRYLRYALYNATKYVCHWDSNFGDYLSKKRAEGKHYNVALSHATKKLVRTIYAMEKSGQAYLPMN

SEQ ID NO: 132118 - protein, 380 aa, unidentified
MNETYYIGLDVHKDSIAIAYSPEGSRKDPVYYGECGGSITAAERTLRKIAKLLGQKLQDLKVCYEAGPTGFVLARRLITLGVDCCLMAPSKTERKATEPIKTDKRDAKMITKLFRNGDITPVRIPPVLDEAVRDLCRARTDASDDLSRSRQRLNAFLLRVGFHYSGKTKWTPAHMRYLRELVMLNEAHRLVLEEYIQAIDSCADRVARLEERLKQVLTDWEWKPIVYALMACKGFKEVAAMTIISELGDLRRFSHPRKLMAYLGLVPGEQSSGGKRRQGSITKCGNSHARWMLIESSQHYRRTPKISKELTRRQEGQCKEVKDLSWRIQNRLSKRYQALRARGVIDSKCIVAIARELAGFIWELQNKCGLPIPEGETLNN

SEQ ID NO: 132119 - protein, 343 aa, unidentified
MEAYAGKQFVGIDLHRRRTVIVRTTEAGEVLEAVRIVNDVQRLASVMARAGDCPEVVLEATYGWYWAVDALQAGGANVHLAHPLGVKAFEYRRVKNDFRDAQDLADLLRMGRLPEAWIAPPPTRELRELVRHRAKLVGLRSHCKAEVHAVLAKCGVQVLMSDLFGLAGTELLDRLDLPAPYAARIASLRRLMDDVDFEITAFAGIIRGRMAQEPGYTAVQKIPGIGPTLAAVLVAEIGDITRFASASKLTCWAGLTPKHHESDTHVRRGRITKQGSRLVRWAAIESVKTISKTSEVGVLRERVADRRGRNIGSVAAARLQLEFVFYALRDGHVRALEHLPRVA

SEQ ID NO: 132120 - protein, 406 aa, unidentified
MLNAVGIDVSKGKSTVAILQPAGVVVRKPFNVSHSVKGLSDLISCVKDLDGETRVVMETTGHYHEPVLKAFLDAGIFVSAVNPSLIKRHDSDKNPLRKVKSDPADARKIAKYTLDKWEHLRQHSAMDSSRAQLKTLNTQFHFFMQQKVSLKNNLISLLDLTYPGANDLFDSPVRSDGSEKWVDYVHSFWHVDCVRKIGLKAFTSRYQNFCRHHGYNFQPGKPEELFNASKDLVAVVPKDPIYKQLILSNIEQLDTVSKRIELFRRTMNELASTLPEYTTVMSMYGVGPTYGPQLMAEIGDISRFDHRSAITAFAGVDPGVDQSGTVNHESNRASKHGAPRLRKTLFQIMTTLLQLAPADDPVYLFMMKKKSEGKPYQVYMTAGANKFLRIYYGKVKECLAAQSISE

SEQ ID NO: 132121 - protein, 324 aa, unidentified
MIDGVLGIDVSKNTIDVSMSDSNKVRARSFANSADGWRHLLAWLISQKIQRVHACLESTGRYSIGIASALYDAGHVVSIVNPAQIRDFARTKLGRNKTDGVDASHIREYCELFKPQPWAPASEAHRRLGELQTIRAGIIAGLTEWKNRKNSGMIDAVAQSLADVTISHFTSQLGAVDEAITQTIDNDPVLRRKRDLLLSISGVGETLAGVVLAELPGPDVLRSGAEVVAYAGLNPRLHQSGTSIDRITRISKIGNAVLRAALYMPAMSAMQHNPAIVALVARLKARGRLKPKQIVVAALRKLLVLCFGVLKTGKPFDSAIAMGC

SEQ ID NO: 132122 - protein, 378 aa, unidentified
MKNDNRYVGLDVHAETIAVAVVETDGEVRFLGTIPNRAETVRRLVKRLGPANRLRFCYEAGPTGYVLYWQLTGLGAHCDVVAPTLVPQKPGDRVKTDRRDAEKLAVLYRGGHLTPVWVPDQAHEALRDLVRAREAAKSDQLRARHRLQKFLLRHGRRPLQGIKAWTQKHLDWVRREVHFEALAQEAVLVDHLAEVEHARERIRRLEGAIDTAVKAAPASLRAVIEALQGLRGIAMVSAATIVSEVGSLSRFRKPRQLMGYSGGVPREDSSGERVRRGGITKTGNAHLRRIVGEAAWSYRHRPTVRGELLKRQAGLSEEVKAISWKAQHRLYSRYRRLIGKGKAKQQVVTAVARELLGFIWAIGVHVEQQHGTAARRAA

SEQ ID NO: 132123 - protein, 402 aa, unidentified
MNSVGIDISKGRSTVAVMRPFGEVVISPFEVRHTDSELSELARQLKSLDGETRVVMEATGNYHAPVAKLLHDAGLYVSVINAKLVHGYGNNDLRRVKTDKKDAVKLANYGLDRWLTLPRYVPEEDTRLLLKNCYRQYRQYSKVQTILKNNLISLLDTVFPNANRLFSSPIRVDGSEKWVDFVAEFWHCRCVSEKSQKAFTNKYQRWCRKHGYNFSEAKAHTIHAEACGHIDVIPKSETTKLLVEQAVAQLRATSAALAALKHEMQALASMLPEYPVVMDMFGVGPTLGPQLIAEIGDVRRFYSKKALVAYAGLDAPPNDSGDVTGKHKSMSKIGASSLRRTLFLVMSVYLQTAPLDEPVYQFMDRKRAEGKPYRVYTMASANKFLRIYYATVKAYLELLERT

SEQ ID NO: 132124 - protein, 320 aa, unidentified
MSVSSVVAGIDVAKAHVDVDVVGVEFAPKRFDNEADGHSAIASSLKALDVGLVVMEATGGYETSLACALQGAGLAVAVVNPKQPRKFAEAMGYLAKTDRIDARVLAEFGQTLARRADLSRFLRPMDDVDQQWLAALVTRRRQLVAMMTSERQRLQITPKKLHPSIEAIVKAIKAQLDDVEGQMVGHVKEHFGRLDAILQSVTGIGPVASATLIAELPDLGKLNRRQIASLVGVAPFAKDSGTTKGRRRVQGGRFDIRRVLYMATLTAAFRNPVFKAYYQRLTAAGKLPKVALVACMRKLLTTLNAMVKAGSKWNPEHQGA

SEQ ID NO: 132125 - protein, 424 aa, unidentified
MNFKMQDKQNQLIERISDTHLIVGVDIAQQLHVARAVNFRGIVIGDPLTFENNEEGFVKLLSWMQNLQKLKKLDSTIVGMEPTGHYWINLSKWLYNQNIEVVTVNPHLVKRNKENRDNTQSKSDKKDALVIADMVKNGYYSFIRPSSESFEKLRVLMSNRDVVVKRLVMSINQINRWVDVVFPELRQVFKDVSCKGAIATLRLFPTPGEISSMEPLDVMRGWKSLMKRQPGPKKAQLLINQAKSSIGTGQALDAYKFHLEQLLEEYDLAAKQLERVEEQVKDVLNKIPFAKKLLMIKGISEISLAGILGESGDLSGFSHGNSLLRHAGLHLAEASSGKWKGQIVISKRGRSRLRRFLYLATMSLVMNNPEFKAVHSHNVKVKKIKKMKSIMKLIGKLARIFVGIARGNESYCPSKVQVLIPVAA

SEQ ID NO: 132126 - protein, 372 aa, unidentified
MDKYIGFDIDSKKTVVCVVQKDKKDVYDTIPTDVELMKLWLKAQRKPSDKLHLTFEVSGQSGWLYDNLIDCVDTLTVSNPSQMTWIYRTSKKTDRIDARKQAILLQIGEIPKVHMPDKKIRLWRGQIQHRRKLVSSRTQVKNRIRALLKSQGYTKPEHKGSWWKKANRQWMRMLTENIEEYWTDGLIDLMDQLELYEMQVKRLTEKLDQRLKDNTAAGLLMTIPGVGPRTTEAVLAYTDEIERFSRGKKYCAYFGMTPKLDESGSTRRLGHISKQGPSVVRWLIVESAWRAIKKSPSLMEFYEQVRHGQNKRKKIAIVATARKLLSVMRAMLITGEVFNEKLILKQEQITRAQKEQQKRKDKEMRKRMEFYN

SEQ ID NO: 132127 - protein, 405 aa, unidentified
MAAMKKIKVAVVTMSGARSHADAAAGLRPIVPGSNATVTKHGTRRPRVPSPEQPIEPPTLAPERSHSQERVSRMASPNTPELPVAPQSQVFVGIDVAKLTLDMARSDSRQVLHVPNDPAGFQTILAALAPAAPTRIVLEATGGLEQPLLDALLDAGLPVARANPGHVRHFAQAHGVLAKTDAIDAAVLVEFARQVEPRLAVKRSEKQTELDALVTCRRQLKDSKTQHTNRLGSTGSKPARKALGAVISTLEKQIEALDKQIAEIIDSNDDFKHLNTLLQSVPGVGPGLAASLIAELSELGETGRRPLSALVGVAPFNQDSGKFRGKRAIRGGRSSLRSVLYMATIAAIRFNPIIKIFAARLTLKAKPGKVVIVACMRKLLSLLNAMIRDNLPWTKLNVVTHAQTI

SEQ ID NO: 132128 - protein, 350 aa, unidentified
MAIIGCDLHSRYQQIAMLEFSDGEMVTCRLEHENGETQKFYARLPKPSLIGIEATGYTQWFERLLAKLGHELWVGDPAEIRARALRRQKTDTRDAEHLLDLLLTKRFPRLWVPTPEERDLRQLLRHRDQLVRMRTSVKNQLHFLAMSQGVCRGRKLWSPAGRQELVELGLDSWANRRREELLQLLDQLEPKIAELDRAAEAEACRRPGVLQLMTQKGVGPVVGLAFVLTVGPVERFASSRKLVSYLGLNPREDSSGGRQRLGHISKQGNSLLRWLLVEAAQTAARLDPELRRKYLRLKFRRGANVAKVAIARRLAVGLYWRLRQARAEASPVRTPGSPTHSMVGATPSTL

SEQ ID NO: 132129 - protein, 405 aa, unidentified
MFYNSVGIDISKGRSTVAVMRPFGEVVISPFEVRHTDSELSELARRLKSLDGETRVVMEATGNYHAPVAKLLHDAGLYVSVVNAKLVHGYGNNDLRRVKTDRKDAVKLANYGLDRWLTLPRYVPEEDTRLLLKNCCRQYRQYSKVQTVLKNNLISLLDTVFPNANRLFSSPIRGDGSEKWVDFVAEFWHCRCVSEKSKKVFTNKYQRWCRKHGYNFSEAKAHTIHAEANGHIGVMSKSETTKLLMEQAVSQLRATSAALAALKQEMQTLASMLPEYPVVMDMFGVGPTLGPQLIAEIGDVRRFYSKKALVAYAGLDAPPNDSGDVTGRHKSMSKVGASSLRRTLFLVMSVYLQNAPLDEPVYRFMDKKRAEGKPYRVYMKASANKFLRIYYATVKAYLESLEHAA

SEQ ID NO: 132130 - protein, 348 aa, unidentified
MTEQLMAGIDLHSNNLVIGIMDQSGQRLKHQKLDCNLQQVEQFLAPFKAQIKSIAVESTYNWYWLVDGLRARSYPVVLANPAQIDQYSGIKHADDKNDAYFLAELQRLNILPTGHIYDPVLRPVRDLLRRRMSLVHQRTALMLSFKSLYARTTGQAMSLSRLKSMEMAEAKTLYEHPANCLIATVQKEHIEKLDQSVERIEKAVLQSARELPCYERLNTLPGIGRILGLTVTMEVGEIKRFKTPGDFASYCRTVDSKRLSNGKKKGDNNQKCGNKYLAWAFVEAANFAKRYDEHCRKWFDRKAAKTSTVIATKALACKLAKAAWHVMSQGTDYEAKRMFPELALKTTT

SEQ ID NO: 132131 - protein, 348 aa, unidentified
MQQFYIGLDVSLDETSICVVDAKGAIVQEITASSDPESVSAALKMYRDRIARIGLEAGALTSWLAVELRELDYPAIVVEATHMRSAIRAQASKTDRNDARGIAHMMRLGWYKTVHVKSAESQRLRVLLSNRRILKRKLIDIENHIRGTLRAFGRKMGRIGRSSYEARVLELIKDLDPATAEFIVAMLEVRRGIWKGYTALHNLVVRIVKDDPVCRRLMTVPGVGPIAALTFRAGVDDPLRFARSRALGAHFGLTPKVHQSGTIDRDGHITKRGDIDVRTSLCEAAASLLMRVQKWSALKAWGLRIAKRSSMMNAVVAVARKLAVILHRLWLEDRDFQWKAEAAVAEKG

SEQ ID NO: 132132 - protein, 454 aa, unidentified
MPKKSSKKAKSQRSRERNLLAKVHLNAAGIDVGANEHWVAVPEDRDPYPVRRFGVFTSELIVLCNWLKQCQIETVAMESTGVYWIALFQVLERNGFEVRLVNASHVKNVPGRKTDVVDCQWLQQLHTFGLLRGSFRPEAAMCVARSYLRLRDTLTKDSNSLVQRMQKALTEMNVQIHRVISDITGLTGMSILRAIIAGERDCVKLAQLKHPQIKSSTEVLAKALEGDYCQEHLFALQTALELYDSLQLKILGCDKRIEEAFKAFEAKVSLPAPDLSRLRSAEKRREARQRHHLEQMTGADLTTLPGLELLAVQRILSEIGRDMTRWPTEKHFCRWLGVAPDKRVSGGKPLPSKPRKNANRAAAALRLAAQSAMQSKTAIGAFIRRIKSRLGAPTAINAGAHKLARLLYRMLKFGKAYVEVGQQAYEKLFKERMLRNLQRKARDLGFQITPIPSQ

SEQ ID NO: 132133 - protein, 358 aa, unidentified
MNEITRVGVDLAKHVIQVFAVNAAGERVTTRALPRAKFLAWCSQLPAGCLVAMEASSSSHHWARKLAALGLDARIIAAPHVVAYRLQGKSGKNDANDAAAICEAASRPHMHFVPIKSVEQQSMLCIHRLREGIKTDRTACINRIRGLLAEFGLVFAQSPEALRQALPDAMEDASNELGGFARLALQRAYAHWQELDAHLRWCDERIAAHGKASEQVRQAKQLPGVGPVTASAVVAAVGDFKQFKSGAQFGAWLGLTPRQNSSGGKNNLGRITKRGDAYLRTLLIQGAKSIVLTAHRRDDPISRWVQALRERCGWQKAVVALANKNARILWAVFARGRLFDAHHVSTKPPGAIAAVTGA

SEQ ID NO: 132134 - protein, 331 aa, unidentified
MFPVGIDVSKNTLDLCMLYDGIKGRIKTRNIKNNRHSVENILRWLRLQHCSPEDVHVVMEATGVYHERLATELHDAGFRVSLANPHRSREFARGMGIMTKTDKVDAYMLACYAFLKKPHRWEPPAPEIRYLGALLRRRDVLLGDALREENRLEKYLSTDTPADIISSCRRMAQLLREEVSNIERQIKAHIKASPALRRDYTLLTSIKSVGPQLGMHMLVVLRSHNFVSAEQAAAFLGVVPIEKRSGTSVRRRPRMSKIGPPQLRAKLYMSALCGKIYNKRMRNIYDEMCLRGKPKMVAIGALMRKLVHWCYGVLKTGTVFNDEDLKPALST

SEQ ID NO: 132135 - protein, 340 aa, unidentified
MEDNIYDHYIAIDWSIKNMAIARMTKKSNKITAIDVPSDIEDLQAYLKNLRGTQILTIEETTTSQWLYTELKEFVDRILICDPNRNKLLNEGPKTDKIDATKLVQLLKAGLMKEVYHSNDKFLYLRRVVSGYEDLVKAGVRLKNQRYALLRACGKNGYEIIGSTLDSQGEQFVLACLDRQIEAYEQEKEGYEKEFERLARKVPEIKHQKSLPGIGTIHAIKIVSRVVTPYRFPVNGHYLSYSGLIKLEKTSGGRSYGKKNPRYSRQLKSVYKSGVLSAIGGNNPINDYYEYLIQEKGYPEHNARQKTCRRLAILSLGVFKSGKKYQPYRRDHVKGSKEGT

SEQ ID NO: 132136 - protein, 389 aa, unidentified
MIYVGIDVAKDKHDCCILESEADKLYPIFTIPNNKAGFDELYEKMFSVTDDKTKIKVGLEATGHYSLNLLGSLIDKGLPTCVINPLHTNLYRKGQSLRKTKTDKVDARSIAMMLMTNKTLKPYSDTSYHNEELKSLTRYRFDKVQDRAKLKSSVARLVNILFPELEKLVPSLHMASVYALLSKFPGASYITKCHLTHLKNLLETASKGHYGRDMAITLRNTARDSIGSVILAKSMELKHTIHLIEVMTEEIDEIEDSIKSIMDTCNSPIMTIPGISYRMGAMILAEIGDFTRFNYADQILAFAGLSPSTYQSGQLDSSYSHMEKRGSRYLRYALFNAAKFVCKWDENFGAYLSKKIGEGKHYNVAIGHATKKLVRTIYRMELTGEAYRK

SEQ ID NO: 132137 - protein, 339 aa, unidentified
MNNSVIGLDIAKNIFHLFTLLADGKTLKKKLNRNQLLAFFANYPASIIGIEACGSAHHWARELTKLGHEVILLNARFVKNYVVGNKTDFNDAEAIYEAVNRPNKRVVAIKTVAQQDIQLVHNIRKELVDQRTALVNQTRGLLSERGIVINQGITHIREQLPLILEDAENGLTDLSRELFAEQYEKLKVLDAEIKAQDQRINRLCNANDLSKRFLDVPGVGPLTATIVAADIGDGGKGYKSSRDYAASLGVVPKQHSSADKQHYLGISKRGNRYIRTLLIHGARAVLKNCTQKTDKLSLWLQALVARRGFNKAAVALANKNARILWAMASNGKDYQALAA

SEQ ID NO: 132138 - protein, 370 aa, unidentified
MLDTTTFVGLDVHARSIKAVSLDVMTGEVRCATFGYDAGAVAAWVRSVDPRARCVYESGVTGFDLQKRLSGLGVDCVVGAVSKMIKPSADRRRKNDRNDAEFLARMLSVGNVVEVWVPDDECEAARDLTRALEDARDDLSRSKQRLSKFLLRHGLVFDERTPTGRRKGNWTRAHWSWIESIRFAEGADEEVLAHYVEAVRRAAEEKSRLEGLVGAEARKPRWRRRVDSLRCLKGVDTATAADLVFEAGEFSRFRNARSFAAWVGLTPSEHSSGKSDRRGAITKAGNKHLRKTLVEAAWHYLTCSGRPKDLAKGQAPDPAARRHAAKGVRRLVERREALLARGVHGNKANVATARELACWVWAVGLMAEEA

SEQ ID NO: 132139 - protein, 383 aa, unidentified
MRPPLGQVRVRASAAQAERLLTWAAAWPERTWAVEGAGGLGHLLAQELVAAGELVLDVQPKLAARVRLLAAGAVNKNDPNDARSVAVAALRSPSCLPVRPDDHAAVLKIWAKRHRDLSRGRNQVACRLHAALCELVPGGLSKEIYADQAARILAGAEPRGAVQQARAELAAELVADLRRVDALLRETKKKLGVAVRASGTTLTEVFGVGPVIAATVIGDVRDISRFGSRDRFAAYNGTAPIEVSSGNRVIHRLSLRGNRRLNHAIRMAAITQIRYKHSDGRAYYDKKRAEGKTPKEALRALKRQISDTICKRLKADAARATAAGTQGPGGHAGNDSVASAAGSHPECQLFGEATPGPAPSVRPVARTRHAMPARAGEQGVKEG

SEQ ID NO: 132140 - protein, 414 aa, unidentified
MLKIVYRVCCGMDIHKSFVVACIASTNEYGVTTYKRKRFSTFTGDLRRCAVWLAENNCKDVCMESTGKYWIPIYNILEPTCNIVLAHPKYVKAIHGKKTDKRDAKWIADIFKHDLVAGSFIPPADIRQLRDLFRYRWKLTNFTTGEKNRAQNCLTISNFKLDDVFSDVFGKAASAITARILENPTEKITDVSGFRTKGMKATNEQVLAAVDGEMCEEQAEKLRIIRSHMDSLELGKLNLESLILSTAEKYLPQFNLVMSAPGIQSFAAIGIISEIGVDMSVFPTSKHLCSWAGLTPQNNESAGKKKTTRISRAGAYIKPLLVQCALSAIRAKQFPEVRNRYLALKKRRGHKKAIIAVARMLLTAIYNMLKKNEPYNSELYRKGDRPPAHREVSVEEAVFILQRQGYLVSAPPTP

SEQ ID NO: 132141 - protein, 336 aa, unidentified
MNNEMTTIGIDVSKKTLDISIASEGKKKHEKEINEISGFEKIIAFIEQFQLKKDVVIIIEATGGYHYGIVYYLLEQRFTNVKVINPSIAKSFSQMNNIRGTKTDKVDSILLAKLGKIHDLPSYRESKEDIEKKQIVAGLIGLRKSLREHKQRQNHFKHQLKVIQCDAILQSMNAVIVLLEKEIKKLEKLLCKLTEKDTQIISSIPGISEKGAAVISTQIGDISRFKNVKQIIAFSGLDPKIQESGTSLHGNGRISKKGNEILRCSLVQCAWYVYMQAIKRKGGKIFVDFVERLQKKNKHYYQILCAIAHKLLGIIFSLLKKGEKYKENHYFNLISV

SEQ ID NO: 132142 - protein, 331 aa, unidentified
MFPVGIDVSKSTLDLCILYDGIKGRIKTRNIRNDRSAVENIRRWLRLQHCGPEDVHVVMEATGVYHERLATDLHDAGFFVSLANPHRSREFARGMGIMTKTDTVDAYMLACYALLKNPHRWVPPSPEIRHLSSLLRRRDVLLGDALREENRLEKYQSTDTPADIITSCLRMAQLLREEITSIEQKIKTHIRTCPDLERDYLLLTSIKSVGPQLGMHMLVVLRSHNFESAEQVAAFLGVVPVEKRSGTSVRSRPRMSKIGPAHLRAKLYMSALCGKIHNKRMRNIYDELCLRGKPKMVAIGALMRKLVHWCYGVLKTKTAFCDDSFSAALHT

SEQ ID NO: 132143 - protein, 389 aa, unidentified
MIYLGIDVSKFKHNCYLADEDNFDKGCHFEIKNSRDGFDFLLKKLSDFDKDKIRIGLESTGHYHLNLSRFLLDLNFNIHFFNPYQTSLYRKADSFRNTKTDKVDAFFIAKLLRATDSNPTHNELYHNYELKSLTRYKSSLKNDRIKIKQTIIGHLDLIFPELTSICNDVFCKYTLEVLKEYPSADKIAKANLTRLSNIIKKASKGSHSKDKAIEIREYARKSIGINSAAVSFRLVQDIKTLEFLKEQINEVNEQIKPLLDYLDSPIMTIPGVGIEIGPSIISEIGNIERFDNPSKLLAYAGLDPSISQSGTMYSNYSSMSKRGSSYLRDALFIAAFLICQNDETFRIYYEKKKNEGKHHYVTLTHVARKLTRVIFYLLKTNQKFVSQTP

SEQ ID NO: 132144 - protein, 391 aa, unidentified
MGPALVGAIRLGRSCVGGPERFATHHQGADPTGRRVGGRTDRPICFQRLDLAQKQRAAVLHLVKTRTAEGAMSSHCKMESTTPEQANYAGVDVSKDRLDYALPDERAGHVPNTAPGHARLLTLLRAFEHVRVVCESSGGYERALVAALLHAGLEVCLVQPGRVRAFAHAEGLLVKTDPIDAALLRRFGEKMHPRLSVPTDPAAVTLRELLEHRRALSDQLVAVENRLALAGPTLRTLLERQRRFLKKELAAVEALIDAHIEQEPDLRAKAARLQQLQGVGPVLAATLLAYVPELGQIESAQLAALIGVAPFARDSGTLRRARHVRGGRAAVRHVLYMAAVAAARFNPVLRAFYQRLVAAGKPKMVCLVAVMRKMLGVLNRLLAEPNFALVR

SEQ ID NO: 132145 - protein, 442 aa, unidentified
MKPVTETPREPATMPLVNAHAAGLDIGLAEIWVAISADRDPQAVRSFATFTPDLHALADWLSACQVTSVAMESTGVYWIPIYEILEARGFEVYLVNARHLKNVPGRKSDVQDCQWIQRLHSYGLLSASFRPEAEMVALRAYLRLRADLIAHRAAHIQHMQKALQQMNLQLTQVLKDITGVTGQQIIRAIVAGERNPVTLAQLRDKRCKHSSDEIAKALTGHYRAEHLFALKQALNLYDAYTAQIQECDQELERQFSALKPTHDDKLPPLDTSDKRNTHSKNGPTYDARSLLYQWLGVDLVALDGLNAGSVQALLTEVGTRLDAFPTEKHFCSWLHLAPHNDISGGQVLRSRTLKAQNRAGQIFRLAAQSVSRTNTEFGAFFRKVRAKHGAKKAIVATAHKIARTFYVMLKHRTPYRARSAEQYSERERQREIARLTKNCGFA

SEQ ID NO: 132146 - protein, 370 aa, unidentified
MVWTAPYGIDCARMRLSRSHTREPSVSEIIRIGMDTSKYIFVLHGVDAEERTVLRKRLSRKAMLEFFAKLPPTLVAIEACGASHYWARELAKLGHEVRQIAPQLVKPYVARNKNDGRDAEGLCEAVSRPRMRFVPTKTAEQQAAVMLLGVREQLVTRRTQLANAIRGHATEFGLIAAQGLDKLASLLERIAQDEGLPELARGLFTMLGRQYEQVQVELKAIEAKLMAWHRADATCRRLAEIPGIGPVTAAALVMKAPDPHAFRSGRLFAAWLGLTPKDHSTAGKTRLGTITRAGDETLRSLLVVGATSVVKLAKGPKQRGPRWLIELLKRKSPKLAAVALANKMARIAWKLMTTGESYRARIDAAAPTLA

SEQ ID NO: 132147 - protein, 307 aa, unidentified
MFVGIDVSKDRLDVHVLPGAQAFAVARHGEGLSELVDRLRTLPAELVVLEATGGYETVVAAALAAAQLPLVVVNPRQIRDFARATGRLAKTDRLDAQIIARFAEAVRPAPRPVPEPDARAFGEMVARRRQLIEMIGAENNRRRHLTQKRVLDGLERVLTVLQAQLSAIERDIGEAVRGSPAWREKEELLTSAPAVGPNIARTLIAELPELGSLDRRKIASLAGLAPFNRDSGAFKGRRAIAGGRAPVRTALYMAVMVSLRHKLPLSLTYRRLLAAGKASKVAIVACMRKLLTILNAIIRDGRPWQTA

SEQ ID NO: 132148 - protein, 349 aa, unidentified
MRVYVAVDFHAREQTISYCDLADGEIHRTRLRHQQDEVRKFYEQFSGEVIVAFEASGYSAWFEQMLAELGHTVWLGNPAEIRRKAPRRQKNDRRDADLMLDLMLKGDFPRVHGFSDESRTVLRQLRYRHKLVKVRTIAKNSLQAIGINAGLPLKRRLLTEQGIAQLRALQLSTVLAQQRDEWLELMVLMDERIATVEEQLEQRAKDDAEVALLRTHPGIGLLTSLALRYTLLPLSRFRTTRQVTAYVGLDCMEDQSSERRRMGSISKAGSKLLRFLLNEAGQTAARRDPELKKFYRRLLHRRDKPKAKVAVARKLLVRSFIMLRDQIDYAEFVRRGVAVRVARETHSLP

SEQ ID NO: 132149 - protein, 427 aa, unidentified
MIETNKCTDFAALVGLDWGWDSHAIALAPADGPTQTSTLKHSAESLHQWLDQLEKAYEGRAVAVAVEASKGAVVAALLERPWITVYPIHPATSTRQRSAFRPSGAKDDTPDALVLLFILQHHRDRLRSLQPDDEATRTLAGLVEARRKAVDRRSLLANQLKSTLKNYFPQAMDLVGEDLAIPMALDFLDKWPRLTDVQASKDITLRNFYCRHNIRRAELIQSRIDFRRSARLLTRDSAIIEVNVRIVRMLVAELRVLAEHITGFEIAIEEAFAEHPEKSFFRELPGAGPVMAPRLLTAFGTARDLFPDAASMQRYFGVAPVTEKSGGRRWIHWRWNAPKFLRQTFVEWAGQTVIFCPWAKAYYEQQRNKRTGHHAILRALAFKWLRILWRCWQTRQGYDQEKYLLQLEKRRSPIAARARQLAVEMAG

SEQ ID NO: 132150 - protein, 343 aa, unidentified
MSITMIGLDTAKSVFQIHGVNETGKAELKRKVRRSELIAFFEKQESCTVVMEACGAAHHWARILTGLGHTVKLIAPEAVKPFVKKGKKNDAADAAAICEAASRPDAQFVPAKTVAQQGILALHTVRSLLVKQQTMLANAIRGLATEFGHVVPKGLHNLEPLVALVDADEAMPAQARQAIAELHERFGELAKGIQSCEAGIVKHARNDATARRLATIPGIGPITASLTAATVVDISLFKTARQFAAWLGLVPRQHSTAGKTRLGRITKAGNKEIRKLLVLGATSMLGRAEGWHSALGAWLRDILQRRPVRLVTVALANKMARIAWAVMTRNEVYRAQGGVAAKA

SEQ ID NO: 132151 - protein, 402 aa, unidentified
MLPKRSKRGVVETGKPAALSASEKRQASRSAADRSCLGDQNTVTEQDRRTSVGKSPNSRKNRAAAPAVTSSNLQDRVKTISTSSTTVPVFVGVDIAKDKFDVHVRPFNKKWTLTNDTDGFEMLLEHLKQFPALQLLVVEGSGGYERAMVAHLIDANIPVAIVNPQRARDFAKAHGYKAKTDSIDASMLAHFAESVKPAITPKTLENQQELQDLVTRRRQILQIRTIEKNRQHTLKGTIPIQTIKKTIEVFDEQLALIDQAISELFESDDDWKAKSEILTSVPGVGEKTAQQLLAEVSELGTANRAQITALAGLAPYNHDSGKLKGKRCISGGRPNVRTALYMATLSARRCNPIIRKFAKRLEAAGKPYLVIHTACMRKLLVILNALLKNKVAWKHENMLSIV

SEQ ID NO: 132152 - protein, 445 aa, unidentified
MSNGSGLSRGDRTRNARLARLRELVPLGNAILGIDLADDKQAAVVTDHDSRVIARRRVSARAWELGGLLDWAVVAAAGAGFASVTVACEPTGHRWRVLDQLAVERGLALVCVQPLLVYRAREGEDLTWDKSDPKDAVIIARLAAGLRCYEPERADAVWARLRHLGARRSALIADATAEVNQVRDLLECAWPAVLAAAGVPFRSATWRAALAVTLDRCAGDLARVRRLGPARFESAVRRELPRWGARRPCLRIIRAVFAALADPAGVRVHRPGALERARLVLGDWRETRARLADVEARMVAVLDDLGLTGLVTTIAGLTPAGAAAILAETGDPARFTSPRALVKHAGLCPRDNASGGYQGKTSISGRGRPALRVAAWRAVWAALPNNPVMAARFAYLTTRDHNRLARQQARTACAAALLRWIHVVITRRIAWDPAIAGRTPPCRAA

SEQ ID NO: 132153 - protein, 350 aa, unidentified
MIIIGVDFHPEFQQIDLVDKDTGEFQEKRLAHRDEAEKFYRDLAVAGQKVRVGMEASGHARWFERLLAELQFELWVGDAAVIRTKRVRKQKTDRQDARLILQLLLEDRFPQIWVPNWENRDLRQLLWHRHRLVQARTRIMNQLQAVALNEGLRCKKRLWREHGREQLESFQLAPWASRRRRDLLELLDRLNPTIAELSQAIEQEVEKCPEALRLMTYPGVGPLTALAFVLIIGDAERFQCGKQVASYLGLVPLEDSSGNRRRLGHITKQGNSTMRFLLVEAAQVTARSLPQWRSKYVHLMMRRGRKTAKVALARRLAVHLYWMMRQGWDYQQWVKFGSHAGQPGHRDGVQ

SEQ ID NO: 132154 - protein, 347 aa, unidentified
MRFYTGQHQHYCGIDLHAATMYVCILDAAGEIRVHRNVKSSPEALLEIVAPYRDGLVVAAECTFTWYWLADLCAKENIPFVLGHALAMKAIHGGKAKNDKIDSHKIAVLLRGGMLPQAYVYPAAMRATRDLLRRRLHFVRKRGQLLAHIQNTIHQYNLDPFGKRIAYPANREGLLEHFPDPAVRKSVEVDLALLERYDALIADLELTIVRHAKRHDADAFHRLRSVPGIGKILALTLLYEIHDVTRFERVQQFASYARLVKCAHESAGKKLGSGGAKQGNVHLKWAFSEAAVLYLRHGADGKKLLARLERKHGKGKALSILAHKIGRAVYYILARGTVFSPEKFLHA

SEQ ID NO: 132155 - protein, 336 aa, unidentified
MHYVGLDVHWRQSTYCVLDENGKHLTSRTIHGPWEKVLAALSSVKKPFAICFEASTGYGWLYDRLKGLAARVAVAHPGELRMIFRSKQKNDRVDAEKLAKVLFLDEVPPVYVPEVEVRSWRGMIEHRSGLLADRTGAKNELRALLRSHGVVAPKGLWTLRGLAWIRGLEFEQGFDSVRRDILLEKVEAANKMIKRVEVELAKVAAKHPGVQLLMTIPGVGIRTAEAVMAYIDRPERFHSNRSIGEYFGIVPSQDSSGGRERLGHITKQGPATVRRLVVEAAWQSIRHSPAVRARFERIMGGNAGRKKIALVAVAHYLLRVMLAMLKSGEGWRKEAA

SEQ ID NO: 132156 - protein, 312 aa, unidentified
MAMLSFCGIDVSKDRLDVVVLPEGWLFSVSNDTAGWGELVARLRPLTVSAIGLEPSGGYERGIIRALLAAGLSVRRINPNKLRQFARARGVLAKNDRLDARLIAEYIAIIPTRVVQRDAAVERLAEIVTMRRQLCDEHVAAENQAAHLEDAMLRRLSKRRQMRLEADIRLLDKRLAEMVAANVALAQRYELLISMPGVGPVLAFTLIALLPELGKMSRKQIAALVGLAPYDFDSGKLKGHRSIYGGRMPVRNVLYMAALSASRYSPALKTFHKRLAAADKKSKVIIVAVMRKMITTLNAMLRDSAAWQPRSA

SEQ ID NO: 132157 - protein, 355 aa, unidentified
MKRAADDRGMQVFLGVDTHSEAHVGVALDQAGRRLGTLEIPNERAGYARLLEWVLGFGVLVAAGVEGTGSYGAGLSRFLRAQGVRVLEVNRTNRQHRRRYGKHDAGDAEAAARAVMAGTASGEPKGADGAAESLRALRIARRSAVKARTQAANQLHALLSTAPERLRESLRGLATKQLVERTWRLRCDAKPGDPTTATKFALRSVARRHRTLSEEIAKLDAQIERLVEEAAPELVALDGVGPDTAATLLTAAGDNPERLRSEAAFAHLCGAAPVPASSGKVVRYRLNPGGNRDANRALHVVALNRLRRDTRTRAYVARRTAEGKSKKEAMRCLKRYIARETYRAILASAARVPPA

SEQ ID NO: 132158 - protein, 338 aa, unidentified
MKLYGAIDLHSNNAICGAIDSHDHVKLRKKSPCETAAILDAFAPFKQDILGIAVESTFNWYWLVDGLMDAGYRVHLVNTSAVKQYEGLKYTDDNTDTFWLAHLLRLGILPTGYIYPKELRPVRDLLRKRHQLVELRTTNILSIQNLWIRNTGVRLTSNSTKKLTCEQIEKRFNDPNLVLAIDSNRLVMQALDDQIKRVEETVLKQSKLDPRYRYLLSIDGVGKILALTIMLETGDISRFEKVGNFASYCRCVGSTKLSNGKKKGTGNTKNGNKYLSWSFVEAANFAIRFYEPARRYYQRKMAKTKRVVAIKALAHKLARASYYVMRDQVPFDPAKIYR

SEQ ID NO: 132159 - protein, 406 aa, unidentified
MEILHERCCGLDVHKRTVVACVRTPARSETRTFGTTTPDLQLLGVWLRGAGVTHVAMESTGVYWQPVFNVLEERAELAVLVVNAQQVKQMPGRKTDVKDAEWLADLLKHGLVRGSAIPDRARRELRELIRYRVGVLRQRAQVIQRIQKLLEAANLKLSSVVSDVAGVTGRAILDGLATGEANPMALASLARGSLVRKKTALIAALQGRMDAHRRLLLASQLRHLDFFDGELSGINQEIAERLSHHEALLDRLDAIPGVGRRVAEHVLAEIGTDVSGFPTAAHLVSWAGLCPGNKESAGKRLSGRTRHGNGWLRTVMVEAAWGAARTRGSYLAAQYRRVAARRGPKRAIVAVAHSLLTIIYHMLRDGTLYEDLGPNYFDERDRQATLRRSVRRLERLGYRVTVEAAA

SEQ ID NO: 132160 - protein, 430 aa, unidentified
MKSITQNKKIEAITEKTLVIGIDVGSETHYARAFDYRGIEYSKKPFKFSNTEAGFVTFKEWILDLKEKHEKDKVVPGMEPTGHYWFNLGKYLQDNEMKPVLVNPHHVKKSKELDDNNPTKNDRKDPKVIAGLVREGRYMIPYLPDGVYADLRTASNIRFQLQSELTRIQNRISRWFNIYFPEYKTVYGKPDAKSGMLILKEAPLPEDILTLGIDGVDQIWRDAKMRAVGKARAKTLIEAAEHSVGSKEGAVSARMEIRMLLEDYESRNMRLQEVMVLIEELVKQIPMAEKLLEIKGVGIKTVSGFLAEVGDISRFNSPKELQKLAGLALVENSSGKHKGETTISRRGRKRLRYLLFEVAMSLVAKNPEFRELHNYYTTRRLNPLKKMQSLMAIAAKLIRVFFAMLTKGVDYDPKKMVSDIKRPAVYLQAA

SEQ ID NO: 132161 - protein, 414 aa, unidentified
MRVCGLDVHKSFIIAYIFDVFFKKDENGKPVIEAVEAAWGRFERTWGELDRLAEFLDKNETKTVVMESSGPYAYMVYMALENVGFDMWMAHPRDNKTNNQQKTDKLDAERLVKKFVVKEIRAYKLPTDPKIIKLKRLTRFRMKMVSRLVSIKNEIRKLLDEVGIDLKKAFSTLGKGAAAIIDGLVRGLSIDAIISSNPSLAKKRDEIEKILELRNKLDDALTFELKSLLRLLREVKRQIENVENRIESALSDLERDATLLTTIPGIGLQSAAVILAEIGGISRFASPRRLASYAGLVPSVYQSGDKTTYGKLRSDCNRRLRCVLYQIALKAIRYSPRLRNFYERLRRRGKAHKQAVIAVARKIAVAIWHILTKAVAWNEKLKRGYVPKKRRFKRITLKEGLRILRELGYEVSVR

SEQ ID NO: 132162 - protein, 315 aa, unidentified
MAPPLLFVGIDVAKAECVVALRPPGTTWSVPQTEAGWAALATRLQALAPTLVLCEATGGRELPLASVLAAAGLPLAVVNPRQVRDFAKAKGLLAKTDALDAAVLAHFAEAIRPLPRPVPDATTQTLAALVTRRRQLVEMCTAEENRLGSAPPSLRAGLRAHIRWLQRQLASLHTDLDQTIRTHPGWRVQDDLLRSTPGVGPILSSTLLGGLPELGTLSRRAIAALVGVAPWARDSGRHRGARRCWGGRADVRAVLYMATLAAVRCNPVLRAFYQRLLAAGKLKKVALVACMRKLLTILNAMVKTQTPWTPQVREA

SEQ ID NO: 132163 - protein, 516 aa, unidentified
MVATVVRRPRRVFQVHKPNGQLSPRVQAVGPERFGIIAVDPAKKRSRLLLANFYGTVLVPPITVEHERGPIEAALAALRGAIREHNLGDVVVALERTGTYHRPLQRAFQAAGFETRLVHPFTSKQFRLPADPDNKTDDTDLAGIVRAVTQGFGLLEPVWPELYASIQMLRRHRRDLVDKAALLQNQIRETLHSAMPGFEAAFTHLWQSPAPLAIARQFSSAADILQAGADGLRAALKDAGVRPRHDTIAKVLDWARNAPQGHPLNALQRRIFTALDDDRREKTRLINAIEVDLARLGVQTPYAILLAIPGINIVTVADLAGEMGPMEFYLNANHITGRAGLVPCRYQSDQVDRSGPLVKRANRRLRAVLMQTASNLINCNNTYNARAAAWRRQGKDERWIRVKVAKSFSRLLFAMVAGRRIFPHPALQPRHYVLGKLLEFHMEHKVAPEQMRADLEALCDQLPTRARAAEIPPLQERLDELTRRRAHGPRPLAEILPIVLVRLQGVQSTPRSEDPS

SEQ ID NO: 132164 - protein, 387 aa, unidentified
MPNRNDLSRSLTALDQDSTLIAVIEMSQSRWLAGALVPGLKRDPLKQQGPDAEALLRLLHRWRDEAVRSGRVIKRICVAYEAGRDGFWLARWLRARGIEAYVIHASSIPVQREHRRAKTDRLDVGLLKRAFLGWLRGEAKHCSMVAIPTLAQEDAKRPSRERENLVGECSRIVNRMKATLIRLGIRGFNVKLRQAPERLEALRTPEGEGLRPNTLAELRREMARLDFVKAQIKAIELARLERLERAPAEGAHAMVLLLAKVRGIGIETADMLVHEVLGRNLRDRRAVARYGGITGSPDESGTKRREKGLARAGNARVRRAMIQLAWRWLMFQKDSALAQWYGERTADARGATRKTMIVALARKLLIALWRLVTTGQLPAGVVLQPAP

SEQ ID NO: 132165 - protein, 344 aa, unidentified
MSIVGITGGVDTHADVHVAAAVDHNGGLMGMESFAADLAGYETLLSWLTEFGPIVQIGVEGTGSWGVGLARFLADQDLEVIEVDRPNRQTRRKQGKSDPTDAVSAARAALSGEASVTPKARNGAVEQIRVLLVARRSARQQRIQSLNQIRHLVFCAPEEIRVRFKDRPKTGLVKEAAAMRPHEGSDPLEYTTNLVIRNLARRVTRLNDEMAEIDRMLAGLISQTAPSLLDLHGVGIDSAASLLVTAGDNPDRLHSEGSWARLCGVAPLPANSGKVNARYRLNRGGDRQANAALYRIALTRMSNHQQTRTHVARRRSEGLNSGEIMRCLKRYVARQTFKHLPQKV

SEQ ID NO: 132166 - protein, 370 aa, unidentified
MRESNTSTTWVGLDVHQNSITAAILTPGAMRPTVQQLPGDLNAARRLFRRLGSTGPVRACYEASGAGFILQRTLTRDGFHCEVIAPSLMPRKPGDLRKTDRLDAIRLVELYRSGLLTPVAVPGEEQDALRQLVRSRLALISHGTRLKHRIVHVLATHGHRFTGSKSNWTQTHRRWLQDLRVELTGPLRMVLGLHLDHLEYLESQIRTLDAEMERLAQQPGLRERAEALCCFRGIQTLTAMTILTEIGDIRRFAAPRQLMAYCGLIPSERSSGDVQRRGPITKSGNTHLRRVLVESAWHYRHRTGAQLRLTRQRQGQPAAVVAAAVKAQHRLGRRFWHLAQTKHVNKAVTAVARELCGFLWSALMALEAGC

SEQ ID NO: 132167 - protein, 340 aa, unidentified
MPIVMGLDQHRAQIAAEWIDTVTGEVSRARIVPGDRAGVRAFFEPFRESGLEVALEATTGWRFVVEELERVDAEVHLAEAAEASALKGKKRRAKTDFADARHLRELLLIGRIPESWIPPAHILDLRARVRTRHLLSHQRTEWQQRMHAVLYHHGVPQRRDLLNRASRDWLAGVDLPDAAREQIEVALHVINAIEQRLVPFDRELNQIAKSQPGCRTLMHEIYGVGALTSVTILAELGDVRRFQNSRDVVRYGGMDITVYQSDDHRAPGHLSRQGPPALRWALYEAAQRARFPASPDRAYYEQLAARIGGNRACLALARKLLKRCYHLLKGLGDKALAPVA

SEQ ID NO: 132168 - protein, 309 aa, unidentified
MEITVGIDVSKKRLDVYVHPSGTEFSLDNDEAGLAALVERLGAAKLDCIGMEANGGYEKLAAASLAEAGLSVVVINPAQVRHYARALGTRTKTDSIDARMIALFVAATEPELRALPDEQSAVLAELMARRRQLVGMLVAEKNRLGRLPPGKVRLSVVRIVAALNDELARLDADLGGIIEHSPVWRDKQNLLASVPGIGDTIARALLADLPELGQLDRRAIAALAGLAPFTRQSGQWRGKSFIAGGRAAPRSALFIGAMVAARHNGPLNAFYQRLQTAGKPKRVALIATARKLLTILNAIIRDQKPWQSA

SEQ ID NO: 132169 - protein, 343 aa, unidentified
MNVTTFGIDLAKNVFQVHGIDARGKAVIRKQLKRGEMTAYFVNLPPCLIGMEACGSAHYWARELQRLGHTVKLMAPQFVKPYVKSNKNDRADAEAICEAVTRPSMRFVPIKSVEQQAVLALHRARQGFVKERTAQSNQIRGLLAEFGVTVPVGISQIARCIPSILEDADNALPDRFRALLARLYEHFHHLHEQVIALEHEIKTWHAQSAASQRAAQVPGVGPITASALVATVGNAHDFANGRQLAAWLGLVPKQHSTGGKAVLLGISKRGDSYLRTLLIHGARAAILAARRRGLVADAWLTRLLARSHPNVAAVALANKNARILWALLAYERDYQPGYVSPAH

SEQ ID NO: 132170 - protein, 348 aa, unidentified
MTIETLGIDIGKSTFHLVGLDERGHPVLKQKLSREKLMQFIANLPTCLIGMESCPGSQHLARRFLDSGHQVRLMAAQFVKPYVKSNKSDFLDAEAIAEAVTRPTMRFVPVKTPAQQDLQALHRVREGLVGERTLIVNQIRAFLLEYGIPVPQGISKIRQALPGLLEDAGNGLTDRMRALLAELRDLLIDLDVRIQHLSGEIKREADDDPAARRLMTIPGVGPLSATALIAAIGDGKVFHSGRELAAFLGLVPRQHSTGGKPTLLGISKRGNTYVRTLLVHGARAVLIHSERRTDRLGLWAKTLRGRAHSNVVAVALANKIARVAWAVLVKGTTYQASALVEETTAVAA

SEQ ID NO: 132171 - protein, 338 aa, unidentified
MTILTVGIDLAKNVFAVHGVNEVGKAELVRPAVQRDKLHELIASLPPCVVGMEACSGAHHWARLFQASGHTVRLIAPKFVTPYRMTGRRGKNDAADAAAICEAIQRPHMRFVPIKNLEQQSRLMVHRARQGFVEQRTATLNRIRGLLSEFGIVLPLKAATVRRRACECLEDLPGYANTVIGDLLSEVTRLDERVAQYDAHIQGMAKDDERAQQLMQLGGVGPTTATCLLAMIGNGHDFDCGRQFAAWLGLTPGQYSSGGKTRLGRITKAGDAYLRSLLVLGAKALLAAAKKKADPISRWAVALAERRGYWRAVVAIAAKNARMAWAMLRRGEAFALPA

SEQ ID NO: 132172 - protein, 430 aa, unidentified
MTKLSSTPADAVLVAIDMSKHRQEVLIERPEGGRRRRMTVMATKTDYDRLASDLADIGRPIVVGFEATGNYHRTLAHRLLTAGFELRLISSVALARTREALHNGWDKNDSKDAQVILHMLRIGATQRYVDPLAAGINDLQEMSKTHEAISKAKTQTWHRILTHYLPLYFPEIERFAGNSRSDWFLALLERFPTPASMTALGQEAFTSEAWSLVGRKVSKARLINDIYETACASVALPVDEDSVAIVMFRMVIAQARSLIRQRDEIERTAHAMLSENRDYQLLRMIPGIGPINALTILAEAGDLRRFAHHRQFLKFCGLDLATCQSGTFRGRTKLSKYGNARLRRTFWMAAQVAARQRDNSFRDKLGRYMEGHASDPDRRRKAMTALTAKMARVAHAVIKTGTEYRPFLERADTRWKDPSLLCREGATATL

SEQ ID NO: 132173 - protein, 403 aa, unidentified
MFYCGIDIAKYKHEATVIDGAGAALLDSISFANSKEGCEKLLALFQRLEISKDDLLIGMEATGHYWLSVYGYLLEQGFEVKVINPIQSEAFRKMYIRQTKNDRKDSFIIAQIMRFGQFSATNLSEEVIVAMRQLSRYRLALVDACGDCKRRVIALLDQVFPEYDTLFSDTFGVTSKEVLSQYPTPEDLLSVSTQKLSGLLEKASHGRFGKEKAEQLKAAAASSFGVSFAKDAFAFQIRQLIEQLEFLEGQITELEERISSLLKQTGSYITTIPGIGDTLGAIILSEIGDIHRFDAPNKLVAFAGLDVRVTQSGEFTGTRQKISKRGSPHLRRAIWLAASRAAFCDPILSEYYQSLRARGKHHLTAIGAVSRKLCNTIYTILKENRPWQPVPPRDKKVSNHTEQ

SEQ ID NO: 132174 - protein, 339 aa, unidentified
MKYTPVGVDIAKHLIQVHFIDEHTGEVIDKQLRRQDFLMFFCNREPCLIGMEACGGSQHWARELTKLGHKVRLLQARFVKAFVMGNKNDVMDARAIWMAVQQPGKEISVKTEEQQAVLVLHRSRRQLVKFRTAQINALHGTLLEFGETIHKGRAAMEREFPEALERMKERLPPYLITVLENQYNRLNELDSLIEDIEKQLTSVARQNETCKRLLDIPGVGPLIATAAVATMGEASAFKSGREFAAYVGLVPGQTGSGGKIRLLGISKRGDTYLRTLFIHGARAAALLTKEPGPWVTELKKRRPASVAIVAMANKLARTVWAIAAHGRKYDKNHVSIRPN

SEQ ID NO: 132175 - protein, 412 aa, unidentified
MTATNQFAAHVGLDWADKKHDVCVQFKNGERTFHVIEHTPEALDVWLTELHQKVKGRIAIAVELKKGPVVYALQKYPFITVFPVHALSLARYRQAFSPSGAKDDPQDAELALELMLRYPQKIKAIEPDNADIRLLQQLVEQRRQLVEDKRRFVNRIINTLKQYYPQPLEWFSHRGSLLLCELIIRWPSLQQLKRARRDTIRNFLNAKGGRAMALTEQRVASIDNAIPLTTDPSVIEANALMATALATQIKVVSEIIKTYDERIEALFDTLPDAELFKSLPGMGPCMGPRMLAALGDNRDRFNSAEEIQNYAGIAPVTERSGQKSWVHWRWQCAKFVRQTFVEWAAKTVSSSYWARLYYQGLREKGKSHQSAIRALAFKWIRIIYRCWKARTQYDEAKYLLALEARHSPLLKP

SEQ ID NO: 132176 - protein, 415 aa, unidentified
METLYSVSCGLDVHKRSVTACLRQQSGAGGRVVEECRDFLTTTAGLETLGDWLTQHGCTAAAMESTGVYWKPVYNLLEERVPVLLLVNAQHIKQVPGRKTDMTDAQWIARLLQAGLLAASFVPTAEIRDARDLTRYRKVLIRQRADECNRIQKLLETCNIKLASVATDVLGASGRRMLGRIAGGESDPEVLAELALGRLRGKIPQLRQALYGKVRPSQRWLLERQLQQIEHLDQAIAELDAKIDELMRPFSAVMTRLMTVPGISRRVAQVLIAETGPDMKQFGSAERLASWAGMCPGNHQSGGKRYSGKTRHGSPWLKAALMEAAWAAGKKKDSYFRAQYQRLARRRGKRRACVAVGHALLKVAYVLMADPNREYTDLGEAYFDRRDKDRLIRHHIRRLRELGINVPENQPSEAA

SEQ ID NO: 132177 - protein, 435 aa, unidentified
MRRSETALKGEVYMSYCPVAGIDVSKRFSDMCILSPDNKIFAQEKIYHDETSINRANALLQKAERLFFSKPVIVMESTSHYHLILFQFFSEHGYDVIVVNPLQSNSMKDFSIRKRKTDRVDAFKLAMMYRTKTLRPSQIPQTATRALRQLCRHRAELLNDVSSYKNRLTALLDQTFPGYDKVFSDVGGVTSCAVLVRFPTPTILLVEEESELVEVIAAASKSGYSFAKKKAGLLISAAQKAQTLGIHSCADETLIVCTIQMLRTLSESVLQIETAIDDLLAQIKEMRNNVSLLQSIPGIGSHSAALLLGEIGDISLFKKPKQLAAYFGLDPTERQSGSFRGTKNKLSKRGSPYARAALHMGVVNSICKRGKDSAANPVLLSYYEKKCKNKPAKVAQAASMHKLVFIVFAVLRDQMPFELKTPEQHAVEQGFVKAA

SEQ ID NO: 132178 - protein, 444 aa, unidentified
MRAVALDVHRDFCEVAIVAEGRLRSAGRIEARPEALELFGRSLDRRDWVALEVTGNAWEIARILEPHVARVIVVSPSDTGIRQARAKTDRLDARALAKLLWAGELDGVWTPDERVRAMRRRLARRAQLVRARSRAKNEIHAVLMRCLKDRPPASDLFGVKGRRWLAEQQLPITERETVDSAMRQVEFLDAEIAAVERLIAAEALSWPEIKRLMTVPGVNVIVAATFIAAVGDIRRFPDRRKLTAYLGLDPRVRQSGAGPAAHGHISKQGSGSARHALVEACWTTVRQPGPIAGFYQRVKARRGHSIAIVASARKLACLFWCLLTRGEDYAFAQPSLTKKKMRRLELQAGAPPLAGRPRRLVDQRRDARGRTRARPAGPARLRTHHQRPPGEQGGCGRDTGPRISWLVKRASRAADHRPYVCALTRRRPRPHPVSHHRSSPSNST

SEQ ID NO: 132179 - protein, 344 aa, unidentified
MQITTIGIDLAKTVFQLHAVDANGKTVIRKRLRRAEVLSFVSGLEPCLIGMEACATSHYWARELARFGHTVKLMPPAYVKPYVKRGKNDATDAEAICEAVTRPNMRFVPVKSADQQAVLMLHRTRALLIRQQTMLANAFRAHLAELGIVVPQGIRHVRALIERVFGEGADAIDLPALARIALRPLVAQLMELRLQIKTIEKELLAWHRTSQESRRLETIPGVGFITATAITATVTDPSHFRSSREFSAWLGLTPRQNSSGGKDRLGRVSKMGNGYLRSLIVVGATAMIRYAREKGPVSARWINALLEKKPARLVSVAVANKTARIAWALLIKKEDYRVPVPVAA

SEQ ID NO: 132180 - protein, 335 aa, unidentified
MYYAGLDVHKKTISVMIKDQLGNVQKKTKIKSKRDDIIKWAQNAPSPLSVVLEATLFTGWIYDILIHYVEKITVANPIMLSYISKAKNKNDKIDANKLCDLLRVNMIPETYMLPPKVRQVRELLRYRNWLLAQCTRFKNKINGELMMNGHEFNKKKLHNKGYFQELLDSLETDKNVLEILNMSRNQLELLKQLERRVKRLIYTHPEVTERVELLTTIPGVGEITALTWTLEVWEPTRFSNYKKAISYCGLCSGQDQSGEKNKRGPLSKQRNKRLQWVLIEAAKVAVHRIKDPTLVSIYQKTAAKKNNNAATVAVARQLVKWLMAVDKRGTAFVAA

SEQ ID NO: 132181 - protein, 380 aa, unidentified
MPDVSSTAPAQVRILVAIDQHKLSLVAATLPVTGGQPEVMRVENTERAIRRFVQRLGGADGLAVAYEAGPGGYQLHRLLSSMGVACDVIAPSLIPVRAGDRVKTDRRDAKKLVRLYRAGELSFVQPPSPMQEGLRDMMRCRDDLRCARTAARHRVAKALMRHGHIYRQGKAWTLRHRAWIESQRLADPLAHTALEHMLTHLGALDAQIAALDQQLEQIATHQPWADPVAWLCSFRGISTHTALGLLAEIGDFRRFAHPRELMSYLGLTPSEYSSGQQQHRGHITKTGNRHARRLLVEAAWHYCHRPRQSTRAARLQEHVPPEVTTRAWQAQIRLHHRHRVLAEHGKRSTVANVAVARELTGFIWGAMTKAPLREQEAAAA

SEQ ID NO: 132182 - protein, 344 aa, unidentified
MTIVEDRPVITGGVDTHSEVHVAAALDPLGGLLGTAEFPATAAGYGSLLGWLGEFGDVALVGVEGTGSYGAGLARYLARRGVRVVEAGRADRQDRHRKGKSDPLDAVSAARAAQSGRASGEPKGRDGAVEAIRALMVAKRSARNERTQAINQARALILTGPDELRARFARLRAAALAEVVAALRPRPGGAAEYSVRVALRELGRRVEFLDAQIGRLDELIVPLVTARAPGLLSLYGVGPDTAALLLIAAGDHPGRLRSEAAWAHLCAVAPIPASSGKTRRHRLNRGGNREANHALWRIVITRMSAHPATRAYVERRTAEGLPEKDIIRCLKRYVAREVYPYLRG

SEQ ID NO: 132183 - protein, 514 aa, unidentified
MSEGTAQPPFSRLCPRLLRKHSAWLIRHIPLTQKFHPQPLAPAKMADWVHAHYARVRSPYAAQDKPFASGFTNPYRNGGDIMLKINYMSTLFVGIDVSSKSNSVYAMDFEENKYLSTSFGNNQPGADELVNRIAACMQKHKNLDTLLIVLESTSVYSVHISNFLASSEVLMPYKPYVFCVNPKATANYRKSYIGMEKTDPTDAYLIADFARVGRTKKLEPWRGGQFIALKRLTRHRMHLSECITREKTYMVSNLYLKFSELQLLEGDDKPFGNLYGATSSAILTEFLSPQEIIDMPEEDLLAFLAQRSRNRICDLSKTSELLRKAARDSYRLDKCMYEPLNISLASSFNCIQAYQKEIRLIEQAIEKCIKGMNPNALIILQSIPGIGPVWASGILSEIGDISAFHSSDALAKYAGLYWPKGDSGDFISEDNQMSKAGNPYLRYYFGEAANSIRKHIPEYADFYARKYAEVSKHQHKRALALTSRKFVRLVFGLLAKNQLYTGEKLDTEHNTESN

SEQ ID NO: 132184 - protein, 425 aa, unidentified
MKGTQNEKISQIKFETLVVGIDIGKETHYARAFDYRGIELARLLKFSNTDQGFQRLEQWMRDICKQQEKTEIIAGFEPTGHYWFTLGDHLKRQGYKLAIVNPFHVKRTKELDDNSPTKNDRKDPKTIAMLVKDGRYREVYIPDDIYQELREAVSERERLQEQLTSIYNRVVRWLDIRFPEFTTVFKDWRRNAALITLRSFPTPEKVVKMGVDAIIETWRKQMKRASLKRAERLVKAASRSVGRTSGKVASEASLQNLLAEYDLYCQQYDKLEQLMQELLMQVPNADKLLDIKGVGLITAATFVGEVGDISRFQDPRQIQKLAGLNLVENSSGKHKGKTTISRRGRRRLRHSLFFSMIAMLGKNREFRLLHQRNLMRENNPLNKMQSIIALCGKLIRVFFAILTKGVDYSPEKMLGDMEQSSRVAA

SEQ ID NO: 132185 - protein, 348 aa, unidentified
MRFYNRQHQYYCGIDLHVQTMYICILDGTGQVLVHRNIPSTPAAFLEVVRPYRDRDLAVAVECMFTWYWLADLCAAEGIAFVLGHALAMKAIHGGKAKNDKIDSHKIAILLRGGMLPQAYVYPAAMRSTRDLLRRRLHLVRKRGQLLAHIQNTRAQYNLPAFEKRLAYPGNREGVVAHFPDPSVRKSIEVDVTLIDQYDALITDLELTIVREAKRHDADAFHRLRSVPGIGKILALTILYEIHDITRFDRVQQFASYARLVKCRHESAGKVVGGGGAKIGNVHLKWAFSEAAVTFLRHNPQGQRLRARLEKRHGKGKALSILAHKIGRAVYYMLARDTVFSMEKFLAA

SEQ ID NO: 132186 - protein, 345 aa, unidentified
MSMVSGVIGGVDTHADVHVAAAVDRNGGVLGIESFPTDTVGYETLTGWLAGFGPVVKVGVEGTGSYGVGLSRYLHSEGVEVVEVDRQNRQARRRFGKSDPVDAVSAARAALSGTASVTPKGRNGPVEQMRVLLVARRSARRQRNQTLNQLRQVVITGPDEIRARFKDRAKAGLVSEAARMRPRKGNDPVTYTTYVVIRGLARRIKDLNDEMRSIDGALKELIDVTAPSLIECHGIGTDTAATLLVTAGDNPDRLHTERSWAHLCGVTPVSTGSGKTSGRVRLNHGGDRQANAALYRIVLTRMSSDAETRNYVRRRRAEGLSTREIMRCLKRYVARQTFKHLPRVA

SEQ ID NO: 132187 - protein, 396 aa, unidentified
MAKLWIGVDIGKAHHHVAAVDGDGRLVDSRRVANEETALLTVMAEVSTHGRPVCWAVDVTTGLSALLLTLLWRRQVQVRYVSGTVAFHMAAVFAGENKTDARDAVVIAQTIRMRPDIPILEPSDRLLAELTVLTGYRADLVGQRVATLFRVQELLTGISPALERAVDLNRKAPMMVLACWQTPAAIRHAGVDRITALLRRGHVKNAVQVAEAMVTAARQQTVNLPGQRAAAVVVGQMATEILAIEQRIAAVDDLIAEQLDQHPLAPIIGSLPGMGPLLTAELLVHTAGMTEYDSPAKLAAHAGLAPVSRDSGTVSGNHRQPRRYHRRLRHILWMAAFTAARECPTSRAYYERKGAEGKNHRQAILALARRRVDVLWALIRDRKTFTRPAPTVRAAA

SEQ ID NO: 132188 - protein, 348 aa, unidentified
MDHIGIDVHKRESQIYLLAEAGEIIERRIRTEGERFAAVLGDRPRARILIEASTDSEWVARCLEALGHEVIVADPNFAPMYATRTRKVKTDRRDARALAEACLLGAYRPAHRLSDPQRHVRGRLGVRDALVHTRTRYISVIRALLRQQGYRVPSGSAEGFTQRVRAVPLPGRLLSLIAPLLAVMRPLNQQLAYSDATIEHLAVQDPRVPRLRSVPSVGPVTAAAFLAAIDDVGRFHHAHQLEAYLGLVPREYSSGETQRRGPITKAGHSRVRWLLIQAALSILRRRPPAAEALWTWALRIAARRGKHVAVVALARRLAGILYALLRDGTVYAPRGPAALPDSVAALHA

SEQ ID NO: 132189 - protein, 343 aa, unidentified
MEIRSVGIDLGKTTFHLVALGDSGKVLLKKKFTQKQLIAFTANLQTSLIGMEACSGAHFLGRALREQGHDVRLIPAQFVKPFVKSNKNDFLDAEAIAEAVDRKNMRFVPIKTDDQLDLQALHRVRDRLMTRRTSVINQIRAFLLERGVVFAKSPVRLRERMPDVLENADENLTPRMRNLLSWLWEEWKDLEQQLNVLNLEVKQIGSGDAACRRLQQIPGIGPLIATAIVAAIGNGAAFHKGREFAAWMGLVPKQHSTGGKSKLLGISKRGNQYLRKILVHGARSVVLNFKRDHAPIGAWMTALEARAPHNVLVVAVANKLARIAWAVLSSGNDYRANPAQIAA

SEQ ID NO: 132190 - protein, 433 aa, unidentified
MKVLYERVAGIDVHKDMIKVAIRSPGDKPWTRKTEIFEFRTFYGVLQQMARELRKRGVTHVVMEASGVYTEPVYYALAEQDFTEVAVINPAHAKALRGHKTDAKDCARLAELFECGLLRGSYIPVPELKEVRDLTRYRIKTVQARTSEIQRLGKALESAGIKLGSVASSITGTASTAMIEALIDGERRGGVLADLAIGRMRTAGKLADLSMALAGRFTDHHALLCRLHLDRIAVFDDAVDGLDKRIAGKAARWQREQGLLTSVPGFGDVVAQAWLGEIGPAPHRHFASCEKLASWVTLCPGNNISARKRKHGRTGDAGTYIKPMLVQAAWAAIRVRGRLQARYNRLVRRFGGDKNPAAKKKAITAIAHTLLKIAYQVLKSGTPYQDLGTDFYTRRESPGHKQAWLERQLQKLHPGCAVTITISPLEAALTPVA

SEQ ID NO: 132191 - protein, 398 aa, unidentified
MTRKNTLKSLPTDTDFRVVGLDLAKSDVSVAAIPVDDNTPSLVDRMTYADLLDWAGKISPTLFAMEPCNGYSLLCLQLENLGHEIKVISGWTVSMWINTHLSGQKTDLNDAIALARLAVSDAELTPIRHKSITEIRIQTVQAVRQQLMSQRSKSIVSFKALAQQWGIPCAAGHRNLKKLRESIEAKVDLITRPVANAMLFLLDAVKSLDRQIGQLNQTLQELVMSDERGRLLQSVLGVGTQISARVITVVGNIERFNSPRSLVAYVGVAPRNFITGHKNLTKKKHGNCPDLSHKGQGKISRRGDKLLRSLFIQGAACLYMQFCKDQLPECQLKRWILKQLARQKPYGKLIVSLAAKLIRIVWAVLTYREKFNIQKAGMTRSMWSEMALETPLNKEVPA

SEQ ID NO: 132192 - protein, 387 aa, unidentified
MPQPNDLSRSLVALDQDSTVIAVVEMSQSSWLVAGVLPGIERQPRKKLEPSAERLLGLLHRWRDEAVRAGKKITRIALAFEAGRDGFWLARWLSARGVEAHVIHPSSVAVSREHRRAKTDRLDTELLKRGFLGWLRGERGHCSMARVPTIAEEDAKRPNRERECLVGERTRIVNRMKGSLARLGIRNFKPTLRKAAERLATLQTPEGSPLPPNVSAELQRDMARLRFVISQIREIEEARQKRLEQEPETGSHAMVRRLARVVGVGIETADMLVHEVLSRPIRDRKAVARYAGLTGSPDESGAKRREQGLARAGNARVRRGMIQLAWRFLMFQKESALALWYRARTADSRIGTRKTMIVALARKLVIALWRFVTTGELLEGVVLRPAS

SEQ ID NO: 132193 - protein, 356 aa, unidentified
MKYYTSTTEFNCGIDLHARQMYVCVMDRQGKKLVHTNVKDNDFEFFLQRIEPYKHDLTVCCECMFGWYWLADACHQAGLTFVLAHALYLRAIHGGKNKNERIDSEKLTHLLRCNLIPPSYVYPADKRPMRALLRQRVYYVWRRTEILNRIQSHQLAYNRRPVKCTTRHNRDPWEQKILATESHPLRQLALQNDMAMVRHYDAQIWALETKLVNLAKEHSARDFTLLLSVPGIGENLGLTILHEIGHIDRFPTVKDFLSYCRLVKGTVASAGKIKGLRGARLGNPYLRWAFGEAAIIAKRDHAIIGPLSQSLEARMGGNKFKANTVVAIKLARAVYFMLKNKTVFDSDRLVAVLSKN

SEQ ID NO: 132194 - protein, 325 aa, unidentified
MSRWQEKIVEKNADAYVGIDVSKDQLDVFVLPHGCFMQVENNAKEIRKLILELKKYNTKLVAMEATGKYHRLAHTMMHECDLSVTIVNPFRSRQFADSLGKLAKTDTIDAEALARFAERMEPTPTIPADKQTSQLHELHIARRQVCDEVSDLKRQLHSADHPLTKRQIKARISLGERHKKSLETEIQSLINTVPEFKSKFDILTSIPNIGKITAAIMLADLTELGQANAREIAALAGVAPMNWDSGNKNGKRMIRGGRRCVRNALYMCAVSAITRSDPLGRTYRHLIKRGKNPKVALTAVMRKLVIIANTLIAENRKWQPERVMA

SEQ ID NO: 132195 - protein, 429 aa, unidentified
MTQDGVTIWLGIDWADQKHRWALRVEGQSRIQQGELEHTPEAIEQFVSSLALQFPGQRVAVALEQSRGALLFLLGKYAHLILYPLHPNMVNHYRKSVYPSGAKSDPSDAALILDLLYKHPERLRPFQPDTAETRTLQLLVEARREAVDDKTRFLNRLTAQLKMFFPQVLDWFSTIDTAVVGQLLQKWPTLDELKRTSADKIAAFLRKHRLTDSRIAALQQLIQQSVVAIRDTAVLESSVLIVRRLVRQIEILRESIADHDKQIAESAEAHPDYGIFSSLPGAGPAMTPRLIAAFGTQRERYATASAIQCYAGIAAVTESSGKQKWVHWRWACPKFLRQTFHEWAWLSTRKSAWARIFYDQQRGRNKSHHAAVRALSFKWLRIVFRCWKDRVPYEEARYVLALQKRTAPKGVEIRLKTSAGFAQVEGVSC

SEQ ID NO: 132196 - protein, 344 aa, unidentified
MDHFAGLDVSVKETSICIVDEAGKIVREVKVASEPEALLAVLKNPAYHFKRIGLEAGPLSQWLFSALAEAGLPVICVETRHMQAVLKAQINKTDRNDARGIAQMMRAGLYRPVHVKTIRSQKLRMLLTHRKLLQSKAIAIENDLRGTLRNFGLKVGMVGKVKFEARIRELVENLPDLAVLVEPMLIVRRVLREQIVILHRRLLAIVRDDEVCRRLMTTPGVGPVVALTYRATVDVPARFRKSKAVGAVFGLTCAKYQSGEVDRNGRISRCGDEMMRVMLYEAAQSMLRSKKWSWLKAWAMQIARRRGMKKAIVALARRLAVIMHRIWVDGTEFRWTREQAAAAA

SEQ ID NO: 132197 - protein, 411 aa, unidentified
MERVLERCCGLDVGQKTVAACVRIPAPNGGREQIIRTFGTMTSDLLALRDWLLAHGVTQLAMESTGVYWKPIYYALEDEFTVLLVNARHVKNVPGRKTDVSDCAWIAQLLEHGLLRASFVPPAPIRELRDLTRYRKSQIQERAREVNRLHKVLEDAGLKLAVVASDVLGVSGRAMLEALLHGTTDPEILAELSRGRLRKKLPQLRQALNSRFGAHHRFLVGRIIAHLDYLDESIAECSQQVELLLRPFAPVVERLKTIPGVKQRTAEVIIAECGLDMRRFPTPAHLASWAGMCPGNNESAGKRKSGKTRQGSKWLRIALIEAAQAAARTDTALSARHRRIMRHRGYQRAVVAVGHEILVIAYCLIARATTYQELGSTYFDRRYTERTIRRCVRTLEQLGHQVTLQPMAAVA

SEQ ID NO: 132198 - protein, 395 aa, unidentified
MRRDTKEVLAELVGKLKDKLDPKKPAATSVGEKPKRGELRPNLDRLTVGVDLGDRWSNYCILDLEGETLAEGQLRTTQEDLAEFFQALNAARVVFEVGTHSPWVQEVIGGCGHEVLVANPRMMDGSKRRKRKNDRIDANKLARLGRVDPESLHPIQHRSREVRQDLVVLRARDALVAARTELINATRGLVKSMGTRLPNCSSPSFAEKVEGTVPAELRDALLPLVRMAAALSDCIRKYDKKIEKLGQEKYGHTALLRQVKGVGPITALTYVLTLENPDRFVKSRDVGPYLGLVPKQEDSGEMQPQLGISKTGDTMVRKLLVSAGQYILGPFGPDTDLRRYGLRLCERGGKNAKKRAAVAVARKLAVLLHRLWVSGEVYEPLRQGMSATTAPALAA

SEQ ID NO: 132199 - protein, 393 aa, unidentified
MSCTTSRANLVQTAAHPDRATLFVSLELSKSKWLATVLLPGGDKMSKHTVTGGDWDALIALLLRARVQAETRVGKLVEIVAIHEAGLDGFSVHRVLQMNGVESHIVDPASIAVPRRKRRAKSDRIDGETLLRTLLAYKRGEPRVCSMVVPPSPEDEDRRRLSRERQTLVSERVQHTNRIRGMLMAEGIADYAPLRRDRRERLDALRTADGRTLPPHLKARILREIERIEVVVRQIAEVEAERDALLRPETKVGVAGVSETAAALLMKLKGIGAEFATVLWFEAFFRRFDNQRQLSAFAGLAPSPWKSGKIDREQGISQAGNPRLRTTAIELAWMWLRHQPGSALSCWLRERVSAERGRTRRITIVALARKLLVALWRYATQGVIPDGAVMKTA

SEQ ID NO: 132200 - protein, 371 aa, unidentified
MMNVTTFAGLDVHARSIKAVALDVVTGEVRSATFGYDACAVAEWVRSIDPGARCVYESGVTGFDLQKKLSSLGVDCVIGAVSKMIKPAADRRRKNDRNDAEFLARMLSVGNVVEVWVPDDECEAARDLARALDDAREDLRRQKQRLSKFLLRHGLVFDEKTPSGQRKGNWTGAYWTWIKGISFREKADNDTLAFYVDAVRRAEEDKRCLEKLVADEASRPRWKKRVDSLRCLKGIDVMTAADIVFEAGEFARFRNARSFAAWLGLAPSEHSSGEKVAQGGITKAGNKHLRRVMVEAAWHYLNASPHSKGLAPGQAPDPAARRHASKGVRRLVGRRAALLERGVHKNKANVATARELACWCWAVGSMAEGAR

SEQ ID NO: 132201 - protein, 403 aa, unidentified
MSTVYAGLDWASRTHAVCVIDAQAQVHAQFEIGHDAAGLAELARRLRALGVQALAIERPSGLIVDALLEAGLTVVPIHPNVVKATRPRYRSHGGKSDASDAFLLADLLRTDGHRFKPLAAQSDDIRALRALVRGRDDLVATRVQLANQLRSLLQSFWPGAAEIFADIDSPIALAFILRYPTPESACRLGPKRMAAFCAQHAYSGRRTPQELLERLHQAPAVNVGEMETEAKGELALSLARTVQRLVEQIRLITSRIEHHICNSEDGRILMSFPRAGRICAAQILAEVGSVRERFASDEQLAAEAGVAPVTYASGKTKAVTFRWACNHRLRAALTCLADNSRHANAWAASVYAKAKARGCDHPHAVRILARAWLRVIWRAWIDHKPYDPTRHRAAQNLQISRGG

SEQ ID NO: 132202 - protein, 343 aa, unidentified
MQDVATVGLDIAKQVFQAHGADASGGTLFNTKIKRENVLEFFSKLKPCLIGMESCATSYYWARQLLEFGHDVRLIHTSYVKPFVKRGKTDANDAEAINVALTQKTMRFVPVKTLNQQAAITIFRTRSLFVSQRTQLVNALRGHLAEAGLVAAKGIQNYSKLLKLMESAADTVLPTVMKQALTDICDQIHRLNDLVTKLDKEIERRVQHDENACRLLTIPGVGPKTAMCVIATIPDIHRFPSGRHFSSWLGLTPRTHSSGGRSVLRRITKMGNSELRTMLYLGGTVIMMRDKKTPIGRWAARLRAGRPYKVVVIAVANRIARIIWALLTKGGVYDPTYGREASA

SEQ ID NO: 132203 - protein, 341 aa, unidentified
MDKELYFGVDVSKKTLDLAYYDGETIDWKNAHIKVSNDDAGFRKIGSWVAKVGKDFDTFLFCMEYTGLYSQNFRLWLESKEYIYGMVEPRKMHRFEPDLDDDQRSLDRIKTDELDAFRIAIYCEQNHKKILRNPSKLPSPVYFKLKRLLAERKQNTKQSVLYKQQLHDICAYDSDLSVERKKLLLKNMKENQKAIDKEIDCYMNEDVSISKNYDLLTSIPGIGHIIALEAIVLTENFTAISNPRKYACYIGIAPFKKESGTSVRKRTSVSKKGFSEAKADLSIAVLSAITYNPAIRGYWIRKKKEKCGGIVLNAIKFKLVLRMFAVIKRGTPYVETDAYKN

SEQ ID NO: 132204 - protein, 443 aa, unidentified
MNEQRTAHVRGPRGQAFADLVRGLAPEHILCVSLDISKYFHVVMIHNGLGEIVTPPFDIDIYQSGFDQLCQAIQRAKAATQAQVVLVGMEPTSHYFENLARHLLQQAQPVKLINSFAVKQNREQHLMRREKTDQIDVAAIGDLLRRGEGTPYHPAAGIYLQVQQLDRVRLGKVKLAGILKNQIIGHLDRIFPGLLILDEAAQRRSAPLFNTDFWHCQTLQDLIRVCPNPHTLSTLTPKQLVQAFHAQHRRLGLVTAAKIIAQARKTLLPDAELAAIRCELLHHDLALLEAVQTHLTQLESRLAELVAHTPYHIWAKLKGLSVVQVASLAAAIGDPANYTDASRIFRRSGLVSGRNDSGNHQRKGKGNHILKTGDVYLRRALMSAVATLILHQSVLARYSQHLQVTKPAGVARVATARKTIGILWAVLRDQSSNTLITGKGVVM

SEQ ID NO: 132205 - protein, 341 aa, unidentified
MLIIGCDFHPSVQQIAFVDTETGEYGERRLTHGAEAEQFYRELKQKGVIVRVGIEATGQSRWFERLLGELNFEYWIGDAARIRAMQVRKQKNDRKDAEHLLKLMMKDAFPRIWVPGPENRDTRQLVWHRHRMVQMRTRAMNQLQSIALSEGLRRKRGLWTEKGRAQLEALSLPYWTSRRRQELLELLDRFDPSIDELTKAVEQEAERRPEVERLQTHPGVGPITALAYVLVLGTADRFECGKQVGSYLGLIPCEDSSADQWRLGHISKQGNGLVRYLLGQSALAATRKDDDWRRQYAHLTMRRNQAVAKVAMARKLAVRLFWMWKREWDYDEWKKFGSHAG

SEQ ID NO: 132206 - protein, 344 aa, unidentified
MKIKLLGIDLAKNVFQLCALNQANKVLFNRTIRRARFHSSIAKLEPTTIAMEACSSAHYWGRAFEAMGHSVLLVPAQHVTPFVRGGKSDARDALAICEAAQRPGLHPVPIKSIEQQDIQLLHRLRQRQVQHSTALANQIRSLGREYGVIFPAGIKSLIKRLPEALEDGSNELSPVARYALADQLRCLIEVRQAMKAFLLQIEQLAGQHPAYVNLLPLPGIGPMVASAYIAAIGNGNQFKCGRQVSAWLGLVPRQYGTGGQIQLMGISKSGDRYLRTLMIHGARAAITSGMKNNPELAQWVQPIIDRQGFNKAVVAMANKMTRISWVIVTTGEVFDMKQAFKPVA

SEQ ID NO: 132207 - protein, 470 aa, unidentified
MAAVMIGVDPHKTSHTAVTISAAEEPLGELRVRACAAQAERLLAWAAAWPERIWAVEGAGGTGHLLAQQLLAAGERVLDVPPKLGARVRLLAAGDVNKNDPNDARSVAVAALRSPGVRQVQPDDHAAVLKLWSKRYRDLGRTRTQVVCRLHAVLCELVPGGLSRPIYASCAARILGQITPPDAVAAARWELAAAFLEDLRRIDAQLRETRKTLATAVQAAGTCLTGLFGVGPVIAAAVIGDVRDVSRFGGRDHFAAYNGTAPIEVSSGPRKIYRLSRRGNRRLNHAIHMAAITQIHHRHSDGRAYYDKKLAEGKTGKEALRSLKRQVSNAIFACLQADARRAAVRAKGPGGQQGNDSASSAAGLHPRHRLFGQATPGPGHHPTSAAGNQAPGPASARVRAGQSSIAATLPPATPQVQVERPQRSEDERPGGAARRRPHSAARKASGQGSPVKLQRPEGTSQAARKTDGTP

SEQ ID NO: 132208 - protein, 408 aa, unidentified
MRLYVGDDWAEDHHDVEMMNEAGKVLAKKRLPEGAAGMSQLHGLIGRHVPEDADDAEVVIGIETDRGPWVAALIAAGYTVYPANPLLASRYRERHAVSGAKSDGGDAHMLADMVRTDSHQLRPAAGDSPEAEGIKVVARTHKTMIWDRTRTVQRLRHQLREYFPAALEAFDDLDAPDALELLAKAPDPARAAKLTRAQVAAALKRARRHHVQDRTGAILAALRGEHLGQPAALTAAYAATVRSLVAVLVTLNEQVRFLEAQVKEHFGRHPDAEIYQSQPGMAAVLGARVLAEFGDDPYRYESARARKNYAGTSPITRASGKKKVVAARFVRNNRLIDALMAWAFTSMLASPGARAFYDEQRAKGFEHNDALRRLANRLVGILHGCLKTGTVYDEDAAWGHREELKPAA

SEQ ID NO: 132209 - protein, 461 aa, unidentified
MVGKPYMTPIFEFCPVRWDEKVDPDPGSIKLSVINALRGAIRKDGGRPVKKHSSFLEQRESGKAAKSARRDSREVMAELVAQLTKQLDVESVSVPGEDKNVPDCESPNLDRLTVGVDLGDQWSNYCILGLDGETLTEGQFRTRRQEMAEFFQGLARSRVVIEVGTHSAWVREVIAGLGHEVLVANTRRMEGSKRRRRKNDRIDAAKLARLGRVDPKSLYPIQHRSTEVREDLLVLCAREALVESRTKLISAVRGPVKTMGTRVSSSSSDAFSRKAAAEIPQQIRETIQPLLRLIANLSEEIKSYDRRIEQLASEKYMHTKLLRQVTGVGPVTALGYVLTLETPLRFARSRDVGPYLGLVPRQEDSGDSQPQLGISKAGDRMLRKLLVGSAHYILGPFGPDTDLRRFGKKLCERGGKNARKRATVAVARKLAVLLHRLWVSGDVYEPLGHGTLNKTEHAAAA

SEQ ID NO: 132210 - protein, 317 aa, unidentified
MSKTITTVAGIDVAKAKLDVAIDGCKLRWQVTNDPAGFHDLAELLHSRKVCRVGLEATGGYERDVVEYLRKAGFNVVVLQPRQVRAFAVFILCRAKSDRIDAGLIAACVAHHRIEREAPDPRIAAFADQLTFIEQTEEDIVRIKVRLEHTRDPKLCHVMLADIERLKTRRAKMIAKLVTVLRTYQDLARRLDLVGSIDGIGPRTALAFIIRMPELGRLSREQAAALAGLAPFVHDSGDRKGERHIAGGRERLRKSVYSAALPAAFRWNAQLIALYKRLTDAGKPHKLALVACARKLVIFANTVLARGTVWSSRPATS

SEQ ID NO: 132211 - protein, 358 aa, unidentified
MRIIGCDLHTRQQTMAMFDTETKEVIETTLTHEGDTVREFYSALPRPALVGIEATGAMFWFLQLLKELSIPCLVGHPAAIRKAETRKQKHDRRAAALLLRLLLENRFPAIWMPSAEQRDLRHLLLHRHQLVSMRSRVQHALQSLALSHGLRRGARLWSRSGEQELSTLTLAPHTTRRRNTLQRLQQYLDRQVRQLDQRVMQQASQRAASQLLMTHPGVGPVTALATEVFLGEPRRFSSGKALASYVGLIPSEHSSGGQRQRLGALSKQGNPFLRFLWVEAALHAVRKDAALRRFYRRKLLQKGLGKARVAAARKLGIRLWIMLREQIDYPEFCRRGQQRQSGGAYAEMPAKEFGPATP

SEQ ID NO: 132212 - protein, 364 aa, unidentified
MIVIGTDTHKQSHTAAALEEGTGRLLAEQTVRAKRRSFDDLLLWGRYLDSERVWAIEDCRHVSGALERFLLARGERVVRVAPKLTAGARTAARERGKSDAIDAVAIARAAIREGVHTLPVAQLAGPELDIRLLVDHRERLVAQRTRLSNDLRWNLHDIWPELEVPARALSAIGWQERISGRLARTEQTVRVKIARDELRRIRELTRAINELERELAVLVTAVAPQLLAERGCGVLIAAKLVGEIAGVRRFDSDAKLARIAGSAPVPASSGRSERHRLDRGGNRQLNCALHRLAVTKGRLDPDTAAYLARRQAEGKSRREAVRCLKRHLARRVWHLLQPQADHARPTPTAPAVSIHCNLPLNAFS

SEQ ID NO: 132213 - protein, 315 aa, unidentified
MKQEETYVGIDVAKDRVDVAVRPGGDIWSVDYDERGMSELVSCLRTAAPAAVLLEATGGLEVPLVSALAAAALPVVVVNPRQVRDFARATGKLAKTDALDAQVLAHFAEAVRPPVRPLRDADTQELNSLTTRRNQLVTMLVSEKNRLRRASHSVRPSIQSHITWLKQELSDLDNDLREALRRSPVWREKDDLLRSVPGVGEQLSLSLLAYLPELGALNHKRIAALVGVAPFNRDSGPRRGKRSVWGGRSRLRAVLYMGALVASRCNPVLRAFYQRLLAAGKPKKLALTACMRKLLTILNAMAKSGQRWAPRVNST

SEQ ID NO: 132214 - protein, 326 aa, unidentified
MNQVTTIGLDIAKSIFQLHGVDAAGRSVLRRRLSRSRVLEFFGKLPRCLIGLEACASSHYWARELIKLGHEVRLMPAQYVKPYVKRGKNDAADAEAICEAVARPTMRFVDVKTTEQQSIMMLHRVRRILTRQRTQLSNALRSHLAEFGIVSPIGREGLDRLLKIVADTGDGRVPAEARASLDMLAAQLEGVKARILENDRRIIANARATEVGRRLLEVPGIGPVLASAFVASVANPAIFKSGRDLAAWIGLVPRQNSSGGKERLGGITKAGNGYLRQMLVVGAMAVIRYAQRDSTRRPWLVQLMGRRPTKVAAIALANKTPERCGR

SEQ ID NO: 132215 - protein, 410 aa, unidentified
MEVILGCCAGLDIHKDSVEACVRRTSAGGKVEHEVRHWGTTTRELVEMSDWLSSLRVTHVAMESTGVYWKPIFNILEERFEILLANAHHLKNVPGRKTDIKDCQWIAQLLQHGLLRGSFIPPRPQRELRDLTRQRTQLVDEASRISNRIQKVLEDANVKLGSVASNVVGASGRLMLEAMVAGQDDPAQLADLAKRRLRAKIPQLEQALYGKLTEHHRWMLGLLLDQLKATEQFIARLDERIAELTRPQLPVLEKLDAIPGVDRRVAEVLLAEIGPDVTPFPTDAHLASWAGICPGNNESAGKKRSGKTTKGSRWLRQALVQAAWAASHKKDSYFQAHARNLMHRRGRKRGLVAVAHSLLTVIYHILKEGTAYRDLGSQFLDRLRAKHLIRFHVRRLQSLGLQVNLTPEAA

SEQ ID NO: 132216 - protein, 340 aa, unidentified
MPLYGGIDLHANNSVVVLLNAQDQVIYQKRLPNDLPTILEALAPHPGEIEGLVVESTYNWYWLVDGLMEAGYQVHPANPAAIQQYSGLKYSDDHSDARWLAHLLRLGVLPTGYIYPKAERAVRDLLRKRAHLVRQHTSNVLSVQNILVRNTGVRLSIKRIRELTKQEIEGLLPESAQVLAVTSSLAVLDCLSHQIKTLEQTVHKHLKHTPSYEQLLTVDGIGTILAQTITLESGDMGRFPTVGNYASYCRCVNSTKISNGKRKGQGNVKNGNPYLGWAYMEAAQFALRFNARAQRFYQRKLAKSNNNMVLARKTVAHKLARACYYIMRDLVPFDAMKAFG

SEQ ID NO: 132217 - protein, 340 aa, unidentified
MSEVTTIGLDLAKHVFQVHGVDANGAVVLRKQLRRGQVVAFFAALPRCLIGLEACATAHYWARELQAVGHEVRLMPAQYVKAYVKRNKNDAADAEAICEAVGRPSMRFVAIKTAEQQAALLLHRGRERLVRQRTTLVNALRAHLAEFGVIAPHGLRHVARLVAIVRDDSDTRLPALARQVLEVLAAQLEQLTTAVTAIEKELMAWHRNNPVSHRLASIPGIGPIIATALAATVVEPIGFKSGREFAAWLGLVPRQHSTGGKARLGGISKRGNRYLRRLLINGASANLLRSRATNANPWVIGLRRRRPSLVVAVALANKTARIAWAVMRRAQSYRHRSAAA

SEQ ID NO: 132218 - protein, 401 aa, unidentified
MVSDFRKGRYNLMKIFVGIDIAKLNHFAAAISSDGEILIEPFKFTNDADGFQLLVSKLESFDKNSIIIGLESTAHYGDNLVRYLVAEFYQVCVLNPIKTCQMRKNNVRKTKTDKVDTFVIAKTLMMQDDLRFITFFDLDMMDLKALGRFRQKTIKQRTRLKIQLTTYVDQVFPEIQYFFKSGLHQHAVYALLKEAPSPKEIASMHMTHLANLLKVNSHGHFTKEQAKELRVLAQKSVGANDSAISIQITQTIQQIELLDSQLEKIEAEMTDIMRFNDSVIMTIPGIGYINGGMILGEIGDIHRFSNPNKLLAFAGLDPSVYQSGNFQAKTTRMSKRGSRVLRYALVNAAWNVVRNNATFEAYYNAKRSEGRSHYNALGHCAGKLVRVIWKMLTDEVEFNLE

SEQ ID NO: 132219 - protein, 426 aa, unidentified
MVRAVGLDIHRDFCEVAIMEAGELRSVGRVDTSPAALELFAGSLAPDDWVAFEVRGNAAEIARIIEPHVARVVVVSPSDTGIRQARAKTDRLDARTLARLLAAGSLDAVWIADERTRVMRRRLARRAQLMGARSRCKNEIHAVLIRRLIPRSQVSDLFGQAGRRWLGELELPLEERESVDAGMRQIEFLERELADVDRLVALDALGWAQAKRLMSVPGVNVICAASFLAAVGDISRFKDPRNLVGYLGLDPKVRQSGPGSGTSGHISKQGSASARWALVEASWSAVRQPGPMRAFYQRVRARRGHQIAIVAAARKLACLFWFLLTREQDYAYAQPSLTKKKLRRLEIAAGAPKYQGRSNIWSTNNAMREAERALAEQAEHAYKNTVRDWQAAQAKKPAVEVGASATKGRASNKPSKGKAARQTTSP

SEQ ID NO: 132220 - protein, 333 aa, unidentified
MVNNAQGRARLFEEVKRRAAAANGKVWMAYEASACGFVLADEAQNRQMLCAVLAPTKMEKSVEQRKHKNDDRDADGVVETLRGHVLAGNRLPGVWIPDKQVRDDRELIRTRLELAEKQAKLKSQVQMLLKRYGLEKPSGLGAGWTVGYRQWLQALAETSSPPLGMGGRQALGSLLRQLQLIEEEIQRMDQCVKQLANEARHKPFMDELMKEPGVGRLTALVYRTEIGYAGRFRRGRQVGKFVGLTPSSYESGQQNDRKGHISHQGPPRIRKMLCQSSWVGIGSGEGGDRRLYDRIVSRNPKRKKIAIVAVMRRLAVRLWHRMRQVEMKLAATA

SEQ ID NO: 132221 - protein, 461 aa, unidentified
MAPARKTPKQLQLDGLPTIHPNAAGMDIGAELIVVAVPPDRDGEPVRAFRTFTPDLQELVAWLLACGIDTLAMESTGTYWVAIYELLEAAGIVPYLVNARHVRMVPGRKTDWNDAQWLQKLHALGLLHASFRPDAEIVALRTLVCYRATVVAHRSPHVNQMQSALKVMNIQLGEVLTDITGQTGMAIMRAIVKGERDPITLAQFRAPSCKSSVETIAKALTGTWKDEQIFVLEQTLALYDAYTAQLEVCDRRIEQFLQQMESRGEPNAPLPDLPPSKHDKKAKNEANFNTRAQYARIVGVDLVAVLGLSSGHVQTIITEVGTDMSHFPTSKHFCAWLGLAPRNAISGGRVLHSHVAKVANRATLAFRMAAYAVSRSETAVGAYYRSMRARKGPQQAIVATAHKIARIVYHLLKTGEAYVEQSAGEFEEQRRERELRQLTRRASKLGLTLTPTTPATALPAA

SEQ ID NO: 132222 - protein, 338 aa, unidentified
MHITTIGLDLAKNVFQVHGVTEDGTIAFNRPLRRNRIVPFFENLPRCLVGMEACASSHYWARELTKLGHDVRLMAPSYVKPYVKRGKSDAADAEAICEAVTRPTMRTVPIKSEDQQALLSQHRARELLIRQRTQLSNSIRGLIGEFGHVLRKGLKYVRDFVEDMKVEKGPNLPDIARNVITSLCEQLASLDHRIDLLDREIFAASGRDERAKLLQTIPGVGPVTAAAIIATVGDAGAFRSGRDFAAWIGLTPMNKSSGGKERLGRITRMGDQYLRKLLVIGMTSRVRSARSHPDRVDPWLAGLLDRKPVRLATVAMANKTARIIWAVLTRGTPYQRAA

SEQ ID NO: 132223 - protein, 437 aa, unidentified
MLLCLNPNAAGVDIGATEIYIAVPEDRDPQPVRCFPTFTEDLHAAADWLKTCHIETVAMESTGVYWIPFFQILEARGFKVFLVNAHHVKNVPGRKSDVSDCQWLQYLHAVGLLRGSFRPEQAVCTVRSILRHRDSLVQMASSHVPHMQKALDQMNLQLHHVISDITGMSGVAILEAILAGERNPHTLAALRDRRIKASADTIAKSLVGDYRREHLFTLRQSLAAFRHYQELIAACDREIAQSLEEFESKLDPPPGSPSPSKDGSKAKASEPGFDLQTHLHRIFGVDLTQVPGIHVLTTQTLLAEIGPDLSSFDDGAAFASWLGLCPDNRVSGGKVLSVKTRKVKNRAATALRMAAQSLHHSQSFLGHFYRRMRAKLGAPKAITATAHKLARIIYHMVTTRHAYDETICAQNEVQNRQRMEARLRKQARELGLQVVAI

SEQ ID NO: 132224 - protein, 424 aa, unidentified
MNLTQNDRLKQVTFDTLIVGVDVGSKTHFCRAFDWRGFELSCRVFKFSNTGLGFLTFLRWTEELMNKTEMKKVIVGCEPTGCYWLTFQKFLKEHGVQLVTVNPFTVNRSMELDDNSPEKSDLKDPKTIAHLVKDGRFSTSYLPSSVYAEIREASVCRDQIMKQHVRLSNQIQGWLQKFFPEYFECYADWDSTSGLLLLKEAPLPQDILKIGAGGINQIWRDAKVRAAGIKRAQTLIEAAQNSVGLEAGEAARLEIWVLVNDYILKAEQLKRLDEYLEEKVKEVPNVEKLLAIKGVGMSTVIGFIAEVGDIGRFTDPKQIQKLAGLEIVKKSSGKKKGQPRISKRGRRKLRRTMYESARALMNWNPAFQDVFLYYRNRQKNPLGGMQAKIAVACKAIRVFYVVLQTGCDFDEEKFRKDINRPEAA

SEQ ID NO: 132225 - protein, 340 aa, unidentified
MAITVGFDVHRGQITFDALDGATGEVTTGRIAPADRGGLRRFLERWDGQQVEAAVEATTGWRFVVEELQRAGAAAFLAEPAETSARRGPKRRAKTDKRDACHLRDLLLERRLPRAWIPPEHILELRALVRLRKTLVDQRTEWLQRIHAVLFHHGVKLAISRLDGRDARDQLTALDVVPSACQQIAVALAIVEHVNAQLAPLDRELKAFARRQPGCRALMRHYGIGPQVACAILAELGDARRFSSSRQAVRFAGLDVTVHESDDKRRPGHLSRQGPPVLRWAAFEAAESACKPSSPDHAYYLQLKARVGQNRAVLSVARKLLRRAHHTLRELGDDALLPAA

SEQ ID NO: 132226 - protein, 311 aa, unidentified
MSTSTKIHVGIDVCKLQLDVAWPGQRRRLTNNPQGHQALLAALPAGTHVYLEATGGYERALVDTLQRAGRAVSVLNPRQVRAFARAQGQLAKTDRLDASVLVDFGRAMDTPATAPVDPSIRQLAELCAVRDQFVHLRAQLLQSAEHWSLPQARRCLQTQLRSLTTQIEKLEALLAATIAREPALAARNATLQSQCGIGPTTAAVLLALLPELGHASRRQIGALAGLAPYNDDSGPRSGHRHIRGGRSRVRRALYLASLSVVRSNSPLATFYQRLRQAGKPAKVALLATARKLLCFLNHQLKSSPSSIPLSS

SEQ ID NO: 132227 - protein, 430 aa, unidentified
MKSNTQNAKIEAITEKTLVLGIDVGSEMHYARAFDYRGIEYSKKPFKFSNTEAGFATFKEWILDLKERHEKDKVVPGMEPTGHYWFNLGKFLQDNEMKPVLVNPHHVKKSKELDDNNPTKNDRKDPKVIAGLVREGRYMIPYLPEGVYADLRTASNIRFQLQAELTRIQNRISRWFNIYFPEYKTVYGKPDAKSGMLILKAAPLPEDILTLGIDGVNQIWRDAKLRAVGKARAKTLIEAAEHSVGSKEGAVSARMEIRMLLEDYESRNIRLQEVMALIEGLVKQIPMAEKLLEIKGVGIRTVSGFLAEVGDISRFNNPKELQKLAGLALVENSSGKHKGETTISRRGRKRLRYLLFEVAMSLVAKNPEFRELHNYYTARRLNPLKKMQSLMAIAAKLIRVFYAMLTKGVDYDPKKMVSDIKRPAVYLQAA

SEQ ID NO: 132228 - protein, 386 aa, unidentified
MPQLNDLSRSLVILEQDATLIAVIEMGQSSWLVAGIVPGVERSPLKKLAVDESALLKLLNRWREEAEKAGHRIERIAIAFEAGRDGFWLARWLRARGIEAHVIHASSVAVSREHRRTKTDRLDTELLKRAFLGWLRGERDHCKMVAIPTLAQEDAKRPNRERESLVGEQSRIVNRMKAALARLGIRGFNPKLKKAAERLDGLRTPEGEPIPPNTLAELKHDMERRRLVRSQIRDIEGTRLERLKQAPGDGPHVMVRLLARVIGVGVETADMLVQEVLSRNLRDRRAVARYGGLTGSPDESGKKRREKGLARSGNARVRRGMIQLAWRFLMFQKDSALAHWFYARTKNAPQTRKTMIVALARKLLIALWRLAREGAIPEGIVLRPAL

SEQ ID NO: 132229 - protein, 372 aa, unidentified
MKAKTKNTNQPFATFIGIDLGDKKHHVCVTDTHGTIVKECIIPNDRAALKKLSEDYPHAAVAIEVGTHSPWISRFLIANAMNVTVANARKLRAIYQNDRKCDQLDARMLAKLLRADRDLLSPIQHGSEQAQKDLIAIKIRDSLVRQRVNIIATIRGVLKSIGLRIPTSSSEAFHHRAETFLTAHPELADAITPALQSIKSLTEQIKHYEKTIQQSARQHHPQAIALQKIPSIGPITSMVFVLSIEDPSRFKDPRDIGAYLGLVPRRDQSGGSDKQLPISKAGNKYLRALLTQCAQYLLGRYGPDCAIRQYGLKLAARGGKAAKKKAITAVARKLAVMMIALWQKGGEYQPFPAATDRPLPTPNKSKTKKKAA

SEQ ID NO: 132230 - protein, 451 aa, unidentified
MEDEVIKMEVVNPQAAGIDVGSRSHWVAVGQREEDVREYGVFNDDLFSLCDWLKECKVRTIAMESTGTYWQNLYAVLISRGFHVILCNGKFTKNIKGKKTDIKDCQWIQRLHSLGLLSSSFLPDGKTEELRTYCRHRQNLLHESASTSKKMQKYLRLLNLRLDVVVKDTCGLTGLRIIRAICNGEKNPEKLADLRHHNCHTSKADIARALQSNGREDYLFALQQELDMYEYLHKKIEECDLKIEQKLNSIINDDENKKQHHIEPKPHKKVNKNTPKNIDLNLKSYQMFEGTDLLAIEGMSYSTVLALMSEIGVEGIRKFPTAKHFASWLRLAPNNKVSGGKILSSKVPKGSNNLKISLRNAANAIGNLKDSTPLRDFFMRISFRKGRVSAISATARKLAVIIWNMVVKGVPYNNPEEYLFRDQKKKLGLLKRIQKQITKFELESTDFQFHN

SEQ ID NO: 132231 - protein, 372 aa, unidentified
MNYNTVYVGMDVHKESFSLCAYTIEAEKASHYQRTEADYKKVLNYLEFLRTIYGDDANFICGYEAGCFGYTLYHQLTANNVKCIILAPTTMLEQRSKKRIKTDRRDAEIIAKCLAQHNYSPVHIPTAKDEETKEFLRMRDDHKLALKKVKQQILAFCLRHNYRYDGKSHWTAAHLKWLKALTPEALYKEILDEYLLTYQTLSDKIERLDKRIEELATQDEYKEAVKKLCCFIGVKTHTALSVLVEVGDFKRFASAQHFASYLGLVPGEDSSGDDQNRLGITKAGNRHVRLLLTEASQCYARGQVGFKSKELKARQSGNTPAVIAYADKANERLRRRYYKMVLNKCKKHNVAKTAIARELACFMWGMMTDNLA

SEQ ID NO: 132232 - protein, 364 aa, unidentified
MLIIGCDYHPGFQQIAFVNTDTGELSERRLAHREQAEQFYRELKQQNASARVGMESSGHSRWFERLLHELGFELWIGDPAEIRTKRVRKQKTDRQDAQLLLRLLLENRFPRIWVPDVANRDLRQLLWHRHRMVQMRTRVMNQLHVVPLNEGLQRKKALWRPAGRKELEAIALAPWASRRRQDLLDLLDQLTPKIEELTHALEEEVEKRPVTRLLMTHPGVGPLTALAYELVIGTPERFHCGKQLASYVGLVPEEKSSGDRRRLGHISKQGNVLLRFLLVEAAQVTVRSQQEWRSKFFHLAMRRGRKIAKVAMARKLAVHLYWMWRQGCDYGQTQKLGSHAGEPGNRDGVQSITDVMIGHPAPSK

SEQ ID NO: 132233 - protein, 478 aa, unidentified
MDDRRLVGIDLGITSAHTVRVLSGEGATVCRRKAAPTLHGLAEVERAALAGAAPATRLEVVIEPTGPAWLPIAVFFCSRGHTVYRVSSAKAHDLRRFLHRHAKSNGIDADTLARLPLVDPAGLHPLELPDAERAALDRRVRACDRLTQQAATHKRRIKDLVRQLLPCSPLVGELGMADLAVLERYADPHALLAAGRARLARVIVKASGGHLGAARAEQWLQAANAALDLYGDHPAVAFQDLAAEVATEVRLLRVTQAELAAHATQREACYHWVDPLALARSLPGLAEIGGPALTATMGKASRFPAASKFRAFTGLAPRASETGQTDRKPQPISKAGNRLLRTTLVRAADNARHIDPQLARIYYVQMVQRGKDHLGAVCVVAAHLAERAWTVMDRGMPYVVCDTDGVPVTPEQAKAIIAEHWTVPEEVRRRRRSRKGKAPQQVLQGHVTGAQGATRRPSPSPASLGRRAGRVKQARART

SEQ ID NO: 132234 - protein, 373 aa, unidentified
MPRYSTAFGMDVHLRSTTVCALDAETGEAVTRRFRGNPWGEVAEWMSGFPGPSLAAYESGYLGFAPQRELSGLGVDCVVAAVSKVPRSAADCSSKNDRNDAARMAKAILSHDVTPVWVPSPEIEGLRDLAAAHDAATARLATAKQRLLAFLARRGYAYGGTTPAGNPRKYWTYGFLRWLDGIHPADDGGIRALAALRNEVEAAAETRDDLLAEYRAAVAAGPLSAEVEALQSIKGCGFALAAAFASEVGDFSRFRSGRQVTAYFGLAPRQRSSADSVRLGGISGAGNALVRKLAVEGSWCYAQAGHQPKLMPKGSGVPLEIRMHGRKGSERLLRRREEMLERGMPQAKANAATAAELVRWLWALGTMCREAGE

SEQ ID NO: 132235 - protein, 582 aa, unidentified
MNPNNVAPSLTPIGVGFDTARYGHHVTFLREDLQPATTSCEFTESREGYQLLEQKFQQLAQRIPNVLFRIRIDAAGQYASNLETFLRQLPFPKTISVGEPARNQKYRQAIFPKCKSDPAESHCAGRFALREDPKPAREVAAELIPLREIASRLEAQTRQSTRLANQLHNLMARVFPELATIASDFQAHWVLRLLDQYPTPLQLARARQSSLTAIPHLTTDKAQKLQTAARTSVGSFRGTVAEELVRLLVGQLRRSGQEQDHLRNLLAKVHQALPHSNQIDTIPGIGAGTAAVLTAKMISIDRFETPEHLVGYFGIFPEKDASGLDKDGTPKPGCHSHMSKKGSDLVRKYLWNAAKVACQHNPAVRALYRRLRSRGVRGDVALGHCMRKLLHLVWAVWKSGKAFDPNHYPWEPAAAPPGNTEAAGHNQGTSPERKVVTAADSTVSSEAPAVNEPSPAAPENSLDLAAADNGSVDFALLREQVTMEQVLNHLNWLACLRGSGPQRRGPCPVHGTPADRVRSFSVHLHKNAFQCFHPPCASHGNVLDLWAAVHRLPLLAAAHHLAATFNLKTTRGTEKRNPLSNP

SEQ ID NO: 132236 - protein, 434 aa, unidentified
MSSLEKIIKNCAGIDIGSEKVFVAIENQEVRSFRTFTRSYKELGVYMQEHGITHVAMEATGIYWITLYDILESMSFDVCLVNPADSKNLPGRKTDVQDCQWIQQLFSYGLLRKSFVPQDIVRKLRVYTRMREDKLQMASSHILHMQKALVEMNIRLPEVLSQTHGASGIAMIQAILKGERDAQVLLSLCTSDLIKRKGADILLALEGNYKEEYIFELQQAYDGYMFYLNQVRTCDKEIERILVEFKDKSNNGYKDDNKIKPIRHNKPDIDKLHDLLLGIHGANPTVLPGLTDYSLMRLTAELGNDIKQWPTVKCFVSWLGLAPGKNQSGKMNKRSKKKAAPRSGQIFKQAAQSLLVSKQPGLGVFARKLKARRGAAIAIKATARKIAELYYKTFSNGMQYVEQGVEMYLQKQKEQQIRFLNKKATELNMQLVSI

SEQ ID NO: 132237 - protein, 348 aa, unidentified
MTIVDIAPKITVGIDTHRDTHVAAVLDHQGRLLATESFPTTSAGHRQLERWANSLGTIDIVGVEGTGAWGAGIARHLTGHGYRVVEVDRPNRQTRRKHGKSDTVDAEAAARSVQAGTATGTPKAGTGSIEAIRVLRVARTSAVKARTQAMNQLHSLVSTAPEALRDELRRLSRTDLVERCARFRRLRDLPDPTQATKMALRAIARRYQHLDAEITELDAVLEDLVTDTAPGLIARYGVGPDTAGQLLVTAGDNPDRLHSEAAFAHLCGVAPIPASSGRTDRHRLHRGGDRAANAALYRIAICRLRWDPATRAYAQRRTAQGLTKLEIIRCIKRYIAREIYTELRTLTT

SEQ ID NO: 132238 - protein, 353 aa, unidentified
MKTYYVGMDVHRASIVIVVLNGAGKIVMQSVIETGAERVRGYLKQLRGKVYVTFEEGTQANWLHEVVRPLVTEVVVCDPRHNKLMQSGNKSDRVDAQKLAELLRLGSLKAVYHGDNGVRTLKELVRTYDCLVADTTRVMNRLKAIYRGRAIGSEGHDIYRQDRRQQWLEKLTERGAKERASFLYRQLAALKPLRHEAKRIMVKEARRQPAYPWLMSVPQFGSVSVAQLLAIVSTPHRFRSKRQFWTYIGLAVVTRSTADHEVVNGVLRRSQRPVSTRGLNRNHNHLLKRVFKNAAKGACHSGPFKAAYELRVTQGMVPSLARLTVARQLAAITLAVWKHGEQFNPERMKQQAA

SEQ ID NO: 132239 - protein, 364 aa, unidentified
MTKQLFAGIDLHSNNLVIGLVNQDGQRVRHQRLACDLKLVTDFLQPYRKRLKSLAVESTYNWYWLVDGLRADGYPVQLANPAKMEQYDGLKYTADTHDAYFLADLQRLNILPTGYIYDPQLRPVRDLLRRRLGLVRQRTALMLSFQSLYTRTTGRELNLNRLKSMPAVAAQLLYEHPANRLIAQIQKEHMEQLDQSIGTIEQTVQASARPLPCYGPLTTLPGVGRILGMTITMEMGESSRFKTAGDFASYCRTVDAQRLSNDKKKGDNNQKCGNKYLAWAFVEAANFAKRYDAGCRQWFDRKAARRGKVIATKALACKLAKAAWHVIHQHTSYDPKRMLPGMAPASAPAILESRRQPVKGLEKP

SEQ ID NO: 132240 - protein, 402 aa, unidentified
MTYDYVIGMDACKYFHHACVLDIDGTQVLSKRINQNEQSLRALFSAFSAYDHKVLVVVDQPNNIGRLTVAVAQDIGIDVRYLPSLAMRQLSRIHAGNAKTDIRDAYIIAHAAKNLPESLRSVDRVEEAFLQLKVLNGIDEDLARSYTRLINQIRSALVGCYPQFEQALRGQIIHRKWVLHLLARYGGPTKIKRLGKAKAAAFARRYKARNPEPVLDAIFAAISEQTVTIAGAHYAEMGVAMSAKDALLKLEHRQQIEKEVIKLINDIPHTQFLLSMPGIGPKTAAQILMTAGDMSDFPSAGHLASYAGLSPRTNQSGTSIMSNSLNRAGNKKLKNALWQSSFASIRFHERSRQFYERKRREGKRHNAAVVALARRRLNVLYAMMRNHEHYHDPAPSQEDLAA

SEQ ID NO: 132241 - protein, 466 aa, unidentified
MKPFYMGIDVSKGYADFMIINAKKKPVISSFQLDDTFEGHQTLHSIIGRFLSKHPDSMLFCGMESTGGYENNWYNSMVAFQSSLDIQTARLNPLGVKHNSKADLKKNTTDKISAQNIAEYLVAHPEKVIYQQQDRLAGLRKQWGFIQTLTKQCTQFLNQFKGLLYTSNPELLSYCQSETPAWILKLVIKYPSAARLKRANVKSVAKIPFVSKEKAQQLVSAAKRSVASATDTATQQLIVATAQQIIHLNQTINVQTQRMIKACKLPEVELLKTFAGISDKSAIGLIIEIQTVERFAAVKKLASFFGVHPVYKISGDGVGGVKMSKQGRKRPRHILYMIALAAIKCNPLIKQIYEEHQKNGKHNMAAMGVCMHKILRIIYGMLKHQKPFDPQIDMANRQRSLQTRKAGPGKNASRRFQAYDIGAPISRRQKKKRLEQDGSHSVNGTKSGITAPVPVADIIANILPEL

SEQ ID NO: 132242 - protein, 358 aa, unidentified
MAGKVTETAVVGGVDTHKDLHVAAVVDQNNKVLGTQFFSTIRQGYRQMLAWMTSFGALKRIGVECTGTYGSGLLRYLQNAGLDVLEVTAPDRMERRKRGKSDTIDAECAAHAAFSRIRTVTPKTRNGMIESLRVLKTCRKTAISARRVALQIIHSNIISAPDELREQLRNMTRMQLIRTLGSWRPDASEYRNVTNVYRISLKSLARRYLELHDEIADLDVMIAAIVDELAPELIKRNAIGYESASQLLITAGDNPQRLRSESGFAALCGVSPVPVSSGKTNRYRLNRGGDRAANSALHIIAIGRLRTDDKTKEYVARRVAEGHTKMEAIRCLKRYISREVYTLLRNQNRRLNSIPITA

SEQ ID NO: 132243 - protein, 366 aa, unidentified
MKITTIGIDLAKSVFAVSGADARGKVVVRRQLRRAQVLEFMRQLAPCVVGMESCGGANYWARALGKLGHEVRLMSPALVRPYRTSSNKHDRNDADAICEAVRRPRMRYVAVKSVAQQDLLALHRVRAQLMKQRIAQSNQIRALLHERGVIARLGAKGLRQALTQALAAENSEVSGAMGELLLELSGWLRETEQRIATITRRIERAVKDDERCQRLMEVPGAGPLISSALVAMVGNAREFKSGRELSAYLGLTPRQHSSGGKTVLLGISKHGDRYLRTLLIHGARSLLYRNRAGAHPRAAWAARLCARRGPNVAAVALANHNARVLWALLSRGASYCPTPQHSFPSRPSTVVERAREGKLLITTAQS

SEQ ID NO: 132244 - protein, 342 aa, unidentified
MQISTIGLDIAKNVFQVHGIDASEKVVVRKRLRRRQVLEFFKALPPCLIGMEACATAHYWARELTKLGHRVRLMPAKDVKAYVKRNKNDTTDAEAICEAVRRPTMRFVQIKSAEQQGRLMLHRTRDLLMRQRTQVINALRAHLAELGIVAAQGREGIKELLNIIASEHDVRLPVDAHTSLVVLGAELQAMQTLIASIEKRMMAQHRGNEASQRLESIPGIGVIGATAIAATVPDPKIFRSGRDFAAWIGLVPREDSTGGKQKLGPISKQGDRYLRRILVVGACAVLRYARHRPEKYPWLAQLLARKPFKVVAVALANKMARTAWALLAKGGTYRAPALAAAA

SEQ ID NO: 132245 - protein, 338 aa, unidentified
MTTGLAAGTYELFVGIDIAATTAEVSTQRPGAKAGRSFKIDQTPEGFHRLVHTLQATDNEPSHVLVVMEATGSYWISLATRLVHEGFRVSVINPSQAHHFAKALLKRAKTDAIDAQTLAQLAMVLQPEPWMPPPQIYYELQQRLAQRDDLLNLRQQVRNQRHALEQHPEVITPVRTRMESLLSIFQSQIDEVELEITAVLNQDTAWAAAAARLQSIKGVGWVTAAWTLVTTLNFTTCDTVDALTAYAGLAPMPRQSGSSVWHRPSIGHSGNGRLRTAFYMATLTAARFNPPIKTFYSRLLEAGKPEKVARCAAARKLLHIAWAVVKKDQPFDPHYAQG

SEQ ID NO: 132246 - protein, 330 aa, unidentified
MKNVKESVGIDVSKKTIDVFLYNQGKHSQFPNDSAGFGKMMRWIKSQGLCREELIVCFEHTGWYCLLLGYYLHENGYSYSCVNPMEIKRSIGLKRGKTDKADSKEIARYAWLRREETVLSVPPPKILIELQRMMSLREQLVKQATSLKCLEKGMKVLVEEGNDMSVDMIRETLVHIEQQILKIEKSMDRLIKTDEPMHKNYRLSRSVKGVGRVMAIQFLIHTHNYTRFASWRQFSSYCGLVPFPYQSGTSINGRMKTHPVSDRKMKSLLSMSAISAIQHDKQLKCYYQKRVEEGKPKMLVLNIIRNKLVARIFATVNRGTPYVELNQFAA

SEQ ID NO: 132247 - protein, 355 aa, unidentified
MQSNKISFKGQNIYVGIDVHLKTWHVTTLTETGCKYSFAQHADAKELFDRLNKKFPEAHFMSAYEAGFCGFSAHYALTEQGIENIVVHAADIPTTGKEKAMKTDAVDSEKIAWGLKRNELTGIYIKDKRYMDDTNLMRLRQRFIMDLSRQKNRTKHLLYTQGVTYPERFRNCRTHWSRNFMKWLREEVEFLSEQKLSLLLLCEQVENTRKAILKVTREIRRLSTTDRYKENYDLLITVPGLGLITSMSMLTELDNDIVRFPNERRFVSMLGLIPTCHDSGEKKVSGEKINRGNKHLGPLIVEASWVAIQRDYQLGAYYSSCCQIMKPHKAIIKVARKLACRAYAVLKTKTKYELS

SEQ ID NO: 132248 - protein, 428 aa, unidentified
MLSTGKPHSSRAAIRPFHRKSELMQYRQFHECLPFTLTTAVVDYMTMSAPTTRVDLVDVKPNQGSGRKEPNMLIIGCDYHPSMQQIAFVDTETGERGERRLMHRDGEAERFYRELKQRRVEVRVGMEATGYARWFERLLAELSFELWIGDPARIRARRVRKQKTDRQDAQLLLRLLLEEDGFPRIWVPSPENRDLRQLLWHRHRLVQMRTRIMNQLQAVAMNEGLRRKRALWSEAGRKQLESFLLAPWATRRRKDLLELMDRLNPTIRELTGAVEKEAENKPEVQLLMSHPGVGPLTALAFVLIIGTPQRFHCGKQMGSYLGLIPCEDSSADRQRLGHISKQGSSLLRFLLVEAAQVAARVDAEWRRRFLHLAMRRGRKIAKVAMARRVAVGLYWMWRKEWDYQQVVKFGSQGRKLSSHNVVTTGSTR

SEQ ID NO: 132249 - protein, 372 aa, unidentified
MGHHSEAFIGIDTSKSRNAVAIAEGGRGGEVRYFGEFPTTEAATRKLVGKLAAKYGRLTFCYEAGPTGYGLYRLITSLGHECEVTAPSLTPKKPGDHVKTNRRDAVSLARLSRAGELTAVWVPDERHEAMRDLSRARQAVKKDLQGKRQQISSLMLRLGRYYPGKKTWGPAHMKWLRSQKLEHREQRIALEELLEGVRQESERVERLEQAIREAVPEWSLAELVTAMQAMRGFDLIAAVTIAAEIGDLSRFQNPRELMGYLGLVPSESSTGDKVKRGGITKAGNGRARRILVEAAWSYRYPPRVGRDKQPKVAAAPRRVREIAWNAQTRLCARFRSLVRKGKRPTIAATAIARELSAFIWAINREIMGNRQA

SEQ ID NO: 132250 - protein, 335 aa, unidentified
MGLDQHRAQITADWLDTETGEVSRARVTPAHRDGVRAFLGRFAGQQLEVALEATTGWRFVVEELHAVGAEVHLAEPAETSSLRGNKKRAKTDRADARHLRELLMVGRLPESWIAPRHLLDLRARVRLRHTLVDQRGEWQQRIQAVLYHHGVAQRRDLLTAEKRRWLTELGLPAAAREQVTVALAVIDALDAQSEPLTRELRAYARRQPGCRALMRHYGIGALTAVTILAELGDARRFSSSRHAVRYAGLDITVHQSDQRRAPGHLSRQGPPALRWALYEAAQLSRRASSPDHAYYEQAAARLGGNRACLAVARKLLKRSYHTLRELGDEALAPAS

SEQ ID NO: 132251 - protein, 365 aa, unidentified
MKKIAYVGIDYHLNSLSIAVMVQGEKDPSDMVRLKNDDKIIRKYMKKLSERFEIKACYEASSNGYCFQRKMTAWGYPCDVIAPSLIPRRPGDHRKNDFRDARDLAQNYAHGMLSIVHPPTEEEEAVRTLVRCRFAFKEAAKKVKQQINSFLLGQDQHWDHSKWTHQHLKWLWEMRMPNAYLQQVLEEHLAHLDYLEARLKHLDEQIEQIATSPVYAPAVKKLAAMKGIRTLTAMLLIVEITDFRRFPNPRALMAFLGLIPSEDSSGEKHKGGAITCAGNKRCRSALIESVQHYAKSPQMSAQMKSDLSQLDAHSAAIAVKCLKRLHKRYWALVLKGKLRPVAITAIAREFVGFIWAMMQPQPAIA

SEQ ID NO: 132252 - protein, 364 aa, unidentified
MKKITTKKTMTSKRLERQDEFSSYVGIDLGDKHSCVCVLDRWGRIVEELRGRTTVKELEGFFRKLPRSRVALEAGSQSRWVSELAKKYGHEVHVANPHKVQYISGGDDKNDPGDAYKLAELSYVRPSLLHGISHRQRQEQVHLEAIRARDLLVRSRADMINAVRGMSKAFAATLAQCSAESFTAKAAGKLPEDLRTATAPLLRVIDQLSEEITELDQWIEHVARQHYPAYVLLEKVNGVGTLTALTYMLTIGDAGRFQRSREVGAYLGMRPRQKDSGSSSPQLGITKTGDAYLRKLLVNCAHYILGKFGADSDLRRFGLRLAARGGKNAKKRAAVAVARKLSVLLHRLWASGEAYEPLRNSQAA

SEQ ID NO: 132253 - protein, 357 aa, unidentified
MPAHSKTAKPSTQVAVIGIDIGKNVFHLIGLDKRGAIVLKAKLSRSQLEDRLANLPPCLIGMEACAGSHHVSRKLIALGHDARLMPAKYVKPYLKGHKNDYRDAEATAEAVQRPTMRFVATKTEEQLDLQALHRVRARLVAERTATVNEIRAFLLERGIAVAQGIQRLRRALPDVLAKSTDALSPRMIRIIEALATDWRRLDERVEEVSTEIETLARKEAPCQRLMTVPGIGPIISSATVATIGTGDMFAKGRDFGAWLGMVPKQLSTGGRTILGKISKRGNKYLRTLFVQAARVVLLKRVSWERYGLKAWIEAAARRLHPNKLAIALANKLARIAWAVLHYGRNFEVSHDYAPQPA

SEQ ID NO: 132254 - protein, 340 aa, unidentified
MTQYKRIGIDTSKAVFTLHCVDQQDRPVLRINLRRAQMNPFFAKLPPTEIAMEACGGAHHWARELAALGHEVRLIPPQYVKPYVKRGKNDRNDAEAICEAAGRPGMHFVPIKSVSQQAQGMVLKVRETLVGQRTLLVNTLRGHAAEFGMIAGKGLPQVGPLLTAIEQETTIPPEARDMAALLGRQIEDLDTRIKELDAKLTAVHKANAVSQRLATIPGVGPVTALTLAIEIDPAAFESGRHLAAWAGLTPKEQSTGGKQRLGGISRAGNERLRVLLVAGATSVINAAMRPGSKQMTDWLRALLQRKPRKLAAVALANKMARVAWALMARGEVYRRPAAAA

SEQ ID NO: 132255 - protein, 407 aa, unidentified
MLNPVSLQLRVGVDVGSRCHTVAIGLSDGSLLEEFDILHTAEGFREFFTRVEACGRRHAAPIAVAMEGYNGHVRPLDSLVRARGWQLFNVNNLKLARFKEIFPAAAKSDRIDTRKTLELFQLRDHLPMAGEVLQEVLATPEENNVLKRLSRRRRRLVNERGRVANALQADLQAVCPGLLEITREAGNLWFLNFLTCRKGLLKLARVRRASLLKVPGIGDNYASAIQAWQSRAYFASDASLVGDMIQQDAARILELKLQIKALEEKMAYIAERSSIACRFASIPGYGSICSAELAGEIGTVKRFRHEASLALYLGMATLDRSSGKSRGSKPPRHVNARAKAAMMIAVDHHRKLVPQSQRYYEKKRAESKTHNQAIRALGRHLCRVIFKMLTQDRPYRIDTSPQTSKAS

SEQ ID NO: 132256 - protein, 436 aa, unidentified
MDTDYANRLGWFRQFKENINASANTLVVGIDIGKDKHHAFLGTPAGRTIHRRLIFENSIYGFDRLLFLIKRYLSDEQLADVVIGVEPTSVYHKPLAEYLISRGYSVVYVTNSAIKKNRAILDGRWDKNDTKDAANVADLVSRGRCHFYDLPDINLRDIRNLLSFRKRLKKQEHRLITRIRNNLVAQYFPELDGAWYRCQQENLAIVRFCLSPQKIAGLSFDDFCRMVTRRRRGIRQYQRLLHIHEVAEDSIGCRVGSSVTFEAQLLVENLQRSREQIAEVEQQLDLICGSYKEYELLQTIPGFGPYVSAVVLGAIGYAHRFENTKQLLRLAGLDLNASRSGKKSQTAVPVISKAGKADLRYALYQAAKVATSLTAEFKAYFERLLKGREKERGIKTKMRVKVSAKMLVIAWTLMKTMQPYKAGLLVIDEPVQPRGS

SEQ ID NO: 132257 - protein, 340 aa, unidentified
MGEITTIGLDLAKNVFQVHAVDEAGSVVMRKRLRRGQVLAFFAEIPSCLVGLEACATAHHWARELIALGHEPRLMPPTYVKAYVKRNKHDVADAEAICEAVRRPSMRFVPIKTMEQQSALMMHRARDLLIRQRTMLANALRGHLAKFGLIEAQGLHKVARLIAIVMDQNDRRIPDIARQVLKVIVNQIEDTQTRIAELERQVLAWHNNNPVSQRLATIPGIGPIIATAIAATVADPSIFGSGREFAAWLGLVPRQNSTGGKARLGGISKRGDSYLRRLLVNSAHTVLLCSKQAKTDPWLTSLLSRKPRLVVAVALANKTARMAWAIMNGQDTYRRAPLAA

SEQ ID NO: 132258 - protein, 309 aa, unidentified
MNEELVYLGVDIAKAYLDAAIANEKRRFSNDAVGHRRLIQWLKQIKGPVQVICEPSGGYERALVRALVAAQIKVSLVPANRVRQFARAGGILAKTDRIDAKLLCAFGEAMKPGIISASQLEQEQLRELESQRRHLTHLFVMEQNRAARVSEVCARKLNRRLITEIKKQVEQLDLLIQEQIAASRELATKAQKLTTISGVGARTAALLLAQMPELGQLNRREVAALVGVAPFNRDSGRMRGKRAIYGGRRSVRHGLYMAALVAARHNPILRGFYLRLRAAGKPAKVALTATMRKLLIVLNRALKPDLNYA

SEQ ID NO: 132259 - protein, 412 aa, unidentified
MTATNQFAAHVGLDWADKKHDVCVQFKNGERVFHVIEHTAEALDVWLTELHQKVKGRIAIALELKKGPVVYALQKYPFITVFPVHALSLARYRQAFSPSGAKDDPQDAELALELMLRYPQKIKAIEPDNADIRLLQQLVEQRRQLVEDKRRFVNRLINTLKQYYPQLLEWFSHRGSLLLCELLIRWPSLQQLKRARHDTIRNFLNAKGGRAMALTEQRVVSIDNAIPLTTDPSVIEANALMATALATQIKVVSEIIKTYDERIETLFETLPDSGLFKSLPGMGPCMGPRMLAALGDNRDRFNSAEEIQNYAGIAPVTERSGQKSWVHWRWQCAKFVRQTFVEWAAKTVNSSYWARLYYQGLREKGKSHQSAIRALAFKWIRIIYRCWKTRTQYDEAKYLLALEARRSPLLKP

SEQ ID NO: 132260 - protein, 412 aa, unidentified
MLKIVYPICCGMDVHKSFVVACIATTNECGVTTYQSKRFSTFTNDLRRCAAWLEKNRCKDVCMESTGKYWIPIYNILEHTCTIVLAHPKYVKAIRGKKTDKKDAKWIADIFKHDLVSGSFIPPADIRQLRDLVRYYWKLTNFTTGEKNRAQNCLTVSNIKLDDVFSDVFGKAASAITTRLLENNEPFDVTPYLNKHIKTPIEKIQAAVDGEMCAEQAEKLRIIRSHMDALELCKLNLQSLILTTTEKYLPQLNIVATAPGIQAFSAIGVISEIGVDMSVFPTSKHLCSWAGLTPQNNESAGKKKTTRISRAGAYIKPLLVQCALCAIRAKRFPEVRRRYLSLKKRRGHKKAIIAIARMLLTAIYNMLKKNEPYDPELYSKADRPPVHREVSVEEAIFILQRQGYFVTAPASS

SEQ ID NO: 132261 - protein, 407 aa, unidentified
MEVIIENACGMDVHKDSITACAITPKGKEIETFSTKTIYLIELVDWVKKHNCTHVAMESTSVYWKPIVNLLEAEGIEFLVVNAQHIKAVPGRKIDVKDAEWIAKLLRHGLLKASYIPDRNQRELRELVRYRRSIIEERARQYNRIQKVLEGANIKLGSVVSDIMGVSSRDMLRSIAEGNEDLEELTNFARGRMKNKKDELKLALQGYIQEHQRFMIKTIMDHIDFLTEQIDKLDKEIEKRMEDDQEDIDRLDSIPGIGRKMAEQMLAEIGPNIKEQFPTAPQLCSWAGLVPGNNQSAGKRKSSKTMKGNKYLKSALIEAAHSVRGSKNYLGALYRRTASRKGKKRAAVVVAHAMLRISYYLLTRKEMYVDLGEDYFDKQRQQSIVRHSLRRLENLGYTVTLVEPKVS

SEQ ID NO: 132262 - protein, 339 aa, unidentified
MKLYGAFDLHSNNNYLGIIDSNDKRVYKKKLPNNPQTILTVLEPYKENLTGIVVESTFNWYWLVDLLMDHDYSVHLANPSAVKKYEGLKYSDDNHDAFWLSHLLRLGILPEGYIYPKNERPIRDLLRKRSHLVKLRTSLILSLQGIISRNCGHKINAKQIKAIKENKVSPLLAGDEDLELSGSVSKEVIDFLSLKIRKIENSVKKKVKLKKSFKCLQTISGVGDILSLTIMLETGSISRFPEVGDYVSYCRKVPTGWTSNGKSKGKGNKKNGNRYLAWAFSEAAEFARRFDENARAWYNRKSAKKNFMVAHSALSSKLARAAYYIMKNNVPFDPGKLFA

SEQ ID NO: 132263 - protein, 533 aa, unidentified
MSKGSGRSRKRKGTVSPQGTDDSLGRRIREVGPEHFGLLLVDSGKRHFAVRLTNFFGDCLWEPEPVRSLRLALEAMMAEVEKQMAKHGLTDLVVGIERTGRWHHPVKQMVEKKWPVKMIHPFTTKQLRQPASSGIKTDPVDLIAMQRAMICGYGTEDLELPEPWLEFRLVSRARADLVSKRACLKTQCAGRMEALLPGYTDLFEDLWKTPTAAALIEAYPSARKLLRADAQRIMERLSGMGTKCQRSTVDRVRSWAAQAAPADAGAAVNHRILRDHLALLRQMTVLIQRYEIELLGLLVQTPVVLLLSITGLNVVSASDYGSEMGPDEHYIGAKNVTGRAGLFPSRYQSDGTDHANGPVVAGRNARLRQAIVDVAHNLLSRNPYFQAWRRLPDHKDLQNKEARIAVGSRFVRISFHMLRHRTVFNHPLAGRQDSVLCKLLAFGRDRRVPADRLYELCAQALRQLPDDGLEFERRALLGGGWNGSTNSPRPSSAAPRRSARKPAYVVKLIADVDHRLLAGKGGEPATSVSPRIP

SEQ ID NO: 132264 - protein, 340 aa, unidentified
MKVVAQSLGIDVASKSLQVCFMIKNDQGQFKIKGQRKFDNAKSDFKMLIEWISKRHQAGLGLEVVMEATGVYYERIAYALAQQGFHVHVLLPNRIKGYLKFLNVKSKTDKIEANGLAQLGLNHQLPKWEPACAQMYSLKRLCRERNMLIDEKTAISNRLHAEKSCQDPEPLTIKRLKKRIKLLVDQIKEVEQQIIKLSEEDTQLAQKIDNICKVKGLGPITVISIIAETNGFQLVENKSQLVSYAGYDVVERQSGSSIKGKTRISKKGNAHIRKALHFPALGVVKYHKEFTDFFNRIFERTKIKMKGYTAVQRKLLVLIYTLFKKNQPYDPQFAQNLNQI

SEQ ID NO: 132265 - protein, 388 aa, unidentified
MLHHLTDGLTAIRTHIGAIFVSLELSRSNWLITSLSPGQGEKMSKHSLGAGDVVGLMNLLADLRRKAQARTGESYPIITIQEAGLDGFWLHRVLQQHGLESHVVDPASIAMPRRRRRAKTDRLDGETLLRALLAYKRGEPRVCAMVVAPSPEEEDRRRICRERQSLIAERITHVNRIKGLLFAQGISDYAPLRRDRRARLEALRTGDGRELPSHLKAQIGRELDRIELLLEQIEAVETERDALLAAARKPASQAAAPDPVAMLLALKGLGANFAAVLWSEAFYRPFSNRRQVAAYAGLAATPWQSGGIRHEQGVSKAGNPRLRTTMIQLAWLWIRHQPQSALTRWFKQKSPQGRKRAIVALARKLLVALWKYVTQGVVIEGAVMKPAA

SEQ ID NO: 132266 - protein, 430 aa, unidentified
MKSNTQNAKIEAITEKTLVLGIDVGSETHYARAFDYRGIEYSKKPFKFSNTEAGFVTFKEWILDIKERHEKDKVVLGMEPTGHYWFNLGKFLQDNEMKPVLVNPHHVKKSKELDDNNPTKNDRKDPKVIAGLVREGRYMIPYLPDGVYADLRTASNIRFQLQAELTRIQNRISRWFNIYFPEYKTVYGKPDAKSGILILKAAPLPEDILTLGIDGVNQIWRDAKLRAVGKARAKTLIEAAEHSVGSKEGAVAARMEIRMLLEDYESRSIRLQEVMTLIEGLVKQIPMAEKLLEIKGVGIRTVSGFLAEVGDISRFSNPKELQKLAGLALVENSSGKHKGETTISRRGRKRLRYLLFEVAMSLVAKNPEFRELHNYYTTRKMNPLKKMQSLIVVAAKLIRDFYAMLTKGVAYDPQKLVSDIRRPAAYLQVA

SEQ ID NO: 132267 - protein, 364 aa, unidentified
MSSVSQRSLVHLGMDVHKDSISIGILRPDDSMDVEKIFHDEESVRRFIARMGEPRHLVACYEAGPTGYELDRLLKRLQVRCDVVAPSLIPKAPGDRVKTDRRDCRRLARLHRAGELVVIRVPSPEEEAVRDLCRARGDVVIDLDRARRRLGAFLLRHGRVWRGGSNWTLKHEDWLLGLRFDDPALASTFAHYRSIVEERRLRLQALEADLLPYCEKDPYAEGVHRLCCYRGVDSIGALTLVSEVCDWRRFAKASSFMGFVGLVPSEYSSGERTQRGHITKAGNVHLRTQLVESAWAYQSGPYVGTRIRRAQQQCPPATAERAWAAQVRLCGRFRRLAARKNVKTVVATAVARELAGFLWGEMTA

SEQ ID NO: 132268 - protein, 403 aa, unidentified
MNSVGIDISKGRSTVAVMRPFGEVVISPFEVRHTDSELSELARQLKSLDGETRVVMEATGNYHAPVAKLLHDAGLYVSVINAKLVHGYGNNDLRRVKTDKKDAVKLANYGLDRWLTLPRYVPEEDTRLLLKNCYRQYRQYSKVQTILKNNLISLLDTVFPNANRLFSSPIRVDGSEKWVDFVAEFWHCRCVSEKSQKAFTNKYQRWCRKHGYNFSEAKAHTIHAEACGHIDVIPKSETTKLLVEQAVAQLRATSAALAALKHEMQALASMLPEYPVVMDMFGVGPTLGPQLIAEIGDVRRFYSKKALVAYAGLDAPPNDSGDVTGRHKSMSKVGASSLRRTLFLVMSVYLQTAPLDEPVYQFMDRKRAEGKPYRIYMMASANKFLRICYATVKAYLESLEHTA

SEQ ID NO: 132269 - protein, 313 aa, unidentified
MDKTAPTFVGIDVSKRRLEIHLRPSGEGLAIDHGEEEITALVERLVALEPTLVVLEATGGLEVRLAAALAAAGLPVAVVNPRQVRSFARAMGRLAKTDRLDAEAIARFAEAVRPPVRPLPDEATRRLGALVARRRQLLEMLVAERNRRHAADPALHGRIDAHLRWLEQALAEIEGDLDGAVRDSPVWRAKEELIRSVPGVGPVSARTLLAELPELGALTRRQAAALVGVAPFSRDSGKLRGRRTVWGGRAALRACLYMAAVAAARGSNPAIAGFYKRLRLAGKPAKLALTACVRKLVVTLNAMLRTDTAWKSA

SEQ ID NO: 132270 - protein, 335 aa, unidentified
MNQQIFYVGLDLGSTQCYQVVMNEGGKILRSRPFATNEQNLRSAFQTLEGELRVHTEAGELANWVSDIIKPLVKQVVVSHPQSLAWIAKDARKCDKLDARKLADLLRCGLTHEVFLPVNQARRTFKQIVRHFDEATRAQAKLKAKLKARLRCLGIICRDSQVFGKTGREAVLKQINDKFLRRMFEGLYAALDFLVEEMQTARQFPEIKLLQTAPGVGAIGACRFVALVQNPRRFSNKRKLWRYCRLGVAHRSSDGKLLAHPRLDRNGCGALKDVSRKAFEAALRCREDNSFKRSFEKSLAATRDKVHARLSTQRKIVACLRAMWLSNQPYQTDLP

SEQ ID NO: 132271 - protein, 392 aa, unidentified
MTATLNTKVTTRTDVLYLAFELGETEWKLAFTIGVGQKPRLRSMPGRDLPRLQEEIAKAKKRFELPADAPVRSCYEAGRDGFWLHRYLTVSGVENSVVDSASIEVNRRKRRTKTDRLDAGKLLSLLLRYHGGERQVWNVVRVPTVVDEDARQLHRELQELKDERTEHINRIKGLLASQGLAAPAVNKRFAAWLGEARLWDGSAVPPELHQRLLRELERWEMLDRQIKALEDERRQRIRRDNTPHVDKVRSLLDLWGVGFNSAWMLVYELFGWRHFDNRRQVGGCVGLTPTPYQSGDSHREQGISKAGNRRMRRLMVELAWCWLRWQPESELSRWYMRRFGVGNGRTRKIGVVALARKLLIALWKYVETGEIPAGARLASWQKKVKGCSKAAA

SEQ ID NO: 132272 - protein, 408 aa, unidentified
MDVVYPRCAGLDVHQKTVVVCARVAAGARVQREVHTFGTTTGELLALAEWLAARALTHVAMESTGVYWKPVWHVLEGQCELVLANAMHIRNMPGRKSDVNDATWIADLLAHGLIRGSFVPPAPIQELRDLTRTRKQLVREIGRHTLRLQKTLEDANVKLTGLLSDVLGKSGRAILAALVAGETDPARLAALTGGRLKASRAELVAALQGRVTAHHRFMLQLHLTQIAALEAAVQELDARLEAALAPFRAVVDRLITIPGVSQVVARVLVAEIGPDLSRFPTAGHLVSWAGLCPRLHESAGKRLSTRVRPGTPWLKTTLVQAAWAAVRTKGSYLQAQFLRLKSRRGPKKAIIAVAASMLTAVYYMLTRAVPYHDLGAAHFERRDHTKLAQRLVRRLRDLGFTVALQPAA

SEQ ID NO: 132273 - protein, 455 aa, unidentified
MAKQKRQTKLKVQVNALEQIKPHAAGIDIGSEEVYVAVPPDRDAESVRSFPTFTADLRRLAEWLKACRIETVAMEATGVYWIPLYELLEEEGFEVCLVNARHLKNVSGRKTDVLDCQWIQQLHTYGLLNPSFRPPEQIVAIRSLVRHREMLVQYRSAHIQHMQKALTLMNVRLTSVLSDISGVTGLKIIRSILAGERNPHHLAALREPGCKKSEAEIAKSLEGHYKREHLFALKQALELYDFYDRQLQACDAELEAMYQKFDPPEDPGTPPPAPRTQKRRKNQAHFDLAPALYRLTGVDLTQIDGVDELTVQKVLSEIGTDMSKWPTVKHFTSWLRLCPNNKITGGKVMQTGVQPTKNRASTALRVAAASLKSSNSALGAYFRRMRARLGTPAAITATAHKLARIIYYMLKHRKPYHDFGADYYEEQYRARVLRNLNRRAAKLGFRLEPAVLVVS

SEQ ID NO: 132274 - protein, 320 aa, unidentified
MSDHLAVGIDADSKSLVVARHGTKGSTRIPNSASAIGKWLSTLPVGSRIGVEATNRYHEVVVQAAQKAGHVVFVLNPRDIKHYAKGVACRGKTDSGDAQVIARYIAKEADNLHEHVARSPAQEQLHVLLQQRDSLVRSKAKLNLSLGAGASESAIFGRIFDGLKEAIALLDQQIQQLCRSGEQRDLYRRIMTIPGVGPTVAAFVTHHITRWPLTSSDAWIACTGLDPRPNESGARIGRRRLSKRGNASLRQILYMAAMGLTRSKNGKALYNAIRERGHSSTASFNILARKLARIAWGVFKSGRDFDPAMLKVGQACFQQA

SEQ ID NO: 132275 - protein, 346 aa, unidentified
MTTVDATRPVTGGVDTHLDVNVAAALDAIGGLLGVAEFPTTPAGHRRPAEFLASFGTLTRVGVEGTGSYGAGLSRYLRGSGVEVVEVDRPNRQSRRRTGKSDPVDAVEAARAALSGRAQGEGKSRDGNAEAIRALVVAKRSSRSTKIQTLNQIRHLGFTAPEELRSRLKGVSRQHLGAIAAALRPRAGGDPVVFATKTALSLLGHRVLVLDAERERLNLLLGELVKKTAPQLLEIHGVGVDTAATLLVAAGDNPGRIRSEAAWAHLCGVAPIQASSGKVTRVRLDRGGDRQANSALWGVVITRLRSDPRIQAYMERRLKEGRSKPEVIRVLKRYVAREVYHRLPRA

SEQ ID NO: 132276 - protein, 392 aa, unidentified
MEEKAWAGVDVGKGFHWAHVVDARGTELLSRRVENDEADLLALIDEALSLAGEVAWAVDQPGGGAALLLALLWERGQGVCYVPGLSVDRARDGYRGESKTDRKDARVIADQARMRGDLGRLEPGDDALAGLQLLLARRRDLVADRTRALTRLRETLLALFPALERALNLTTRGPLELVARYQSSGAIRRAGRKRVAAYLKKRGVTKADALARRALEASEEQSIKLPAEDVASEIVAELAGSILALKERVEALEEDLARRFFSRPEARVLSSFPGIGPILGAEFLVAVGDVSAFGSADRLAAYAGLVPAAHDSGKRVGNHRKGRGGNKVLKRVFYQSAFSSMRAVPESRAFYDRKRAEGKRHTQAVIALARRRVNVLWAMLRDGTTFEPRSAA

SEQ ID NO: 132277 - protein, 415 aa, unidentified
MEDLGLRALHRRVAGIDVHRMLHVVTVLIEQPDGSMQRQTRQFGGFRRDCRELAAWLAELRIELVVLESTGIYWKSVYAHLENAGVAAWVVNAHRVKHVPGRKTDTADSEWLAVLARFGLVKASFIPPKDLRELRLVSRYRRKLNAMRASELNRLHKILDDGGIKLGGVVSDIDGVSARAMVKALIAGQPIEQMLGLARGKLKQRREELSASLDGDLSARHLFVLGHIEAHVETLQRELAEIDRYMLTALQPYAWAHELLQTIPGIDQIAAALILIEIGDDMTRFGRAQSLACWAALSPGNDESAGKRKSGRTAHGNSIIRCILCECANAARMTKSTLAAKYRSLMVRKSHKKSIIAVAHKMIRLIYLMLSRRQPYIDQAIDYAAMSAKKNAPRWIKQLKSIGRWPSPGSVAAST

SEQ ID NO: 132278 - protein, 385 aa, unidentified
MILKQPILIGIDWADAKHDFHLLCPDGDAQTGVFAQSPQAITDQLKTWRSNHPGAQFAVAIEASKGALINALLQFDDVVIYPVNPAALAYLRKSHRHGGGKSDPVDAKRIAEFLRERIDELRPLHQDSPLTRELARLSEDRRFAVDARADLANELTALIKQYYPVISGFAAAKPYASFLLSFLIEYPTLDQAQAAGEAKLRSYFHGLNMKRKADHLAKLIMDAKPLTTEEVTLRCSSKRAVMIAEQLKVLNKHIRSYEANIKELLPQHPQYAVAASLPGVAANTQARIIAAMGDGEGRYETAQSLQCASGIAPITEQSGKRKFVSARWACTKFLRQTFHEMAGLSVTKSRWAKAFYEDQKAKGKPANTAKRALAYKWQRILFRCW

SEQ ID NO: 132279 - protein, 312 aa, unidentified
MDVSSQFLDAQLGRDGAQAQFANDAEGIEALAGFCRSHSVDVVVMEASGGYEQLAFGLLCSAGIGVAIVNARAVRRFAQSMHIFEKTDRIDAGVIAWYAETKNVVAMRPASLEQHHLKALVKRLQQLTETRQTQRNQRLLVTDTQVLQGMHQLLVLVNQQIKTLEQDIAALISNDPLWQQLDKSFRSIKGVADRTVARLMAELPEIGVLSNKRISKLVGLAPLADDSGKHKGKRKIYGGRQNVRNILYVIVTAVSRHNPDFAAFRTRLLLAGKAKKVARVALAHKLLVRLNAKAREVRSQFAAAAEPDVLAG

SEQ ID NO: 132280 - protein, 351 aa, unidentified
MSRSSSSAAIATLGIDLGKNSFHLVGQDQRGAIVLRIKLSRTQLAQRLVNIPPCLIGMEACAGAHHIGRQLLALGHDVRLIPAQYVKPFLKGHKNDYRDAEAIAEAVQRPTMSFVAIKTPDQMDLLALHRVRSRLVSQRTGVTNQIRGFLLERGITVRQGLAPLRQALPSILGSSSDALSLRIIRLIADLAEDWRQLDERIAAVSAEIEALATQDEHCQRLMSVPGVGPIISSAVVAAIGTGAGFKQGRDFGAWLGLVPKQESTGDRTILGKISKRGNKYLRTLFVQAAHVVLVRRPHGAKLGLWPWIEAAGRRLHRNMLVIALANKLARIAWAVLARGHAYQARSAPHAA

SEQ ID NO: 132281 - protein, 385 aa, unidentified
MVNLKVITSPSNFHQPEYPMKYVGIDLHKKTIVLCVVDKDRKVLNRKSFLCLDVKGIVECFRQLGPFEFVVEATAAYEWLVQLLEPLAEDWVLAHPGKMRVIAETAKKTDKLDAQTLAEFLALGMIPRAYRPTGRQREHRVLVRHRVECRQRISRLKCQIRYLAATYNADHRDLFQVDQLEELRQRADLTGADRFVLEQRLKNYQEALERLAAAKAEVKRFAQKGACAEQKERAILLSAPGVGEVVSEVVLAELGDVQRFGSIKEATAYAGLVPGKRESAGKGKELGITKKGSRLLRWAMVEAAWQAVRHSARWRNVYDRLKRRRGAKRAIIAVARRLLGMLASMLKAGAKYRSTVAELKEREAKAEKRKRQRRAAQAIKEAAVV

SEQ ID NO: 132282 - protein, 327 aa, unidentified
MTLHILGIDVSKATFDVALDMEGRMHEEPFANNRTGIEALGRWLDKQEVNQLHACMEATGRYWEELAEWLFGRGYQVSVVNPARICAYSRSKLLRNKTDKVDARLIANFCRTQVPDLWSAPPPEQRQLRDLERRLSSLQSILRMESNRLGSGVKESTVVIDLEDHLEYLESSIEKIRQAITAHIQANPWLARQYALLVTIPGIGELTAARLLGEIPDITAFDSAKGLAAYAGLTPRHFTSGTSIQRYTPITKTGNAQLRALLYWPAISASQHIPAVYALRERMLERGKSKMAAVAAAMRKLLHIVYGVIKSNRPFDPKLAMPTNHAS

SEQ ID NO: 132283 - protein, 346 aa, unidentified
MTIVETRAITGGVDTHADVHVAAALDPVGGLLGVREFPVSPAGYAGLLIWLGGFGTIALVGIEGTGSCGAGLARPIAAAGVRVVEVDRADRQDRRRQGKSAPLDAVSAARAAQSGRARGAPQGRDGAVEAIRALMADGRSAAGERTRTINQARALILTGPDDLRARFAGHTAAGLVTAIASLRPRPGDAAGHATRVALRELGRRAVFLDGQLERLDELIVPLVTARAPGLLALYGIGPNTAALLLIAAGDHPERLRSEAAWAHLCAAAPIPASSGKVTRHRLNPGGDRQANHALWRIVFTRMGSDPATRAYVERRTKEGKSKAEIIRCLKRYVARQVYPHLRPAAD

SEQ ID NO: 132284 - protein, 390 aa, unidentified
MFYAGIDVAMDKHDCVVLDSDGNVVFEVFTFENSREGFKTLKKVLQSCSKNPKKIKVGLEATGHYSDNLLEFLNSIGFAPVLFNPLHTNLFRKGLSLRKTKTDHVDAHTIAIMLRTEDLKSYSQQSYHLAELKSLTRYRSMLVSDCSRHKISLVRLCQILFPELKNLVPSLHQSSVYTLLSELPSADKIANCNLTHLTALLSSASKGHYGRDKAIEIRDTARASIGIKSVVKELELQQTIELIQIYQQQIEAVEEQINNLMDEIDSPITSIPGIANRMAAVILAETNNFQDFERAEQVLAFAGLEPSVYQSGQLTSTHSKMVKRGSKYLRYAIFNATKYVCHWDPKFKAYLAKKRAEGKPYNVAVSHAAKKLTRVMFHLAKTNKEFVPQA

SEQ ID NO: 132285 - protein, 374 aa, unidentified
MSVGKKFIGLDVHQDTIAIAIADDGVDKEVRYYGTIANRAETLHVALKKIGQDGSELRVCYESGPCGFVIFRFLAKIGVDCMVISPSSMPRRQGDKVKTDRRDAQTLARLLRAGELVAVWVPDEAHEAVRDVVRARRQVKDDLGSAKSSLKSFLLRHGRRFTGKAIWGKAHWGWLAEQKFAYPHQQFVFEEYKRRIHDLMDRCNQLDEVLKDAVSGWTLSPLVYALQALRGIKLTAAVTLVAEIGDLHRFDSPKQLMAWLGLVPAEHSSGRRIKRGEITRSGNAAARTMLIESAWHYRFPAREGRSLIDRNGDIPEHIKAIAWKAQVRLCARFRRLAASGKQTVKVVTAIARELAGFIWDIARHTPAIAVEVPR

SEQ ID NO: 132286 - protein, 336 aa, unidentified
MEREQRYVGIDFHRRRSVIVHKNAAGEIVETVHIDNDPVTFARELEKAGERPEVVLEACYGWYWLADLLEEMGASVHLAHPLGNAWGNRRVKNDERDANDLVDLLRLGRLAEAYIAPPELRELREIVRYRAKLVTLRSGLKSQVHSVLAKEGIPVPMSDLFGTAGQDLLNTAKLGRAYGIRTESLRDLIGDFDKEIAMLDKEVDHFLSGDVGYLAIQALPGVGPVLGAVFLAEIGDVHRFSSPDKLCCWAGLTPRHRESDLHVVRGSITKQGSRLVRWAAVEAASRQRGVQGARYEAIVARRDSKKIARVALARHLLTLVYYGLRDGEIRCLAKAG

SEQ ID NO: 132287 - protein, 334 aa, unidentified
MEIIPVFVGMDYHKDTVRVCVLNAAGDVLGNRNCPNDASCVIEYVRRYGDVRGVAIECCEGTADFAEALIDQTGWPVHLAHPGYVQRMRQNPDKTDHSDARLLADLERVGYLPRVWLAPAAIRELRRLVRYRRQRVNERRNVKLRIRSLLREHRRVINAPRWGRAWFVWMRCVNLPADSRWILDRHLDRLHQLNEGLQEIEHRLESVTVDDTLVQQLLKLPGVGPVTAWALRAEVGRFDRFRSGKQLARFCGLTPRNASSGARQADAGLIKACNNDLRSVLIEAAHRLKRYDPRWTALAAKLRAAGKPGSVIAAAVANRWMRWLYHEVREVKAA

SEQ ID NO: 132288 - protein, 343 aa, unidentified
MAIVAGFDVHRTQITFDALDSETGELARGRIDSTPAAVCAWVKRFPGRRVEVAVEACTGWLFVCESLAEAGAVPHLAEPAETSARRGKKRHAKTDRADARHLRELLCEGRLPEAWLPPAHVVAWRTRTRLRKTLVDERTQWLQRIRATLFHHGVPPTDVPQRLLSRGGRSFLERVELPEAARERITVALAIIDALDLQLVPLEHRLRLLARRQPGCQALMRESGIGELIAATILCELGDVSRLSSSRKAVRAVGLDVGVYRSDRRSRVGKLTKQGSPAARWALYEAAQSACRRTSPNHSAYLELKGRGLSHTRASLTIARKLARRCFHTLRELGPEALAPISD

SEQ ID NO: 132289 - protein, 323 aa, unidentified
MSTKTTKKRRSFIGIDVSKKLLEVGVHQSDYHFRCPNDPKNFPALITELISLRPARILLEATGGLERALLQALHAAGLPVAVVNPRQVRDFAKALGRLAKTDRLDARVLAHFAAATQPAIRPVKAQQETELDALMGRRTQLSDMLAQEKNRRGSAATKGTRDDIEAHIDWLEERIQELDEKLKEQLKCSAVWQQKAKILQSVKGIGFVTSLSLLADCPELGELNRHQIAKLVGVAPLNRDSGQQRGARHIWGGRAQVRGKLYMATLAATRFNPVLKSFYQRLLAKNKLKKVAIVACMRKLLTIINVMVRENKLWNVKAQPVSA

SEQ ID NO: 132290 - protein, 343 aa, unidentified
MTHYVGLDVSQKLTSICIVDATGRKLWRGQCASDPEQIERAIGRHGGEDVRVGIETGPMTPWLVHELRGRGLDVTCLDARHAKAALKLQINKTDQNDAEGLAQIMRTGWYRAVHVKSFDAHRARALLGARAQLVGMTTRLSNHIRGVLKTFGMLPGAKRGQRFDRRVESLLAERADVALIVRPMLVAWRQLREQVAGFDKTVRTLVKSSPACRHLMSVPGIGVLSVLAYVSTVEDPARFRRSRSVGAHLGLTPRQCQSGEIDRSGKISKCGDTLARTLMYEAAVVLMTRVKRASGLKDWAQAIARRSGAGKARIALARKLAVIMHHIWRSGAPFRWPAPSASA

SEQ ID NO: 132291 - protein, 340 aa, unidentified
MQEQVSRQYVGIDLHRRRSVIVRLDDAGKVLGTVRVDNDPVQFALAMAEAGEGPEVALEATYGYYWAADLLKANGAHVHLVHPLGLHWDTRRVKNDVKDATELAKRLWREDLPEAWVAPPEVRELRELVRYRAKLVALRTSAKAQVHAVMAKQGILPALDDMFGPGGQVLLDKMPLDQPYRYRVDSLRRLIEIFDDEIDIAESQVQKRLRGHRGYRAVQALKGVGPVSAAIFVAEIGDIGRFSDARQLCSWAGLTPGHRESDDIAHRGHITKQGSTLVRWAAVEAVVRYHGGAPIAPAFRRIQERRGTPIARVAAARRLLTLVFYGLRDGELRCLAKKVA

SEQ ID NO: 132292 - protein, 499 aa, unidentified
MVLGHVGDIGETVRTVIPFERVSTTTYPSRRGIPNDMMEEGMTVRKRMALELAHPNAAGVDIGSASHFIAVSPDRDDEPVREFKTFTADLEQSADWLVRCGVDTVAMESTGVYWIPFYELLEARGFKVYLVNARHVKNVSGRKSDVLDCQWLQQLMSYGLLSGAFRPADEVCALRAVSRQRDMLLASQARHIQHMQKALTQMNVQLANVISDVVGETGQKIVRGIIAGERDGQVLAKMKNARIRASEEEIAKSLQGNWREEHLFVLKQAMALYDAYGAQLTECDAKLQSMLAALVAGDDGEPTKGRQIGRSKNAPRFDVRRYLFKLCGVDLTRINGINPTTALKVISEVGPDMSRFKSAKHFACWLGLCPGTKISGGKVLSGASKRTTNRAAQALRLAAAALHKSQSALGAYFRRLAARLDRAKAITATAHKLARLIYTLLTKGTEYTDKGQDYYEERYRQRVMHHLTKRAEKLGMQLVPLSVNPPGIIQSIMEINCVS

SEQ ID NO: 132293 - protein, 345 aa, unidentified
MPIVGGLDIHRKQITFDYLDTVTGEVKRGQIAPADREHVRAWLARFAGCEDAAFAVEGCCGWRYVAGELAAAGIGAHLGEPADTAALRGRKRRAKTDKTDARHLRTLLAEGRLPECWIPPAQILEYRALLETYHDLRRAHTAWVQRIHAVFFHQGAPPLAEGALRTEPGLAGPRAAAAAHLSAAGQQQVATAVDMLAATEAQQGPLRHQLADAARHLTGAKVLAERLYGVGPLTGLALTCWLGGKDRFSSSRKAVRFAGLDITVHSSDRKGPPGRLSRQGPPVLRWAVHEAGKTHARASAPDHGYYAAVADRKNTKRAALSEARKIVRQACHILTELGDDALAAA

SEQ ID NO: 132294 - protein, 410 aa, unidentified
MAERFVGIDVALREHRIAVLDRDGEAVGPSFTIAASPDGVTTLLRTLAARDATTAQTLIGLEASGHLWENLEAALGGAGYRVLVLNPLQTRRYRDVVRRKAKTDDIDAHVIAGLLRSGAAQASYVPDEQIQSLRELARLRARLLADRQDYQRQLIAQLDVVLPEHRVVLGDLLTARARGILAQFPTAQHLAHASPRAIRRAAEDAGARGFSLDDATGVRDHARRSLYSGKAAVARAHVVRTLVSQLERLTSAMDEVDHAATTLLPPSEPGTSPSDAELLQTIPGIGPQTAATLLGEFGALTRFTDARALVAYVGFYPVISESGDRAAPPRLSRVGPRIARHSLYLAAVNAVRHSREWRTIYLRKKAQGKTAKQALVVVAVKLLHAVYAMLKHREPYNPSRLLVAPATIGT

SEQ ID NO: 132295 - protein, 339 aa, unidentified
MANIALFGLDIGKQTFHVVGHDAQGRPVFKRQFSRNSLLEFLARQPVTRIVMEACCGAHWLARKLAGYGHTVQLIAPQYVRAFVTGNKNDFIDAQAICEAASRPTMSYVAVKSPEQQAMSALHRLREARIGERPQAGNQIHALLLEFGVALPVGVRGIKQVPVWLQEESGLPALARRVLERHFDHWCALNRQITELDAEIAAQAKADDVASRLMTVPGIGPITASQLAADAGNAKGYGSARDFAASLGLVPRQHSTGGKAKLLGISKRGDKSLRRLLVQCAHVIMQNAARWTSAMAQWTVALMMRRHANIVACALANKLARVVWAILAKGGEYRPSPTP

SEQ ID NO: 132296 - protein, 497 aa, unidentified
MKKQRQNRTPKAASNTASPAPSKRGRSAKLRKLKAIEALEQINLYAAGIDVGSAQNFVCVPAQAVKPGQSNVRSFGAFTKDLDDLVEWLKECGITTAAMEATGIYWMSLYDKLEAAGIEVVLVDPHSVRHVPGRKTDVLDCQWLQQLHTYGLLRGAFRPEASVRRLRVLCRHRADLVCEGSSHLQQAQKALVQMNIQLPLVVSDINGETGLRIIEAILAGERSPQALVQLRDPRIKKSTVPEMAAALSGHYTEEHLFVLRQNIEAWRFYQGQMQQCDQQIEAALKAMASASKLNVPAAPPKPIPAAQPGSPGAKKKRQRPLHGNNAPTVDFSEQIRRVCGVDLMKICGLNLLSVLMLIAEIGVDMSQWRSAKAFSSWLGLCPGSKVSGGKHLSRRTRHVVNRASVLFRMAALAAGQTDTWIGRFYRRKRSHLGAPKAITATAHKIACVVYHMLKYQEEFLPLDIALYELKAQQRRMRNLRKQAQELGYELIERKQAA

SEQ ID NO: 132297 - protein, 345 aa, unidentified
MAQVTTLGVDIAKNGVCVHGIDTQEHVIVQKRLARQKVLPFMAQLPPCLIGMEASGGAHYWAREFTKLGHTVKLMSPQFVKPYVQSQKNDPNDAAGICEAVARPRMRGVPVKSVDQQDMQALHRIRERQIKARTALINQIRGLLTEYGIVIPQRASQVRHKLPFILEDADNGLTATARAWLSALAEELKALDQRIATTDTQIEEVFQSDDACQRLAQLAGIGPLTATALVAAVGDATAFKNGRQFAAWLGLVPRQHSTGGKTVLLGMTKGGNGYLRTLLIHGARAVLRVVDRKTDPWSRWLQGVKARRGMNCASVAQANKTARVAWALLARGERYRPPASPRLAA

SEQ ID NO: 132298 - protein, 333 aa, unidentified
MDVVHERCAGIDISKADAKVCVRVQGRGRRRTSQEVRTWGATTGQILALREELVQRRVSLVVMEATGDYWKPFYYLLEDAGFEVVLANPRRVRAIPGRKSDVSDAAWLADLGAHGLVAGSLVPPAPIRELRDLTRTRTAITRERAREYQRLEKVLEDAGLKLSSQTSSLTLVSVRRMLEALVAGQRDPRVLAEMAQGQLRKKIPALVEALMGRFTEHHAFLVRLHLDLIDRHTEAIEELTGRIDAAMEPFRGFHTLICTIPGVSTLVADVVVAETGGDMSRFPTAQHLASWAGTSPGSNQSAGKVKSSATRPGSPHLKGALGVAGRAAAPSSS

SEQ ID NO: 132299 - protein, 343 aa, unidentified
MKLSRVGVDLAKNVYQLHGVDRCGKTVWKRRLRHRQWMQAVLDKTEPGCEIGMEACTGAHHWARELQSRGYTVRLIAPQFVKPYVKSNKNDANDAEAICEAMSRPHMRFVTVKGVEQQDIQATHRVRTTIKDHRNAKANQIRGLVAEYGLVAPQTLLALRRAIPEWLEDADNGLTDYFRSLLHGLWGDLLTLEGRLKELDKAIEKLARSNEVAKRLQQLRGVGPIVATALVATVGDGGQYNKGRQMAAALGLTPRQNSSGDKHRLFGISKRGDVYLRTQMIHGARAVVSQAKHRDDPLSRWVTDIAKRRHPNVAAVALANKTARMAWAMLRNDTDYDPGLGTC

SEQ ID NO: 132300 - protein, 356 aa, unidentified
MLYSTIIGIDAHAKTNEICAIDKTTGEIKRATLSADPKETAAWIKALNFSTPLKAVYESGPTGFALARVLGDAGIECSVCATSKLPSRKDKKKTDRSDAEYLARMLDSGSVREVRIPSEAEEALRNLVRLRNDTSKDLTRAKLRVTSFLLLKGIKAPAKNWTWHFKEWAHQLIFEQEIDTYVFAEKFAEVLRIEERLKAIWGKIEAVIETLPKLKDSIARLKCVYGIGDIVALTVICEVMDFKRFRNAQAFASFIGLTPSEDSSGERRATGAITKTGNTYVRTALIEAANCYFRPSRPYAHQDLSVNPLIRAHAAKCTKRLKKRYASLKKRKKQGNKIKVAIAREMAEWIYHLMIM

SEQ ID NO: 132301 - protein, 372 aa, unidentified
MNTCERSKTLFVGIDVHKDTHTAVGLSPFGEKIFEMKIGNEATDFVSLVERTQGEAERAGLSPSFGLEDVHSWGERLSSFLVGEGLPVRAIAPILVDHARRHATHPEKNDSLDAQGVAEVMIRKIDSLPAYTLTKDGGTAKNIRDISLDREHLVKERTRLKNQVHILLYRIFNTAYAQEFKDPFSVKALRYWMKSHPKGISPFLIRSMKRKVRRLMDIRKEIKELEQELETLITESGHTIQTASGCGIVIAAEIIGEVGDVSRFHSPAQLAKYAGCAPRECSSGKTVRWRKTRSGNRRLNRSFHRMALSQISRMGNTAAHAYFKRKVSEGKSKSQALVCLRRQMVNIIWMMMKHKTEYRSPVGEAGYPQKDD

SEQ ID NO: 132302 - protein, 448 aa, unidentified
MFIMHYKRLLTFIDGVSSYLSVGLDVGADFTWMSIALPNGSFVGKPFKIIHSDSRSRDLAVTKIKEAQETYSLKSRCFLESTGIYHIPLLCFLRDKGFDCSVINPIITKNSTNINIRKLHNDKFDSKKAALVGLNVSLKTSILPDDSVVDLRNLVRDYYYFKDLQSAVALKLTAELKVSFPAYAKVFSKVTTQSSLKLLSSYPLPADMLAASKEDIVDIIRSTARFGEAYALRKYDAIIAAAQDAAVFGRALPSNAVRIRLYIDTYQEYQKHLDALLKALHETIEKLQDTLIYDQICLLQSLRGIGFLSAVVLIAEMGNFKLFSSPKKLYAYFGLDPAVKQSGKLNGDKVHMSKRGSSLARRVLHMAALNNVKVDKGSGTPVNPVVYDYYTRKCSGKKKPVAMGAVMHKICNIIFAMLRDNKPFEIITPEEHCRRFATEHPDKIRKAA

SEQ ID NO: 132303 - protein, 346 aa, unidentified
MSYSTTVGVDLAKNVIQISVVSGRGKELSNRSLTRAKFAEFLGKQKPSLEAFESCATSHYWARAAKRHGHEARIIPAKAVAPFRQGHKTDSNDALAVAEAARRPKIKEAPMKTIEQQGLQAIQRSRELLIQESTALSNHVRSLLMEFGIVIKRGFASLLRAVPEILEDGDNELPDLYRPTLHRMYTRLLELREDIEAMTGEVERLAKAHPICSKLMALEGIGPIGALLLYATMGSGAAFSSGREFAAYLGLAPKQYSSGGKTTIVGLSKKIGNSRLRSVLILGARAYVYKLKEPKSSKDKWLKAIIERNGESRAAIALANKNVRTAWAMVTQGTEYQRRQQLPMAA

SEQ ID NO: 132304 - protein, 344 aa, unidentified
MQITTIGLDLAKNVFQVHGVDATGQAVVRRSLRRAQMLPFFAKLPPCLVGIEACGTSHHWARELTKLGHEVRLMPPAYVKPYVKRGKTDAADAEAVCEAVTRPTMRFVPVKSPEQQAALSMHRARDLLVKQRTQLINMIRGLLAEFGVDIPKGLERALLMARQIVDGKAPEVPIEAAKIVATLSQQALDIHVRLREIDRDLLVSLRGSDVARRLMTIPGIGPVGATALAASVTDPHQFRSGRQFAAWLGLTPLQKSSGGKERLGRISKMGDKYLRKLLIVGMTSLVRRAKYNPGKIDPRLADLLARKPTRVATVAMANKTARVIWAIMARGETYRTGHQPTLAA

SEQ ID NO: 132305 - protein, 368 aa, unidentified
MAEHTSFIGLDVHKATIAVAVAEEGRKGEVRFVGEVPNDEASLDRLVARLGAGGARLRFCYEAGPCGYGVHRYLSGRGQECIVVAPSRIPRRPGERVKTDRRDAVMLASLHRAGQLTAVWVPDAGHEAIRDLVRARSAAVAAGRAARQQLSGFLLRHGRRHGGKPWTRTHRAWLAGLRFEHPASQIVLQDLMDAVDAAAERVARLTRQIEAQVAEWSLAPLVAALQAMRGVALIVAVTLVAELGDLSRFASPAQLMAYVGLVPSEHSSGARTRRGGITKTGNGEVRKMLTEAAWTYRRPARISGQKQRRVDVAPKKVREIAWKAQLRLCARYRRLAVSKPLQVVITAIAREMLGFVWAIAREVHPAPA

SEQ ID NO: 132306 - protein, 407 aa, unidentified
MNQEVLYLGLDVHAENIAVAIAEAGRDGEVRNYGEIPNTFHSVEKLLRKLRHPDKELRVCYEAGPCGFVLARFLKKKGIACDVIAPSLTPKGSGDKIKTDRRDARMLARLHRAGELTPVHVPDERDEAIRDLCRARTDAVHDRRSGRNQLKAFLLRNGYRYGEKTSWSAAHMRYLRELILPHPAMKIVLEEYLQCIDAAAERIDRLEVHMKALLDEWHLKPVVLALMGFRGYQTVAAMITVSEIGDIHRFAHPRQLMAYLGLVPSESSSGGSRAQGTITKCGNGHLRWIFNECAQHYRLPPKISQELTTRQEAIPKAYRRQVIEISWRCQNRLHERGRKLAARGKTRQKAQIAMARELSAFVWEVMRAVMPKADGTQASSTARPPKVKGSTQPAVKKKGREYTLKSK

SEQ ID NO: 132307 - protein, 346 aa, unidentified
MSKKVTTSKVLGQSPATVFTGIDVSAATLAVAVQQQEKVGFQQKHFDNSAAGHKQLIAWLLQCGGKVRVSLEATGKYSLDLALALEAAEGIEVAVLNPKTVNRFAQTLRRSKTDAADAQALAEYSRRMEFVPWQPPSQTALELRSLSRHIAMLTEDHTRCSNRLHAAQATATTPKCVLKDLKRSLMALDKRILELRQQAVARIVQDSGLKQKFEQIKTIKGIADTSAVQILGELATLDPAMEVRQWVAYSGLDPVQQVSGASVRKPSHISRHGHSYLRRALYMPALVGVSHDPHRKAFYKLLQTRQKTKLQALMAVARKLLHAIFGIFKTGTAYDGSKLFPQLETA

SEQ ID NO: 132308 - protein, 402 aa, unidentified
MAVFQLWAGVDVGKEFHWVCVVDEAGVVVLSRKLANDEQPIRALLAEIDALGPEVSWTVDLTTVYASLLLTVLADAGKTVRYLSGRAVWQASGTYRGGEAKTDAKDARVIADQARMRGTDLPVLRPDADLITELRMLTAHRSDLVADRTRTINRLRQQLVAVCPALERAAQLSQDRGWVVLLSRYQRPKAIRHSGVSRLTKVLGDAGVRNAATIATAAVTAAKTQAVRLPGEEVAAGLVAELAQEVIALDDRINATDADIEGRFRRHRLAEVITSLPGIGFRLGAEFLAAVGDPTLIGSADELAAWAGLAPVSKDSGKRTGRRHTPKRYSRRLRRVMYMSALTAIRCDPHSKAYYQRKREEGKRPIPATICLARRRTNVLYALIRDNRTWQPDSPPITESAA

SEQ ID NO: 132309 - protein, 380 aa, unidentified
MNRTYYIGLDVHKETIAIAYACGANREDATYHGQCGGSVPTAEKTLRKLAEKLGIEFRDLKICYEAGPTGFVLARRLIRLGLDCVLMSPSKTERKPNEKIKTDKRDACKIARLFRNGDITVVRIPPALDEAVRDVCRARTDATDDLSRSKQRLSAFLLRNGFNYTGKSKWSAAHMRYLRELVMPHDAHKIVLEEYMQAIDTGIARVARLVDKMKQLLAGWEWEPVVRALMAFRGFQEVAAMTVISELGDLRRFKHPRALMAFLGLVPGEETSGAKRRQGSITKCGNSHCRWMLVECAQHFRKAPKVGSALTNRQEGQGKAVKELSWRMQNRLHKRYVRLKARGIKENKAIVAIARELSAFIWELQVKLNLPIPAAAPTGQ

SEQ ID NO: 132310 - protein, 341 aa, unidentified
MKNLFIGVDFSKEKVDVAIIFADGLTETAARVFNEFKTTVSGYKQLVKWVEQNSYGIDSSLWLFCGENTGDYSKGLCNFLYGKGYDMWLENAKSIKDASGLRRLKSDRADASMIAEYAMRNYDKAIMYEPLSESLAQLRELFLYRQMVVRHRCSFQVRRGEKRLTMEKSPIKTMISQSGRHIVSELNKEVEKIDKRIAELIKSDEELTEVFTIVTSVPGIGTLNAVCLMVYTDNFRRFNYDSRKISCYYGIAPFGKDSGTSVHSDPHVHYMANRQIKAMLTQAALAAVNFNPVMARYYMRLVERGKKKQVALNNVKNKLVHLVTAMVRNRQIFTPEYKISA

SEQ ID NO: 132311 - protein, 396 aa, unidentified
MAQVWAGADAGKAHHHCVVIDADGRRLLSRRVANDEPELLALIADVIALADKVTWAVDVPDGGAALLIGLLIARDQELLYISGLAVNRAADGYRGEGKTDARDAAVIADQARIRRDLVPLRPGDEITTELKILTARRADLVADRTRAVNRLRGLLTGIFPALERALPDLTQAGPLILLTGYQTPAAIRAAGPAGLQAHLAGRKVRNPGKLAALAAGAAARQHTALPAEQLTASLIATLAGEVMALNEQIKQAGKLIEDRFHRHQLAAVIESLPGIGVLLGAEFLAATGGDMAFFATPSRLAGFAGLAPAPRDSGRIHGNLHRPRYYHRGLNRVFYYSAMISLAHCPESRRFYHRKRAEGKRHTQAVLALARRRVDVLWAMLRDNRPYQATPPPAAA

SEQ ID NO: 132312 - protein, 435 aa, unidentified
MLKINYMSTLFVGIDVSSKTNAVYAMDFEENKYISSSFGNNQPGADKLVNMIAECMHKHKNLDTVLIVLESTSVYSVHISSFLSTSEVLMPYKPYVFCVNPKAPSTANYRKSYIGMEKTDPTDAYLIADFGRVGRTKKLEPWRGGQFIALKRLTRHRMHLSECITREKTYMVSNLYLKFSELQLLEGDDKPFGSLYGATSSAVLTEFLSPQEIIDMPEEELLTFLAGKSRNRISDLSKTSELLRKAARDSYRLDKCMYEPLNVSLASSFNCIQAYQKEIRLIEQAIEKCIKGMNPNALIILQSIPGIGPVWASGILSEIGDISAFHSSDALAKYAGLYWPKGDSGDFISEDNQMSKAGNPYLRHYFGEAANSIRKHIPEYADFYARKYAEVTKHQHKRALALTSRKFVRLVFGLLAKNQLYTGEKLDTEHNTESN

SEQ ID NO: 132313 - protein, 355 aa, unidentified
MTSTKYIGMDVHKESISSAVMNASGKIVMECVIETKASMILQFMSGLRGDLLVTFEEGTWAAWLYDLLKPHVTKLVVCDPRRNALLKDGNKSDRIDARKLAELLYLNKLNPVYHGEHGMRTLKELVRSYLTITKDLARVMTRVKAIYRSWGIACTGKQVYAPRHRGEWLGKISEAGVRRRAEFYYQQLDALRVVRQEVRRDLLAESKKHQAWKRLCQIPSIGPIRAAVLLGILQTPHRFRTKRPLWKYSGFAIETHSSADHRSVDGQLQRSKKQISVRGLNQNCNHDLKNLFKGAAIVASSKPGPFQEFYAALLAKGMRPEMARLTLARKIATIALIVWKKGVCFEAQYLKPQTA

SEQ ID NO: 132314 - protein, 411 aa, unidentified
MLFVGDDWAEDHHDVEIQDETGRKLAARRLPEGAAGITRLHELIAAHLEQDGDPGQVAVAIETDRGLWVQALTAAGYQVYGLNPKQVARFKERYNLSGAKSDAADAHALADMVRAERHQLRAVAADTPEAQAVKVVARAHQTLIWERTRHTLRLRSALREFFPAALVAYAGLDLTGADTLELLARAPGPEAAAKLTAAQISAALKRARRHDVPARTQVIKDALRAPQLAQPAVITAAYAAAVQAAAAVLSTLNEQITRLEAQVEAHFLQHPDAGIYVSQPGIGPVNGARVLAEFGDAPGRYASAKARKNYAGSSPITRASGKSKVVLARFIRNTRLADALQSQALSALTASPGARGYYDKQRVRGLGHNAALRHLSNRLVGIQHGCLKTGTRYDEATAWPGAVAHAEPLAA

SEQ ID NO: 132315 - protein, 475 aa, unidentified
MNIKGSKKKNQVLSVNIFEQQGIIVKADAIKAGLKASTWHEVETRGKFDKNDKLSFVSDDMLILGCDIGSETHYVRAIDIRGRELSKSAFGFSNTAEGFESMLDWSTKLAAANDKKQIVLGLEPTGHYWFCLTTWLVAKGISVVQVNPYAVKQTKEVEDNSQLKDDKKDPKLIANLVKDGNFGMPYLPEKLYADIRRLSMFRDQLNEDRIRNLNRLHREMKIYFPEYKDAFGKIDGAFSLELLKAAPFPDELAALGTEGMKQIWHEAKLRGRGYANASSILEYARKSVGIKDGADAGRQAVKWFVSRIIELDGQLSDIENKLNERCMEIPHAKNILAISGIGENILSGILAEMGDISRFDDVKEIQKLSGLGLVACSSGKHTGETKISHRGRKRLRYWLFQAAKSAVAHSGEFKELHVYYTTRKQNPLKKMQSLIVIACKILRVIFTILTKGTTYDPKKLLGDIIRPNQAIPQAA

SEQ ID NO: 132316 - protein, 428 aa, unidentified
MRKQKLIRHKQYCQIVKEITRSDQYMVVGIDIGKDQHHAFMGTATGKSLFRKLIFENNLEGFSKLLKTSDLIKNRNNLSKVVYGLEPTGNYHKPLARHLIRCNSNVVLVSGEAVNKNRSLLDGRWDKHDTKCAANIADLVSRGRCLYYDSPSPGIIELRSLLSLRKRLKKEEHSLRMRIRNNFLALYFPELDRFYSACESESLAIVKWCPDPDQIADMAFEPFFQMVTRTRRGSAQLLRLRKIHQQASESIGCPMGSAATFEAQLLVDKLKQVRQQLKDTETALNDVALEFAEYDYLLTIPGFGPYISARVLASIGDPFRFKSRKQLIKMVGYDLCANRSGKTSDKAVPVISKKGNSELRYALYQAAKVATARVDLFRTYFTELLRGRERERGIKTKMCVKLAAKMLIIAWTLMKKREPFDPEYLTIE

SEQ ID NO: 132317 - protein, 389 aa, unidentified
MRSVKKRGPGPSSSLMTPDHAGNVVGIDPHKRTLSATVADARGGILGSAHFRVSGERHRELEAWARQFGQIARWGVEGAASWGRHTAMFLAGRGHDVRDVCANRTPRSDRARQRGKSDTLDSERIARETLAHPLLPKAFKRAGQEQGPDEQHQLLSLWNNRRRSILTGRQHLVGEAEYLLCELPLELRERLPDTKAVRPRLAALAQRNRRRRYDAPTRLRLQLLDDYRAQIKSLDRQERRVTAQLEALVDQSGSTLGELCGLSTRSVAELLVEVGDPRRFTEGGFARFNGSAPLPASTAEGPGEPIRHRYNPGGNRRINAILYRMAITQLRCEPRAQRIYEGARANGHTKKEARRILKRHLSDVIYRRMIRDLAAADHASLPAQPLLAA

SEQ ID NO: 132318 - protein, 349 aa, unidentified
MQHYAGIDVSLELLSVCIVDAKGKIVKEAKVGSDPDTLVAFLRGLDLAIERIGLEAGPLSQWLHAGLTSAGFEAVLLETRHVKAALSAMTVKTDRKDARGIAQLIRMGWFRAVHCKSAGSQEVRALLVARKLLLSKLLDVEFSIRGILRGFGLKMGMVTRKRFEARVRELYADHAILEQICSAMLTARSALQTEYAKLHKALLVIVRKDEVCRRLMTTPGVGPLVAITFKTGVDDPSRIHKSKAVGALFGLTPKKYQSGETDVTGGITRAGDEMVRTALYEAASVLLSRVTRFSALKRWGMDVAKRRGTKRAKVALARKIGVILHRMWVDMTSFRWTKGAPTTMRLARV

SEQ ID NO: 132319 - protein, 372 aa, unidentified
MKSVNYSAYIGLDVHKDTIAVAVANPERQGEVRFYGNISSAKDSVIRLMKKLIKLHGSILVCYEAGPTGYGLYRLLLSMNIDCTVVAPSRIPKISTNKIKNDHRDAVALARLLRAGELVDVWVPDMTHEAMRDLVRARSCAKKDTKVAKQRIQSILLRTGKRYEKKMWTVRHRVWLANQSFPIASQQIAYEHYRQSLEQIENRIEQLDQEIDRLLPNWSLYNLVNQLQALKGVGRTIAISVATELGDFSRFSNPKQIMAFLGLIPGEYSSGSTTRKFGITKAGNVELRRLLYEAAWAYRNNAKVGNWLVTYRPDSVCQEAKDISWKAQQRLCFRYRSLVAKGKKSQVAITAVARELLGFMWDIAVSTRSQKA

SEQ ID NO: 132320 - protein, 334 aa, unidentified
MNAKLNKQASNPTDVAIYCGIDVGKKVFVVSLSCKDKTKTFSNTGGDIKQAVAYLNTNAGIHLSLVVLESTGGLEIPLAKALYQAGFRVVIANPNKISQFARSYSNAKTDNQDAKMLALYAKFLTLDELELTKHLYAPPSKEQEHLEALVVRRTQLASMRVQEKNRLHQIHQSQLDSVKQVISYLDEQIARLEQDIDTLNKHFDDTTKKFKDIKGVGNLTLATLMSMLPELGTLNNKQIVSLVGVAPHPKESGTMKWKSHCTGGRQSVRNVLYNATNVARQHEPKFKQFYERLINKGKPFKVAINACMRKLLTVINAIVKNDSVWQADYHLRCC

SEQ ID NO: 132321 - protein, 378 aa, unidentified
MDVIYPRCAGLDVHAETIVACALWEEDGHIQKDIQTFSTFSKGLGDLLEWLEEHGVTHVAMESTGVYWKPVFAFLEGYVDLTLANPQRIKNVPGRKTDVSDAEWIAKLLRHGLVEKSFVPPADIRELRDFTRLRKKWVGQLTSEKNRIQKVLESSNVKLGSVLSDLFGVSGKDILARLLEKGYVDKDELDQCLRGRLKKKKQAVYDSLLGTLTEHELRLLRLLWKHVEELEQLIEEVDQHIDRLLEPYREEVELLMTMPGVKKQTAAVIIAEMGTDMSVFETPERAASWTGLSPGNHESAGKRKSTRTTKGNPHLRSALCEAAWSAARSKTHPLSRKFWSLAARCGKKKALIAIARRMLVIIFCMISRKEPFRQPQLI

SEQ ID NO: 132322 - protein, 342 aa, unidentified
MAHFAGLDVSVAETSICIVDEHGKIVRERKVPTEPEEIIAALNGAGQSCERIGLEAGPLSQWLYGELAEAGLPVICIETRHIRAVLEAQVNKTDRNDARGIAQMMRVGLFRPVHVKTLQSQQRRMLLTTRKLLQSKMLDLENDLRGTLKNFGFKVGKIGAGSFEARVRQLVDGYPTLRAMVIPVLVARAALREQFKVLHALLLRLVRHDRACRLLMTAPGVGPVAAMTFRATVDVPARFRKSKAVGAHFGLTPRKYQSGEMDRTGRISKRGDRMVRTALFEAAQAVMIRLTRWCALKAWGMKIARKRGLRRAIVAVARRLGVILHRMWASGTAYRWGQPAAA

SEQ ID NO: 132323 - protein, 431 aa, unidentified
MKNRTSQRLEEITANTLIVGVDVAKSLQWARFVDYRGMEIGKALSFPNNRKGFESIVARIQEHCKSKILRYPIETVVIGMEPTGHYWKPLANYLMNLGYRVVGVNPYHTKKAKELDDNSPTKSDKKDAITIARLVKDGRFFNPYLPQEEYGELRGLTNARASVMKRNNAVKNTITAILDEYFPEIKTVFKYPLKGKASRQILRSCPFPAFILAMGEAGVLAEIKKAVKKTVGMKKVRELMSTAKDSVGVQNGLNAAKMRLGWLLDELELVEKQLCEVEQAMEASLIKTGYAGQILGIKGIGVVTAASFLGEVGDPLRFQNARQIARYAGYNLVEDSSGKSKSGTCISKRGRKQLRSILYLMAYTMVGKNAEMKKLYQHLLTRKNNPLKKKQALVVVSKKIITVIYSLLKKQEAYNPALVLGAVRQKMLMAA

SEQ ID NO: 132324 - protein, 331 aa, unidentified
MFPVGIDVSKKNLDLCMLYDGIKGRIKTRNIQNNRHSVENILRWLRLQHCSPEDVHVVMEATGVYHERLATELHDAGFRVSLANPHRSREFARGMGIMTKTDKVDAYMLACYAFLKKPHRWEPPAPEIRYLGALLRRRDVLLGDALREENRLEKYLSTDTPADIISSCRRMAQLLREEVSNIERQIKAHIKASPALRRDYTLLNSIKSVGPQLGMHMLVVLRSHNFASAEQAAAFLGVVPIEKRSGTSVRSRPRMSKIGPPQLRAKLYMSALCGKIYNKRMRNIYDEMCLRGKPKMVAIGALMRKLVHWCYGVLKTGTVFNDEGLKQVLST

SEQ ID NO: 132325 - protein, 348 aa, unidentified
MALTIVEDTRAVTGGVDTHADMHVAAALDPVGGLLGVGEFPATAAGYARLLGWLGGFGTVCLVGIEGTGSYGAGLARHVTAAGIRVVEVDRSDRQDRRRQGKSDPLDAVSAARAAQSGRARGEPKGPDGAVEAIRALMVAKRSARSERTQTINQARALIVTGPDNLRARFARHTAAGLVSELAALRPRPGATVGYATRIALRELGRRAEFLDGQLGRLDELIVPLVTARAPALLALHGVGPDTAALLLIAAGDHPHRLRSEAAWAHLCAVAPIPASSGKRTRHRLNPGGNREANHALWRIVITRMSSHAPTRAYVERRTKEGLSKKEIIRCLKRYAARQVYRHLRPAG

SEQ ID NO: 132326 - protein, 411 aa, unidentified
MKKHRYVGLDVHKESISIAVAEAGRRGEVRDYGRVGGSLIAVERALRKLKQSEGDKEVQLHCVYEAGPCGFILYRRLKQIGIDCAVVAPSLIPRKPGERIKTNRRDAIKLARSHRAGDLTPVHVPDARDEAIRDLCRARTDAVRDQRRSRQQLKALLLRLGYRYTGKSSWTEAHLRYLRELEMSHPAQKAVLEEYLIAISQAGERIARLSTQIELHVASWRMKGAVEALMAMRGIQLIAATVLISELGDLRRFAHPRQLYLGLVSREESTGDRQHRGAITKCGNTHARWFLIECAQHYALPPKVSKELSKRQEHQSQGIKQLSWKAQIRLHRRFFALMQRGLCRQKVVVAVARELSGFIWALLRQVPLDLGNHGSPNPSSKGNRTHENTSNDNELDLTTCLHRLVRPCGFF

SEQ ID NO: 132327 - protein, 360 aa, unidentified
MSFNGTSVGLDVHALSVVAHAFDEGTGRVERARLCPDHGEILDWLHRLRGPVRVAYEAGPTGFGLARALAEAQIDCVVAAPSKLIRPAGDRVKTDARDAAHLTRLLRLGEITAVTVPAADVEAVRDLVRAREDARADLMRVRHRLSKLLLRHGRFYSGGRAWTGVHEIWLRQQRFDDIHTAAAFDHHFDAVLTATGARDRLDEEIVSVAATPRWADQVDRLGCLRGISALTGLALTVEIGDWTRFTGSSIGSYVGLVPTEYSSGASRVQGSITKAGNAHVRRLLIESAWHHRAAYRNPGPTMRARWAKVDPALKARGHAGNRRLHQQWCQFNERKKPHVVANVAVARQLAGWCWSLATLT

SEQ ID NO: 132328 - protein, 463 aa, unidentified
MKHHPKHERASKKEPVSPSLLERIQPDAAGIDCGQNSHFVAVPPDRDPQPVHEFRTFTAELERLAEWLAHCRIKTVAMESTGVYWIPLYEILEQRGFAVVLMNARDVHNVPGRKSDVKDCEWLRELHSVGLLRASFRPAAAIVPLRAFLRQRQTLVEEAATRIQRMQKALTEMNLKLHTVLTDITGHTGLKIVRSIVAGERDPERLAAYRDPRCHASHGEIVAALTGNYRAEHLFALKQNLAAYEFLLQQIAECDCEIEALLTQLADQQPPPAALLPQARRNQVSKQAPPFDIRHPLHRLTGGADLSQIDSIGPYAALQLVAEIGPDMHRWNSAKHFTSWLSLAPNNKISGGRLLSSLTPPSANRAAAILRRCAMSLTRTSTALGAFYRRLAARAGKAKAITATARKLALLVYRVMSGNLIYDDPGATAYHQLHRARELKALCRRARILGFHLVDQATGAVTA

SEQ ID NO: 132329 - protein, 405 aa, unidentified
MKEVYVGIDVHKDENVFGSAFDGRCRGELIGKCSADMNRTLTFIRRYMKNNNLTKEQLHLCYEAGPTGFVLARRLIKLGFDCQVIAPSKIPERAGDKVKTDRLDACKLARLHRAGELISVHIPNVEDEVIRDVCRGRTDAVNEVKRGKQQLSGFLLRNGYRYTKRGKQQLSGFLLRNGYRYTKRGKQQLSGFLLRNGYRYTGKAGWTEAHMRYLRELVMPERAQKMVMEEYLLRIDAATAQVGRIDHQMELLLQTWSRRAFVEALMGFRGFRTTAAMVLTAEVGDFLRFAHPKLFMGFPGMVPKENTTGNHRRQGNITKCGNSHARWMLIECAGHYRMPPKVSKALSKRQEGLSREVRALSWHAQNRLNNRWYKLMFRKVHHNKIQVAIARELSSYLWDLAHLVR

SEQ ID NO: 132330 - protein, 420 aa, unidentified
MQVSQDDQEIIARVAALDIGKAEVVCCVRVPGQGPRARRMQEVRTYTTMTRSLLAMSDWLTGLGVTRVVMEATSDYWKPPFYLLENSFETWLVNAKDVKHLPGRPKTDRLDAVWLCKVAERQMLRPSFVPPPAFRELRDLTRYRADLITTRTSEKQRVEKLLEDAQIKLSVVASDIFGVSGRAMMAALVAGERDPKVLADLARGSMRGKTARLEEAFTGRFTDHHAFLLRTMLARVDGIDADVDVVQARIDEQIAPFAKAVTRLDEIPGIGVTTAQVIIAEVGLDMTRFPTPDHLASWARFAPGISESAGRKKGGSSTGKGNRYLARALGEAAVGCRSTKTFLGERYRRIAKRRGKKRAIVAVGRSILMIVWELLSDEEKRFVDLGPGYYDSRVNRNRSTRNHVRELQALGYKVTLEPAA

SEQ ID NO: 132331 - protein, 416 aa, unidentified
MDTMYERCCGLDIHKKTIEACFRSGKKKTHMSFGTTSAELRKLTMWLVENDCQSVAMESTGSYWKPIFNILELSGTDMKIIVVNARHMKNVPGRKTDVNDAEWIAELLQYGLLRPSFIPDREQRELRELSRYRKSLVGERAREINRLQKMLEGGNIKLTSVVSEVTGYSSRRLLDRLLRNDEPMTEDVISGLVHTSLAGKSKELETALDGLLSELQKELLIKVLDHIDDMSRRIADLDDFCRKQMKKYEDALDKLDEIPGIARRTAETILIETGLDMSRFPTAKHFARWAGLAPGNNESAGKRSSGRTTKGNPTLKSTLIQSAKVAARKKDSFFKARYQKIAARRGANRASVAVAHSMLIAIYHILKSGESFKDLGEDYYNQFNKEKKKKYYLQKLTKLGVNLKEATLSISIQTAT

SEQ ID NO: 132332 - protein, 407 aa, unidentified
MRLFVGDDWAEDHHDVEVMDTSGRRLGRARLPEGVAGVARLHALVGEHAGDDPDDVEVLVGIETDRGPWVQALVAAGYTVFAINPLQASRYRSRHAVSGAKSDAGDAHVLADMVRTDAHQLRPVAGDTAIVEAVKVVTRTHKTMIWERTRHSQRLRHALRDYFPAALVAFEDLDAADTLELLAKAPTPTAAARLTLSQISAALRRARRRDVAAKAVAVQAALRTEHLGQPDVVTGAYAASVRALIAVLTVLNEQVKELQGQVEEHFGRHPAAEIVLSQPGLGPVLGARVLAEFGDDPDRYATAKARKNYAGTSPITRASGRKKTVAARFVHNDRLVDALMTQAFSSLRASPGARAYYDRQRERGASHNTALRQLANRLVGILHGCLKTATPYDEATAWPPGAEQIAA

SEQ ID NO: 132333 - protein, 425 aa, unidentified
MQSDYAARLGIDWADQKHAWALQVADESRTEQGELEHTPEAVDQFVAGLAARFPGGKVAVALEQSRGPLFYMLSKYQHVDLYPVHPSTLDHYRQSFYPSGAKSDPRDAALILELLVKHPERLRVVVADTPEARQLGMLVEDRREAVDDKTRAGNQLRAQLKLYFPHLLAWFDVDQVVLAEMLCKWPTLEQLQRVAPARLEKFLRQRSVPESKRQRIGQELTSAVSALTDRAVIESAQGKARHLIALLELLRARIAELGRQIDDLTAVHPDRAIFESLPAAGPVMLPRLLAAFGTQRDRFRTALELQCYSGIAPVTESSGKTKIVKWRWGAPTFLRQTFHEWAWLSTRGSEWARTYYDRQRARHKSHHAAVRALAFKWLRILFRCWQQHQPYQESRYLAAVQKRANPVVITLKKSSGLTPVSELLA

SEQ ID NO: 132334 - protein, 317 aa, unidentified
MSSTPVTVGIDVAKATLEIAVRPSGEQWQVPNDEAGITALIARLQPLAPRLIVLEASGGWEVLAASSLAEAGLPVAVVNPRQVRDFAKAIGRLAKTDTLDAQVLARFAEVVQPDPRPLPDAAQQALAARLTRRRQVLGMLVAERQRLATAHPPVRDRIQAHIRWLEQELADLDDELGRTIRRSPIWREREALLCSVPGIGPTVARTLLAELPELGQLDRKRIALLVGLAPLNCDSGTLRGKRIVWGGRARGRSALFMAALVASRHNPVIRAFYARLLAAGKPKLVALTACAHKLLTILNAIVAHRTPWQPAAHRPDA

SEQ ID NO: 132335 - protein, 389 aa, unidentified
MLLDHPSDGLTAIRTHIAAIFVSLELSRSTWLVTSLSPGKGEKMSKHSVAAGNVAELLMLFAELKRKTEVRTGQSYPIITIQEAGLDGFWIHRVLQQEGIESYVVDPASIAVPRRRRRAKTDRLDGETLLRALLAYKRGEPRVCAMVVAPSPEQEDRRRLCRERRTLIEERITHGNRIKGLLFAQGISDYGPLRRDRRTRLEALRTGDGRQLPSHLRAQIGRELDRIELLLEQIKSVEAAQDALLAAARKPASEKGAPDPVTMLLALKGMGANFAAVLWSEAFYRQFANRRQVAAYAGLAATPWQSGGIRHEQGVSKAGNPRLRTTMIQLAWLWIRHQPQSALTRWFKERSPQGRKRAIVALARKLLVALWKYVTHGVLIEGAVMKPAA

SEQ ID NO: 132336 - protein, 357 aa, unidentified
MIAMKYYTSTTQFNCGIDLHARQMYVCVLDRDGKKLVHTNIRNNDFAYFLKLVAPYRHDLTVCAECMFGWYWLADACADTGIHFVLAHALYLKAIHGGKNKNDRLDSEKIAHLLRTNFIPPGYVYPAAKRPLRALLRQRLLYVWNRSELLSRLQSHQLAYNRPTHRQTLYNRESWSAQLLSAEPDPVRQLALQNDLALIGHYDTQLATLEKELLKLTKQTMNRDFTLLQTTPGIGDYLGLTILHEIGDIARFPTVKDFLSYCRLVKGTVASAGKIKGLRGKKLGNPYLRWAFGEAAVVAKRDPLVIGPLAQRLEARLNNKFKANTVLAIKLARAVYFMLKAKTVFDPERLVAALSNN

SEQ ID NO: 132337 - protein, 379 aa, unidentified
MSIVMGVDQHRAQITAEWIDLATGEISRARVLPADRAGVRRFLARFAGEQLEVALEATTGWRFLVEELRAVGAVVHLAEPAETAALRGNKKRAKSDRADARHHRELLLAGRLPESWIPPDHILDLRAQARLRHTLIEQHCQWQQRIQAVLYHHGCPQRRRLMEGDGRDWLEAQPLPATARQQVTVALAVIDMLEREIAPVERELRGYARRQTGCRALIDAYYGIGELTAVTIVAELGDCRRFANSRDAVRYSGLDITVYQSDRHRAPGHLSRQGPPALRWALYEAAQASRRGGERSPDRAYYLEVKERIGGNRACLALARKMLKRCYHTLRELGDDALAPPAAPTQPGRGSAATRRASSASPRQTNPAATQKAAGALAA

SEQ ID NO: 132338 - protein, 338 aa, unidentified
MVYGAIDLHMRYSQIRIVDAEGRVVREQRVPTTAERLVKAFDGHGRMRILLETGTESEWVARALETAGHEVIVADPNYAPMYGEIRRKVKTDRRDVAALAEANRRGWYRATHRVSSGQRAVRQMLRSRRQLVQMRAGTIALIRSLLRQEGYRLPTSSSPRVPARLAGLTLPPGLQETVAPLARMVDVLTTEIASVDAGLATGAKADPIVDRLQSVPGVGPVVALTFRAFVDDVGRFGSAAQVSAAIGLVPREDSSAERRHRGHITKAGPRELRSLLVQAAWACWRSKASGTLRAWVERLAGRRGKRIAVVALARRLSRILFAVWRDQSVFAAATIATA

SEQ ID NO: 132339 - protein, 343 aa, unidentified
MSGAYEGRQIVGMDLHRRRSVLVRMSETGERLETVRISNDPEYLREVMTRAGEAPEVVLEAAYGWYWAADALAELGATVHLAHPLGVKMFGLRRVKNDERDAADLADLLRMGRLPEAWIAPPATRELRGWVRHRAKLVGLRSGLRCQIHAVLAGAGVAVPMSDLFGVSGRELLATAALTVESRSRVESLLRVIGALEFEIDLYAKLVAGRLRTDPGYRAIQAIPGIGPVLAAVFVAEIGDITRFTQPKQLASWAGLTPKHHESDTTVHRGRITKQGSRLVRWAAVEAVQRVPAHTRLGQRRDRVAERRGHNIGVVAAARDLITLVFYGLRDHHVRCLPTKAAP

SEQ ID NO: 132340 - protein, 414 aa, unidentified
MTKIIRIGMDTSKSVFVLHGVDAAEQPVLRRKLRRRQVLEFFAKLAPTKVGLEACGAAHYWARELRALGHEVVLVPPQYVKPYVKRNKNDAADAEAICEAMSRPTMRFVPVKTAEQQAALMLAGTRDALIRRRTQLSNTIRGYAAEFGLTAAKGLDKIEPLLARIAEAALPELAKEMFVTYAREYARLKVEIVKIEAKLMAWHKDNELSRRLEEVPGIGPIGASLAAMKVPDPHAFRCGRDFSAWLGLTPKDHSTAGKTRLGVITRAGDEALRRVLVVGATAVIQKVKQGKGQPSPWLVELLRRKPPKLAAIALANKNARIIWKLMVSGERYNPARAIAARDEGMEVPSCPSVTPCSPPSRTLRAAAGGGPTGPSLTAAALGATGPRQVGTEKRPPGRTKKLKPVQVSATIASH

SEQ ID NO: 132341 - protein, 428 aa, unidentified
MNCNTQNAKIASITEKTLIIGIDVGSEAHYARAFDWRNYEYSKKALEFSNTEAGFMALRAWVEDIAEKHGKTAVIPGMEPTGHYWFALGKFLQDNGMRPVHVNPHHVKKSKELDDNNPNKNDRKDPKTIAALVNEGRFSYPYIPTGIYAEVRSLSNLRFQTQEELTRIKNRIARWFAIYFPEYKDVYGDLKAASGRMVLKVAPLPDDIIKLGAEGVNQIWRDAKLRGVGMKRAKTLITAAEHSVGSKEAPETARIELRHLLGDMDVYTSRLEELLRSIEGKLREIPYVDKLMEIKGIGLTTVSGFIAEVGDIGRFDNPKQLQKLAGYAIVANDSGKHNGESRISYRGRKRLRYVLYEAAISLIGKNAEFREIHEYYRTRKKNPLKKMQSVVAVACKIIRVFYTILTKGIDYDANKLMGDIRRPQIQTA

SEQ ID NO: 132342 - protein, 394 aa, unidentified
MLNSGMERITDIGTLLSRFQDGKEERMITRFHGIDRHKKFSTVSVLDRDGKEVRFLRSCSLEDYLSDLGAEDAVLLEASCGCFYWADRIEATGASCYVLDPRRFRIITDSWNKTDRQDARNMAKALWVFLVTGEFGIPTVYKPSVTIRTLRRLFATYNLLNRQIRMLKNAIQAMLTDDGVVLTSSQLSQLFAGRAPVAEILSEHSLSPTIVSAIEIQAALLRQVNESKDALARQIVIHSAPLADQITLLVTIPGITPLTAAAFLADIGDVRRFKSLRQMNAYLGLVPRCHDSGGKSRPGHITRESRKLTRTILTQSIYQAVKSTPSWQRNYDELKARRGAGRARIAMIRRLCGVMRRMLLNGEKYHWLKEDLYQRKLRQYRQVLENAKKEQNAA

SEQ ID NO: 132343 - protein, 334 aa, unidentified
MSNVTTVGIDLAKNVFSLHAVDGRGVVVLRKTVSRARLAAVVSQLPASVIGLEACSGAHEWARRFAALGHTVRLMAPKFVAPYRKSGKNDGNDAEAICEAVSRPSMRFVPVKSVEQQAVLTLHRVRLGFVEERTASINRIRGLLAEFGVVLPQRAVEVRRSAATALELLPTLAQRALRDLLAHVRVLDERVGEYERELEQHARRDERAKRIQQLSGVGPISASAIVASVADAHEFKNGRQFAAWLGLTPKQYSTGGKTRPGRITAHGDPYLRTLLIMGARSMLQTALRRTDRLARWALGVRARRGYHRACVAIAAKHARIVWAMLAKNQSLQLT

SEQ ID NO: 132344 - protein, 401 aa, unidentified
MAPTAGIDWASEAHEVCVSEEGRVNERFSATHDERGIAALAGKLVRLGVCRVAIERPDGILVERLLAAGLEVLAIHPNQVKAARARFAVAHGKSDRFDAYVLAELARTDAHRFRALVPDGEETKALRALTRAREDLVGVRVELANQLRAQLETFWPGALLFAAVDSPISLAFIERYPSPGDAKGLGAGRMAAFLARESYSGRTDPAELLARMKAAPQGTAGPEEQRARRAVVLGLAAALSPLVAEIAALDHQIRERLAIHPDAPIFAPLFRDPKTTICPATLIAEIGDARGRYPTEAAMAADAGMSPVALESGKLRVATFRRACDKRLRVAVATLADSTRHWHPWARDVYLRARARGQDHPHAIRTLGRAWIRVLWRCWRDEVPYDPARHGNFGRLQTVGG

SEQ ID NO: 132345 - protein, 348 aa, unidentified
MRFYNGSHAFYCGVDLHARTMFTHVLDQAGATVFARDLPARPDAFLHAVAPFRHGLVVGCECMFAWYWLADLCEDQSLPFTLGHALYMKAIHGGKAKNDRIDAAKIAGLLRGGMFPMAYVYPRQKRATRDLLRRRCCFVKERSQLIAHIVNTNSQYNHPPLTAKLCYARNRTEGIAERFADPATQLSIRADLNLIDHFDEQIDEIERVVLRTAKVDDPLTLGFLRTIPGIGKILSLVMLYEIDQVARFPEVGNFLSYSRLVRPEHESAGKKRGSGAKKIGNGHLKWAFSEAACLMLRAWPDAKKWLARQERKRGKRKALSVLEAKIGRTVYHLCRKQQPFDHKRFFCQ

SEQ ID NO: 132346 - protein, 388 aa, unidentified
MTYYVGVDIAKYTHFASIIDSNGTVIEHPFSFANNEIGFKLLLAKLQNYPKSEIVIGYESTAHYHLNLHHFLDDSGYKTALINPILTKRLRSISIRNVKNDKVDSLTIALFLYSNYSKLNLSDNGIQELRVICNQVHELKQTKAKLYIQLTACLDLTFPEIKAAFFKGNLKSNAAHNLLKKYNTAKEISAITPTQLVKIISKNSKRFNKNRVESLVDLAKHSVGINSKSISIKIRQIIEQVELIERQIEDLLDVICNDEIVRDCALLQIPGMGYLQAANILSVIYSIERFDSPEQVLAYAGLDPIIRQSGLFNAKSTRMSKRGNSLLRYTLIWSALNCSKNSKTMSEYYLKKRNEGKSHYNALGHCARKLTNYIFWILTHPNDKFNLD

SEQ ID NO: 132347 - protein, 416 aa, unidentified
MSTMDWSRRLLFVGDDWAEERHDVELQNESGRVLGRAKLPEGVAGVARLHAMIGEHLGESDEAIVVVGIETDRGPWVQALVAAGYQIYAINPLQVARYRERHGVSGAKSDTGDAHALADMVRTDRHQLRPVAGDSVEAEAVKVLTRAHKTLIWERTRHLLRLRHALREFFPAALVAFDDLDAKDALELLGAAPDPASAAALPIERITAALKRARRHHAVAKAEAIAAALRAEHLGQPPVVTSAYAAMVRAQVAILTVLNAEVRTMEEQVEAHFGKHPDAEIYLSQPGLGVVLGARVLAEFGDDKDRYADARARKNYAGTSPITRQSGKRKLVLARYVHNDRLIDALGLQAFAALRASPGARAYYDQLRARGTGHRAALRQLGNRLVGILHGCLKTSTNYDEDKAWTPTQQDQQLAA

SEQ ID NO: 132348 - protein, 327 aa, unidentified
MDDVAKKMEVNVGIDVSKESLDIAVRPTGETWNCTQSSDDLEALAKRVAEIGPALVVLEATGGLEMPIAAEMSSADVPVAIVNPRHVRDFAKAIGKLAKTDAIDALVLARFAEAVQPEARPLPDAKTQELKALLARRRQLIVMITAEKNRLHQARITKVSTSIRRTISMLQKQLKAIDTDLDRMIRASESWRAKEDLLRSVPGVGKILALTLITELPELGKLNRKQIAALVGVAPLNRDSGTFRGTRRVWGGRAAVRTCLYMATLTAAHHNPVIRESYRRLLAKGKPKKVALTACMRKLLVTLNVMIRDHRTWGAYGAPLPNLQHSC

SEQ ID NO: 132349 - protein, 371 aa, unidentified
MEHTRFIGLDIHKERISIAVAESGRTGAVEYLGEVANDPGAISKLCDRLGRPGRPLAFCYEAGPCGYGVYRQLTSLGHRCDVVAPSLIPMKPGDRVKTDRRDATMLARLHRAGELTPVWVPDADHEAMRDLIRLRSVVRQIVTRTRQHLQGFLLRHGRKHGQGTAWRMAYRRWLSTLAFQHTAQQIAFQDYVDAVMDAERRLQRVEEQISCLLPEWNLRPVVDALQAMRGIALINAVVLVAEVGDFTRFSSPRQLMAYFGLVPGEQSSGETIRHTGITKTGNSHARRALVEGAWAYRMKPRIGRHKVDRIEALPKIIRDIGWKAQVRLCARYRRLSARGKNANVVNIAIAREMVGFIWSIACTIQSAPRTA

SEQ ID NO: 132350 - protein, 343 aa, unidentified
MEYGAIDLHTKQSEIRIVTAEGSVVLHRRIATTRAALSGIFAERSRLRILLESSTESEWVAQHLEELGHEVVVADPNYALMYGQRHRRIKTDRRDAIALGEANRLGIYRTAHRVSSAQRMVRRQLQVRDQLIRMRTQIINLLRGQLRSEGLRIRSGRAESFVARYRAVAASAALRAVLEPVVEALSALAPLIATADAWAHDTAHGDAVARRLMTAPGVGPITALTFQAALDTVTRFGGPGAVTAYLGLVPQEATSAERQRRGPITKAGPGRLRAVLVQASWATWRSPRSSATLHAWVHRLADRRGKRIAIVALARRLARILFAMWRDRRDFQPAQVGRAVVAA

SEQ ID NO: 132351 - protein, 416 aa, unidentified
MNAVGIDVSSRKSTVAVLRPLGEVVCLPFDVTLDIAGLASLVEKLKALDGETRVVMEHTGRYYEAVEKALHEAGLFVCAVNPLLIKEYGANSLRRVKTDKADAVKIARYALDNWADLRDFTPMDAIRYDLKTLNRQFQLASKQRTASANNLIALLEQSFPGIRKCFDSPVRSDGTQKWVDFAHSFWHVDCVRKQPFPAFCERYRKWCKRHAYLFKLSNAEEVYALAKRAVVLTPKAKVVKVLVQEAANQLISISRSVEVYRAEMDRLAAMLPEYPVVMAMYGVGKSYGPQLMAEIGDVRRFERKQALVAFAGIDPMPNQSGDKNVRSNKSSKRGSPYLRKTLFNVIRTYLQCAPQDEPVFQFLNRKRAEGKPFYVYMLAAANKFLRRYYAKLRDYFASLDTLQPVAPIPTILKATL

SEQ ID NO: 132352 - protein, 399 aa, unidentified
MNSVGIDVSKGKSMIAVMRPFGEVVVSPFEIHHTDSELCELAKLLRSLPGETRVVMEATGNYHLPVAWLLNDSGFYVSVVNAMLVHDYGNNSLRRAKTDKKDAIKLANYGLDHWLTLPKYVPEEDTRLMLKNCYRQYQQYSKVQTMLKNNLISLLDTAFPDANRLFSSPPRADGSEKWVDFVASFWHCECVCCLSEKSFTSKYRKWCKKHGYNFSEDKALDIYASACGHFDVMPKTETAKLLVEQAVSQIRATSAALAALKQEMQSLSSSLPEYPVVMKMFGVGPTLGPQLMAEIGDVRRFHSKKALVAFAGIDALPYQSGQMEVYGRSISKRGSPSLRRTLFLVMGVYLQQSPQDEPVYQFMDKKRSEGKPYRVYMMASANKFLRIYYATVKAYLDSL

SEQ ID NO: 132353 - protein, 400 aa, unidentified
MLSIGIDVSKGKSTVCGMKPGGEIVYAPFEVQHTREGMSELVSLLRSSGEEVRAVLESTGSYHCPVVAALLENGIFVSVVNSLRMKRFCSQSIRKVKTDRIDAMQIALYGLAYWQELQPTRLPEDTYRELQLLARQYYQMTSILIKAKVDFNAICDQVLPGMQELMSDHAGRHKLSDFVLRYRHTTHILEMGETRFRKDYCKWAEKKGYRNCERMAALIFATAQNGIPVLPNAPSTQIVITEAIRVLHTVEASRDAILTQMQALAKTLPEYSLVREMPCIGDTLAPRLIAEIGDVRRFHSKRALIAYAGIDAPPYQSGKFCANNRHISKRGNRYLRKTGYEVMQSYVMHKPANDPIFTFIEKKRGEGKSGKLAMVAGLNKFLRVYYGKVTELYRSLPAIE

SEQ ID NO: 132354 - protein, 400 aa, unidentified
MLSIGIDVSKGKSTVCGMKPGGEIVYAPFEVQHTREGMSELVSLLRSSGEEVRAVLESTGSYHCPVVAALLENGIFVSVVNSLRMKRFCSQSIRKVKTDRIDAMQIALYGLAYWQELQPTRLPEDTYRELQLLARQYYQMTSLLIKAKVDFNAICDQVLPGMQELMSDHAGRHKLSDFVLRYCHTTHILEMGETRFRKDYCKWAEKKGYRNCERMAALIFATAQNGIPVLPNAPSTQIVITEAIRVLHTVEASRDAILTQMQALAKTLPEYSLVREMPCIGDTLAPRLIAEIGDVRRFHSKRALIAYAGIDAPPYQSGKFCANNRHISKRGNRYLRKTGYEVMQSYVMHKPANDPIFTFIEKKSSEGKNGKLAMVAGLNKFLRVYYGKVTELYRSLPAIE

SEQ ID NO: 132355 - protein, 379 aa, unidentified
MEIITQNEKILYIGIDVHKDTYSLCCFDFFRNEISDEMTIKATTKAVIKYLEAIKKKHKEEILFACGYEAGPTGYGLCRGLQKAGYGCVVMAPTTMSNPDGKRRVKTDRIDARAIARILAYKSYSQVHLPSEEMEALKEYTRARDAKKRMFKKAKQELLSFLLRNGKSYPESGNYWTEKFFKWIKTVQFSEKWMQEAFNEYLAEVYSLKAKIELMDMKIREIAELEIIKDKVDKLVCFSGIDVTTAVETVVEIHDFTRFATAAQFVSYLGLCPGEDSSGKTKNMLPLTKAGNKRVRALFCESAKAIKRTNPYGQKSKRILERQKNASPEIVAYADKATKRIRTKMKHLEERGKNYNVSSAAGARELACFVWGMMNGKIA

SEQ ID NO: 132356 - protein, 411 aa, unidentified
MIKENYMYVGIDLHKETHTAVIIDCYNQKLGEITFPNRPADFPKLVTKVKKCNTDGKEVVYGLENAYGYGRALAVWLIDKGYFVKDVNTAISHRQAKHRGAMYRKSDSDDAKAIALATLNMLDKLQDACPNDAYWSLGQLVHRRDNIMKQRTRLVNQLHEQLCIVYPSYKQFFNDISRPTALYFWEHYPSRKYLKGKSVEDLRAELVPVSHNKCATKTCEKILDAIAGDKVKNNAYQDARDMVTLSIVSDLQHYDKQLAEVDKMLEQMYKMLGCTLTTIPGVNVITAVKILAEIGDIKRFSNANKLAQFAGIAPLHLSSSGKGKDLATKQGNRRLQATIYFLAIQMVQISSKGTPRNPVVRAYYEKRKAEGKTSQQALICISRRLISIIYGMLKSGTEYRMPVMENTGETV

SEQ ID NO: 132357 - protein, 397 aa, unidentified
MITTDVDIFLGLDLGKTDHWACAVSTVGTKIWNKTLPNDEAKLTAVYENLSAKGTVLVVVDQPATIGALAVAIAQNLGIPVAYLPGLSMRRIADMYPGTAKDEKDAFIIADAARTMPHTLRSIQVSEEDEATLGMLTGFDLDLARQITQTSNRIRGLFTQIHPPLERILGPWLEHDAVLEVLASWPTPAQLKHAGKARIDAKLKKQGARRHTAWASAIIDALDEQTVVVVGTDAAGLVIPHLARQLISLHAQRVDVANHLETMVEAHPLYPVLTSMPGVAVRTAAIIIAETSGKTFTSAAALSSYAGLAPTTRQSGTSIKSERDSHSGNKRLKRALFLSAFESIRFDPTSREYYDRKRAQGKRHNQALIALAHRRLTVLFAMIRHGSLYDVPELKIA

SEQ ID NO: 132358 - protein, 342 aa, unidentified
MDEYDGRQFVGIDLHRRRSVIVRQSESGEQLSAVRIVNDPVALGLQLEQAGSDPEVVLEATYGWYWAVDVLQACGAHVHLAHPLGVKGFRYRRVKNDVRDAADLADLLRMGRLPEAWIAPPQTRELRELVRYRAKLVAIRSGLKAQIHAVLAKAGVLIAASDLFGVTGRQRLAKVPLGAAYAQRIGSLLQLIDIFDSHEARFAAMIAEQLDTHTGYHAIQQVPGIGPVLAAVFVAEIGDVHRFTDPAHLCSWAGLTPTHRESDTVVHRGHITKQGSKAVRWAAIEAVQRHPTTAKIAADKHRIEARRGKNIAKVAAARKLLTLVYYGLRDGHIRALDRTRAA

SEQ ID NO: 132359 - protein, 333 aa, unidentified
MKLTTVGVDIAKSVMQLYYIDAETGEIVNKPVKRVAFLEHFANRSPCLIGMEACGGSQHWARKLTAMGHQVKLMPGKFVKAFVMGNKNDAADARAIWMAVQQPGKSVAVKTETQQAVLGLHRMREQLVKFRTMQTNSLRGLLTEYGEVLGKGRTALDKAIPGVLERQVDRLPTILINTPREQWNGPVELDKQIAQIERRLQTWMKEDKACKTIAAIPGVGLLTATAAVATMGAAKTFRSGREFAAWIGLVPAQTGSGGKVQLLGISRRGYTYLRTLLIHGARSVLFHPKEPSLFDKCVRNVHVRQCALRPAISLFQNRRRRTSEGTGTGKYTR

SEQ ID NO: 132360 - protein, 340 aa, unidentified
MTITTVGIDLAKNVFAVHGFDQNGKTVLVKSRVTRAALPGLIAGLPHCVIGMEACSGAHYWAKLFRQYGHEPRLMAAKFVSPYRMAGKSGKNDAADAPAICEAVRRPHIRFVPVKDESPQAMQCLHRTRQGFIEEKTATYNRLRGVISEFSIIAPQSIDALRRMVSVQKSSLPLQVQQCIDDLLEHVDRIEANIAEYDRILSRMAKTDHRSQRLMELKGVGPTTACALVACTGNAHDFKNGRQLAAWLGLTPSQYSSVGKSKPGRITKAGDSYLRTLLVQGARSVLIGAEKRTDSFSRWVCSLVERRGYWRAVVAIAAKNARLCRASLHYGDDFRLYSAS

SEQ ID NO: 132361 - protein, 347 aa, unidentified
MGIVVALDVHRNQITYKLLDRETGEVRRGRVAPAARVDVRAWLEQFAGCEAEFALEGTTGWRFVVEEIERAGYRAHLADPAETAAKRGRKRRAKTDNADCDLQLRLLLAGELPESWIPRTHILELRARVRMRKTLIDQRTAWLQRVQAQLFQQGVPAGLRLRSEVGRQALAAAELSPAGRELVGLGLRMIDALDQELAPLTRELGAFARRQLGCRALIARLYGVGPISATAILAELGDARRFSSSDDAVRHAGLDVTVHQSDSKRAPGHLSHQGPEVLRWALFEAALSAARVGSPDHGYYLQVAERIDHNRACISLARKLCRRAYHILRELGDEALAPVEEAIAAAA

SEQ ID NO: 132362 - protein, 476 aa, unidentified
MVVPNQEPKKPAKRQKSTKPNQSPQRSLPVPVPASTAALTVINPDAAGIDVHSNMHMVCVPADRDANPVRQFGANTADLHEIAAWLKKCRVRTVALESTGVYWIPLFELLEAEGFEVKLVEPGQLSRCGARPKTDVLDAQWIQRLHSYGLLRGSFRPPDSILALRAYWRQRQMQVRYAASHVQHMQKALEQINVKLAEVVSDITGLTGMSIIEAILGGERDPVKLAKLRDERCHCSEDQIALALQGTWRPEHLFELRQAYELYQFHHKQITECDNQVQAELAQFPNRAGEKTRTHKPRKRGRKSNDLRFDATGPLFKALGVDLTLIDGIDVGTALVILGEIGVDVSRFPTEKHFASWLRLCPPQDESNNTKKRRRRRKNTSRVATALRLAARSVGKTMTPLGLFYRRIRSRIGALGAVKATAHKLACLIYRMLKYGHEYVVQSLEEYEAKTKANMLKVLQRKAAAMGFQLTPIPTQ

SEQ ID NO: 132363 - protein, 318 aa, unidentified
MTIHTESQIEINVGVDVGKSKLDIVLHPLDLHFQIPNDEESILKVIHVLKKRNIKRIVVEATGRYEHAFVFACDQANLPIVVVNPISVRRYAQVIGILAKTDKVDANLIAHYAATIQPKIKPIADKQSRLIKDLLVRRTQLLEMQTMEKNRLQILPKALHRSIKTLLRSLETQINTITKQIDEAVMQVKHWRTQTEILTSVPGVGKVLAYTLLSELPELGKLNRKEIAALVGVAPMNRESGSWNGKRRIRGGRHRIRTVMFMAMLSSIQCNPVFKRFYEHLKAQGKLPKVAIIACMRKLIVVLNTMLKNETRWGENMA

SEQ ID NO: 132364 - protein, 346 aa, unidentified
MEHHAGIDVSLELSSVCVVDGRGKIVREAKVASEPDALVSFFKGLGLPVKLIGLEAGPLSQWLHAGLMRAGFEAVLLETRHVKAALSAATVKTDRKDARGLAQLIRMGWFRPVHAKSIGSREIRALLVARKQLLGRLLDVELSIRGILRGFGLKVGQVTRKTFEARIRELVTGHTMLERIAEAMLSARATLQAQYEKLHKAILAFVREDAVCRRLMTVPDVGPVVAVTFKSGVDDPNRITKSKAVGALFGLTPKKYQSGEKDVTGGITRTGDEMVRTALYEAANVLLSRITRFSKLKRWGMDVAKRRGSKRAKVALARKIAVILHRMWIDGTTYRWAEAKPIAAQA

SEQ ID NO: 132365 - protein, 313 aa, unidentified
MYYIGIDVSKKDLAVFNGKKDLKFINQEGLRPFKKYLKGKYKNFSDLVIIFEPTGIYSFNLKEFCAENSIKAYIVNPKRSHSFARSLGIRPKTDKIDARILYQFHKLIDAKDIKVPKVDQQTKALSSYLTSYEFAVKQRVAISNHLESLRDEKLVSLLKKELKRARKLEDKIFHDIKEYIRQNQNLREDYERLLTISGVGEKMAIALLTLFKTYQGTNRAQITALVGLDSTKRESGSSVRGRAKISKNGKAIYRKVSYLPAICATVHNQKIKIFYQRLLAHHKPKKLAIIASMRKILLIAHAMYRDKTEYMAV

SEQ ID NO: 132366 - protein, 378 aa, unidentified
MKNVRFIGLDVHAETIAVAVAEPGGEVRSLGTIPNRPEPIGRLICKLGKPEQLRVCYEAGPTGYVLYWQLSELGVKCEVIAPTLVPVKAGDRVKTDRRDAEKLARCYRAGDLTPVWIPDAAHEALRDLVRARLAAKRDQLRARNRLGKFLLRHGRRAPLGSTAWSTRHLAWVKQQSFEQAARQATLVDYLHEVEHAAERIVRLERSIDMAIETLPAKMRAVIEALQSLRGIAKVSAVSIMAELGEVSRFEHPRQLMGYSGIVSREHSSGERTRRGGISKAGSAHLRRIVIEAAWAYRHRPGLGTTLLARQRDLPEEIKAMAWKAQHRLHARYAKLLAKGKAKQQVITAVGRELLGFIWAIGIAAERSQAPRRALERAA

SEQ ID NO: 132367 - protein, 283 aa, unidentified
MYVGIDAHKRDCHATLLNDAGETVSTARFPSTTKALAQWAKRLPKGSVLALEASTVAKRIYWHLKEMGLDVRMAHPLEVRRRAGNKRKTDALDSFELADLMRMNRLPEAYVPSPEANERRQVLRYRNDLGKKARLVRNQIHALLVHNGVTFELSDTFGVVGRSRLDRMKLQSIQRHLLDGLLAQLDLLGHQIEEVEGQLAELGSKDPAVQKLMTLPGVDFYSAQIILEEIGDVTRFPTEKQLSSYAGLVPRVMQSGTTLRMGHIHKQGPKALRWILTTCAHPR

SEQ ID NO: 132368 - protein, 402 aa, unidentified
MNCVGIDVSKGKSMIAVMRPFGEVVISPFEVQHTASELSELAKLLKSLDGETRVVMESTGNYHAPVAWLLHDAGLYVSVVNAMLVHDYGNNSLRRAKTDKKDAVKLANYGLDHWLTLPRYVPEEDTRLMLKTCYRQYQQYSKVQTMLKNNLISLLDTAFPDANRLFTSPPRTDGSEKWVDFVATFWHCECVCGLSKKAFTAKYQKWCRKHGYNFSQDKALDIYASACGCFGVMPKTNTAKLLVEQAISQLQTTSAALAALKQEMQSLAASLPEYPVVMGMFGVGPTLGPQLIAEIGDVRRFHSKKALVAFAGIDAPPYQSGQIDVRSRSISKRGSASLRRTLFLVMGVLLQCAPMDEPVYQFMNKKRSEGKPYRVYMMASANKFLRIYYASVKAYLDSLEHD

SEQ ID NO: 132369 - protein, 318 aa, unidentified
MVEAPCYIGADIAKDTIELAYANAMGAPLRIENRRTAISAWLRGVPRGTHLALEATGPYHELLCTLAYRRGLVVYLLNPKRTRHYLQAMSPRAKTDRVDAPLIATFLANERPRLRPWAPLRPEERRAWALLRRRAKLVNARQRLEQSLAGLPSLRSTRAALLAELERALGVLDTQLARLLAQDPAHAHLLHDLQSIVGVGTLTSSALLLALKRGTFATSDAFIAFLGLDLRVRDSGNKRGRRRLTKHGEPELRRLLYTAAMAARRTQAWRPVFDHYLGRGFSSIQTLVIVARRIARVAWSLYKHGGSFNPQRLVQGLT

SEQ ID NO: 132370 - protein, 353 aa, unidentified
MDGLILAIDLGKFNSVCCWYDTATKSATFQQVKTTRAHLGRDLTWRRVAGVIIEAGSPAGWVHDLCAELGLPCLVANTAGAAWQWKNLKRKTDRDDALKLARLAAIGELPTICVPPPPIRQWKSLIGLRKRLVGERGRGQNRIRGLLVGQGLAAPEGNKAWTQLGLDGLAQLARPLSECAATELWRGELMTLIARHRFLEGQIREVESALDTLAKSSSAVPLLTSVPGVGVRTAEVIAAHLHDGRRFRNADELSAYAGLVPRQYQSGATDRRGRITRRGPKLLRAALVECAWCSLRYNCWARDTWLRLLANGLSKKKAIVALARKLLIRCWGILKSGQPWRNPSSAVAASAVG

SEQ ID NO: 132371 - protein, 406 aa, unidentified
MNMNAVGIDVSKRKSTIAVLRPGGEVLMKPFDIPHKSADFQTLVNKLKGLDGETRIVMECTGHYYEPVARELAQADFFVSAVNPQIINNFQGQDNPLRKVKTDKADSVKIARYTLDSWANLKQYTLMDQLRSQLKTMNRQFDFYTKHKTAMKNNLIALIDQTYPGANTYFDSPARDDGSQKWVDFLDTYWHVDCVRKMSLNAFTDHYQKWCCRRKYNFSKAKAEEIYGAAKELIPVLPKDNFTKCIIKQAVAQVNAASQTVERLRALMNETASKLPEYPVVMAMKGVGPSLGPQLMAEIGDVTRFTHKGAVTAFAGVDPGVNDSGDYSQKSVHASKHGSPVLRKTLFQVMDILIKTKPDDAVYLFMNKKRTEGKPYYVYMTAGANKFLRVYYGKVKEYLSTLPQSN

SEQ ID NO: 132372 - protein, 347 aa, unidentified
MNYFAGLDVSLEETAICIVDDAGNIVREARVASEPETLVAFFSSCGMKMARVGLEACSLTAWLHAGFTEAGIPAICIDARLAKAAMGAMPNKTDRNDARGIAQIMRTGWYRAVHVKSPSCRSWRALLTARRMVLNKRRDVENGIRALLREVGLKVGTPSRKDFPARVRELAADDPVLMSLAESLLSVIEVMSREVERLTKRALDEVRVEPTCRRLLSVPGIGPLTALAFRATIDQPGRFRKSRDVGAHLGLTPRRYQSGETDIPGRISRCGDELARTALYEAAHSLLIRSTKWSSLRAWGMNIAKRRGMARARVAVARKLAVILHRMWVDGSEFRWGKQAAAPAVAA

SEQ ID NO: 132373 - protein, 438 aa, unidentified
MGAFDPRSVSRGLPALMYSCMKRRRLLQIVYERCAGLDVHKKSVMACLITPAANGERRKARRTFSTMTADLVRLRDWLTEQQCSQVAMESTGVFWRPIFNILEGHLEVMVVNAQHIKAVPGRKTDIKDAEWIADLLQHGLLRPSFIPPAWQRMVRELTRSRVSLSEERSRVIARLQKGLEEANIKLASVASDLMGKSAQQMLHALLEGELTPEAMAEFARGRMRPKREPLVQALTGHLQAHHRFLVAEPLKHLSELQEAIARLSTEIAERLRPYEELLVRLETIPGVKRRLAEIILAEIGPDMQRFPSAQHLASWAGMCPGNHESGGTRLSGKTRKGSQWLRTALVEAAHAASHGKNAYRSAQYHRLAFRRGKQRAAVALAHTLLIIVYHLLAQEEKYQDLGGTYFDALDREKQEQRLVRQLEKLGFEVSLTPAVSQA

SEQ ID NO: 132374 - protein, 345 aa, unidentified
MQESFYVGLDLGSSHCFQSVINSDGALASARSIPTSEHHLRAAFTNLQGDVRVHLEAGELSNWVASIIQPLVAEVIVSHPRSLAWIGKDSQKDDKVDAKKLAELLRLGRVHQVFYQSDNSRQTFKYLVTHYEQLSREQARFKSKIKARLRTLGIIRKDSHLFSTLGQTALLDEIKSVSIKQMLTQSFAVLNQMLASFDEAKQAMIEFSKQFREIELLQTAPGVGIITACRFVGYVQTPHRFSNKRKLWRFCRLGVTRRESNGKRLAHPRLDSSGVGSLKDVSRKVFEAARRTKTDNSFKQFYEMSLLNTKNAVHARLSTQRKILATLRAMWISNQPFRNDLTEIG

SEQ ID NO: 132375 - protein, 403 aa, unidentified
MNSVGIDISKGRSTVAVMRPFGEVVISPFEVRHTDSELSALARRLKSLDGETRVVMEATGNYHAPVAKLLHDAGLYVSVVNAKLVHGYGNNELRRVKTDKKDAAKLANYGLDRWLTLPRYVPEEGARLLLKNCYRQYRQYSKVQTVLKNNLISLLDTVFPNANRLFSSPIRGDGSEKWVDFVAEFWHCRCISEKSEKAFTNKYQRWCKKHGYSFSVAKAHTIHTEASGHIGVMPKSETTKLLVEQAVSQLRATSAALAALKQEMQTLASQLPEYSVVMDMFGVDPTLGPQLIAEIGDVRRFYSKKALVAYAGLDAPPNDSGDVTGKHKSMSKIGASSLRRTLFLVMGVYLQNAPLDEPVYQFMDKKRAEGKPYRVYMMASANKFLRIYYATVKAYLESLEHTA

SEQ ID NO: 132376 - protein, 392 aa, unidentified
MKAIGRAIGLDVHLDFCEIAICEEGKVRSAGRVASTPEALGVLAESLLPTGRVALEVTGSWWEILRILEPHVARVIVVSPDETGIRQARAKTDRLDARTLARVLASGELDGVWTPDELTRVLRRRLARREQLVRSRSQAKNEVHAVLMRRLKGRPPVGDLFGVGGRRWLRQLELPVEECETVEGCMRHVEFLDAEIAEVERLIARQMLSCSDARRLMSVPGVNVICAASFLAAIGEVRRFKTSRQLAAYLGLDPKVRQSGSELARSGRISKQGSASARWAMVEAAFSVVRQPGPLHAFYERLRSRRGHQIAVVASARKLACVFWCLLTREEQYAHRQPSLTAKKEGVSSSVYADSVSVTVTPGLSTVTVNFQMSDVSVGDAVGEVDFERGER

SEQ ID NO: 132377 - protein, 371 aa, unidentified
MKNTIKYVGLDVSKEKIAVAIADEGRDPARYHGAIAHTPDAVGRLIRKLKSPEVTLEVCYEAGPTGYDLYRWLTKMGISCTVIAPSRIPQRSGDAIKTDRRDAERLAQLHRAGELTAIHVPTPELEALRDLIRARENAREELHRARQHLVHFLLRHQIHTPEEMKKRWTKRYRLWLSTLTFEHTAQERVFTEMQQQLREVEERIKRLEEAMRKEAEICPYASVIQALQGLRGIALLTAMTLVVEIGNFERFRSPAQLMSYLGLVPRESSTGPKTRRGRLTKTGKASVRRALVESAWSYRYLPAVKGDLEKRLEGQSAHVQETSWKAQERLHKKYVQMVKRGKHRNLVIAAVGRELVGFIWCVAVKAEAGIA

SEQ ID NO: 132378 - protein, 397 aa, unidentified
MRLFCGIDWAQEEHSICVIDENGRVRARFRAAHSAAGIEELLAQLRRLGDPAQLPIAIERPTGALVDALVQAGHPVVPVHPNVVKAARPRYSAAGAKSDPGDAYLLADLLRTDGHRFRPLRPLSDETRALRSLVRSRDDLVAQRVALANQLRALLESFWAGAVAIFADIDSPIALAFLAQYPTPAHATKLGPKRLAAFLARNAYCGRRSPELLLERLRSALVVDIGDNEMEAKGEIVRSLVAILETLVARLQTLSACIEHAVTHHPDGPVITSFPRAGRINAAQILAELGDDRARFCNDAHLAAEAGVAPVTRESGKHRSVTFRWACNKRLRQALICWADNSRRASPWAERVYSSARARGCDHPHAVRILARAWVRVLWRCWQDSQPYRLEQHRAAA

SEQ ID NO: 132379 - protein, 468 aa, unidentified
MQTTSRNSTSKKSSKDFYSRSVITTNMPVINNHAAGIDLAGASSHFVAVESNGVVECREFGGTTDEVMMIVDYLKDNNVTSVAMESTGVYWKIVCELIERAGIEVYLVNPTHVKNIPGRRKDDRSDACWIQKLHKFGLLSASFRPQFDDRVAQDLYRQRSRLVRISSDEIRRMQKALDVMNIRVHKVISDINSVTGMNIIRAIVAGERDLDVLAGFRNSGCKCSIEELKAALKGNFNTHNVRELQHALERYDLCEKQISEIDTDIEDVMRSLILLADKSIEAEVSKASKQKSKRHEPDFAFIPYLNLLIGKDPTIIPGIGVQSALGLFCELGRDFTKWETEKHFTSYLTLAPVQKISGGKLLSSSTRPGSHPVAKILRQCAASIIQTDCDLSSKYKVLAIRVGKGKALTAIARKIAIQYYYFMKYDTFCVNSYNERNEKIHHEKQVSKVKKMAKKYGLTVVESIPATQ

SEQ ID NO: 132380 - protein, 429 aa, unidentified
MKIIYPRVCGIDVHKKFIVAVICISESVEPVYLKKRFSTFHNDLIRFRDWLIQNDCQNVCMESTGKYYIPVYNILESHISNIVVANPKWVRAVKGEKDDDKDAKWIADLFKLGIVKSSFIPQKDFRILRELTRYKYKLVNMRSSEKNRYQNALTSGNCKLDMVFTDVFGKSASNIIDLILSDNPYTDEDILSKVHKNCKASPDMILNSINGTDLTPVQKSRIELVNNHIKQLSSNIQRLDKLIDLMIEPYEDYISFLCQIPGVSRNSAITILSEIGVDMNQFTSTRRLTSWAGLTPSSNQSAGKKKSVRISRAGVYLKPCLVEVAHAAVKDTNHPYYANKFNKISKRRGKKRAYIAIARKILVAAYYMLLTGEIWNPADLAEVETPVEQRIKYVKNNLKSDIKQLLDIGLTVEELTLMIQQNANNIATQ

SEQ ID NO: 132381 - protein, 386 aa, unidentified
MQNLNDLSRSLIALEPAVTLIAVIEMSLSSWLVAGIVPGLERQPLKKLAVDESALLKLLHRWREEAEKAGCRIERIVVAFEAGRDGFWLARWLKARSIEAHVIHAASVAVSREHRRAKTDRLDTELLKRAFLGWLRGERDHCKLVAIPTLKDEDAKRPNRERENLVGEQSRLINRMKAALIRLGIRGFNPKLKRAAGRLDSLRTPEGEPIPPNTLAELRRDMERRRLVRNQIRQIEQARLEHFEQTPNDGPHAMVRLLARVIGVGVETADMLVHEVLSRNMRDRRAIARYAGLTGSPDESGRKPREKGLARSGNGRVRRGMIQLAWRFLTYQKQSALAQWYRARTVNAVGARKPMIVALARKLLIALWRLVRQGVVPDGVVLRPAQ

SEQ ID NO: 132382 - protein, 340 aa, unidentified
MNKSLDFDPCGIEVSARTLVVERRRPGQPDAVREFANTAAGHQALLRWLERAGRAVRVCLEATGLYGLDLALTLEAAGVALMVANPRAVRHFAQALMQRSKTDRLDAAVLTECAARLPFQPWRPPSPRALKLLAVARRLEDLTEMHAAEKNRLHAASVSAALPSILRRDVQRSLQTLERAVARLTRAAQEFIAAAPLLAERYQLLLSIPGLGPTSALHVLAELLLLGPDLDVRQWVAYAGLDPRQYTSGSSVHKPARISKAGNKHLRRALYMPALVASQHDAHLGGFYQRLLARGKTKMQALVAVMRKLLHAIFGIFKHHQPYDGARVFAHPSPQEVTCT

SEQ ID NO: 132383 - protein, 340 aa, unidentified
MKLYGAIDLHSSNNVAVVIDEQDQVVYQRRLPNDLSKIVEQLSPYRSSLEGMVVESTYNWYWLVDGLMEHGYRVHLANTAAIQQYEGLKYSDDQSDARWLAHILRLGVLPQGYIYPKQQRPVRDLLRKRSQLVHLRTANLLSIQNLFSRNTGSSINANRIKALEGQQIDELVPEGDLALAIKANLSVMQSVDEQVEILERTVTERVQLRPEFRFLKSVPGIGQILALTIMLETGDIKRFPSVGNYASYCRCVGSQKLSNGKRKGSGNTKNGNKYLAWAFVEAANFAVRYQPRIRRFYQRKKAKSHGVLAIKAVAHKLCRACYYIIKDRVPFDLNKAFALK

SEQ ID NO: 132384 - protein, 354 aa, unidentified
MIVIGADVHKRTHTFVAVDAVGKQLGSTVVPATTIGHRKAMQWAHTRFGTTVLWAIEDCRNMSAWLERDLLGAAQKVVRVAPRLMAEHRRTGRERGKSDPIDALAVARAAAREPDLPVASHDALSYDVKALVDYRDSLVRERTSKINRVLWRVHQLDPERHIAKGGLTMKKHQEALQVWLKTQGTSVDARLAGKEITAIYELTVEIAEVAKEITTLVSAAVPTLLAMPGCGVLSAAKLLGESADITRFPGEAQFARHAGIAPVPVWSANPGRHRLTRSGNRQINAAIHRIALTQARMPDTLGYAYYEKKQADGKSPREAMRCLKRRLARVVYNNLTTDHHARTHEAENPTPAAA

SEQ ID NO: 132385 - protein, 387 aa, unidentified
MQSVTSATAVATTARANNITLFASLELSKSKWVVTINSPGSEKFSKHVVEGGDGACLLDLLSRSRAKAEQRYGVQVKAIVIQEAGLDGFWIHRLLLANGIESHVIDAASIAVNRRHRRAKTDAIDGESLLRTLMAWARGERRVCSMVRAPSPEDEDRRRLTRERGTLLKERIQHTNRVRGLLSGQGIGDYNPLRRDRFERLEALRTGDGRELPPMLKAEIRRELDRIALVTTQLAAVERARDALIRTDAEERNNPAALLLKLKGLGPEFASLLWLESLFRSFGNRRQVAAYSGLAPSPWQSGGVERDQGISKSGNRRLRKTMIELAWFWLRHQPDSALSRWFQARVGAAKGRIRRIAIVALARKLLVALWRYATQGVVPEGAVFKVA

SEQ ID NO: 132386 - protein, 412 aa, unidentified
MEGETVIAGVDTHKDVHVPCLLDGLGRKIWSGSFGADPEGYDRLAEAIGDPGSCMVVGVEGTASYGAGLTRRLVELGYNVVEVLRPKRDKVRPGEGKSDPLDAERAARKAASGRGCSVPKSQDGWVEAVRQLYVARRLAVATSTSCVACAKSMLTTAPSALRERFRGRERPKDLMPLLARGRKAGDALEESVLASLRSVAAVWKEARSQVESLDERIRALLEANAPALLGVEGCGTTTAAALVVAAGDNPGRLKGEAAFSMMCGASPIPASSGKTDRHRLNRGGNRQANWALYEIAIKRMAYDERTRRYVARRTSEGKSRREAVRCLKRYIAREVYHVLMDPNPDGAAPEGPELAKMRKAMRVTQKKAAAELGLSAATLGHLERGKRRSTKLERRYYELLCELERTLPQTAS

SEQ ID NO: 132387 - protein, 354 aa, unidentified
MPERAKARVTVVGIDIGKNSFHVVGLDRRGAIVLRQRWSRGQVEERFANMPRCLIGMEACVGAHHLARRLRALGHDARLMPPKYVRPYSKGQKNDFRDAEAIAEAVQRPTMRFVVTKTPDQLDLQSLHRVRERLVSQRTGVTNQIRAFLLDRGVAARQGLRFLRCQLPIILATRSDVLSPRMMRVIEELAGDWRRLDERIDGLSQEIEALARQDPACERLMTVPGIGPIISSAVVAAISNGAVFTKGRDFGAWLGLVPKQISTGDRTILGAISRHGNRYLRALFVQAAWVVLVRIKDWDRYGLKAWIDAAKKRLHHNVLAIALANKLARIAWAVLNKERVFECVRTRATASQPA

SEQ ID NO: 132388 - protein, 360 aa, unidentified
MLYGGIDIHKKYSVMSVINERGECLETKRFENNRTELQEILDRYKGEKFKAVIEAGLNWGVMYDMLWEMEGIVDVKLANASKVKAIASGKIKTDKIDSKILGQMLRMDYIPEVWVPDNPTRVLREVARYRLFTVKFKTMLKNRIHDILLKSHIEVPEVKDLFGSHGLKFLESLELKDKNYDILLKRQLGLLKQMKEEDKEIQEVLETELKDRSDIKLLRSIPGIGKIFGQLIALEISDIGRFANAQKLCSYCGLAPSIHSSGNTSYHGKLVIGNKWLRWAFIEASHSAINVSPYFKKHYIKVKNRAGTSGATISVARKLATVAYHVLKEKRDYIELLPDNKGRLPSDGASRSFTPDSFQV

SEQ ID NO: 132389 - protein, 319 aa, unidentified
MAQNDRVVAGIDVAKDKVDVCIRALSLRRTFASTAEGRRELASWVRRQKVGKAVMEASGGYEREWAKALRNAKIEVRIVDPKRVRSFAQSAGQLAKNDTIDAEMIAWFAETFDEARAQTYDVTREQLQQMVNARQALKDMQSKLTSQDEHAVPAAVQRIHARISKTIAVELVKIEAAITALIQATPRFAELAEIIESVPGLARTTSAALIAAMPELGQVNNKIVASLLGVAPYDDDSGRRRGERHIKGGRRRTRNVFYMACLGAATQHNPVLKAFYDRLVAKGKLKKVALTACMRKLISILNIMIERRQKWDAKRYALS

SEQ ID NO: 132390 - protein, 388 aa, unidentified
MFYLGIDIGKFSSVATLIDEKGTIVDKTLKFPNSTDGANCLLELIDSYVFDSSNLSIAMESTGHYWLSVFSFLSEKNFNICVINPIQIKSFRKSFTIRKVKNDFVDSILIANYLRIFGSNDFSLPNENLIALKQLCRHRHFLISNISDLKRKTIAVLDRVFPEYQKIFTDTFGTTSLELLSNCPTPEDIVNIDSQKLYDILSKVSRGRINYDKVSDIQNIAKNSFGIKFALPSFTFELKQLIAQIQFLESQLKDLENEINSLYETFNCYLTTIPGISNTLAAVILSEIGDINRFSSPAKLVAFAGIDPSVNQSGEFTGTENLMSKRGSPFLRRALFLAAFVAENSNTTLNNYYQKKIKEGKHHYVATRCRCSKTFICYLWCFERTPTF

SEQ ID NO: 132391 - protein, 372 aa, unidentified
MKEKVRFLGLDVHADTIAVAVAEANGEVRSLGTIPNRRESVHKLLKKLGGVEHLRACYEAGPTGYVLYWQLSELGVQCAVVAPTLVPVKAGDRVKTDRRDAEKLARNHRSGDLTAVWVPDEGSEALRDLVRAREAAKQDQLRARHRLSKFLLRTGQRPGPEIKAWTQRYLVWVRQVCYAQPAQTATLLDYLHEVEHMGERVGRLEQAISEAVKLASPQMQAVVRDLQALRGIAEISAVTIASELGRISRFASARQLMGYSGTVPGEDSSGKRKRRGPITKTGNAHLRRIVVEAAWSYRLRPAVGPGLRKRQQEVSPPIKEIAWKAQIRLCKRYARLAAAGKDKRKIVTAVGRELLGFIWAIGTKAEAAANLR

SEQ ID NO: 132392 - protein, 333 aa, unidentified
MNHCAIDLGGRKSQVCLRAPDGGLLHESRCDTLSLPDFLSALPHSRVVLETSAEAFHIADAARKSGHEVRVVPATLVRQLGVGARRTKTDKRDARVLSEVSCRINLPSVHLPSLRSREWKALCGMHDTLVRSRTRLINNLRGWLRGQARRLARGSPETFSQRMLTLRPLPEYVEVQVSLIGSLTEQIRFSERRLARLAAADVVCKRLMTTPGVGPSTALRFVAAVDNVTRFESAHKLQAYLGLTPGEMSSAERQARTGITKAGSSSVRWTLVQAAWSLRTHCRAPRARPLQLWAMEIEKRRGKQIATVALARKLAGILYALWRDGTTYAAPPL

SEQ ID NO: 132393 - protein, 486 aa, unidentified
MAKQKKHSPKPDGKLKGRPKAGSGKRGRKAKGICLEDRPLLEPNAAGIDIGAREIFVAVPPDRSQTPVRIFTTLTEDLELMAQWLVVCRITTVAMESTGVYWSPIADVLEGYGLKVCVVDARGMKNVPGRRTDWHECQWIQYLHSVGLLRAAFRPEPAVRAVRALMRHRTEQVLMANQHIQHMHKALTQMNVQLHHEIRDITGVTGMAIVDAILGGERDAAVLAKLRMPTVKASEETIRKSLEANWQAEHLFTLKQSRESLTHYQKQIEACDEEIEKLLLQFEPRVDPENQPLPPDRKRKQQSRKKQAQMKNPKTGFDMRKEAYKLFGVDLTQVPGLMLMVLTLFSEIGRDMTRWPTAGQFVSWLGLCPDNDITGGKVRWRGMRRVKNRAGTLFRLAAQSLHREESPWGDYLRRMKGKLGPAGATTATAHKIAIVFYTMVKNQVEYDPAIWAKRDSQRAKRMERKLHRQAQQMGYKLVPIEEKPAA

SEQ ID NO: 132394 - protein, 424 aa, unidentified
MNFKMQDKQNQLIEGISDTHLIVGVDIAQQLHVARAVNFRGIVVGDPITFENNEEGFVNLLNWIHDLKRLKKLDAAIVGMEPTGHYWINLSKWLYDQNIEVVTVNPYLVKRNKENRDNTQSKSDKKDALVIADMVKNGYYSFIRPSSESFEKLRVLMSNRDVIVKRLVMSINQINRWVDVVFPELRQVFNDVSCKGAIATLRLFPTPNEISLMDSLNVQRGWKSLMKRQPGPKKAQLLINLAKTSIGTGQALDAYKFHLEQLIEEYDLAVKQLERVEQQVKEVLYNIPFAKELLTIKGISEISLAGILGESGDLSGFSHGNSLLRHAGLHLAEASSGKWKGQIVISKRGRSRLRRFLYLATMSLVMNNPEFKALHSHNVKVKKIKKMKSIMKLIGKLARIFVGIARRNESYCPNKIQELIPLAA

SEQ ID NO: 132395 - protein, 409 aa, unidentified
MDVVITRCAGLDVHQATVVATVRVPDDQGGRRVVTDTFGTMTADLLALRDWLQAYGVTHVALESTGVYWKPVYYMLEDAFTLLLINMQELKRVPGRKTDVKDSEWLAQLLECGLLRPSFVPPPPIRELRDLTRYRVQQVRDRSQEVNRLCKVLEDAGLKLTTVISDVMGKSGRAMLQALVDGTTDPAVLAELARGKLRKKLPELRRALQGRFRPHHAFLIEQIFAKIDFLDEALERLTTEIDQRLVPFEPMLTALDTIPGVDRIGAISIVAETGGDMTRFLTAGHLCSWGAMCPGQNESAGKRRSGKTRKGNRYLRGTLIQAGLGAMRKNGSALQARYRRVARHRGHKKAVVAVGHQILEIAFYIMRDGVTYEELGADYFNRRHAEKAVRRHVKQLEALGFHVTIEKAA

SEQ ID NO: 132396 - protein, 338 aa, unidentified
MQTYAGIDLHSSNNFVGVINDKDKILYGKRHANRLDDVLRALDPFKDNLQGVVVESTFNWYWLVDGLQEHGYSVHLANPSAIQQYEGLKHTDDQWDSFWLAHMQRLGILPEGYIYPKENRAVRDLLRRRLLFVRHSTSHILSLQSSISRNLGFKMSNNEIKKMKPENIEDLFACPNLVFMANNSLSAIKFLKKIILDIEKKVKSQVKMRKEFEMLRTIPGIGNILGLTIMLEVGDIARFPKVGDYSSYCRCVESKRLSNGKKKGENNKKNGNKYLAWAYVEAAQFCRRYCVKAQSFYQSKEAKTKPVVAVKALSNKLSKASYYIMRDQVCFDEDKLFR

SEQ ID NO: 132397 - protein, 351 aa, unidentified
MAGLAGKGRGQAWPCLLFAEPEQLGGPEPALQARESLEMLAHDEVAGIDVGKMRLDVHVAGVAEGFWTGNDGRGIRDLIVRLRRLKVRRVGIEASGGYERGVAVALSTAGFKVVLCDPAQVRNFARAMKVRAKTDPIDARMIARYLMAAGDLPLYQPDALRDRLGELVNMRRHLIAERSELAAKTDQIADPMLARLLRRRLRQLAADLELVELEIRRHIQSHAELSQRAKALMAVPGVGPVLSTILIAELPELGAIGARQIASLVGVAPHPRQSGLADRGGKCSGGRTRVRTVLYMACLSALKARHSRLYPFYERLRANGKPFKLAITAVMRKFLTILNAITRDSAAYRPT

SEQ ID NO: 132398 - protein, 414 aa, unidentified
MTNSLDKFSVLIGLDWASKKHDVCIQKSSTATRQFKVIKHSPEDIDDWLCSLRSEVKGPIAIAVELSSGPIVYALQKYSYVTVFPIHAATLARYRQAMFPSGAKDDPSDAELALDLMLKYPEKIKPLKPSSDASRALNLLVEQRRMLVEDKRRAVNRLINALKQYYPLPLTMFSHRGSDLFCEFLLTWPTLKQLKRAREKTIRAFFSKRGGNAVANTDKRIKAINDAMALTEDSSVIEPYSLLSVTLCNQIVLLNKSIKAYDVKIDELFNQMPDADIFASLPGTGSCLAPRLLAAFGEDRSRFTSAQEIQNYAGLSPVTERSGNKEWIHWRWQCSTFIRQTFVEWSAKSVHQSYWAGLYYEKQRAKGKAHQAAVRALAFKWARIVFKCWQTKTPYSEARYLKALEERNSSLLST

SEQ ID NO: 132399 - protein, 343 aa, unidentified
MQDVTLIGIDLGKHSFHVHGQDRHGKALLRKKFSRKQLIEFFAKFHVCTVVMEACAGAHHMSRLLAGYGHDAKLISPQFVRPFVKSNKNDFVDAEAICEAASRPSMRFVTPKTEAQQTLSALHRVRESLVRDRTKTSNQIHAFMLEFGISLPIGYAVIRRLPAVLAEQSLPPRLMQVLQRLHSHFKYLDEQIAEIEKDLTRQLADDDLSQRLMTVPGIGPITASVLASEMGDGKQYRCGRDFAASLGLVPRQYSTGGKNNLLGISKRGDKNLRRLLVQGARAYMQRLERQSGQLARWVSAMLARRHSNVVACALANKLARIAWAIAAHHTAFELKEAPMPAGA

SEQ ID NO: 132400 - protein, 396 aa, unidentified
MGKEFCLGIDVGKYHHQASLINEHQTMVGESLKFNNDQIGFEKLRQTIIAQLPPQTAVKIGMEATGHYYWHLKKYLLEHGFNHLEIINPIETQRVAKTRIRKIKNDKVDSLAIAKIISSREISPCAQDDQELKQLRELTRFCEKLKGQSRFYKQEIITLIERLCPEFSANFSNIFLATPLMVIEKYFIENVEKDELARLITKTSRGRIKEDKAKHIIDILNNSLGSYYQSENAAFQLKLILQSLKMIKDQIKQIQDQIKKQSQNFKQEIAFVESIKGVSNYMASAILSELGDVNRFKNKGQIVAFAGLDPSVKESGQYKRKQGNHISKRGSKYLRKQLYYAAKTSILFDPELKAFYQKKKAQGKHYNVIMVAIARKILLRVQAVLKQKRPYELRSS

SEQ ID NO: 132401 - protein, 363 aa, unidentified
MYKTTTPDISLAQAKEKRIVKFGLDVHADQITVCRMQEGSLPQPAQKMSPQKALSWIIGHVEDGFEVHSCYEAGPCGFWLHRALTARGVVNVVVAPQRWDAQGKRVKTDKRDARELADRLERYLRGNRTVFSLVRVPTPQQEQRRSLVRQRGALMKERNRCILRGRSMMLLEGIKAPLSWWQPTQWSRFAPTLPVWLREQAALWQTKAVQFAKELERLDDQLEASLAGKLIPKGLGALSAALLEAEILDWSRFKNRRAVSSFTGLCPSERSSGATRIQGSVNKHGNPRVRHYLVEAVWRLERWQPQYPPLGMLERTSGNRSRKRAAVAVARRLAVDLWRIATGQCSAQKLGLKLVAAGAPSLG

SEQ ID NO: 132402 - protein, 473 aa, unidentified
MPRRKPASSPHDPATAALLQTLNPHAAGIDVGATELWVCVPPSAVASSLLAVPSVPTVLPPHVRRFGAFTADLYAIAAWLRQCQVTTVAMESTGVYWIPLYDLLEAEGLAVLLVDPHQVQRAPNRPKTDVYDCQWIQRLHSLGLLTAAFRPEEPIRVWRSYQRHRASLIEDAGRHLQRIEKALEQMNVKLPAVVSDITGVTGMGIIRAIVRGERDPQALAKLRDRRCKESAATIARALQGTWQPEHLFALQQSLALYDYYHEQIRACDRVIEEHLTGMALPEVPPLEPTRRIRRRRDNEVTFDARQRLHHMAGVDLTAIEGIEESTALVVLSEIGTDMSRWPSEKHFGSWLGLAPNPKKSGGKVKSSATRPGVNRAAQALRLAAKNLQRSQSALGAFFRRIAARRGLAKAITATAYKLARIIYALLKHGTVYVTQGLAAYETAYRERIVRQMKRKAAKLGLVIVEQEAVAQPA

SEQ ID NO: 132403 - protein, 437 aa, unidentified
MVHPDAAGIDVGGSEHWVAVSPDRDPEPVRRFGCFTADLREMACWLVEKGVRSVAMQSTGVYWMPVFEILEQQGLEVYLVNAQHTKNVPGRKSDIQECQWLLKLHAFGLLNNSFQPNDEIRIARTLWRHRGNLVAEASSVVQRMQKVLTERNVQLSNVLSDISGVSGMKIIKAILDRVRDPWELAALVEPGVKATPEDIVKSLEGNWREELLFVLRQHVEFYQIYQKKIRACDLQLRKHLQSLGSKLDLQAQPLGPRPKGKKLSRNAPTFDLRTELYRITGIDWSQINGIDVLTAQTVISEAGADLSAFPSEKQFASWLGLCPTNQQSGKKILNRRTRKVVNRATVAFRNAAMTLVRSQSYLGAQYRRLRTRLGAPKAITAMARKLACLFYRLIKHGQQYVDQGTEYYETRYREQQIRALAKRAQKLGLQLVIPKTA

SEQ ID NO: 132404 - protein, 423 aa, unidentified
MTEDPNWFAGVDWASEIHQATLLNSKGTVTGERTFPHGGAGLAAMCDWFLANSNAPAGSIAVAIEVPHGPVVETLLERGFLVHAINPKQLDRFRDRFTVAGAKDDRLDARVLADSLRTDRHCFRPLRLADPTVVELREWSRMAEDLQQERTRLANRVREQLWRYYPQALELTDDVATDWFLALWALAPTPAKAVRVHKETIARHLKTHRIRRVDADETLRILRQTPISVAGGTTEAATAHIRAVAVRLKVVNRQIREANRQLDALCVRLAGADEPAGSEETEPGQNHEQRDVTILRSLPGVGRIVLATLLAEAWQPLRQRDYHALRSLCGVAPVTRRSGKRCVVIMRQACHMRLRGAVYHWARTAIQHDPLSRTRYAALRKRGHSHGRALRTVGDRLLGVACAMLETGTLFDPAHAALARNAA

SEQ ID NO: 132405 - protein, 427 aa, unidentified
MSEEKALELRVSVDVGFRRHRVAMGLSSGEVLEEFEIDHRIEGFEEFFSRIETHRKKKNCGVAVAMEGYNGHARPLDSLIRQRGYRLYNLNNLKLARFKEIFPGAAKSDRIDARKGLELFQLSDHLPLAKEVLQEVSGTPPENEVLKRLTRRRRRLVNERVRVVNNLQADLQAVCPGLLEITNDASNQWFLNFLVSADTLPQLARLRRSTLLKIPSVGVKCASIIAGWQERAHFSQEVEWVGDMIQEDARRCLDLDEKIKRLEAKIASIAKDSAIAKTLRSIPGFGAVCTSELAGEIGTIERFGSEGSLSLYLGMSTLDNSSGKYQGTKAPKHVNTRAKAAMMTGVDRHRKYVPESQRYYEKKRSEGKKHNQAIRALGRHLCRIIYKMLKEERQYQVRPEKGNTKTKASPRSLIKTQIRRSKISTQA

SEQ ID NO: 132406 - protein, 347 aa, unidentified
MKFYTQTHQHYCGIDLHARCLYVCILDQQGKILVHKNIKANPQALMQVVEPYLEDLVIGVECMFSWYWVADLCRERQITFILGHALYMKAIHGGKAKNDRIDSNKIAVLMRGGMFPEAYVYPREMRGTRDLMRRRMHLMRKRSELLAHIHNTNSQYNLPEIKKNLRYAFNRDGIVERFSDPSVQKSIELDLNLIGFYDKQLSKVEWFIQRQANDCDQHSLILLRTVPGIGKILSLVILYEVHTIERFPTVQNFASYCRLIKCQKESAGKSYGSSGKKIGNAFLKWAFSEAAVLFLRNNPEAQAWLERMANKHNKARALTILAHKLGRAVYFMLQRKTVFDQERFLNS

SEQ ID NO: 132407 - protein, 341 aa, unidentified
MNIKRIGIDLAKQVFQVHGVDGQEKVVLRKQLRRAQMLDYFKTIPPCLIGMEACSSAHYWARELQKLGHTVKLMAPQFVKPYVKSNKNDANDAEGICEAVARPTMRFVAIKSIAQQDIQAVHRVRSELVQQRTAKVNQIRGLLAEYGIVVGRRVDVLHNALPLILEDAENGLTPDFRVLLEGLRQDLATLNGRVDELDKTIKTLASSNTDAKRLQQIPGIGPITATALVCAIGDGKQFKRGRDMAAWLGLTPRQHSSGGKDRLLGISKRGDAYLRTLLIHGARAVQKVAGQKDDPRSRWLQNLCSRRNKNIAAVALANKNARIAWALLSKETDYLPEGEPA

SEQ ID NO: 132408 - protein, 426 aa, unidentified
MRGVIVNADCPVVGIDVGKNFSYFCVLASDGQVHRKPSKVYHDAKGLTGLVACLRETEETLGTTPAVLLESTGHYSERLVCFLIRNNFRVFLINPLQTHSIKNVRIRKVKTDKMDCEEIAKLYSILDLREYQMPEDDVANLKILTRSHYHLGKNRVQIINQLTSKTDQAWPGFTEILDVQSKTGQSLLFAYSAPAQLLNAPKKDVVELIKTNSRRGQEYANEKYKALKQCAQDALRFGTQLEGHFIGIEIYADMLQQLDEKLSQLETEINVFAVRVPAVELLKSIPGLGPVTASILASEIGNIDRFDHSKQLVAYFGVDPSVKQSGNFVGTKNKFSKRGSPYARRALYLAALVSVRKNKSGDYVNKVIHDYYQKKLKNKTKSQALGAVMNKLVRIVYSILKNKKTFIMITPEEHNKMYAAGLLPAA

SEQ ID NO: 132409 - protein, 344 aa, unidentified
MKALKSHVAGIDVHKEMLAITVLIGELDGEPKEYQFESSTFTDDLMALGLKLKEMGFTDVAMESSGIYWKPVFNVFNPLGLKVVVANAAHIKNVPGRKTDMNDSRWIAELHRFGLIRASFIPDGEFQRMRLLSRHRTNLTEDLARVKNRIQKVLEDGNIKLSIVVSDIFGVSGLKVLKQIAGGYTHPNILITEVTTKIKRMEEMKKALTNCLTTEHCFVINVLMKQYEELKNRIEEGENELCKKVEPYAHLVEELDKIPGIDAILAMGIIAEASANMSSFKDERAFAAWSAVTSGNNESAGKKKRAKCRKGNPALRKMLIQAAQKATTARNPFIDLNTTNSAFA

SEQ ID NO: 132410 - protein, 378 aa, unidentified
MKRILKIGMDVHTTNYTLCAMEPIIGEDDRVFATIKVTPDYKNILMFIENLKLKLGLNDEYDIQCGYEAGGLGYSLYNQLTAAGIKCVILAPTTMLTPQGVRIKTDMRDAYMIAQCLSYGGYHAVYIPTEDDDSVKEYLRMRNDHKLALKKIKQQINAFCIRHGFCYDGTKWTLSHLKWLKKLEITNGLYRETLDEYMASYEEQEAKIERYDKRIGEIAEQTRYHDKVKKLGCFLGIKTHTALSLIVETGDFERFAKGNQYASYLGLAPGENSSSDNIHRLGITKAGNSHLRQLLIEASGGICKGAVGHKSKELRARQNGNTAEVIAYADKANTRLRSRYYKFIRHGKKRNVAVAAIARELACFVWGMMTDNIEMKAA

SEQ ID NO: 132411 - protein, 424 aa, unidentified
MKFKMQNKQNQLIERISVKHLVVGVDIAQQFHVARAVNFRGIVVGDPLTFNNNDEGFASLLKWIKNLQRLNNLEEAIVGMEPTGHYWINLSKWLFKQDIEVVTVNPHLVKRNKENRDNTQSKSDKKDALVIADMVKNGYYSEVRYTSESFEKLRVLMSNRDVVVKRLVSSINQLNRWVDIVFPELRQVFKDIKAKGAIATLRLFPSPMDLEIMQPHEIIEGWKSIMKRQPGLKKALLLLQLAKKSVGTRQALDAYKFHLEQLLEEYDLAVTQLERVEQQVTEALNKIPFAKKLLTIKGISEISLAGILGEAGDLSGFSHGNSLLRHAGLHLAEASSGKWKGQIVISKRGRSRLRRFLYLATMSLVMNNPEFKALHSHNVKVKKIKKMKSIMKLIGKLARIFVGISRRNETYCPDKLQPLSPFAA

SEQ ID NO: 132412 - protein, 349 aa, unidentified
MTIVTIGIDLAKNVFAVHGVDATGKAVLVRPSVARAKLLELIASVPPCLIGMEACSGAHHWAREFAQFGHTVRLMAPKFVSPYRLSGKRGKNDAADAAAICEAVTRPNMRFVPIKSVEQQGQLLVHRARQGFVEQRTATLNRIRGLLSELGIVLPLKAAVVRREALLRLEDLPGWANTVIGDLLSEVSRLDERIGQYDQHIRAMARQSTPAQQLMQLAGIGETTATALVSTVGNGHDFACGRQFCAWLGLVPGQYSSGGKQRLGRITKAGDPYLRSLLVMGARAVLALAMKESNPRQDAVSRWARALAERRGYWRAVVAIAAKNARMCWAMLQRGEAFKMPSATTPVTA

SEQ ID NO: 132413 - protein, 368 aa, unidentified
MSKQSHYKVGCDAHKHYSLFAVLDHQGRPVERTRVNHEPGAIRAFLSRFPEGTPVALETVGNWYWIVDEIEQAGCLPHLAHAQMAKKMMGHVHKTDKLDAEGLAILQHLGSLPTVWIAPRETRDERELPRTRMALSKVRTMLKNRMHSTLAKYALSLDTQSDIYAPKWRPQLLDLLQRFPPETERCMRQELELLDQVQEQILRLEARIVERVQMTPTIQLIQSLPGPAKILSIVIDREVGSIDRFPSPHHFASYSGLVPKVKASGGKTHYGKMIKAANNYLKWAFIEAANIVVRQQHHPNWRHKYVVTLFERTRQRKGHAVAVGTVARYLAEATYWVLKKGEPYREPVPWHPVRRKSAISPKQGQART

SEQ ID NO: 132414 - protein, 395 aa, unidentified
MYFLGIDIGKRTHVASLMSEEGKVILKGFSFPNTTEGADSLIERLSKYSETPADFIVGMEATGHYWLSIFSYLHESDFLIHVVNPLQTDGWRKGTEIRKRKNDIIDSVLIADLMRYGSFVETVLSDENVFSLKQLSRYRTYLVGTASDFKRKIIAVLDQVFPEYASIFSKQGIFGKASKELLLEFSSPIELEEISAETLAQYLAELSRNRIKPEKADQLKQAASNSFGVKFAQEAFTFQLRSMIEQLKFIESQVKETEKEIKRIMSNLDSVILTIPGIGPINGATILGEIGDIRKFSNPKKLVAYAGIDASVSQSGQNEATHNVMSKRGSPYLRKALFSAALVASRCDPVFRAFYQKKISEGKHHLTALGAVSRKLCYVIHAILTKNEPYKIVSD

SEQ ID NO: 132415 - protein, 400 aa, unidentified
MNATTIYVGIDVSKDKSDICIKDKLGNDLIKRLIIANKKADLGHLYETIEKIRSKTPGNSDVIFGMEATGIYSLPLYSALTRDGHKVKLYNPIQTNGFRKMNIRKTKTDPIDSAIIADMLRFSEPPKVNPIKDLNLYQLRELVRIRDRLIDKQTVCKVQLVRNIDTVWPDYSSVMKGATSATAIAILKKYSVPSKVRAESFEKFYELVKMKSRSKISRTAAEEIYNHAGNILTIPELDSIISVEIKTLIKELELYDEQIRSIEKKIDNMMKLIDSKIMSIPGIGDTLGPMILGEIGDASRFPTAKKLIAFAGLDPVVSQSGRFENKSGKISKRGSPLLRKGLFLAANVARQNDENLKRFYDKKISEGKHHYSALNAVAAKVLRIVYWVLKNDKEYQTQVN

SEQ ID NO: 132416 - protein, 347 aa, unidentified
MAKNQLQSNTATLIGVGIDVAKDTLMFCKKYDSGDKTIFEIKNKNIEIRKIANEIKAEKFLGKIIVESTGRHHLVSALEMSKKNLDIRVINPLLANKYIKSSIRKIKTDKRDAEVLAEIAIKEERLPNKFDGDKNALKIKKKASLIATLDKQIQKMTAAMNEFKKTGEEIGLNLSIAEKRIFKTIKLLKEQKKELEKEVETMAIKSEYKKEIAKRYKSIPGVSDYLASLSTVFFKEEEHSKHSKQWVAFAGLDVSVRESGGWRGKGKITKRGNGYLRKRLFQAAWGAMMHNENFKEYYDHLRKKGRSYVASLTIIARKIVAIMFTLSKNKCCYDDSIKLFKLADETK

SEQ ID NO: 132417 - protein, 378 aa, unidentified
MTQIDRTKTKSPRESSRRPGPSVQSTLGVAKPTRKRQKETPVELETQYVGIDLHRRRSVIVRRNGAGETLDTVRIDNDPVVLAAELAKAGEHPEVILEATYGWYWAADVIQECGGTVHLAHPLGNNWGNRRVKNDERDATDLVDLLRLGRLAEAWIAPPPLRELREHIRYRAKLVHLRTNLKSQVHAVLAKEGVAVPMTDLFGVGGQVLLDEVHLGDAYRVRVESLRDLIEHVSREIAMLEEQTAPYFAGDLGYHAVQAIPGVGPVLASVFVAEIGDIARFKSARHLSSWAGLTPTHKESDVTVRRGHITKQGSRLVRWAAVEAVAHQRGDTPIRAHHRRVGERRGTQIGRVAAARKLLILVYYGLRDGEIRCLAGTG

SEQ ID NO: 132418 - protein, 428 aa, unidentified
MDELNRNRLEEFRQLKKEVRHSGEYLIVGIDIAKDRHHAFFGTATGKTLLRRLVFSNDGEGFRKLLDHAEALRAQHGLNKVVYGMEPTANYHKPLGEYLITQGRTVVLVSGVTVARNRESLDGRWDKHDVKDSANVADLISQGKCLYYEHPSAELRGLRGLLSLKRRLKKQEHGYKVRIRNHLIAQYFPEMDRDYERLGAEGLSIVKWCFPASQIVQLDVDPFIERVTSRRIRMEKRRRLEAIWEKAGESIGCDGVPGVEHEAKVMVEGLRQIREMIKETEEKILYLCKLFPEYSYILTIPGFGPDVSAKVLGAIGEPDRFQNGKQVLKMGGLDLSADRSGKDSDKATPEISKRGKADLRYALYQAAFIASTKNRDFMLYYTSKLRGREKEKGIHTKMIVKLSAKMLLIAWTLMKKKEAFDPAYLTME

SEQ ID NO: 132419 - protein, 339 aa, unidentified
MLIIGVDYHPSFQQIAFMDQGTGECGERRLSHSDGEAEKFYRDLKQRGVSVRVGMEATGYSRWFERLLAELSIELWIGDAAKIKTKRVRKQKTDRQDAQLLLRLLLEDTFPRQLLWHRHRLVQMRTRIMNQLQALAMNEGKRWKKKLWSEQGRAQLEKLPLAAWASRRRQDLLELLDRMNPTIEELTAAVEQEAKKWPEVLRLMTHPGVGPLTALAFVLIIGTPERFRCGKQVGSYIGLIPSEDSSAGHQRLGHISKQGNTLLRYLLGEAAQAAVRCDSDWRRRYVHLAMRREKNIAKVAIARKLAVRLYWMWRNGWEYSQSIEFGSYAGELATGHGVK

SEQ ID NO: 132420 - protein, 338 aa, unidentified
MKNCNKQNEKIELVDEKTLVIGVDIGSYDEYARAFTCRKQELSKKPLHFYNTAEGFKTFKDWAVNIMKANGLEKIIVGMEPTSIYWEALATYCKDNGMILVHVNPAAVHKSKELDDNDPSKNDRKDPKVIAGLVTDGRYSFPYMPEEEYAQLRELSNLRIRTQESLTQCKNRLARWYSRYFPEFKEAYKNVVSKTAMIIMDMYPLPEDIVTLGVEGILQIWRNKKVRAAGESRAKKLYEAAKNSIGRKEAATVARLEFQSIKEDLDRYQERLEAIDKEVDEILPKIKNADKLFGIKGVGKATVLTFLSEVGDISRFENPKEIQKLAGYAIVTNDSCKL

SEQ ID NO: 132421 - protein, 369 aa, unidentified
MNNGSTVVGLDVHKATVVAAVLPPGADRTRETVTIENSPKAVERLVTRLAARGPLAFVYEAGPCGYEVQRQLTALGQPCAVVAPALTPVRPGDRVKTDRRDAEKLARLYRAGELTPIRIPTRAEEAARDVVRVREDVLADRLRARHRLGKFLLRQGRVYRETKAWGVAHRAWLRSQRFEWPALQQTFAAYLRALEDVEAHLAVLDQQVVDLAQQAPYRLLVQALRCLKGIDTLSAVTLAVEAQEFRRFPRARAFMSYTGAVSMERSSGGTVRRGSITKAGNAHLRRILVEAAWSARHGTGVSPALTARRKGCPAEVVRIAKKAQARLHRTFWRLTSRTKPAQVAVVAVARELAGFVWAIAHQVPEGGSA

SEQ ID NO: 132422 - protein, 318 aa, unidentified
MTQKTTIVGIDIGKEKIDAAIRSESVGASFASTAEDRHNLLDWLKRHRVGTVVMEASGGYESRWAKLLRTAGIEVRIVDPKRVRHFARSAGSLAKNDPIDAAMIAWFAETFPDAVGRPHDPRREELDQLVSARTALAVMKAQIANYAEHDQPAEVRKAHRAIGKTLAAQVARLEAAITAKIDQTAPFAERAAIIESVPGLGHASAAGLIAFLPELGLVSDKAAAALVGVAPYDDDSGKHRGRRFIKGGRQKLRNLLFLPIVGAATRFNPVLKAYYERLIAKGKPAKVALIACMRKLIVILNTMIARGEKWDPIRHAPA

SEQ ID NO: 132423 - protein, 320 aa, unidentified
MDPNTAQIQFALGFDVSKATITFFDTRTGKIGTVENSKVALRAALKPYAGRGDMLAICEATGGYEDDLLDVLEDLAIPAHRADAVRVKAFIRACGANAKTDPIDARHIAQYGLSRAQSLPRWRPSPPHEAKVKLLVLRRTDLVSMRVQEENRLKAPRNKPIAREIAGHIAEIKRRIEAIDKQIETIISLDKRLKDRKAILQTVPGIGKVIAPMLLALMPELGHINRKQAASLAGCAPHPRDSGAHKGRRFTTGGRRQLRPLLFTAAMAASHSKSHLAATYRRLLHAGKSKLTALGAIMRHIIVIANARLKEYQNEKIRLT

SEQ ID NO: 132424 - protein, 391 aa, unidentified
MDRVWVGIDAGKEVHWAHVLDASGEKLLSRKVENDEADLAKLIDEALSFADEVVWAIDQPGGGATLLLGLLWEREQRVLYIPGLTVERSRDTYPGESKTEARDAHVIADQARMRPDLEELTAGEGELAELQILLARRRDLVTDQTRTINPLRDALLSSFPALERALDLNNRGALTLVSHYQVPAQIRRAGRKRIATYLRNRGVKGADALSGQALTAAKAQSVTLPAEDVTARIVAELAAEVLCLKESLKTLDEELEKRFFARKEARVLTSLPGVGVILGAEFLVRGGDLSAFESADKLAAYAGLVPAAHDSGKRVGNDRRMRGGNKALKYVFYQSAFASLRSSPESRAFYDRKRAEGKRHTQALIALARRRVNVLWAMLRDGTTFEARFVA

SEQ ID NO: 132425 - protein, 436 aa, unidentified
MRGCRCSMIMGFTKPIEHFNLQRKKVITMNTLYVGIDVSSKSNVIYLMLPNGDKHSNFSVANSHEGSTQLVKRILSALTSHSLDTVLIGLEATSVYGDNLVYFLREDATLAPFNRKIHVLNPKQVKKFHDAYNDLPKNDYVDSFVIADCLRFGRINKEVYLGDYHYKALQNLTRARFFAVQNLVKEKQRFMNVLFKKYSTMTQEKVFSDTFSTTALAVYDEFESAEALANMDLHELTDFIIEKGKNRFPDPDAVAKAIQKAARSSYRLPKTVNDSVNQVLSISITSMKALESQIKEFDKAIKAQMELLPNVLISIPGIGPVYSAGIMAEIGDINRFNSQAALAKYAGLAWKQHQSGGFESEVTRLIPSGNRFLKYYLCEAAFSLVRCDKEYSDFYRLKYKEVNRCQHKRALALTARKFVRLVFRLLKDNRLYCPAK

SEQ ID NO: 132426 - protein, 431 aa, unidentified
MKANRTKNLALITSRTLIVGVDGHCKSNTAAFCMANGDEPVRPFTFGNDRHGFLRFLERVDWVKKRKGLSSAVFVLEPNGPYWRLLGRFLSERNHLVRVVNPLQVKMNRQTGNPSQDKTDFADARSVADLGKQGKFNQTTLLGAVYEDLRSLTGLREALIGQRSALKHRLRAALVRTFPELDSLVSDILGKGVRALLRVSPTAKGLAGLGVEAVTEVLKEASRGRFGQKKAKQIVFAARDSVGYAAQSLAVRIEFEALLDSIEGLSANIERVEWEMARLLRQTEEGLLLTSVPGIGEVTAAAILGETGSLKHYQNPNQIRKLAGFDLVGNQSGSRQTDLRISKRGRKLLRKIFYQAAVASLRCNDPLIRFYKGLIDPGRDRTLKKKQAIVAVAGKLIDIVFSLVKTRDPFELDHEWIAPGGQKRASEAMAA

SEQ ID NO: 132427 - protein, 381 aa, unidentified
MQTKLYVGLDLHSNNTYVGVIDSKERRVLKGKFPNQLEVILGVLEPHKERIVGVVVESTFNWYWLVDGLMDNGYKVHLAHPAAFQQYNGLKYTDDEHDAFFLAKLLQLGILPEGYIMPREDRQLRDLLRKRLKLVRQSSTHILSFKSLVSRNLGISMPANEIKKLEDDEVNDMFDNEHLALSAKVNIAAMNNLKWQIYEIRNSLLKAVKIKPQFEKLLTVPGIGNILALTIALETGDIKRFPSVGNFSSYCRCVGSSRISNNKVKGSNNRKNGNKYLSYAFVEAAQKARRYCPPAQSFFMRKTIKTNKIVATKALAHKLARACYYIMHDQVDFDITKIFGKPIKVDKGCAREPKRGLGYQPSAPIGMSGAATKQNDHIFIE

SEQ ID NO: 132428 - protein, 317 aa, unidentified
MTQETCWVGVDVSKATLDVYLSCPEQALSVSNDPAGIQRLLAILRPEAPRLIVLEATGGLERAVVAELLVANLPVAVINPRQARHFAAAIGYLAKTDRLDARVLARFAAAIQPPARPLPTAEAAALSDLLARRRQLVEMVTMEKNRLQQAQHARIREDIQAHLDWLQARLNTTEQGLRAAVEASPAWQAKADLLNEVNGLGEITILTLIACLPELGQLDRKQIAALVGVAPLNHDSGTWRGRRGVWAGRAAVRHMLYMATLSAVRYNPVLKAFYTRLRAAGKMAKVALVACMRKLLTILNAMLRDQAHWDVHYGKIA

SEQ ID NO: 132429 - protein, 400 aa, unidentified
MDRIEQGWVGIDAGKGHHHVVLIDRDGRQLLSRRVDNDELALTGLIETVRDRVMEPTWAIDLADGAAALVIGLLLHRDQPVFYLPGIAVNRASAGYRGEGKTDAKDAAIIADQARMRRDLRRLQVLDEDIAELRLMTAYRADLAADRTRCINRLRSLLLGVFPALERVLDFTCHGPLVLISGFQTPTAIRRLGATRLLRWLERRGVRRPGRLATAAAEAAGQQTIQLPGEAAAASLVARLAQTILELDRQLADVDRKVAASFHTQQDAAIITSLTGIGDVLGAQFLAAVGGSLSGFASADHLAGYAGLAPTPRDSGYRTGNLHRPQRYNRQLQRVFYTSAMISIQRSPASRAFYDGKRAQGKRHTQAVLALARRRVNVLWAMLRDHQPYQERRQPLILAA

SEQ ID NO: 132430 - protein, 514 aa, unidentified
MSEGTAVPPFSRLSPRLLRKHSAWHIRHIPLTQNFHPQPLAPARKADWVHAHCARFRSPYAAQDKPFASGFTNPDPNGGDIMLKINYMSTLFVGIDVSSKTNAVYAMDFEENKYISSSFGNNQPGADQLVDMIAECMQKHQNLDTLLIVLESTSVYSVHISNFLSTSEVLMPYRPYVFCVNPKATSNYRKSYIGMEKTDPTDAYLIADFGRVGRTKKLEPWRGGQFIALKRLTRHRMHLSECITREKTYMVSNLYLKFSELQLLEGDDKPFGSLYGATSSAVLTEFLSPQEIIDMPEEDLLAFLAEKSRNRISDISKTSELLRKAARDSYRLDKCMYEPLNISLASSFNCIHAYQKEIRLIEQAIGKCINGMNPNALIILRSIPGIGPVWASGILSEIGDITAFHSSDALAKYAGLYWPKGDSGDFTSEDNKMSKAGNPYLRYYLGEAANSVRKHIPEYADFYARKYAEVTKHQHKRALALTSRKFVRLVFGLLVKNQLYTGEKLDTKYNIESN

SEQ ID NO: 132431 - protein, 374 aa, unidentified
MYGLLPLAGVLRYKVKSIHSNQLLPGVHTMTQCNVIAIDLAKDIFQVCIMTIHGKITFNKAMTRAKLKEWLVKQKPSLIAMESCGGAHYWARFAMSLGHNVMPIPPKQVKPFRTGQKTDANDAIAIAVASRAPNIKPARVLTNEEQGLQSVSKMRDLLDKQKLQLSNQVRGLLLEFGIIISKSIKSFKARIPEILEDGENQLPMPMRHSISKMWALYSRLEDDFKTLNNELMHLTEQDDDCKKLMKLEGVGPITSMRLKIQLGCGEHFKSSRQVSACIGLTPKQHSSGGKIQLGSVGKSSCDKPLRSCLFLGARAVVAKLKNRPAKTEKERWLKALIERRGANCASMALANKNARTAYALLRNNTEYSPVLLAA

SEQ ID NO: 132432 - protein, 323 aa, unidentified
MEHILGIDVSKDTLDLVLDQRLHRKVINELGGFQQIQQWLVSQHVDRVHACLEATGQYGDGVAEYLYEMKHFVSVVNPARIKRYGESKLHRNKNDKADAALIAEFCMKEKPACWKPISNNMKHLRALVRRLSDLQTSRQQERNRFGSGEKDEWVLSDLQSHIHYLDDCIHNTTKAIHQFIDQNTSLKSQRDLLISIPGIGKLTAARLLAEIGDISSFENAPQLAAFAGLNPRGFSSGSSVHKKTKISKQGRAFLRCILFMPAIVAQKHNPVIHQFCARLSDRNLPKMAIVVASMRKLLHLCFGVLKNQIPFDPHYGDQFNFAS

SEQ ID NO: 132433 - protein, 389 aa, unidentified
MKIYVGIDIAKLNHFAAAISSDGEIIIEPFKFTNDADGFQLLVSKLESFDKNSLIIGLESTAHYGDNLVRYLVTELYQVCVLNPIKTCQLRKNNVRKTKTDKVDTYVIAKTLMMQDNLRFVSFFDLDMMDLKALGRFRQKTIKQRTRLKIQLTTYVDQVFPEIQYFFKSGLHQHAVYALLKEAPSPKEIASMHMTHLANLLKVNSHGHFTKEQAKELRVLAQKSVGANDSAISIQITQTIQQIELLDSQLEKIEAEMTDIMKFNDSVIMTIPGIGYINGGMILGEIGDIHRFSNPNKLLAFAGLDPSVYQSGNFQAKTTRMSKRGSRVLRYALVNAAWNVVRNNATFKAYYDAKRAEGRSHYNALGHCSGKLVRVIWKMLTDNVEFNLK

SEQ ID NO: 132434 - protein, 398 aa, unidentified
MLSIGIDVSKGKSTVCGMKPRGEIVYTPFEVQHTREGMSELVSLLRGSGEEVRVVLESTGSYHCPVVAALLENGIFVSVVNSLRMKRFCSQSIRRVKTDQIDAMQIALYGLAYWPELQPTRLPENTYRELQLLARQYYQMTSILIKAKVDFNALCDQVLPGMQELMNDHAGRHKLSDFVLRYRHTTHILEMGETRFRKDYCKWAEKKGYRNRERMAALIFATAQNGIPVLPNAPSTQIVITEAIRVLHTVEASRDAILTQMQALAKTLPEYSLVREMPCIGDTLAPRLIAEIGDVRRFHSKRALIAYAGIDAPPYQSGKFSANNRHISKRGNRYLRKTGYEVMQSYVMHKPANDPIFTFIEKKRSEGKSGKLAMVAGLNKFLRVYYGKVTELYRSLPQ

SEQ ID NO: 132435 - protein, 458 aa, unidentified
MRKKSKRTLGVEEARPFAGMSRVNKDAAGVDIGAVEIVACVSQDESTQIVRAFGNYTVDLQNIGKWLKEHKIKTVAMESTGVYWIPLFEELERQGFECLLISSRSLRRVPGRKSDIIDAQWIQTLHNYGLLESSFRPEGELAALRTLLRHRGQLLEHRAPHVLHMQKALLQMNVQLSQALSDVTGDTGQAIIRAIVAGERDPQKLAALRNRNCKKSVEEIGRALTGTWREEHLFVLKQALELYDFYTKQVESCDMEIERMYALTRPDWEAGKVKPLPPKKKQSHSKNAPEQKEEIRQHLKRICGVDLSVVDGIGVSLAQTIIMEVGTDMNKFPSEKHFCSWLPQVAPKHEISGGKVLKNKTLKTKNRAGQAFRMAAQSVKGSDCVFGSRYRRLRARLDNRQATVATAHAIARVVYRMLKHQVEYEELSVEEYEQEYKKQQVKYLKKKAEKFGFQLVPA

SEQ ID NO: 132436 - protein, 443 aa, unidentified
MSKANVTLMPVLNPHAAAIDIGSRKHLVCVGPNPDTDVREFDTFTDDLNALADWFIERSVTTVALESTGVYWVPAFEILSARGIKAIVIDSRQTHRAGRPKTDRLDCQWARRLHACGLLQAAFRPDDSICELRGYMRLAGTLIRDLGRCIQHMQKALELMNVKLTEVVDDITGKTGFSILRAILKGERDPQKLARFRNPRCKASEATIAKALHGNWRAEHLFALRQAVDTWDFFQKQLRACERQIEVFLQGMPKKQPDKVLPQRSRPRKLRHNAPHFDARGLLAPILGVDLTAIEGIDDSSALVITSEIGLHVNTFPTEKHFGSWLALAPKAKGSGKRRRDRITPGAQRIAQVLRMAGTSLHNSQTALGAFLRRLKGRIGAPKAITATAYKLARLIWRMLKHGTDYVIQGMAEYEAKFRERNLKALQRKAKHFGYQLVPHPTS

SEQ ID NO: 132437 - protein, 389 aa, unidentified
MIYVGIDVAKDKHDCCILDAEAEKLFPTFTIQNNQTGFGELYERLNSVTEDKSEIKVGLEATGHYSLNLLGSLIDKGLTTFVINPLHTNLYRKGQSLRKTKTDKVDASSIAMMLVTDKTLKPYSDTSYHNEDLKSLTRYRFDKVQERAKLKSSVARLVNILFPELERLVPTLHTASVYALLKELPGASHVAACHLTRLKNLLETASRGRYGREKAIELRNEAQASIGSVMPSKSLELRHTISLIEVLTEEIDEIEQSIREIMDRCKSPIMTIPGISYRMGAMILAEIGDFSRFEDADKILAYAGMSPSTYQSGQLQSSHSHMEKRGSRYLRYALFNATKFVCKWDERFAAYLAKKTREGKHYNVAASHAAKKLVRTIYRMELTGEPYRK

SEQ ID NO: 132438 - protein, 345 aa, unidentified
MPIVGGLDIHRKQITFDYLDTVTGEVKRGQIAPADRQHVRAWLARFAGQDDVAFAVEGCAGWRYVAEELAAAGIAAHLGEPADTAALRGRKRHAKTDKTDSRHLRALLAEGRLPECWIPPAQILEYRALLETYHDLRRAHTAWVQRIHAVFFHQGAPPLGEGALRTEPGLAGLRAAAAAHLSAAGQQQVATALDMLAATEAQLGPLRHQLRDAARHLVGAKVLAERLYGVGPLTALALTCWLAGADRFSSSRKAVRFTGLDITVHSSDRKGPPGRLSRQGPPVLRWAVYEAGKTHARTSAPDHGYYAAVADRKNTKRAALSEARKIVRQACHILTELGDDALTVT

SEQ ID NO: 132439 - protein, 317 aa, unidentified
MEAPVAGIDVSKDKLIVYFQGKLYEFTNDRQGFEEIRKILPSGCKVGIESTGVYHVNLAKYLNNEYDVRIINPFILKKFKGFRGKKSDKNDAKKLAEIVVSMGSGFVTSDARELTSQWDFVIRSIARVKNRLRRDLVLLGYRDSLSKKNLEEVLRGGGDSVVLSEVRFLLEELERLEGRKREIEKELEDFVPKDSLIFTIPGIGKTLGCIILARVGDVRRFSDKKRFVAYCGLDPVVESSGKSVVSRGISKRGDAVLRRAFYLAALTAIKVNLIIKRFYEEHKGRLRGKKLIVACARKLAVITWAVLYYNKPFDASE

SEQ ID NO: 132440 - protein, 365 aa, unidentified
MSSVASPAGLVHLGMDTSKKTIVIATLWPGEEIPVTERIANEEAAVRRFFGRLGDPSVLRSCYEAGPGGYDLYRLLTSMGVACDVVAPSLIPKGGSDKVKTDKRDACRQARLHRAGELTPVRVPTQAEEAVRDLVRVRAALVDDRKRAQQRLTAVLMRHGSVWTGSYWTAAHRAWIDAQRFGEPALAAAIAHYRGTLATREAELAAIEAELAPWARRDPLAGPVARLGCYRGIAELGGLTLTAEIVDWRRFPAARAFMSYTGLVPSEYSSGERTRRGSITKAGSEPVRTTLIEAAWAYQHAPAIGATLCRRQAGADPGTLARSWKAQRRLNGRYRHLTSHGKARGEAITAVARELAGFVWAEMTA

SEQ ID NO: 132441 - protein, 403 aa, unidentified
MNSVGIDISKGRSTIAVMRPFGEVVISPFEVRHTGSELSKLARQLKSLDGETRVVMEATGNYHASVAKLLHDAGLYVSVVNAKLVHDYGNNELRRVKTDRKDAVKLANYGLDRWLTLPRYIPEEDTRLLLKNCYRQYRQYSKVQTVLKNNLISLLDTVFPNVNRLFSSPIRGDGSEKWVDFVAEFWHCRCVSEKSERAFTSKYLRWCRKHGYNFSEAKAHTIYAEASGHIGVMPKSETTKLLVEQAVAQLRATSTALAALKHEMQSLASMLPEYPVVMDLFGVGPTLDPQLIAEIGDVRRFYSKKALVAYAGLDAPPNDSGDVTGRHKSMSKIGASSLRRTLFLVMSVYLQNAPLDEPVYQFMDRKRAEGKPYRVYMMASANKFLRIYYATVKAYLESLEHTA

SEQ ID NO: 132442 - protein, 344 aa, unidentified
MKITTVGIDLAKNIFQVHGADREGTPVLRRKLRRSGMLKFFEALEPCLIGLEACGGAHHWARELIARGHDVRLMPPQYVKPYVKRHKNDVTDAEAICEAVTRPTMRFVPVKTVDQQSVLMLHRSRDLLVRQRTMLTNAMRGHFSELGIVVGQGRRNIGVLVELVRSMPEEHVPAIAREVLETLILQLEALQTRITDLEATLKSWHRSNPASQRLASIPGVGPITATAIVATVGDARQFKSGREFAAWIGLVPRQHSSGGKERLGGITKRGDAYIRRLLIHGARTVLRWRRQRKDTASAWLQGLLERRPVNIVTVAVANKSARIAWALLNRGETYKAPAAPSVAS

SEQ ID NO: 132443 - protein, 343 aa, unidentified
MNTVATIGLDIAKQVFQVHGADAQGATLFNRKLRRSEVRPFFEKLPPCVVAMEACGSAYHWGREISALGHEVQILPAQYVKPFVTRGKTDAGDAIAISQAMRRPDIRSVRLKTATEQAAAMVLRTRVLFVRQRANAMNALRGHMTELGLIADRGIPNIGKLAAALPEEGDARVPPSARTVLEEILAEIEALTSRIERIDRQVASVAKEDEDIRRLTAIPGVGPVTASTIKAYVPDAAYFKTARHFSSWLGLTPKLNASGERLRSGRISKMGNVELRSLLYMGAMSVLIAARRRGTPSPWLRRLLDGRPLKVVAVALANKTARVIWALLTKGGSYEAPSERAGA

SEQ ID NO: 132444 - protein, 396 aa, unidentified
MPQKNEAITSTPVQPSGGDIFVSVEMSRSKWVIGIHTPLVDKIALHTMACGDVGALLGLIERAQTRLGAAGAATPSTVLCYEAGYEGFWLYRRLSPLGIRVVVIDPASLLVDRRAKRAKTDRIDARAMVRALMAWARGEQQVLSEVRVPSVEQDDARRGLRERQRLVKERTAHGNRIKGLLKTQGIMDFDPRAADAIARLNALVTGDGRSLAPCLKREIVRELERLTLVMQQIAQVETERDTVFQTGDAEAGTDPSAVAPEREAAMIGVLNQLKGIGMNDATILVREAFWRDFRNRREVGGWSGLVPAPWASGSVSRDQGITKAGPPLLRAHLIQMSWRWLLWQPESDLARWFRKRTEGATGRMRRIMVVALARKLLIALWRYATTGMVPMGAIVT

SEQ ID NO: 132445 - protein, 452 aa, unidentified
MTQTSHDTFAAFVGIDWADAKHDGCLQTAGSTKRACFQLAHTPEAIDAWVTTLRTRFNGQPVAICLELTKGPIVSALRTYDFLVLFPLNPLTLARYREAFTPSRAKDDPTDAALQLELLRTHRDKLQPLNPQSPTMRALAQLVEHRRRVVGDQVRITNRLTSTLKNSFPHVLQWFQEKDTAIFCDFLRRWPTLKAVQLARRSTLETFFREHHVRYADVIAQRIQAITSATPLTTDDGVIAPKALLVQALVAQLRVTLQAIADFDTAIAQRAQSHPDFPLFQALPGAGPVFAPRLLVAFGDQRDRYASAADLQKYAGIAPVTERSGKKSWVHWRLQCPKFVRQTFVEWAAESIRHAFWAGVFSQQQRDKGKAHQAAVRALAFTWIRLLSRCWQDRTPYDASTSLQALNNRGASLLQNFVHEVVASWAQSIQRLSVFPTSKIGQTGFVRLLSQT

SEQ ID NO: 132446 - protein, 344 aa, unidentified
MDNFNVVGLDLAKSVFQVHVANTQGKKLLTKRLKRCEVLTWFAALPPSLVGMEACGGAHEWARQLQELGHQIKLMAPQHVKPYVQGNKTDARDAAAICEAASRECVPAVALRSRDSQQMQVMHRTRENWIKQRTAIANQLRGHLAEFGHVLPAGIHHIRAGCRDWQAREGHKFGILNQIVDALLDQFAGLEERLKKVEQQLLQIHRNDPACKLIESIPGIGMLTATGVISHFGRCDMFGSARKFACALGLTPREHSSGGKQVLLGISKRGNGYLRKLLVHGARAVLSARMNKPQHAQDWVVKLAQRRGVNIAVCALAAKNARRIWAMLQSGEVFRVDYAEGTLA

SEQ ID NO: 132447 - protein, 291 aa, unidentified
MRVPSDDTLETGNEIFVGIDISKSTLDVAIWPSGKQWSVDNDATGIKELIEQLRGFNPALIVLEATGGLKVYLAGELAVSGFPVVGVNPRQVRDFTKAIGKLAKTDKIDAQVLAQFAQAVRPVPRPLPDASTQALGALVARRCQMMQMLVAEKNRLQSSPNPIRKQIQKHILWLERHLTSLDEDLTRSIQQSPLWCERENLLKSTPGVGPVMSRTLLTDLPELGTLNNKQIAALLGVAPLNRDSGKLRGKRSVWGGRAHVPSTLYKEYLGSASFQSGDQGFLSKAAGSGKS

SEQ ID NO: 132448 - protein, 326 aa, unidentified
MTEHYIGVDLHKVFFQACAVTASGMREWEDRFPRTAAGIAAFVARCDAQTAVAVEASTPTWHFADAIHDRVGEVRIVDSVKTRLKAGYAAKTDRLDARRLADALRRDSVVGIYYPPMAIRELRELCRGRHTLVQMRTRLLQRLRAVLLRQGIVEARRLVRRDAVLDTLLLPPRAAASVMSLRHMLAGVRAEITTVEHEVHAVAAMDPIATRLQQIPGIGPVLSLMMRAEIGEIRRFPTGRHLASYAGLVPRVDGTAGRYRYGRITRRGSPWLRWALVEAAMHGPRRHDPAGRWARRLAIRKGALKARVACARSLCDEIFAVWMTGL

SEQ ID NO: 132449 - protein, 343 aa, unidentified
MQAITTIGFDIAKSVFQVHGVDAAGQVIVRRQLKRRQVMAFFQKLPPCLVGIEACASSHYWSRELHALGHRVRLMPPAYVKPYVKRQKNDMADAEAICEAVTRANMRFVPTKTPEQQSGLVLHRTRHLFIRQQTSVINAIRAHLAEFGVIAPVGRKGVEELLCVVADPNDKRVPEVVRACVAALGSQLLSLKKQILDFDRMIMAWHRSNQTSKRLNCIPGVGPLLATALVASVADPKTFRSGRNFSAWIGLVPKQHSSGGRDRLGSISKQGDRYLRSLFVAGALAVIRYAKIHGSKHRPWLTALLARRPTKLAAIALANKLARMAWAMMATGARYNYPASLRV

SEQ ID NO: 132450 - protein, 410 aa, unidentified
MSAIYCGIDVSADSCVVLCVDQSGQPLGQSRSFANDLDGAGELTAFLVDLAKSRQATRLEIGLEATSVYGVHLRNFLVSAPSLAALETKVYEINPALVAGFKKSFPKRPKTDSLDAFAIAERVRFGHLTPFSPQRLVTEPLLQLTRLRLHLVQTLAVEQNRAYNYMYLKFSNYRREKPFSSVFGRSSLAVLNDYTPEELLNLELEDLADFILKNGNNRLGDPEEYARSLKATARRAYHLHPKMGSAVETVLAMTISNIDFLKGQIRKLDKLIARELDAIPQTLTTVAGIGPVLASGIIAEIGDIKRFASQAALAQYAGLTWSRYQSGSFDAEDRSLTKAGNRYLRYYLVEAANSLRVHNEEYRAYYQAKYAEVTKHQHKRALVLTARKFVRLVYALLSKGQIYAPGQVNA

SEQ ID NO: 132451 - protein, 442 aa, unidentified
MARKPSKQRFTVVHPDCAAIDVGSREHFVAVDPRHENAVQSFTSFTDDLYKLTDWLDSLGIKVVAMESTGVYWIPIYEILSERGFEVYLVNARATRQITGRKSDVLDCQWIWQLMTHGLLRGAFRPSDPTCCVRSLVRQRAFKVKDQAQTLNRMQKALSQMNIQLANVISDISGVTGMRILRAITAGERDPVRLAELTDARIKAGKDTIARSLHGNWRREHLHALAQELAAYDFLEQQIAECDDVIGKALGQLPVLEHVPQPSRKVLRSPHRTSAQQAALHQALWQVLGVDLTAIPTIGVDTALVLAGEIGADLSRFPSSQHFCSWLGLAPPTRISGGRQLSGGGPKVINRAAQALKQAASNARNDKGFIGASHRARLTRMDTSCAIKATAHQLARLVYTLLTKKQTYVEQGLEAFEAKSQDRQLRALLRKARKLGYQLVAA

SEQ ID NO: 132452 - protein, 334 aa, unidentified
MKYTPVGVDIAKHVIQIHFINEHTGEVVDKQLRRQDFLTFFGNREPCLIGMEACGGSQHWARELTKLGHKVRLLQARFVKAFVMGNKNDVMDARAIWMAVQQPGKEIAVKTEEQQSVLVLHRTRMQLVKFRTAQINALHGTLLEFGETIHKGRAAMEREFPEALERMKERLPPYLIMVLENQYNRLNELDSLIEDIEKQLTSVARQNETCKRLLDIPGVGPLIATAAVATMGEASAFKSGREFAAYVGLVPKQTGSGGKVRLLGISKRGDTYLRTLFIHGARAVALVAKEPGPWITELKKRRPASVAIVAMANKLARTVWAIIAAFPRAIVVAI

SEQ ID NO: 132453 - protein, 360 aa, unidentified
MTTYYIGADVHSNSTELAIEKRNKIVARYSVPTTIPAISNVLDSLQGKKHLAFEEGPMAGWLYRNLNQKVDKLIVCDPRRNKLISSDGDSDDKIDAGKLALLLRGGYLRAVYHSDNDQRAELKHWVNLYHDRVRDAVRNINKIRARCRMFGLTIPRSALRDPAHRLKWLFKINHPALAKQLKMLWIGYDATAKQARIAKRQLSVLGKNHDIIKLWDRLPGIGLIRATTLFACLDTPWRFKRKNKLWRYCGVGLQRAASGTDKKGRPKPARLRLPWAVNRTLKNAVLGAAISAINQKDNVFKDYYERMVQDGMITSNARHAVARKMLTVIWGMWKTNSRFDEKLLYLPSDLSKPTASVSSR

SEQ ID NO: 132454 - protein, 415 aa, unidentified
MQEEAYALYVGVDWASEAHQVAIVDAARARPVQQRVPHTGAALTQLADDLIQRAGGEPARVAVAIEVPRGPVVETLLERGLHVYALNPKQLDRFRDRYSMAGAKDDRRDARVLAEALRTDRPAFRRLQIDEPTVIRLRELARLAAELQQERTRLANRLREQLQRFYPQLLALCPAADEPWLWALLELAPTPATGRRLSPAQLGRVLRTHRIRRLTADALHAQLQTPALRVAPGTAEAASEYIALLLPRLRLVHAQHRACAQRLERLLAELAEPAPGQPAGHRDVTILRSLPGVGSGVVATMLAEATPLLATRDYHGLRTQIGLAPVTRRSGKHVEVSMRYACNQRLRYAAYHWGRTSVQCDAHSRAHYAQLRQRGHSHARALRGVVDRLLRVLVVMLDTRTLYDPVRRRSLEQTA

SEQ ID NO: 132455 - protein, 373 aa, unidentified
MKKNNTCQQSSKRGKKAPKGSMTIGMDLGEKTSRYCVLDNDGEIVREASVGTTKKAMKQVFGPMKHCRIAVEVGTHSPWVSRLLTKLGHQVIVANARRVKLISESSCKDDRLDAQTLARLARVDPQLLHPIRHRSEQAQADLMVIRVRAALVETRTSLVNTARGLAKSVGERLPKCDAAQMGVEQMESLPAALQETLRPLLEQIESLTEKIKESDGRIEQIARKEYPETALLKQVSGVGTLIALTFVLTIEDRERFQKSRDVGCYVGLRPKRSESGERQPELRITKEGDVYLRKLLVQGAQSILKQKSPDTDLKRWGLQLAGNSKNKKKRAIVAVARKLAILLHRLWVTGEVYEPLRNSQIRQQQQKVTQKVA

SEQ ID NO: 132456 - protein, 427 aa, unidentified
MKFKQSDEQNQRIERITPSHLVIGIDIAKDAHVAQATNFRGIVLSKRHLTFTNSKEGFERFGRWINELQQKHRLNNIIIGMEPTGHYWFNLVNWLVEQRLSVVLVNPVTTKRNKENRDNSPSKNDPKDALVIADVVSRGYYSEYTKQSHYFERMRVIMSDREFWVANSIRLQNRIIRWLDIRFPEYTLVFSDWTCKRSLATLYEFPVPADLHGVTTAEVIASWRKHMKRAGGTTGLEKAAQLIASAARSIGEIVATHEAKQDLRRLLDEYCRIVEILEMIEQEILVLLDKIPLAQQLRSIQGLGPIFIAAILSGAGDLSLYSHGRQLLRRAGLNLAESMSGKRKGQIVLSKRGDATLRKYLYLATLRLIGNNQLFRKWHEHNVQVRHMKKYRSMFKLIGKLARILVGLAQRGESFSTDKAVIHDSVA

SEQ ID NO: 132457 - protein, 327 aa, unidentified
MGMDTHKQFSFVTALTEKGDVIKQEKLVNFSDEFNEFFRELSRNKTLEIAIESTEMIMPFVKALERYGKIKVAHPTKLKLIAESKVKTDKIDSTVIANLLRTNYLPESYIPPEEIREIRTLCREHYAIKALIVRVKNQIRHYLLSQGIIREDNVFTKENRKKLRKMNSDFINRKLDMLECMEEKLREVDDEIKERVSNVKEVELLTTIPGIGIYTAALLYSEIADIERFKKFSKLCSYVGLNPSMYQSGNRKYFGRITKQGNKLLRWALIQSAYVAVKFDPELKIFFERLKQKKGVKKAIVATARKLLKRVYAVWKRKEPYESCGSL

SEQ ID NO: 132458 - protein, 394 aa, unidentified
MIYVGIDVASTKHDIVILNESGELFKKAFSIKNDLDGYKKLLSEISSAKEFFNDLNVRIGLESTGHYSRNILHFLILAQFEVMFINPLLTNMDRKAASVRKTKTDAIDAKAICMFLIRNQNDFKPYTLSSYHIDELKTLVKLRKSLKTQINKEMNLLHAYVIQAFPEYYKIFKKISSKASMEVLSRYASLSEFKRVRLKTLKELIRKSSQGHHGIREAQMIKELTASSIGIDSSALSFSIKQTIERILVIKDQVSGIEHEIIHHVDESKTKLLSVPGVGYTTGAIILAEIGDIHRFKTDDQLLAYAGLDPSVYQSGNFEGNYKISKRGSSILRWAIYQAAQAAVKFDSVFKAYYLKKKSEGKRHRVIIGHVTKKLLRVIRSIMKNNITYSLNTH

SEQ ID NO: 132459 - protein, 351 aa, unidentified
MESRVTALPKLFIGIDIHKRSWKIHCSTDLFAGKSFTMPPEPDKLYAYVQKHFPDYQVTTAYEAGCCGYSAHRSFEAYGWKSLVVNPADIHRKGKERYTKTDRIDAQLISRELKDGRLDSIIIPNIEREELRSLFRRRNELVKDLRRIKCMIKMQLLYFGIKVPEEFDNDHWSHAFRHWVDSQQFNYPTARETMASKMRNFRFIDKELRDVSNQLRAYCCKHFKKDYYLLRSVPGIGGIVAVGILSELGDLRRFNNLKHLAGYVGLAPGLYESGATSKSLGMNPRCHRLIRSYFVEAAWQAIRTDPVIQGYYRKHLGKDVKKIIVKVAHKLLSRTLAVVKTETPYEIGVIA

SEQ ID NO: 132460 - protein, 408 aa, unidentified
MNPLFVGIDVSSKNNVAYLMKPDGSKHSSFSVQNNLGGAKLLSERIVSALGSMQLERVVIGLEATSIYGDSLVYALREDGRLGRFQRKIHVLNPKQVRKFKEAYSDLPKNDWVDAFVIADHLRFGRINREVYMDDYRYKALQTLTRARFDVIQNLTREKQRFANYLFLKCSGMAQDKDIQNTSATTIALMEHFETVDDLANADLEELTAFITETGRGKFADPDATAKAVRAAAKGSYRLPKTVNDTVNQAMAVSIASMRALKGQVKVLDKAIEQQFEIIPNTLTSIPGIGKVYSAGIIAEIGDIHRFDSQASVAKYAGLVWNRSQSGDFEAEHSRMIKSGNRYLRYYLLEAANSVRRCDSEFRRYYDLKYQEVNKYQHKRALALTARKLVRLIFRLLKDNRLYIPPEG

SEQ ID NO: 132461 - protein, 344 aa, unidentified
MAVYYVGADVHNNNTELAVEYNKEIVRRFSVPTTIPTIRSALKELGGRCHLTFEEGPMAGWLYRNLKGDVESITVCDPRRNKLIACDGDADDVIDSGKLAALLRGKFLRPVYHDHDAKQLELKQWVKLYHDFVKSATRNINKVRGCCRGEGIRIPAHTVKAGAYRQQWLDGLENRVLAEQVRLLWQGYDTAASQGRAAKKQLDRCIRGNIVLQRWSDLAGIGIIRATTIYAYLDTPWRFKKKSQLWKYCGVGLQHSASGKDAKGRPRTGKLELAWHVNKMIKNAVMGAAMSAIRQKDNEFAHYYERMLKNGITPGNARHSVARQMATVLWGIWKQQLRQQKTEK

SEQ ID NO: 132462 - protein, 368 aa, unidentified
MRIIGMDIHRVAAEVVSLLDGEIVKLGRVQMLRDKLEEFARKELTHDDHVVVEATGNAAAVAEVLSPYVDRIVIANPKQVHMIAHAKVKTDMIDATVLAKLYASGFLPEVWVPDPETLALRRQVTRRTQLVRQRSRLKNLIQSILHAHLIPPCPHGNLVGISGRKWLARQILPADERAAIERHLGLINQVNEALTVVEADTAVHALQDPTIRRLMTLPGLDVTVAASVAAAIGDIRRFSDPQKLVAYLGLHRGRRHRAQACNDHLAHAEQGYRLHLGPAGLACPQVQIGRAACRPSDQPRQTRHRLRLQHPGQAPKNDPASRRRKLPMQPRLPDGERGRKGRRLWKSRRMRRTGYSTTSVSIGLPGTM

SEQ ID NO: 132463 - protein, 419 aa, unidentified
MQYSLCRELSAGYSEGKLPRERVTGVLIMEKAWLGVDAGKEAHWADMLDASGTVLLSRRVENEEADLSKLIDDALLLAEEVVWAVDQPGGGAALLLALLWERNQRVLYLPGLTVDRARDAYRGESKTDARDARVIADQARMRPDLGELKAGEQEVAELQLLLARRRDLITDQSRTITRLREALLSLFPALERALDLKSKGPLTLLTHYQTPAQLRRAGHKRVATYLRNRGVKGSNKVADKALAAAKAQSVTLPAQEVAASIVAELAGDVLGLKERLESIDEEIGQRFFARPEARVLISLPGMGSILGAEFLVAVGEISAFESADRLAAYAGLVPAARDSGKRVGNNKRMRGGNKTLKRVFYQSAFASLRSAPESRVFYERKRAEGKRHTQALIALARRRVNVLWAMLRDGTTFESRSAA

SEQ ID NO: 132464 - protein, 369 aa, unidentified
MSEIARAQIARVGVDLAKQVIQVHAVDAYGQRAVVRALKRDQFYDWCAQLPTGCLVAMEACSSAHYWARKLRARGLDARLIAANFVSPYRMEGKKNDATDAAAICEAASRPSMRFVPIKTCEQQGVMSLHRVREGLKEERTACINQIRGVLTEFGLVFSKSPKVLRAVLTDVIEDATNELSSMARLVLQRASEHWRELDEHMRWCDRQVAQHVRSSPVAKRAAKVIGIGELSASALTAGVGDFKQFKSGHQFGAWLGMVPRQDSSGGKARLGRITKRGDDYLRTLMIQGAKSAVMTANKRDDPTSRWLVQLTARVGWQKACVAMANKNARILWAVMTREEGFDPNHISVKPMTKQTVDDLLASSTSGLI

SEQ ID NO: 132465 - protein, 485 aa, unidentified
MIKSVGIDLACTGEHKVRCLDERAQPCDGFSFETSSEGLAKLEERIFGDGANPVIVFEPTGLAWLLVAIYLKGRHPDCHLIRVQARKVVALRKYLRRSSKSDKIDALTLAKMSFIDSEQLEEVYLPPAKIYAMQRLARQRKRLESEITARKTRIGSIVDGYFPRMRQAFSDPWSSHARAFLRSRLNPVAVVHTSEKTLHAFLTKARRHGKADAAESHMIYLSCKDAATVYELSKPVGTIDDDFFADLQEEISRELRIMEMTEAESDAIAERLEQLYLELHPSDNLRTIPGVGEHTAPMFLATVGDPARFRSQSAFANYSGVVPAAKQSSNAEAKGLRMTKAGPATLKWALYQSGQIGRRCDPQLACVYYREMVHHGKNHKQAMGAVMSHMGARVLAVLREDKPYELRDMQGKPITREEARKLILSNFQVPEEIKRERRRRKTTSGSTKPRRKYQEMAAHRTNEAAVAPQPAITTAISGAYCSREG

SEQ ID NO: 132466 - protein, 343 aa, unidentified
MSIVGGLDIHRKQITFDYVDTETGEARRGQVCPADREHLAKWLARFTGQDAHFAMEGCTGWRYVAGEIIAAGLTPHLADPAETAHLRGPKRRAKTDRADARHQRMLLEQGRLPECWIPPPHVLECRALLETYLDLREQRTGWVQRIHATLFHHGAPHIARQRLGTAEGAAALQAAAARCSPAGQLQLAIAVQMLAVYDERLHQVRRQLLDQARHLRGAAELTARLYGVGPITGLAITCWLGGAGRFSSARKAVRFAGLDITVYSSDGKRAPGRLSRQGPPVLRWCLYEAGKTHARKDAPDHAYYAQVKERIDGKRAAISEARKIIRQAARILTGLGDDALAAC

SEQ ID NO: 132467 - protein, 415 aa, unidentified
MDTMYERCCGLDIHKKTIEACFRSGKKTHMSFGTTSAELRKLTIWLVENDCQSVAMESTGSYWKPIFNILELSGTDMEIIVVNARHMKNVPGRKTDVNDAEWIAELLQYGLLRPSFIPDREQRELRELSRYRKSLVGERAREINRLQKMLEGGNIKLTSVVSEVTGYSSRRLLDRLLRNDEPMTEEVISGLVHTSLAGKSKELETALDGLLSELQKELLIKVLDHIDDMSRRIADLDDFCRKQMKKYEDALDKLDEIPGIARRTAETILIETGLDMSRFPTAKHFARWAGLAPGNNESAGKRSNGRTTKGNPTLKSTLIQSAKEAARKKDSFFKARYQKIAARRGANRASVAVAHSMLIAIYHILKSGERFKDLGEDYYNQFNKEKKKKYYLKKLTKLGVNLKEATLSISIQAAT

SEQ ID NO: 132468 - protein, 332 aa, unidentified
MVFKEFIGIDVGKFHIDVCIHSNQAVNQFECTKKGYNALLKFVKKHLKSTDDDQILFVMEHTGNYSLNLAMFLESKGAKFSIVPSLEISRSMGLTRGKSDVLDAKRIAQYAFRRRDEIQATKLSSDTILKMKQLLSARALLMKQKKALNASIKEFEYLKSGPENKDLITLLKRQVKSLNKDIKSIEKSLLNTINQDDKIKKQYELMCSVKGVGIIMAANMIVHTDGFQKFSEARQFASYCGVAPFPYSSGTSLKGRNKVSPLANKEIKAILHLCAVSVIKNSTEMKEYYQRKLAEGKHKMCVLNAVRNKILHRIFAVIKREKPYVDTHKYAA

SEQ ID NO: 132469 - protein, 362 aa, unidentified
MKQYIGCDTHLRYSVFRILSEDGVMGAAMRVEHSGGELERFLAQLPAGSPVALESTGSYGWLVRAIEEAGLEPHMGHALEVKKRIGGAHKTDTVDARGLAILLRNGTLPEVWIPPAGVRDLRGMVRSRLALRRHQNSFKCRIHAVLSHYGAKQWVEDDEDVIVRDWFAPKSRERLMKAIEALPPATREATRQEYLVAEDMERYIRSLELAIRARVGQLGWLKLLKSLPGVGDILGPTIWLEVGDVKRFPNAQHLAGYAGLVPRTYSSGGKTWRGSTAKSCNHYLKWAFVEAANVIASQHHKMQRKHPHVVGLYSRVKATTKLSGKAKVAVARHLAESTWWILTKKQFYREPTSARVASSNNG

SEQ ID NO: 132470 - protein, 383 aa, unidentified
MPDVSSNAPAVVRMRAALDVHKRTIVCASQPDDPRAELRLEEIPNTERALRGLVKRLGGPEGLVVCYEAGPCGYDPYRLLSAIGVACDIVAPALVPIAPGARVKTDRRDAKRLLVLHRAGALKFVHPPTPAQEGLRDLVRCRDDLVCARRAARHRVAKQLLRHGHIFRDGKKSWTKIHQAWVRRQRLADALAQSALEHMLAHLDGLDAQIAALDHQLDEIAAREPWVDPVRWLCCFRGITTLTALALLAELGDFRRFGSARELMGFLGLTPSEYSSGEQRHRGHITKAGNTHARRLLIEAAWHYQHAPRVSQRIAAVHPHVPPDVAARAYSAQIRLHHRHRTLTAHGKRSTVANVAVARELAGFLWAAMTHQPLRDQEMPAAA

SEQ ID NO: 132471 - protein, 318 aa, unidentified
MSEIIAVGIDVAKATLDVAFGVAGTVITYPNTPTGHEELLTALAECHVDLVVLEATGSYEVAVGCALQSASYAVAIVNPRQARDFSKAMGNLAKTDRIDARALAQLAQVLAQRSDRDKIVKVLPSPLQQELQALVARRRQIVTLLTSERQRLGISHEAVRGSLTAVIDFLQAELKAIEAALAKHVKAHHTGLVELLSSVRGVGPATVATLIADVPELGKLTRREVSALSGVAPFNRDSGAFRGKRMIFGGRAAVRRMLYMATLAAVRFNPVIGAFYHRLVATGKPNKVVLVACMRKLLTILNAIAKTGKPWDESIHTA

SEQ ID NO: 132472 - protein, 353 aa, unidentified
MALDHRWCVGVDLHKDTLTACVFCGCCGEVSFQKIACRCRRQIAEYFAALPRPHTVALESVGFYRWLWEMLEPIVEELVLADATQARALAGRRLKTDREDALNIAQLLAAGRLPRSYAPPIEVQWLRDLTRHRNSFSRQHARILHRVKSIMNANNRPGPARMQSDGLIRYLKAQGEKLPARHVEMLWQCVDALTLTERQIAHTERTIGQVVRRESFREVYGILTSFPGVALVTAATVIAEIGDFKRFSGAKAIGRYAGLNPRVYASGGKQRMGHIAKTGSPDLRWVLQQAAWTAIRYDEHVKRIFLRIAKRAGRKAAAVAVARKLLTWMHIAAKKGEPYRTPGARHTVLPGAA

SEQ ID NO: 132473 - protein, 325 aa, unidentified
MAAALDEVGRLLGTESFGADPAGYSALLGWLAGFGPVTKVGVEGTGAYGAGLARFLARAGIEVIEIDRQNRQDRRRQGKSDPLDAVQAARATLSGRADGRAKSRDGAVEAIRVLVVAKRSARQARVKAIVQMRQLVFTAPDQLQSRIKGLPIPKLVAMAQGLRPTRSTDPVTAATKASLSSLAHRVGDLGEEITRLDAMITPLLKTTAPELLAVYGVGIDTAATLLVTAGDNPERLRSESAWAHLCGVSPLPASSGKVARHRLNRGGDRQANRALWHIVITRLASDPDTQAYMERRVKEGRSKREVVRILKRYVAREVYRYLPRG

SEQ ID NO: 132474 - protein, 337 aa, unidentified
MTGGVDTHADAHVAAALDGIGGLLGVSEFPATPAGYARLLGWLGGFGAVGLVGIEGTGSYGAGLARHIAAAGIGVVEVDRSDRQDRRRKGKSDPLDAVSAARAALSGRASGAPRGRDGQVEAIRALMVAKRTARAQRTQAINQARALIITGPDGIRTRFTGQTPAGLIAELAALRPRPGTMVRYHTLLALRELGRRAQFLDGQLGRLDELIVPLVTARAPGLLSLYGVGPDTAAMLLIAAGDNPGRLRSEAAWAHLCAAAPIPASSGKTQNRHRLNRGGDRQANHALWRIVITRMGSHPPTRAYVARRSKEGLSKPEIIRCLKRYAARETYRYLRPR

SEQ ID NO: 132475 - protein, 468 aa, unidentified
MSPYSTTPGTLIVALDIGKNVHWFGCYRYDGRPVELVAPQKVRSDLRGFADFTATVDRLLASGQFPAAVLGNEHTGVYHEPWAWRIDEHFRAAMQPGAACPVSYRWLNPLLTKQRQAEMSVRQRTSDRTAVAAVAACLAAGLGHPAQLLTDHAAQLREWVRSYEALSDQIRFAGRQIIPQVDRLWPGAIADVKQFRRAHPDLPPPTPIVETQALDRDRLAVLLQHCPNPHDALALGEAGLIRLFHDHGYRAGPKTAAAILAALRHSPLPPQPVAAAYAARLQADYQRYVALTAASQALEDHLTALVPSTPARFVDSVPGISPLLAARYVAPIGAVASFPTASQVWALAGYDLRSAESGDTKQLGHLTKRGSPYLRDVLYQIGFHTARHCPVIGAAFLAARERGLNETAAVIHAAHKANRLCFTLLRAERPYDPATPAEAQDFRQRWQRFQQAQARQRQRQAPQQRLAT

SEQ ID NO: 132476 - protein, 410 aa, unidentified
MELLHRRCCGLDVHKETVVACLRLVADGKVPTEVRTFQTTTADLLRLSEWLAANECTHVAMEATGVYWKPVWHILDDGDFVLVLANAAHVKNVPGRKTDVNDAMWLAELLAHGLIRASFVPDTQTQEMRNLLRTRKQLVREQSSHVLRVQKTLEDANIKLDSVLSDVMSKSGRAMLEALIAGETNPTKLASLASRRVKASPEELREALRGRVTKHHRFLLRLHLNQIDALAAAMVTIDAQVEESLEPFRTAVELITSIPGIRSLSAHVIVSEIGIDMSRFPSATHLISWACLCPRNDESAGKRRSNRSRKGATWLKTTLVQCAWAAVKKKDSYLQAQFYRIKARRGPKKAIMAVAASMLTAIYHMLKDGTMYQDLGRNYFDRRSTEQQKNKLIKRLADLGYAAALTPLAA

SEQ ID NO: 132477 - protein, 331 aa, unidentified
METRKEPDMITSGVDAHKSVHAASAAHPRQWGIEGAGNDGRGLAQHLVAADETVYDINPHWTAGERRQVRRPGKSDRLDARAVALVVRREAATLHPLQAEDETAVLDLLVTEREAALAEATRLRNQLHALLLQLDPQHKKVLPPLDTEAGVAALVAYHGPERTPLQQAQAASVRRLAHRLRLAAEQATDVRRQIEARAEAVFPPLTRLKGVSLLTAGALAGILGPGRRFMSEAQRAAYAGFAPLEASSAGRVRHRLNCGGNRRLNAILYRMALTQLRCWPPAQDYVARRVSEGKTKREAIRALKRYLVRAIWRVWQECVSHQASSSFVQAA

SEQ ID NO: 132478 - protein, 316 aa, unidentified
MDQADQALPCFVGIDVAKKHLDIHVRPTGTSFTVSRDTAGLDELLARLRPLQPSLIVLEATGGYETIVLATLGGAGLPVLAVNPRQIRDFARACGRLAKTDSLDAAVIALFAERIRPELRPQPDAATQAIAELAARRRQIVEMISAESRRRQQAATKRVQNNINIHISWLQKELSSIDVELDTTIRGSAVWASSEDLLVSVPGVGKTVAHTLIAHLPELGTLDRREIAALAGVAPFNYDSGSHRGSRSIRGGRSVVRAKLYMAAWVATRCNPVIKTFYERLIAAGKQRKVAIVACMRKLLTILNALIREKKPWQPA

SEQ ID NO: 132479 - protein, 358 aa, unidentified
MNKFKQLSFEGQTIFCGIDVHKKSWRVNVRNDEFELEDYSQDPCEENLLDHLRKRYPGANYQVAYEAGFCGFGIQRSLQHSGLRCIIVNPADVPSSDKDKKRKNDRIDARKISRELSKGELKGIYVPAVEMEHARTLVRQRTRLVQDQTRCKNRIWHLLMFSGLKLNADSTGRHWSGRLLETLRQMACETRSLRYALDTAIEEYLQVRKLLSHTTKQVRALWEWEQPFFVTTQKLLQTIPGIGIVNAMIIMTELQDMRRFKTLDNLCSYVGIVPDTATSGENEIVKGITHRSNEYLRPAIVESSWSIIRKDPAMTMLYKKYCSRMVPNKAIIKIARHLLSRIRYVWLSQVGYEIGIVG

SEQ ID NO: 132480 - protein, 471 aa, unidentified
MEREQKRLEQFRLLRKEIRGSQQYLVVGIDISKDTHNALMRTVSGKILYRRLTFNNTREGFETLLLQVEAVQVQHGLKEVVFGMEPTANYHKPLGEFLINQNHQVVLISPEAAKQNRPLLDGRWNKHDGKDCANIADLMCQGKCLYYEYPSPELRDLRNLLSLNRKLKKLEQGLRLRIRNHLVAQYFPELDQYCHWGANEGLALVRWCLDPAVMAALSDEELIKRLGTPGRTIAQRKRLSALKDKAPSSIGCQFGDSVEFEGQSVVKLLKEVRQAMEDAQEQIQGVCQKFKEYSYLLSIPGFGPTLSAMVLGAIGNPWRFQNGAQVLKMVGLDLSASQSGKSQGVPIVSKKGKAEIRYALYQAATVASSRDKHFVDYFTDQLRGREKEKGIKTKKRVKLAAKMLMIAWTLMKKHERFDPKYLSAQTQPIAAHTTVKTRSGGIPEVQPAPRVVYRANMKAVFLRLPTKRTST

SEQ ID NO: 132481 - protein, 423 aa, unidentified
MKFKSQDRQNQLIEKITDQHLVVGIDIAQQTHVARAVNFRGIVVGNPLSFSNDEDGFQLLLRWIQMLQSTHALTEAIVGMEPTGHYWFNLSNWLSDRLLEVVLVNPHLVKKNKENRDNTPSKSDKKDALVIADMVKNGYYSFIRNTPEAFEELRVFLSNRDSVVTRLVSTKNQIHRWVDIVFPELRQVFKNIMCTGSLATLRLFPTPEELYKLQSQDILQGWKSLMKRHSGERKAKALISFASRSVGTKQAPHAYKLHLKQLLDEYDLACLQLKTVETEIVAVLERIPFAKSMLAVKGISAISLAGILGEAGDLSGYVHGNALLRHAGLNLAEASSGKWTGQMKISKRGRSRLRRFIFMMTMSLVANNSEFKAMHAYNVQVKKMKKMRSIMKLCGKLARILVGMARRGEAYNPPKTLPIQLAA

SEQ ID NO: 132482 - protein, 410 aa, unidentified
MKMAGIDVHKKVWMVVVVDASVPEEKPVRRRFVTLPSELQRFRIWLQEQGVEEAVMESTAQYWRSVWLELEPHMSLHLAQAFSNRAPRGRKHDFKDAERLVRRLMADELILSFVPKGEQRIWRSLTRMKVQLTRDRVRLQNQMECLLEEMRIKLSIVVSNLLGASGLRILHALAQGETDPQKLAELGDERLHCTEEQLVDALTGRVQPMHRGMLALQLQRLQLIDQQMTQLNSMIAQAMKSHQDAVIRLAEVPGLGVDSAQQIIAEVGAQASTFSSAAELTAWVGTCPGKEESAEQNHSSRSAKGNKYLRRVLNQAAHAAVAKKGSYFQGVFRRLMPRLGYKSAIWAIAHRLCRVVWKILHEGVRYIEQGREVGPREKKQRAQMLARALRKLGYEVTITPINQLAPKPAI

SEQ ID NO: 132483 - protein, 406 aa, unidentified
MTLIFVGDDWAEEHHDVYVMDEAGKRLAAKRFPEGLAGIRGLHALIATHAEESDQVVVGIETDRGLWVDALTAAGYQVFAINPLAAARYRDRHHLSGAKSDPADAKLLADLVRTDRHNHRPVAGDSGGAAAVKVLARAHQSLIWARTRHTNMLRSALREYYPGALETFDDLDDRDALAVLGRAPTPAEGARLSLAKIRSALKAAGRQRNIDARALEIQAGLRTEQLTASDAVTAAFAASTRAAVGIIAELNHQISDLETELATHFETHPDADIYLSLPGLGVILGARVLGEFGDDPNRYTTAKCRKNYAGTSPLTIASGRKRAVLARHVRNRRLYDAIDQWAFCALTTSPGARAFYDQRRDADDLHHQALRALGNRLVGILHGCLRHHTLYDEHKAWAHRQPTAAA

SEQ ID NO: 132484 - protein, 369 aa, unidentified
MGEQIAAFIGLDVAKAKHAVAIAEEGRTGEVRYFGEIGAEPASVRRMVAKLDKPGTRLHFCYEAGPTGYGLHRQLTAMGHACDVIAPSLIPRRAGDRVKTNRRDAIQLAKLLRAGELTPIWVPDEVHEAMRELIRSRDVAVADLRRKRQAISSMMLRYGLIYAGKKTWGPRHRQWLQVQRFAYPAQQLVLQDLILAAEHAAERLKRVETSIMEFLPKWSLAPVVDALQALRGIQVVTAATIMAEIGDLRRFDTPRQLMGYLGLVPGEDSTGESVKRLGITKAGNGRVRRALVESAWTYRHLPRTGKVKRYVHERVSPDVRDIALKAQSRLCARYRNLSGKGKKPTVAVTAIARELAGFVWAIGRLVQTT

SEQ ID NO: 132485 - protein, 454 aa, unidentified
MSLEDRPVEQPHAAGVDIGAREIFVAVPHDPEGQPVRKFATFTEDLWRLADWLQGCGVTTVAMESTGVFWIPLYELLEQRGLKPCVVNARHMKNVPGRRTDWHECQWIQFLHSVGLLRAAFRPEEQVCAVRAIVRHRQQLVEMAAQHVQHMQKAMTLMNLQLQHVLSDITGTTGLAIVDAIVAGERDPKELSKLRDPRVKASSDVIEKSLCGNWREEHLFTLGQSRQFHRFYQAQIVICETNIERLLQQFDPRVDPQQTPLPPDNKCNRSGAKRRKKAGHVESQFDLRTEAYKLFGVDVTQIPGLETNVLPLFGEVGRNLSRWPTASHFISWLSLCPDNDISGGRVLWRGMRKTNNRAGQIFRLAAQSLHRSPTPIGEYLRRLKAKLGPAGAITATARKIATLFYTLVTRQVEFDHTLWHANDAQRQQRIQARLTRQARRLGYQLVPLEVSSCT

SEQ ID NO: 132486 - protein, 399 aa, unidentified
MNAVGIDVSKGKSTVAVMQPLGVVAASPFEVAHTESELRELAKFLKSFSGETKVVMEYTGSYYEPIARFLHNEGIYVSVVNAILIHNYSGNSVRRAKTDKKDSVRIAQYALDRWLDLREYIPVEETRSTLTLLNRQYSAICKHKTQLINNLISLIDQSFPNANEFFDSPTRQSDGHMKWVDFILKFPHRDCVSGISRAAFKDKYSRWCKKQNYNYAEEKADEIYDHCRSCVAALPDSECVRAMIQQSANLLNCTLETAESLRKLMTATAEQLPEYDTVLGMYGVGRVLAPQLMAEIGDTRRFHSRKAITAFAGLDAPPYQSGTVDVKSRSISKRGSPHLRRTLFLVVETYLKRKPADEPVYQFLDRKRSEGKLYKVYMTAAANKFLRIYYARVNQVLNA

SEQ ID NO: 132487 - protein, 309 aa, unidentified
MKQSVVYIGIDVAKAHLDVAWAGTFRRLPNERSGHAALVRWIKQSTTPVQLICEASGGYEQALLESLEKSAVKVTLVQAVRVRQYARASGILAKTDKIDAKVLAAFGSAIKPQPMSPRSVEQKRLRQYEAQRRHLSRILVAEENRLAQLSCAELRTLSRSLMSKIKNQIETLDRRIGELIAQDQTLWEKAQKLTAISGVGARTAALLLAQMPELGQLNRRQAAALAGLAPFNHDSGSIRGKRAIFGGRRALRSGLYMAALSAARFNPILSRFYQRLRAKGKPHKLALTAVMRKLLLALNHSLKPEPIIA

SEQ ID NO: 132488 - protein, 344 aa, unidentified
MGEISTIGLDIAKAVFQVHGVDGEGAVVIRKRVSRAKMLEFFTELPPCLVGIEACPSAHHWGRELQLLGHTVKLMPPSYVKAYLKRSKNDANDAAAICEAVTRPSMRFVPIKTKEQQTALMLHRTRQLLVRQRTMLSNALRGHLAELGVVSAKGRNGTGELLRIIADGADNRLPAAVRGILDVLARQYSALGAEIGSIDKSILAWHRSCEASRRLEEIPGIGPIVATALVAEIGDWKAFRSGRNLAAWIGLVPKQHTTGGKNRLGSITKQGNRYLRWLLVIGATAVIRYAQKHGTKNRPWLGRLIERRPAKVAAVALANKIARTAWAIMVHGDRYKEPKLSMAA

SEQ ID NO: 132489 - protein, 482 aa, unidentified
MKSKPQKRTKKATDHPTQRHWHEMNRKQRRETMRKIQSEEISLEVVHPNAAGIDIGNESHYVAVPPSRDSQPVQRFGCTTAELKAMAAWLKQCGIRTAAMQSTGVYWIAVYDILEQAGLEVYLVNARDTKNLPGRKSDVQESQWLMKLHTYGLLRNSFRPAQQIRTMRTYWRQRNDLVQSTGRHIQRMQKALTQMNLQLANVLSDVSGVTGQAIIKAILGGERDPHKLAEFRDPRVKASEEQIAQSLEGNWQEELLFVLKQEQDGYEFCRKQMAECDRQLAQYLQQREDRSQGAPLPEEKRKTRLKKKKGNAPQFDLRQGLFRLSGTDLTRIDCIDVMTAMTVISEAGWDMSKWKTEDHFVSWLRLCPDNRISGDKIIGKGRLPTNNRVNIALKMAASSLRLNNTYLGAQFRRLRTRLGAPIAIKAMAAKLARLVYRMLRYGMKYVDRGAAFYELQNRQLQIKRLKSKAAKLGLQIVQAPAA

SEQ ID NO: 132490 - protein, 311 aa, unidentified
MSQTLKTSVAVIGVDIGKNSFHLVGQDRRGAIVLRQKWSRGQVEARLANLPPCLIGMEACVGAHHLSRKLQMLGHDARLMPAKYVRPYSKGQKNDFRDAEAIAEAVQRPTMKFVATKTADQLDLQALHRVRERLVGQRTGIINQIRAFLLERGIAVRQGLRFLRAELPGILATRNDVLSPRMLCIVEDLAADWRRLDERIEGLSGEIERLARQDKGCERLMTVPGIGPIISSAMVAAIGTGDAFSKGRDFGAWLGLVPKQISTGDRTILGSISRRGNRYLRSLFACAQHFCLAPDSAHIAASSERSKRAND

SEQ ID NO: 132491 - protein, 370 aa, unidentified
MSVRRILAKTIDTDLEYEAIGIDLAKNCVSAALLTTDGEVVCIDRLDYSELEKSAQTLSPTTFAMEPCTEMNYLVQKLEAWGHRCLIIGGKNVRDYIESHFSGQKTDLNDAQALAFLTQDTQLRTITAKDLEQQKYASLTTLREQYIKQYRQTIVSLKGICQAWGLSISKGISGKARLKELIENQSNFPSELRAELINMVAHAQSAQRDLNNITKTLVELAKKDKACQLIQTVPGLGPICSCRLRATVGDIKRFKNPKDFPAYYGLVPISIATGHNEKKGKITHRGDKTMRSLMVQGAGCVVIMATKGTLGSKQLTKWILKKQKEKMPWGKLVCAVAAKLLRIVRAILISGKPYNSKIAGVARCSLPQAA

SEQ ID NO: 132492 - protein, 338 aa, unidentified
MPSYAGIDLHARNSYLGIIDNRDKPLFEKRLPNCLCTIKSVLEPFRRGLAGIVVESTYNWYWLVDGLQGAGFKVHLANPAAIKQYEGLKHTDDQWDSFWLAHMLRLGILPEGYIYPKKDRPTRDLLRRRLLFVRQRSAQILSLQSMATRNLGVNIATNEIKKMKEASGQRLFDDPDLAFTAVTNISTINFLKTKIRDIEKRILAKTKLSPQFVILTTIPGVGNILALTIMLEVGDIGRFAKAGHYSSYCRCVKSEKISNNKKKGEGNRKNGNKHLSWAYVEAAHFAARYCPEAKGFYQRKKAKSNGAVATKSLANKLARASYYMMRDQVPFDKDKLFC

SEQ ID NO: 132493 - protein, 326 aa, unidentified
MHRRRSVIVRKTGAGEPIETVQIENGALALTEVLARAGECPEVVLEATYGWYWAADVLAEAGATVHLAHPLGNNWGNRRVKNDERDAADLVDLLRLGRLAEAYIAPPALRERRELVRHRAKLVAVRSGLKAQVHAVLAKEGVAVTVSDLFGLGGRGLLAEIPLADAYRRRVDSLLGLIDAFDTEVAGFANLIAATLAGDAGYHAVRAVPGVGPVLAAIFVAEIGDVTRFAGAAQLCSWAGLTPRHRESDTHVRRGHITKQGSRLVRWAAVEAVGRQRGATPIATVHHRVGDRRGRSIGRVAAARKVLTLVYYGLRDGHIRCLDPTG

SEQ ID NO: 132494 - protein, 419 aa, unidentified
MKKIKPKRPYAVNKKVLIATVDGGKDKHYGYYRFPDGTDGKSLPFENNGKGFQEFLERITSAARTHGLEEIIVGFESTGPYMEPMAQFLKSKRGIRLVQVNPMHTKRLKELSGNSPLKTDRKDPKVIADIIELGHALTVVIPEGPAAELRRLTQGRERTITSRTRLFNQLQCLLASFFPEFLQVMKDVTTASAWHLLMHHPTPQEIAKLGETALASLLRKVSRGKLREDRARALFEASRASVGIRDGRDSVLLEIRLILETIASYDRFIEDSVAEMVRQLEQIPYSKIILSLKGIGPVTAAGLIGEVGDFTKFGTISEIMKLAGLDLYEVSSGKHRGKLRISKRGRPLMRKLLYLAALSAVRKDGVMHEWYQRALSRGMKKTKALVAVSRKLLVLIFALVRDHSIYVENYVKPILREVA

SEQ ID NO: 132495 - protein, 412 aa, unidentified
MKQIRDKVAGLDVHRDTVVACCRVGQPDRSIDVTKQSFATTAKGLAELAAWLTEAQVITVAMEATGVYWKPVYYALEGLFDELWLCNAQHVKNVPGRKTDLSDAEWLADVASHGMVRPSFVPPPDIRELRELTRYRKTQVDARAQEIQRLEKVLQDAGIKLTSVASTVWSASSRLMIEAMIDGERDPKVLGQMAKGRLRAKISQLEEAFSGHFGSHHALVCRQVIDHIDFLDQSIATLTTEITERLCPFEAAFTILCSITGVSRTTAEVMIAEMGTDMTRFPTAGHLCAWAGVAPASHESAGKRRPVGTMKGSTWLQRALIESARAAARTKGSYFSAQYGRIARRRGPNKASVAVAHSILAVAWHLLTNGSLYDDPGAQYFELRHDPAIEAKRLQRKIESLGYQVTMTEIAA

SEQ ID NO: 132496 - protein, 423 aa, unidentified
MKNTAANKLRQVKEGYLIVGVDPHKHKHAAVVMTQDYTIRCKFKFNHSQEGFVMALDRVREEMLKASCQGVMFALETGGHYWRTLAYYLDERGIPFRFINQFTLKRRREGKDLNRRKNDYRDCEVAAQLLCTGEFTESKVKQGIYAELHAAHNTYRRMVKERTRITNLIKGLLDGLFPEFIHAFKDPCCLTALSVLATCPIPSSISSMTDDEFVNTIRANHLGLLKKKKLCALHLVARTSVGIQADAKSVSMEIGFLVEKFRLIKRQIQSLEETLIQLVDQTEEGKYLLSIRGLNYIAVSGLLAELGCFRLYRSAKQMIKMAGSNPSEKESGGKSSKRTPMSKHGRPALRYCAWTSVIPMLRFNADFRAWAKQRRERPAHANPLSGRKIVGAALNRLFRLAFALVKNRTYYQVSRSELALSAV

SEQ ID NO: 132497 - protein, 384 aa, unidentified
MINNSITFIGLDTHKEFFEVAYIEDKRDAKPVSLGRIHGTKLALQKLVRQFESKHPGSTLHFVYEAGPCGYWIYRFLTSLGHCCFVVAPSLIPKKAGERIKTDKRDALKLALLLRSGDMDPIYVPEPEDEAMRDLSRARETAMKDLKDAKYQLKAMLLRNNIRCDIQDNWSTQHLRWLTELVLPHPSQQIVLQEAIQTISERIRRLERLDNELTYHVKNWRYYPVVKAIQAMRGVRLLVAVGVIAELGDLSRFDHPRKLMSYLGLVPSEHSSGGKRKQGGITRTGNTRARRLLVEGAHSYRYTANVSTELQKRQESLSKEIIDIAWQAQLRLCKRYQRLIKRGKNYNLVVTAIAREMIAYIWAISREIVLTPVNPAKRLARVPA

SEQ ID NO: 132498 - protein, 324 aa, unidentified
MIDGILGIDVSKNTLDVSISSCTKVRTKSFANSSDGWHHLLDWLIAQKIQRVHACLESTGRYSLGIACALYEADHVVSIINPAQIRDFVRTKLGRNKTDGVDASHIREYCELFKPSPWTPPSEAHRRLAELQTIRAGIIAGLTEWKNRKNSGIVDAEAQALADATILHFTSQLGAVDKAIALTIDNDSDLRSKRDLLLSISGVGDTLAGVVLAELPGPDVLRSSGEVVAYAGLNPRQHQSGTSVDRATRISKIGNAVLRAALYMPALSAMRYNPAIVALVTRLKSRGRLKPKQIVVAAMRKLLVLCFGVLKTGKPFDPAIAMGC

SEQ ID NO: 132499 - protein, 325 aa, unidentified
MDIVGIDISKAKFDAALLLGERTRYAVFSNSEVGFEQLLIWLAKHRPDPTIPLHACMEATGNWALELADFLHAQEVRVSIVNPARIKAYGDSELARNKTDKLDAALIARFCRAHLPPAWVPAAAHLRELRELVRRCDALKSTRVQELNRQKSGFALPAVARSIVAHLEWLNEQIEAVMDEVRHLIAADPDLNRNLALVRSITGFGEVSAIILLAELPNIADFTPKALAAFVGLSPGEHSSGTSVRRPGKISRIGTERLRSTLYMCALSAKRNNKPLAAFVARMSAAGKPPKVILIAVARKLLVYAHAVIRTQKAFESSPDALFPA

SEQ ID NO: 132500 - protein, 312 aa, unidentified
MIEYNIGVDVSKDWLDVHRLPDGATRRFPNTKAGLRALIAWLLKQPVARIAFEPTGPYHRALERALADAGLPLVKVNPRQARRFAEAIGKLAKTDRADAGLLAKMAALLKPDLRPVVSATIAMLKELHLARTALIKDRTAAKNRQKALTVPLLKRQAAQRLRHIEAQLAAVEKAIEELILEDQNLAGRLAILVSIPGISKLTAFALLIEMPELGTLTGKQAASLAGLAPVTRQSGGWSGRAFIRGGRANLRNALYMPALVAARFNPDLKTTYDKLLAAGKPAKVALTALMRRLLVLANALLRDGRKWAPAMA

SEQ ID NO: 132501 - protein, 397 aa, unidentified
MIAVGIDISKAKSTVAVIDSDGTVLASPFTMAHTQPEMEAFVTYLKGLGEPTTILMEYTGHYHYPVLKKLQGEGFPVCIVNPYQMKKYGDVEIHKAKTDKKDALRIAAYALEKSYKLVPYSSMEQKYEDLKFLSRQYSQRITYVAKLKVQLIALLDQTMPGITRILPLNSRNPEKCALLLFIRRFKSFDEIHRIGKTRFLASYDVLAKKTSERSASSKGLSIYELAVDSITTRGEDPYIWLSQNQCVDLLSATQNAADDIISQMRNIAETIPEYKILRAMNGVGDRLGPIILAEIGDIRRFHSGKALNSYAGNDAPPYQSGQFESRNRHISKRGSSALRKACYEVMQALKLTKPQDDPVYLFMLKKEQEGKPFNVAKMAGVNKFLRIYYARAMELYK

SEQ ID NO: 132502 - protein, 394 aa, unidentified
MSAACTSNVSTPGAMLHLAFELGSSHWKLAFTIGHGQKARQRSMRARDLATLEQEIAKAKKRFKLNADAPVVSCYEAGRDGFWLHRYLSTRGIASLVVDSASIEVNRRKRRAKSDRLDADKLVRMLLRYHAGERKVWSTLHVPDRAAEDERQLHRELQELKDEQTLHINRIKGLLASQGLELAIIHENFPEWLGSARLWDGTALAADLQSRLLREWRRWQFAHEQVLELTRERRRRILSDDTAAVAMVRRLLGLAGIGANGAWLLVYEFFAWRKLQNRKQAGALVGLTGTPYHSGRSQHEQGISKAGSKRMRRMLVELAWCWLRYQPESALSQWYERRFGEGKGPARKIGIVAVARKLLIALWRYLERGEIPAGARLVDWRSKIVKPKVPKRAA

SEQ ID NO: 132503 - protein, 428 aa, unidentified
MNYNTQNAKIASITEETLIVGIDVGSEIHYARAFDWRNYEYSKKPLEFSNTEAGFLTLKAWMEDIAERHGKTAVIPGMEPTGHYWFALGKFLQDSGMKPVHVNPHHVKKSKELDDNNPNKNDRKDPKTIAALVNEGRFSYPYIPTGIYAEIRSLSNLRFQTQEELTRIKNRIARWFSIYFPEYKDVCRDLKAVSGRMVLKVAPLPEDIIKLGAEGVNQIWRDAKLRGAGMKRARTLVSAAEHSIGSKEAPEAARMELKNLLSDMDVYASRLEELLQSIEEKLKEIPYIDKLMAIKGVGLVTVSGFIAEVGDIGRFDNPKQLQKLAGYAIVANDSGKHIGESRISYRGRKRLRYVLYEAAISLIGKNAEFREIHEYYRSRKENPLKKMQSVVAVACKVIRVFYAILTKGVDYDAEKLMGDIRRPQMQAA

SEQ ID NO: 132504 - protein, 331 aa, unidentified
MDHFAGLDVSVKGTSVCIVDDTGKIVREVKVASEPEALLAVLKNPAYHFKRIGLEAGPLSQWLYSALADELPVICVETRHMQAVLKAQINKTGRNDARGIAQMMRVGLYRPVPVKTLRSQKLRMLLTHRKLLQSKAIAIENDLRGTLRNFGLKVGMVGKVTFEARIKELVENLPDLAVLVEPLLVVRWALREQIIVLHRRLLAIVRDDEVCRRLMTTPGVGPVVALTYRATVDVPARFRKSKAVGAVFGLTCSKYQSGQIDRSGRISRCGDEMMLYEAAQSMLRSKRWSWLKAWAMQIARRRGIKKAIVALARRLADGTEFRWTREQAAAA

SEQ ID NO: 132505 - protein, 429 aa, unidentified
MEQPQEVEDEEHERVYQRVAAVDVAKASGVVCTRVPGDGPAGRRRVQVWTVQATLGAVTELGDHLRCEGIEVVTLESTSDYWRVWHAVLEAAGLKVQLVNARAVKNVPGRAKTDRKDAVWLAKLTERGMLQPSFVPPYDIRRLREYTRLRADLVRDRIRHWARLEKLLERALIKLSSVVSKLTTQSARAILEALIAGQRDPRALADLAIGKARARRGELAEALEGRFEDHHAELARMLLDQIDALTRQIDQISERVSELVAQIPAAQGIDADGTTGPQAGRGPDAAVLPAVARLDEITGCGIIAAQAVIAEIGLDMTVFGTPGRLVSWAKRCPQTRQSGQKSTSAKAGKGNPWLNRVLGEIAASASRTDTFLGERYAASPANAGNARPWPPSPARSSSSFTTCWPTPPPGSTTSVRITTTAASTGTARS

SEQ ID NO: 132506 - protein, 346 aa, unidentified
MKINRVGVDLAKNIFQLHGADHKGKMVWKRRLSRGKWLAVLCNTVEPGTEIGMEACAGAHHWARQLMQRGYPVKIIPPQFVKPFIKSNKNDANDAEAICEAMGRPNMYPVKVKTVAQQDLQAMHRIRDEIKSHRIAKANQIRGLVTEYGLVAPQQLHALRRAIPDWLEDAENGLSFLFRQLLQGLWGDLYALDQRMTELDKQIAVIAQEDPTARRLQQLRGVGPLIATALVATIGDARQYRKGRDMAAALGLTPRQHSSGGKERLLGISKRGDAYLRCLLVHGARSAVRTAKDKDDRLSRWIIDLQSRRHSNVVAVAMANKMARMAWVMMTKGVDYDPNLAAASVS

SEQ ID NO: 132507 - protein, 346 aa, unidentified
MTIVGCDFHPGWQQVAVFYPETGEVEERKLTNGDGEAERFYRQLVPPVLVGFEASGSTQWFEELLDQLGHEVWIGDAAAIRASYVRKQKTDRRDAAHILKLLIENRFPRLWRPSAEERDLRQLLIHRYNLVSIRGRAKNGLHYLMLNKGVQMKRKLWSKAGQKALRELPLDGWAAQRRKDLLSLLAGLNQQVSELDDAVLRAAQQNPKARLLMTQPGVGPITALAFVLTIGDVNRFQRGKQVGSYLGLIPRERSSSNRRRLGSISKQGNSFMRMLLVESAQTVNRLDEGFRKQYQHRCHRMAKGVAKVAAARRLAVRLFWMLRTNTAYPEIARIESSPRYGVVGAS

SEQ ID NO: 132508 - protein, 328 aa, unidentified
MLTLGIDVSKLTLDCYLSEGIEKKARRSCQFKVSNSEAGFKELAQNLAKRGIGIEQMTIVLEPTSQYHKALLYWLYEHKARACMVNPADVRHFAKSLGKYSKSDGLDCFVLAQFAQTRELIMWQPPARIIQNLDSLLHLRHQIVVERGAAQVRLRELPSDALQAVKDCYSKTLEHFKAMEKEVNQEIKKLIDSDDSLKQKHKRLQTSPGIGPVVASLMLVIFETKQFTKSCQVPAFCGVTPKEFQSGTSVLGQTRMTKRGPAQVRAGLRMAATAIVCSKRRSTLKDFYESLVAKGKSKACALGAIMRKITLVAYAIWRDGNTFNGFVS

SEQ ID NO: 132509 - protein, 427 aa, unidentified
MSERKSLELRVSVDVGSRRHSVAIGLSDGQVLEEFEITHRPEGFQEFFSRIEKHQKAQGCGVAVAMEGYNGYARPLDSLVRQRGYRLYNINNLKLARFKEIFPGAAKKDRIDARKGLELFQLRDHLPLAKQVLQEVTGTLKENEILKRLTRRRRRLVNERVRVLNNLQADLQAVCPGLLEITTEASNQWFLNFLVSADTLPQLARLRKSTLLKIAGVGRKYASVIQEWQKRAHFSEEAQWVGEMIHEDAQRCVELEEKIKTLATKIEQVAKGSKIAKVLLSIPGFGPVCTSELAGEIGTVERFGKEGGLALYLGMSTLDNSSGNYHGTKQPKHVNTRAKAAMMTALDRHRKYVLESQTYYEKKRSEGKKHNQAIRSLGRHLCRIIYKMLKDQREYEIRLHQGNTKTKVGSRSCVKTKIRRPKIFPNS

SEQ ID NO: 132510 - protein, 402 aa, unidentified
MPYFVGLDWASQDHAVCVINEHGHAVLRGTVAHTHQGLSDLCAILSRLAEPAQLPIALERPSGLLVDTLVEAGFPVVPIHPNVMKACRSRYAAAPGKHDLGDAFILADLLRTDGHRFHPLRPLTDETRALRALVRTRDDLVAQRIALANQLRALLESFWPGAAAIFAEVDSPIALAFVARYPTPPRAQSLGERRLAAFLARHAYCGRRSPADLLARLRTAPQGLAGEAECDAKGDLAQALVAVLEPLVAQIQRLNATIEHAVVQHADGAIVMSFPRAGRVNAAQILVELGDDRARFASEEQLAAEAGVAPVTYASGKHRGVGFRRACNKRLRQALTTFADNSRHASPWAAAVYRRARARGCDHPHAIRILARGWVRILWRCWQARELYDPTRHRAAAILHSA

SEQ ID NO: 132511 - protein, 370 aa, unidentified
MTKITKFVGLDVHKSTIAIAFCEGGPMTEAVQAGTISNDIPRVIRKLESLGDREDLRVCYEAGPTGYALCRALLAAGIHCIVVAPGKVPKEPGKRVKTDERDARDLARLLRSGYLSGITLPDQAREALRDLVRAREDLMRDLRRARQRLKSMLLRHDRKWSGKSCWTLKYREWVRSQRFGAEADNIVLKHYLQEVEHLEAVRDLLTDDVERLVPTLNEENLFRSLQALRGVSTIVSSTVVCEVGDLKRFPTAGRFMSFTGLVPSEHSSGNSRNRGAITKAGNGHVRSVLIEAAWACRSTPNRSLQLLKRQKGLDPKIVDIAWRAQQRLHKRYVHMRRKGIEQNVVIVALARELAGFIWAIGQEVETKSVA

SEQ ID NO: 132512 - protein, 400 aa, unidentified
MRAVFGIDVSKTSSEVAILVNGEKVHSYTILNDAIGFNRLLGDLKTVHNPEIIFEATGVYSRRLQAFLEEYSYAYTRLNPLEAKKQLDSLRVRKTDKIDAEKLAKSQLVHNRKPTYVQEEVYQHLRDLSRFYQNMTEDLVRTKNRLHKVLQVTFPELENLLSTPTGEQYWNLVMAFPCKEFVLSLSQSNLCEVIRQSTSKRISKKRIAYLTDKLIKLAKQSFCAVKKTSPMLEEVRYYAQELLRLSERRQVVLNDMVALAQPLPEYDILRSIPGIAETTATSIIGELGDIRRFQSTNQINAFIGIDLKHYESGNFLAKEHITKRGNPYARKILFKCIHNIASASHTNPCHIADFYEKRKRQSTIASTKPHTIASIHRLIRTMYYLITHNKLYDYSLTQNR

SEQ ID NO: 132513 - protein, 345 aa, unidentified
MNYYAGLDVSLEETAICIVDETGAIVRELRAPSDPESLISAFNGVALPMVRIGLEACSQSAWLHQGMARSGLPVLCIETRQAKAAMGAMPNKTDRNDARGFAQIIRTGWYRQVHVKSAPSRMSRSLLVARRTVLCKVRDMENAVRAVLRESGLKVGAPGRKLFATRVRELAETDPSLADITEPLLAIIAAMHCQLERLTRRVLEAVRVEPICRQLMTVPGVGPLTALAFRATVDRPERFRRSRDVGAHLGLTPRRYQSGETDVQGRVSRCGDELARTLLYEAAHTLLTRSKKWSALKAWGMGIAKRRGMAKARVAVARKLAVILHRMWSDQTEFRWGKVPAGQIA

SEQ ID NO: 132514 - protein, 311 aa, unidentified
MSSSATHYVGVDVAQDLLALAGTEPAQVPNQPAALRAWLTTLRAAQPSAHLLCEATGRHHYALQVAAAAAGVPLSVLNPRQVRDFARSLGCLEKTDAVDARLLQRLGSALRPAATPLRAAALQQMQDLLVVRQALVEEQSAWTNRAALLSAPAARLCARRQRALGRELAGVEAQLAALLATPQAAPLQHRVQTLCLVCGVGERTAWVLVAGLAELGRCNRRQIAKLAGLAPLNCDSGRFRGERHIAHGRAPIRRALYQAAVVAARHNEHLRPLYQRLRAAGRPAKVAYIAVARKLLIFLNRLLREAPPLAA

SEQ ID NO: 132515 - protein, 365 aa, unidentified
MPSVSHLAWTHLGLDVHKDTISVAILAPDRDGPDVERIAHDEASVRRLVGRFPNPRRLRACYEAGPTGYELARLLHSRGVGCEVIAPSLIPKAPGDKVKTDKRDCRRLARLYRAGELVAIRIPSVQEEAVRDLCRARADMVADPTRARHRLGKFLLRHGRAWRGGSAWTLTHERWLLQQRFQEPALAATYAHYRAVLDARDAQLEAIEADLAGWYDRAPFADAVGRLAAYRGITRLGALTLASEVGDWRRFPRAAAFSGFCGLVPSEDSSGASTWRGHITKCGNAHLRAQLVESAWAYQYRPALGVDLRDRHQGLDPQVVARAWAAQLRLCGRFRRLAARKDSKNVVVTAIARELAGFLWAEMAA

SEQ ID NO: 132516 - protein, 349 aa, unidentified
MGEVSTIGLDIAKNLFQIHGVDADGTVVIRKRLSRGRVLEFFADLPPCRVGMEACATAHQWARELRKLGHDTRLMPPTYVKAYVKRGKNDAADAAAICEAVTRPSMRFVPIKDVEQQSMLMLHRARDLLIRQRTQLINALRAHLAELGLVAAKGREGLHQLVAVVTECGDERLPSNARFACQAIVTQLHAVQIEISGLDKRITQIQRTNADCKRLNTIPGFGVILSTAVAATMADPKVFRTGRDFAAWIGLVPRQNSTGGKERLGSISKQGDRYLRRLLVVGATSVINCARARPYKYPWVIELLGRRPTKVVAVALANKMARIAWAVLAKGEPYRAPTRSSNAVVPTAA

SEQ ID NO: 132517 - protein, 410 aa, unidentified
MQKTQNEALVAGDVVIIGVDPHKASVTIEARDAREVLRATGEFPTTRAGHAAMVKVARQWPRRVWAVEGARGVGRALVARLVASGERVVDVPAKLSARSRVFDTGQGRKTDSHDAHAIVMVALRDKRLREVVIDEDLEVLRLLVDRRDELAAARTQALNRAHRLFAEVTPGGAPTKKSIAKYQALLAGVHPRDAAGRVRRRMLAEELTEARRLDVRVKELTAEIKAAVLARGSYLMDLPGIGPAGAGRILADVGDVTRFPSRHHFASWTGTAPIDASSGAHQRHRLSRAGNRRLNHVLHIAATVQIRHDGTLGKAYYDRKRAAGKRPLEAMRCLKRRLSDVVYRQLVKDALEAQTATMKAGPGGHSGATLQSSAAGLPPHTGTSDQPLPGPATTTLDPTPTTRQVPIPTG

SEQ ID NO: 132518 - protein, 391 aa, unidentified
MESNPMQKLNDLSRSLTPLKPDGTLIAVIEMSLSSWLVAGIVPGIERQPLKKLEVDESTLLKLLIRWREEAKKSGHRIERIAVAFEAGRDGFWLARWLRARDIEAHIIHASSVAVSREHRRAKTDRLDTELLKRAFLGWLRGERDHCKMVAIPTIKDEDAKRPNRERESLVGEQSRIVNRMKAALVRLGIRGFNPKLKKAVERLDGLRTPEGEPIPPNTLAELRRDMARRRLVSDQIRQIEDTRLERLEQAPSDGPHAMVRLLARVIGVGIETADMLVQEVLSRNMRDRRAIARYAGLTGSPDESGRKRREKGLARSGNARVRRGMIQLAWRFLMFQKDSTLAQWFRARTENARSTRKTMIVALARKLLIGLWRLVREGVVPDGVVLRPVS

SEQ ID NO: 132519 - protein, 410 aa, unidentified
MNPLFVGIDVSSRQNVVFIMKPDGSKFSSFSVNNNLGGAKSLSKRIVSTLIKESLTDVVIGLEATSVYGDNLVCFLREDGSLAPFHPKIHVLNPKQVKKFKEAYPDLPKNDSVDAYIIADALRFGRIKNEVYLDDYRYKALQTLTRSRFFAVQNLTKEKQRFMNYLFMKCSSLAQEKVFSNTFGATALSVYEDFSSPDELAYMDLNELTAFIQEKGKNRFPNPEGVAKSIQAAARGSYRLPKTVNNSVNQVLSLSISSMKAIEKQIKNLDCAIAEQLTIIPNTLTSIKGIGPVYAAGIIAEIGNIKRFKGQASLAKYAGLAWTQHQSGSFEAENTKLIRSGNRYLKYYLSEAAFSLVRCDSEFKRFYNLKFKEVNKYQFKRALALTARKLVRLVFALLKDNRLYIAPEEY

SEQ ID NO: 132520 - protein, 421 aa, unidentified
MSFKIFRKNCCGLDVHKTWIYGCIGITDTNGRTDYKQARFSSFSKGLQELSDWLKKYQCNEVCMESSGKYWIPVFNILEKNNLSVVLAHPKYTKPQKGNKTDRKDAKWICDLFMCDMIKPSFIPPADIRHLRDLVRYRFKLTCMITGEKNRAQNCLTVSNLKLDDVFSDVFGKSSRSITEQILTHPGETFDVTPYVDKRCKTPIEEIQAAVDGAISPEQAIKLRQCLNHIDELEEHIEKVTQEILRISDKYQAALELIRTVPGFNKNPMTAIQVLSEIGDDMSVFPSAKHLVSWAGCCPRNDQSARKIKSTRISCAGSYFKPILVQVASALTNARSKKHPEILNRYRRIKARRGHKKAIIAICRMLLTAIWHILSDLKPYTPDGFLESRPVNQSKELTVSQALSLLKQRGYVIKNDPVTAS

SEQ ID NO: 132521 - protein, 402 aa, unidentified
MSNSQKRYVGLDVHKHYVMVGAVNAAQETVLPPRKVSLLEFEGWAKKHLRPTDEVVLEATTNAWYVYDLLEPLVARVVVGHPPLIKLIAAAVVKTDKKDTMILAKLLAVNMIPAVWVPPAPVRELRALISHRQRLIGQQTRLKNQLRSLLHRQHLVPPGGQLFAAANRPWWLGLSLSPSEKLRLRQDLTLLDQLAPLIAEVEAELNRLSLAEPWAQDVPYLLQLPGIGLLTAMTILSAIGQIDRFPTAKKLVGYAGLGAKVYASGLTHRTGGITKQGRRELRRVLVEAAWTAVRYDQHWQSQFESLAYRIGPEKAIVAIARKLLVVIWHVLTAQVADRRAVPQQVARYFIHWGRQLRVKSTLGLKASEFARQQLDRLGIGQELEQVPYGTVTYRLPPSARSA

SEQ ID NO: 132522 - protein, 342 aa, unidentified
MQITTIGLDIAKNVFQVHGIDAKEKVVVRKQLRRGKLMAFFEALSPCLIGMEACATAHHWARELTKLGHEVRLMPAKDVKAYVKRNKNDAADAEAICEAVRRPTMRFVRIKSPEQQGQLMQHRTRDLLMRQRTQLINALRAHLAELGIVAAKGEGGVKELLAIVADEEDTRLPIDARASVIVLATQLEAVQTVIGAIEKRIKMQHRANEASQRLETIPGIGVIGATAIAATVADPTVFKSGRDFAAWIGLVPRQDSTGGKQKLGPISKQGDRYMRRILIVGAHSVLRRAQQNPGKYPWLTQLLARRPFKVVAVALANKMARVAWALLAHGGTYRAPELAEAA

SEQ ID NO: 132523 - protein, 341 aa, unidentified
MTELNYPILGIDVSKEQLDVCVLQATDKRLRLTVKNSPAGYQKLKHWLEQQKVEPAAAGLEATNVYSTGIAMFLYEQNMVVYLSNPSQVHAYMRAELRRAKTDKADAEVIANFIAAMSKKLHPWHPLPEHYQELRDLVRYLHDLTEDRAAVYNRMEKIDYVTSNAKVRILRSLKADLAHYEKEIRMIKKDIQTCLRKHQDLTNRYKLLTSAPGIGEITARTFMAEVPRIEQFSCAKQLAAYAGVTPRIRHSGKKQPESQPISKMGNARLRQAFYMASLTAKQYNQSMTSFAQRLRDEGKKKPKVVNIGVVRKLFHLLYAMEKHQRPFDPNYHKLQPMAGTI

SEQ ID NO: 132524 - protein, 354 aa, unidentified
MPRQSKDTIAVLGIDIGKNSFHLVGLNKRGAIILRLKLSRRQLEARLANLPPCLVGMEACVGAHHLSRRLKALGHDARLMPARYVRAYLKGNKNDFRDAEAIAEAVQRPTMRFVATKTAEQLDLQALHRVRSRLVGERTAIANEIRAFLLDRGIAVAKGLHPLRTALSGILATRTDALSPRLVHIIEDLATDWRRLDQRIADVSLQIEALANLDPGCERLMTVPGIGPIISSATVAAIGTGDVFGKGRDFSAWLGLVPKQISTGDRTILGKISKRGNKYLRTLFVQAARVVLLRPRSWERQGLKPWIEAAARRLHHNVLAIALANKLARIAWSVLHHGRDFEVRKTSEPVCQPV

SEQ ID NO: 132525 - protein, 365 aa, unidentified
MQKVSTMRTSGKRIFKGQLTIGLDLGDRSSSYCILDEAGKILLEQKLPTTPEAMKQTFAKMPRSRIAMETGTHSPWISRLLKALGHEVIVAHAQNVHLIVKSRRKDDRIDARTLARLARIDPELLSPAQHRSAQAQLHLTEIRARAGLVSARTALVNAARGLVKSHGERLRKCGTFQVSREITSDLSTELREALQPLLREVESLNERIQEYDRRIEKMAKEKYPETALLKQVKGVGDLIATTYVLTLEDAKRFRKSRDAGCFVGLQPGRRNSGESEPQMHISKEGDEYLRTLLVQGAHYILGPFGEDSDLRRWGQRLAARGGKNAKKRAVVAVARKLAVLLHRLWVSGEPYEPLRNSQKAISAAA

SEQ ID NO: 132526 - protein, 405 aa, unidentified
MDITPIHRRVIGLDVHQNKITACALIEQADGSVAVAQGEFGGFKRDRRALAAWVHGLAPDIVVMESTGIYWKSPYAALEKVGIAAWVVNARHVKNVPGRKTDISDAQWLATLARAGLVRASFIPPAEIRHLRLIARQRQKLGGMLAAEKNRLHKVLADAGIRLNVLLSDLHGQCARAMVKALLADEPIHAILERAGRLRASREDLFEALQPEELSAKHRFVLNEIMAHIEYLEATMARFEQQLLVGLAPWEPQMRLLETVPGIDRLGAAMLLVEIGTDMDSFGSAERLASWVGICPGNNESAGKRKSARTRKGNAWVRRLLCEFAQAASRTRCALKDKFSALAIRKGHKRSIVALAHKMLRIVYAMLANTTPYQDRTVDYEALMVGRNAPRWLKMLAKHGYIATA

SEQ ID NO: 132527 - protein, 375 aa, unidentified
METIYIGVDFHARQQTICYLTTETGEFVTHELKHQDKDEVRTFYAQFGGRVIVGLEASGYSPWFEQLLEDLGHEVWLGDATEIRRRARWRQKNDRRDAELILDLLVHDEFPRLHRPSLESREILRMLRYRHKLVKMRTIIKNSLQALALQSGLSRRTKLFTKAGQQELRAAPMSPVMKQQQEQWLELLLVLNQRIVETTLWLKQQSLNDARIRLLRTHPGIGLLTSLGLVHTLDPISRFRNQRKVTAYAGLEPMERSSAERKRFLGISKAGSRLLRFLVIEAAHTAVKKDDDLKRFYRRLQERRGRPKAKVAVARKLLVRSFIMLRDEIDYAEFQRRAVAARLARQSSRPSVPDRLIGQPASSESQECVRSESKK

SEQ ID NO: 132528 - protein, 346 aa, unidentified
MRFYTKPHKHYCGVDLHARTMFVCIVDGQGNALIERNIPTSPAEFRKLIEPFREDLVVSAECVFCWYWLADLCAAENIAFVLGHALYMRAIHGAKAKNDRIDAFKIASLLRGGNMPTSYVYPAGMRASRDLLRRRLYLVRERGFLLAYIQNTHHQYNLTPPAARLHWRRNRIDVAEPFTDPCVRKSVEVDVKVVDHLDTVITDLEKHLLTTTKVHDASNFLLLQSIPGVGEILAMTILYEVHDIARFETVQDFASYGRLIRCARESAGKRSGTSGSKIGNAHLKWAISEAAVLMLRHGDIDKLRNRLQRKHGKGKSMGVLTHKLGRTIYYMLLRRKPFDMERFLAA

SEQ ID NO: 132529 - protein, 344 aa, unidentified
MENVTHIAIDIAKQSFHLRAVNHRGRAVLDRKLSRNAVLKTVLNFPPGTVVVMEACGGAHYWARLFRHHGYPTKLLPPHLVKPFVKSQKNDAADAEAIAEAASRDTMRFVPVKTIEQQGMLALHRVRSRLVKQRTALMNELRGILLEFGVVVPQGVKALKESLRGDSVMSLPEAVLAVVKDLEDELHGVDGRITRYEKALRERAKQHELCVRLMTVPGIGVLTATALDATVGDPRQFRNGRALSAWLGLVPSQKTTGGRARLGRITKRGDCYLRQLMVHGARAVLKVAQRYKESRYSLWAKHLRDSKGYNKASVALANRNARIAWALMVKPDAVFSPGGTLTAA

SEQ ID NO: 132530 - protein, 401 aa, unidentified
MLNCGVDWASDHHDVCIVDADGTVRWRRRIGHDPAGIAELQAAIAAEEPDPTQVAVAVETSHGLLVGALVEAGYIVYPINPKAAERFRDRRKPSGGKNDRLDAEVLAHAIRTDRASLRPLVPDSAVAIEIATLARDRHALVREHTRLLNQLRSALNEYFPAALIAFDLDADSTLAFLERYPTPAAAAKLSAFQIAAFLRARRANRDLAAKAAAAKVALRAPALRAAPEIARAKARLVRVLCVQLQALRPELSAYKSELDRLLKTHPEGELLLSLPGLGTVLASRVLAGTGDNPARFASAAGLCAYAGTAPMLLQSGKRTVVKARNACPKEFRDAVQQWADQARRRSPWATEFYRRHRDRGHNHNESLRALGNRLLELLFDLRRRGLRYDEAVHAANIRWAA

SEQ ID NO: 132531 - protein, 408 aa, unidentified
MHDGYGVYLGLDVGKEGHHAVGLAPDGKRLHDAPLPNTEARLRQLFDKLARHGQVLVVVDQPASIGALPVAVARACGHQVAYLPGLAMRRIADLHPGSAKTDARDAYVIADAARTLPHTLRRVDTGDEALAELEVLVGFDDDLAGEATRVSNRIRGPLTQIHPALERVLGPKAHHKAVLELLSRCGGPAGLRKAGRRKLLSIAAVHAPRMGERLVAQIMTALDEQTVTVPGTQAAETILPRLADSLRDTLRQRDQVAGEVEGMLDAHPLAPVLTSMPGIGVRTAARILLEVGDGTAFATPGHLAAYAGLAPVTRRSGSSIRGEHPPRGGNKNLKRAFFLAAFAAFAAFAAFAALADPVSRAYYDRKRAEGKRHNAALICLARRRCDVLFAMLRDKIPYQPRPTSPVPA

SEQ ID NO: 132532 - protein, 304 aa, unidentified
MAQMVKTAGIDVSKSWLDVAIWPTREEIRVSRDAAGLALLIAWLGEREVARIGLEASGGYEREALDTLQAGGFEVALLNALRVRCFAKAKGRLAKNDRVDARTVAQFTAVMVEQVPPQRRRDLDELVELLTYRRQLKGWCTDCTNQLEHLRDRALRKTVAQRQAAFERDLAKIDTKLAALIAEHDDWSALARRLRTVPGVGPVVSASLVALLPELGTLSRRAIASLVGLAPFPRIKSGGRLTIAATARANATSRVAARPCVMRSIWLRCPPDTTTPPSPLSPTGWPARNPRSSSRPACASFWSR

SEQ ID NO: 132533 - protein, 414 aa, unidentified
MSETSSPIPPPAALAYAVGIDIGMESCMMCCLTMEKRQVIKPSQFSNDATGYAWLFAHLGPLQVAPQQIIIGLEATSRYGENLYYALLKRGYRLCLLHPGQVHAFAQQRGLRAKTDRLDCTTIARVLLSGEARFGYVPGNQIVTYRELVRLQQQLTEEVVRYKNEIHALLVVLFPEFSQVFADPSKPTALAVLKAYPSAQVMGEANLEDVYRLLHELCPRRYGRKTAARLLQLAQASVSSGLAVAARSTSMRILCDQLDHTQKNLSHLEEEIDRLLDQDPKIKGVLSIPELGPMTVAVLQAELGDLDRFARMDQVVAYAGMDLQVRQSGKWKGQSKLSKRGSGRLRRMLYLAALRSIRLPTSPFGVYYHRLVDRGMKKGRAVVAVMRKLLIVAAHLIQTQEDYDAGKVGRAVVS

SEQ ID NO: 132534 - protein, 403 aa, unidentified
METVYPRCCGLDVHKKMVTACVLTPDGQETRTFATMTADLLKLGDWLQERRVTHVAMESTGVYWKPVYNLLEGEFSVLIVNAQHIKAVPGRKTDVKDAEWIADLLRHGLVRGSFIPDRAQRELREVTRYRRSLIQQRAQEITRIQKVLEGANIKLASVATDVVGVSGRAMLEAMISGEEDPKVLAEMAKGRLRNKQASLEQALDGLLQPHHRMVLSVQLSHLDFLDKLIARLSEDIAGRMGPYEETIQRLDTIPGMGRETAEEVVAEIGADMSRFPTSAHLASWARLSPGNNESAGKRKSGRTGHGNRWLRPALVQAAWAAVRTKNTYLASLYHRIAPRRGRKRAIIAVAHAILVAIYFMIRRNTVWHDLGENYWDNRHRDAVLHRALRRINSLGYVATLAPA

SEQ ID NO: 132535 - protein, 329 aa, unidentified
MKVQHIIGADLSKRSIDLVYHLSKSHIKINNSTDGFNDLMRWLQKLNIDISEAMIVMEHTGLYSYRFEDFLHQQQIAFCKVSALEIKRSVGLVRGKTDRLDAARIAGYGHEKKARLIINQPLSNDLKRLQVLHSTYQRLVRHRAALINALKEYIYIGIAERDLIIQTQRQLIKNFDKQIKKLMSEIQMIINQQAALKQNFLLLQSIKGVGKILALTVIIKTHNFTRFISARKFACFCGTAPFDHSSGTSIRMKTRVSHLADKQMKTLLDLSAKSAIQYDKELREYYLNRTQNGKSKMSTINVVRNKILYRMFAVIKRQTPFTENYSQAA

SEQ ID NO: 132536 - protein, 321 aa, unidentified
MTYVGIDVSKATFVVAYSSAKSSETKTFKNTTKGIREFIRTISPEENHCVLEATGNYSMLLVYLLSKAGFTVSMENPLKIKNFARVMLSVVKTDEIDARLIALYGERMQPAPFKLHSDSLLLLKQKRTVLRQLKKQLTANRNLEGSLKVLPFIDSKCKKVLEKTIKFLEKQIEEMEEELTSLAEIEYKKQMDLLTSIKGIGATLAAALIIATGGFTYFDNAKQLTRYLGLSPTYQQSGTSVNVKGHINRNGDAYLRSQLYIGAMASLRCNTECKACFDRLRSNGKPGKLAIVAVANKLIRQAFAVVAHEKKYIDGYKSVKP

SEQ ID NO: 132537 - protein, 400 aa, unidentified
MAETGRIWAGVDAGKEHHHVAALDEAGRLVLSRRVANDELALREVIAEVTALAAGPPRWAIDLRDGYAALLLALLAADAAEIVYVPGRMVNRMTGAYRGEGKTDAKDARIIADQARMRADLTPLAPGDELITELRMLVARRTDLVTDRTRVINRLRVTMVEISPALERALDFTRTGPLTLISGYATPAAIRGTGQDQLTAWLRERGVRNAAVLARRAVTAAHAQTVRLPGQDIAAELAADLAREVMALNERIGQVDERIAARFRRHPAAAVITSLPGIGVLLGAEFLVATGGDMAAFSSADHLAGYAGLAPAPRDSGRRTGSLHRPRRYNRMLNRVFYYSALISIQHCPDSRTFYDRKRAEGKKHNQAVLALARRRVNVLWALLRDQKPYTPSQPATTAA

SEQ ID NO: 132538 - protein, 394 aa, unidentified
MSFKILKNNCCGLDVHKTWIYACIGITDSFKRTEYKQARFSSFTKGLQELCLWLAKYNCIDVCMESTGKYWIPVFNVLEKNNIFVTLSHPKYTKPQKGNKTDRKDAKWICDLYMCGMVKPSFIPPADIRQLRDLVRYRFKLTCMITGEKNRAHNCLTVSNLKLDDVFSDIFGKSSRSITEQILQHPGETFDVAPFVDSRCKTPIEEIQAAVDGAISHEQAVKLRQCLKHIDELEMHKAEIEREIFRLSQKYESVLDLIRTIPGFDKNPLTAIQVLSEIGADMSVFPTAKNLVSWAGCCPRNDQSSRKIKSTRISRAGSYFKPVLVQIANALIKSKKHPEFTTRYRRIKARRGHKKAIIAICRMILTAIWHILTDLKPYTPEGFLESRPVNKETV

SEQ ID NO: 132539 - protein, 416 aa, unidentified
MKISMGIDWSDKSHTICFREFKTRRILAEFEIEHSAAGIEQLENKVGALGCTPGDCLVAIETNEGMLVNYLFESGYPVHPIPPAAVKDYRGRRRRTGAKSDRDDAQLLSDMLCQDLDLYPPMDSTSPLSREIQVVYRARGQMVKHRTQVLNRLTCNLKAYFPVVLGLFSGLDRQITQAFLAAFPTQRAAQDAPAEDIRDFLEEQGYRRHDKIPEIIAKLHAPAIPVPDWQAEAGQYLTEALLAELAVLTEQIHKLEKRLARLLEQHPDTVLFQSLPRVGLILTAGFIGELGDCRQTFDDASELQALAGTSPVTFQSGQTKVVRFRYACNKPLRNLLQQFARQSARADGSAWARGYMTHQLERGHSKSRAYRALANRWLVIIFRIWQDRTLYDENHHLRNIAQRGAKLPSLRLEKAA

SEQ ID NO: 132540 - protein, 325 aa, unidentified
MQGKDRSEQETKTKSTVGIDVCKLWLDIHILPSEESFRVPNTKAGSKEIIRRLANHDVQLIAIEATGKWHRDLHRNLVDHGYPVRVVNPLRARLFAEAMGLLAKTDRLDARMLAVFAASLTEARPPAPEIIEALKELVQARSSAVEEQTSLTNQFKSATTAFLRRQLKLRLTQIAKHIKALETEALQRINADPGLARRYDILISIPGFGDVVAMALLAWLSELGSCNDKQIATLCGLAPWPDESSDRVGARHIRGGRELIRNILYMAALTAKSFNPPMKAFFRRLTANGKAKKLALVAVARKLIVLANTLVRADRLWQTEAPKCA

SEQ ID NO: 132541 - protein, 344 aa, unidentified
MATYYIGADVHSNNTELAIEQRGQIVARYSVPTSIPAISAVLSSIQGKKTLAMEEGPMAGWLYRNLHEKVDQLVVSEPRRNKLISSEGDRDDKIDSGKLVVLLRGNFLKAVHHTCDSHRAHLKHWVNLYHDRVRDAVRDINKIRACCRMHGVHIPRKVVRNQVRRHAWLLELDNPVLKVQLHMLWIGYDATKAQVEIAKKQFSAYARKYPIIASWCKLPGVGLIRATTIFAYLDTLWRFKNRAKLHRYCGVGLVRMTSGKDKKGRPKPVRLKLPWAVNRRIKNAVMGAAITAIERGDNAFKDYYERMRSHGITPVNARHSVARKLVSTMSAMWKTGSEYDETLV

SEQ ID NO: 132542 - protein, 339 aa, unidentified
MKGTIIGLDLAKDIFHIAVLNQAGKQARKKKLRRRQLRLYFTQTEPCKVAMEVCASAHYWAREFQRRGHEVVLLPPQHVKGYLRGQKNDYNDALAIAESAQHGAIRPVIIKSIEQQDTQSFHRIRRQLVGEQTRLANQIRGLLAENGIVMRKGVSVVRRDIPEILGDADNGLSERFRALLCRQHQRFLDLDEELAWYKAQLVAEAKSDETCRRLSDVPGFGPVVSSAFKSWIGDGKQFKRGRDASAALGVVPRQHSTGGKELLLGISKRGDSYVRSLVIHGARSVVSHAGKKTDPLSVWINRLVATRGFNKAVVALANKLIRIAWVVVARGEDYRPQAV

SEQ ID NO: 132543 - protein, 418 aa, unidentified
MDVVVERCAGLDVHRDNVVATVRVPSEDQHRYDRQTRTFKATLAGLAALRAWLEGWAVTLVGMEATGVYWMTVFQALEDRFECWLLNAHHLRNVPGRKTDVKDSEWICDLVAHGLVRASFVPPPEIRRLRDFTRLRKAQINERARVIQRLEKVLQEAGIKLTSVASGPYSKSARAMLEALLCGISAPEQLAELAKARMRQKIPQLREALASRFEIEHHGILVAQLLAHIDTLDQAIANLDEKISAMLAPHQRIVELLCTIPGVAERTAQVLIAECGLDMSQWPTVGHFASWAGVCPGNRQSAGRQRSGHTRPGPHWLREALTESAKAAARTKGTYLAAHHAQLRGRRGEAKATGATRHDILVAYYHIVRDQVPFRELGPDWQRRRYSPEHRARRLQRQLEALGYSVVIEQRQEAEQPA

SEQ ID NO: 132544 - protein, 476 aa, unidentified
MVVPNEEPKTPTKPKTPTKPRKSRERSVPVPVPASATALNIINPDAAGIDVPSNMHMVCVPADRDANPVRRFGANTADLQELAAWLKKCRIKTIALESTGVYWIPLFELLESQGFEVNLVEPGQLSRCGARPKTDVLDAQWIQRLHSYGLLRASFRPPDSVLALRAYWRQRQMQVRYAASHAQHMQKAMEQINVKLTQVVSDITGVTGMLIIGAILEGERDPVKLAQLRDERCQHSEQQIALALQGTWRPEHLFELRQAYELYQFHHRQITECDQQVEAELANFPNRAGEKTHSVKPRKRGRKSNDVRFEATGPLFQALGVDLTLIDGIEVGTALVILAEIGVDVSRFPTEKHFASWLRLCPPQNQSNKTNRSRRHRKGTSRVTIGLRMAAQSVGRTMTPLGLFYRRIRSRIGGLGAVKATAHKLACLVYRMLKYGQEYVTQSMEEYEAKVRANILKSLKRKAAALGFQLSPLPTQ

SEQ ID NO: 132545 - protein, 378 aa, unidentified
MHSENIAAYVGLDVHKETLAVAIAAPERLGEVRYYGTINNEAQAVRRLFQKLQGLYGNILSCYEAAGPCGFGLYHQLTAMNIKCQVIAPSRIPKSPTDRIKNDHRDAISLARLLRAGELTPVWIPDLTHEAMRDLIRARAAAKRDSRVARQRILSMLLRTDKHYAGKHWTGKHRTWLANQSFSQPSQQIAFQHYCQSLEQIEDRILQLDQEISRLLPEWSLCNLVCQLQALKGVGQLIAITLVAELGDFSRFSNPKQLMAFLGLVPGEYSSGNSIRPRGITKVGNSELRRLLYEAAWSYRTPAKVGAWLIYYRPDSVTQYSKDIAWKAQQRLCSRYRSLTAKGKKSQVAITAVARELTGFMWDIALAAQSSFNQQKQN

SEQ ID NO: 132546 - protein, 348 aa, unidentified
MAHFVGLDVSVKETSVCVVDDAGKVILEQKVLTEPDIIIALLTSLGVTFGRIGIEAGPLSQWVVNALTAAELPVICVETRHMKALLTAQQINKTDRNDARGIAQMMRVGLFKPVHVKTLVAQEQRMLLTSRKLLQRKLLDVESDLRGTLRNFGLKVGVVGGSRYEARVRELVEGFPRLAAIVEPLLSVRRVMRQQFAVLHKMLLDTVRADLVCRRLMTAPGVGAVVALTYRATVDQPQRFVHSRAVGAHVGLTPKRYQSGETDYDGGVSKCGDALLRTMLYEAAHSLLTHSRKWSWLKAWGMRVAQRRGMRRAIVAVARRLAVVLHRMWVDGSEFRWSKDSTPVPAVA

SEQ ID NO: 132547 - protein, 338 aa, unidentified
MDYYAGIDLHSNNSYIAIIDNDNKRVFKKKVKNDLENVLHVLEPHRKEIKGIVVESTYNWYWLVDGLMEKSYKVHLANPSAIKQYEGLKHSDDVTDAFHLANLLRLDILPEGYIYPKKERPVRDLLRKRLQLVQQRTAQILNFENLLARNLGTRINLDEINKFTEEDVEDIFQQEQLILSGKASVATINFLGTRIQQIEKAVHKVAKLKSEYKLLMTVPGIGKILALTIMYEAGPMERFAKVGNYASYCRCVGSERISNGKQKGKGNRKNGNKHLSRAHVEAAHYAIRHYEYVKRYYQRKMAKTNIVVARKAIAHKLARACYYIIRDQKAFDPGKLFV

SEQ ID NO: 132548 - protein, 413 aa, unidentified
MAEETISWFAGVDWGSERHQVCLLDARGTTVGERAFPHSGEGLAELGDWLLSMASAASTVAVAIEVPHGPVVDALIDRGFVVYAINPKQLDRLRDRFSVAGAKDDRRDAYVQADGLRTDRRLFRHLQVADPRLIELRAWSRLAEELQAERVRLSNRVRHQLWRYYPQMQKLTNDLAAPWFLELWTIASTPAKAGRLRKSTVERLLKQYRIRRIDAETVLRILREPAIKVAEGVAEAASIHMRSLVARLRIVNRELREAERKLDELCTAVSEIEQTSGESLQRRDVAILRSMPGIGRINLATLLSEASGPLSRRDYEGLRTLSGAAPVTKRSGKSLIVVRRYAAHVRLRDTVYHWARVATQRDPKCRARYTALRKRGHSHGRALRSVADRLLALACVLLQRQTLFDPHFGRPTT

SEQ ID NO: 132549 - protein, 350 aa, unidentified
MNEITLLGIDLAKNVFQLIGVDKHHKEVMKKRVSRAKLEEVVSKLPKCTILMEACGSSNHWGRRFRSLGHEAKLISPQHVTPYVGNHKNDYKDTQAILEAGTRPRTQFVSIKTLEQQDMQSLLRVRERLVGNRVSLSNQIRGLLLEYGIDIAQGFSRLREKVPELLDASNDELTAQMKEVLTDCYEEFKELSKRILGYDKKLECISTQHESCRLLRTIPGIGPISSVSLYAAVGNGSHFKNGREMAAHIGLVPRQHSSGEKRVLLGITQKGHADLKRVLIHGGRAVVRHASKKTDWRSEWINNLLLKKHKNAVATAVANRTARIAWAVLQSCTPYQINLNDAELNKSIAC

SEQ ID NO: 132550 - protein, 481 aa, unidentified
MGKQKMSTFERLNRQQRRKLRRQLALPDPGLTIVHANAGGVDVGNESHFVAVPPGRDPQPVQEFGCWTADLVRMAQWLQACRVDTVALQATGVYWIALYDVLTRHGIRVALVNAQHTRNVPGRKSDVQECQWLMKLHTYGLLRDSFHLDEAIQKVRTIWRLRDGHVKEASQAIQHMQKALTKMNVQLANVISDLSGLSGQTIIAAILAGERDPYKLADLRDRRVQASREEVARSLEGHWREDLLFELQQAVEAYQFAHCQMRECDRQLEQYLTALPTRTLRASEASEPAEPQAAPSKTKRRRKPSGNAPAFDLRTELRRIAGVDLTTIDGIDVLTAQTILAEVGPDVSAFPDEDHFASWLGLTPSKDITGGKVIRRGRRKVKSRAGQALRMAATTLRESNSYLGARYRHWRYRFEVKAAAVKAMAHQLAVLVYRLLKYGQAWVDQGAAKFEQKQEQAELARLRTRAAARGLKLVPLGAEIQ

SEQ ID NO: 132551 - protein, 402 aa, unidentified
MYFVGIDWADLHHDVAVLDEKGQELKYFTIPHKREGLEQLKQKLLSLDTDPENFACLVETKNGLLVQFLLEAGFPVYPLNPKVVDYRRKPSGAKSDPIDARLLANIGRADLSQLKRLKPDTELISELKMLTRDQDGLIQEATRLTNKLIACLKEYYPAALDFFSKPTLPVALEFFKLYPTPDLIREATVPDIAAFLKAHKHPRPNQTAVSIWQKAHEPQLQASAPIVRAKCRLLLALVSQLEVVKEQIAAYDEEITRLFQLHSDSRIFASLPGAAGRLAPRLLAEWGDDRERYENAAVVQALAGTSPVLFQSGKYRFARQRKSCVKPFRRAMHLFAFQSIKQVCWAREYYDAKRSQGKTHHESLRALANIWVRIIFAMWRSRTCYDEATFMTARARHLNRAA

SEQ ID NO: 132552 - protein, 415 aa, unidentified
MKTSSGNDFAAYVGIDWADRKHDVCLQAAGSNTRESSVLSHRPESIAQWAEGLHQRFGGRLVAVCLEIAKGPLVYALQRYAFLVLFVVNPTTLAKYRETFCVSGAKDDPSDAALALELLLTHPEKLSGLNPERCPMRALQQLVEQRRMLVDEVRRLTNRIGDALKQYFPQALDWFEDKDTLVFCDFLTHWPTLKQAQRARRGRLSAFFREHNVRYPHIVEQRIQAILTSTALTSDQAVIVPNRLLVEILAQQLRLLLLAVQRFDAEIAALAPTLPDYALFASFPGAGPVFASRLLAAFGEQRERYGSAAELQKYTGVAPVTQRSGNKCWVHWRLQCPKFLRQTFVEWAALSIPHCYWAKAYYQQQRSRGATHQVALRSLAFKWIRIVYRCWTNRTPYDETTYLNALKRRGSPLLN

SEQ ID NO: 132553 - protein, 302 aa, unidentified
MPPVRFWTGATFATSTAGLRQLGTSVRRFTARTWAVEGCNGVGKPLAQRLVAAGERVLDVPTRRTALVRVFAGGNGRKSDDTDALSIALVGLRTPGLVEVVPDERAATLRLFAHRREELVATRTQVVCRLHRELLILLPGGTKRGLTAARTKTLLASVRPRDEVGKARKAIAVDMLGDLVTVDKKIKAIGVQIKDLVAATDTSVTDIYGVGPVTAAMVLGEVLDVARFVDEGHFASYNGTAPIEWGSGGGQGAFILNLGGNRRSTTPCTWSRSPRSEATPPGGGTTGASSPKARRRRKPCAA

SEQ ID NO: 132554 - protein, 349 aa, unidentified
MSQGLNCAVAVIGIDIGKNTFHVVGLDDRGAIVLRQKWSRGQIEARLSNMPPCLIGMEACVGAHHLSRKLKALGHDARLMPAKYVRPYSKGQKNDFRDAEAIAEAVQRPTMKFVATKTADQLDLQALHRVRERLVSQRTGIINQIRAFLLERGVAVRQGLRFLRAELPRILATPPDVLSARMVQVISDLAEDWRRLDHRIDDLSNEITLLARQDAGCERLMSVPGIGPIISSAMVAAIGAGEAFSKGRDFAAWLGLVPKQISTGDRTILGKISKRGNRYLRVLFVQAAWVVLIKPMSWERHGLKHWIDAARKRLHRNVLAIALANKLARIAWGVLAGSRTFEASKLQTA

SEQ ID NO: 132555 - protein, 378 aa, unidentified
MKNDKRYVGLDVHAETIAVAVVETDGEVRFLGAIPNRAETVRRLVKRLGPANRLRFCYEAGPTGYVLYWQLTGLGAHCDVVAPTLVPQKPGDRVKTDRRDAEKLAVLYRGGHLTPVWVPDQAHEALRDLVRAREAAKSDQLRARHRLQKFLLRHGRRPPQGVKAWTQKHLDWVRREVHFEALAQEAVLVDHLAEVEHARERIRRLEGAIDTAVKAAPASLRAVIEALQGLRGIAMVSAATIVSEVGSLSRFRKPRQLMGYSGGVPREDSSGERVRRGGITKTGNAHLRRIVGEAAWSYRHRPTVRGELLKRQAGLSEEVKAISWKAQHRLYSRYRRLIGKGKAKQQVVTAVARELLGFIWAIGVHVEPQHGTAARRAA

SEQ ID NO: 132556 - protein, 331 aa, unidentified
MTTDYIGIDLHKAFFQACAIGTAGDRHWEGRFPRSPEGIAQLVARGVGADVAIAVEASGPTWAFVDALEPTGARVCVVDPRKTRLKAGFAAKTDRLDARRLADALRRESVVSIYVPAPAIRELREVCRGRHQVVRLRTRLAQMIRALLLRCDAGEPPGTRLYAPAALAWLTQVQLPTAADGTLHRLERLYRAVHADAQAADGEVRERATADPIAVRLDTLVGVGPIIALTVRAEIGEGARFRSGPALASYAGLVPRVDSSAGRVYHGRITRAGSPWLRWALVEAARHAMRRDDARGRWARRLAVRKGINKARVALARVLCDEVIRTWPAGS

SEQ ID NO: 132557 - protein, 393 aa, unidentified
MIYVGIDVAKHKHDCYITNSEGEILRDVFTFQNSMSGFQEFYDTLLSFEPTPSSRNMRIGLEATGHYSSNLIDFILAKGINPSVLNPLSTNLFRKGQSLRKTKTDKSDARFITMMLITESFKPYSPVSYHISELKSLTRHRFRLVQARSRFKVSYARILDLVFPELSDIVWALTQKSVLLTLLELPNTQAIGQCHLTHLAKILEKNSRGRYHREKAIQLRELARNSIGSNSPALAFELQQIIRTILFLQEEVILIEKQIKQVMINIDSPIMTVPGISFTLGSMIIAEIGDIERFETPARLLAFAGLEPSTYQSGNFTASHAAMVKRGSKYLRWAILNAVRLICMRDVAFKNYFVKKLSEGKHYLVASSHTAKKLIRLIFCLLKRNQRFSPQAA

SEQ ID NO: 132558 - protein, 430 aa, unidentified
MNHKRRAVKLSIVRATHTLIVGVDVGKLSHWACVMDGLTELQVCSPFSFQNTKDGFERLLDQMRKTQQLTGAQHVVVAMEPSGHYWKPLATFLLNQGITVVCVNPLHVKRAKEFDDNSPTKHDRKDCWVIARRAADGDFFEPYMPEGVYADLRGLTQARQQTRVKLNQAQTQLQTLLDEYFPEFTGVFKDPTGMAATYLLRHYPFPVDILEVPAERLAEELRKASNGRVAMKRVQEIRLAAATTIGVRHGLKAARLRLRQLLDEIDSCLSRLTETEAEMHAALNETGLASYLLSAPGVGIVTAAIFLGETGDLTRYEDARQIQKHAGYNLKENSSGQHKGQSKITKRGRPVLRNLMYLAAMVAVAKSAEFKALHTHLKTRRQNPLKPKQALVAVACKLIRVLFALARNQCHYDRRIVLGEFRTQQLGLAA

SEQ ID NO: 132559 - protein, 339 aa, unidentified
MKLYGAIDLHSNNNVTVLIYEQDKVVYEKRLPNDLGVIAQQLAAYQSSLEGIVVESTYNWYWLVDGLMDKGHQIHLANTAAIQQYEGLKYTDDHSDARWLAHILRLGVLPQGYIYPKEERAVRDLLRKRGQMVRQRTANLLSIQNLITRNTGSSISSNRIKTLDSETVDALLPNQDLALAVKANLAMIQCADGQIDILERTVTDRVKLRAEFSFLKTVPGIGQILALTIMLETGEIQRFSTVGDYASYCRCVGSQKLSNGKKKGSGNTKNGNKYLAWAFVEAANFAIRYNARIKSFYQRKKAKSHGVLAIKAVAHKLCRACYYIVKNRVAFDIAKAFAG

SEQ ID NO: 132560 - protein, 408 aa, unidentified
MKLVYPICCGVDVHKKIIVATIVSTDNVGISTYQQKSFSTINYDIEKFHNWLIENNCYHVCMESTGKYWIPIFNYLENDIDVCLTHPKYVKAIKGKKTDKKDSKWIADLYKFDLVRNSFIPPKEIRELREISRYRFKLVCMKSSEKNRIQNSMTVSNIGIANILSDPFGKTATEIISYLLKHTSESFDEKACRKLIKKGAKAKADEIIAAINGYTIESDQRLKFELARGHLDYLDEMITKTEVELYIRIRPYWQLVDLIAAMPGMTELSATLILAEIGSDMSVFEDAKHLTSWAGLAPSNNESAGKKKSVRIAKAGQYIKPLLVQCALAATKSKKEPYFAIKYQHIKKRRGHKKAVIAIARMMLVCIYHMVSEVKPFNPTDYTDLMDPHSHVDKVVLNEANVFAYLQE

SEQ ID NO: 132561 - protein, 356 aa, unidentified
MGKDIRSVSGLTIGLDLGDKHTVGCVLTRSGEVEETFSVATTMSALGRTMAGFKPSRVVLEVGTHSPWISRLVEQAGHEVIIANPRRVRLIAENDSKTDAVDAELLARLGRVDPGLLKPIVHRGEKAQHDRILLLARDGLVRSRTQLINQVRGFAKSLGHRMPSSSTPAFPRRVREQCRTDLFPGQSVMLNMIDMLTKEIRAMDRAAEKLCKENYPETGVLRQVKGVGALTALGFVLTLEDPSRFAKSRTVGAYLGLRPRLRQSGEQQPQLRITKAGDALLRRYLVGAAHYILGPFGPDTELRRFGLKLAERGGSAAKKRAVVAVARKLSVLLHRLWVTGEEYQAIGYGRSTQEAA

SEQ ID NO: 132562 - protein, 316 aa, unidentified
MKNNAQVVVGIDVSKAVLDVAVLPSGEVLQFANEVAGIDELGKKLKAGAADLVVMEATGGYETAVATALVAMGLRVAVVNPRQIRDFAKATGRLAKSDRIDAQVIAAFGQAIEPEIVRLPDEDAREMEALLVRRRQLVAMRVQEINRLGLMQGAMRKNIKAHIDWLEKQIDRLDIDLTAGLRKSPAWRAKDELLRSFKGVGPTTSSTLLIELPELGELDRREIAALVGLAPFNCDSGLMRGRRSIYGGRSHVRTMLYMATTTAIRSNPVIRPFYERLKARGKPHKVAMVACMRKMLTILNAMLRQSTPWTPETNPL

SEQ ID NO: 132563 - protein, 346 aa, unidentified
MKTVLEQGSLHRLPSNPNGCRGIEARILQDRVLEDVMETKVFVGVDVSKDSLDVAISAEEQILTFANDQKGVDALVKKLSRIDVELTVFESTGGYELLAASSLAEAGLPVVIVNPRQVRNFAKATGILAKTDAIDARVIAHFAQAVKPDVRPLKDRATSELTALVTRRRQIVEMIVAESNRLKLANKRNKKDIKDHIRWLEKRLDKIETDIGQTIQNSPIWHCKDNILRSVPGIGPITSATLICDLPELGVLSPKKIAMLAGLAPLNCDSGKFKGRRRIWGGRAAVRSGLYMATLAAIRCNPAIKGFYQRLIAAGKCHKVAATACMRKLLIIANAMLRDQTLWQHN

SEQ ID NO: 132564 - protein, 343 aa, unidentified
MSKKDLQILKQNMGIDLSMDDFKANLVVLNHKHESQSLGHKTFRNSIAGIEEFLSWVEKKADPAVELEFTMEATGVYYENLAYTLFERGRVVHVVLPNLAKKFTDSLGIRSKTDKLDAYALGRLGVERRLSRWQPASKNIRILKVLTRERSKRQKATTNAKNQLHALEHSYEPPESSIDRYKETIEFLEGQVNAIEKEIMDLIRNDSVLDTRIRKITSTPGLGHMTVAIVVAETNGFAAISNIKQLQSYAGYDIQLKESGKWKGHSRISKKGNSYIRHALYFPAYTIIKHSSYHKTFYERLLKEKGKSLIAATAVQRKLLGLIYTLWKKDEYFDPEYGQKNVA

SEQ ID NO: 132565 - protein, 349 aa, unidentified
MLADELDYVVGVDTHRDEHVLAVLAAPAGAVIARHAIAANARGYGEALRFVEQYTRGARAWAVEGAGHYGAGLARFLAGHGETVLEISRTPRAERRLRGKDDSLDAVSTARAALASETRALPRAGQRREALRLLLIARRSAVDVRREALVQLRSVIVTAPDRLREQLRGLPAGRLLERCRRLRRTRTMSADELATRLVLSSLARRVLAATAEADELEAEILAHVRALAPQLLDEPGVGPIVAAQLIVAWSHRGRLRSEAAFARLAGVAPIPASSGQTTRHRLSRGGDRQLNRALHTIVLHRRQHDPATKDYFARRIAESKTRRDATRLLKRYLARHLYRLLENGPPLPT

SEQ ID NO: 132566 - protein, 378 aa, unidentified
MTSLETVLQGKDTTSQGDLHVSFELGDRSWKLSCSDGIRSPSRYSVSAGDQAAVLDCLQKARARCGLDPQAKVHTCYEAGRDGWWLHRWLREQGIDSIVVDSSSIEVNRRAKRAKTDRLDADKLLALLLRYHRGERRVWSVVHEPTAQEEDARRTHREIARLVHERIAHTNRIGSLLVMHNLRPGRIGGRTWQGWWDGHCMQVPPLLRAEIGREYARLVLAKQQLNALETERRHEVAEGAHPVVAQLAKLRAIGPRGAWILDKELFGWRRFANRRELAGCLGLAPTPYASGTSEGEQGISKAGNKRARALLVELAWRWLKFQPDSAMSQWFHQRFGIAGKRSRRIGIVALARRLAIALWRYVEHGEVPAGATLKTVDA

SEQ ID NO: 132567 - protein, 341 aa, unidentified
MQITTIGLDIAKNVFQIHGIDAAEKVVVRKQLRRGQVMKFFAALPPCLIGMEACATAHYWARELTKLGHEVRLMPAKDVKAYVKRNKNDAADAAAICEAVRRPTMRFVPVKSAEQQGQLMQHRARDLLMRQRTQVINALRAHLAELGITAAQGREGIRDLLAIIADDGDARLPIEARTSLIVLAAQLQALQTLIGSIEKRILARHRSSEASKRLQTIPGVGILGASAIATIVIDPKAFRSGRDFAAWVGLVPRQDSTGGKRKLGPISKQGDRYLRRILVIGAHAVLKRARLHPQKYPWLTQLLARRPFKVVAIALANKMARVAWALLAKGETYRMPRLAAA

SEQ ID NO: 132568 - protein, 371 aa, unidentified
MEEGIKVFVGLDVHKDTIKVAVAEAGRAPARLIGNIAHDISKLRKVLARLGTPAVVHVVYEAGPTGYGLQRALTRAGYRCEVIAPSLIPKRAGDRIKTDRRDSLRLAELSRAGELHAVWIPDPADEAIRDLSRAREDAVHSRTQARQQLKAFLLRHEVRYTSGRSSWSKTFYRWLATLNFGSGPAQTAFTEYWQAVSAADERVARLTTALIPAIKDWRFEAVVQALQALRGIDQVSAIGLVAEIGDIARFAHPRQLMAYLGLVPSEYSTGDQVARGSITKTGNAHARRLLTEAAWNYRFHPRIGGRAQRRAEELPQAIRDIGWKAQERLCARFARLRGRGVQINKVCVAVARELTGFIWAIATTQTKLIAH

SEQ ID NO: 132569 - protein, 381 aa, unidentified
MQGSAVFPEVSHGRVYSAVRRSGRPQRFDRRGPCQGLSADPPVFVGAIGTHQADLAKLIRRLQAKTPTLVFAYEAGPCGYTLHRDLTGQGFTCHVVAPSLIPKRPGDKVKTDRRDAVELARLLRSGDLTHVYVPTVEDEAIRDLRRARDAARLTMKNAKLRLKAFLLRLGLHYVGRADWTDAHRRYLAKVVCPTAAQQIVFQESVRAVDEQLDRLHRLEAELLERGPAWRLYPVVHALQALRGVQWLVAITVVAELGDLTRFDTPRQLAAFVGLIPSEYSSGPARRQGGITKAGNGRARRALIEGAWAYRYPAKVSAHIQRRIDGLPKPIQDLGWKAQVRLCKRFRRLTARGKHPNVAVTAIARELIAFMWAIAKAVPVTA

SEQ ID NO: 132570 - protein, 449 aa, unidentified
MGSNYAGVDWASEKHDLLVADEMGEAILAATFAHDERGLIALCNALVRLKVQLVAIERPDGLLIERLLDAGLRVMAIHPNQVAAARPRFRAAGGKSDRFDAFVLCELARTDSHRFRVLMPDGDQTKALRALTRAREDLVQTRVALANQLRTELERYWPGAAVIFKDIDSPISLAFIKRYPSPKDAHALGAQRLGWFLARHAYSGGKQPAQLIRKLRSAPDGRAGDQEIEARRAVVLALVTAIEPLVAKISELTSEIGHCLRAHPDGHIFLSLFKGKSVITAAELLAEIGDCRDRYPTADALAADAGMSPVAIESGKRKVAAFRFGCDKRLRDAFGVLADTTRRWHPWAGDHYARSIGRGHDHPRAIRTLGRAWCRVLWRCWQDRAAYDPAKHRGLQQHITVTIPSSSGPRPDLAATQRMAGAAVTEPAARRAEREALDGKPTSANTSGG

SEQ ID NO: 132571 - protein, 315 aa, unidentified
MTKKREAVNVGIDVGKAQLDVCLLERDIKLQVANQEDAIRALIARLARYRLARIVIEATGRLEQPLVRAALAKGLPIIVVSPLKIRRYAGAIGQLAKTDAIDARLIAQFGAAVKPAAHAPTDPQARKIKDLMVRRRQLTDMRTMEKNRQQVMPADFHDSIDTLIAVFDQQLKVLDRCLDQAVDQHCVWRHKRKLLTSMPGIGNTVAYTLLGDLPELGTLSRKQIAALTGVAPFNRDSGRMRGKRRIRGGRASSRTALFLSAMSAVRFNPDIKRFYERLVKSGKHRKVALTACIRKIVTALNAMLRDNVTWKTAMQ

SEQ ID NO: 132572 - protein, 313 aa, unidentified
MDAAGKILKRQRILSTPEHFRQSLAEFSGPIKAVLEASYCWGPMYDWLDGLTDEVVLAHPSKVRAIAEARIKTDNIDSEILAHLLRADLIPRAYAPSKDVRALKRVLRQRLFLVQLRTMVKNRIRALLTQHSVELPKETLFSKLGLAWLQQVELPGPDGCVLREDTELLKVFAKKIASTDKLIEQLAEGDEAVPWLASLPGIGKFLSVVIRWEVDNINRFQEAKKFASYTGLVPSTYASANRMVHGRLTKRGNKWLRWAFIEAVTPAVRSSASLRAQYLRIKLRRGAKDARTARKLAELAWTVWTEQRCYEQR

SEQ ID NO: 132573 - protein, 389 aa, unidentified
MSQFFDASRSLTALEQDSTIIAVIEMSQSKWLVAAIVPGVERQPLKKLNADEEALLKLLHRWRNEAGQAGRQIKRIVVAYEAGRDGFWLARWLRARDVEAYVIHPASVAVSREHRRAKTDRLDTELLMRAFLGWLRGEKRHCSMVVIPTVEEEDARRPNRERGSLITEQTRIVNQIKAILVRFGIRTFRLTLRKVEEKLECLRTAEGAPLLENTRAELRRHLARLRVVREQIRAIEQGRLHKLAAAPAGEKGPHAMIRLISRLLGVGVETADMLVNEILSRHLRDRKAIARYAGLTGSPDESGRRRRERGLARAGNARVRCGMIQLAWRFLRFQKDSALAQWFHARTADGRGSTRKTMIVALARKLLIALWRLVMTGEMPQGVVLRPAS

SEQ ID NO: 132574 - protein, 347 aa, unidentified
MDHIGIDVHKRESQICILAEGGELIERRIRTEPGRFAAVLGNRPQARIVIEASTDSEWVARCLEALGHEVIVADPNFAPMYATRTRKVKTDRRDARALADACVLGAYRRAHRLSDVQRHVRGRLLVRDAIVRTRTRYISVIRALLRQQGYRVPSGSAEAFPTRVRALALPGPLLSLIAPLLAVMRHLNRQLAYSDETIERVAAHDERVQRLRSVPSIGPVTAAAFVATIDDVQRFQHAHHLEAYLGLVPRECSSGDTQRRGPITKAGSGRTRWLLIQAAVSIFRRRPPEAEALRTWALRIAARRGKHVAVVALARRLAGILYALLRDGTVFTPRQISPPLASAALAV

SEQ ID NO: 132575 - protein, 389 aa, unidentified
MDDRVVIGMDPHKRSVTIEVMAADETILGGGRFNTDVAGFRAMRDYVRQWPQRVWAIEGCQGIGRHVATRVLAKDEDVVDVPPKLSARARVFATGQGRKTDVTDAHSVALVGTRMAGLRPVVDDQQLVVLRVLVDRRRALGEEHTRKVAQLHHLLLELIPGGAKKFLSAAQAKALLATVRPRDAAGKTRRRVAAELVGDLERIYKRKKAANKELEELVAATGTSLLELQGMGPSGAARLLVDVGDITRFATRAHFASWNGTAPIDASSGDVVRHRLSRAGNRQINRVLHIMATVQLRNATEGRAYYDHKVASGKGSMEAMRCLKRRLSDIVYRHMVNDAIAHAMTGPGGHRGTTTDSSVTDSHPIAGSSDKPLPGPARPKPRTPATAAR

SEQ ID NO: 132576 - protein, 367 aa, unidentified
MKKVSTAATKQSRNISQQRLTIGLDLGDRNSCYCVLDEAGRIQLEQRVRTTAKALQEVFGAMRRSRVALEIGTHSPWISRLLSKLGHEVIVANARKVRLIGENRKKDDRLDAQTLARLARIDPQLLCPVKHRSAQAQADLMMIRARASLVRVRTGLVNAARGLAKSYGERLLGGNVRNMNPEKAEGLSPELQRALEPLLSAIEEVSERICEYNDRIEALAQTSYPQVELLKQIKGVGTLIALTFLLTLEDPHRFRKSRDVGCYLGLQPGRRQSGKSDPQMHITKEGDPYLRTLWVQGAQHILGPFGIDCDLRRWGLKLAERGGRNGKKRAIVATARKLAVLLHHLWVSGEVYEPLHNSSPMTIATAA

SEQ ID NO: 132577 - protein, 422 aa, unidentified
MNEQDTVVYSAYVGIDWADSKHDVCIQSAASKTREFAVIRHRSEAIDVWMKDLHQRHGGSIAVAVELSKGPIVSALQKYDFIDIFPVNPGSLAKYRETFQPSRAKNDPTDAELAVDMLLRHPEHFKVLKPQSARMRALTTMVEQRRCLVSERIRITNRLRSALKQYYPQVLEWFDRIDTPLFCAFVKRWPTLRQAKRARSNTLKCFFHEHHMYREAVVESRRQAIHAASPLTLDDAVIIPYRMLVLVLVEQLELMFRAIDQFDDEIAKLAFQHPDYALFQSLPGAGSSLAPRLMVAFGEQRERFSSAGDVQKLSGVAPVTERSGQKHWVHWRFQCPTFMRQTFVEWAAQTINKSYWAGAYYRQQRDKGVTYQAAVRSLAFKWIRIVYRCWQTGVAYDESRYLKALERRGSPLVTRQKIQESA

SEQ ID NO: 132578 - protein, 319 aa, unidentified
MQTILDLGADVDSRYIVIACAAQSFAVQTIANERKAILAWLRSVPRGSRLAMESTGSYHELLADLAHAAGLQVFVINPRDLRRYAQALGRRGKTDRVDAEVIARYIAREHAELHAYLPPSKEQRAVARLMGRRAKLVILKGTLTQSLRGVPELRQELKQLTTRLERLIAHVEMLMQRALQQVPDARQAAEHIATIPGFGTLSSTCLGHSFTRLPYSNSDAVIAQTGLDPRPDDSGKRSGRRRLSKHGPSEQRRLLFNCARSAARTKLWRPYYQAQRAKGLSDTAATVILARKMVRVAFAVYKQNQPFDPQRVSRALQKP

SEQ ID NO: 132579 - protein, 381 aa, unidentified
MNIQTGLPDPIDCFVALELSRSKWLVGALFPGQDKVTTTTVAGGDTAELLSVLERIANKATDRGHSNVRLRVCFEAGYDGFWLARFLIARGIDTTVLDASSFLVSRRGRRVKTDRIDVEAMIFTLKAFLLGDKSVCRAVRLPTPEEEDAKRLVRERAQLVKERTRNVNRIRGLLNLHGIRSVRGLWGGEWRQWLARGRTGDGRALGPFLLNELVRQFERLRLVADHLKALDAERAAVVAQDVEVPGGSKIAMLKQLCGVGEGGATTMVTEIFHRQFKNRRHLASYLGLAPSHYASGDVSRDQGISKAGNQSARVMMVELAWCWLRYQPQSELTRWYRQRFAQKTGRSGKIGIVALARKLAIALWRFIEDGLVPTGARLKTS

SEQ ID NO: 132580 - protein, 338 aa, unidentified
MKLKRIGVGLAKQVFQLHGVDSHEQAVCRKQLKRSQALGFFRRLGPCAVAMEACGSAHYWARELSALGHEVRLIAPQFVKPYVKSGKNDANDAEAICEAASRPTMRHVEVKSAEQQASQALHRIRSRLIRARTALVNKIRGLLGEFGLVEIRHGVAATRRLAQTALEDAGNGLPGPMLELLAELRGELDEHEAHLCRLDEMIQCQAREDERVKRLMQVEGIGPVSATALVEAVGNARQFRSARQFAAWLGLVPRQHSSGGKERLGAITKRGDIYLRTLLIHGARAVLQHCRDKADRRSQWLRQLICRRNRNIAAVALANKNARVVWAILSREECYQLG

SEQ ID NO: 132581 - protein, 360 aa, unidentified
MHATTVAVDLAKSVFQLAVADEHWRVIETQRLTRTQFERWFANRDVGLVIMEWCGSSHYWARWLNGLGIDVKLLPAQYIRAYVKRNKTDAADAAALLEAARASDIRPVRVKSVEQQALQGLHRIRSLWMSTRTSRINALRGFCREFGIVIPVGARTGIEAISRVLADPHSAVPDMMRGTARLLVEEIRLLEARIAQLERELAQIARHSPACTTLLSVPGIGLLTATAIAAATSGDVTHFQDARHFSSWFGITPREYSSGSSRYLGRISKKGDRYLRMLIIHGARSVLRAAAVAQNAGREVTGIRAWALAVQQRTNHNKAACALANKLARICYATLRDHAPFCEDARLSKKLNRESFATPT

SEQ ID NO: 132582 - protein, 381 aa, unidentified
MTTPATRNVQESTTEGTLFVAFELSEKTWKLGFTTGHGQKPRERTVPARQQERVLDEIAQAKRRLGLPESAAVVSCYEAGREGFWLHRFLQAHGITNHVVDSSSIEVNRRRRRAKSDGLDVRKLLSMLIRYADGERQVWQVVKVPTVEAEDQRHLHRDLETLKQERASTMTRIEGLLSSQGLRVTSLTKLPEQLEALRLWDGSPIPPGLRRRVLRVYAHYTFLSAQIAEVEAERRAQLQASTEAQIDQVRQLMQLKGIGINGAWLLVMEFFGWRAFKNRREVGGLAGFTPTPYQSGDSAREQGITKAGNRHVRWMTTELAWSWLRFQPDSALSCWFRQRFGSGGKRLRRIGIVAVARKLLIALWRFLETGVIPAGAVLKEV

SEQ ID NO: 132583 - protein, 387 aa, unidentified
MKTFQVFYIGLIKSGGANAYVALRLIQPICIMYTHVYIGLDAHTRNCVLGTIDADANVVSVHDFPTSETGLIRHVKALPATFKYLALEESSLAGWIAGVLTPHVTELIVCDPVQNALISRGGSKDDVRDSLKLARLLRLEELKPVYHNHDPSRVDFKIVAQQYLSITNEIVALKNQIKSKYYQGGVLKISGSLVYRKAHRHSYLKHVESEAMKKVILNFYDPLDCMVRVRENALLLMQELGKKYGEIEQFQRIPGIGVVGAHVFSAFIQTPHRFATKQQLWKYCQLGIRVRQSGGKKLSGECLDRSGASVLKAISYQCWMSSLPAKESNEVSLFYHASAKRTQDLTRARLNTQRNVLATLWTIWRKNVDDHPHLFYRPPVSARKAKQ

SEQ ID NO: 132584 - protein, 362 aa, unidentified
MHYANNTELSSLEGTRGQFNGRPGTIKLGIDVHQSFYVVVVQEGGSNPKLPQRFPKEAFLLWAERLRAKHPEAALHAVYEACGFGFGLQRALSARGIECHVVSPQKLDERQQRVKTDGRDARTLCLKLSRYVEGNQEELAVVRVPSEAEEQARALHRQREQLVRTRKQLEAHGRSLLVNHGIEPVNQWWKRRAFATLVVPAWMKDLLSHTQPLLLQLEAQIRALTVQLQAAAVPDQPRGLGALTSVVLDREVCAWDRFRNRRQIGSYTGLCPGEHSSGHTRLQTCVTKHGNPRLRAALVELAWRMVRFQPDYRPVVKWRKILAKGALATGAARKKAIVAVARQLAVDLWRIRTGRVEAATLG

SEQ ID NO: 132585 - protein, 482 aa, unidentified
MKKKNIYVNQSQELLRLFEEAGNGAKVMCVPIDYAKKDHVAMFCDGYGHILRKPFPVKNSPEGIEYLTEQVARSCLHRHIDPKHVFFGGEDVGSFAENFIHTLRSGGWIVAGVNAQDAKKQRANLQASTDRLDLMGIASMLLNRRANCSPAQSGIYRNLRTLVRQRRKLVVMSTEVKNRVHTFVDRLFPGFLDDKNSGIPPFSNSSLYLMENRFSPRQIRRRKSPKLIEVLHRYGTEAPENAAAKLQEYAARVLLPSDEYISTLQVSLAHHVKLFRCLQDSIHQLEHELAVWLAQTQGAFLTTMRGIGIVLAAGVCAEIGDPDAQKPLTNLVSYSGIIPKVKQTGGPEGKTHIGKVAKRCNRILKDYVVESANHLGLHGPEDLMADYKRREAAGQHADFGIGRRYLRTGMCLMRTSQIYLPPRLRNTDATPEERAGYYLTTWPALRQKWNKADALETAFDKGRPLGRWRNMVQELYGIKLKL

SEQ ID NO: 132586 - protein, 425 aa, unidentified
MNFNTNEKINQVSENTLVIGIDIAKHKHFACAIDDRGRVLQKSFPLVQSRFGFESFYERLLALKEMHEKREILIGFEPTGHYWMNLAAFLTHYGIPFVMVNPMHVNRSKELDDNLQTKNDQKDALVIARLMRDGRFSYPRLLESVEAELRNGATLRSKIQEDLNALQNRLIRWLDRFFPEFPQVFKNFGKMAYAALEMTPLPSDIKEKSPEELLFLYRQVEGMKSPQLPKAKQLVEAAQNSIGLTEGLVMAKYEIATLLSQIKLMQAQLDELTVQLTELAKQMTDYDYLASVPGIGDVTVVDLLSEVGSLSQYAHPRQLIKLAGLTLRENSSGQQKGQKRISKRGRRKLRALLFRVMMPLIKHNQAFKQLHEYYTTRTVNPLRKKQSIVVLCGKLLKILHALCKKKKMFNEEQMMNDFTQLQTAA

SEQ ID NO: 132587 - protein, 345 aa, unidentified
MQTMYYIGLDVHKRTISYCVKDGSGAIHAEGAIPATRFDLDRWMKTLPQPWTAAMEATVFTGWIYDHLQPHAAALKVAHPLMLRAIAAAKKKNDRIDASKICDCLRCDFLPECYMASTAIRERRRTLRYRNLLVRQMVQMKNKISGLLMEAGVSYNKRRLHRAGYFRELLATNPGIDEGLCSLLRLCRETVVRLQKTESAVVRSLERDSLLMDRVERLMTVPAVGPITALTWALEVGDAQRFSSIKKAISYCGLCGAEKSSANTVQRTPLSKQRNKHLQTTLIEAAKMAPRYSPNLAMLYDKEKQKGNANRATLAVARKLVAYLMAVDRGQRNFQVAETSNCIAA

SEQ ID NO: 132588 - protein, 395 aa, unidentified
MKEDIAKAISQQTAAALNDAKGWSRYGGFIGLDVHKDTIAVAIAMPGRDEPVYRGEIAHEPKALKKWLDRLNDEFGGAVLLFCYEAGPCGYGLYRQLTEAGHECHVVAPSLIPKKPGERIKTDRRDALKLARLLRAGDLTAVWVPDTEQEAMRDLTRARDDMKSQERKARQQLNAFVLRHGHHWPRGKTRWTQAHHNWLESIRFEQPWLQIVLQEYIDAAKAASRRVADLTDQLMQALPGWSLAPVVDSLAALRGIDKLAATVLLAELGDISRFDSPKQLMAYLGLVPSEHSSGPRRRQGAITLTGNGHARRMLVESAWSYRFPARQTMHLKRKAQHASEQAKAIAWRAQKRLCGRYRQLSQAGKNIKLVCVAIARELVGFIWDIVRNEMPRLAA

SEQ ID NO: 132589 - protein, 380 aa, unidentified
MSTTPVQFCLMLAIAVEMSGATWLVGSCAGAKLRRKALSDETPIERMRSLLAEIETALKKFGGGEHTRVVVAYEAGQEGFWLVRELRARGIEAEVIDPVSLKVDRRGKRAKTDRLDVEALARALYAWMAGDTTALRMVRVPSKEDEDNREWQRERDRLMSERRGCLDRIGKKLRTHGIWVWDRTALEEGTLRCLDGTPLGPMLQETMRMELDRVEKAEAKLAVLNKQVEQLSADAHNRIERLTLFRGIGETGGRGLALKLYWREFDNRRQVGACTGLVSMAYDSGTMRQDQGISKQGDPSLRALLVELSWLWLKHQPTSEITAWFRKRTEGQGKRHKRSMIVAVARRLAIALWRYLKDGVVPEGAAFKKHQVAPAIAVNA

SEQ ID NO: 132590 - protein, 312 aa, unidentified
MEMAYVGIDVSKDRLDVHVLPEGETFVVARDGQGLAELVERMGTLGPERIAVEATGGFETVVAAALAGASLPVVVVNPAQVRHFAQALGRRAKTDPIDASMIARFVEATKPDLRELPDQATQLLADLVARRRQIIEMIVAERNREKRVAVMRIRKSIARLIAALEKELSEIDAEIDASVRGSPAWREKEDLLASVPGVGPITARTLIAELPELGTLDGKRIASLAGLAPFTRQSGQWKGKAMIAGGRKSVRSALFLASLVACRHNPVLKAFRQRLIDAGKPKMLVVIAAARKLLTILNAILRDKQPWRPETA

SEQ ID NO: 132591 - protein, 465 aa, unidentified
MNTDKKFWRNRKAKKELGRRLHSENPGLEVVHPDAAGIDVGNGAHYVAVRPDRDTQPVRRFECFTADLYRLADWLQNCGVCTVALQSTGVYWIPVYDILEERGFQVYLVNARHTKNLPGRKSDVQESQWLLKLHTYGLLNNSFQPPSKIRTLRTYWRQRLQHVTGAATCVQRMQKALTQMNIQLANVISDLSGVTGQLIVRAIVAGERNPQKLAELSHPRIQASRAEIAKSLEGNWRQELIFVLQQELEMYDTYQRRVAECDQQLQKHLSAFADTVPPPNKQNLPPKKKKKQNKNNPHFHLADELQRITGVDLTRIDGVDVIVAQTVISEVGLDMSPWKTEAHFASWLGVCPDNRISGDKVLARGTRHVLNRAANALRLGASTLLKSQTYLGAQYRRLRTKLGAPKAITAMAHRLARLVYRMLKYGQQYVDRGADYYERRNHQQQVEFVRKRAAQLGLQLTQLHA

SEQ ID NO: 132592 - protein, 350 aa, unidentified
MSIIGCDLHSRYQQIAMLDTETGEVVTRRSEHENGEARAFYTTLPKPSLIGIEATGYTQWFERMIAELGHELWVGDPAEIRARAVRRQKTDTRDAEHLLDLLLTKRFPRVWVPTPEERDVRQLLKHRNKLVRMQTSVRNQLHFLAMSQGVCRKKKLWSARGRAELEGLSLGPWASQRRKELLELLDGLGPRIAELDQAVKTEAERRPEAVELMKHKGVGPVTALAFVLTIGPVERFAHSCALVSYLGLNPGEDSSGGHQRLGHISKQGNPMLRWLLVEAGHGAAQFDPELRRKYQRLVFRRGRNVAKVALARHLAVRLYWTLRQASSATPPVRTPGSPQSRKVEATPSRV

SEQ ID NO: 132593 - protein, 368 aa, unidentified
MNTVKFIGMDVHKNSITIAIAEEGLRDSARLYGTINNDLDALDKFCRKMISTASDLYFVYEAGPCGYGIYRHLTGKGFNCMVTAPSMIPKKSGDRIKNDTRDAKTLARLHRAGELTAVYVPDAQDEAMRDLSRAREDAVIAGRKAKQRLNAFLLRHGMSYSGKSKWSRAYFNWLSDIAMPHPAQQIALQEYIDAVHESLDRIERLTEQIRQMVPDWRLAPIVDALQAARGVSLIVAVTMLSELGDLNRFQHPRQLMAYLGLVPSEHSSGGSIKRGGITKTGNGHARKVLIEAAWAYRLKPRVSRALLKRQENLPEPVREIAWKAQLRLCARYRRLMAKGKTKQVVVTAIARELCAFLWAITQELQPVA

SEQ ID NO: 132594 - protein, 351 aa, unidentified
MMLIGCDFHPSWQQICWVDTETGQTEEHKLVHAPGEAEKFYRRFAAPARIGMEATGNCQWFVEMLAGLGHEVWIGDAAKIRASEVRQQKHDRRDAALLLRLLMENRFPRIWTPSSAEKDLRQLLIHRHKLVRLRAQTKNGLQHLAMNQGLQKKRRLWSKAGQEALRELTLGPWASRRREDLFSVLAMLDRQIESLDLAVKQAAEQNKNARLLLTQPGVGPVTSLAFVLTMGDVSRFPRGKQVASYLGLIPREYSSGGKQRLGSISKQGNRFMRMLLVEAAQVAVRCDPQLRQEYLQRCHQDKPKGVAKVAAARKLAVRLYWMLRTQKPYPEIVHVESSSRVPLAAEARPKN

SEQ ID NO: 132595 - protein, 342 aa, unidentified
MTVLIGVDPHKGSHTAVAIGRDEAVIDELRVEATVGQVDELVGWAKPLGERTWAVESAGGLGYLLSQQLVAAGETVLDVPATLAARVRVLGTGRSDKNDPNDARSVAIAALRAPKLAQVRAEDEISVLRLLAKRHGDLGRARNRTACRLHAIVAELVAGGIDKELVATQVRALIDGLEATTATQQARLEIAAELTDDLARLDTQLKASKRRLADAVTASGSSLTDIFGIGPVLAGMIIGYTGDPTRFPSADSYANYNGTAPIDRSSGDHRIRRLSRRGNRQLNHAIHMAAVTQIRFAHSPGRGYYDSKLAEGKTKKKALRALKRRLSNVIYRQLIADARARR

SEQ ID NO: 132596 - protein, 380 aa, unidentified
MVMPQSHRLQEESVVRKNNINWVGMDVHADMIQVAVYRGEESFPSEEYTSSTDAKAKARLLKKLREMSGEVRCVYEAGPCGYDMQRYLSGNGISCEVTAPSLIPRKVGDRVKTDRRDARNLGRLYRSGELTMIYIPDEEQESVRDLIRAREDMVEDVRRKRHLLGKFLLRHGYRYSGKQWTQAHEKWIKGIEFDSKYLKAVLEEYQVGLNQTMEQLKRLTQAIEEIAVTPQYQKPAAALMTLRGVQTLTAMTILSEMGDMRRFGKAGEFMAALGLTPSEYSSGSRICRGGITKTGNVHVRRVLVEAAWHYRHRPIAGYTIKARRKGQPLEVVSIAQKADIRLNRKYRRMVDRGKRSTTAVVATARELAGFVWAIAQNVKA

SEQ ID NO: 132597 - protein, 468 aa, unidentified
MKRKSRGAKWQKVSPFDGELKLIEADAAAIDVGSRSHWVAVNPQRDPDPVREFGAFTMDLMRLADWLAQCEVKAVVMEATGVYWVGLYDLLESRGFKVEVVDAHTVRHLPGRSKSDVKDCQWLRRLYSYGLLRGSFRPPEQIRQLRNYLRSCTKIVEAAAQQQLRMQKALTLMNIQLHHVISDISGLTGLSIVRAIVGGERDPKQLAKLRDPRIRASKETVEKSLQGHWQEELLFDLKMALASYDHFQGQIAAYQEQMRRALQEVPSKVDVLEKPLPAARPKVFHKRPGLSREDQLDLRVELYRISGVDLTRIDGIGLQTAQTVFFEIGTDVNPWPNEEAFSSWLGLSPNHRISGGKVLKRGSRKVVNPLSIALRLAARTLRNSQSALGANFRRLIAKIGMPKAITAMARKLAVLIYRMLKYGTQYVDKGMEHYEAKYRATKLQYLRSQAAKLGMSLVANAPALTAAR

SEQ ID NO: 132598 - protein, 418 aa, unidentified
MTTQTFKHHAGIDWASDHYDLCVVDESGTAVGKKRVEHSGDGIGECIEWMLQMAGGDASSIAIAIEVPHGAMVESLIENNLAVFALNPKQMDRFRDRHTVAGAKDDDLDAFVMAESLRTDQRCFHRVELDEPAVLRLRELSRMADDLQTDSNRLANQLWEQLRRYYPQMLKLSSAANEDWLWDLLESAPLPGTVGKLKLAKVKAILRAHRIRRITAEEVLEQLRQPALRLAPGAAEAASEHVLMLLPRLRLLQQQRKATAKRIGDILEELRAAPPECEGREHRDAEILLSLPGIGPVIAATMLAEASQPLRDRDYQALRNYAGAAPVTRRSGKKKVIVMRYACNERLRNALYHWARTSMQNDARAKQHYAEMRARGHSHGRALRGLSDRNLAMLMSMLKSGTLYDPTRRGSAALAQAS

SEQ ID NO: 132599 - protein, 343 aa, unidentified
MDYFAGLDVSVKETSVCIVDDAGKIVREARVASEPEALLQVLTNAVYRFKRVGLEAGPLSQWLLSALAEAGLPVICVETRHMRAVLKAQINKTDRNDARGIAQMMRAGLYRPVHVKTLRSQKLRMLLTHRKLLQSKAIAIENDLRASLRNFGLKVGVVGTVKFEARIRELVENLPDVAVLVEPLLTVRRVLREQITVLHRRLLAIVRDDDVCRRLMTVPGVGPVVALTFRVTVDVPARFRNSKAVGAVFGLTPSKYQSGESDRTGGISRCGDEMMRAMLYEAAQILLMRSAKWSWLKAWAMKIARHRGLKKAIVALARRLAVIMHRIWVDGTEFRWTRQVAVA

SEQ ID NO: 132600 - protein, 400 aa, unidentified
MSGLKGNVNSFVGIDISKDKFDACGITGDEANLFQFSATMDRKGFEKLKGHLGTVSVSSVLIGMESTASYHVNLFSYLVSEGYRVILINPLLISNYVKMQLRKTKTDKKDAVIIARFLLANGDTLIQRATPSLISDLRDLSRQRESLVDEMTSLKIEIKQILNITFPELEHMVGIFTKSIIKLLQQYPSAFALRDADLNQLSQMLIADSYGHKREAFAKKLIKAAHSSIGTNSTAKEMILKQKIALLLHLEDALQEITGMLIEMARKLMEEDINIMTSIKGIGDKTAANFLVEMGGDINQFERSGKIIAMAGLDPAVYQSGKHEGKGRITKRGNRHLRRVIWMMTTGVIQYSDAFKVYYLKRRKGGLPYKKAVLATAHKLIRVIYAMLTQRITFCPQGNS

SEQ ID NO: 132601 - protein, 364 aa, unidentified
MKNCITWVGMDDSANKIKVAVFLGNANIPHEEFGVDNDPSGHGRLVKKLKSLPGEVRCVYEAGVNGYHLQRVLSRNKISCDVAAPSLTPRRSGKRVKTDPLDAKALAGLYRAGELTSILIPETRQETVRDLVRAREDAMEDQQRARHRLNRFLLRRGMKYRAGKAWTGAHLKWMKAIHFEEAQAQAVLDEYRLALDEQTERKKRLEELVEEAAKAPEYRKLVGYLMALRGVRVLTAMTIIAEMIDLKRFPDARKLMAAFGVVASEHSSGEQERRGGITKTGNVHGRRVVIESSWHYRHPPVVGKALRKRRAGLPQEVLEIARKADRRLHKKYWHLVNRGKRTQTAVVAVARELVGFIWAIGQVA

SEQ ID NO: 132602 - protein, 347 aa, unidentified
MNITRIGLDTAKSIFQVHGVDETGKAIMKRKLQRCEMLPFFERLEPCTIYLEACGAGHYWARVLIGLGHDVKLIAPEAVKPFVKKGKKNDPADAAALCEAGGRPNIKFVPVKTVEQQAILAVHSVRALLVKQQTMLSNAMRGLAAEFGLIVPKGIDKLVELMAFVDADTSVPKQARQAGKELLDQCEAVGERIETLEAEIVAHARQDKAARRLTTIPGVGPITASLIAATVADFGLFKRARDFAAWLGLVPRQHSTGGKTRLGKITKTGNREIRKCLVLGAQSMTFRAPQWKSAAGVWTDSLLQRRPFRLVTVALANKIARIAWALMTRDEVYHAKGRVVAAAEVVA

SEQ ID NO: 132603 - protein, 356 aa, unidentified
MPIPIKRHKGMKKIFIGIDFSKEKFDATVIKAEGVEECAERQHEVFDNKVSGFRRLLRWVKSVADEPDTGLWLFCGENTGGYSRALCNYLYGSGYDMWLENALSIKRSSALQRSKSDKADAGIIAEYAMRNYDQMRLYKPLEKNLERLREVFLYRHNLVKLKASMTVHKGEKKLTQEKSDISRFMAMSSKHLISEFNKKIAECDMRIEKIIREDEDLRRNFEIITSVPGVGTQNAVCLMVYTDNFSRFDFNSRKIACYYGVAPFGRQSGTSVNTPPHVSPFANKLIKALLTQAALASVNFCPQMAIYYHRLVEAGKKKPVAVNNVKNKLLHIITAMVRKGEKYKPDHDYHAALKAA

SEQ ID NO: 132604 - protein, 313 aa, unidentified
MGEEQWVGIDVCQKYLDVYVRPLDKLFQVTNEQKGISQLIQSLREINPELIVIEATGGMERKVALELTQSGFAVAVINPRQARDFAKATGKLAKTDAIDARILAHFADAIRPPVRAISDESSHELRDLVQRRRQLSDMITAEKNRLRGKSQLVQSQIKEHIEWLQEKLQEVESQIKEAISVNENWKEKLKLLTSVPGVGQVVATTLVASLPELGQLSHKSISYLVGVAPLNKDSGKFQGKRRVWGGRARVRSVLYMATLVAVRFNPVIKAFYQRLLDKGKLKKVALTACMHKLLIFLNAMLRNNQVWHPQTVE

SEQ ID NO: 132605 - protein, 391 aa, unidentified
MVYVGIDVAKEKHDCCVMGADGVIIVSPFRIKNNIAGFDLLLQTITTAEKDLSKIKVGLEATGHYGYNIIGFLLNSGLQTVVFNPLHTSLFRKSMSLRKTKTDKVDCKIIAKMLLSNTDLKPYSMSLYHNEELKSLSRYRFNKIQERSKLKTSVTRLINILFPELEDLVTNVHMNSVYALLSEYPGASFVSEIHITKLTNILLTASHGLYRKTKAMEIKEAARRSIGTAMPAKSLELKHTITLIQHLNKEIDEVESCIKDIMNKIDSPMTTIPGISFRMASMIIAEIGDFNKFDSSDKILAFAGFSPSTYQSGKLDGAYAHMEKRGSPYLRYALYNAAKFVCKWEPVFGCYLEKKRAEGKHYNVAISHVVKKLVRVIYHLEKTGQNYTIAT

SEQ ID NO: 132606 - protein, 423 aa, unidentified
MKSLSTHSFTAFVGIDWADAKHDFCIQAAGSDRHEFGTMDHSPEAIAKWAYSLRDRFGGPIAICLELAKGPLVYALQRYEFLVLFPVHPSTLAQYRKTFVPSGAKDDPTDAEAALDILLRHPEKVRPIKLQSVAMRTLTTLVEERRCLVNDLTSITNRMTSTLKQYYPQVLDWFEHRDTLIFCDFLERWPTLKHVKRARRSTLESFFHEHNGRRAHLVEERIQGIRAATALTEDESVIGPCQMIVQVLVEQLRVLLQAIDRFDAEIDVVTKGLPDYDLFAALPGAGHIQAPRLLVAFGEDRDRYASAAELQRYSGVAPVVERSGNKCWVHWRIACPTFLRQTFVEWAGSTIPRSFWAEAYYRQQRSKGCSHRVAVRALAFKWIRIIYRCWKTRTPYDESVYLKALKNRGSPLLANLSESAKMT

SEQ ID NO: 132607 - protein, 370 aa, unidentified
MEQYSTDQIWVGLDVHQSSITAAVLYGDSHDPEVVRMRGDLNAVRKFFRRLSQDGTPRSCYEASGAGYVLQRALGRDGFHCEVIAPSLIPRKPGDRRKTDKLDAVRLAKLYRSGHLTPIAVPDEEQEAVRQLVRARLVVQQEITRLRHRIVRVLATHGYHFHGTKSNWTKKHRAWLGQLRYDLDGPLRTVIGMHLEHLEYLETQQRSMDAEIERFSQMPPWRRGADALRCFRGIKTLTAMTILTEIGDIRRYPTPSGLMAYTGLIPSERSSGNVERRGPITRAGNSFLRRVLVESAWHYRHRAGADLILKRRRQGQNPEVVAIAVKAQHRLSSKFWKLSQRKHTNKAVVAVARELTGFIWAALMAVEEEV

SEQ ID NO: 132608 - protein, 311 aa, unidentified
MYVGIDVAKDTMFVAILPTGETWEERITEDGLKRLVAKLRPITPQLVVMEATGGYEAPIFEVLWKHNIPVAVVNPRLVRSFAKALGRLAKTDKIDATVIARFGEAVKPKPKVRNDQQEKILGDLVARRRQILRMIVAEGNRKKRAVGEVQKLIEKHIKWLNKALEEIEKKLEAYISKTVEWRERNEILQSVPGIGKIVAYSLMAELPELGKLNRKQIAALVGVAPLNRDSGNMKGKRSCWGGRASIRTALYMATVVAMRFNKTIKAFYERLCQNGKHKKVAITACIRKLLCVLNAMMKNHIRWGEFKPAKT

SEQ ID NO: 132609 - protein, 500 aa, unidentified
MFAQVSPDRILAVAIDFALDQHVVLFCNGQGEQVLKPFPVHNNTAGFLFLKERILTTCRRLQIDPSHVVLAGEDDPPYALNFLWALNQEWLVLRVNARIAKEHRENLKASTDLLDLLGIAKALLSRQAHRVFPPNLAANDALQSLKTLGRDRDALVKNATRLKNRIHSHVKILFPGFLEAHKDNPVKAFGKPSLALMAKDDFCATTYARKKAAPLARCLKSLRLRLSQEKAVELIKRASEVLAPPPHRIESEQLALGSLLVAYQALEEAAYQLELQQSRILATHSAAMLTTLPGVGIITVSAMAGELGQPEELGSRAQMASYAGIVPQVEQSGGPNSATQTKPTGHRCNHRLKNHLVRAAMNIGTLFGPTEIRQDYRALRDQGRHANFIHARRLLGQFKALTSSGSCWLPPSLREGVVDQGEAAKARYRNELHEYFSYLWPKLVAKWAVFKLEGIFEDPQSPLGQWRDMIQNIYRISLPMDGPPILKDEEESDVSVGTSN

SEQ ID NO: 132610 - protein, 433 aa, unidentified
MLKLNYMSTLFVGIDVSSKTNAVYAMDFEENKYISSSFGNNQPGADKLVNMIAECMHKHKNLNTILIVLESTSVYSVHISNFLSASEVLMPYRPYVFCVNPKAASNYRKSYIGMEKTDPTDAYLIADFGRVGRTKKLEPWRGGQFISLKRLTRHRMHLSECITREKTYMVSNLYLKFSELQLLEGDDKPFGSLYGATSSAVLTEFLSPQEIIDMPEEELLTFLAGKSRNRISDLSKTSELLRKAARDSYRLDKCMYEPLSISLASSFNCIHAYQKEIKLIEQAIEKCINGMNPNALLILQSIPGIGPIWASGILSEIGDITVFHSSDALAKYAGLYWPKGDSGDFTSEDNKMSKAGNPYLRCYLGEAANSVRKHIPEYADFYARKYAEVTKHQHKRALALTSRKLVRLVFGLLVKNQLYTGEKLDTEYNIESN

SEQ ID NO: 132611 - protein, 419 aa, unidentified
MVHVHGAQVQQLVAQTRGVPPERLVAVPVDVGKAAAMALVCDFTGEVLAGRFEFPISRAGVAELVGRVQAVRAARPVDLVRVGIEAAGHYHRPLTAAGVLPGDWQLVELNPAQVTAQRRSNGQRGVKTDTVDLAAICDLLLAGRGIPLGRTDAVLVELAGLVAHRARRVQVRSALKNQLLGQVDRCFPGLAGCLADLLGAKVGRLLVAHFPDPARLARLGPARFRAFAARRGVIVAGKLAERLVAAARVALPTDQAAVARQVLAEDLALLAELDRQIGVVDQRLAALLPATPFAVLGSVPGWATLRVAAYAAAVGDLARWPSARQVYRAAGLTPTVYASAGRRRDGGISREGSVALRRALLDLGVGLWHGDPPSKTYAASLRARGKPGGVIATALANRANRIAYALVRDQAAYDPDRWR

SEQ ID NO: 132612 - protein, 402 aa, unidentified
MNAVGIDVSKGKSMVAIMRPFGEVVASPFEVNHTDSELSELANTLKSLNGETRVIMECTGNYFYPIAYDLHEAGLFVSAVHAKLIHDYGNNTIRRVKTDKADSIKIANYGLSNWMDLPRYWPEEDIRRMLKAYSRQYTKYNKLKTMLKNNFIALTDQTFPGVNELFKSPPRKSDGHEKWMDFAFKFWHCECVCGLREKEFIERYRKWCKRAGYNFSQYKAENIYVSALGHVCIVPMNDCTKQLVTLSINQINAVSESLAIVAREMKRLAELLPEYSVVSQFYGVGDILGPQIMAEVGEVARFRSKGSLVCFAGLEPPEYQSGKFESENRHISKTGSPHLRKALFQVMDCILKKSPQDDPIYQFLDRKRAEGKHYYSYMTAGCAKFLRMYYARVNEYIDKMKD

SEQ ID NO: 132613 - protein, 351 aa, unidentified
MDRYIGLDVHAASTTFAVVSPSGKRLGTHVVETNGLAVVEQLKRIAGQRHVCLEEGTQSTWMYEILSPHAEEVVVTGVSESRGPKSDERDAYGLAEQLRTGAIARRVFKETGAYTKLRELARTHTMIVQDVVRVQNRIKALYRSRGVAVAGQTVYSVHGRQEWLPKLPEASRCAAATLYAQYDAVEEVRRRAEKDLVQEAHRHPISRVLETCPGLGPIRVAQLTPIVVSPARFRTKRQFWSYCGLGIVMRSTSDWVRTKNGGWARADVQKTRGLNLHHNHVLKHVFKGAATTVIMQLKTEPLHQNYQRMLAAGTKPNLAKLTLARKLAAIALSMWKSGEEYDPTKHRKQDS

SEQ ID NO: 132614 - protein, 415 aa, unidentified
MKEQQLAACIGLDWADKEHSVHLQAADGKLEHFTLEQKPDVLHEWVAQLRQRFKGEKVAIAIEQRKGAVIHALMMHDFLVLYPVNPKALARYREAFRTSGAKDDPADSELLLDLVRKHRDKLRAWVPDTVEARKLQLFCEQRRKMVNHRVALTNRITSFLKQYFPQALDWVGDVASIQCCDFLTNWPDLSATQRVRKDTLRKFYQQHNCRKASVIDDRIAQISNAVALTDDLAIIEPLSLSVQTYAIQLLSLIRAIQQFDSRIAHLFAHHADHDLFDSFPGAGGVCAPRLAVAFGTDRSRWDSAVEMQSHSGIAPVTERSGKSLWIHHRLACPKFVKQTFHEFADQSIRFSKWARAYYDQMRARGKDHHAALRALAYKWIRILFRCWKERKPYNEEQYLQALRRHGSLLLIEKIA

SEQ ID NO: 132615 - protein, 320 aa, unidentified
MAKRTTICAGIDTGKRKLDVALDCSSEQLQVENTAEGYKTLLEWLGRHKVKRVGIEASGGYEQAVVAELRRKRLVVVVFQPAQVRAYAKYRGQRAKNDRIDAALIAACTAAVNEIHPAPDARFSALAVHLTLIEQIGEDIARCKNRLESCRDVRIQKLWKEDITRLVKRKRAEFKALVEAIREHRDLAERLDLIYSVGGAGLPTAVAILVRMPEIGQLSREQAAALAGLAPYDDDSGEHTGARHIEGGRKRLRRALYAAALAGSFRWNPQLMALYKRLIAAGKGRKCALVACARKLLIFINAVVTRGTPWQADAPAAQAA

SEQ ID NO: 132616 - protein, 366 aa, unidentified
MRKVMAGMDLHGNNVMVGIVDDQGARLQHRRLACELPEIIEFLAPYKAELESIAVESTFNWYWLVDGLRAAGFPVVLANPAKIDQYSGIKHADDKNDAYFLAELQRLKILPTGYVYDPELRPVRDLLRRRMSLMRQRTTLFLSAKSLHQRTTGRGLELRRLKAMEPEEAAALYTHPANQLIAQIQKEHIDSLDQSICQIEKAVLKVALQQPYYQRLQTMPGVGIILGLTISMEVGNIDRFAGPGQFASYCRTVDAKRISNGKTKGDNNQKCGNKYLAWAFVEAAHGARRFDATCRRWYDRKAGKKCTTVATKALACKLAKAAWYVMAKGTEYQAGKIFPGLTEPKAEEISGEQASASKGVGPNPED

SEQ ID NO: 132617 - protein, 345 aa, unidentified
MEHFAGLDVSVKETSVCIVDDTGKIVREVKVASEPDALLAVLTNPAYRFKRIGLEAGPLSQWLFSALAEAGLPAICVETRHMRAALKAQINKTDRNDARGIAQMMRAGLYRPVHVKTLRSQKLRMLLTHRKLLQSKAIAIENDLRATLRNFGLKVGGVGTVKFEARIKELVEKAPDLMMLVEPLLVVRRALREQIGILHRRLLAIVRDDDVCRRLMTVPGVGPVVALTYRATVDVPVRFRNSKAVGAVFGLTPSKYQSGEINRTGAISKCGDEMMRAMLYEAAHIMLVRSTKWSWLKAWAMKIARHRGMKKAIVALARRLAVIMHRIWVDGTEFRWTREQAAAAA

SEQ ID NO: 132618 - protein, 412 aa, unidentified
MDMIFKKACGLDVHQKTIAACVQTEDSDKTREVRSYGTTTSDLESLKAWLLEKQVTHVAMESTGVYWKPVYNILEDSFHILLANARHIKHVPGRKTDIKDCEWICKLLRAGLLEGSFIPPKPIRELRDLVRYRSKLKQTITQEKNRICKVLEDGNVKLSSVLSDIFGSCGSFAIQALLDNQCSPEEMAPLLKKKGKNIKATESEIREALRNTITDHHRFMIQLHLDHIAALEEQLHQLMKRIQKQLEPYQDIQKLLTTIPGVGEEGAATLIAEIGADMDQFPDENHLSSWAGMSPGNNESAGKTKSGKTTKGSQHLRCTLVECSWAATRTKETYLASKYHSLAGRRGKKRALIAVGHKILIAAYFIIKYKAPYHELGQDWLDKTRKKSLIGVYLKKLTDLGCIVQPIQPSMA

SEQ ID NO: 132619 - protein, 316 aa, unidentified
MPTAEAFIGIDVARDKLDLAVRPAGQHWQVANTAAGITALVPQLHALAPTLIVLEATGGLELPLLAELGSAGLPAVAVNPRQVRDFAKAVGKLAKTDAIDAQVLAHFADAVRPVARPLPDAATQALSALVTRRRQLVEMLTAEQNRLKTATPAIHADIQEHIAWLRKRLKGVDKELSQAVRTSSLWREQEGLLRSVPGIGPVVSVTLLADLPELGTLGRKQISALVGLAPLNRDSGTMRGKRTIWGGRATVRAALYMGALVGSRCNPVLRGLYTRLVAAGKTRKLALTACMRKLLIILNAMLKHSTTWATPTPATP

SEQ ID NO: 132620 - protein, 430 aa, unidentified
MWRGDEAAVLAESEDNEEIIARVAALDIGKAELVCCVRLPAPRERRKRLQEVSTHSTMTAPLTELANHLVELGVQRVVMEATSDYWKPVFYLFEAHGLDPWLVNARDVKHLPGRPKTDVIDAVWLCKLAERQMLRPSFVPPRPIRRLRDLTRYRVDLVTARTAEKNRVEKLLEDACIKLSVVASDIFGVSGRAMMAALIAGERDPKVLAQLARKRMRTKIAQLEEAFNGHFGDHHRFLLARMLGRIDSIDADIAAVDEQIEAHLAPFAQAAARLDEIPGIGPTAAAAIIAEIGLDMSRFPTAGHLCSWAKFSPGINSSAGNTKGNGSTGHGNRYLARALGEAAVVAGRTDTFLGERYRRIAKRRAKKRAMVAVGRSILVIVWHLLANDDARFTDLGPDHFTKHLNPDRQKRNHIHQLEALGYTVTLTPAA

SEQ ID NO: 132621 - protein, 406 aa, unidentified
MTHQPSSPKRFVGLDVHKHYLIAFAVDANKNEVMPPRRVPLTHLDDWVRKTLTLTDAVVLEMTTNTFQLYDDLLPHVQSVTVVHPPHVALITRAQVMTDKIAARTLARLHAAGLLPPVWVPPDEVRDHRALVAQRTKMMRLATQARNRLHAVLHRHHFLPPEGEAFTPDKHAWWLALPISALERARVQSDLDTLVFAWTQVEHLEEAMLSLAAQDDRAVLLLQLPGVGLIIALTLLAAIGDITRFPTASHLVGYAGLGGRVHDSGQTHRSGRITKAGRRDIRAAMVEAAHTACRVHPHWQAELARLEPRLGKNKAIVAIARKLLVAAWHVLTNGEADRYATPERTARKLLQHAYRLGAENRQGQSAGEYVRAQLDRFGVGVELKAVPWGKKRVVPLPPSRLKVGAD

SEQ ID NO: 132622 - protein, 340 aa, unidentified
MSLYGGIDLHANNSVVVLLNEHDEVIYQKRLPNDLTTILGQLAPYRMELKGLVVESTYNWYWLVDGLMEADYRVHLANPAAMQQYSGLKYTDDHSDARWLAHLLRLGVVPEGYIYPKAERAVRDLLRKRTHLVRQHTANVLSVQNILARNTGARFSGKRIQELTKQDLTTLLADETQVLAVTSSLVVLDCLRQQIKTLEQTVHKRLHHTPSYEQLLTVQGIGTILAQTITLETGAISRFPTVGNYASYCRCVDSTKISHGKRKGTGNVKNGNPYLAWAYMEAAQFALRFQPEAQRFYQRKLAKSRNNMILARKAVAHKLARACYYILRDLVPFEATKAFG

SEQ ID NO: 132623 - protein, 338 aa, unidentified
MGVTTIGLDLAKNVFQVHGIDGDGKVLVRRQLRRSEVLKFFQGLPACLVGMEACGTAHHWAREIAALGHTVKLMPPAYVKPYVKRGKTDAADAEAICEAVTRPTMRFVAVKTIDQQAALMLHKTRDLLVRQRTMLINALRGHLAEFGIIAAKGPSGTKAAIEALHEAQDRLPELARRALHGLVDQLRLLGEEIDRLEARILEWHRASDVSRRLATIPGIGPITASAIAAAVPDGSLFRSGRQFAAWLGLTPKAHSSGGKGRQVGISKQGDGYLRRLLVVGATAVMRLARQDNAARCWAAKLLERKPAKLAAVALANKTARIAWAVLTRGGTYTVPAAA

SEQ ID NO: 132624 - protein, 397 aa, unidentified
MIAVGIDVSKSKSTVAILNGDGSIRAKPFDVHHVADELQALVDYIKRTSEPPTILMEPTSHYHYPLLKAFTEAELPVCLINPYQMKKYGDTELRKAKTDKRDSLRIAQYALEKSYSLIPYTPQDQKYEDLRFLSRQYSQRISTITVAKVQLLSLLDETMPGITTILPLKSRDPDNCVLLRFIKRFKSFDVIRKMGKTRFLDSYQVLVKKTKDRFAGSKGLAIYELVLNSVTTRGENPLSAMTQDQCVDLVSTSQKAADEINLQMRIIAETMPEYKVLRSMTGVGDRLGPIILGEIGDIRRFHSGKALNAYAGNDAPPYQSGQFESRNRHISKRGNPALRKACFEVMQALKLTKPQDDPVYLFLLKKEQEGKPYNVAKMAAVNKFLRIYYARAMELYK

SEQ ID NO: 132625 - protein, 344 aa, unidentified
MDHFAGLDVSVKETSICIVDDTGRIVREVKVASEPEALLAVLKNLAYHFKQIGLEAGPLSQWLYSALAEAGLPVICVETRHMRAVLKAQINKTDRNDARGIAQMMRVGLYRPVHVKTLRSQKLRMLLTHRQLLQSKAIAIENDLRGTLRNFGLKVGMVGKAKFEARIKELVENQPDLAVLVEPILIVRRVLREQIAILHRRLLAIVRDDEVCRRLMTTPGVGPVVSLTYRATVDVPARFRKSKSVGAVFGLTCAKYQSGEVDWSGRISRCGDEMMRAMLYEAAQAMMRSKKWSWLKAWAMQIARRRGMKKAIVALARRLAVIMHRIWVDGTEFRWGREQASATA

SEQ ID NO: 132626 - protein, 547 aa, unidentified
MEINMSDSTLKPSIPEAAKDSISSTLSKDKAPIITVFEASYNSAVGIDVHLNKMALAYQRAVPESQDLIQDALTTKGTIEELNRAIDWIATKDPEVIIMESTGVYWVPLYLLLEERGFADKTFVLNAYNAKTALGKKSDASDAKHLAQMGRLGAFVGSFIPCKYIRDTRIYSRHINALKKDAVTNKNRLHKLLNMGGIKASTVFSDIRGVAARTILDAVMRGDDAESLKCVIADNCKRLKAQPDEISQAISHLDITAISPLYFDISTKLDQIESEIERYEDLLYKRLKPYYDSIELLTSIPGISQKTACTIISELGDDWSAFTNSKAFCSWVGLAPGNNESAGKRKKAGITKGNKYIRKVLIEAAQSVYRMKSGHLKSGFDRFYSRLHSYHKAVVAIAHKMLRIAYALMTKRELYKDPTLDCVATDDVSAELKLFEEPNMVLNLDDSQDMQSLAVSESADTKSQSDIIIDNSSNASDGDSLEVSSKQVTTAGNTSLPNEQKLSKVVAKPISALKQSVDEPITPKQGSLFSFALGLDQLFSAEPLGQT

SEQ ID NO: 132627 - protein, 366 aa, unidentified
MKEETVTSNGSSQASVVNKGNRVLKLGLDTHYRQVTVAMQEDGGRIKAAGKMRHADFLNWVQKKLEESWEIYSCYEAGASGYWLHRQLEQMGVKNLVVVPKAMGRGGKKQKTDKRDSGELCDSLDRYLRGQDKALSRVAVPTEDQEQKRALIRYHRQIMADRGRCEARGKGLLCAQGIEVHGRWWQGDGWIEVQHNPRLKDWMKEQLIGWRNKILSTDEEQSGLRERIAALAPAILPKGVGAYSAAVLHYEMRGFERFKNRRQVGSMTGLCPGIHLSDGRGKEGSINRCGNRIVRWTLVEMVWRLLKWQPQYPPVRRLAAGLVTGRRAKKRLVVQAARRLAIDLWRLSTGQTTPQKLGLIMHCTHA

SEQ ID NO: 132628 - protein, 397 aa, unidentified
MMRFAGIDIGAERHMVAVLDEQGEVLCRSSPFGEDASGYARLFELLGPSADCLVALEATGHYWRNLFVALIAKDYAVAVLNPLRTARFAEEELRRTKTDAIDALGIARFAQQKRPRAAQLPDSVTEELRELERLRERVVEDFADRLRQLHRAVDLGFPEFTRYVRTLESQLAATILSRYPTAASFRGVSVKKLARIVYDGSHKIGEELARNLIEAAEKSVGAHHSEPYRRRIKYLCEDLDVLRRRLKDLARDVERKLDDHEVGKLLMTIEGLGPLTAACLIAELGDPARFDSPGAIASYVGVIPRIRQSGKKRFTKGPAIPLGNARLRKSLFMVVLQMVRRNPWLRQYYERLRAAGKPGKVAIIAAMRKLLTAVWSVATHRRPFVPIMPQLPAPKNA

SEQ ID NO: 132629 - protein, 344 aa, unidentified
MSSVPSQAVFVGLDYHSESVQVCVLARDGKVLANRSVKNDWRAVAAVVRERGGPQTIVQAAIESCCGAADLADELIAQAAWSVDLAHPGYVARLKQSPDKTDFSDARLLADLERVGYLPRVWLAPEEVRELRRLVRYRQSLTKERKRLKLQIGATLREARQKPRAELNSWTKEWVAWLENLAVLSPNARLITHCRLIRLAALVKEIRAVESLLARQTAKDPLVQKLLTLKGIGLVTAVTLRAEIGRFDRFRSGKQLARFCGLTPRNASSGERQADAGLIRAGNPELRTVLVEAAHRLMRYEERWLKFARRLSLRGKPVSLINAAVANRWLRWLFHRMQPGELAA

SEQ ID NO: 132630 - protein, 424 aa, unidentified
MKMKVKRLHYELLVGIDLGQWLHQACVVDANGEFLEERGFEHSVEGLGATRDWLLNLAGKNAERIAVAIEKPHGAVVETLLESGIAVFSINPKQVDRFRDRHSMSGAKDDRRDAFVLADALRTDGHRFQRLQLPPPEIVALRELLRTRDQLVKNHVALSSQIRDLLARCWPHLVALAPKDKALDAFFCELLQLFFDPHPTADLSRENIQKLLHQHHIRRLQPEQILEVLRKTPLRVAPGTTEATSAHMKLLLHQLLLVRQHRRDSDQYLERWFKQLQPTPDQPYTDAAILASLPGVGAVVLACVLSYAHDPVRLRNFDAFRSLGGIAPVTQKSGKQKPLILMRRARSLPLNNALHHWARIAVIRDPHFKDHYDRLRATGHSYARALRGVMDRILAIAVAMLRDQTLYDPARRVRGHDVRKKVSS

SEQ ID NO: 132631 - protein, 376 aa, unidentified
MREISTWVGLDVHQEEIVVAVLKGHDREVIEFRVGGDDRGIVKLIRRLKKLRGPGQVQCGYEAGPCGYTLQRRLEAEDIECVVVAPSLTPVKPGDRIKTDRRDARKLAEHLRAGLLTAVCSPDEAQEAARDLCRCREDAREDLMRARHRLSKMLLRRGLVFRAGSNWTQKHRRWLLGLVWESETERVVFEDYLLAIEHLEERLRGLVAALEQLAQEDRFREPVGWLRCFQGLDTINAMTVATELYDIPRFRSPRQLMAYLGLVPSEHSSGGSRRQGGITKSGNRHVRRALINAAWTYRHRARVSGVLRKRREGQPARIIALADRAQQRLSRRYLHLVLHRGKPSQKAVVAVARELAGFLWAALVLYPQLPSQEVTD

SEQ ID NO: 132632 - protein, 348 aa, unidentified
MNATTTYAVDTAKNVMQVHWVDPASGEIGRKKLTRSKFSEFFARRHSARVVMEACGGAHHWARVLTALGHQVELLPAGQVRAFVRSNKDDAADARAIWLAAQQSDIRRVPLKSCVQQAMLSLHRVRKHWVDVRTATINALRGLLYEFGVALPVGKDAGLKALAERRAAIDQTLPAPMVRLIDAQLLALQEIERNVRLFEAEIAAVHKSDQTARRLRQVPGIGLLGATALSAVLGDGAAWRNGREFSCCLGLTPRHSGTGGQVRMGGLSKRGDPYVRNLLINGSRSVLSRSSPPPWAARMLERRPFNVVVVALAHKLARTAWALVAHGRSYDWQWQSSPPEDMTPQLAM

SEQ ID NO: 132633 - protein, 458 aa, unidentified
MRILGVDLAVTAQHRAILADERGRFISPLLRFRTCQADLERVYALARQGMASEEPLAVVLEATDIVWYPVAIFFHQRGATVYLVNPRMAADLARFYRRYAKSDRLSAQTLARLPVVNPDRLYPWTPLRPGYLALQRGCKELDRLTDQASAIRNRLQSTDHLGWPDLHRRVFADPFSPAARWFRDHFYDPRRVVAAGVSGLRQAWQAAEVYDGNEDWIEPLLTLAQEVLSLYGEQGGYLDYSALADEVRREQRRLADLEADAHFVRLQVTRPRYRQLHPSRNLETIKGVGQDGAAVYVAFVGDPDRFATQRAFRGWSGMIPSSDQSGEQEGKGLRITQAGPDLVKKYAFLDAETARHWDPQIAAIYYDQMVNKGNHHAQAVCACATHLLDRIRVVLTEDRPYELRDVDGTPVTPQQARAIIAERYTVPEEVRRRNTRRARRERRERQEELRRGSRSVRG

SEQ ID NO: 132634 - protein, 370 aa, unidentified
MAQSTPLFVGLDVHKDSIAVAHAAGGSAEPPVFVGAIGPRQADLDQLLRRLQGKTRALTFAYEAGPCGYGLYRYLTGKGMPCQVVAPSLIPKKPGDRVKTDRRDAVELARLLRSGDLTAVYVPSVEDEAVRDLCRARDAARVTGTDAKLRLKAFLLRLGRHYIGRANWNDAHRRYLAKVVCPTPAQQIVFQESGRAVDEQVDRLRRLEAELLERAPAWRMYPVVEALQALRGVQFLVAITVAAELGDLTRFDSPRQLAAFVGLIPSEYSSGGSRHQGGITKAGNGRARRALIEAAWAYRHPAKVSLHIPQRIDRLPKPLQDLGWKAQVRLCKRFRRLVARGKHPNVAVTAVARELLAFMWAIAKEVPLAA

SEQ ID NO: 132635 - protein, 400 aa, unidentified
MSSMPQPTPPEQDATATATDEVILGVDTHKDVHVAAVITALGRLVASRSFPTTAAGYRRLLEWAGSFGTLRRAGVECTGSYGAALARHLQAAGIEVVEVNQPDKAVRRRRGKSDPIDAQAAAQAVLSGRATATAKTGDGPVEMLRMFKLAKGSAIKSRTQAINQLKAVLVAADPALREALSGLSTPILIRRCTQLPLQAGLPTDPASAAAYTLRLLAGRIVALTAEIHDLEQVITRAINQQAPKLLARRGVGPDCAAALLIAAGDNPDRLGSEASYAALCGASPVEASSGKTQRLRLNRGGDRQANAALYRIALSRLRWDQRTRDYLARRISQGKTRREAIRCLKRYIARELYHTLRADLADLNLSAASAQQAVTINCGAGPIGITPTRSTTSRRRRRRT

SEQ ID NO: 132636 - protein, 424 aa, unidentified
MKVTYQTCCGVDVHKSFLVATIVKTTGGIEPSYQKKRFSTFNNSILEFKQWLINNNCHDVCMESTGKYWIPVFNLLEDQINVTIANPKWVKAVKGNKDDTKDSKWIGDLFRLGLVKGSYIPCKKVRILREYTRYRYKLVSCRSSEKNRYQNALTVCNVALDSVVSDIFGKSSTSIIDYLLEQSGTSINHEEIASKLLRRLKSKEDAVIESVEGYQMTDAQKYRMRLVRAHMDYITAEINDVDKMIENMISSNPDFENAIQFLCTIPGVKRDSAITIISEIGTDMSQFSSSKRLCCWAGLTPGSNESAGKKKSVRITRAGVYLKPALVQCAHAAVKSDKSPYYKKKYESLVKRRGKKRSIIAIARMILTAIYQMLSTGEQWNPSDLYKIDMPVALVEKQKAKAIKQAKKLLQREGLLPPDEPLFL

SEQ ID NO: 132637 - protein, 319 aa, unidentified
MATLGIDVGKSKLHAVMLHEDLAKAKIVANSASGLEQLEEWLRSLGLERVHVCLEATGGWSEDIGAVLHRAGYVVSIVNPSRIKAFAQSEMLRTKTDRVDAAMIARFCQLHAPEPWSPPTPEAAALQGLVRRYENLVHMQAEEQNRLQAPLVTTTVKRSIRATLNHLGRELARVDREIKQVFDRNPSLRSQRDLLTSIPGIGDTTAARILGEMPRIAEFRSVKAVAAFAGLSPRHYLSGSIRWPSRLAKAGNANLRRSLYFPAITAIRFNPVIKRFADRLRARGKPKMSIIAAAMRKLLALAYGVLKSGRAFDPVDMTA

SEQ ID NO: 132638 - protein, 423 aa, unidentified
MLGVGIDWAEEFHVVALGRPGEGVTEVVRVEHRPQAVAALVERIAGLEADPAEVRVVIETRHGLLVEALVEAGYMVLPVNPELVSRRRGPARKKDDAEDARICCLLALDRHAGLRRLIPHGELAGELRSIARDDERACRDERRLLNRLRADLLVTFPAALAIAGEDLGATRILRLLERWPTAAALAAASREEIIEFGRAQRTGYLARFADQIAAALAEDHFTAPPHLVRAKVDTIRLTARQLLLIDAQRRAWEKRMGELLLGAHAGQQQAEDQPGQAFPGGEIYLSFPGLGRRLAARIAGEAGEHIGQFTTPNSLQCYAGRAPVTRRSGKRDLVVAHRLACNRYLADAVHKWAFASLRRSAWASDFYDAQRARGKSHHAALRALGNRWLEVLWHCLTHDVPYDEAVHAANRNRALAAVTSSAA

SEQ ID NO: 132639 - protein, 334 aa, unidentified
MENVALIGIDLGKHSFHIHCQDKSGKALLRKKFTRMKLMQFLATCPPAVVVMEACAGAHFMARRISEIGHEAKLISPQFVRPFVKSNKNDFVDAEAICEAASRPSMRFVQPRTETQQAMRALHRVRESLIRDKVKTTNQIHGFLLEFGISLPIGDAVIKRLSLVLAEHDLPEYLSRLLVKLHTHYLYLVEQITALESELNHSIKADDATQRIMTIPGVGPITASLLSSQLGDGKQFSCSRDFAASTGLVPRQYSTGGKSTLLGISKRGDKNLRRLLVQCARSFMMQLEHQQGRLAEWVRKQLSNRHSNIVACALANKLARIAWAITTNHNEYQA

SEQ ID NO: 132640 - protein, 339 aa, unidentified
MASRNTKTVFVGVDVSKDTLAVAWKGLKGAVTEFTVVNDSDGWGELLERVTSGRIQVARLVVEATGPYSAGIVASTASHTKAQVMRLRPADAKAFARLTARAKTDRVDARVLCSYAETMPFRATALPSEEALRVRKMSRHLSKVVARRAASRTEQKSARVEGLEDPISWAFEAEQEALGRIIDELEQRILTALEAIPQAAACTENWRGIKGVKNGVICQVLPEFISFPIGLTPKQVVAMIGLDPRPKQSGQRGAKASWPISKMGHSRIRRILWCAANTAVRHQPAIRVFYESLLARGKEKKVALIAVMRKLLVVLWRMYQTGERFNGRGFTSRFQPATT

SEQ ID NO: 132641 - protein, 370 aa, unidentified
MKEYSEAFVGFDTAKNKHAVAIADGGRDGEVRYFGEIDSSPTTVAKVLGKLSARYARLQICYEAGPTGYGLYRQVKALGHHCAVVAPSLIPRKPGDRVKTNRRDAVTLARLFRAGELTSVWVPDPVHEAVRDLVRARGAAAADLRKKRQQLLSLLLRHGRIFAGRNHWSLAHRRWLAGQRFEHPAQQIVFQDAVDAIEDAAARLRRLDQQLLTIVPSWSMAPVIAAYQAMRGVSFIVAATFVAEIGDVRRFDNPRQLMSFLGLVPSERSTGETVRRAGLTLAGNRRARRVLVEGAWTYRYPARVSETLRARLQGLPKTVRDIAWKAQVRLCARYRRLVAAGKKTPVVVAAIAREMAAFLWAISCQVEPLT

SEQ ID NO: 132642 - protein, 387 aa, unidentified
MPQPNDLSRSLVTLEQDSTLIAVIEMGQSSWLVAGIVPGIERQPLKKLAADQDGLLQLLHRWRKEAAQAGHPIKRIAVAYEAGRDGFWLARWLRAREIEAYVIHPSSVPVSREHRRAKTDRLDTELLKRALLGWLRGEPKHCSMAAIPTVEDEDARRPSRERESLVGECTRIVNRVKANLARLGIRGFRPRLAHAPKRLETLRTPEGTAVPANTLAELQRDMAHLRFVKQQIKEIETARAKRLEQASEGGRDAMVRLLARVVGIGIETADMLVQEVFSRKLRDRKAVARYAGLTGAPDESGQKRRERGLAKAGNARVRHAMIELAWGHLLHQKDSALAEWYQKRTVDARGGTRKTMIVALARKLLIALWRLVTTGEAPAGLLLRPAA

SEQ ID NO: 132643 - protein, 391 aa, unidentified
MIFVGIDVAKDKHDCFILNSEGTVLADVFTIANNRIGFETLLSRIQSCSQGESKIKVGLEATGHYSYNLLGFLLDSGLATYVINPLHTNLYRKSLSLRRTKTDRIDARTIAMMLMSDVDLKSYSNTAYHNEELKSLTRYRFDKVKERAKLKSSVARLVNILFPELEKLVSSLHIAVVYALLSNYPGASYIANANTEELAETLCTASKGRYTKSKTAKIQVAAGVSIGSKMPAKSMELKHTIALIRELDKEISEVESAIDKITSQMDSPIFTIPGIGRHMGAMILAEVGHFSNFASADKLLAYAGLSPSTYQSGQLQNCYAHMEKRGSRYLRYALFNAAKYVCLWCPTFSAYLEKKRSEGKHYNVAISHAAKKLVRLIFAMQRSGKAFLADY

SEQ ID NO: 132644 - protein, 407 aa, unidentified
MFCGIDWAEAHHDIAIVDPEGRLVACQQISDDAAGFAELVELLATHGDRPEAPIPVAIETSRGLLVACLRATGRPVFAINPLAVARYRERHSVAPKKSDRGDALVLANSLRTDLAAHRPLPADSELVRAIAVLARAQQDAVWDRTLAHNRLRSLLREFHPAIFAAVAGKRGGLLRPEARTILAAAPTPTAAARLTLAQLRSLLGRAGRRRGVDDEARRLRAVFRAGYLHQPPLVEEAMGRQALALLGQLEAACTSAEELAAATIAQFATHPDAELITSHPGLGPLTGARVLAEVGDDRFRFADARAVKAYAGAAPVTWASGKSHQVSHRRVKNQRLAAAGYSWAFSALTASPGARAHYERRRTAGDGHVAAQRNLFNRLLGCLYHCLQTRTRYNEQAAFPTQAATAA

SEQ ID NO: 132645 - protein, 337 aa, unidentified
MDYFAGLDISLDETHVCVLDREGVVVYESKTASTAEAIAGELAKAPSCRRIVFETGRMAPILFHGLSQLGLPVVCVESRQAYQALKSLATHKTDRNDARGLAHLARTGFFKPVHVKSLSAHALRSLIIARKKLVGQRVTLENQIRGLAVVFGIRLPRALTASFVNQALKASEGIAGLSAAMRGLIAARTAVMTAVAAIDADMRRMTRASGACRRLMTIPGVGQLTALAFVAAIDDPSRIRRSRDIGAYFGLVPRRYQSGEIDYVGSISKCGDRRVRTLLYEAANVMLTRYKGQLKLKDWAFAIARRSTMRKAKVALARRLAIIMHAMLRDGTEFASA

SEQ ID NO: 132646 - protein, 419 aa, unidentified
MGKIIERCAGIDIGKRFLLCCVLKGAAHEDPRGQTFRFDVTVPALIRLRDWLIAEKATHVVMESTGSYWIPVFNILEDHFVVVLANPEEVKNRKGHKTDRKDAAHLAELLRHDHIRSSYIPPKPVRDLRDITRRRLQLTQDATRERNRVQKLLEQVNVKIGNVLSDVFGVSGQSMLLALLNGEASPEQIAQLARGQARNKIPQLIEALEGHRMSDHEKLLIRSCLRHLACLQEEVEELDAEILRRMQAAPFQNAFLLMQTIPGVGQLAAASILAETGTDLTPFPTAEQMASWAGLCPGNRESAGIQKGAQTTHGNPYLRTALVQCAWAATRKQGSVFQSRFQQLSPRRGQKRAIVAVAHQMLIILYCMLKLSVPFRGAEDAPQQRRRQRRAHHHLRSLRRLGVSVQVLAMPDGLIGETG

SEQ ID NO: 132647 - protein, 317 aa, unidentified
MSRIFIGIDVSKDTLEVCVRPTGLRRRFANTATGIADLVAWALPQTPERILLESTGPYQKAAVGALLAEGLPAVVVNARQVRDFAKGLGQLAKTDAVDAAVIAHFGEVVPTTVRPLAAQDLRELRDLYDRRGQLVRMLAAEKNHRHAATGSSPKVLKNIDKHIAYLEVQIADLEDRMDRLVEASAAFKAQNELLQSITGIGPQVSRTLIAYLPELGHRTRQSIAALVGLAPFNDDSGYHVGPRHIRGGRSKVRIGLYQAAIAAIRHCPRMKAFYASLKARGKASKVAIVAVARKILVLANALLRDQVPYSEPANSVC

SEQ ID NO: 132648 - protein, 363 aa, unidentified
MFESTTVTVGLDVHARSVRLAAVRADELLEERTLPYDEEAVERVLRRWPAVRCCYEAGPTGFGLYRYLVERGIDCLVVAPGLVPQRPGDRLKTDSRDARKLARLLAGGLLEAIHVPSRELEAARDLVRAREDARLDRMRDRHRLSKFCLRHGRTLPTSSWTIVRRRWLGEQRFEFPAQQQTFDSYVHTVDLVDARIEALERAIREAAEQGPWCQLVARLRCLRGIDTLTALALAAEIGDFNRFKSAEEFMAFVGLVPSERSSGEQRRQGSITKVGNSHVRRLLVESAWHARRHPKVGYELARRQRGQDAVVIERAWRCQQRLYQRWQRMAGRGKPQQKIVVACARELAGFVWAIATEQPLRTI

SEQ ID NO: 132649 - protein, 323 aa, unidentified
MFYLGVDVSKKKLDCMLLNGTNGKLKSKSLSNTKAGFEELIGWLAENKAPEAHVVMEPTGVYHEPAALALTDAGLTLSLVNPAQLRQFAQGLGVKNKTDKADSTVLARYGEAVKPEAWQPPSKSARHLKALLARRDAVADDLQREQNRQEAVEFAVSPEEVKQSINQSISFLRAELKRLEVTIEEHIDSDPGLRDKKDLLETIPGVGERVSTNLTALFAAKTFDSAEQLAGYLGLVPVHGESGTSVHKRPHMSKAGPAHLRKLLYMPALVARQWNPHIKAFSERLLAKGKAKMAVIGACMRKLAHLCFGVVHTGRPYDPNYAM

SEQ ID NO: 132650 - protein, 326 aa, unidentified
MAIIGVDISKQKFDCLWLRDVCSLKVKTKVFANRPAGFADLIDWCCAQTGETPEQLQVFLEATGVYHEPLALYLHDRGVQVFVLNPARVREYARSLGMQGKTDKQDSLVLARYGATQPVRPWMPERREVRELKALIARHEALQEDLQRELNRREKAVVSGNLSVLASIDNLVKALQQEAARVRQDIDDHIDRHDDLKRDRALLQSIGGIGEVLSRHLLALLHSRNFSSARQCTAFVGLVPRPWQSGQSVQGRTVLSKAGSPRIRAKLYMGAIVAKGSNPDVKALYDRLLARGKPRMSALGAAMRKLLQIAYGVLKTQQPYQPRQAL

SEQ ID NO: 132651 - protein, 344 aa, unidentified
MKKILKQAVGVDVAQKELVTTLGRLYDDLTIELYAYKVFRNNKTGIISLLKWVKSLVNDEVEFRFVMEATGVYHQKFAYFLEEKGFDLSIVLPNKISNYMRTLDIKTITDRTASQAISRFGLERKLNIWKRPNKIYKELQQLTRERDQIVDERTIIKNQLHAENVEAEPNKRSIKRMKARIRFLNSQEKEVKIDIEDIVNNEAILKQEIEDICTIPGVGYLTAITVLAETNGFELIRNKRQLTSYAGLDIREKISGTSVKGKPKISKKGNRNLRKAMHLPSLSSVKYNKDHKELYVRLVSKSGIKMKGLVAVQRKLLELIYVINKNKTTFKHNYEQEKRAATFN

SEQ ID NO: 132652 - protein, 349 aa, unidentified
MKKLSKVTKQMGETIGIDLGDKVSRYCIVDRDGDVMEEGSFRNQSSSIDTHFAGEPRRIALEAGAQSAWISRELKRLGHEVIVANPRELKWITSSDTKNDPADARKLALLARADVRLLAPVEHRTAEQQAELAVIRARDAILRARTLLINSARSLAKGFGLRLPKSITNTFGGRAIEMLPEFLRTTLAGLVEQIDALSQAITGYDQQIAGLAGKHPELARMESIPGVGRLTAMTFVLTLGRAERFAHSRDVAGFLGLRPKQRQSGARDPQLGISKSGDPYMRKLLVQCAHHILGHYGKDSALRQWGLARSEGGKKATLRAIVAVARKLSVLLHRLWVSGEFYKPFPKMV

SEQ ID NO: 132653 - protein, 391 aa, unidentified
MSMYFIGIDISKYKHDCCIISAADQKVVSKVTIKNNKAGFNELLTIIHSLANPADIRIGFESTAHYALNLELFLENSLLTFMEVNPVLISEYKKSKTLRRTKTDSVDCESIARWLMTVEYKPHSKGFYHAYSLKSLTRLRDKLIRQRSFYLVKITNVLDHTFPEFKPFFNERLSKTALYLLENYGSAEKMARMNSASYEKLRSVSRGKFSPQQFLRLKELASNTVGVNNSIFDVELNSLLSLYKSLVKEIDTIEKEINKLIEEVHPHYMSVPGIGPLSAAVIYSEYGDISNFTNPGQMLAFAGIEPGINESGTESHGGKMVKRGSSQLRYTLINCCLPLIRFDMTFATYYAKKRGEGKPHRVAITHVAKKLIRVIYALKSQDIDFNAQKLR

SEQ ID NO: 132654 - protein, 402 aa, unidentified
MQVDDIDVFIGIDVGKSEHWATALTTAGECLHDRPLPNDEARLREVYEHLGEHGRLLVVVDQPATIGALAVAVAQDMGITVGYLPGLSMRRIADLSPGSAKTDQRDAAVIASAARTMPHTLRSITSSDEDAAALSMLTGFDLDLARQVNQVSNRIRGLYTQIHPALEGVLGPWLEHDSVLEVIATWPTPAALRKAGRARIDAKLKANGCRRHAAWAQAIVEALSKQTVTVAGTDAAGVVLPHLARQLIALHTQRADIAAQVEALVEAHPLYPVLASMPGVGVRTAAVFLAGTLGKTFTTGAHLASYAGLAPVTRRSGSSIRGEHVSHGGNKRLKQAMFLSAFASLRTDPVSRTYYERKRAQGKRHNQAILALAHRRILTLHAMIRNGTLYNPQPAQPLTTAA

SEQ ID NO: 132655 - protein, 405 aa, unidentified
MEIIIERGAGLDVHKETVVACIMGTGIKKEVRTYLTVTNDLLRLKKWLRDNQITHLAMESTGVYWKPIFNILEDSFAVILVNARHVKNVPGRKTDVKDSEWLCKLLRSGLIRGSFIPPKEIRELRDLTRYKRKLIQTIASEKQRIQKILEDANIKLSSVASNIFGASGTRIIEELMKGDLTAEEMAELSKGRLRKRKDDLKEALVGHMEEHHIFMITASLRHMEAMEEILSTLEHKIQEKIEHHFKEEYELLQTIPPVKENASVIIAEMGVNMDLFPTEMHLASWSGMSPGNNESAGKKKPGTTTHGNKCLKSILTEFAWVASRMKGTYLRAKYQSLVGRRGKKKALVAVGHKILIMCYHILKYKVPYKELGENYLDARKKDRITKSYIKRLTSLGYEVTLKEAA

SEQ ID NO: 132656 - protein, 419 aa, unidentified
MLKIVYPISCGIDVHKKFVVATIATTNSNSVTTYKTKQFSTFTSDLIQLRDWLSLNNCNEVCMESTGKYWIPIFNILESTCRVTLANPKFIKNIPGKKTDKRDSIWIADLHKHGLVRGSFIPPKQIRELRDLMRYRVKLIGFRSSEKNRLQNSLTVSNLMISSVVSDTFGKSASAIIKYAIEHPDNINVDFTKFLHKSMLHKAEQINASMQGTISNEQCSKMNVCLNHYDYINTCMSQLDETISLIANEFTDSIKIVETAPGITYNSAIGIISEIGVDMSVFPDAKHLCSWAGLTPQNNESAGKKKSVRISRAGVYLKPLLIQCANAAIKDKSYPYFRYRYESIKKRRGHKRAIIAIARMLLTCIYNMLSKNEIFDEELYREYLNSARKPLNTNISKMILFLESKGFTISHISDNELTP

SEQ ID NO: 132657 - protein, 325 aa, unidentified
MDTFLSTSDRYLGIDVSQAQLDLAVRPGTQTGTMANDPDSLDRLVEQLVAQPPRLVIVEATGGLETPLVAALGAAGRPVAVVNPRQVRDFAKSLGRLAKTDRIDALVLAHFGEAVAPEPRRLPDESARQLHAVVVRRRQVIEMLVAEKNRLQRTHASLRERVRQHIDWLDQDLAGLDGELHDRLQASPLWRAKDDLLRSVPGVGAVTATTLLAELPELGQLNRKEIAALVGVVPFACDSGQHRGQRRIWGGRATVRQALYMAALSGIRFNPVLQRHYQHLRQAGKPAKVALVACMRKLLTILNALVRSGSAWRPELAQPKSPAPA

SEQ ID NO: 132658 - protein, 344 aa, unidentified
MTEITTVGLDLAKRVVSLCGENATGRVVMQRTLRREAVLGWFAQRPPCLVGMEACASAHWFARELGALGHTARIIAPEFVRPFRLSGKNDTNDAAAICAAVRQPHLRFVAVKSAQQQARLVVHRLRQGWQEERTAGLNRLRGLLAEFGRVYPNSAAAALAGARAALADETLPAALQRGVARQLDHLRTLDQRIAECDREIAQDAAADPRAQRAARLSGVGVLTASAVAATVVDPQQFRCGRQFAAWLGITPRQYSTGGKTRLGRITRRGDTYLRALLVQGARSALQAALRAAPARRNRLAAWIVATYERIGYHKTLVAIANKHARLLWVLLTRDEPLRAHAAVN

SEQ ID NO: 132659 - protein, 314 aa, unidentified
MSTKDLFVGIDVSKDLLQVAAGEQQWTIGNDPAGIADLVERLARLKPCLVVLEATGGLEMPAAAELTAANIPVAAVNPRQVRDFAKATGRLAKTDAIDASILAQFGEAVRPPVRPCSDAQTQELAHLVARRRQLVEMLTAEKNRLTRAVPTVRRLIERHIDWLRHELKDLDGTLKDAVQSSAVWREKEDLLKSAPGVGPVVAATLLAALPELGRLNRKQIAALVGVAPLNRDSGTLRGKRSVWGGRAHVRAALYMGTLVAARHNAVIRTFYQRLLAAGKTPKVALTACMRKLLTILNAMLKNNQRWQPNFENSP

SEQ ID NO: 132660 - protein, 364 aa, unidentified
MNDTYYIGLDVHKKSISYCVKTASGAIVQEGQVVARRTELRAWATAQPKPWRGAMEATLFSAWIYDTLKPYAQQLDMAHPARMKAITSGKKKSDRLDARTIADLLRCNLLPTCYVLSPEMRDLRRLLRYRQLVVTQSVRMQNKMAGLLMETGAPFVKAKLHGKKYFTQLLATLQEVPESVKDLLRMSRGALEMFEISQKQLVKRLLAEPVLEARVERLASIPAVGPITALTWALEIVDPHRFSAIGDAESYCGLTTAFRSSAGKEQRGPLSKQRNPWLQTALIEAAKLAPRWNPQLAAVHERELKRGHRNRATLQVARKLVAYLMAVDKSGQPFQLRTSPALATALPTRKKEKAAPPAVVLQPA

SEQ ID NO: 132661 - protein, 341 aa, unidentified
MSVCYYIGLDIHKKTISYCVKKIDGTMVGQGKIAADRKSLSKWMEGLPGPWCGAMEATIFTGWVYDFLKPHAVDLKVAHPEMLKAITAAKKKNDHADAEKIADLLRVNLLPECHMLSEELRDLRRIMRFRNMIVRTAVKMKNKMSGLLMETGATYDKKRLHGRKYFGNLLERVEDVPESVKGMLKLSRNSLEMFEAIQKKLVKTLREDNLIRERVQRLMSIKGVGEVMALTWVLEIGDPSRFHSARQAVSYCGLCSAQRESAGKEQRGPISKKRNKHLQTILIESAKLAPRWNPQLAVLHEKELTRGNRNRATLSVARKLVEYMLAVERQGKDFEPRQMAA

SEQ ID NO: 132662 - protein, 345 aa, unidentified
MMIIGCDFHPSWQQVSWLDTETGETGERKLVQASGDAERFYRQVAAPALIGMEATGNCHWLVDLLSELGHELWVGDAAQIRASYVRQQKTDQRDAAHILKLLIEGRFPRIWMPSSEVRDLRQLLLHRYKLVIIRARVKNELQHLCLNKGVQRKRKLWSAAGQQILRELPLKPWAGRRRDDLLKLMAMLDQQIEPLDQAVQEEAQRDKMALLLQTQPGVAITALAYVLTMGDVSRFPRGKQVASYLGLIPREHSSGGRQKLGAITKQGNRMMRMLLVEAAQIAVRYDPEFRKQYLHRCHSKPKAVAKVAAARKLAVRLYWMLRTQQPYPAVVRIESSPRVPLVGAS

SEQ ID NO: 132663 - protein, 324 aa, unidentified
MKYIGIDIAKSSFVAAFPKGKGYTTATYKNDPNGIAIFLSKLDKCLDHCVLEATGNYGCLLVKMLLEADLSVSVINPKQIKHFTKVVNHITKTDEVDAELISLYGSKMEPKPYKMPLASIQALKQQKTLFAQLKKQLTMCYNLLESFSVLPKPDTVSLTMVKQTISYLEEQIVILEQQMLSITQETYQDLYKRISSIKGIGDRTTMELIVSTGGGNHFESAKQFSKYVGLAPIYEHSGSSVRKKGHINRHGNPQLRSLLYIASWSAIRFNKSCKDFYERLKERGKPGKVALIAVANKLIRQVFAIMRDHTFYVDGHLSKLKANP

SEQ ID NO: 132664 - protein, 369 aa, unidentified
MTFFIGVDLHKSQFTVHVRTEEKVESLDQIRQYPTTTAGYAEFLSRIETYKATGAAVKIGVESTGNTRFFKNQVEKAGAEVTVINTLKFKVINESTKKTDKHDASTISEFLSKDMLPESYLCGKETENIRRLLKSRERLVRSTVGQKNEIHALLVSLGLSDELRSLQSKKGRQRVLDTLESNNDYVLEAQSVKLMFEIIERIEESVKIIEKQISELTKDDEMVNRLMTIRGCGKITAWTVRAYTEDISRFATAKKYAAFCGLVPWVQDSNETIHHGKITKRGPQELRTCFVQLVMGIRRCKDTSEWRMMQRYEYMKKNKGSGKSIVAAARKMAEIVWAMLNDKQDFDSAKMIGRYKPMILADEALAAMN

SEQ ID NO: 132665 - protein, 357 aa, unidentified
MSHAIILAVDYHDENTVIRQFDERTKEESTCTIPSTAQALLKVVQQARKQRSRGGQVVWIQESTSGWARVQELLADKVKFVLANVVQMPRLPKGHRRKTDHTDTARILREYRNGSLPQAHQPSAWWRQIRRLVCLRENLVNRRTALRNWINRYLAHETWESRVGLWSAKGMGRLRQLSEALPVWDRAVFDIKLTELELLEVPLSRVEAQLHEVYRSWPEAQKLDAVRGIGVIAAVSIAARIGPLERFRDAEALIAFAGLAPGVRQSDQTRRAGRIGGGGTDGHLRHYLIEATVWARELPRYRPTYERVAKRRGKKIGRLVVARLLLRSIFKVLRDGLCFSGAAAPKVGTMETAGQGI

SEQ ID NO: 132666 - protein, 342 aa, unidentified
MNKVAIAAIDLGKHTFHLHAQDDRGHELYRKKFNRVALAQHLANLEPCTVVMEACGGAHFMAQEVAKLGHTPKLIAPHLVRPYVKSNKNDFADAEAICEAATRPTMRFVPPKNQAQQALAMRNSVRESYIKDRTATVNRIHAALLEVGVSLAPGFKSIKELPALLEMSSFSGSIKKILMGLHEHFNYLDGKVKALDKDVECQAAEDDLASRLMTMPCVGPITSSALAAELGDGKQFKCGRGYAASIGLVPKQHGTGDKTVLLGISKRGDRNQRRLLIQCARVYLIQLDRQKGALADWVRQLLASRHHSNLVVCALANKLARIAWAIAAHHTEFDAGPAAMNA

SEQ ID NO: 132667 - protein, 337 aa, unidentified
MEYFAGLDVSMAETHVCVMDRDGTVALEVKVPSTPADIAAALTQAPICERIVFETGRMAPMLYHGLSQLGLPVVCIESRQAYQALKSLATHKTDRNDARGLAHLARTGFFKPVHVKSLPAHALRSLIIARKKLVGQRVTLENQIRGLAVVFGVRLPRALTAAFIREALGASDGITGLSAAMRGLIGARTAVLAAITAIDADIKQLVKASAACRRLMTIPGVGKLTALAFTAAIDDPGRFRRSRDIGAYLGLVPRRYQSGEVDYTGSISKCGDRRVRTLLYEAANVMLTRYKPALKLKDWAFAIAKRSTMRKARIALARRLAIIMHAMLRDGTEFKPA

SEQ ID NO: 132668 - protein, 430 aa, unidentified
MKNSINQRLEEITLSTLIVGIDIAKTTHWARFVDYRGREVGKAVSFSCDRHGFDKIVARIEEICNSNVFKEKHDNVIIGMEPTGHYWKTLAEYLMKRVFKVVCVNPYHTKRAKELDDNSQTANDTKDAMTIARLIKDGRYFIPYLPQDVYAELRVLTNARVSVMKRNNAIKNTITAILDEYFPEIWTVFKKVFDGKASRQILKSCPFPLMILAMGEGGVLLEIKKAVKKTVGLKKVRELIAAAHTSVGVTYGLESSKLRLRLLVDELEMIERQIAEIEASMVQMLFSTGYAKQILSIKGIGIVTAASFLGEVGDPLRFQNVRQIANYAGYNLIEDSSGKSKSGTCISKRGRSQLRSLLYQMAFTVVGQNAEMKALHKHMTSRAKNPLKKKQSLVVISKKIITVIYSLLKKQATYDPALALGAVRREMMAT

SEQ ID NO: 132669 - protein, 420 aa, unidentified
MKVVYQTCCGVDVHKSFLVATIIKTTSGVEPSYQKKRFSTFNNSILQFKEWLVKNQCRDVCMESTGKYWVPVFNLLEDEINITIANPKWVKAVKGNKDDTKDSKWIGDLFRLGLVPGSYIPCKPIRILREFTRYRYKLTSCRTSEKNRYQNALTVCNVALDSVVSDIFGKSATSVIDYLIEQPDNSINHEEIASRLLRSLKRKSDSVIESIEGYQMTDSQKYRMRLIRAHLDYITSTINDIDTMLNSLIAPYENAVQLLCTIPGVDRNSAITVISEIGTDMTPFSNSKRLCCWAGLTPDNNESAGKKKSVRITRAGVYLKPALVQVAHAAVKSDKSPYYKQKYERIMKRRGKKRAIIAIARMILTAIYQMLSTGEAWNPTDLFKIDMPEPMKEKQKEKAIKQAMKLLIREGKISESQLAS

SEQ ID NO: 132670 - protein, 393 aa, unidentified
MICVGIDVAKDKHDCFILSSEGKVLADVFTIPNNAEGFDTLLQAIRRSTRPEDKIKVGLEATGHYSYNILGFLLDKGLPTYVINPLHTNLYRKSLSLRKTKTDRVDARTIAAMLMSDVDLKSYTDTAYHNEELKSLTRYRFDKVRERAKLKQSVSRLVTILFPELEKLVSSLHMASVYAVLGEFPGAKQIAGAHLTHLKTLLNDASKGHYGRDMATELRNAARCSVGSVMPAKSLELQHTIRLIRELDTEINDIETAIQAIMEEMQSPITTIPGIGIRMGAMILAEIGDFSRFDSPDKILAYAGMSPSTYQSGQLSLSGAYSHMEKRGSRYLRYALYNATKYVCLWDPTFEAYLAKKRAEGKHYNVALSHAAKKLVRLIYAMEKSRRPYNTAA

SEQ ID NO: 132671 - protein, 436 aa, unidentified
MPGNEGVVHVEEITEEPVQVVARVCAIDIGKAGLVACVRVPHDTRPDRRVQEIREYMTVTPALLELADWLRVERVELVAMEATSDYWKPVFYLLEAEGFECWLLNAKHVKNVPGRPKTDRLDAVWLAKVVERGMCRPSLVHPKPIRQLRDVTRYRRSLVREQTREKQRLEKTLEDAQIKLDSVISDLHGVSGRQMMQAMIDGQRDPKVLAEMAHGSMRRKIPQLREALTGHFDDHHAFICATMLRRIDALAADIANLDARIEELIAPFAAVVEKLDEVTGIGVQSAQEIIAEIGVNITVFPTAAHLVSWAKFSPIDAQSAGRKKANSTGKGNPWLAATLGEVVAGLSRTSTFLGDRYRRLARRRGKKRAVVAVGNSVLTIVWHLLTDPDARYQDLGPGFHESRIRKQRRQRDLIRQLEQLTGQKVDLQPLPQPAIA

SEQ ID NO: 132672 - protein, 408 aa, unidentified
MKTLHNRCAGLDVHKVEVVACLRLVRRRKVEREVRRFLTTTQGLLELAEWLERGGCTHVAMEATGVYWKPVWHLLEGRFELVLANAAHVKNVPGRKSDVNDATWLADLLAHGLIRESFVPPPAIQELRDLTRTRKQLTREIVQHVQRIQAVLEEANVKLSSVITDLLGPSGRRMLKAMIAGETDAAKLAALGSERLGCPRAALVEALTGRVREHHRFLLAQHLQTIEQLEGSVAAFDARIEAALAPFRDTIERLNEIPGIGITAVQTIIAEIGTDMRRFPTAGHLLSWAGLVPRLDESAGKRRSTRIRKGAPWLKPVLVQCAWAAARKKSSYFQAQFLRLKARHGAKKAAVAVAASILRTVYHMLGDGTCYRDLGPQHFARRDPDKAAARLANRIRNLGYHVEIRSAA

SEQ ID NO: 132673 - protein, 411 aa, unidentified
MIKENYIYVGIDLHKETHTAVMIDCYNQKLGEITFPNRPADFPKLVAKVKKCNTDGKTIVFGLENAYGYGRPLAVWLIDKGYFVKDVNTAISHRQAKHRGAMYRKSDSDDAEAIALATLNMLDKLPDACPNDAYWSLGQLVHRRDNIMKQRTRLVNQLHEQLHIAYPSYKSFFNDISRPTALYFWENYPSRKYLKGKSVEDLREELVPVSHNRCSTKNCEKILDAVASDKVKNNAYQDARDMVTLSIVSDLQHYDSQLAEVDKMLEQMYKMLGCTLTTIPGVNVITAVKILAEIGDIKRFSNANKLAQFAGIAPLHLSSSGKGKDLATKQGNRRLQATIYFLAIQMVQLSSKGTPRNPVVRAYYEKRKAEGKTSQQALICISRRLISIIYGMLKNGTEYRMPVVENAGEKL

SEQ ID NO: 132674 - protein, 319 aa, unidentified
MRRHRYRQAQAGIDTGKHKLDVAIDGGGQRVQVDNNPKGHRSLSAWLRQCEVERIGIEASGGYEQAVVLSLRADGFVVIVFQPVQVRAYAKFVLQHAKNDNIDAVLIARCTAAATDIHEPPDARLAPLAQHLTMIEQLTEDVGQLKTRREACREERIREFWKQEINRLKVLLNRELKQLVTAIREYRDLANRLDLIASVDGVGLRTAVAILVRMPEIGRVTREQAAAIAGLAPYDDDSGLRRGSRHIKGGRQRLRQSLYAAALPAVFYWNPQLKAFYRRLLVAGKPHTLALIACARKLLIFVNTVVARGTSWRSSAVTT

SEQ ID NO: 132675 - protein, 451 aa, unidentified
MPKKRNKVGILPVIEPNAAGIDIGATEIFVAVPGDRDAEPVRSFPTFTVDLERLADWLQECQIRTVAMESTGVYWIPLFQILEKRKIDVRLVNAHHVKNVPGRKTDVQDCQWIQHLHSVGLLRGSFRPDDEICAIRSLWRHRDNLIQLATLHLQHMQKALDQMNLQIHHVISDLDGTTGLAIMDAILAGERDPHKLAQLRHPRVRASQETIMKSLVGDYREEHLFTLRQSLNAYRYYQQLIQEVDLQVKQMMQRLPSKVADGEKPPKGDKPRPRKIPWRNEPPQLRDDLYRAFGVDLTEVPGINTLTAQMLLTEIGPNLARFPTAAAFCSWLRLCPDPKISGGQVLSSRTRPTKNRAALALRMATQGLHRSDTFLGDYFRRMKARMGVPKAMTATAHKLARIVYHMITTRQEYDATIFQQQEQRRSQQRTARLHAQARMLGFHLVPVDFVP

SEQ ID NO: 132676 - protein, 410 aa, unidentified
MEPILISCAGMDVHEKKVDVCIAHGPFDKPPKFEIRTFSTMTSDLEELMAWLNKYEVTTIGMESTGVYWKPIFNVMEGEFAIVLANAQRLKAIPRKKTDIIDCKRIANLLRYGLLPNSFIPPREIRELRDLNRTRRKLVGIMTSEKNRLIKVLEAANIKLSSVVSKIYGVSSLALIRSLLEKDKLSREEISQLAKGKLKKKVDQLEKALNGKLTDHHRFLLGMHLENIDYLAKQIKKIDEEIQRKMVPFQKESKLIQTIPGISEVNASAILAEIGVDMSQFPDAAHISSWAGVCPGNNESAGKKKSGRTQKGNSFLKGALTESAWAASKTKDTSYSAFYRNIVRRRGKKRALVALAHRMLIDIYYVLKSGEPYQDTGAEAVCERTMKRRERSMIRSLEKAGYSVVKAEAA

SEQ ID NO: 132677 - protein, 327 aa, unidentified
MDPTTTAARLFAGVDVSKDRLDVCLRWSEPENHQKEEAFVLAYDDSGIDALLSRLLKEPTALVILEATGGFERTVVGALAAEGLPVVVVNPRQVRDFARATGRLAKTDRIDAAILARFAEAVRPAPKPLPDREIRALQAIVARRRQLLGMIAAENNRLSSAPKAVAKRIKAHIRWLEKELSRTEGDLEAAIESSPVLGENEALLRSVPGVGPVLARTLLAGVPELGTLTHKRVAALVGVAPLNRDSGTLRGHRSVWGGRADVRAALYMGALVAARRNPVVKEFYERLLAAGKPKKVALVACMRKLLSILNAVLKHRTPWRSPHYLSP

SEQ ID NO: 132678 - protein, 370 aa, unidentified
MKDVSEVFVALDVAKLKNAVAIAESGRDGEVRYLGEIASTDAAVRKLIAKLSEQYHRLMFCYEAGPTGYGLYRLIRSLGHDCLLVAPSLIPTKPGDRVKTNRRDAEIMAKLLRAGELTAVWVPDERHEAMRELTRARDVARKDLRVKRQQISGFLLRNGLHYPGKKTWGKAHLNWLASRKLGHVEQRFAFEELLLGMRQASERSARIEQMIRDAVPDWSLAPNVVALQAMRGVDLITAVGFLAETGDLARFEHPRQLMAYLGLVPSERSTGERVNRGAITKAGNTRARRFLIESAWSYRFPARVSKEKQTKVEAAPRSIREIAWKAQTRLCGRFRNLTRNGKRSTVVATAIARELAAFIWAINQEVATQS

SEQ ID NO: 132679 - protein, 422 aa, unidentified
MNFCPVAGIDVSKRFSDMCILSPDNKIFAQEKIYHDETSINRANTLLQKAEQIFSSKPVIVMESTSHYHLILFQFFSEHGYDVIVVNPLQSSSMKDFSIRKRKTDRVDAFKLAMMYRTKTLRPSQVPQTALRALRQLCRERVEFLNNVTSYKNRLTAFLDQAFPGYDKVFSDVGGITSCAVLVRFPTPIILLAAEEAELVEVIATASKSGYRFAKKKAELLISVAQKAQTLGIHSCADETLIVCTIQMLRTLSESVLQIEKAIDNLLAQMKEVRNNVCLLQSIPGIGSRSAALLLGEIGDFTLFKKPKQLAAYFGLDPSERQSGTFRGTKNKLSKRGSPYARAALHMGVVNAICKHGKQPAPNPVLLSYYEKKCKNKPAKVAQAASMHKLVFIIFAVLRDQKPFELKTPEQHAAEQGFVKAA

SEQ ID NO: 132680 - protein, 332 aa, unidentified
MDTIPVQVGLDYHQSLIQVCVGSKEGRALGNRRCGNSVEEVAKYAGQFGPVEGVTLEACSGAADFADALIAHTGWKVQLSHPGYAARMKLNPDKSDYSDARMQYELGRTGLVPRVWLAPREVRELRLLVRHRQQLVKERRAAKLRIGAILREQRCLDAPAPRWTRPWLEWLRQQAALSEQGRWVVERHLGGLKRLGEEIGQVEARLLDATAADHQVQRLLEEPGIGPVTAWMLRAEIGRFDRFHNGKQLARFCGLTPRNASSGARQADAGLIRAANGELRACLIEAGHRLARTHPRWSALAVALRARGKPGSVVAAAIANRWVRSLHHRLAA

SEQ ID NO: 132681 - protein, 266 aa, unidentified
MFVGIDVAKAELVVSIVPSAERFTVANDERGVRTLVERLRAVAPTLIVLEATGGYELLAVAALATGALPVVVVNPRQVRDFAKATGQLAKTDRIDADILARFADVVRPAVRPLADDDAQELEALLTRRRQLLEMLQAERNRTGQVFGKGKRLVKKSLKSHIAYLERELRITDTDLGAMIQASPVWRERDELLQSVPGVGPVLSRTLLADLPELGRLSRREIAKLVGVAPLSRDSARCVGGASSRAGAPRSARCSTWRRSWRRSATR

SEQ ID NO: 132682 - protein, 399 aa, unidentified
MLNPQSLQLRVGVDVGTQCHSVAVGLTDGSLLEEFEIPHTAAGFDDFFARIEGHAKRHPYPIAVAMEGYNGHVRPLDSLVRARGWRLFNVNNLKLARFKEIFPAAAKNDRIDTRKTLELFQLRDHLPMAGDVLQEVMATPAENNILKRLSRRRRRLVDERGRVLNSIQADLQAVCPGLLAITRQAGNLWFLNFLTCRKGLCKLARLRRASLLKVPSIGNHFADAIQAWQTSAFFSDDAGLVGDMIQQDARRILELDRQIKALEDQMAPVAAVSTIARQIISIPGFGSVCTAELAGEIGTIERFRCEASLALYLGMAALDNSSGKFRGSKAPKHVNARAKAAMMAAVDHHRKWVPQSQRYYEKKRAQGKRHNQAIRALGRHLCRVIFKMLSQERPYRIEP

SEQ ID NO: 132683 - protein, 416 aa, unidentified
MLFIGDDWAEDHHDLEVEDDGGHRLSRARVPEGLEGIARVHALVAQHAPAAWADLPAKDAAGQVVVGIETDRGPWVTALLAAGYQVYGINPLSSARYRERYSTSGAKSDAGDAHVLAEIVRLDRAHHRQIAGDSDLSEAIKLLARAHQSAIWERTRHVLRLRSTLREFYPVALEAFEDLSAPDALALLRRAPDPVRAAKLTRSQVLAALRSARRHHVETKTDVLIAVLRTPALRQPALVEGAYAAVVTGEIGLITSLNEQISGLQAVMADHFGQHPAAEIYLSQPGLALVLGARVLGEFGDDPTRYASARARKNYSGQSPITRASGKKTVVLARYATNRRLGAALHAQAFAALAGSPGARAYYDTLRGRKIGHHAALRQLANRLVGILHGCLKTATIYNEHTAWQHHRNATEPLAA

SEQ ID NO: 132684 - protein, 348 aa, unidentified
MMRYVGIDVGKTRCRAALMNEKGVIESEFFFENSNKGIANLTSALTSEDRVVMESTGNLWLNIYDTLDAKSIRVVLANPLKTKVIASAKVKTDKLDARILAHLLRADLIAESYVPQGNVREMRALVRHRLSLVQMRTMVKNKVHAIIDKYSYRCECSDMFGKAGTMWLRALELGALDRLLLENHLGLIEFVNSQICRVDEVIRERACEDQDVRLLLSLTGVDVYTALLLRSEIGPIERFADFKRLVSWAGLAPSVHQSGNVEFHGRITKRGSSILRWALVEVAHVAVQRDERMKAFYLRVAARRGGQKAIVAVACKMLKIVWFMLTRREAYGNVNEKRYEEKLKRMDA

SEQ ID NO: 132685 - protein, 376 aa, unidentified
MGHHSEAFIGIDTSKLKNAIAIAEGGRHGEVRYLGEIDTTDAATRQLIRKLAAKYAKLTFCYEAGPTGYGLYRLITSLGHECSVVAPSLIPRKAGDHVKTNRRDAQSLARNLRAGELTAVWVPDERHEAMRDLSRARESAVDDLKSKRQQILSLLLRLGLHYPGKKTWGKSHRNWLASQTIGQREQRIVIEELLGAERQAQDRVGRLEQAIREAVPDWSLAEVVTALMSVRGIDLVAAVTILAELGDLSRFTSPRELMAYLGLVPSERSTGDNVKRGGITKAGNRRARRILVEASWSYRYPPRIGRDKQAKVDAAPEPVRAIAWKAQTRLSSRFRMLSKKGKRPTIVATAVARELCGFIWAIHRLVTSPGATTASR

SEQ ID NO: 132686 - protein, 341 aa, unidentified
MPIMTVGLDLAKHVFQVHAVDEAGRVVARKKLRRSEVLEFFQALSPCLIGMEACGSAHHWGRELTALGHDVRLMPAGYVKPYIKRGKNDAVDAEAICEAVTRPTMRFVDIKSAEQQSGLMLHRTRELLVRQRTALINSLRGQLGEFGLIAPKGVWSIPDLHALAKNATSAILPDAVRGCVELIMGQIDDLQMRIQTIEKAIRVQVRANEVSLRLKTIPGIGVITASALTATIGDIKAFKSGRHLAAWIGLVPRQSGSGGKVYMGKISKKGDAYLRKLLVLGATAVIRYCRNKPELAGWINALLERRPARVVTIAVANKMARIAWAVMSRGESFRQAASAIA

SEQ ID NO: 132687 - protein, 357 aa, unidentified
MRIIGCDLHTRQETMAMLDTETGEVVEKTLQHEGEKVREFYSALPRPVQVGIEATGSMLWFLNLMEELGIDSQVGHPAKIRAAEPRKQKHDRRDADLLLKLLMENRFPSIWMPSKELRDLRALLCHRHQWVRTRTRVQNALQAMALTNGLRRGKSLWGQEGQHAIASLPLGPHAAHRRTALQALYRELDADINALDKRVLEQALERPGARRLMTHPGVGPVTALATDVFLGDPVRFEDAKALASYVGMIPSEYSSAGRQRLGGLSKQGNPLLRFLWCEAAIHAVRRDPLLQRFYRRKLVQKGMGKARVAVARKLGIRLYIMLRDQIDYEEFCRRGQMRQKNGAARAGIPEVGYGPSL

SEQ ID NO: 132688 - protein, 368 aa, unidentified
MKEVTTRYVGLDVHKATISIAVADDGVAPVLFGTIANDATAVRKAVSQLKRGGKLVAAYEAGPTGYGLHRQLTQLGVDCVVVAPALIPRRAGDRVKTDKRDAIALARLLRSGDLTPVWVPGQQDEALRDLVRSRFDAKDDLRRAMHRLAKFLLRQSIQAPPGIKPWSARHLQWLETLRLDHPTSQLVFQDYRVAVHAARERVRRLEADLERCAEQSPRLGTILALQVLRGVAFLSAVTIVAEVGDFRRFPNAPRFMSFTGLTVSEHSSGQSRRQGRITRAGNRYLRHILVQAAHNARFAPSLEGELKRRLKDVPADLVALSVTAQNRLHRRYRHLDRRIGRPKAVTAVGRELAGFVWAIGQRMEASAA

SEQ ID NO: 132689 - protein, 430 aa, unidentified
MEVIYPKACGVDVHKSFIVAVICDSTSVKPQYLRKRFSTFPNSLIDFRNWLLANDCQNVCMESTGKYYIPVYNALEGYISNVVVSNPKWVRCIKGEKDDNKDAKWIADLFKLGIVRHSFIPSKNIRVLRELTRYLYKLTNMRTSEKNRFTNALTVGNCKLDMVFSDIFGKSSSAIINTIISQNQYSDKDILKNVDKRCKASEEDILNSINGISWVDAQKERMLLIQNHIDYLNSTIKSLKEIIDIVVKPYEDYIKFLCTIPGVDRNSAISIISEIGTDMSQFSSHYRLVSWAGLAPGCNESAGKKKSVKISRAGVYLKPALVEVAHAAVTDKDCDYYAVKYKQISKRRGKKRAIIAIARKILVTIYHMLSTGEVFNPSDLSKVETSDKDRIKYTKNNFMQSAKQLLSLGLTSEEIILLVNSQNSNLTPIT

SEQ ID NO: 132690 - protein, 433 aa, unidentified
MSLLNHERRIVHMKVVYPVCCGIDVHKRFLVATIVSVTKMQTLSYKRERFSTFNKNLQRLKHWLIENGCYDVCMESTGKYWVPVLNVLEPEMHVVIANPKWVRAVQGHKDDAKDSKWIAELFCFGLVKGSFIPSKDIRILREFTRYRAKLTNMRSSEKNRFQNGFTVCNIALDAVVSDMFGTSAQRITKYLLTDKEPTAQHCSSLLHRSLKKKAVAVVESIEGFQLTEEQKFRMLQIRQHMEYLNAAIQVLDEKLDQMAAPYAAAIRLFCTIPGMGRESALTILSEIGTDMTQFGSSKRLCSWAGLTPGNNQSAGKKKSVRITRAGVYIKPMLVQAAHAAVKCTRQPYYKVKYENIARRRGKKRAIIAIARMILTAIYHMFKTGEVFCPTDLRQIDMPEELKEKRRSRKIQNAIHLLKQQGILSETFVAPTCA

SEQ ID NO: 132691 - protein, 425 aa, unidentified
MPYKIVGIDVHKKMLAVVVADVEGEGDFQFERHKVGTSPAELRALAGWFVERQVDEVVMESTAQYWRPVWEALELHWRPQCRTRDGASPLSGTLHLAQAQSNRGAVGRKKDFPDAERLVKRLVAQELTLSFVPDAEQRLWRTVMRRKYQITRSRVQLHNRLESLLEEAHIKVSSVVSDLLGTSARRMLQAVADGERDPTALAALADSRLRATPDQLRNAFGACADLHPVYRRLVKLTLEELRVIEDHLAQLDQQMAELLGHHHDAVQRLAEIPGLGVDSAQQIIAEVGATAATFPSPKHLASWMGACPGTEESAGKNYSHRCPKGNRQMRRVLNQAANAAVKAKGTIFSVVYRRIVPRLGHAQAIGAITHRLCRLIWKILHERVRYEERGPSVSAEAKKIRARKMIRELRSLGYRIEPIVPAPSA

SEQ ID NO: 132692 - protein, 411 aa, unidentified
MDVLIERCAGLDVHRDTVVATVRRPGPGGVRRSETRTFTTMTGQLEALADWLAAQQVTLVGMESTGIYWKPVYCVLEDRFSVWVINAEHLRNVPGRKTDVADSMWIAQLIEHGLVSPSFVPPRHVRLLRDLTRHGRRLTEERTRTIQRLEKVLQDAGIKLTSVASTILGKTGRAILAALLAGQEDPAVLAELAKGRLRPKIPALREALTHRFRLEHHGVLIAQMLAHIDFLEASIAETHQRVEVLLRPVADIVELVMTIPGVGRRVAEVLIAEVGLDMTVFPTAGHLASWAGICPGNNSSGGKRRPGRTRHGSMWLRIALTEAAQVAARGKGTYLAAHHAQIRGRRGTQKAIGATRHDILIAYYHIVRDQIPYQDLGPDWNNRRRSTEQQTRRLVRQLERLGVNVTIEYTA

SEQ ID NO: 132693 - protein, 377 aa, unidentified
MKRVKFVGLDVHAETIAVAVAEQDGEVRSLGVIPNREDSVRKLVRKLGAVQELRFCYEAGPTGYVLYWQLIRMGAKCEVVAPTLVPVKAGDRVKTDRRDALKLARNYRAGELTAVWVPDAAHEALRDVVRAREAAKKDQLRARHRLSKFLLRHGRRPPMGVKTWTIKYLEWVKREVHFEQLAQEATLLDYLNEVEHAAARIARLDGAIEEAVKVAPPQMRAVIEALQALRGVAHVSAVTVVAELGELSRFSRATQLMGYGGIVASENSSGERTRRGNITKAGNAHLRRVVVEAAWAYRHRPDVGATLRKRQERVSEEVKEIAWKAQQRLHGRYRKLLAKGKNKGVVVTAIGRELLGFIWAIGIKVETAQKEPLQRAA

SEQ ID NO: 132694 - protein, 427 aa, unidentified
MIAAVIERCVGIDIGKKSVSACVMTGPANGEARTEIRTFGTTVAELKMLRDWMKQEQCTDAIMESTGSYWKPVFNILDGSVKVALANPHEVKARKGHKTDPKDAWWLAHLLRHGMVTPSFIPGKKQRQLRDLTRRRKKMLSAASSEKNRISKILEDANVKLGSVLSDLFGVSGQSMLQALLEGKAGPEEVAALAKGTAQKKVPQLIAALEEHQMEDHHRRMINYSVAHLCFLEDQIAELDQDIRKQIREANWEPAWELLQTIPGVQETTGAVLLAEVGPDMEQFGSEKKVSSWAGLAPGNNISAGKSQGSATRPGNHWLKGALTETAWAVARKKNCHLRDKFWRIAAKCRPKAVVAIAHDVLKLSFCVLKRGTPYVEKGPHGMSEPQRQRIIRHHVRRLGKLGIRVRTPTKLVRGGRKGRPRKPVSK

SEQ ID NO: 132695 - protein, 350 aa, unidentified
MIIIGCDYHPGFQQIAFVDTATGELRERRLQHPEEAEQFYRDLAAPGMKVRVGVEASGHAHWFERLLAELNFELWIGDAAEIRAKRVRKQKTDRQDAQHILRLLLEDRFPQIWVPNGENRDLRQLLWHRHRMVQARTRIMNQLQAVALNEGLRCKKRLWRERGREQLESFKLAPWASRRRRDLLELLDRLNPTIAELTEAIEQEAEKCPEAQRLRTHPGVGPLTALAFVLIIGRAERFQCGKQIACYLGLVPLEDSSGDRRRLGHITKQGNSLLRFLLVEAAQVTVRSDQQWRSKYFHLAMRRGRKIAKVAMARRLAIQMYWMMRKEWDYEQVKKFGSHAGQPGNPHGVQ

SEQ ID NO: 132696 - protein, 317 aa, unidentified
MTAVGIDVAKQTLAIDVIGATGKRRQKHCANSPAGHADLIRWLGRHAGAGAVIGLEATGGYQEAVAIALHDAGYAVSVLNPLVIAAYGQSQLRRAKTDPTDAALIADYMRTQTPPAWTPPPPEARQLQALVRRLDALLEMRTQELNRLDLAAPIIRPSITATVQHLDAQITIVKRQIAAHIDQHPTLRAQRDLIVTIPGIGETTAAIVLGELLDIARFTSARQMAAFTGLVPRVRQSGTSLRGRGALTKLGSSRLRKALYFPAVTALRCHPTLARFAARLRAAGKPSLVIIAAVMRKLVHQIYGVLRSGLAFDPARA

SEQ ID NO: 132697 - protein, 308 aa, unidentified
MQTVADRPEAPTAIRTDLGAIFVSLELSRSTWLITSLSPGGGEKMSKQVVRGGDVAGLLERFARLREKARARTGKVFPFVVIQEAGLDGFWIDRALQNEGIESHVVDPASIATSRRRRRAKTDGIDGEALVRALLAYKRGEPRVCAMVKAPTPEEEDRRRLCRERKVLIGERVQHVNRVKGLLFSQGISGYEQLRRDRRQRLDTLQTGDGRLLPDHLKAQVCRELDRLELLLEQIKAVEAERDVLLAAQQVAAPAPAAMLLDIKGIGPEFAAILWSEGLFRHFDNRRQVASYAGLAPTPHSTKGIARG

SEQ ID NO: 132698 - protein, 341 aa, unidentified
MSEVSIIGLDLAKNVFQMHGADGSGTVLFRKKLRREQVLKCLAAQPTCTVAMEACASSHYWGREIGRLGHAVRLIAPDYVKPFVKRQKNDAADAEAICEAAQRPTMRFVAVKSEEQQAAAIVFRARDLLVRQRTQTINALRGHLTEFGVVAAQGPSHVAKLVSVIISHDTDIPELARPILRLLVELLRSLNEKVALLDRELARRAKEDAEAKRLMTIPGIGPITATALVALAPTAQAFKRGRDFAAWLGLTPLQRSTGGKQKLGKTSRMGERTLRRLLIIGASAAVRWAMRKGSTADSWLARMLALKPPMLVIVALANKMARIVWALMARGGTYRAPAAAK

SEQ ID NO: 132699 - protein, 311 aa, unidentified
MENYIGIDVCKDRLDVDGYPQSHRSSFTNDEAGRQALVSALLPLAPKGIVLEATGGLEFPVVCELARAGMPVFVVNPRQARDFAKAIGLLAKTDQIDAFALARFAEAVKPQPRALKSDELRELEEIVTRRRDLVEMITAEKNRRTRATAKTIKLIDEHIEWMERQIKRADTDMGDAIKQSPIWQAKANLLKSIPGVGQVTVNTLLAELPELGQLNRREIAALVGICPFNRDSGGQRGKRRIWGGRASVRAVLYMAALVATRHNSVIKAFYQKLLAAGKMKKVALVACMRKLLTTMNAMVHNQTPWQATAGI

SEQ ID NO: 132700 - protein, 382 aa, unidentified
MDVFHACCAGLDVHKRTVVACVRRVDPAGKVSKAIKTFATMTRDLLSLSDWLAAQGVTVAAMESTGTYWKPVFNILEPRLEVVLVNAHHIKQVPGRKTDVKDSEWIAQLLQHGLLRPSFIPPRPTRELRDLTRQRTRLIGEKAAVANRVQKVLEDANVKLGSVASDVLGVSGRAMIEAIIRGEYDPVKLADLARRRLRGKIPQLQVALQGSVTEHHRFLLRTLMDHLTQLEGLIRRYDERIEEALVPFAGPVGRLTSIPGVNLRVAEVVLAEIGHDMGRFPTAGHLSSWAGLCSGNDQSAGKRRSGRTTDGNRWLRAALVQAAWAAYRARGTHLSRKFRRVAGSRGKKRAAVAVAHAILVIIYHLLKEGTTYQEVATDSEAA

SEQ ID NO: 132701 - protein, 344 aa, unidentified
MEYFAGIDVSLRSCALCIVDGKGTVLLERELPCEVRDIAEWLGTFPHPIERVGFEAGTMSQHLFFGLKAAGFDVVCMEAHQVNAALSAMRNKTDKNDARGIAQVLRTGWFSPVHMKSREAHGVRALLSTRKALLKKTMDLANEVRGLLKIFGIRLPMTVKHGSFDGVVRPLIEMDEVLVHALVPLLDARVVLYEHFLELDRRVKRAASQDEVCMRMMTVPGVGPIASLTFKAAVDDPTRFKRSRIVGAHFGLTPRRYQSGEHDNPGRISKAGDRDVRATLYAAANALLMRTMAGSQIKSWGMRLMRTKGRRRAVVAVARKLAVLLHRMWVDGTEFRQDQVGGKA

SEQ ID NO: 132702 - protein, 350 aa, unidentified
MVVVGADVHKRTHTFVAVDQGGRKLGEKIVTAVTVGHAEAVMWARERFGSDVIWAIEDCRHLSARLERDLFGFGQKVVRVPPKMMAQTRASARTRGKSDPIDALAVARAFLREPDLPVASHDSVSRELKLLVDRREDLVAQRTATINRLLWRVHELDPDHSPKARSLDLAKHRSILGDWLKTLDGLVAELARDELADITRLTEDINALAKRIGERVRAVAPVLLAMPGCGELTAAKLIGETAGVHRFKSEAAFARHAGVAPVPVWSGNTRGRVRMTRSGNRQLNAALHRIAVTQIRLQGLGQTYYRHRIAHGDSTPEALRCLKRRLARVVFNHLHTDQHNRQNACHPAAA

SEQ ID NO: 132703 - protein, 341 aa, unidentified
MNITTVGLDLAKNVFQVHGVNEHGVAVLRKQLKRDQVTPFFARLEPCLIGIEACGGAHYWTAKLTALGHRVKMMAPQFVKPYVKTNKNDLLDAEAICEAVTRPNMRFVPAKAPEQQSVLSLHTARESFVHARSAQANQIRGLLNEFGLVVPQGIRHVYERVPDLIEDASNELPGRFRLLIDRLLQHLRELDRQVHELEREIEQWHRSSEVSRRLETIPGIGPITASALVASAGDPSNFKNARQFAAWIGLVPHQNSSGGKTRLLGISKRGNVYLRTLLIHGGRALVQLAQTRADRAGTWLAKLVGRRHHNIAAVAMANKNARLAWALLSTGKAYEPMRSAT

SEQ ID NO: 132704 - protein, 392 aa, unidentified
MEPVVGVDVAKGSSVVQAFRKRNEPYGKAVDIEHGRSGFEQFGEMLGRLQAETGLAPVVVLEATGHYHRALVSYLDRSGYTYYMVNPLQSKRAKGTQLRKVKTDALDAWHLAEMYYRGDVKPHRTWNETFTELQHLTRQHEFVTGIYVQAKLNSRALLEQVFPTYEQVFYNVFSATSLTVLARCLEGDAEDWNEVIQGSAGKSHSKRWANEKARKLEKVLDHWKEARHSPSQRKALLGMVSLLLTMIRQLDELEKQMEEMAANLPEVELVKSIPGIGTKLAAAIVAEVGDVKQFSDVKQLVAYAGLDPGIFSSGKFTATSTRITKRGSKRLRRSLYLAVQCGMRKNANARIRSYYEKKRKEGKPYKVVVIACANKLLHHIFAILQKGQPYQA

SEQ ID NO: 132705 - protein, 311 aa, unidentified
MNSEAYIGVDVSKDLLDVKVLPSNKAQQFSNDDPGIKKFITFIKKIGPQLIVFESTGGLEMLAVSSLVEKHLPTVVINPRQIRDFAKATGRLAKTDSIDADTIARFARDIRPEIRPIKDEHTQLLSALNARRRQIVDMLVAEKNRLYSAPKPNIKSIQKHIQYLERTLEDINKDINKTIKKSPTWRENDRILQSFKGVGPVLSATLLCDLPELGTLNRKKIAALVGVAPLNCDSGRFRGRRRIKGGRADVRRKLYMAAVASIRHNPKMKNFYHKLIDAGKPPKLALTACMRKILTILNAMIKNRTYWIATC

SEQ ID NO: 132706 - protein, 338 aa, unidentified
MAIVMGLDQHRAQITAEWIDTSTGEVSRARLAPAHRAHVRRFLGRFSNEELEVALEATTGWRFVVEELRQVGASVHLAEPAETAARRGTKKRAKSDRADARHLRELLMVGRLPESWIPPAHILDLRARVRLRHTLSEQRGEWQQRIQAVLYHHGCPQRGDLINSAGLAWLASQPLSGCAREQVAVALAMIDALRVQIGSLDTELRAFARRQAGCKALMAHYGIGALTAVTIVAELGDASRFSSSRQAVRFAGLDITVHQSDQRRAPGRLSRQGPPALRWALFEAAQCARRRGSPDHLYYLEAAERLGGNRACLSVARKLLKRSYHTLRELGDQAMQPA

SEQ ID NO: 132707 - protein, 403 aa, unidentified
MNAVGIDVSKGKSMVTILRPFGEIVSSPFEIKHTSSDIHSLIKLIHSIEGESRVVMEHTGRYYEALAHQLSAADLFVSAVNPKLVKDFNNDSLRKIKSDKADSVKIARYALDKWQSLEPYSITDELRAQLKVMNRQFHFYVKQKTAMKNNLIGLIDQTYPNANTYFNSPTRSDGSQKWVDFVSTYWHVDCIRKMSLNAFVEHYQNWCKRKKYAFNKSKAEEIYTKTKELVPVFPKNEITKHIIRQAIDQLNSTSVTVETIRTLMNETASKLPEYSIVMQFKGIGPSLGPQLMAEIGDITRFTHKGALTAFAGVDPGVNESGSYAQKSVPTSKRGSSNLRKTLFQVMDVLIKTMPQDDPVYQFMDRKRTQGKPYYVYMTAGANKFLRIYYGRVKEYLSVLPDPS

SEQ ID NO: 132708 - protein, 340 aa, unidentified
MKRYLGVDLHRNCFTVCTLKEDGQSELRKWSIHSLCDFAQEVQATDAVAVEATGNARYFCQALKERGCRLVVVNPHQFQVVSRSVKKTDAHDAKTLAEFLAKDMLPEVRMKEALPAEIASVLQTRDKLVKLRTVLKNKINNLRAGRGILIRRESLSSDKGLEQVLQAPVSDLERVELEVLVGQIRHLNDSIRRLEAAIKEQGPKLPGYESLKSIKGIGDIGASTMLSTIGDINDFASEGKLAAYFGIVPRVQNSNATERSGRITKRGSKLGRTALVQCALIAMRYSPYLAHYYARIKAARGTGKAIIALARKFLGIIYKTLKNGWVFEDFPAFVLAPAAG

SEQ ID NO: 132709 - protein, 363 aa, unidentified
MRKSAQAARVPSVVQQPTESTIGIDLGDRWSRYCMLDAGGTIIEEDRVRTTAEAMAERFGKRAATRIVIEAGTHSPWVSRLLESLGHRVIVANARKVRLIYESDRKNDRLDARMLAKLGRLDVSLLCPVQHRSAEAQADLAVVRSRDALVAARTQLINAVRGMVKAIGGRLPKSTTAAFAPKMTVLIPAELKTAVEPLLKSIRVLSEQIVRYDEQIEHLAEKKYPETRLLRQVKGVGPLIALTYVLTVEDPTRFRRSRQLGSFLGLRPRQRESGDSAPQLGISKCGNNHLRWLLVQAANYTLSRLAPDSRLRRWGLGLAARGGKNGKKRAVVAVARKLAVLLHRLWVNGEVYEPLYGVEPQAA

SEQ ID NO: 132710 - protein, 374 aa, unidentified
MGNHSEAFIGLDTSKLRNSVAIAEGGRGGEVRFFGEIDNTPGAIGKLVRKLAAKYDRLTFCYEAGPTGYGVYRQITGLGHECVVAAPSLIPKRPGDRVKTNRRDAVSLAKLLRAGELTAVWVPDRGHEAMRELTRARETAMLDLRRKRQQISAFLLRQGLHYAERRAWTKAHMNWLACRKFDHAEQRIVFEEMMLAVREAQDRLKRLEDAIRTAVPEWSLAEVVTALMAVRGMDLVSAATFLAEIGDLSRFQSPRELMAYLGLVPSEESTGDTIKRGPITKTGNRRARRMLVECAWSYRHPPRVGRNKQEKVAAAPQAVREIAWKAQCRLHNRYRMLIRKGKLKTVANTAIARELAGFLWAVSREITKASAAGR

SEQ ID NO: 132711 - protein, 416 aa, unidentified
MSKVYRRCCGMDVHKDTVVVCVLPPDGEEGEKVRKVFGTFRNELARMRGWMKLKKITHIAMESTGVYWMPVWNIFDGHGFELLLVNPAQVKALQGRKSDQRDAQRIGEFLQDGRLDGSFVPPREIRQLRQMLRHRQSLLEQRNEVHNQIRDLLETANIKLSSVATDLMGVTGSAILNALADGLDSPERLSWKARGKLRKQEAKIKEAMKGFTDEFFRWMLKSHLKQYDFFTEHIAHFEGQIEIHMVPYAEQIGLLTTITGVEKLVAWNLIAEMGVDMSVFPTAAHCASWAGLAPGTHESAGKQMTGRTKRGNRTLRRILTQSAWANTRCKHGYLKAFFLRIRARSGWSKAIVATAHKILVIAYGILKSKLPYQDLGDDYYDRLNPDKTIRRVQTRMAKLGYQVSFTPMPEPSIQTT

SEQ ID NO: 132712 - protein, 427 aa, unidentified
MYRIAGIDVHKKKLAVVVSDVEVHGEYQFERCWFGANPEQLRFLSQWLVEHQVEEVVMESTALYWKPVWGALERYWQPICQKREGAGATSGILHLAQAQSNRGPRGRKKDFRDAERLVKRLVADELKLSFVPDWEQRLWRTLTRRRYQLTRARVQLQNQLEALLEEAHLKLSSLVSDLLGVSARRMLQAIADGETNPEALAGLADRRLRATPAQLSDALGACTELHAVYRRLIKMMLGELKVIEEHTAELNQELATLLRPHQDAVERLAEVPGLGVDSAQQILAEVGTNAAVFASDKNLCSWVGICPGDEESAGESSSHRCPQGNRQMRRLLNQAANAAVKTKGSIFEIVYRRLVPRLGHNQTIGAVAHRLCRLIWLLLRKGVRYEERGPAVSRRSRQNRTSKMIRELRTLGYRVDFLNAVPSNPMP

SEQ ID NO: 132713 - protein, 334 aa, unidentified
MEQITTVGIDLAKNVFSLHGVDAAGKTVLRRTVRRERLVETVASLSPCLIGMEACSGAHEWGRRFEQHGHTVKLMAPKFVAPYRKSDKNDGNDAEAVCEAVTRPNMRFVPVKSTEQQALLAMHRVRQGFVVERTAVINRLRGLLSEFGVVLALRSVTVRRQAAQAAEALPSLARRAIGDLLEQLRLLDERIGAYDKEIEAQARLSEPARRLMKIRGIGATTALAIVATVGNAREFKNGRQFAAWIGLVPGQYSTGGKSRLGHISKRGDAYLRNLLVQGARSVLQTAAAHQDRMSRWALELQARRGYYRTLVAIANKNARIAWVLLAKNETLRMN

SEQ ID NO: 132714 - protein, 340 aa, unidentified
MKQYGAIDLHSTNNVTVVIDEQDRVVYQKRLPNDLALILKELSVYQSELQGIVVESTYNWYWLVDGLMEQGYRVHLANTAAIQQYEGLKYTDDHSDARWLAHLLRLDVLPEGYIYPRAERAVRDLLRKRSQMVRQRTTNLLSIQNLLTRNTGSSLSAHQIKGLDVQQVDQLLAEPDLALALKANLSVMSSADQQAQLLEQTVTQRVKLRAQFSYLKTVPGIGEILALTIMLETGDIGRFFSVGNFASYCRCVGSQKISNGKKKGQGNTKNGNKYLAWAFVEAAHFAIRYNAKIKSFYQRKKAKTKIVVAIKAVAHKLCRACYYIMRDRVAFDMSKAFGPK

SEQ ID NO: 132715 - protein, 348 aa, unidentified
MTTMVEDARVITGGVDTHADMHVAAALDSVGGLLGVQEFPATAAGYASLLSWLRSFGTLAVAGVEGTGSYGAGLARHLAAAGVRVVEVDRPDRQDRARQGKSDPLDAVSAARAALSGRASGVPRGRDGAVEAIRALMVAKRSARQERTQAINQARALIMTGPEELRARFVRRSPAQLIEAIAALRPRPGDVPGYATRVALRELGRRGQFLDAQLDRLDELIGPLVTERAPGLLALHGVGPDTAALLLVAAGDHPERLRSESSRAHLCGVAPIPASSGKTAGRYRLNRGGDRQANSALWRIVIVRMSSHPATRAYADRRSEEGLSKKEIIRCLKRYVAREVYRQLRDGA

SEQ ID NO: 132716 - protein, 542 aa, unidentified
MEVNVKRCCGLDVHQASVVGCLLVEETGGLRSEVRSFGTTTKELKKLASWLREEGCTHVAMESTGVYWMPVYGVLEGDFELVVGNAQHIKQVPGRKTDVSDSQWLAQLLRFGLIRASFVPPKPLRELRDLLRYRRKLVRSRSAERNRLQKLLETGNIKLASVMSDVFGVSGKAMLQAILEGTRSNEEIVELARGSLRRKRLALLDALEGQFEGHHRFVLQTQLERLDELERHIATLEQRIDDKLTPYRAEHTRLTQIPGVSWVVAATIIAEIGVDMSAFKSAEACAAWVGVCPGNHESAGKRKRVGTRQGNEHLKSTLVEAAQAAARTKRTYLRDKFHRLRARIGHGKAVVAIAHKILRSAYHMLRTGSDYRELGESYLDQRDHKRLTQRLVRRLEAVGFHVTLTACEPPVPADATSEPPDPPSPAPPAPTSSAPAPTPSAPPASSAPSAPSAPSPRPGSQTAANAARRRRARARDPRLPPVGHTLRRTYRGVEHHVLLLPHGFEYGGTLYSSLSRVARAITGTAWNGFRFFRLGAKGATPV

SEQ ID NO: 132717 - protein, 422 aa, unidentified
MLAESHDEEQIIARVAALDIAKAELVCCVRVPSPAGGKRRLQEVTTHSTMTQALTELANRLVEMGVQRVVMEATSSYWKPVFYLLEAHGLDPWLVNARDVKHLPGRPKTDVLDAVWLCKVAERQMLRPSFVPPWPIRRLRDLTRYRTDLVAARTAEKNRVEKLLEDACIKLSVVASDIFGVSGRAMLAALVAGERDPKVLAQLARARMRGKIDRLEQAFDGHFADHHRFLLSRMLSRIEGLDADIAAIDAQIEAQLAPFAEAAAHLDEIPGIGSVAAAAIIAEIGVDMSRFPTAGHLCSWAKFAPGINSSAGKTKRSASSGHGNPYLARVLGEAAVGTTKTNTFLAARYRRIARRRGQPRAVVAVGRSILVIIWHLLHDPDARYQDLGADYYNRHVDPSAKKRSHIRQLEALGYTVTLTPAA

SEQ ID NO: 132718 - protein, 429 aa, unidentified
MDHSASLTNPIVAWIGLDWADQKHDVCLQATGSTEVEHVVVEQKPEALHAWVAELRRRFPHGPIAIALEQSRGSLFYALMNYEFLRLYPIPPKALADYRKALYPSGGKDDPVDAQLLLEFLRKHPQRFRPWVADDVQTRQLSLLNEHRRQLVDNRTALTNRLTTLLKGYFPEALRWAEDLRTPLAWDFLAQFPSLERAQQASRLEVLKVYRAHTRRPPEQLEVLCDEIRTARPLTTDRAIIDSSVLMVEILVEQLRVLGAGIERVEHQLADVFAAHPDRLIFQSFPGAGKALAPRLLAAWGSDRQRFPTAANMQCFAGPAPVTVRSGKSKWIHRRYACPTFLCQTFHEFAAQSRLKSPWAKAYYQQMRSKGADHHPTVRALAFKWIRIMFRCWQDRTPYDETRYQQALARRGSPLSKSAGRLATSPAGG

SEQ ID NO: 132719 - protein, 491 aa, unidentified
MVLGDVGDSGESERSDIPIERVSKDDVPDPARHSFFIMEGDMAKRKQPFEVKFPNAAGIDIGSSSHFVAVPPDRDDTPVREFPSFTVNLQEAADWLTACGVESVAMESTGVYWIPFFELLESRGFTVFLVNARNVKNVPGRKSDVLDCQWLQQLMTFGLLLGAYRPPDDICALRAISRQREMLLSYQARHIQHMQKALVQMNIQLGNVISDVVGETGQKILRAIIAGERDGKVLARFRNNHIRANEEEIAKSLVGNWREEHLFALKQAMALYDAYGERLVECDQELEMMLAHLGWYDGEPGKARRRSRAKNAPRFDARTYLFKMCGVDLTRIDSIEATTALKVIAEVGTDLSRFPTVKHFTSWLGLCPGTKITGGKRLSGRTKRTANHATQALKMAAASLLKSQSALGAYYRRMCARLDKSKAITAAAHKLARLIYAMMTKGTEYVDRGQDYYEERYRERVLHHLKRKADAMGFRLEPVADGGNNLSHSVT

SEQ ID NO: 132720 - protein, 369 aa, unidentified
MADRITYVGLDVHKESIVVAVASGGLRGEVREYGRIANTATALDRLLRKLGDAGMVLRFCYEAGPCGYGIQRHVSARGHECVVVAPSLIPKRAGDRVKTDRRDAASLVKLHRAGELTAVWVPDPQHEAMRDLVRARLDAVHSLRRARQQLSGFLLRQGCHYGRPAWTKLHRRWLAGLIFDQAIHHIVLEDYIAAVEAAEARRDRLTAQIETMLPDWTLAPVVAALQTMRGMAMVNAATLIAELGDLSRFADPRQLMAYLGLTPSEYSSGSSVRRGGITKAGNGAARRLLIEAAWSYRFPARLSRELLLRQESQPKPIRDIAWKGQVRLCARYRRLARTAKPANVVTTAIARELTGFVWAIARQVTVTPG

SEQ ID NO: 132721 - protein, 401 aa, unidentified
MLFCGVDWAADHHDVCLVDGDGAIRWRGRIAHDPGGIERLREAIAAQEVDPAKVCVAVEISHGLLVGALVEAGYVVYPINPKAAERFRDRRKPSGGKNDRLDAEVLAQAIRTDRASLRALLPDSPLANEIATLARDRHSLVREQTRLGNQLRSALGEYFPAALIAFDLAADSTIAFLERYPTPEAAAKLSAFQIASFLRARRANRDLAAKAAAAKEAFRAPALRARPEIVRAKARLVRVICAQLRALRPELAAYEHELERLLKTHPEGELFLSLPGLGTILASRVLAGTGDNPSRFRSAPGLCAYAGTAPIVLQSGKRAVVKARSACPKEFRDAVQQWADQARRHSPWAAEFYRRHRARGHNHNESLRALGNRLLELLFDLRRKGVRYDEAVHAANIRWAA

SEQ ID NO: 132722 - protein, 369 aa, unidentified
MPHVTSIGLDVHARSVAAAAFNPFTGEVVHRDFGTDAAEIAEWALGFEEPRACYESGPTGFHMARELRALGLDCAVAAVSRMQRPAADARRKNDRRDAEFIARMLATHNIVEVPLPDAAVEAARDLDRALDDATAEYRRARQRLNMFLIRLGHVWDERNADGTRKGSWTRAHWRWISGIRLEGPQRDVLEYYVTAARCAESDRRQLEKKVLALARTDRWRPAVEALSCIKGIDTLTAFRLAAEAGSFTRFRTAPAFASWCGLVPSERSSGETERRGGITKTGNRLARTALVESAWHYLTCTPRPKAPAPGADVPAAIRARADDCTARLCRRREALAAAGKSSCKANAAVARELACWVWEIGRRAEGTLG

SEQ ID NO: 132723 - protein, 366 aa, unidentified
MKKISTVAKRGNEIFKEPKLTIGLDLGDRASYYCTLDEAGNVILEHSLPTTPKGIHQVFSRIPRSRIALETGTHSPWVSRHLSQLGHEVIVAHARNVRLIGESSRKDDQLDARTLARLARIDPGLLGPVRHRSAKAQIHLTVIRARAALVSARTALVNAARGLTKSYGERLKKCGTGQMNREIAKGLSQELRDALQPLLEEIESLNKRIAEYDRRIEQIAKEVYPEVALLQQVKGVGTLIALTYVLTLDDPHRFRRSRDAGCFLGLRPGRRNSGMSEPQMHISKEGDRYLRTLMVQGAHYILGPFGQDCDLRRWGLKLAERGGKNAKKRAVVAVARKLAVLLHKLWVSGEVYEPLRNNHQVVSAVA

SEQ ID NO: 132724 - protein, 352 aa, unidentified
MIIIGVDFHPEFQQIASVDTDSGEFQEKRLAHPEEAEKFYRALTGQKVRVGMEASGHARWFERLLAELQFELWIGDAAEIRAKRVRKQKTDRQDAQLILQLLLEERFPQIWVPSWENRDLRQLLWHRHRMVQARTRIMNQLQAIALNEGLRCKKRLWRERGREQLEAFRLAPWASRRRRDLLELLDRLNPIITELTHAIEQEVEQCPAAQRLMTHPGVGPLTALAFVLIIGKADRFQGGKQVASYLGLVPWEDSSGNRRRLGHITKQGSSMLRFLLVEAAQVTVRSLPQWRSKYFHLAMRRGRKIAKVAMARKLAVRLYWMWRQGWDYEQLTKFGSHAGQPGNRHGVQSNTE

SEQ ID NO: 132725 - protein, 412 aa, unidentified
MAKRTVEFEQVIERGCGLDVHRDTVVATVMGKGIQTETRTFGTTTRSLKALGEWLESLQVTDGAMESTGIYWKPVLHVLREYPLNLLVVNARHIKNVPGRKTDKADSQWICKLLISGLLKGSFIPPENIQALRDLHRYKKKLVGTVASEKNRIIRVLEDANIKLSSVVSDTSGVTATYLINGLIAGRKDLERLVSECYHKKLQATPEQIVEAINGRLTSHLTFLLKSMQKHIQSVQEQLAEIDAEIETHIKGFENEIELLQTIPGVGKEGAIGIVAEIGVDMDVFPSEHHLASHSGMCPGNNESAGKKKSSRTRQGNKHLKATLTELAWGAARTKKSFYKAKYESLVVRRGRKRALIAIGHKILCASYHIIKNKEAFKELGYEYLAERKKKNRLEYLKRELKEHGYKVEKAA

SEQ ID NO: 132726 - protein, 373 aa, unidentified
MADRFSFTHDTAAIRSMVSRLRSANVAGIAIERGDGPVVEELLAAGLVVFVMPSRQIKGLRTRYGSAGNKDDRFDAYVLADTLRTDGHRWKPLRPDTGPTRALRALCRSRKDLVETRVLVTGQLRANLELAFPGAIGLFTKPASAISLAFLQRFPAAGKAAWLSPSRLASWLRSAGCTGGVSAGTLYGRLAAAAPGLTGPEGDARGQITLAFVAMLRTLNEQITVMDAEIGRLFAAHPDRHIFASLPRSGTVRGATLLAEIGDCRQRFPTDDALAALAGACPSTRQSGKRSQAVFRWSCSKKLRAAVMDFANGSRMSDPWAAAIYAAATGRGCRHPHAIRILARAWIRVIWRCWQDGTAFDPALHRGRQAAAA

SEQ ID NO: 132727 - protein, 385 aa, unidentified
MEIYSNTRAIQRYIALDIHKEYILAGGMNASQAWVLSPHKIEMSKFREWAKKNLCESDAVVIETTTNVWDIYDIVQLLVGRAVVAHAGAVRQIAEARVKTDKEDVKRLIRLLIADIVPEVWVPPQPVRELRGLVSYRQRLVKTGAMIRNRLHSLLHRHNLLLPEEGLADQEWWTQQEKIPALEKLQIGQELCMLHQIETHKAEVDQELGRQSLGETWGKAAVRLMQLPGMGIVVAMTVLSAIGDIHRFESADKLVGYSGLGAGVHDSGKEHIEKRITKSGRKELRWAMVEAAWRAVRMSPYWKEQYEKFLARMRRPNPAIVVVARKLLIAVWHVLSKDEINEHATEEDLAYKMLLWSWSLSEDSNLCSTNLYHCHCFASIMRSTA

SEQ ID NO: 132728 - protein, 343 aa, unidentified
MQTITTVGLDIAKSVFQVHGVDVQGEVLIRRQLKRRYVLAFFQKLPPCLVGIEACASSHHWSRELKALGHTVRLMPPAYVKPYVKRQKNDAADAEAICEAVTRANMRFVETKTPEQQSGLVLHRTRHLFIRQQTAVINAIRSHLGEFGIVAPVGRNGVEDLLDVVADPSDKRVPEIARACLAALGAQLHRLKEQILEFDCMIRAWHRSSEMSLRLDDCPGVGPVLATALAATVADPKAFRSARNFSAWIGLVPKQHSSGGKNRLGSISKQGDRYLRSLFVAGALAVIRYAKIHGTKHRPWLTALLARRPTKIAAIALANKIARMAWAMMARSERYKEPVALAA

SEQ ID NO: 132729 - protein, 462 aa, unidentified
MRRKAKSEATHSGMAVVNPNAAAIDIGATMHVAAVGADRASDPVRSFGTFTADLHRLADWFAECGVKTVVMESTSVYWIPIFELLDERGFEVLLVNARDSKHVPGRKTDVSDAQWLQRLHSYGLLRASFRPKGEIVELRAYLRQRERLLDTAASHIQHMQKAMTEMNLQLHHVVSDITGATGMRIIRAIIAGERDPAVLASMRDTRCHSSVEVIEKALTGHYRGEHLFVLEQALALYDVYQQKVAACDIRIESVLKELSSIRGRKEDARADVSGSSRRRSRQSNGPDFDVGEALHSLLGKDLTRIHGIGPYLALKLVSECGDDLSAWPSAKHFTSWLCLAPSNKISGGKVLSSRTRRSGSRAASLLRLAAVTIGRTETALGAFYRRLSARTGKAKAVTATARKIAVLFYNALRHGMDYVDPGASYYETRYRERVVKNLHRRAKAFGFVLQAADISAAEQAVS

SEQ ID NO: 132730 - protein, 402 aa, unidentified
MNAVGIDVSKGKSMVAIMRPFGEVVATPFEIKHTTSDINSLVKFINSVEGESRIVMEHTGRYYEVLAHQLSQANIFVSAINPKLIKDFDNDSLRKVKSDRVDAIKIARYALDKWQNLKQYSVMNELRNQLKTMNRQFGFYIKHKTAMKNNLIGILDQTYPGVNTYFDSPARSNGSQKWVDFASTYWHVDCVRKMSRNAFINHYQNWCKRKKYNFSQSKAEEIYGKAKELVPVLPKDEITKLIIKQAVDQLNSASTTVESLRTLMNETAFKLPEYPIVMAMKGVGPSLVPQLMAKIGDVSRFTHKGALTAFAGVDPGVNESGTYEQKSVPTSKRGSSDLRKTLFQVMDALIKTKPQDDPVYQFLDKKRAQGKPYYVYMTAGANKFLRIYYGRVKEYLSSLSES

SEQ ID NO: 132731 - protein, 342 aa, unidentified
MNKPVRIGMDTAKSVFQLHGVDENEIVVVRRQFRRAEMIRYFEKLPPALVAIESCGSSHHWARLLQSFGHEVKLLPPQYVKAYVKRGKNDAADAEALCEAVTRPSMRFVPVKSLERQAACMLMTVRERLVGVKTQLSNAFRSYAAEFGIVGPAGRQNINALIKQVLENDGLTALAQDLFRLQAREYEAVEARLEEIETKLRKWHREDDVSRRIATIPGVGPIGSTMLSMKAPPAETFRSGRDFAAWLGLTPRDHSTGGRMKHGGITKAGDSALRSVLIVGATALLRHVRKGRHKPTPWLAALLERKPPKLVAVALANKFARIAWRLMISGGVYNRPLDAIPT

SEQ ID NO: 132732 - protein, 349 aa, unidentified
MTMLTDQVEVVIGVDTHKDTHTAAVVDTRTGAVLDRTTVDADRDGYTQLVQSAQSHARLRAWAIEGTGGYGAGLARHLGDRQELVVELDRPTRPARRAGAKSDAIDAERAARDALARTHLAQPKTGPQRAALQMRLTARRAAVEAATTAQQQLHALVITAPEAVRARFRDQSTARMLTTALRLRPSRCTDQEISTALAVLRDLARRHRHLRTEADQHERAIRAIVTTWRPDLLHLPGVGPIVAATVLTAWSHPGRCRNEAAFAMLAGTAPIPASSGKTIRYRLNRSGDRHLNRALHTIALSRLRYDPTTRAYADRRRAHGKTDREITRCLKRYIARQLYRQLQHTPTTT

SEQ ID NO: 132733 - protein, 425 aa, unidentified
MNYKQNEKINQVKESTLVVGIDIGSTTQYARAFDWRGIELGKVFTFSNSREGFEAFKAWMQHLQDKYRKSDVIVGIEPTGHYWFDLGAYLEDEGILLVMVNPYAVKQTKELDDNSQSKNDRKDPKVIAKLVTEGRYSAPYTPDGVYADLRIMVTNRKRLIREMTQIKNRFARWFAIYFPEYTDVFGDYEAQSSMLLLKKVCTPEAIVELGAEKINQIWRDAKLRAVGMKRATTLCETAKRSIGLKKGSSAARYEMKLLLEDYEYKKAQLDAVMEEIEKLCRKIPESEQMLAIKGIGVITVAGFLAEVGDVRRFESPRQIQKLAGLSLRENSSGKHKGQTTISKRGRSKLRAVLFNAAIPLIAKNPEFKSLHEYYTTRANNPLKKKQSVIAISCKLIRVFYAILANGVTYDSQKLLSDIHRQPQVA

SEQ ID NO: 132734 - protein, 394 aa, unidentified
MILVGIDIGKKQHIFSIVDKDTGEILSDPSAFHNNLEGFLLLIKKLGSYAKPNLLIGMEDTGHYHFALLKYLLDRRYTVALVNPTTTDLTRKLQGGITKNDSLDSLTICDVIGSNQRKKPYRITKVNRFDLYEQKQLTRHHHNLKEELNIYKNRLQKCIDIVFPEFNSLFRSKYGIVYRNVLKTFASAEKIASSDIRTIRKCFEYNGRGKRIPLSAEQLKTAAKDSVGIPSVAEEIQIRHLICQIEMIEEQLSEIDKKIEEFSLQNNSPILSIPGISHFSGTSILAELGDICNYTKASQIIKFAGVAPYHYESSQFTAQHTAITKKGSRYLRKTLYQIILPVINHNKVFTAYYNKKLAEGKGHRCAQGHCIRKLLRIIYHLLSTGQDFNPALLI

SEQ ID NO: 132735 - protein, 408 aa, unidentified
MKRYYMGVDWGDRLHQVYVGDEEGKKVREMKVQESPEGLAETGRWLDERRAEGIELWAAIEKPAGRIVDFLLDHGVEVYPVNPKAVDRVRDRYRMSDSKSDVFDAYVLAEFLRTDQAHLRVLRPNSEKAQELKMLSRDQRRVGRHKTRLLNQLTTTLKEYYARPLEVFEDLETGLALDFLQQYPTPAHLSALKCKEFNRFATKQHHLSKQRCEQLWEKLQKPQLAVPEHVVRAKAQLVEVLIEQLRASIKAVKIYNHKVESFFASSPAAQFAKTLPGAKSGTLVAAIWAELGDAQGRWQSSRHLQAEAGVVPVTKASGKSRVVHFRFACNKHLRHTLYWFSFVSVNHSEWAKLYYRGQRDKGHSHHQALRALGAKWLKIIFVMWRDHKPYDENYHLANIARQKMRQAA

SEQ ID NO: 132736 - protein, 403 aa, unidentified
MIFVGVDWAENHHDVCLLDEQGANLGKRRVPEGLDGSRQLQELIAEHTEGPEQVVIGIETDRGLLVRSLLAAGYQLYAINPLAVDRYRDRHTTSGAKSDTGDAKLLADLVRTDRHNHRPVAGDSELAEAIKVLARAHQNLIWSRQRQLNQLRSTLREFYPGALAAFRDDLGSADAIALLERAPTPYRGRSISQAKILSALRKAGRERNLEQKTAEIQAQLRAPQLQMPNSVAQAYGHTVSALVLVIKQLNLQLRELEQELNQGFEMHPDAEIYLSLPGLGNVLGARVLGEFGDDRTRYSDAKARKNYAGNSPITKASGTKQVVLKRFACNRRLADACHLWAFCALKASPGARRYYDQLKARGKTHRQALRALANRLVGILHACLQHRQPYREEVAWPPLAAAA

SEQ ID NO: 132737 - protein, 440 aa, unidentified
MRRGTRMGNCRVQESAAHRISMTKEKRKVCGIDVHKSFLVATILDREGNVETRRIRQDPESLLELRDWIQTEKCESVAFESTADYWRSLYLVLEECVPVTVANAHHIKHVPGRKTDIIDSRWIAQLELNGLIEPSRIFFGEKYDLRSLTRSRELLVRNRTELKNKIHHLLDASSIRLSSVLSDLFGKSGSIILKGLVQNKPVEEIITSLPRKMRGNTDAISATLPAAVPPVTLILLQSYLKLVDDLDAEIKLLEGRIRESLAGKSRELQILTSIPGIGFIGASTLIAEIGNVHDFEDADKLAKWAGLTPSVYQSANVTRTGSITKQGSKHIRWILVELAHIAIRSPGRIRSFFERLLPKKGYKKSIVAVARKMLRIVWHLLVHDEVFIDDFPRSKQVKFPKLPKKIQSFGINRIIELLAKATEVVIRDNNQKIFRLDFTA

SEQ ID NO: 132738 - protein, 483 aa, unidentified
MKSKPEEQNKRATNHPTQHHWHEMNRKQRREMTRQIQSEDLSLEVIHPDAAGIDIGNESHYAAVPPSRDSQPVREFGCTTAELKAMAAWLKQCRIRTVAMQSTGVYWVAVYDILEQAGLEVYLVNARDTKNLPGRKSDVQESQWLMKLHTYGLLRNSFRPSQEIRVMRTYWRQRNDLVQSAGRHILRIQKALTQMNLQLANVLTDISGATGQAIIKAILAGEHDPHKLAEFRDPRVKASEEQIAQSLEGNWQPDLLFLLKQEQDGYEFCHKQMAECDRQLAQYLQQREDRSQSAPLPEEKRKGRLKKKKGNAPQFDLREGLFRMTGTDLTRIDGIDVMTATTVISEAGYDMSKWQTENHFVSWLRLCPDNRISGNKVIGKGRLPTNNPISIALKMAATTLRESKTYLGAQFRRLRTRLGAPIAIKAMAAKLARLVYRMLRYGMKYVDQGAAFYELRHRELQIKRLKAKAEKLGYRVTPIPVAA

SEQ ID NO: 132739 - protein, 397 aa, unidentified
MYIVGIDIAKRKHEAAVIDGEGAVIIKPFSFTNNCSGYNRLLAMLTKAKLPLDEASFAMEATGHYWLALFTRLQKEGFRVQVINPVQTNSIRNFYIRQAKTDPRDALLIAEVIRFGHFSESTLHPENIYELRELCRGRHAIVSMQADVKRKVVALLDQVFPEYETAFTNMFGDTSMAILQTCPTPKELSEMPLEELCHLIEVSSRKRFRMAKAQELQELARNSFGFAMAGDVFSTMIRLYAKHLDFLKQQVREMDRKIAEIMETLDTPITTITGIGPTLGAYILSEIGDISRFSSAAKLAAYAGIDPTMRQSGEYNGVRNRMSKRGSPYLRHAIWLAASSAVLHDPALKLYFQKKRDEGKPYMASVGHACRKMVSIIYAVMRDNKAYTPYIPNEISV

SEQ ID NO: 132740 - protein, 422 aa, unidentified
MEAFNVSDFAALIGIDWADRKHDICEVNRDTNTQFLSVISSEPKSINAWALELKQRYNGRPVAVACELKKGPLIYALSKFKHIVLFVINPSSVAKYRAAFTHSGAKDDPTDAIIQVEILQLHMDKLTVIRPDSEDIRCLAQLVEYRRKLVQDRVNLTNKIATTLKNYYPHVIDWFKEKDTQIFCDFLLRWPSLAHAKKARKQTLLDFFNQHNSRYPLVNEKRIKEIKGAEILTEDMAVITPNLLLIECLVPQLKQLMMAITRFDDEIKTLYKQHTDRAIFDSLPGAGPQLAPRLLAAMGSNRDRYKSAADIQKYAGIAPVTERSGKKEWIHWRYSCTKFLRQTFVEWAGLSVRYSFWAKAYYRQQEAKGKPHNTIIRSLAFKWIRILFRCWKTHTPYDESTYLTALKSKGSPLLKFAVESGL

SEQ ID NO: 132741 - protein, 375 aa, unidentified
MKEKVRFLGLDVHAETIAVAIAEPDGEVRSLGSIPNRADSIRKLIRKLGPAEKLRACYEAGPTGYVVYWQLTELGIQCDVVAPTLVPVKAGDRVKTDRRDAEKLARCYRSGDLTAVWVPDEGSEALRDLVRAREAAKQDQMRARHRLSKFLLRSGQRPPTGVRPWTRPYLIWVAQLRFTQIAQESTRQDYLHEVEHMRERVTRLEQAITEAVKLASPALQQVINDLQALRGIADISAVTIAAELGQVSRFGGARQLMGYCGAVPSEDSSGKRTRRGGITKTGNAHLRRIVVEAAWSYRRPPCIWCGLRRRQESICEEVKEIAWKAQHRLHKRYMKLGAAGKDQRKVVTAVARELLGFIWAIGIRAQTVASQQAAA

SEQ ID NO: 132742 - protein, 379 aa, unidentified
MDVLMTRCAGLDVHAETIVACVMIGEQDDELFIETETFPTLTKDLFRLLKWLENHGITHIAMESTGVYWKPVYNILEDYFDITLANAQRIKNVPGRKTDVSDAEWIAKLLRYGLIEKSFVPPEDIRNLRDLTRLRKKWIGHLTSEKNRILKVLECSNVKLNSVISDVFGVSGRKLLSKLIQNGYVDSIDVENSIHGRMKHKKQMITDSLFGTLNDHQIFLIKQSWQHIVYLESLISQIEERIDEILKNYKEEVELLLTIPGIKKDSAAIIIAEIGVNMEQFPTSQHLASWAGVAPGNHESAGKRKSTKTTKGNPHIKTVLCEVAWAISRSRNRWLAAKYWSIAARRGKKKALVAISHRMLRIIYSMLINKEPYKEPLIN

SEQ ID NO: 132743 - protein, 350 aa, unidentified
MQTIYIGVDFHARQQTICYLTTDSGELLFHHLKHEDKALVRAFYAQFRGHVIVGLEASGYSPWFERLLEELGCEVWLGHATEIRRRARWRHKNDRRDAELILDLMVHDEFPRLYLPPLQSREVLRMLRYRQKLIKMRTIGKNSLQALALQSGLAKGPHLFTKAGLQELRSATMSPAMQWQREQWLQLLEPLNERLLETMRWLQQQSQADQRISRLRTHPGVGLLTALCLVHSLEPVRRFANTRKVTAYAGLDPVERSSAERQRFLGISKGGSRVLRFLLVEAAHTAIRKDADLKRFYQRLAQRHGRPKAKVAVSRKLLIRTYIMLRDEIDYAEFQRRAVAARPVLPAHGL

SEQ ID NO: 132744 - protein, 372 aa, unidentified
MTSEHVAFIGLDTSKLKISVAVADGERNGEVRFLGDISSEPASVAGMVKKLAKRGAKLHFCYEAGPTGYGLYRQIIELGHECSVVAPSLVPKRAGDRVKTNRRDAISLARLHRAGELTSVWVPDEAHEAVRDLVRARDATFEAQKQARQQLHSFLLRHGRFYTGRKAWTRAHGRWLASQAFEHPAHQILLAEYCQAVEDAAVRLDRLNKLIGETSASWSMAPVVAAYQAMRGVAFMTAVTLVVEIGDVRRFNSPRQLMAYLGLVPSESSTGERIRRGGITKAGNARARRALIEGAWTYRYPARISSSISARLAGLPKSVCAIAWKGQVRLCTRYRRLISAGKAKTVAVTAIAREMAAFIWAIGQEVAPLIKP

SEQ ID NO: 132745 - protein, 391 aa, unidentified
MGKRYARVAYGGVDVHYKSCTVTLTDRAGKVVSRERLDHTDREALRRQVSRWPPGTPIVMEASFGWGWLSDLLEERGLQVHLSNCYKVDKMREARGLAKTNAKDSYLGSLLAGERTRWWEVWRAPPAVRDRREWMRYRADLVGVGTETKNRIHAVFHRHGVFFEDGTDLFGGKGRQFLRVLCQDGRHRGGTLPEGALEALRGLVELMLWLRDRLAGVARTLRNQLDRDALGKRLDGIPGIGLILAHTLRAEIGQIERFRSHRKLAAYACLAPQCQDTGEPDPRRAPLGRHLGSRGNRTLKWAFIEAAHGAVRHGGRWRAMWDRATQGGRQDRGRGYIKVARELVKIVYIVWSRNVAYQETPPTRPGSRRSRRGRASSRPGTGQSSRPLVQA

SEQ ID NO: 132746 - protein, 340 aa, unidentified
MTITTIGIDLAKNVFAVHGVDQNGKTVLVKSRVTRAALPGLIASLSPCVIGMEACSGAHYWARLFLQYGHEPRLMAAKFVSPYRMAGKSGKNDAADAQAICEAVRRPHMRFVPVKDESQQAMQCLHRTRQGFIEEKTATYNRLRGLISEFGVIAPQSTDALRHMVSAQKSSLPLQVQQCVDDLLEHVDRIEANITEYDRILSRIAKTDHRSQRLMKLKGVGPTTACALVACIGNAHDFKNGRQLAAWLGLTPSQYSSGGKSKLGRITKAGDSYLRTLLVQGARSVLIGAEKRTDSFSRWVCSLVERRGYWRAVVAIAAKNARLCWASLHYGDDFRLYSAS

SEQ ID NO: 132747 - protein, 337 aa, unidentified
MKKFFIGIDFAKTKFDVVVLSKDDLVSKGEYNQFCNTKDGVKQLEKWLRQVCGNDVITECVICGENTGVYSVLAAKMLTRDGYTVCLESALRIKRSMGISRSKNDKKDARDIAEYAARHYDKLVVYQEPSLTSEALKTLFTQRRLLVKQKSDLQRRNKELTGLYKDNPLLKKMLASDKRIINAIDAEIEKIEAQMKSIIEGNPEVKKVYDILTSMKGIALVNAVALIVYTDNFKRFDYDARRICSYWGIAPFANQSGTSINGKPHVSHFADHYLKSLLSQAVVCAIRFCPDISNYAQRLLARKKHISIVHNNCKNKMIHILVAMVKNGTLYGEIQKN

SEQ ID NO: 132748 - protein, 362 aa, unidentified
MDAHKNSIAVAALFPDRPEAVEWTEVTTPEAIRRLGRKLRREAPGEVRCCYEAGPTGYALHRQLEAEGVVCEVVAPSLTPVKPGSRIKTDRRDARKLAELLRAGLLTEVHPPSESDEALRDLCRCRDDVRVDLLRARHRLTKFLLRRHCIYRQSKHHWGTRHWAWLEELRFDDPVSQATFDSYVLSVRQLEERQHQLDAQLAQYGGQDPYREPVGWLRCFKGIDTVTAVCLIAELHDFRRFRSARELMSYVGLVPSERSSGERERRGSITKAGNRHVRRLLVEAAWHHRHRPMIGAPLQRRREGQPARVLAIADRAQERLCARYRRMTGRGINNPKTIVAMARELTGYLWAVLHPAAIETRN

SEQ ID NO: 132749 - protein, 412 aa, unidentified
MVCNLLRGRSELEGRATCAMVPAWEFSHEPEKKSSPCPLFIAFESEQHLSACDALIVEPAFISLDLAMTAPDRSSSSDSVPPAAHHVGIDVSKASLEIALIRSEEDDFASKTVSNTEDGFDELLNWIETQADVRLEENPEQVHVCLEASGDYQRPAARFLQKRGLTVSIVNPLRTSAYAESQLSRSKTDKVDARLLARFCRREEPSPWEPAPSEQKSLKEMTRGLEQLKKERDRLKNQIRQSENPTVTSSLGSVLESINEQIDQLEDQVDKHVESTDTLARNRDLLETIPGIGSTTAALVLAELGDHERFECARQAAAYAGLTPSHHESGSSVHRKPRLSKVGNSRLRRALYFPAIAALRCNAAVEALGDRLAERGKEKMVIIGAAMRKLLHICYGVLKNQSSFDPSLHPGT

SEQ ID NO: 132750 - protein, 423 aa, unidentified
MPYRIAGIDVHKKKLAVVVADVEVEDEYQFERRWYGSNPEQLRVLSEWLIEQQIEEVVMESTAQYWKPVWGTLERYWKPKCQSREGAGRMSGTLHLAQALSNRGRRGRKKDFRDAERLVKRLVSQELVLSFVPDTEQRMWRTLTRTRYQRTRDKVRLQNQLEALLEEAHIKLSSLVSDLLGASARRMLKALADGETDPAALAALADQRLRATPAQLHDALGACTELNPVYRRLVKMTLDGLQFVEQQIGQLDQEMASLLRQHQDAVERLAVVPGLGVDSAQQIIAEVGAKAATFPSGEKLSSWVGACPGEEESAGVNRSRHSPKGNRQMRRVLNQAANAAVKHKGSIFEIVYRRLVPRLGHNKTIGVIAHRLCHLIWIILHKGVRYEERGPSVSEKSRQRRTARMVRTLRILGYRVEPLANPT

SEQ ID NO: 132751 - protein, 396 aa, unidentified
MKTTSDVSAQKKGKKVKSFPIINAHAAGIDIGADSHWVSVPSEQDSQPVRRFACFTSDLHALADWLKDCKVETVAMESTGVYWIPLFQILETQGFEVKLVNAHHVKTVPGRKSDVLDCQWLQQLHSYGLLSGSFRPNDQICVLRSYIRQRDTLIKSASTHVQRMQKALTQMNLQLHRVISDLTGITGMAIIRAIVAGERNPQVLASLKNPRIKSSVSEIAQALTGDYRVEHIFVLQQELQFYEAYQKAIAECDSQIEQCLAQFSDQVDVEAAPILPAKNRRNKPQGNQPNFDLRTHLYRISGVDFTQIDGLGVLTVQTILSEVGLDPTRFPSVKHFCSWLGLCPGSRITGGKVKSSQTRSVVNRAANAFRMAAQSLKNSRSSLVAFYRRLRSNQFR

SEQ ID NO: 132752 - protein, 409 aa, unidentified
MRYYLGVDWADQTHAVWVVEKRGTKVALRTVPHTAEGLSEWGRELDEWRAQGIELWAAIERPEGRVVDVLLDDGVVVYPVNPKALDRARDRFRQSEAKSDPFDARVLADFLRTDHLHLRALQPSSEAAQELKLLTDDYQRQIRQQTRLVNQLTTTLKVYYPRGLEVAELTTALAREFLQAYPTPAALTALTERQWQRWARAHRLSEARTRELWAVLQRPQLPVPAHVVRAKARLMQSLVAQLTLVVEVVGAYREAIEDFFARIPAAQWIRTLPIGDHGITAPTLWARLGDAPGRWESFRHLQAQAGTVPVTLRSGKHQVVRFRFACDKSLRYVIDHVAFLSLRWSEWARAYYDEQRARGHSYRQALRALSAKWLKIIFVMWERHVPYDEQYHLATMTRQQLRLRQKQVA

SEQ ID NO: 132753 - protein, 383 aa, unidentified
MLKTPTLTPVDYDTALVLALEISNKSWVVAAHVPGIGQVKAKQVIAPNANALEAAIERYRGRAAASARTVERVILVYEAGYGGFWLARWLEARGIGVHVIQPSSVPVERKKRRAKSDTIDAELLLRTLLAWLRGEPRVCSMVPIPDEDQEDERRRSREREELLGERISITNRIGAVLTTLGINGFKPLRKDRRAQLEALRTPSDQPLPEHAKAKILRSIDRLELVMAQIAALEDQRDAVVVKEDPGAAEKMIQALVLLRSIGAQTATVLVYEAFVRQFCNGKALGSYAGLTGTPFNSGGSEREQGISKAGNQRLRATMGELAWLWVRHQPESALSKWFRERLGGAKGRMKKALIVAMARKLLIALWRYATLGVIPEGAVMKPV

SEQ ID NO: 132754 - protein, 400 aa, unidentified
MKTVLSVDVAKNKSMIMLMNNEGEILIDTKEIKHNLGEFEKVKEEIEEINPENLTVFMESTGTYHLPVERYFKENGFNTLVINSLTTKNNFDTIRKTKTDKKDCYRLAKLFFVNEVEYHEISKKDLYANLKAMTRQYFYLTQVNIRCKNRYKRLINICFPEFEGFFARNRIYEDTALNFIKAFPHAYIVREKRIDALYNNLRKVDARHDYYYKRLARQLKDTAMNSFPGVDKDHADVKNLSDMASILQENNKLIDEIRKNMIELAKQSPYFEIVNSFYGIGEVLAAELLGELGDITRFDNHKQLIAFCGLDPAIVQSGKSINVHGAISKRGDKYARWILFNISQMVVKLGHQYPSHPVYNYYLIKKAEGKHYYESLTACSTKILRMLYSMCKNNKRFLEE

SEQ ID NO: 132755 - protein, 396 aa, unidentified
MDASGKKISERSVPHSGAGIAQLLAWITEQTMQPVDRIGIAIEIPRGAVVESLAERGYAVFSINPKQLDRFRDRHSVAGAKDDSRDAFVLADSLRTDLHCFQSVHIGDPLVIRIRELSRMEDDLRQDWSRLTNQLRDQLHRYYPQMLQLSPAADEPWIWELFELAPLPAHANKLKRNRVEKLLRQYRIRRFSALQVTSELKTQALPVAPGTAESAAEVCLLLITRLKLLYEQKSEVAKRIEVVLDQLTAASVGNCGSAHCDTEVLRSLPGVGRVVAATMIAEASQALAERDYHAIRSYSGIAPVTRQSGKKKQVVMRYGCNPRLRHALYHWSRVSVQLDQRSREHYHRLRQAGHSHGRALRGLADRLLALLIAMLKNQTLYNPQRRQQSTARSTVA

SEQ ID NO: 132756 - protein, 354 aa, unidentified
MNKIKQLNFVGKVIYCGLDVHKTNWKINAKMEGLEVAAFSQNPDPLVLKNYMDRNYPGAELKVVYEAGFCGFEIQRSLTSLGVECIVVNPADVPSGDKDRKRKDDKRDARKLSTELSNGNLKGIYIPDKQMQDARCLVRQRHRLVQDQTRCANRIKHLLLSNGIKTGEKTEVMSLRFIKKLQQLDCGSICLKSSLQFAMEQYLQTRRILKEITLAIRDLSKQDSFKKVQTILQSIDGIGLINGMVIQTEIDDIHRFKRLDSLCDYAGFVPDIYSSNDKMVVRGISKRRNEYLREAIIESSWTLIRKDPAMLMKYNEYRARMNGNKAIVRIAKHLLSRIRFLWKNDQTYVRGIIE

SEQ ID NO: 132757 - protein, 372 aa, unidentified
MTNHEAFVGFDVHKETIAVAIAKGGAGGDVGGFGTIKNSKQAVALLARKLARTHGKLSFCYEAGPCGYAIYRQLADLGHDCQVVAPSLIPTKPGDHIKTDHRDAVTLARLLRAGELTAVWVPDQAHEAMRDLVRGRIAVMQSVRKARQQLQGFLLRQDLRYPGKSPWTKLHRDWLRSLTFAYPAHHVLVHELLHVIEEGQRRQQRIEQQIQALLPTWSMAPIVRAIQAMRGVSVIAALTLAAEIGDFRRFDNPRQLMAYLGLVPSEFSSGKRVTRGSITKAGSAHARRVLIEGAWAYQQRAGISKPHMQRLTNLPTQIREIAWDAQLRLCARYRRLAAKGKCKNVVTTAIAREMAAFVWAIAREVEPVRIAA

SEQ ID NO: 132758 - protein, 355 aa, unidentified
MREEKYIGMDVHQATISVAVVDVHGKLIMECLLETKAATIIEFIQGLRGTLSLTFEEGTSAAWLHDLLKPHVNRLVVCDPRKNALLKEGNKSDRVDARKLAELLRTDQLKPVYHEEHGMRTLKELGRSYLTLTKDVTRVMNRIKALYRSWAIPCSGTTVYTPGHRAEWLAKIAEPGVRVRAEHLYQQLDSLQPVRLQARRELLRESQKHAAVKLLRQIPSIGPIRAAMLVALLQTPHRFRSKRQLWAYSGFAVETHDSGEYRNVRGKLQRNRERMSVRGLNDNHDKDLKNLFKSAAISASTRPGPLHDFYVARVEKGMRPTMARLTLARKIATIALTMWKKGVGFDPQQLHRQAA

SEQ ID NO: 132759 - protein, 386 aa, unidentified
MSGSFLSQEAWSLPIQKGPDLIPAAPRRTNSSQPCRVSSRPPYPRSTAKGHKSSITAAAIDSSGCQLGVRRFIVNAGTAKQLLGWAAQWPERRFAIEGANGLGRGTAQILVAHGEAVVDVPSTLAMKVRVLSTGGGRKNDPADAFAVALTGLRQESLRVVVAEDQSTILRLLAERREDLGHERARLLNRLHRLLRELLPGGVEPGLSADKAAAALRTIRPATATDAVRRELTKELLADLRRIDSSIKSNEAQTRTVLEASNTTLQEIPGIGVVLAAKLLGHVGDITRFPSASHFASYTGTAPLEASSGNHHRHRLNTGGNRQLNSVLHTMAVCQSRDPGPGRDYYLKKIAEGKTPREARRALKRRLSNVLYRQILHDHHHAEKTAA

SEQ ID NO: 132760 - protein, 347 aa, unidentified
MIIIGCDFHSRFQQIAMLDTETGQVTERRLDHESGEAQTFYEGLKEPALVGIESMGYTQWFEELLAEFGHELVVGDAAKIRAKEPRKQKHDRRDAAHLLNLLVKGDFPRLWLPSAAERDARVWLEHRHQLVQMRTRTLNGLQAVALNHGLCLRQKLWTKHGQAELKKLPLREGRARRRADLLALRAQLDRWIAELDERLAQEVAQRPDAQRLLTHPGVGPLTALGTVLILGPVERFPDAKHVTSYVGLIPQEESSGGRQHFGHLTKQGNRLLRFLLVEAAQTASRFDPTLRRAYRRLTFRRGRAAAKVAVARKLAIRLYIMLRDKIDYEEFCRRGSHAGMLGEVALA

SEQ ID NO: 132761 - protein, 349 aa, unidentified
MIIIGADYHPGFQQIAFVDTETGDCGERRLEHCEGAQKFYRDLATQGKKVRVGMEASGHARWFERLLGELNIELWVGDAAVIRAKRGRKAKTDRQDAQHMLNLLLKDDFPQIWVPSWENRDLRQLLWHRHRMVQARTRIMNQLQAVALNEGLRCKKKLWGEQGREQLEAFRLAPWASRRREDLLQLLDEINPTIAKLTLAIELEAEKCPQARLLMTHPGVGALTALAFVLIIGKAERFQCGKQISAYLGLVPIEESSGERRRLGHITKQGNSLLRFLLVEAAQATTRTIPEWRSKYIHLMMRRGRKIAKVAMARKLAIRLFWMMRQGWNYQQVSKFGSHVGQPGNRHGV

SEQ ID NO: 132762 - protein, 429 aa, unidentified
MKIIYPRVCGIDVHKKFIVAVICISESVEPIYLKKRFSTFHNDLIRFRDWLIQNDCQNVCMESTGKYYIPVYNILESHISNIVVANPKWVRAVKGEKDDDKDAKWIADLFKLGIVKSSFIPQKDFRILRELTRYKYKLVNMRSSEKNRYQNALTSGNCKLDMVFTDVFGKSASNIIDLILSDNPYTDEDILSKVHKNCKASPDMILNSINGTDLTPVQKSRIELVNDHIKQLSSNIQKLDKLIDLMIEPYEDYISFLCQIPGVSRNSAITILSEIGVDMNQFTSTRRLTSWAGLTPSSNQSAGKKKSVRISRAGVYLKPCLVEVAHAAVKDTNHPYYANKFNKISKRRGKKRAYIAIAKKILVAAYHMLLTGEIWNPADLAEVETPVEQRIKYVKNNLKSDIKQLLDIGLTVEELTLMIQQNANNIATQ

SEQ ID NO: 132763 - protein, 350 aa, unidentified
MTQFSKIIGVDLAKSVFQLALADTHHHVHQSKRLNRTQFHTFFVNHPPVHVVMETCGTAHYWARTLMAMGHTVTLLPAQYVRPYVRRNKTDANDAMALVEAARNRAIRAVPVKTEYQQALQSLHRLREQWKTTRTARINALRGILREFGVLVPMGPRAAITTTRAALDALPPLLHTSVQAVLDELTDIQTRITTLEKQLKQAVKEDVVIQRFMQINGIGLLSATAMRASVQSPAQFKNGRQLSAWLGITPREYSSGNQRYLGRITKRGDKYLRTLLIHGARSVMARNKIRQRNNEKLNSLQQWAIQLEQRVGHNKATVALANKMVRILWATWMHQRAFDGNYAGQELNAV

SEQ ID NO: 132764 - protein, 363 aa, unidentified
MYSERTSVGLDVHARSVAAAAIDSVTGELKQARLTPSHDHIRSWLDGLAGPVAVTYEAGPTGFGLYRSLTEAGVRCVVAAPSKLQRPAGDRVKTDAKDAVHLARLLRLGEVSPVTVPSVAQEAARDLVRAREDCRGDLMRARHRLSKLLLRQGIVYSGGQAWTGAHDAWLRRQRFDNRATQLAFESDYDAVLAVSARRDRLDTAINDSAADSEFTPVVRRLACLRGVSTLTAFALAVEIGDWHRFSGNSIGSFVGLVPSEHSSGASRAQGSITKTGNTHARRLLVEAAWHHRARYAPGKTMHDRWEVAPPAARARGDAGNRRLHARWVTFNLRRKRPVIANVAIARELAGWCWSLAVLDSDTS

SEQ ID NO: 132765 - protein, 341 aa, unidentified
MKQATTIGLDIAKHVFQVHGADGAGHVLFRKRITRVKLLGFLAAQAPCVVAMEACAGAHYWAREIGKLGHHVRLIAPAYVKPFIKRQKNDAADAEAICEAAQRPSMRFVPVKTEEQQANGIVFRARDLLVRQRTQCVNALRGHLMEYGYVFPKGITHVETLVALVEDLQSPLPSSVRIILKLLVDTFTALEAQIAVLDAEINQRSKSDPTARRLMTIPGVGPIASTAITALVPAAEGFPAGRDFAAWLGLTPLQKSTGGKQKLGAVSKRGERTIRRLLIIGASAVVQQASRRGAPKGSWLAQMLARKPKMLVTVALANKMARIIWALLVKGGTYRTPAAAA

SEQ ID NO: 132766 - protein, 424 aa, unidentified
MQSQKSTACGIDIHKDFFVAAIVNRDGSATIQKFDHTQYGLLALKSWVLSAQCSVVGMESTGNYWRPLHLTLEGYVELILANAYVIKRIPGRKTDTLDAQWIAELALNGLLTSSRVFPKDAREIRELTRARERLVDQCTKCKRIVHDVFDAACIKLSSIITDIFGKSGRYLIQGLLKGKTIDELIAGIPSKRVRKKERELKNAIKSGLSASQVIVIEQNLQLIDRMTEQIAQLDGEILSRMKDREEDLQIAMSIPGIGTIAAVTILAELGDYRDFNSPDSLASWAGMVPSVYQSADKLRTGSITKHGSKHLRRILVEAAQAAARTKNTRFSAYFRKLKNRIGYQKAIVALARKILCILWQLLMNREFYIDALNSRPKSQNLIQKQVSPQSIERSIEILVKAGYCIRKSDSPINIQRFQGAADPP

SEQ ID NO: 132767 - protein, 433 aa, unidentified
MPTTHPYDLVIGLDRSDRKADLHLIDTRTGNVQKQTVATSPEALHDWLVQLRRDHSQARVAICLEQPAANLIVFLETYSWITLYPINPISLQKFREAFVTSRAKDDGKDAQYLAELLLSHPDKLKPWQPEDSQTRQLQQLVLHRRAVVDQRTGLTNRLKALLKQYFPQALDLCGEDLWRPLATAFLLKWPTLQSLKKARKESLKQFYYLQGSRSQTLIEQRLERIDKAVPLTDELALLQSYTLRVQLLCKELQLLLKTLEQFDQQIAKVFQQHTDRPIFEAFPGAGPVLAPRLLASMGSERERFAQPENLQSFSGVAPVTKQSGGKCYIHRRYLCPKFLKQSFHEYAKESILHSRWAAAYYGQQRNKGCGHHTAVRALAYKWQRIIWKCWQTRTIYKEAIYEAALKKNKSPLIGLLDQIELGKSPVKTRAKKS

SEQ ID NO: 132768 - protein, 367 aa, unidentified
MKKVSTAAAKATKNFSQPKLTIGLDLGDRSSWYCVLDERGEVVLEQRLGTTPGAMKEVFGGMPRSRIALETGMHSPWVSQALSELGHEVIVAHARNVRLIGESRKKDDRLDAQTLARLARIDPQLLCPVKHRSAKAQADLTVIRARAGLVRARTALVNTARGLAKSYGERLRGCNVRNMNPEKAEGLSPELQRALEPLLAGIESLSERIREYNERIEHLAQESYPQVALLKQVKGVGTLIALTFLLTLEDAHRFRKSRDVGCYLGLQPGRRNSGQSEPQMHISKEGDPYLRTLLVQGAQHILGPFGSDSDLRRWGLKLAERGGRNGKKRAIIATARKLAVLLHRLWVSGEVYEPLRNSNQRAVPVAA

SEQ ID NO: 132769 - protein, 474 aa, unidentified
MKANKRKGPGGPAIKPAAHMPVINPHAAGIDVGSVEHYVCVPADAVPEGESPVRSFGAFTGDLDKLVEWLQSCGVTTVAMESTGVYWIPLAQKLEAAGIETVLANARHLRQVPGRKTDVKDCQWLQQLHSYGLIQGSFRPTQDICRVRSLMRHRQNLSQQCGQHVQHMQKASQQMNVHLHHVVSDLNGQTGLRILDAILAGERDPQKLLELRDTHCSKSTLEEMAAALKGDWKSEHLFVLKQALETYRHLLKQMGECEQEVEKALAEVVLPVAPAEAPVAPPNPPARATPRKKKVFHHVKAGTGLQRDLTKELERLCGVDLTQITGLNVLGVLIILSEIGLDMSRWRDAKAFSSWLGLCPGNKISGGKVLSSRTSHVANRVAIFLRMVGPAVGRSDTYLGGFHRRMRARLGPAGANTATAHKLACMVYHLLKYKEEFIDIDALIYQEKLHKRRVASLSRQAEALGFDLIKRAAA

SEQ ID NO: 132770 - protein, 415 aa, unidentified
MALKIVYKICCGIDVHKTFVVACIASTNDKGVTSYESHRFSTYTSGLKTLLQWLLNRNCKDVCMESTGKYWIPVYNILENDCSIVLAHPKYVKAIRGKKTDKKDAKWIADLFKHDLVVGSFMPHADIRQLRDLMRYRFKLTRFQSSEKNRLQNCLTVSNIQLGNVVSDTFGKSAQAILDKLLENPADTSLDLEPLIYKSLKKKLPELRDAIDGYITPEQVVKLKVIKAHYESLESRKAELEELILAIAAPYQQELAILKTAPGIRSDFTAIGIISEIGTNMEAFPSAKHLCSWAGLTPTNNESAGKKKSVRVSKAGCYIKPLLVQCANAVVTSKKHPEIRNRYLRLKKRRGHKKAIIAIARMLLTALYHMLKNGENYNAELYRKYDLPPVDREITVEQAIIIARNQGYKIKSATA

SEQ ID NO: 132771 - protein, 309 aa, unidentified
MHTICGVDVSKAWLDTFVAGTHRRLANTEQGCRHLAELCRQQGVELVVMEASGGLEQPAFLTLWQLGQPAAVANARSVRRFAEAMGVLEKTDRIDAQMIARFAEAKRMAPTPPPSADQQQLSALATRLRQVTLDLGNQKRRLHSARDHTARASLMEAIAFFTAQAKALADQIAVLIEADPLWRALDRTIRSVKGAAGRTVAYLLAELPEIGLLCNRAISKLVGLAPLPDDSGQRHGKRSIRGGRANIRSLLVLIADIVRKFDKSLADFRQRLIDKGLSKMQVRVALARKLLVRLNAKARDTRAALAHNP

SEQ ID NO: 132772 - protein, 536 aa, unidentified
MRARWIAEELRLPLGEDCSPPAQETLLGTLGSASDALPLIKDKPGFVYHPWSWALDRTAVRLWWLWDVQRKESNMRIIGIDLATTAKHRAIIADGRSRFIGPLIKFDTRLADLERLRARALEGTAPGEELVVVMEATDINWYPVAVYFCDHGATVHVVNPRMAADLARFYKRHARSDRLSAKVLARLPLVSPESVYPLVLSGAEHLALQRGCKELDRLTVESSARKNRLQAIDRLGWPGLKKRVFKAPTSPVARWFRDHFYAPRQVVDAGRDGLRQAWQAAQAYDGEEGWIEPLFELAKELLVLYGDQGSYVDYAALAGEVRREQRRLADLETDIHQVRLKITRPRYRQLHTSRNLETIPGVGQEGAAVYTSFIGTPDRFASNRSFRGWSGMVPRSRQSGESESKGLRLSQAGPNLIKKYAYLDADVARQRDPQIAAIYYDQMVNKGKHHTQAVCACATHLLDRVRVILTEDRAYELQDVNGTPVTRQQARAIVLERYTVPKEVRERNNRRARRERAEQQAERKEQRRSRTRQVRG

SEQ ID NO: 132773 - protein, 341 aa, unidentified
MNIKRIGIDLAKQVFQVHGVDGQEKAVLRLKLPRAKMLTYFQKLAPCLIGMEACGSAHYWARELEKMGHTVKLMAPQFVKPYVKSNKNDANDAEAICEAVARPTMRFVAIKTIEQQDIQAVHRIRSELVQQRTAKGNQIRGLLSEYGLVMGQRIEVLRKALPLLLEDAENGLTIDFRTLLEGLQQDLITLDERVDEMDKKIRLLASSNEDAKRLQQIPGIGPITATALICAIGDGKQFKRGRDLAAWLGLTPRQHSSGGKDRLLGISKRGDAYLRTLLIHGARSVLRVAGNKEDPRSRWIQSLCGRRNKNIAAVALANKNARIVWALLTKKTDFLPEAKPA

SEQ ID NO: 132774 - protein, 351 aa, unidentified
MAVAEGGLRGEVRDYGRIANTPAALRRLAHQLGQDGLTLRFCYEAGPCGYGIQRQLSALGHECVVVAPSLIPKRAGDRVKTDRRDAASLARLHRAGELTAVWVPDPGHEAMRDLVRARLDAVRALRRARQQLSGFLLRQGCHYGRPAWTKLHRRWLAGLKFDHAVHHIVLEDYIAAVEAGEARRDRLTAQIEAMLPDWTLAPVVAALQTMRGMALVNAATLIAELGDLSRFANPRQLMAYLGLVPSEYSSGASIKRGSLTKAGNSAARRLLIEAAWCYRFPARISRELRLRQEEQPRPIREIAWKAQLRLCARYRKLARNGKPAKVITAAIARELAGFIWAIARHVSPAAG

SEQ ID NO: 132775 - protein, 310 aa, unidentified
MDAIFVGIDVSKDRLDVHALPSGEAFGVARNGQGLEELVERLRALSPTLVAVEATGGFETIVAAAIAGAKLPLAVVNPAQVRHFAQAVGKRAKSDPIDAFVIARFAEAVKPEPRGIPDEAARLLAELVGRRRQIIEMLTAERQREKRAANPRVTKSLARTIKMLEKELADVDRDIDTAVRGSPLWREKEDLLVTFPGVSNILARTFLAEVPELGSLDRRRIASLAGLAPYTRQSGRWKGKSMIGGGRAAVRTALYMAALSASRCNPALKLFYQRLLASGKPKMVALIAVARKILTILNAMLRDQKPWQHA

SEQ ID NO: 132776 - protein, 335 aa, unidentified
MNFVGIDLHKKTITLEALNQDRHVVKRPTLACSDPQSIRRCFEQFRPFQAVVEATASYEWLWELLEPLAQRLVLAHPGKLRLIAESKNKSDRVDAHVLAELLVLDLIPPACRPGPRQREHRRLVRQREYLTHRTTAVRNKIRRLLSDYNADRPNLFTRDGLAYVATVAVAEADRFILQQLLAEWRHHEEQLQAMDKRLRQFAQAGPAREQEARDVLASIPGVGPVTIDVVLSEVGDVGRFRSAKEVVAYAGLAPGQRESAGKRKELGITKQGSRSLRWVLVEAAWRLVRCSRRWQTVFERLQRRGRKKAIVAVAQRLLTVMVALLRTGQRYRRAA

SEQ ID NO: 132777 - protein, 348 aa, unidentified
MKNTITIGIDLGDKFHIAVVFDGEGNELETARVTNTKAGVSKFFQPYKNARVAMEAGTHSPWISRLLIEMGLTVYVGNPRKLRFIWDSVDKSDARDARVLGMVCRIEPRFLHPLQHRNSQAQADLASIKSRDMLVKSRTQLINHVRGLVKANGERLPKCSSESFAKKCEPLVPPELRSALESVFKTIFHLNERIKELDRHIEHLSMERYPETQYLRQVAGIGPITALCFVLTLEDPARFAKSRQVGPFLGLTPRRDQSGDTDKQLPITKAGNSYMRQLLVGSAQYIMGPFGPESNLRLHGLSIAARGGKNAKKRAVVAVARKLAVLLHRLWVTKDNYQPFYGMNKKAA

SEQ ID NO: 132778 - protein, 320 aa, unidentified
MKVSIGIDVSMDTLDVALYDGKSHKILRCENRETGFSEIEKELIGYDRANILISMEATGIYHLKMAVYFHERGYSVSVLNPLIMKRYTEMKMLRAKTDSVDARAIAEYGYTESPCYFIPKKGQNERITQLLKLIDGLHRTKSEIRNRFHALKRVPGADETALLICEELEACINAEIRQAEQKINQILKEYYSDDNKRLREIPGVGERLSSLVIGFFGKFENFDNAKQVSSFIGLNPSPRQSGISLNGRGIISKKGNRYIRKIFYMAALSASKHNSACKAQYERLIANGKSKRVALIAVANKLARQIFAVMKYDRIYDPNF

SEQ ID NO: 132779 - protein, 367 aa, unidentified
MDGHDAAIRALTPGPRTREGCAVTRFVGLDVSQKLTAICVVDETGRRLWRGQCATDPDQIERAVRGHAGEDAHVGLETGPMTPWLVHELRGRGLTIICLDARHASAALKMQMNKTDQNDAEGLAQIMRTGWFRSVHVKSLDAHRARALLGARAQLVGMTTRLSNHMRGVLKTFGLLPGAMRGLPFDRRVEALLADRADLAPIVRPMLAAWRQLREQIAAFDKAVRALAKASPACRLLMSVPGIGVLSVLAYVSTVENPERFTRSRSVGAHMGLTPRQYQSGEVDRSGRITRCGDTLARTLLYEAAVVILTRVKRASRLKDWAQAIAKRSGPGKARVALARKLSVILHSMWRSGEPFRWSGHEQVQAV

SEQ ID NO: 132780 - protein, 319 aa, unidentified
MAQNDPVVAGIDVSKDKVDVCIRALGLQQIFPSCAQGHRELVAWLGKHQVNKAVMEASGGYEGDWAKALREADIEVRIVDPKRVRSFAHSAGRMAKNDAIDAQMIAWFAETFRQAPGQVHDAAQQELVALVKARIALVDLKMRLAAQSEHAASGQVQKARDRVLKSLIGEIAKLEATIAARIDATPPLAERAEIIASVPGFAKTTSANLVAGMPELGQVSNEIAAALMGLAPYDDDSGNRRGERHIQGGRRWVRNAIYMPCVGAATLNNPVIKAYYDHLIARGKKPKVALVACMRKLIVILNTMIARRQKWDPSRNVLS

SEQ ID NO: 132781 - protein, 365 aa, unidentified
MSSVPSAAELIHLGMDTSMKEIVAGVLRPGEEMPVVDRIPNDEESIRRLIGRFPDRRLLSACYEAGPGGYELHRLLTSMGVACDVVAPSLIPRGASDKVKTDRRDAVRLTLTHRAGLLTPIRVPSPAEEAVRDLVRARGDLLDDRKRMQQRLNAMLLRHGRIWRGAKWTYAHRVWVDRQVFDEPALAEAFALYRGALDAREAELAAAEKLLAAWAGRDPLAGPVARLGAYRGIAQLTGLTLAAEVGDWRRFASAPAFMGFAGLTPTEYSSGSRTRRGHITKAGPEGVRTALVEAAWAYRYRPAIGVTLARRQAGQSPQTLARSWKAQQRLHAKYKKMTARGKPPGVAVVAVARELAGFVWAEMTS

SEQ ID NO: 132782 - protein, 310 aa, unidentified
MHPPKVYLGADVSKASIDCRLLDQAFQVSNDAAGLRRLLARLRSQPDVHVVCEATGGYQNDLVAALHRQAIPVSVINPRQVRDFARSRNLLAKTDRLDAQVLAAFGQANGPTPDAPKPAHLQRLAALLSARDQLVGIRAEHKTRSHQITDRWLRAQTQRLIGFYDREIKKLEDQLQALRDADAQLQAKAQRLDQVAGLDWRGALGLLGYLPELGTLSRRAIAKLAGLAPLNYDSGQLRGQRHIAGGRAPARRLLYLASLTAVTKNSLFKTSYQKLRAAGKPPKVALIAIARKLLILLNSALKNPLLSLAN

SEQ ID NO: 132783 - protein, 348 aa, unidentified
MKKVVKQVLGIDVAQKELVVCLATRHDDLSDGVYNHKIFVNSTDGFGKMLKWIEKNTESTVPVIYVMEATGVYHESLAYYLTNKQKPVSIVLPNKINSYAKTLTTKTVTDKTASEAIAQFGIDRQTDLWQQPTPVYRKMKQLTREHDQLVFERTMAKNQLHAEKAEGISNQSSIARCNKRIKMLDEQIAEIRIELVALVKSEKNVANSVRLLCSVPGIGLLTASIILAETNGFDLIRNKRQLTSYAGLDVKEHISGTSVHGKPRISKRGNRFLRKAMHMPSLAATRHDERFKAIYHRLISKHGIKMKAAVAVQRKMLEMTFTICKSKTQYDKEYLKKTAAAEMLQTGA

SEQ ID NO: 132784 - protein, 441 aa, unidentified
MSPLALDVVTKTGKTPVLGRMLSKYVGRKTSSIENDITKARNHLRQRGKIMRVVFGIDVSKASSEVAILVNGEKIHGYTIPNDAIGFNRLLEDLGTVYQPEIVFEATGVYSRRLQAFFEDNSYAYIRLNPLESKKQLDSLRVRKTDKIDAEKLATSQFILNRKPSYVQEALYQELRDLSRFYQNLTEDIVCSKNRLHKVLQVTFPELENILSSPTGKQYWNLVMAFPCNSFVLELDDAALRAIIRQSTSKHISENRVTYLVDKLTKLANHSYCAVKKTSPMMEEVKYYAGELLRLSEYRQSVLEKMITLAQPLPEYEILLSIPGIAETTATSIIGELGDIRRFHSANQINAFIGIDLRHYESGDFLAKEHITKRGNPYARKILFKCIHNIASASHTNPCHIADFYEKRKRQSQVTSTKPHTIASIHRLIRTMYYLITHNKL

SEQ ID NO: 132785 - protein, 401 aa, unidentified
MKQSNATQQAVVERAVAQRVSAAGNVHAAYIGLDVHKVSISVAIAEIGRQAPEFRGEIPNEPKAIDKLVRQLSERFAGQPLLFSYEAGPCGYGIYHQVQASGHDCEVVAPTLIPQRAGDRIKTDRRDAQMLARLSRSGELTPVWVPTPEQEAIRDLTRAREDMKAGELRARQRLNAFLLRHSKIYPGKSKWGPAYFRWLEETVRFDTPVQQIVLQEYVDHVKEAQRRVAGLEKQMEAALPTWSLAPVVESIQAMRGVSLITAMTVLAELGDITRFDSPRQLMAYLGLVPSEHSSGGSRRQAGITKTGNGHVRRVLVEAAWSYRFPARKTRIIEQRAEKTSPTVQAIAWEAQKRLCGRYRRLSATGKAKQQVTTAVARELAGFLWAIACEAMGKPHGSRATA

SEQ ID NO: 132786 - protein, 347 aa, unidentified
MKVTTIAIDLAKNVFQVLGMDCHAKQVFNKRLNRTQLIEFMLQQPNCDVVFEACYSSHYWARKFLAMGHTVKLIPAQHVTPFVRGSKNDNNDTLAIYEASFRPNIRFVPVKTEAQQEILMLHRVRERLVKEKTACTNQIRGVLVDFGICFAQGYKAFEVAMWEIINDASQRPIIKLMANDFWDEYQSVNTRLDRINTLIKKLVERDPNGRILLSIPGVGPIIASAFVASIGRGQAFNTAKELGVWLGLTPKQFASGHRSVNGSITKRGDGYLRKQLIHGARTVVSHASKKQDDLNRWITQLRSRKSICSTVVATAHRLARLIWILLQKQVPYAPQYAAHQGVNHGTC

SEQ ID NO: 132787 - protein, 392 aa, unidentified
MGPVVGIDVAKGSSVVQAFLRRNEPYGKLESILHGESGFERLGEILAELRAETMLEPVVVLEATGHYHRGLAAYLERSEWIYYIVNPLQSKRAKGTQLRKVKTDAADAWHLANMYYRGDVAPHRTWEETFTELQHVTRQHEFVTGMFVQAKLNTRALLDQVFPAYEQIFRDLFSVTSLKVLAHCLTGKVENVSETIREGSGRSHSNRWIEEKAERLRETLPDWLNQPRSRSQTVALCGMITLLLAFSEQLSELENQINEIALNLPEVALVKSIPGIGDKLAAAIVAEIGDVKQFKDAKQLVAFAGIDPGIFSSGKFVATHSRITKRGSKRLRRALYLAVQCGIRGNTNSKIRDYYDKKRKEGKPYKVVVIACANKLLHHVYAILSKGQPFQT

SEQ ID NO: 132788 - protein, 354 aa, unidentified
MVVVGSDVHKRSHTFVAVDEAGRKLAEITVKADHKGHDRAMKWAREKFGVVDRWAVEDCRHLSARLEIDLLEAGEAVVRVPPKLMAEQRRLARTRGKSDPIDALAVARAALREPDLPVATHDEVSRELRLLVDRREDLVCERTRMINRLRWHLHRLAPGEPAADPAPASLDVAKTRRALHAWLADKDGLDARFARDVLADIDRVCAQVSALDKEINAAVKAHRAASRLTQLSGCAALTAAKIVGETAGIDRFGDEAKYAMHAGVAPIPVWSGRTAGRVRVARVGNRQLNAALHRIAITQLRCHEPAKAYYAKRLAAGDTRTEAIRRLKRRLARTIFNTLKNNPSSAAGTLPAAA

SEQ ID NO: 132789 - protein, 497 aa, unidentified
MKKPHSPRSAKPRHNNSTGKSRKRRHGGEPVEAQALESLKQINLHAAGIDIGSAENYIAVPTHAVKEGEPTVRCFGVTSPEHDAAVEWLRACGITTVAMEATGIYWITLFDKIEAAGMQVVLVDPHSVKAMPGRKSDVLDCQWLQQLHTYGLLRGAFRPDGATRRLRTLTRQRAELVMAGASHQEQMQKALIEMNVQLHQVVSDIDGDTGLRIIEAIVGGERDPKVLVQFRDPRIRKSTVAEMEAALKGHYREELVFVLQQNLESWRFCRQQLEACDQRILPTLESFPPAAPKPVSPKPAPPVPLAANPGKEYVLKKKSLGRGKNAPTVDLVAVLQRICGVNLMAVSGLNVLSVLMLLGEFGVDMSRWRSAKAFCSWLGLCPGTKISGGKVLSRRSRRVVNRAAVLLRVVAVAVGRSDTWLGRFHRRKKAHLGAPKAVTATARKLACIIYHMLKYQDAYVPINEAEYEVKAKAQRLVHLRREAKRMGLQLVDIEKAA

SEQ ID NO: 132790 - protein, 311 aa, unidentified
MDTICGVDVSKNVLDAFVASSGVFGQFSNDVDGIAALSRFCQAQGVDLVVMEATGGYEKMAYLLLWQSEVKCAIVHAASVRHHAQAMGMLEKTDRIDAMVIASYAAARRVVACDPPSIDQMRLKALVTRLSQVTSDLAIQKQRLSSTFDAEARASLAEVVALLKRQASRLEGEIASMIDDDPLWAKLAEVFSSIKGVAGRTIATLMAELPEIGLVSNKAVAKLAGLAPLADDSGRRKGQRHIRGGRQRVRSILFLVAGIARKYDASLDDFHRRLTEAGKPKMVVRIALAHKLLVRLNAKAREARMEMQNAT

SEQ ID NO: 132791 - protein, 339 aa, unidentified
MKLYTGLDLHSSNSYLGIIDETGKRVFKQKLPNDRERILAALDPYKNDIAGIVVESTYNWYWLVDLLMSESYHVHLANPTAIKKYTGLKFADDQHDAFWLAEMLRLGILPEGYIYPKEDRPIRDLLRKRMHLVRLRTSLIVSLQNILSRNNGFRLKTSDVKALTEDRVAPYLGGNEDLALAGMVSKESIDFLTRQIKKIEMVIEKKVELKPPYEKLQSVFGIGKILALTIMLETGPISRFAKVGNYVSYCRKVSSKWLSNDKVKGKGNKKSGNKYLAWAYSEAAEHARRSYTQARTYYNRKMQKTNFMAAHNALAHKLARAAYYVMRDEVLFMPEKIFV

SEQ ID NO: 132792 - protein, 387 aa, unidentified
MMYCGIDVAKLKHAVSLMNEKGETVKAALTVANTRSGFDQLHEELQALGGAVTVGLEATGHYWLALYDDLTRNHYPVIVLNPLQVAAYRKSGIRKIKSDASDAVWIADYIRVANLPPSEQNLPVFLQLRELSRFRFRLTEQVGDLKRKLLTILDRVFPEYERLFSNVFLHASRAVLQEAVSAQEFADFDLQELAQVLTEASHGRFGLEKAEKLQAQARQSVGIAFLTDAVHLEMRCLLAQLELLDSQRAEIDLAIAELMQQIPQYITSIPGIGPVTGAAILSEIGDIQRFETLDKLVAYAGIDATVYQTGQFQASEAHMSKRGSPYFRHALWLAATAAVLHDPSLKAYYQKKRDEGKHHGTALGAVCHKLLARIFVVLKEKRAYVIR

SEQ ID NO: 132793 - protein, 319 aa, unidentified
MSMNNHPTVYTGLDVAKDSLALDFQGRAYALSNDAKGHARLLRILSAAPNVHVVLEATGGYEQPAVLALHAALIALSVVEPGRVRAFARALGQRAKTDPIDAGVITAFGYAIQPAPSAAPSAPQLRLGELVLRRRQLVEFVVAESNRSAHYTEKLPRRQAAALLRTLRAQIAACDKAIAAQIGEDPAMSARATRLQEVPGVGVTTAATLVAEMPELGTLSDEAAAALAGLAPYHCDSGPFAGSRRIRGGRAPVRGALYMAAMSAVQHDAILKAFHRRLVAAGKKPMVALSAAMRKLVVLLNRLLKNPLFKLQAAASRKT

SEQ ID NO: 132794 - protein, 368 aa, unidentified
MEKCITFVGLDVHKNSISVALADAGRNAEVRHFGTIGGGLDDLDRLVKKLASSSKELRFVYEAGPCGYDIFRSLTAKGFDCAVVSPAHIPKSPADRIKTDRRDAMMLARLHRAGELTYVFVPRADDEAMRDLTRAREDAKKAQRVAQQQLSGMLLRLGFRYPRDNWTKQHFLWLADQKMPMPSQQVVFQEYINAINETIARVERLTQQIKLLVPTWRMAPVVNALQALRGVSLIAAATTVAEIGDLTRFDHPKKLMTYLGLVPSEHSSGEKKQQGKITKTGNGHVRRILVEAAQAYSHPARITRPLLTRQEGLNQEVRGIAWKCQVRLCARFRRLMAKGKNRNAVITATARELAAFMWAIAKHTPIAV

SEQ ID NO: 132795 - protein, 430 aa, unidentified
MKSNTQNAKIEAITEKTLVLGIDVGSETHYARAFDYRGIEYSKKPFKFSNTEAGFVTFKEWILDIKERHEKDKVVLGMEPTGHYWFNLGKFLQDNEMKPVLVNPHHVKKSKELDDNNPTKNDRKDPKVIAGLVREGRYMIPYLPDGVYADLRTASNIRFQLQAELTRIQNRISRWFNIYFPEYKTVYGKPDAKSGILILKAAPLPEDILTLGIDGVNQIWRDAKLRAVGKARAKTLIEAAEHSVGSKEGAVSARMEIRMLLEDYESRNIRLQEVMTLIEGLVKQIPMAEKLLEIKGVGIRTVSGFLAEVGDISRFNNPKELQKLAGLALVENSSGKHKGETTISRRGRKRLRYLLFEVAMSLVAKNPEFRELHNYYTTRRLNPLKKMQSLMAIAAKLIRVFYAMLTKGVDYDPKKMVSDIKRPAVYLQAA

SEQ ID NO: 132796 - protein, 391 aa, unidentified
MVCVGIDVAKDKHDCCILDSDGTIRADCITIPNNMDGFKQLLQTIRDCTKKSDKIKVGLEATGHYSYNILGFLLENDLAVYVMNPLHTNLYRKSLSLRKTKTDRVDARTIATMLLSDVDLKSYTDTAYHNEELKSLTRYRFDKVRERAKLKQSVSRLVTILFPELEKLVPSLHIASVYALLSEYPGAKQISEIHLTKLTNLLATASKGRYGKDKAIQIRDAARTSIGSVMPAKFLELKHTIKLIRELTSEIDEIEVSIQKIMDELNPPILSIPGVGIQSAAMILAEIGDFSNFESPDKILAYAGCSPSTYQSGKLTNCYAHMEKRGSRYLRYALYNATKYVCHWNPVFAEYLAKKRAEGKHYNVALSHATKKLVRLIYALQKSGKAYLVAA

SEQ ID NO: 132797 - protein, 315 aa, unidentified
MTHTPVFVGIDVSKAQLDVALRPEGRFAAPNTEAGIAQVLTRLRALSPTLVVMEATGGLELPLTGALAAAGLPVVVVNPRQVRDFAKATGKLAKTDILDAQVLAQFAEVIRPEPRPLPDEQTQMLAALLTRRRQLVEMLTAEKNRLASARLPIRKNLRAHITWLEQALAQADTDLAEAIQQRPVWREKDEWLRSVPGVGPVLTTTLLANLPELGTLTDKQIAALVGVAPLNRDSGTLRGRRTVWGGRAQVRMALYMGAIVATRFNPVIRNFYQRLCATGKAKKVALVACMRKLLVILNAMLKHRTPWQPHEAQHA

SEQ ID NO: 132798 - protein, 481 aa, unidentified
MASEANTESNQGRRLTRAQKKELGRQIWSGSPGLEVVHRDAAGIDIGSREHYVAVGPDRDPQPVQKFGCFTGDLHRLAGWLTQCKVKTVVLQSTGVYWIPVYDVLEQYGFEVWLANARETRNLPGRKSDVQESQWLLKLHTYGLLRKSFRPTTEILGLRTCWRERGQYVQQAGMSIQRMQKALTEMNVQLTTVLSDLSGATGMQIIRAIVAGERDGKRLAEFRDPNVKASKATIAASLEGTWRPEQLAVLQRQLADWEHVQRQMGACDRDLAALLKELPSAERKEGEVAPTAPATAGKRKRKRASRNQPKFDLGAEQARVAGVDLTRIDGIQAMTVQTFISEAGLDMSPWPTEDHFVSWIGLAPRNEISGGKVLKKKTRKVVSRLATALRMSASTLRASDSYLGAQFRRLRTKLGNPKAITAMAAKHARLIYRMLKYGQEYVDQGTVQYEEKYRQQQLKLLTKQAAKHGFALVPQTNLQSA

SEQ ID NO: 132799 - protein, 339 aa, unidentified
MAIYAGIDLHSNSNFLSVVDDAGKIIEKRKLANDVQAILHPIAAYRDQLQGIAIESTFNWYWIVDALMDQGYRVHLANPAAIQKYSGLKHSDDASDAAWLAEMLRLGVLPEGYIYPKAERPIRDLLRKRGHLVRLRTSLITSLKGIVSRNNGHSISVNMIKQLKTNHVAPLCVANEDLALCGEVSKDTIDYLGRQIKKIEKQAEERIELRPTYKALLSMPGVGVILGLTIMLETGPIDRFPKAGNFSSYCRKVPSTWISNGKRKGRGNTKNGNKYLAWAFSEVAELARRYDDASRSWYDRKMARSNRMVAHSALAHKFARAAYFIMREGVNFDHEKCFT

SEQ ID NO: 132800 - protein, 385 aa, unidentified
MPQLKDDLSRSLVALDQDRTLIAVVELSLATWLVGGVVPGIQREPLKKLPPDPEGLFKLLHRWRDEAAKAGHKLARIVVAFEAGRDGFWLARWLQVRGIEAYVIHPTSVAVSREQRRAKTDRLDIGLLKRSLLGWLRGEKNHCTMVAIPTLEEEDAKRPTREREQLVGKRTGIVNRMKATLIRLGIRGFNVKLRKAPEQLVSLRTPEGHPIPTNTLAELRREMAHLRFIDDQIRQIEDERLKQLKQAPQQPLNTRVLQLQRIIGVGTETADMLTHEVLSRDLRDHRAVARYAGLTGSPDESGSRRREKGLAKAGNARVRRGMIQLAWRFLLHQKDSAMTKWYQASVASGKKRKTMVVALARKLLIALWRFVTTGDIPQGVTLRSA

SEQ ID NO: 132801 - protein, 318 aa, unidentified
MSVYVGIDVSKQTLDIAIYPTLQSLRVPNTASGHQQLHEWLQQHKEIARIGLEASGRYGEAVTDFLAAKGYAVSYLNPRQIHAFSQVELRYHKTDAQDAQLIARYCALFNPDLYRPTKTLRKRLQQRSRRLDQLKKMRQQEVNRLKSGLQDDFTCQQIEMVIAYFDTLIQQTLDAIHDLIASDEHLAQQRRLLLSIPGIGPTTAPLILAEIDIDDFNTAPQLAAYIGITPQHFQSGTSVNKPATISKQGNARLRAGLYMPAVVSQQYNPPCRRFTERLKAKQKQGKVIVIAVMRKLVHQVFGVLKSGQPFDPDFEKIA

SEQ ID NO: 132802 - protein, 387 aa, unidentified
MTPSCKLAPGTAAVDYDSTLIGALELSSKKWVFAVQLPGSKKHTRQVVEPSGSALVEMIERLKARSLAAGRPILRMILTYEAGRDGFWLARFLQRRGVEVHVMQASSLPVDRRARRAKTDMIDVEMLLRTLLAWLRGEPRVCSMVPIPSEADEEARRAHREREDLTGSRRSLVNKIDGILATLGISGFRALRRDRREQLANLRQPDGAPVPPAAQERIERLLDRLELVLKQIKTVEAARDAVVKKSSAQDESERMIRDLVQLCGIGAESATLLVREAFCRDFANRRSLGAYAGLTGTPFASGGMQREQGISKDGNRRLRALVVELAWFWLRFQPDSALAKWFRARVIGAKGRVAKIMIVALARKLLIALWRFAKDGVIPEGATMKAA

SEQ ID NO: 132803 - protein, 424 aa, unidentified
MFERKCGHFGSHSVRQYVMTPKFVASWIYLYTMNWKHINGNRDYRIQIGGHYMNYNTVYVGMDVHKESFTLCSCKYEDEKASHYQRTQASYKNVLRYLEFLRTIYGDDTRFVCGYEAGCLGYSLYRQLESFNVECVILAPTTMLEQRSKRRIKTDKRDAEIIARSLAQHNYSPVHIPTETDNQTKEFIRMRDDHKAELKKIKQQILSFCLRQGYQYDGSGNWTEKHVKWLRSLKPVGLYKEILDEYLLTYTTLTDKLNRLDHRIEELASKEEYKESVSKLTCFLGIRTHTALSVIVEVGDFQRFASARKFAGYLGLVPGQHSSGDDRNGLGITKAGNTHVRRLLTESAQSYTRGKIGYKSRVLRLRQAGNSPQVINYADRANERLRRRYYKMVLKDGKKYNIAKTAVARELACFIWGMMTDNIY

SEQ ID NO: 132804 - protein, 360 aa, unidentified
MDVHKDTIAVAYVAQEPGADVTYLGTIGTRQCDIDQLIRKMQSKAQHLIFIYEAGPCGYWLYRYLQKKDYDCWVVAPSLIPKKAGERVKTDRRDALQLARLARSGDLTPVYVPKVDDEAIRDLTRAREDTISDLKDAKFRLKAFLLRQDIRYAGRANWGPAHLRWLAEVVCPTPAQQIVFQEYVRAVTDHTERLGRLDQELREQVKTWRLHPVVDALQALRGVQFTVAVTMVAEIGDLTRFEHPSELMKFLGLVPSEYSSGARRQQGGITKTGNTHARRVLVEGAWAYRYPAKVSRQLQLRLEHQPPSIQDISWKAQVRLCKRYQRLVAKGKHANVVTVAIARELVGFVWAIAKEVPLTQ

SEQ ID NO: 132805 - protein, 438 aa, unidentified
MSNKVIFNLDELFISVGIDVGADFSWMSIALPNQQFVGKPYKILHNSIDSLTTAVSKIKEAEELYSLESRIFLESTGIYHYPLFCYLRDKGFNCSVINPIITKNSTNINIRKVHNDRFDSKKAALVGLKPDLKVSLMPSDLALNCRNLCREYYDLMDNRSAYVNKLQGELRMVFPQYLGIFSKVTINTSLTLLETYTSPSAFLEADKQEIIDIIKSTARFGLTYAQNKYNAIIQAATDANQFGYIIDSNIKRIRLYISFIRKYDEEINNILKSLHELVDANEDADFVKQIHLIETFKGAGFLSAVSIMGEIGDFSAFSKPKQLFAYFGLDPAVKQSGKFEGTKVQMSKRGSSIARRVIHTLSLQSISISRNGKAKNPVLREYYLKKCDSKPKLVAMGAVSHKVCNMIFAILRDNKPFKIIAPQEHIKQYNAAKCDIAA

SEQ ID NO: 132806 - protein, 367 aa, unidentified
MSKLNSASPNTTWVGLDVHRDSITSAVLAPGVDAPTLDRWFHDEPSVRRFVKSLGNPKTVRLCYEAGPTGYGLARLLERLGVSTEVIAPSLIPITPGAKIKTDKRDARRLAQLYRAGELTAVHIPSPAEEAIRDLARARADLVIDRTRCRHRLSKFLLRHGEVFREARAWTLAHERWLMNRHFDDPALAQTYAHYRAIVADLDAHLRAVESDLKCYLERGPFADPVARLSAYRGVTELGALALSAEVCDWRRFPRATSLMGFCGLVPSEYSSGESTRRGHITKAGNTHLRAQLVESAWSYQHRPHIGTVIEKRQHRCSPDTVARAWHAQLHLCAKFRRLAERKSSRKIVVTAIARELSGFLWAEMAA

SEQ ID NO: 132807 - protein, 348 aa, unidentified
MTVYCGVDFHARKQTISYLTTEDGEVRQVELEHEQDNIRGFYAKLRSQGPVIVGFETSGYAAWFEEMLEELGCEIWIGMPAAIRRQARRRQKNDRRDADLILELMLRGDFPRLHRYTPESREVLQQLRYRHRLVKLRTIVVNSLQYLALSRGVSLRTKLLTGRGQKRMKELKLPSHLAKQRDEMCELLKELTEKIETAESWLNLRAEQDTRVGRLRTHPGIGPLTGLCLVYTLEQVQRFANPRKVTAYVGFDPVEDSSGERQRIGAISKQGSRLLRFLLVEAGQVAVRSDEDLKAAYWRVQLRRNHQKAKVAVARRLLVRAFIMLRDEIDYAEFQRRGVAARSTRRTA

SEQ ID NO: 132808 - protein, 343 aa, unidentified
MAHYVGLDVSMKETKLHVLDEAGNRVWRGRCATEPAAIAAAVRRYAPAAVRIGLETGPLTTWLWTALTAEGLPMVCLDARHAKRALDMKVNKTDANDAEGLAHLVRAGWYREVRVKSRNAMLAKALLGARSQLLSMSLALENQIRGILKTFGRIVPKGAGGLFEKNVRALITDDAAIAAVIMPLLQARGMARSKCAALDRRLIGSVQADVTCRRLMTMPGVGPLTAVAYVAALEKPDTFKRSRAVGAWLGLTPRRFQSGEVDYDGHISRRGDSQLRALLYEAAAVLLTRVRGESALRRWGLLLWKRLGFKRAATALARRMAVVLHAMWKSGTPFNPTLGAATP

SEQ ID NO: 132809 - protein, 446 aa, unidentified
MKKSFQMSIIHPHAAGVDIGAEFHVVAVPPDADAAPVRTFQSFTDDLHRMSDWLKTCHITTIAMESTGVYWLPAFEILEAAGFNVILVNARDAKNVPGRKTDVNDAQWLQKLHSFGLLRASFRPEHDISVLRSYLRQRERLTEYRAAHIQHMQKALMQMNVQLHHAVSDITGVTGLSIVRAIVSGERDPSVLIQYRDVRCKKTPEVLQQALTGNWQPEHLFALEQSVAFFDFYQEKIRECDDQIETSLLQFSTGIKEPEGALPSARHRTKQPNQLAFDVRPLLWKITGADLTQIHGFGPYLALKFVAECGTDMNRWPDASHFTSWLCLSPGNKISGGKVLSSKTRRSSSRIAAALRLAATTIGRSDTALGAFYRRLSSRIGKAKAVTATARKLAILFYNALKYGQKYVDPGADYYEERYRNRVLDGLKRRAKSLGYSLQQDPELCV

SEQ ID NO: 132810 - protein, 388 aa, unidentified
MTYVGIDISKYKHDCFIQNSLGEVLHTGFSFTNDLVGFAVLEQELACFDKEDLRIGFEATGHYTQNLMAFLECKGYTFMELQPSLVAKYIAGKTLRRTKTDKLDARMIAGYMDTVAYRPYPQGAQRLYALKSLTRFRLGLVRRRSEYMVLLTNVLDRAFPEFKPFFGNKFSVTAFYILANYPSPQHIANMNSRSFDVLRRKSRGKFSMDKFVKLKALAKNTVGNWNEELALEWQMLLELYSELDAKIDEIEAEITRIIVDMDPPTLSIKGIGPLSAAVIVSEFGDFSRFSNPNKMLKFAGLEPGYFQSGTWEHKGHMVKRGSSPLRAALMNLCNPMLLHNEVFATYYYKKTSEGKPYRVAQSHMVKKLIRLIWTLETRGEKFNPELQH

SEQ ID NO: 132811 - protein, 354 aa, unidentified
MTNDPSQPAQTFASIGIDIGKDVFHVVGFDPNGKVVLRKKFKRLALESELAKLPPSIVGLEACLSAHFVSRTLRRLGHTPRIIPAIYVKPFAKGQKNDYNDAEAIAEAALRPNLRVVQEKTQDQLDLQALHRVRARLVSRRTATINQIRAFLIEHGIAVRTGANALRRSLFAILENRADELSPRMSDLIVGLYEDWLWLDERIETLTGEIEQISHREANCTRLMSVPGIGPMISTAMVAAIGTGEAFERGRDFGAWLGLVPRQYSTGGKSILGRISKRGSKYLRTLFIQAANVILMRPQTWERFSFGAWLKAAQPRLHRNKLATALANKLARIAWSVLRHNTAFDAHRVEVVAI

SEQ ID NO: 132812 - protein, 343 aa, unidentified
MSGAYEGRQIVGMDLHRRRSVLVRMSETGEHLETVRISNDPEYLREVMTRAGEAPEVVLEAAYGWYWAADALAELGATVHLAHPLGVKMFGLRRVKNDERDAADLADLLRMGRLPEAWIAPPATRELRGWVRHRAKLVALRSGLRCQIHAVLASAGMQVPMSDLFGVSGRELLTTATLTVESRSRVESLLRIIGALDFEIDLYTKLVASRLRTDPGYHAIQAIPGVGPVLAAAFVAEIGDITRFHRPAELASWAGLTPRHHESDTTVHRGRITKQGSRLVRWAAVEAVQRAPARTRLGQRRDRVAERRGHNIGVVAAARDLITLVFYGLRDHHVRCLPTKAAP

SEQ ID NO: 132813 - protein, 347 aa, unidentified
MVIIGVDAHKATHCLVAVDDVGRKLSEKTIPATTDGARDGLLWARRYFGVDLLWAVEDCRQVSARLERDLIAAGQRIVRVPVKLMSRARRQARTRGKSDPIDALAAARAALREPNLPIACHDAVSRELKLLVDRRDDLILQRTATVNRLLWRVHELDPTRKKPISLNPATHRTALREWLAPQPGLVAELARDELDDITAFTEAINQLTKRIAKRVRVVAPSLLALPGCGEITAATIVGETALVQRFSSEAAYARHIGVAPVPHSSGDKSVYFRSTRSGNRQLNKAIHRIAVTQLRLHGLGRAYYDKRVAENDSRAHALRCLKRRLSRVVFNRLRDDEKNRSAPPQAA

SEQ ID NO: 132814 - protein, 494 aa, unidentified
MSGRNKKSPRSDLRSRPARPAPPPGASDNLRRVARSVEHDRRRSEDCAKIAALPVQHEHAAGIDAGDLSHWVCIDATPDGADTVREFPAHTPGLRELVAWLRQCGVTTIAIEATGAYGHVLFLTLLEAGFHAILTPPQFARQIKGRPKTDRRDCQWIQRLHKHGMLPSVFQPDEAVQTLRDYVRQRGNLVRLSGQHIQRMQKALELMNLKLTKVLGDITGVTGLKIIRAILAGRLDPNELAKLRDRRCKHTVAEIATALDGRYRPEHLLELRCCLEMWEQYLKQIALVDQFIAGHLREMQRKSELPPLPPQTRKRGRKPHDPRFDVRAALYFAVGVDLTAIDGIDELNALTLVSELGCDYTKWPTVKQFTCWLGLCPNWKKTGGKVQSSHTRRGKNRAARALRLAAWSLVRSKSYLGAYMRRQRGRLGKPQAITATAHKLARILYNLMRYGVAYMQQTEADYAKQVHERVEKQLRRRAKEMGYELTPITPPTTK

SEQ ID NO: 132815 - protein, 447 aa, unidentified
MRHERVGQSLLTGGAPRPRPGGNAVQVLHRICCGLDVHKKLVVACLRVQEADGRARTEVRRFEAMTDALVELRGWLEEAGCTLAVVESTGPYWKPLYNLLEERAGLAVWVVNARHVKAVPGRKTDQNDACWLAELGAHGLVRPSFVPDRVQRELRELVRDRSSLLRERAAEVNRLQKVLEGANIKLASVLSDVTGVSARAMLAELVAGSTDAAALADLAIGQLRAKRDLLERALTGVVGAHQRFVLAEQLGHIDELDARVGRLDAEVAARMAAPDAATGERPFEDAVRRLDTIPGVGRRTAEAIAAEVGVAMDRFPSARHLASWAGMCPGQHESAGKRRSGKTRPGSPFLRAALAEAAWAASRTKTETALRAQYRRLAARRGKKRAIVAVGHSILVCADHMLRDERDYADPGPAHRDTDALQRRLVRGLERLGLKVTVEPLTQTEAA

SEQ ID NO: 132816 - protein, 377 aa, unidentified
MSKLRFVGLDVHADTIAVAVAEAGGEVRSLGVIPNRLESIRKMIGKLAPLETLKCCYEAGPTGYVLYWQLTQLGVACEVIAPSLIPTKAGDRVKTDRRDAEKLARCYRAGELTPVWVPDANHEALRDLVRAREAAKKDQLRHRHRLGKFLLRHGKRPNDAGKAWTQKYLNWIRIHVHFEQPALEATLKHYREEVDHIAERIAKLEQAIDEAVKQASPEMRAVIEALQALRGVAQTTAATVVAELGSLSRFASPSQLMGYSGLVSREYSTGNRVQRGAITKSGNAHLRRVLLEAAWTYRHRPNVQGRVLRRQKSLALSEEAKRIAWKAQERLHKRFAALTARGKENNVAATAIARELLGFIWAIAVHTEAQQKQAKAA

SEQ ID NO: 132817 - protein, 342 aa, unidentified
MQNDTRIAVDLAKAVFEIAVSDRPGRVGRRERLPRAQFLNFFAQRPAATVVMEACGSAHYWGRRIEGLGHRVVLLPPYHVRPYVRRNKTDRTDAKGILEASRNEDIHPVPVKTVSQQVLTSLHRLRSGWMSERTARINCLRGLLRELGVFIPTGARQVVPAVWALVEDADADVPDTLRPFLAELCQEIREIEARVDRVERQLQAMSQQLPVVAQLLTIPGVGLLTATALLAFIGDIRRFPSARHLASYLGLTPREYSSGLRRRLGGISKRGDGYLRTLLIHGARSVLLRARTHQPDRLREWAHQIAKTHVHNKAAVAVANKMARLVWAVWTHAKPYQSQLTA

SEQ ID NO: 132818 - protein, 349 aa, unidentified
MLADELDYVIGVDTHLDEHVLAVVASPSGAVVAKRSVRASGRGYASALAFALEAGSGARVWAIEGTGSYGAGLARYLVGRGETVLETGRVPQTERRLRGKDDALDAVRTARAALAGDTLALPRVGERREALRLLLVARRSAVDVRREALGQLRAVIVTAPDGLREQLRTLPVGKLLERCSRLRRSSAMSTDEVATRLVLRSLARRIEAATLEAAELERELLGHVHALAPRLLDEPGIGPIVAAQLLVAWSHRGRLRSEACFARLAGVAPVPASSGKTTRHRLSRGGDRQLNRALHTIVLHRRQHDRATRDYIERRIAEGKTRRDATRLLKRYLARHLYRLLQQTEPLMT

SEQ ID NO: 132819 - protein, 311 aa, unidentified
MGVLIGIDPHKSVNAAAAIDEQGELAGHETFPANRKGLRALQRWAKRFPERRWAVAGSRRYRPSRGSAARHGGREGSGCPAQTLLESQASLYGKRPQKNDRLDATFTAQAALHNERLAPVLSEDGDDAHVEVLRLLTERREDLVAERTRALNRLHVLLRDLLSDTVSKQLCADAASRLLRRVRPRDEPARTRKQLASEVVRDVRALDRRIADLDERIRQEVEASGTTLTEIFGVGPILAAKIVGIVGNVGRFPSKAHFASYAGVAPIEASSGEVVRHRLSLALKTAASTRSHAHDRGLPGSQRSPRRSLPP

SEQ ID NO: 132820 - protein, 349 aa, unidentified
MLADEVDYVIGVDTHRDQHTLAVVVAPTGAVLAQTVVRATGRGYAQALRFAESHAGGVRAWAIEGAGHYGAGLTRYLGDRGETVLEVGRHARTERRLRGKDDPLDAIRAARTLLAAETLTLPRAGQRQEALRVLLLSRRSAVDVRRVALVQLRSVIVTAPEQLREELRRLPVTKLIQRCSRFRRSGSRTPDELAIVLALRSLARRIEAATAEADELEREILKHVRAVVPELLDEPGVGPIVAAQLIVTWSHKDRVRSEAAFARLAGVAPLPASSGQTIRHRLSRGGDRQLNRALHTVVLHRRQHDPATRDYIARRVAEGKTTREATRILKRYLARHLYRVMQNATPLTT

SEQ ID NO: 132821 - protein, 340 aa, unidentified
MTRISVGVDVSKNRSTVCIMDQDGKFIMRPFLVWHSTEELDFLADTLKRLNGEVRVIMESTSIYQYPIALQLKERGLFISIVNAYEMKQFANIDFRGGKTDKKDSRTIASYGISYWDKLVEWQIPKDTYFNLDLLNRTYMNAKKHRQIILQELQHYIDCAMPGMDKELHSLNLNTKKDFMLDFVEKFWHRDEIVNMTEAEFTEVFTAWAKKKGYRPVEGKAAKIYAIAKSCIPYYPANPTVKTILQCIVDKLSGVNRTLVTIVTQMIEEAKKLPEYQIVREMPGVGDPLAARFFGSAGDIRQFKNSKALVAYAGIDSPPDESGDFSSTHRHITKKAIIIS

SEQ ID NO: 132822 - protein, 330 aa, unidentified
MNVLHFIGIDIAKKKFDVAYLKDKERQMVKTKVLDNEPAGFNQLLDWIKKNVSNDFSTIHITLEPTGVYHEALAYFLHDNGFVVNLINPARLPKFAEYKGFVHKNDRGDCKLLALLGAENPHEYWQPEPLSIRQLKAKLSRLEALKSDLLRENSRLEQAESGNLPDEVLQSIHHIRKALQDSIKALSQDIDDHINGNPELKKDKALLKSIPGVGDVIAKQMLVVYHSKHFQKAADMAAFLGLIPKERTSGTMKGKIMLSKRGSPQIRALLFLPAVSAKSHNPDIKAHYERLLAKGKTKMQAIGAAMRRLVHICFGVLKNKSVYQPQTILA

SEQ ID NO: 132823 - protein, 366 aa, unidentified
MLRKAGLSDEADPENNLGGSSETMYYIGLDVHKKTISYCVKDAAGCVLQEGKIGSTRRELDIWVRTLPEPRMIAMEATIFTGWIYDHLLPHAQNVKVAHPLMLRAIAAAKKKNDRIDAAKIADCLRCDFLPECHMAPTAIRDRRRILRYRNLVQRQAVQMKNRVSGLLMETGVTYDKLHLHRMGYFSRLMSSSDEIQDSVRPLLKLCREHIDRSIQMDRALLRSLERDPLLTERLRRLRTVPGVGPITALTWVLEVGDTSRFRSIKQAISYCGLCGAEKSSADKTMRTPLSKQRNKHIQKMLVEAARLAPRYSDELALLYERERQRGNSNRATLAVARKMVAHMLAVDRRKQDFVPAEKFKPTAAA

SEQ ID NO: 132824 - protein, 352 aa, unidentified
MKRKRKDIIKSEELFVGIDIHKRTWHVTIRTDEVELFSGSIPGIWEVLRKLFSRYKAQRIYAVYEAGYFGFWLHDHLTEYGVDCLVTPPSLIPQEYGNRVKTDRRDSRKLARLLAKGLLKRIWVPSVEERFHRQVIRRRRQLVRDRVRIQNRIKAELRFYGVDLPSPKGKWTQIYFDNLQRIKFNNSWMQKSFTCLLKQYDFFCGQINKQTQLLKELSQLPRYRDRVKILRTIPGIGIINAMEILLELQDLSRFQRAEQLAAYVGLTPAQYSSGDKVRMGRITGIGKNSVRSALVESCWMLISKDKEMQRRYKEIKARSGAKRAIVAVARRLLLRIRRMLLDAQPYKFQLIA

SEQ ID NO: 132825 - protein, 289 aa, unidentified
MAYTNRFIGIDISKSSFDICVLPEARSASFSNDACGIAGFLAFVARQDNVERLVIEPTGGYERPVVEALLAARLPVAKVNAKQIRQFARACGQLSKTDRIDAFILADYARRMETKVLTLSSPAQTALVDLVSRYRQLSHMIVQEKNRREKLRTRGDAQARAWIEETLAFLLQQRQSVIEAMDACLKSDKDLADKAQILTSLKGIGLRTACALIAGLPELGLLNKGQVAKLVGVAPINRDSGLMRGKRMITGGRKPVRDALYIAALPAIRFDPAMKAVFDRCQYRSNTPQ

SEQ ID NO: 132826 - protein, 363 aa, unidentified
MKENRRVLTEETVVVGGVDTHKDVHVAAVLSDTGALLSTAEFPATLGGHKDLLGWMRSFGAIGSVGVEGSGNYGAGLTRFLLAEGVGVVEVVRPDRRARRFNGKSDTLDAENAARAVLAGERTSAPKHRDGAVEALRALRVARTSAVKARRAALQLLRNTIVSAPDGLRESVSGLTRTVLVRTCAAWRPNRDAAHDATTATRIALRSLARRVLRLEEEIEDLDELIAALVARINPRLTEASCVGTEIAAQLLLTAGENPERMKSEAAFAMLCGVAPLPASSGKTRRYRLNRGGDRAANCALHMAAISRLRVDPRTRAYAARRAAEGLSKKEILRCLKRYLARELYKLLKPIPLDPITGTEIAA

SEQ ID NO: 132827 - protein, 372 aa, unidentified
MNYNTVYVGMDVHKESFSLCAYTIEAEKASHYQRTEADYKKVLNYLEFLRTIYGDDANFICGYEAGCLGYTLYHQLTANNVKCIILAPTTMLEQRSKKRIKTDKRDAEIIAKCLAQHNYSPVHIPTAKDEETKEFLRMRDDHKLALKKVKQQILAFCLRHNYRYDGNSHWTAAHLKWLKALTPEALYKEILDEYLLTYQTLSDKLERLDKRIEELSAQDEYKEAVKKLCCFIGVKTHTALSVLVEVGDFKRFASAQHFASYLGLVPGEDSSGDDQNRLGITKAGNRHVRLLLTEASQCYARGQVGFKSKELKARQSGNTPAVIAYADKANERLRRRYYKMVLNKCKKHNVAKTAIARELACFMWGMMTDNIA

SEQ ID NO: 132828 - protein, 406 aa, unidentified
MFVGWDWGNTTHAVAVIDGQGQTVDRWLCPHSEDGLRATFARLAGHGAPAELPVAIETTRGLVVDRILAAGHPVVAVHPNAFNAVRPRWGAARAKDDPGDAFKLADYLRTDGRRLRTLRPTEQVTLELQALVRAREDQVTARVTATNQLAALLAEHWPGAGMVFARLDSDIALAFCDRFPAPATARRLAPARMRDWLARQHYSGRNDPTVLVAKLRDAPAPASRLGEETITALVRAQVAVIRALKTAIDELEAQIDTALAAHPWAALIKDLPRVGTVNLAQLIGEIGPLLEHTASADQLAAEAGVVPVTRASGKSRAVVFRYATNRRARQALVRWADNSRHASPWARNIYDTAREQGKRHPHAVRILARSWLRIIYACWRDGTCYDPAAHERRRTEKTDHITALAA

SEQ ID NO: 132829 - protein, 346 aa, unidentified
MKKSTTIAIDLAKNSFQICKLVRDQVASEKALNNQKLKSWLQKQPSSHVVMEACGSAHHWGRFCQSLGHDVSIIAPKNVTPFRANQKTDKNDALAIAIAARQPNVHSVGVKTIDAQALQSIERVRQHLNDLIVATSNMVRGLILEFGIAIPKGVSAFNKTIPQILENGDSELPDILRPYLHHMYNLHQGLSEQKVQIEKELSYYINRHSECKKLLELEGIGPINALGLYLALGHTGRNFKNGREASACIGLTPKQYSTGGVTTMLGISKKVANKRLRANLIQGALSVVRLLQYREPKNGKETWLKALIVRAGLRRAAVALANKSIRTAWSMLKHDTQYSTSFKHAA

SEQ ID NO: 132830 - protein, 421 aa, unidentified
MKPQVSEAFAAFVGLDWADAKHAICLQAAGTVQREFLSLEHSPEAVHTWVQTLRMRFNGQPVAVCLELNKGPIVSALRNYDCLVLFPVNPLTVAKYREAFTPSRAKDDPTDAELLVDILLKHRDKLAPLNPQSPAMRALAQLVEHRRRLVGDKVRLTNRLTSALKNYFPQVLQWFSEKDTAIFCDFLSRWPTLKAAQLARRTTLEGFFRTHHVRSPDLIATRIEAIKSARALTTDDGVITPNVLLVHALVAQLRVTLQGIADFDRVIVQRAQGHPDFPLFDALPGAGAVFAPRLLVAFGEQRERFTSAEELQKYAGIAPVTERSGKKAWVHWRLQCPKFLRQTFVEWAAESTRHSFWAQIYYQQQRDKGKAHQAAVRALAFKWIRILYRCWQERTPYDEAIYLQALKRRNAPLLHNLANVS

SEQ ID NO: 132831 - protein, 412 aa, unidentified
MTNPLLVGVDVHRKTNVVCPMNISGREVGQRFNVDNNLPGTAAFVDKVSSLAEEGGYDAILVAAEATAMYWWHFFRTLDQDPVLNQRPVALFPVNARLTANFKKTYSDLDKTDLSDAFVIADRLRLGRDLPQPFTCDEPHMLVRFLTRHRFHLIRNLVREKAYFLAQLYLKASEYTHLKPFANIFGVTSRAIIQGYDSMEEIAALPFDQLTEIIDDLGKRRFADPTHNARRMQAVARDSYPLPEALQGPVNLILRQSLQHIAWLERQVKRTDTAISEAMKAIPHTLDTIPGLGPVFCAGIISEIGDLQRFGHDQAKVAKLAGLKWRKTQSADFQAQDTPMTHKGNRYLRYYFCEGANSVRMRDAEYGAYYKRKYNEVRTHQHKRAIVLTARKLVRLVVRLLTTNQPYQPRRP

SEQ ID NO: 132832 - protein, 341 aa, unidentified
MNAIYYIGLDIHKKVIAYCIKRIDGELVRQGTVSAERKTLLKWLSELPGPWYGAMEATIFTGWVYDFLKPHALELKVAHPAMLKAITAAKKKNDRADAEKIADLLRVNLLPECHMMPEDLRELRRVLRYRNMIVNTAVKMKNKMSGLLMEVGATYDKKKLHGKKYFGALLERVEDVPDSVKTLLKMSRNGFEMFDDVQKKLVTALRKNALIRDRVLRLMSIPGVGEIMALTWVLEIGEVSRFSSSRDAISYCGLCSGQHESAGKEQRGPISKKRNKHLQTKLIEAAKLVPHWNEQLGQLHEKELARGNKNRATLVVARKLVEFMLAVDRRETDFESLKQAA

SEQ ID NO: 132833 - protein, 345 aa, unidentified
MKIKVVGIDLAKDIFQVCVLREDGKVQRNRKVRRNKLLHEVRQLPEGTLIAMEACASSHYWARTFKSMGYKTALVPAQLVKPFTRKQKNDANDALAICEAAERPEIHLVEVKTVEQQDIKALRCVRRRIVEHRTAIVNQIRSLSAEYGVIFPLGIKRLRETLPDALADDENGFSRILRSLLSDLLDDLRMLDIDVTALDQQIDQLCKQQPGYSELMSVPGFGPVITSALVSEIGSGGQFANGRQLAAWCGLVPKQQSSGGKQMLGGITKHGNKELRVLLIHGARAVLRFADKRDDRLGRWLRRLIERRGKNKATVALANKLARIAWGVLNSKQHFDARLAFASNT

SEQ ID NO: 132834 - protein, 338 aa, unidentified
MKLQCGMDLHGKNVLCSLTDENDKVVVERRLPTKLADVLRFLEPYRKSIINIIIESTYNWYWLVDGLREEKYPVSLANPNAVKTYDGLKHGNDKGDARHLAHLSRLGVLPTGYIYPKEQRGLRDLLRRRMYLVQERTGLILSLQSLCERLNGGKIAAEKFKHMKPEALVEKIDDPYHRLGAVEYLEIVRRINQSIYRLETKVLQECEETHQFKLLTTIPGIGRVLGMMIALESGPMNRFAGPGNYASYARTVNAERYSDGKKKGENNRKCGNKYLAWALVQAAHHLIQHCPEARSFYDRKKAKKNGAVATKALACKLARCIYHMLTEKEEFDVKKIFG

SEQ ID NO: 132835 - protein, 361 aa, unidentified
MRAVQPRVIVAVDPHKRMNAVNVVDERAEVLAREVFPNTSEGYRQLLCFARQWRQRRWAVEGCGGVGRHLAQRLVAQHETVVDVSSRRSSLVRAFATTSGRKTDDIDAYSVALAALHTPGLQEVTVDGHHATLRLLAHRRKELVAMRTQAVCRLHRELLVMLPGGAPKRLSAKRAKTLLGGIRPRDEVGRVRKALALDQLADLVRIDARIKDINRQLRDAVKATSTGLPELYGVGMVTTALVLGEVKDIARFKDRHHFASYNGSAPVLRGSGGEAKACVNLSGNRQLNHALHIAAMAQIRQPESEGGIYYRRKLAEGKSVKEAIRCLKRRISDAIYRQLLLDAEAAKADPGGQMGTTTKPA

SEQ ID NO: 132836 - protein, 342 aa, unidentified
MKLTTIGIDLAKNVFQVHGADEKGKAVLKKQLKRTQMLPFFANLTPCRIGMEACGSAHYWARKLQALGHTVQLIAPQYVKPFVKRNKNDAADAEAICEAMTRPNMPAVPIKNASQQAILSVHRARQGFVKARTAQANQIRGLLAEYGIAIAQGIGHIPKRVPEILEDGENDLPGSFRLLIERLLDHLKELDRQVGELEVQIQLWHRDNSASQKLAKIPGVGPITASAMAASIGDARNFKSGRQLAAWLGIVPRQHSTGGKSTLLGISKRGDTYLRTLLIHGARAVVRVTERKPNADPWLKNLLARRNKNVAAVALANKNVRTIWALLAHDRHYEPGYARAAA

SEQ ID NO: 132837 - protein, 345 aa, unidentified
MRYVGIDIGKWKCNAAVMDPEGVIVEEFAFANDHAGLEELASRLTAEDRVAMESTGSVWTNPYNLLDERHVPAVLANFLKTRAIASARIKSDKVDARILTHLLRSNLVAECYVPSRHLREMRALVRHRAALVRVRTTVKNRVHALIDGRGLRCEYSDMFGRRVSGWLRSLELNSLDRLMLDNHLQHIEALNGQIERVDEEIRGRASMDDDVQLLLSLTGVDVYTALLIRSEIGSIDRFPDYKRLVSWAGLAWSLHQSGCVEYRGRITKQGSRMLRWAMVEAARMAVRHDGRMRAFYERVKRRRGDGKTVVAVACKMLKIVWFMLSRREAYQSRNEGRYGRKLKSL

SEQ ID NO: 132838 - protein, 360 aa, unidentified
MKDSIREINEIPELTMGLDLGDKFSYYCIIDKSGQNVEEGRVKTQRRAMERFFKSQPKMRVVLETGTHSRWVQAIAKEQGHQEIVANPRQVRLISQNRKKSDRKDGELLGRLGRVDPELLYPIQHRGEAAQADLAVVKARDELVRARTRLVNHIRGSVKAFGERLPSCSTEAFPHRVQLHIPGCLKMALEPLLEMIQQLTAQIRQYDRQIQQLCQQKYPDTGNLQQVRGVGPITALAFVLTLEDAHRFGRSRQVGAYLGLTPRQDQSGNRDPQLRITKAGDRFVRKLLVGSAQYILGPFGSDCDLRRYGERIASRGGKSAKKRAVVAVARKLSVLLHHLWITGEKYEPLYNSKEYLEGVA

SEQ ID NO: 132839 - protein, 351 aa, unidentified
MRKIAYLAMDVHSKHCVLGDMDYKGNFKGTQTFPTSEKNMMKALKAVKARNKYLTLEEGNLAYWAAQVAAPYVTEVIPCDPKENALIYRGPQKNDKVDTRKLCRLLRLGELKRVYHPETDERAIFKAAAQHYMDLRDQQIALKQKIKAMYHHWGVIDVAGEAVYSTAKRNDYLRQIKHLDIRNQVSRLYYVMDQTESMQERALKAMKQLGRKYPEIKQFKKIPGIGDILAHFFDAFIQTPHRFANKHRLWRYCRLGVTDRSSDGKPLGFKRLDRSGVSELKSLSYRAWMSALRGDNEVRRFYTTSLQRTFSRVHARLNTQRKIIATMYGMWKRGEPYNPKLFLDSSQSGAV

SEQ ID NO: 132840 - protein, 390 aa, unidentified
MEARTINNMPPAAPHDDAVRCLLAIELSKKSWIVAVNTPLSDKISRYTLEACDWKGLLDLCERIRTRVAREMKKPVEIISCYEAGYDGFWLHRLLEAHGIRNYVIDPASLQVDRRARRAKTDRVDVERLLRSLMAHLRGEPKVWSVVRVPSVVEEDDRRLHRERDRLINERIQHGNRIKGLLAIHGIYEYQPLRRDRMQQLERLRTADGQTLPPRLKAEILRELQRLVLVIGMIKTIEAERDAIASAKTEAEHTSAKKIQDLAKIKCIGPEFANSLVGEVFYRSFDNRKQLASYVGLTPAHFQSGAMSRDQGISKAGNAKARTVMIELAWLWLRHQPDSPLSVWFRERVGKLKGRIRRITIVAVARKLLIALWRYLENGMVPEGAILKVK

SEQ ID NO: 132841 - protein, 348 aa, unidentified
MYYVGVDLHKETSWFYIVDAQSKKYDSKNIQNKPEILKKYFEQIPKPFTLAVEATYNWYFFVDLAEQYAQKVFLANSYELKAFAKRHKKTDKIDARLIAHILQKGFLPVVAIADQETRQVRELLRYRLNLVTDRSRNIFRLKALLDKLGLNSQLDFTTYKGLKSVVIEKLPGIYTRLIKNYIERITGLAQKLTSIEKEIGTVSSLDHDMVNLMSIPGVGYFSAALIKSEIIDIARFASFNRLCAYAGLAPRVSASANKTFHGPLNINRRKNLQWILLENVYHFILAVPEMKERYGILKQRKGHNTAKVVLARDMLKIIYHVLKERRPFYSDKKEFQIQSVAAPALCGV

SEQ ID NO: 132842 - protein, 349 aa, unidentified
MSQISNTTIAVVGIDIGKNSFHIVGLDERGAIVVRQKWSRGQVEARFANMPPCLIGMEACVGAHHLSRKLNSLGHDARLMPAKYVRPYSKGQKNDFRDAEAIAEAVQRPTMKFVATKTAEQLDLQALHRVRERLVSQRTGIINQIRAFLLERGIAVRQGQRFLRAQLPVILAMPPDVLSSRMVRAIEDLAADWRRLDERIESLSSEITTLAEQDNGCERLMSVPGIGPIISSAMVAAIGSGDAFSKGRDFAAWLGLVPKQMSTGDRTILGRISKRGNRYLRVLFVQAAWVVLIRPKRWERHGLKPWIEAAKKRLHHNVLAIALANKLARIAWSVLARGRSFEASKLQVA

SEQ ID NO: 132843 - protein, 333 aa, unidentified
MKTLPLYAGLDVHQEFTVGTLVDEMGNAVRELKVPTSPKGYKQLFFGMGSNVTAVFEAGRNWWYIASLLKPYCSFKMAHPLKVRAIASARIKTDEIDSRILAHLLRTNLIPESYMPPEDIVDLRNLVRYRVRLGRMSAHLKNRTHSILAREGHHSDFKPYEKKAKLWIQNLKMKPINRDELEHTLKLIQELKVKSDELDELLEKERIKYPQADLLTSIPGISTYSALLILAEIGDFSRFPTADKLAAYSGLVSSTHQSGNTCYQGRITKQGNVWLRWMLTQCTHASVKKQHRLQKFYLRIKHRRGTQKAITATARKMLTTIWYMLQRNEAYHG

SEQ ID NO: 132844 - protein, 350 aa, unidentified
MLYTGIDYHRSFSYLTTMNEKGDIISQKKLPSNGEIVDFLKSFGESMEIAIEATPSWYWLYDHLEDEGFQVKLSHPLKTKAIAYAKVKTDKVDSTTLAHLLRSNLLPLSYVPERPVRLNRELLRYRASLVRIQSGVKNKIHTVLAKNNVSHGYSDLFGKEGMAFLHSLALPENYKIALEGYLVVLDAVRQEIRAASKKVQQLAEQDHDSLLLMTIPGMGYYSALLTVSEIGDVRRFRSAKQLCAYAGLVPSTYSSGNLRFHGHITKQGSRWLRWILVEAAIHAVKRPGVLRRFYFKVERKKGGQIAKVATARKLLEWIYYILRDGRTYQEMEKIADLLGRGEPGKNSGSA

SEQ ID NO: 132845 - protein, 333 aa, unidentified
MLYVGVDAHKKRSRVAVMDVDGRLLKNVEIASSRNGVNQALGRYRRPMTAVLEASYAWEPMYDWLDEVAEEVTLAHPLKVRAIADARIKTDKIDAETLAHLLRADLIPAAYAPGQETRQVKRVLRQRRFQVQVRGMVKNRILALLSRNAVERPKLSNLFGKRGRAFLATVALPEVERRLVDEDLLLLDTMEGHIGKTEGLIEELSKNDPVIERLRSIPGIGRFFGVLLRYEIDDIERFWAPKKLAAYAGLVPSTYQSSDRCFHGRLTKQGNRHIRWAAVEAVTPAARYSAYFRRYYQRIKHKAGTGAARVATARKLLDMVWNVWTEERCYEER

SEQ ID NO: 132846 - protein, 383 aa, unidentified
MRRGGILIEANDSEGEAMKKHTMINQSLSADVSACTTVAVDLAKKVFQVAGEDALGQVKFEDRIKSREAFQVFLHKLPESVTVLVETGPGAQAWARLLQIQGNPVRILPAQLVAKHRSGPKNDHNDALAILRAGRDSKISAVPVKSPAALAMQALHRARQGYIRRRTAVGNQMRGLLLEHGVALAQGEMAISQLVPRILEDVTQPLPDLLRELIAELLGEWRQLGERVNVLTGRLETAAKESEIARRLMTVRGVGPIIATALLAKQTEPERFANARQFAAYFGLVPNQHSSGDKIRLGKMCKHGDAYLRSLTIQGAHAVLKQIRSDSEQPDDQRLQRWISRLGRKEAAVRLANRNLRILWVLLQNDQTYRRRPGNGPEVAMSH

SEQ ID NO: 132847 - protein, 411 aa, unidentified
MIKENYIYVGIDLHKETHTAVMIDCYNQKLGEITFPNRPADFPKLVAKVKKCNTDGKTIVFGLENAYGYGRALAVWLIDKGYLVKDVNTAISHRQAKHRGAMYRKSDSDDAEAIALATLNMLDKLPDAYPNDAYWSLGQLVHRRDNIMKQRTRLVNQLHEQLCITYPSYKQFFNDISRPTALYFWEHYPSRKYLKGKSVEDLRAELVPVSHNKCSTKTCEKILDAVASDKVKNNAYQDARDMVTLSIVSDLQHYDKQLAEVDKMLEQMYKMLGCTLTTISGVNVITAVKILAEIGDIKRFSNANKLAQFAGIAPLHLSSSGKGKDVATKQGNRRLQATIYFLAIQMVQVSSKGTPRNSVVRAYYEKRKAEGKTSQQALICISRRLISIIYGMLKHGTEYRMPVVESAGENR

SEQ ID NO: 132848 - protein, 392 aa, unidentified
MYIVGIDIGKNHHEASIVSPEWKQIGHSLRFATTHKGADSLMSFIFNNIGNSSCIFGMEATGHYWYPIYSFLKARGYTIYVINPIQSDSLRKMYIRQTKNDSIDSFLIAEVIRFGQFTTTSMADENILAMRQLCRYRDSVISSRTEIKLRISTIMEQIFPEYEKQFSSLWLSTSMGILEKYLTPENIENAPIDELFEIIKDKSHNKLTMKKAISIREAAADTFGIKIAQDAFSFQLKQLIDRMNFLDKQIEALDCQILEYYEKFDCYLHTIPGIGMIAAATILAEIGDINRFKSSSALVAFAGIDPTVRQSGEFSSTHNHMSKRGSPYLRHAIFLAATTCSFHNSPLNAYYKKKREQGKHHLTATGAVARKLTTVIYAVLRDGKPYEPKKFC

SEQ ID NO: 132849 - protein, 326 aa, unidentified
MSTTPSQHGISVGIDVSKENLDVDFAPTREPLRLANDPAGHAALVKRLSAMDIRVIVIEATGGYERAIVAELAAASLPVVVVNPRQVRDFARALGRLAKTDQIDAAVLADFGHAIQPPQRPLADAETRQMQEKLARRRQLVDMITAETNRLEHVTTAGVRRSIAAVLKLLGKQLQQIEDDLDQAIRRSPVWQAKADLLLSVPGVGPQTTRTLLVQLPELGHCSRQQIAALVGVAPLNRDSGKHRGRRTIWGGRSEVRACLYMAALSATRFNPRIRPHYERLLAAGKCKKLALTACMRKLLTMLNAMVRDNRPWKPLLVTLDFQHSR

SEQ ID NO: 132850 - protein, 341 aa, unidentified
MEKKLNVLGIDIAKQVFHLVGRNEQGTILLRKRLYRAQVMAFIAQLPPTLIGMEACGGAHYWARRFREHGHAVRLMAPQFVTPYRKANKNAMRDAEAIAEAMTRPTMRFVPVKSVAQQDLQALHRVRERLMKARTALINETRGLLHDYGIIVPQGAATFRKHVLEKLTTEAAKLTPHSLELFRQLLEELAALESRVAPYDAQLAQVAQMHPVCQRLMTIPGLGELTATTLVAAVNDATQFQNGRQFAAWLGLVPRQHSTGGKARLLGISKHGDSYLRKLLVHGARSCLRWVGRKRDRRSQWGQSLMERRGWNKAAVALANKHARVAWALMGTEQVYRVAEA

SEQ ID NO: 132851 - protein, 488 aa, unidentified
MPFVGFHEMAVLSVRCRVTIDAADRFPDLIPSGPDAGGNTIGAIPSNGAAAASTPDTRCGVLAGARPGGFNSESATEMDIVHERSVGMDISKRDAKVCLRVPGKRRGQFTSTVTTWGSTTNQILALRRFLEEQNVTVVVMEATSDYWKPFYYLLEESLPVMLVNARHARNLPGRKTDVSDAAWLAQLGAHGLLRASFVPPGPVRELRDLTRARAVTVQDRTRELQRLEKFLESTGIKLSGMVSELTGVSSRAMLEALIRGERDPQVLAQFARASMRSKIPALTEALTGMFGAHHAFMVRLHLDRIDQLARTITVLTEQIDTVMEPFRAAREALTTIPGVSTLVADVIIAETGGDMSVFPTAAHLASWAGVCPGSNESAGWIKSTRIMPGNKHLKGALGIAAMSASRGNNTHLSVKYKRVALRRGRVKAIVAIEHVILTATWHMLANGEVYTDPGADFYLKREPEQTKNRAIRQLQTLGYDVSLKPAGA

SEQ ID NO: 132852 - protein, 353 aa, unidentified
MIETITYRIGVDVAKSVFQVHGVKNETGESVAIRRRLRRSQVEPFFAKLPPSLIGLEACGSAHYWGRLARKHGHEVRLMPPAYVKAYVKRNKTDAHDAAAICEAVARPTMRFVPIKSEADQATLMLHRLRASFVEKRTAAANQLRAAFAEFGIIAPVGACGFKELLQLIESKAESFARLPQALRLVLCELAWQWQSCEAAVRRMDVEIAAGVKTSERAKRLTGVPTIGPVGASAIDALLPDPQLFRSGRDFAAWVGLTPREDSTGKTIKRGPITKKGDGYLRRLLVLGATSYLARVRRGQAKGASAWVLKMAAHPKRKLAAVALANKTARVAWAMLAKGEDYRAPAAVALQAA

SEQ ID NO: 132853 - protein, 362 aa, unidentified
MSTITIGVDLAKNLFSVCEMDGTGHVLRRRDLKRDAFVLWLAQVPAGTIVAMEACSGAHHWARRCLEYGLRPRIIAAQFVTPFRKSSRTKNDRADAEAIATAARQGNMRFVPVKSVDQQVRLSWHRMREGHKVESLAVGNRIRGLLAEFGVIVAKSDVALRRLLADLEAQAGLPGELKELLRDLDTRWAQLRTALDACDARIDDHARQDERCVRLRAIVGIGPITADAAVATVGDAHEFKHGRQMAAWLGLVPTQHSSGGHARMGQITCRGDAYLRTLLIQGARSSLQRAKAVATEKATPEQLWIRSLDGRMPFGKVIVAIANKHARQIWVMLAHDVDYDPHARLQHPMHRQTHVVQEAQAA

SEQ ID NO: 132854 - protein, 465 aa, unidentified
MKRTTSPFKKQKEKISLDPAWELINPQAAGVDIGSREHWACVCAQATERPVRKFGTFTVDLEAMAQWFKDCGVTTVAMEATGVYWIPLFQILEQRGFQVLLANARQTKNVSGRKTDVQDCQWIQRLHTYGLLAGSFRPADPYCVLRTYLRYRDELVCGRTTQTQHMQKALQQMNLALTQVLSDVTGVSGLAIIRAILAGERDPAKLANLVDRRVRANSATIQAALQGDYRAEHLFVLRQALELYDTYEAKILACEQPIALETAKLADQVDVRLKPLPARKEGGGAYLDKMASQDMRLPLHQKFGVDLTAMEGIGVLTALILLTEVGPDVSRFPSEKHFCSWLGLCPDNRISGGKVLSRRTRRVVNRVSDALRMAATSLERSQSALGGFYRRMKARLGAAEAVTALAHKLARIIYRLIKHGEAYVRTGMEAYEKKFQARKLCALQKAAKLMGFELVAKQTVPPGVS

SEQ ID NO: 132855 - protein, 370 aa, unidentified
MEEGIKFFVGLDVHKDTIAVAVAETGRAPGRLVGSMAHNVAKLFKVLERYGEPGQVQVVYEAGPTGYGLQRALARQGYLCQVIAPSLIPKRSGDRVKTDRRDSLRLAELARAGELRAIWIPDAADEAIRDLARAREDAVNSRTQARHQLKGFLLRHDVRYPGTSSWSKTYYRWLATLNFGESGAQTAFTEYWQAVSAADERVARLTDALARSIQGWHLEPVVSALQALRGIDQVSAIGLVAEIGDFARFAHPRQLMGYLGLVPSENSSGDRVTRGPITKTGNGHARRLLTEAAWNYRFKARIGYRAQRRQESLPQAIRDLAWKAQLRLTGRFARLRARGVQINKVCVAVARELAGFIWAIAQAQSSLPQA

SEQ ID NO: 132856 - protein, 345 aa, unidentified
MPIVGGLDIHRKQLTFDYLDTVTGEVRRGQIAPADRAHLRAWLRRFAGRDDVAFALEGCTGWRYVAEELAAAGVAAHVAEPADTAFARGRKRHAKTDKTDSRHLRVLLEQGRLPECWIPPAQILECRALLEAYHDLRREHTAWIERIHAVFFHQGAPRLGEGALRTERSLTALRAAAGCHLSPAGQLQVATALDMLAAIEARMDTLRQQLLHAARHLAGARALQARLYGAGPLAGLAMTCWLGGAGRFSSSRKAVRFAGLDVTVYSSDGKRSPGHLSRQGPEILRWVAYEAGKTHARASAPGHDYYVAVKNRQDGKIAALAQARKLIRQARHILAELGDDALTAA

SEQ ID NO: 132857 - protein, 344 aa, unidentified
MTYYAGLDVSLRSTNICVVDDQGDCVAEGKTDAEVADIVAFLDALDVEIDEVGLEAGTLTQYLTYGLQFAGFDVICMEARQVKSALSAMRNKTDKHDARGIAQLLRSGWYSRVHIKSMESHRVRALLASRKAVLAKCIDLEQEIRGIFKVFGIKLPPKLGHGSFDPHVRPVIEADEILSQSLLPVLDARLVLYRTFRELDNRTRKLAQGDTICQRLMTAPGVGFVTALTFKAGVDDPARFKHSRTVAAHFGLTPRRFQSGELDLEGHISRCGDAGVRSTLYTAANAMLTRSSKWSSLKAWGMQLAKTRGHRRAVIAVARKLAVILHRMWIDDTQFRWGTEAARS

SEQ ID NO: 132858 - protein, 453 aa, unidentified
MEKEKSVSMPVINEHAAGIDVGSRSHYVAVGQSTGDVCKFSVYTKDNIALVEHLRANGIKTVAMESTGTYWQTLYSCLQAAGFEVVLSNNYIKDPQKKTDTKDARWLQRLHTLGLLKGAFIPAPDVEHIRAYHRHRDNIVALASASQQRMQKALRLMNVRLDVALSDITGLSGMKMLEAIVNGERSGEKLASLAHGTVKKSQQEIADALQGQWKDEQLFILADELEAYKNYQKRMAECDKKIEKLLKEVVERLPDSDTPVARSTKRPHKKNRPHYDVEMLSMKYFGVNLLTVEGIGENTVMTFISEIGTDIHKFPTKKNFASWLRLAPNNKKTGDKTMSSRTPKGKSIMANGFRLAANTIAQRRSGVLKKIFVRIALKKGRAAAITALARRLAEIFWIMTVKKVPYKCMNEQEYSQKIKMTVIKNIRTKMKKLNINTDELIFEGRVTNSFSSR

SEQ ID NO: 132859 - protein, 338 aa, unidentified
MIGVDLAKNVFQLHAASMTGHPKYRKKLPRNNFAAFMAQQPPAIVVMEACGSAHYWAREMIKLGHEVKLIAPQYVKPFVKRQKNDAADAEAIVTAAQRPEMRFVDPKTAEQQSRAILFRARERLVHQRTELVNALRACLYEYGHVVPQGIHHIKRIEGILDVPNSDLPDLMREECQELLVQIAEKTIRINARTGKIKALAAEADAARRLQTIPGVGPLTALAVEAFAPAMESFKCGRDFAAWLGLVPRQFSSGGKERLGRISKAGQADIRRLLIIAAMSRLNWLGRKSIPEDSWLARLAARKPRMLVAIALANKMARTIWALMTKGEDYRDSAQAAVA

SEQ ID NO: 132860 - protein, 430 aa, unidentified
MKSNTQNAKIEAITEKTLVLGIDVGSEMHYARAFDYRGIEYSKKPFKFSNTEAGFVTFKEWILDLKERHEKDKVVPGMEPTGHYWFNLGKFLQDNEMKPVLVNPHHVKKSKELDDNNPTKNDRKDPKVIAGLVREGRYMIPYLPDGVYADLRTASNIRFQLQAELTRIQNRISRWFNIYFPEYKTVYGKPDAKSGMLILKAAPLPEDILTLGIDGVNQIWRDEKLRAVGKARAKTLIEAAEHSVGSKEGAVSARMEIRMLLEDYESRNTRLQEVMVLIEELVRKIPMAEKLLEIKGVGIRTVSGFLAEVGDISRFNNPKELQKLAGLALVENSSGKHKGETTISRRGRKRLRYLLFEVAMSLVAKNSEFRELHNYYTTRRLNPLKKMQSLMAIAAKLIRVFYAMLTKGVDYDPKKMVSDIKRPAVYLQAA

SEQ ID NO: 132861 - protein, 380 aa, unidentified
MASMHDSARFKTTVYAAIELSKKSWVVAIARPDRDQPSIHRIAGGNLADLIGRLRKAAGEKQRIVVCYEAGYDGFWLARSLAKIGIDCRVLDPASIQVNRRARRVKTDRIDSLALLRALIAIDRGERHVCAVVRVPTVEEEDARRSHRERQRLVRERTGHINRIKGLLFAQGIRGIEPKRRRTRIDFSKLTTAEGRPLAERLRRELEREYQRLELVQSQLRIVEKERDTADAQDPAVERKRELLCALQGVGGASAAILAREVFARPFASRRQLGSYLGLTPSAYDSGSTTRCQGISKAGNSWARRVLIEVAWLWRKYQPGSPLSHWYARKTADQSPRIRRIMLIALARKLAISLWRYVETGLVPDGAVMAKTTPHMAPAT

SEQ ID NO: 132862 - protein, 407 aa, unidentified
MIFVGDDWAEAHHDVHVMNEAGDRLAARQLPEGLDGIRRFHELVAAFVDDPGEVVVGIETDRGLWVQALAAAGYEVYAINPLAVARYRDRHNVAGAKSDAGDAKVLADVVRTDRHNHRPTAGDSPGAEAIKVLARGHQNLIWARTRHTNQLRNALREYYPAALEAFADLADRDALAVLGRGPTPDAGAALSANQLRAALKRGGRQRNIERRAAEIQAALRVEQLAAPSALAHAFAATTKATVGIISELNHQIAELESALEDRFEQHPDADIYLSLPGLGDVLGARVLGEFGDDPDRYATAKSRKNYAGTSPLTVSSGKKRAVLAPHVRNRRLHDAVDQWAFCSLSASTGCRAFYDQRRATGDLHHQALRTLGNRLVGILHGCLRNHTHYHEHTAWAHRHANVDDIAA

SEQ ID NO: 132863 - protein, 326 aa, unidentified
MTHKLGIDVSKVKLDAALLKVDGKYRSKVFSNDAAGFKSLLLWIEANVPAGIADVHACMEATGAYHEGLALFLSDQGIAVSVVNPLLVKRFIEVDRVRNKTDEGDAKCLARFCQMTQPELWEAPSVGVRTLQALVLRLDSLQEMRQGELNRLDVAHASVQQSMRDVIADLEHAIEAVRKQIKRTIDDDPDLKQRQSLLTSIPGLGDKTIPQLLAYIGRPERFKNVKSLTAYAALAPLIRQSGTSLNKHHGTHPQGHRALRSALYFPAMVAGKYNPLVAAFWQRLKAQNKPGKVIVVACMHKLLAIAYGVLKSGKPFNPDHHKSISA

SEQ ID NO: 132864 - protein, 339 aa, unidentified
MSLYVGIDLHSSNSYIGVLGKDSEKIMSRRLPNDKEKILMALSPFKEQIRGIAIESTYNWYWLVDSLMAENYPVHLGNPAAFEQYKGLKYANDKHDAFWLAKMLALGLLPEGYIYPKAERGLRDLLRRRSQLVRQRTSLKLSLQQICCNQTGVQLSNNLIEKMDDKNISEIFKEKDWQMNGESLFATLEFIKKEIEKIEQYILKQLKGRSCYKSLTSVPGIGEILAFTISLETGPVERFESAGCYASYCRCVPSSYWSNEKKKGQGNSKNGNKYLAWAYAEAASFCIRYCEEAKKYYQRKQVKTNIPKAYRAISNKLAKACYYLMKDGTIFDAKRLFES

SEQ ID NO: 132865 - protein, 342 aa, unidentified
MKKALQLQPLYIGIDVSKQTLDVSCLGQASTHCYHQFENSKAGLRSLNRWLLQQEGFSYTAALFCIEHTGIYTRQVVAFLILQGAKVWLESALHLKRSIGMIRGKNDKVDSYRIARYAMVNADQAKLISPSNQTLQLLKDLLACRTRISKSIQSINVSVRELARIDKASGKELANLNKAALEGLRKSKTAIERRMRELIISDPELKQIFSLATSVKGVGQVLATELLIYTHKFTRMTNVKQLACYCGVAPFTHTSGTSIRGKTRTSHFANMNLKRTLHLAAMSSTQYVPDLRKYYERKVAEGKSKMCVINAIRNKLLYRILAVVKRGTPYVLNYAEINLVKS

SEQ ID NO: 132866 - protein, 355 aa, unidentified
MNAIKYIGMDVHLATLSIAVRDAAGKLIMEATMATEARALLDFMRGLSGTLYVAFEEGTSAHWLYTLLEPQVAKVVVCDPRQNPRRLGEKKSDRLDARKLAELLRLGSLKPVYHGNAAGPALRELARSYRTLVSDAARVMNRLKALYRARGIRATGARVYSPRFRAPWLEQLREPGVRSRAELLYQQLDLLLPLRQEARAALLAASRQHPAHKILCSIPALGPVRVALLIALLQTPHRFRGKRQLWTYAGLALVTRTSADYQLVDGQVTRARKSALVLGLNANHNHPLKGIFKDAAAGALVHPGPFKDFYTTRVAQGMKPELARLTLARKIAAITLTLWKKGESFNVEYVNAQAA

SEQ ID NO: 132867 - protein, 356 aa, unidentified
MSKLSTLDFEGQTFFIGIDVHHAKWVITIRTGGMELKTGMFEPSPEKLAKYLRVNYPGGKFRSVYEAGFCGFWIHRELIRHGIENIVVNPSDVPTNNKERMNKRDKVDSRKLSRELENCSLKGIYIPDEWPQQLRSLCRLRRESVGNMTATKNRIKGHLYGYGITLPPNTECSHWSGAFIKWIEKNCVAKGGPFSDYLEFCIQDLKEEKKRLAAIMRKIREYVKSPSSERIIRYLLTVPGIGVTAAVTVYTEIMDINRFPDLDRLCSFVGFVPTCHSSGDRESVGDITPRRNKYLRYIIIEAAWVAIRKDPVLLRVYSDLLKRMKGQHAIIRIAKKLLSRIRYVWKNQQPYTLCAN

SEQ ID NO: 132868 - protein, 338 aa, unidentified
MKKYIGMDAHSSICVFSVVDEKGTEVNQAKIATNGLLLVEYIRSIKGSKKLVFEECELSAWLFETLHGEVDELIVCNPTRNQQYKKAKTDKLDAQNLARLLRGGFLTPVYHDGSKTEWLRALMSGYQDVVDTGVSVKNRYKSLFRKAGLPARGTKLYDDSSLLEDLPRPDQRFVGHSFYRLLEALEKEREQYVAAIGKLGRTFPEIKLLKGIPGIGDISAAKIIAQVISAQRFKDKHKFWSYCGLVRHRMESGGHVYGNRRGWGNRTLKCVFKMAAKSVLTGENELRAHYDELRAKGTSDKSARNAVSRKLAAITLSILKTRRPYDETRILSQAEQAG

SEQ ID NO: 132869 - protein, 346 aa, unidentified
MDHYVGLDVSLKLTAICIVDRTGKIEREGAVPSDPEAIATFIKLHAPHVVRVGLEAGATSTWLWTELNKMGLPVICIDARHAKAALKMQINKSDRNDAVGIARIMQCGWYKEVRVKDLDSHAIKALLVSRALLVKIKRDMENQIRGLLKNLGLVIGRAKMNVFAVRAAELAEARPELGAAVEPLLKAREAVGRQIADLDRKVLRLARNNAQVRRFMTAPGVGPITALCFLATIDEPTRFKRSRSVGAYAGLTTRRYASGEIDWTGRISKCGDKMLRSYLYEAANVLLTRIAKWSALKAWGIRLAKRSGLRKAKVAVARKLAVILHRMWVDGTEFKWSSKEAANQPA

SEQ ID NO: 132870 - protein, 338 aa, unidentified
MKLYGAIDLHSNNNVTVLIDEKDKVVYQKRLANDLPLVIEQLSPYASSMEGIVVESTYNWYWLVDGLMEKGHRVHLANTAAIQQYEGLKYTDDDSDARWLAHLFRLGVLPEGYIYPKEERAVRDLLRKRSQLVHHKTAHLLSIQNLYSRNTGASLSANRIKQLTSETVDARFSASDLALAIKANLSVMRSLETEIAVLERVVKERIKLKPAYRYLLTVSGIGHILAFTIMLETGEIRRFPQVGNFVSYCRCVKSEKLSNGKRKGSGNTKNGNKYLSWAFVEAANFAIRYEPLVARFYQRKKAKRHRVVALKAVANKLARACYYVMRDEVPFDVARAFA

SEQ ID NO: 132871 - protein, 378 aa, unidentified
MHSMTQNDALVVGGVDAHADAHHVAVLDQRGALLATKSFPTTTPGYRQLLDWLSSHGKVDVVAVESTGSYAAALVRYLRQHGVTIVEVNQPHAHTRRRVGKSDPIDAEMAARLFQAGKAKAVPKQTDGIVESIRLLRVARNRAVKSRSAALVQVRDLIITAPQELRDQLSDRKTLRGKVTVCSRFRPSGNDLRPPSQAAKFALRSTAQRIQALDEEIAALDRELDQLVAAAAPRTVQLLGISTGHAGQLLVTAGQNIERLRSQSSCSMLCGASPLPASSGKTTRHRLNYGGDRQANRALHLIAVCRLRYCERTRAYAKRRTAEGKTQRDIMRCLKRYIAREVFNSLRADLADTAQPRPAVSTTIMCGNPGFGINRIRT

SEQ ID NO: 132872 - protein, 394 aa, unidentified
MKLVGIDVGKNSHHFCVMDKETGEFNVTPTSFSNNKEEFDFLINSLKPYSKKSILIGMEDTGHYHVALLKFLLSNGYPVALINPKTTDLTRKMEGGITKNDKLDTITICDVLDTPERKKQYRITKVDRFDLYEQRQLTRHHHNLKEELNVYCNRLQKSIDLVFPEFNTLFSSKYSIVYMNLLKTFGSAEAIASTDIRTIRKCFEIKGRGNRISLTPEKLKECAKNSIGISSEVETIQIKHLVSQITLIKEQIAEIDKKIEEFSITNNSPILSIPEISHFSGTSILAELGDIGNYSKPSQIIKFAGVAPYHYESSQYNAQHTGITKKGSKYLRKTLYQIILTVINNNPVFKKYYLLKISQGKGHRCAQGHCIRKLLRIIYHLLETGQSFYPALLR

SEQ ID NO: 132873 - protein, 387 aa, unidentified
MTELTRTDVVTPAATMPTTSSLKSVDYSPAAAEILTPTFTVGLDVGDRRTHYCVVDDQRKVVARGSFTTDPEAMAKALAEFPGARVALEAGSQSPWMSRALKKSGFQVHVVDPRRVQLISKDPRKNDRRDAETIARLEAGMPELLGIVHHRSEQAQADLSVIRARDALVRMRTMLVQQVRGLSKVFGVRLPATSTNSFAKRVRSTVPEVLLPAVEILLEHIADTSTRIRESDKLLARISEERYPEAVRLQTQIQGVGPVTSMAFVLTIEDPNRFATSRQVGSWIGLCPRSFASGDSNPELGISKAGDAYLRRLLLQCSHYITGHFGQDSDLRRFGERLAAGGGRGAKKRSNVAVARKLAVIMHHVWRTGVDFNPLHNAERQALREAV

SEQ ID NO: 132874 - protein, 344 aa, unidentified
MEQHKTFYVGIDISSETFTSSNGSAEQGWTVLGKAETFVNTQEGYKDYLQWLARQGVKPGNSVICMENTGVYSEQIAYFLQSKEYQICIETPIKVKRAFDVDGHKTDPVDSRQIAEYAYRFYDELRIWKPRREVLEQVKILLATREQLVIEKTGHINSLKALRRKVVRADIAERVLESLISTLKDQIKTMETEMNKLIRQEADLAQEQALLTSIPGVGKLLSAQALVLFHQMDGELSDKKLAAFIGICPYEHSSGTSVKRKAKTSQHGPEVIRKLLNLAARSVCTHVPDYQQYYLRKLAEGKAKSLAINNVGNKLLSVMAAVFKSGVPYIPGYRSVHQRFLTKS

SEQ ID NO: 132875 - protein, 423 aa, unidentified
MAPMKDCCCGVDVHKSFIVAVIAKLNDKDVIFTGYKRFSTFKKGLLEFKAWLGMHDCYEICMESTGKYYIPVYRTIADETFHVDVVHPKYVKAPRGKKNDKKDAKRIADMYMRDHIAEYSIIPTAEILAIRDVTRYRRKTIHAITAEKNRMSNCLTVSGIKLDEVLSDLYGKTGQALIGETIKHGGCDFDPEPFIDKRVKATPEEFREALDGDITPATLMKMNMIQQRMEFLCNQKAELELSMASLSKDFSRQLEILDSAPGVDSISAISILSEIGSDMKVFGSVKKCLSWVGVVPQNDESAGKKKSTRIAKGNSWLKPVLVQCANAAIKDKKHPEIREKYLAIKKRRGHGKAIITIAKRLMTAIYFMLLREEMYAPRLGKDKAPKRGKISLEKLIAHYQSQGYTITSKGLPVPTFNEDSVAS

SEQ ID NO: 132876 - protein, 399 aa, unidentified
MFVGIDWAKDSHDVCAVDPGGKICGRATVAHSQGGFDELASRLERWTRQGEVLVGIERPEGRLVDRILEAGYPIVLIPTFAMKDLRRRYAVGGAKSDPGDAYVIADVARTDGHRLRRLEPLSEQTRALRSVVRARDDLVDQRVALGNQLRACLDAYWPGAAAIFADVCSEICLAFVERYPTPESAARLGELRLASFLKKAGYSGRRSPAELLGRLRTAPEGIMGVEAEARADAVRAMVRVMRSLNHSIKDLDRAVIAHLGEHPDAEVFTSLPRSGRINAAQMLAEWGDCREAYPCPDAVAMLGGLCPVTHTSGKHRDVSFRWACNKRLREALTTFADNSRHASPWAADIYRRAIARGCDHPHAVRILARAWVRVIWRCWQDRTPYNPVLHGAVTRLEAA

SEQ ID NO: 132877 - protein, 375 aa, unidentified
MKEKLRFLGLDVHAETIAVAIAEPDGEVRSLGTIPNRLESVRKLIKKLGPVEKLRACYEAGPTGYVVYWQLAELGVKCDVVAPSLVPVKAGDRVKTDRRDAEKLARSHRSGDLTAVWVPDEGSEALRDLVRTREAAKQDQLRARHRLSKFLLRSGQRPPSGIRPWTRPYLTWVAQLRFTQMAQEATRLDYLHEVEHMRERVERLEGAITEAVKLASPALQQVINDLQALRGIADISAVTIAAELGQVSRFDGARQLMGYCGAVPSEDSSGKRTRRGSITKTGNAHLRRIVVEAAWSYHRPPCIWYGLRKRQESISEEVKEIAWKAQHRLHKRYMRLAAAGKDKRKITTAVARELLGFIWAIGTRAETIVRQRIAA

SEQ ID NO: 132878 - protein, 355 aa, unidentified
MKRTYFIGLDAHCKSCELAVVTETGKVTKRLKCGTNIPNLVAFLNEVPRPRWLTFEEGALADWLARNLREHVDELIVCEPRRNRLIAHDGDKDDPLDAEKLAQLLRGGYLKEVHHPESLERSAFKQLVMLHHDRVRARVREGNRTLGYLRGHGVFARQPALCKEDERAALYEKLPQNDIVRECLRVLLESFDLLVEQENEVKRRLEKHARQEAVIKRWFELPGIGWIRAATLFVGLDTPWRFASKAALWRYLGIGLERRGSGSGPMQVRVAQNANRLLKSAILGAAKSAVALDDNCFADQHRKWVANGVSPRNARRNVARSQAAVMWGMWKSGSVYHPEWVGVSLAAQAAAPVSV

SEQ ID NO: 132879 - protein, 416 aa, unidentified
MKKGQNTRGYERYMALDIHREYLLVGGWNEEKEWVLTPRRVGIEKFPEWAKKNIRAGDIVVLETTTNVWAIYDIVAPLASRVLVANAAEVGEIANARVKTDKEDVKRLLKLLIGGIVPEVWVPPMEVRELRAFISYRGRLVKTSTMIRNRLQSLLHKHNLMLSEAGLLDQDWWEAQKNISALEKLQIRQELVLLQEVEKLKAAVDEELQRQSTSTTWGKQALQIMQLPGVGYIVAMTVLAAIGDISRFENAKQLVGYAGLGAGVHDSGKTHKEKKITKKGRRELRWAMVQAAWRAIRLSPFWKAEYEKHLQRMRKPNQAIVVIARKLLIAIWHVLSKEETDMHASEEDLAYKMLLLSWSLKEETRRGLTYKQFAKYALMKLGVETDITRFVRKNVPRRLASREEVLAQMAELGLSA

SEQ ID NO: 132880 - protein, 421 aa, unidentified
MPNIEIGVDSMVKENFIYVGIDLHKETHTAVMIDCYNQKLGEITFPNRPADFPKLVTKVKKCNTDAKEVVYGLENAYGYGRPLAVWLIDKGYFVKDVNTAISHRQAKHRGAMYRKSDSDDAEAIALATLNMLDKLPDACPNDAYWSLGQLVHRRDNIMKQRTRLVNQLHEQLCIAYPSYKQFFNDISRPTALYFWEHYPSRKYLKGKSVEELRTELVPVSHNRCSTKNCEKILDAVASDKVKNNAYQDARDMVTLSIVSDLQHYDSQLAEVDKMLEQMYKMLGCTLTTIPGVNVITAVKILAEIGDIKRFSNANKLAQFAGIAPLHLSSSGKGKDVATKQGNRRLQATIYFLAIQMVQVSSKGTPRNSVVRAYYEKRKAEGKTSQQALICISRRLISIIYGMLKHGTEYRMPVVENAGEKL

SEQ ID NO: 132881 - protein, 375 aa, unidentified
MKEKLRFLGLDVHAETIAVAIAEPDGEVRSLGTIPNRAESIRKLIRKLGSAEKLRACYEAGPTGYIVYWQLAELGIQCEVVAPTLVPVKAGDRVKTDRRDAEKLARCYRSGDLTAVWIPDEGSEALRDLVRAREAAKQDQMRARHRLSKFLLRSGQRPPTGVRPWTRPYLIWVAQLRFTQIAQEATRQDYLHEVEHMRERVARLEQAITEAVKLASPALQQVINDLQALRGIADISAVTIAAELGQVSRFGSARQLMGYCGAVPSEDSSGKRTRRGGITKTGNAHLRRIVVEAAWSYRRPPCIWYGLRRRQESISEEAKEIAWKAQHRLHRRYMKLGAAGKDQRKIVTAVARELLGFIWAIGTKAETISKQQVAA

SEQ ID NO: 132882 - protein, 343 aa, unidentified
MDHFAGLDVSVKETSVCIVDDTGRIAREVKVASEPDSLLQVLTNPAYHFKRIGLEAGPLSQWLFSTLAEAGLPVICVETRHMRAALKAQVNKTDRNDARGIAQMMRAGLYRPVHVKTLRSQKLRMLLTHRKLLQSKAIAIENDLRATLRNFGLKVGMVGTVKFETRIKELVDNLPELAVLVEPLLIVRRVLREQIGILHRRLLAVVRDDDVCRRLMTVPGVGPVVALTYRATVDVPARFRNSKAVGAVFGLTPSRYQSGESDRTGGISRCGDEMMRAMLYEAAQILLVRSAKWSWLKAWAMKIARHRGLKKAIVALARRLAVIMHRIWVDGTEFRWTKEVAAT

SEQ ID NO: 132883 - protein, 413 aa, unidentified
MERLLERCAALDVHQASVSACVRVPGEGDQRREFNERFGATTPDLLALCDWLRGHGVTHVAMEGTGVYWKPVYYALEGEFELLLVNAAHVKQVPGRKTDTKDAAWLCQLLECGLLRASFVPPKPIRELRDLTRYRKTLIADRASEANRLHKVLEDAGVKLSSVASNVLGVSGRLMLEALCQGDNDPVALAELARGRLRSKLPALRRALESHFRDHHAFLVAQILGHLDYLDEAIAACSARIDEQIAPFGSALRLLESIPGVGRRNAEVIVAEIGADISVFPSSRHLASWAKVSPGNNESAGKRKSGAIGKGSPWLRSALVESALAATRTRGYLRAKYWRIRQRRGHQRAVIAVAHAILEISYHMFQSGELYRDLGDDFFDRRDNERATQRHLRALERLGYRVTVEAAANPQAP

SEQ ID NO: 132884 - protein, 324 aa, unidentified
MTVIAAAIERCGGIDVGKKFLAVCIMVGPLEGEPHVEIQRFGITVLELRRLRDWLNQESITHVAMESTGSYWKPVFNILEDAVRVYLANPQDVKNRKGHKTDNKDGWWLAHLLRHAMIQPSFIPPRAIRELRDLTRRRRRLLGNGSSEKNRVQKILEDANVKLGNVLADVFGVSGQLMLEALLEGKAGPQEIAQLAKRRARQRIPEIAAALEEHPMNAHHRRMIRYSLEHMQFIEQQIIQLDKDIAQKIRESGLETQWELLQSVPGVQANSAATILAETGTEMQQFGDEKHFSSWAGVCPGNNRSAGKTRAITRQEVIRGCGVP

SEQ ID NO: 132885 - protein, 357 aa, unidentified
MSPMMSLMRKAERPEHMNPRRLYIGVDLHEKESQVAVYDPDGGLIDEKRLPTEKLPHYIASQPGEKHVGVESIGFIYPVYDALVEAGCDVAVANPHNIQLIARTRNKNDKVDARILGELLRTNFFPRSHIPDAETREKRLLVKDRVRYGVRRADLKNSVKWLLKRRGIKNKSPFSREGREQLRSLGLKEVEYRLRELELVDSIIEALDRRIHFAALSDHGARLLDTIPGVGPYTALYLSTALHGVERFPGSKHACAHTGLVPSLHQSGDKTILGHITRQGDRWLRRNLVECARWAVRKDPHLKEFYLRVKHRKGGKRALVAVARKLVSYAYWMLKRDQTYEELSPWKTDWGSSPKLE

SEQ ID NO: 132886 - protein, 349 aa, unidentified
MDHYAGIDVSLELSSVCVVDAKGKIIKEAKISSEPGALVIFLRGLGMVVERIGLEAGPLSQWLHAGLTQAGFEVVLLETRHVKAALSAMTVKTDRKDARGIAQLIRMGWFRPVHCKSIGSQEVRALLVGRKLLLGKLLDVEFSIRGILRGFGLKMGMVTRRSFEARVRELCAGQSMLEQIFAAMLVARSALQTEYTKLHKAMLTIVRKDEVCRRLMTTPGVGPLVAITFKTGVDDPSRIRKSKAVGALFGLTPKKYQSGETDLTGGITRVGDEMVRTALYEAANILLSRVTRFSTLKRWGMDVAKRRGAKRAKVALARKIGVILHRMWVDSTNFRWTKEAPTAPRLIQA

SEQ ID NO: 132887 - protein, 414 aa, unidentified
MGMPRWVGRAIGLDVHREFCEVAICEDGRTRSAGRVSATPEGIAVLARSLLPSDRVALEVTGSCWEVARILEPRVNRVVVVSPDDTGITSARAKTDKLDARALASLLWKGELEAVWMPDERCRVLRRRLARRQQLVWSRSRAKNEIHAALQRRLQPKPPCSDLFGVKGRAWLSSLELPLEERESVDAGMRHIEFLDAEIAAVEKLIAKQALSWPEIRRLMTVPGVNLICAASFIAAVGNPNRFLTSRKLVAYLGLDPRVKQSGEGPARSGRISKRGSPSARWALVEAAWTAVLQPGPLHAFYVRTRNRRGHGKAIVATARKLAVLFWCMLTRGEDYAHQQPSLTRKKLRRLEITAGAPKYTRRAAGIWSTNDLMREAELELARQAETSYLRLVQDQLAGAPAKKAGASVTLERA

SEQ ID NO: 132888 - protein, 454 aa, unidentified
MGKPRVVPDEDHEVMYQRVAAVDVAKASGVVCLRAPDPARPGRFTSRIWDDVPATRARIAELGAELLVSGVQMVTLESTSDYWRIWYYVLEGAGLAVQLVSASQAKNLKGRPKTDKLDAMWLARLTQAGMLRPSFVPPAEIRRVRDFTRARTDLVAERTRCLQRLEKLLEDAMIKVTAVAADGLKAKSVVAMVQALIAGERDPRTLADLAKGRLRARKDALAAALDGMFDSHHGVIAGMLLDQVAFLDQRITVMEDQAIAALAQVEESWGTDATGETGPAAGTAPGSPVLAAAHRLAEIPGISVWLAIVIIAEIGLTMAVFPTPAHLVSWLGLCRSASQSGTRRGKGKPKKGNSYARAAAGQAAIGAARTATFLGERHARIARRRGKAIAQVAVARSIMIIVWHLLNDPAARYRDLGPDFHATRTNRDKKIRTYLRGLKALGLTVAITGDEHAA

SEQ ID NO: 132889 - protein, 331 aa, unidentified
MKQGRAQAGGNTKTSKVYTGIDVSKAALDVAVYGKVARHSFTNDEQGISQLVSWLKELNPALVVMEATGGLEVPLVAALGVAGVPVAVVNPRQVRDFAKSIGRLAKTDALDAEVIAHFGAVADIEPRPLPDAMTRGLAAVLARRRQVLEMLTAERNRLGTALNPVVERIRAHISWLEEDLCKLNNDLSHTIRESPAWREKDNLLRSVPGVGPVLSTTLLADLPELGTLNRRQIAALVGVAPFNRDSGTLRGRRVVWGGRADVRGALYMGTLVATRYNPVIRRFYQHLCASGKMKKVALVACMRKFITILNAILRHSTPWSEPVSQLISPCS

SEQ ID NO: 132890 - protein, 405 aa, unidentified
MFEIDDVGVFLGLDVGKSAHHGHGLTPAGKKVFDKPLPNSEPKLRAVFDKLRDKFGAVLVIVDQPASIGALPLAVARDAGCQVAYLPGLAMRRIADLYPGEAKTDAKDAAVIADAARTMPHTLRSLELTDEITAELTVLTGFDQDLAAEATRTSNRIRGLLTQFHPSLERVLGPRLDHQAITWLLERHGSPAALRKAGRRRLVELIRPKAPRMAQRLIDDVFDALDEQTVTVPGTGTLDIVVPSLARSLAAVHEQRRALEAQINTLLEAHPLSQVLTSMPGVGVRTAAVLLTTVGDGTSFPTAAHLASYAGLAPATRSSGTSIHGEHAPRGGNRQLKRAMFLSAFACMNADPASRLYYDRQRARGKTHTQALLRLARQRISVLFAMLRDGTFYESRTPKAVELAT

SEQ ID NO: 132891 - protein, 342 aa, unidentified
MTITIGIDPHKGSHTAVAVDSNEVVLDEIRVRSCSTQTDRLRDWADRFEGRTWAVESAHGLGYLLSQQLVAAGETVVDVPPVRASRVRVLGSGKSQKNDPNDARSIAIAALRADDLATVCADDHARVLKLLSKRHRDLGRLKNKVSCRLHALLLEMVPGGAGFRITTVTRINAVIDDYEPVDAMGRQRHEIASELAADIDRYNDLLDASKQRINNALAASATTLTTISGVGPICAAMIIGESGNIDRFKSKHHFASYNATAPVEASSGPKVRHRLNQRGNRKLNWALHVIAISQLGRDTLGREFYDRKMAEGKTSKEAIRALKRRLSDVVYRHLVADARQQN

SEQ ID NO: 132892 - protein, 314 aa, unidentified
MILPLRCVGIDVSKRTLDIFDDAIGVPERIANAPQAITAQVARWRCGNVFVVFEATGVYDRELAELLQQTGIRFARINPARARDFARAAGQLAKTDAIDARMLAAFARTMVPAASQAPSPRRNALALLAKRRDQLVQMRAQEKNRRSEAQDRTMIECIARHLDFLNGEIKAIEAEIKALIKADPEILERARLMRSAPGIGPVACMQLLAQMPELGQVGPKQVAALAGLAPRNVDSGTYRGKRTIGGGRKRVRDALYMAALNAVRRDGSFKTFYQKLRAAGKPAKLALIAIARKLLTTLNAMMRDGKIYLQPQPS

SEQ ID NO: 132893 - protein, 334 aa, unidentified
MHESCELTLGATVGIDVSKDRLDVVLRREEREQPRVCANSAAGFLELHRWLSTHGIQPQQTQVVLEATGSYSDAVALFLYQHDYRVSVLNPAVLVDYRNSVNVRSKTDALDARLLARYAQERRPRLWKPLPPEMQTLRFLLARREDVQHMLQQERNRLHAGRMDAWIRTRVQQHVTQLDKELRAVWKRTMDHLKAHPSLKRMWRRLQTIKGIGPIGAAYLLAEVGEIERFDDPRALVSLAGLAVKRHDSGRSVHGRPKIDRHGRTGLRRILYLCAVSALRWDPHMQRFAARLQARGKPLKVVQVAAMRKLLHIVYGVWKHEADYDPTLAFPEVA

SEQ ID NO: 132894 - protein, 399 aa, unidentified
MSEDPTTYVGLDVHKDTIQVAVLIPGRSEILEWTEAHNAESIRRLARRLLREAPESVECCYEAGPTGYFLQRKLRSLGIGCTVVAPSLIPIKPGAHIKTDRRDARKLAELFRANLLTEVHPPSETDEAFRDLCRCRGQAQRDLLRAQHRMSKFLLRRHVIYQQTKHHWGTRHMAWIRTLKFEDSSSRAVFESYLLAVDQLSERLHQLDLKVAAAAEQKPYREPVAWLRCFRGIDTLTAACIVAELHDFRRFPNPRSLMAYLGLVPSEHSSGKRESRGPITKAGNSHIRRLLVGVALKNRHKPRITGPLLHRRQGQPGRILALADRAQERLYARFWRMTQRGVIHPKVTVAMARELVGYLWAALHPDALPTRPDPGSEKSCKAPGVQASPSPVPSQAASQ

SEQ ID NO: 132895 - protein, 401 aa, unidentified
MKKFNAEPIGLEMASALETVRQVEAEHNYPAYIGLDVHKESIAVAVARAGREAAESRREIANKPRAVAKLVGRLAQEFNGAVLLFCYEAGPCGYGLYRHLLGLGHDCEVVAPSLIPKKPGERIKTDRRDARKLAQSLRSGDLTAVWVPDQEQEAMRDLTRARGDFKAQERKARQQLNAYVLRHGHAWPSNRTRWTQAHYHWLESLRFAHDWQQVVLQEYSEAVKAASRRVADMTAQMERVLPQWSLAPVVDSLVALRGIDKLAAMVVLAELGDISRFESPKQLMAYLGLVPSEHSSGGRRRQGAITKTGNGHARRMLVESAWSYRFPARQTMHLKRKAKPASEEAKAIAWRAQKRLCGRYRTLVQAGKNTKQANVAVARELVGFIWDIVCHEMPKVEQVSR

SEQ ID NO: 132896 - protein, 363 aa, unidentified
MEQKNRRFIGLDFGVRTYEMCMYDENGKIIRSNGLTTPEGRQKLYSKLKPTDRVGIEMCSLTMKVAREMKSAVGCDVLLLHAGKLAVIYKSLKKTDKEDALKLARLVKTHEDEELPIVPLPSEVDLKRRRMIREAKQLRSDRTKEVNRLHALFVECGITDIKKKNLATKTSREKSLQLLEETQRRQAERICQVIDLVETQIAEVKKEIAVEVENDSNIKNLQTVPGIGELTAVAYSGFVGDGSRFDNGAQVSNYLGLVPKLDISCDQVHYGNITKTGNPEVRSLLIMAAWSHVRFAKEDTVLKSKWQYLTLVRGMSKKKAIVCIARKMAEMMLAILKSGKPYSPKKFSVAQFSELAEKALKSA

SEQ ID NO: 132897 - protein, 337 aa, unidentified
MTIIRIGLDTSKDVFQVHGVDAAEQPVLRRQVRRGEMKKFFAKQPPCRIGIEACGASHYWARVLRGLGHEVVLMPPQYIRPYVKRGKNDAIDAAAIGEAMSRPGMRFVPVKSAESQAGLMVLRVRELLVRQRTALINAIRGHAAEFGVSVAKGPVKVAELLQCADAEAAGVPAPARAMLRVLAGQLDAVEARLKTLEGQLMATHKENPTSQCLATIPGVGPIGAVSFALRVPDPKAFRSGRHFAAWLGLTPRENSTAGRRRPGRISRRGDQTLRTLLVLGATAVIRFAKPGRTAPWLLQLLARRPKKLAAVALANKMARIIWAMMVSGEAYRRPQPA

SEQ ID NO: 132898 - protein, 365 aa, unidentified
MGIMHSIGIDDHADKWTIAHLEGTDEKAAHEFELVPNEQGYRKLIGFLKSLGGEVRVCYEAGPCGYDLYRRLNKAGIKCEVAAPSLTPCKPGQRVKTNRRDAMKIARNLRAGELTFIAVLDEGRESLRELTRARSTVQKDVVRVRHQIIKLLLRYGQRYRDGKAWTQRFWAWLAKVELTGEYTKKVFDEMLITLDSRTSQLARLDQLIDEASKKPEYVVYVNALRVLRGIDTLSAMVILAEMGDLRRFPTAPQMMAAIGLVPSESSTGDKTSRYSITKTGNAHLRHIVVEAAWQYRGRVTTGRTITARRKGQPPELIQIAEKCDARLRRKFSRMTSRGKLSTVAAVAVARELVGFIWALGQIAHP

SEQ ID NO: 132899 - protein, 361 aa, unidentified
MRIIGCDLHARQQTLAMLDTETGEVVNLTLMHEGNQVREFYSQLLRPVLVGIEATGSMQWFLNLMEELGIECRVGHPATIRAAAPRRQKNDRLDADLILRLLAEDRFPAIWLPSKELLDLRALLLHRHQWVRIRTRIQNALQAIALANGLRRGPSLWSYDGQAQIAFLPLPPHASYRRSALQAMYKKMEEEIKPLTQQVAEQASQRSDAQLLMTHPGVGPVTALATEVFLGDPERFADGKALSSYVGLIPGERSSGRRQRLGKITKQGSPLLRFLWNEAGVHAVRHDPELKRFYRRKLVQKGLGKARVAVARKLGIRLWIMLRDKIAYQEFCRRGQKQQSGAACAGMPETGYGVNRHRPID

SEQ ID NO: 132900 - protein, 316 aa, unidentified
MVGIDVASEHVDVAAIGAELPASLARVSNDAEGHSALAEGLVRLAPGLVLMEATGGYEAALACALQAAGLRVAVINPKMARDFARAMQRLAKTDRIDAATLAELAEVLARRPDCERFIRPLTEPEQQDLAALVTRRRQLVAMQLSERQRLRLARPVARPSIEAMIEAIRRQLDDVEAEMVRHVEQHHRALARVLQGVAGIGKVVAATLIAEMPELGRLNRRQICALVGVAPYANDSGSSRGRRRIAGGRFQVRRALYMATLTAIRYNAPIRAFYQRLLAAGKIKKVALIACMRKLITHLNAIARNHLNAHDRPTIA

SEQ ID NO: 132901 - protein, 327 aa, unidentified
MNYLGIDVSKARLDCTLLDPATDKRKSKAVSNDPKGFEALSAWLDKQGFAAGEVHGVMEATGVYHEQAALWLTDAGMRVSVVNPVQVRDFARGLAMRTKTDGTDSVALARYGALIQPEPWEAPRPEIRELKALITRLEALEMDARRELNRREKALVAQAPALVRESLDIHLAALNREIARLQQAIDDHINRHPGLKSDRERLLSIPAVGDKTANRMLAVLHSRKFRSADQVAAFLGLVPVEHQSGSSIQKRPRLAKNGDARTRAVLYMAAIVATQCNPHIRALYTRLCAKGKAKMAAIGAAMRKLVHLCFGMIKHQTTYQPNWQQGS

SEQ ID NO: 132902 - protein, 406 aa, unidentified
MSMSERVCGVDVHRDSLVATIMGDSLKEAGRFINDADGINGVKEWLKQYGCNRVVMESSGIYWVSFYLALEDAGFNVLLANAWRVKGIPGRKTDQSDSEWLAHLLGSGLVKPSYVPEKRVRELRELTRLRVKLVGTRTAFKNRCHKVLNRVNIRLGSRLSDLFGKAGKEILEGLMEGKTVDAILEHTENRWLRNRADEISAVVKGVLSQSDIFVLKQCVDMVNEVGEKILRVDAQIETLVNERDVDIVSSVPGVGRRSAAAITAEIGDAKRFLDGKKIASAAGLAPSVYQSAGKSLTGGITKQGSKWLRRSMVEVAHAAVKKRDSKLREFYLRVKARKGEKTAIVAVARKMLTIIHHLLVNGEKYVEEGFEKRLRVNRTVRVGDVALQDMVAVLRGAGYVVRGPFG

SEQ ID NO: 132903 - protein, 451 aa, unidentified
MARPKRSRPMRDISPTHPNAAAIDIGAKMHVAAVPPDRDAEAVRTFGTFTGDLHRMADWFESCGVRTVAMESTGVYWIPAFEVLDQRGFEVVLVNARDAKHVPGRKTDVSDAQWLRQLHEYGLLRASFRPKSELATLRAYLRQRERLPDYAASHIQHMQKALMQMNVQLHHIVSDITGATGMRIIRGIVAGERDPAALAAHRDRRCHASAEEISAALAGNWREEHIFALGQALDLYDLYQAKVAESDARIEQVLARLRTASERPACRLPPARHRDNSANAPAFDARAILYSVLGVDLTQIHGLGPSLVLKLVGECGTDLSPWPDAKHFTSWLCLAPGNKISGGRVLSSRTRRSGSRAAALLRLAAVTVGRTQTALGAFYRRLSARIGKAKAVTATARKIAGLYYNAVRHGMVYADPGTSYYEERYRARVLANLRRRATSLGFVLQKAPSLA

SEQ ID NO: 132904 - protein, 445 aa, unidentified
MTPCAPLLSTAEPDWAAFAAIDWASRKHFWSLAPCDGGPPESGTLDNTPEAVELWAMALRQRFAARPIAVAIEQKRGAVIYLLAKYAHFVVYPVPPSMAASYRQAFFPSGAKNDPGDAGLLLEILLHHRQRLRPRQPDTPATRLLQFLVEQRRQLVQQKVQQVQRLTDCLQQYFPQLRLWFDSLDSPLVTALLDRWPVLPQLQRAHPGTLHRFFVEHNCRREELIQQRIQAIYTAVAAIDDPVVIEACTRKTETLLHLIRCLRQEVAGLEKRIRTLTEEHPDAPIFASFPGAGPATVPRLIAAFGTCRDAYANASDVQRISGVAPVNITSGNAKSTRMRRACPKFLRQTFHEFAAQSIPYSTWAKAYYQHYLRQNKSQHHAAVRSLANKWIRILYRCWKDHRLYDESIFLESQRRRGSLLGAELASLGTVQWRSQAGFQKLDDQP

SEQ ID NO: 132905 - protein, 345 aa, unidentified
MKITTVGIDLAKNVFQVHAVDERGRAVLRKQLRRDQLTAFFVNLPPCLIGMEACASAHHWARTLQKFGHTVRLMAPQFVKPYVKTNKNDVADAEAICEAVGRPNMRFVPIKSVEQQAVLSLHRVRQGFVRARTAQGNQIRGLLGELGLIIPKGIVNVTKRVPTVLEAAGEEVPAAFRQLIERLTKHLKELDRQVDELEAQIKAWHRASELSCKLEKIPGIGPLGASALVASIADANSFDNGRQLSAWLGLVPRQDSSGGKPKLLGISKRGDVYLRTLLIHGARSAILAAQRKSVNTNVWLAKLLDRRHPNIAAVALANKNARTVWALLAHGREFRADYAPEVSAA

SEQ ID NO: 132906 - protein, 343 aa, unidentified
MERVYYIGLDIHKRIIFYCIKTIDGSLYAQGKVEADRRSLGEWVKGLPGSWIGAMEATIFTGWVYDFLKPYAVDLKVAHPEMLKAITAAKKKNDRADAERIVDLLRVDLLPECYMLPGEIRELRRILRYRNHIVRTAVKMQNKMTGLLMEVGVTYSKKRIHGKKYFREFLERVEEIPPSVKELLKLSRSSYEIFSSCQKRLVDALRQNDLIRDRVEGLMGIRGVGELTALTWVLEIGEPRRFASIRQAVSYCGLCSAQRESAGKEQRGPISKKRNKHLQTVLIEAAKLAPRWNHPLAVLHKRELQKGNRNRATLAVARKLVAYMLAVDKQQTFVEHLGEKQAA

SEQ ID NO: 132907 - protein, 352 aa, unidentified
MDRYVGLDAHPTSCTFAVMGPSGKRLKSMVVETNGAALVEAVKSIRGRVHLCLEEGTQSAWLHELLSPHVAELVVTVAPENKGAKDDLRDAWARADELRTGSLKTRVYKAPLHLAALRNAVRGYGFAVRDVVRAMNRLRSVFQSRGVAVNDGIYNAKGRVRWLTKLTSPHRRLAEWLGRQLDQLVPLREQAEEWLLEEAKTHPIIRTLATAPGLGPIRTAQVVAITANPHRFRTRRQYWSYCGFAIVTHSTSDWVQRKDGRWERSQVLQTRGLTRKRHPLLKAVFKGAATTVITQLPEHPLHKDYERMLAAGIKPNLAKLTLARKIAATVLSMWKHQEVYDPQRHGAVSGKA

SEQ ID NO: 132908 - protein, 354 aa, unidentified
MITIGVDAHKRVHVAVAVDQAGCEIARWHGPNSVAGWQGLAAWAATLGPNCRWGIEGAWNYGRGLAQQLVAAGAAVYEVNPRWTAEGRRHARRSDKNDRLDARAIALYLRREAATLTAIVAEDDTTVLALLVTERDDLVAETTRLRNQLHQLLLHLDPEYAAHLPSPRTQGGVRDLEDYTSANPCPLQQQRAAGVRRLAQRLRLVAEQAKALATQIRALAAQRFTRLTAICGVSLLTAGALAGLLGPGRRFASDAQLAAFAGVAPLEISSAGRVRHRLNRGGNRRLNAILYRIALTQLRHSAQAQAYVARRVTEGKTKREALRALKRFIVRAIWRQWDQCQNPRSLAPAPTVAA

SEQ ID NO: 132909 - protein, 341 aa, unidentified
MGQASTIGLDIAKWVFQAHGADATGRVVFRKRLVRAKVLEFFAGQPPCLVALEACGGAHYWARELGKLGHTVRLIPPAYVKPFVKRQKNDVADAEAICEAAQRPGMRFVPVKDEAQQANAVVFRARDLLVRQRTQCINALRGHLAEYGHVVPQGPAHVDSLVALVEDPKSSVPESARGILQVLIRMLNALEEQLKELDGEIARRAKADPVARRLMTIPGIGPIAATAITALVPAPEGFRAGRDFAAWLGLTPLQRSTGGKHKLGAISKMGERTIRRLLILGASAVVGWASRRGAAAGSWLARMLARKPRMLVTTALANKMARIVWALLVKGGTYRAPAVAA

SEQ ID NO: 132910 - protein, 333 aa, unidentified
MDTETGELCERRLAHREEAEQFYGELRARSLRVRVGMEASGHARWFERWLLALQFELWIGDAAEIRTKGVRKQKTDRQDAQLLLRLMIEDRFPRIWVADAENRDLRQLLWHRHRLVQMRTRVMNQLHVVALNEGLRRKKALWRPTGRAELESLALAPWASRRRQDLLDLLDQLTPKIEELTRALEGEVEKRPVARQLMAHPGVGPLTALAFELVIGTPERFHCGKQIASYVGLVPSEESSGDRRRLGHISKQGNSLLRYLLVEAAQVTVRSQPQWRSKFFHLGMRRGRKIAKVAMARKLAVHLYWMWRQGWDYSQFEKLGSHAGAPGNPHGGE

SEQ ID NO: 132911 - protein, 411 aa, unidentified
MKMAGIDVHKKVLMVVVIETTSPEEKPERRRFTTLPGDLSRLSSWLRAQDVQEAVMESTAQYWRTVWLELEPHMLLHLAHAFSNRAPRGRKHDFKDAERLVRRLFADELILSFVPNGEQRIWRNLTRMKMQLTRDRIRLQSQMECLLEEMRIKLSSVVTDLLGASGLRILRALAAGETEAKRLAALGDNRLKCTEEQLLDALRGSSQPMHREMLALQLERLQLIDTQIAKLNNLIAQGMKPHQEAVMRLAEVPGLGVDSAQQIIAEVGVQAGTFSSAAELTSWVGTCPGKDESAEQNHSSRSAKGNKYLRRVLNQAAHAAVKKRGSYFQVVFRRLLPRLGYQSAIWAIAHRLCRVVWKILHEGARFIEKGSEPDAQTKKKRARMLVQALRRLGYDVAITATHLATQNAMQV

SEQ ID NO: 132912 - protein, 437 aa, unidentified
MEEVTDEPLYRDRVCGIDIGKAGMAATIRVPSDKDPARRAAETRSFGTTRREVLALADWLRCWQVPAVVMEASGDYWKGPFYRLEAEGFECVLADAKQVKNLPGRPKHDPGDSRWLAACLERGAVTSCFVATPEFRIIRLHTRYRRDLTEERTREKQRAEKLLGSAAVKLSSVVTDLHGVTGRDIMDHLIAGERSPKVLAQLARARARRKISELEEALEGAEFFTAEHAALLAAMLARIDRVNAEIARLSEVIETLLEPYEEQLQQAESMPGWGRRAAEDALAETGTDMTRFRTGAHLASWAGRTPLDNSSGKRKGKAKSKKGNRYLGGLLGKTAIAAGKTQTREGARYRRLSRRRGKAKALVAVGNTQLKVYHALLSSPGTRYEDLGPDYYERRAEVSRQVRHHVGKLGALGFDVTLCRIPEPGPEPGGTGNSQTA

SEQ ID NO: 132913 - protein, 412 aa, unidentified
MQDILTCAMGLDIHRDVIVACLAKGELGTDPEIEIRSFSTLIPEMRKLRDWVLEAECRYVAMESTGIYWQPIYEMLEPCFDGQINILVVNARHMKNVPGRKTDMRDAQWIATLLRAGLLKGSFIPDKTFRELRHLTRYRKSIVRDITAQKNRIDKFLQSSGFRFTAFLSDAFGASGRNIIRHLMEYGNISREALDRCLKTQTRKRIDEILIALNGSLSEHQRGFLRMIFGHLEALEQHRHTVEDAITKEITKHEEALSLLCSIPGIDVTAAAAIIAEIGTDMSAFPDSQHICSWAGLSPGNNESAGKRKSAHINKGNPYLKSMLCEVGWVISGKRSLYLSGWYWRIKQRKGAKRATIALARKLLALIYTMLKTGSPYNEDCFEIRRKQSERKRASRMVNELQKLGYFVVAPS

SEQ ID NO: 132914 - protein, 370 aa, unidentified
MGNASTLHVGLDVHKDSIAVAYAPAESGTAPVPFGTIGTRQCDIDALIRKLQSKGAGLVFVYEAGPCGYWLYRYLTKQGLACFVVAPSLIPRKPGDRVKTDKRDALTLARLARSGDLTPVYVPAVPDEAIRDLARAREDALHDLNAARFRLKALLLRHDIRYTGRANWSAEHLRWLARVVFPTAAQQIVFQEYVRTVTERTELLQRLEAELLEHAQTWRLAPVVSALQALRGVQFTVAITTIAELGDLTRFDTPRQLMSYLGLTPSEYSSGERRRLGGITKAGNGHARRVLMEAAKAYRHRAKVSEAIQARQQALPAAIRDIAWRAQVRLCGRYRRLLARGKHPNTVAAAIARELAAFMWAIAKAQPLPA

SEQ ID NO: 132915 - protein, 330 aa, unidentified
MKVAGIDVAHKTLDVVIGAEGKFGRVQEHANTASGHQGVAKALKAARVERVCLEATGSYHLDLALALEAAGLAVMVVNPKAAKRFAEALLTRTKTDAVDAAVLAQFALRMPFEPWQRPDDQALALRACARRLEALNRAKIEAKNQLHALSQTQTTPAVVVADVRLTISQCESQIKDLRAWAEALIQTQAPLAEVFGLLVSVKGIAAASAIQLMGEILVLPADMRAKQWVALAGLDPRHSDSGRSVHKKPRLSKAGNRYLRLALYMPALSAARHDRHVNGYYRHLVEARGLKKMQAICAVMRKLLHAIHGMLRSRQPFDSRRFYALPATPV

SEQ ID NO: 132916 - protein, 349 aa, unidentified
MQIKSQIRSIGIDLGKTTFHLVALGVHAQVLVRKKFSRPQLLAYTANLPSSLIGMEAGVGSHFLGRALREQGHQVRLIPAQFVRPFVKSNKNDYCDAEAIAEAVERENMRFVPIKTEDQLDLQAVHRVRDRLVARRTSVINQIRAFLLERGISFRKGPVSLRRQMPEILENAEGKLSTSMRRLLDFLWQEWKGLQAQIESLNADLEHIASSDPSCVRLQQIPGVGPLVSTAIVSAIGNGAAFKKGREFAAWLGLVPRQWSTGGKAKLLGISKRGNPYLRKMFIHGARAAVLRVKREGSTLGKWMSGLETRAARNVVIVATANKLARIRWAVLASRKDYHPMHKAAVFSN

SEQ ID NO: 132917 - protein, 330 aa, unidentified
MGQPDTAFVGIDVSKATLDACLLGPDGRVKEATFANDPAGHAALIAWADRHAAGLPAHFCLEATGPYSELPACALAEAGRLVSVANPARVKAHAAASGQGNKTDPADARAIAQFARDRRPPTWRPPSPEVRELQGLVRRREDLREMAAREKGRLDSPALTRAARKSIERATKFLGREADRVQAQADALIAASPALRANRDLLVSIPGVGAQTASTVLAELPAVDRLPSAQSAAAAAGLAPREFRSGVSVRKRTRLSKAGNARLRKALYLPTLTAVRFNPLLKGFFERLVKAGKPKMAAVGACMRKLVMLCYGVLKNRAPFDPAWASKKAP

SEQ ID NO: 132918 - protein, 412 aa, unidentified
MPRWVGRAIGLDVHREFCEVAICEDGRTRSAGRVSATPEGIAVLARSLLPSDRVALEVTGSCWEVARILEPRVNRVVVVSPDDTGITSARAKTDKLDARALASLLWKGELEAVWMPDERCRVLRRRLARRQQLVWSRSRAKNEIHAALQRRLQPKPPCSDLFGVKGRAWLSSLELPLEERESVDAGMRHIEFLDAEIAAVEKLIAKQALSWPEIRRLMTVPGVNLICAASFIAAVGNPNRFLTSRKLVAYLGLDPRVKQSGEGPARSGRISKRGSPSARWALVEAAWTAVLQPGPLHAFYVRTRNRRGHGKAIVATARKLAVLFWCMLTRGEDYAHQQPSLTRKKLRRLEITAGAPKYTRRAAGIWSTNDLMREAELELARQAETSYQRLVQDQQAGAPAKKAGASVTLERA

SEQ ID NO: 132919 - protein, 336 aa, unidentified
MRYIGLDVHKNNTTACVIAANGKPVASMDVKSNDDGLQKILDYMQGQEFCVMMESTTYAYRIFRFFSRHDVEAHVVHAASLKMVTDTDKKTDRKDAESIGRYLRLWKKGDIELSMSYMPTIEECRVKDICRIKEENSMKIGDESRRIKSHMSRNLEEFRGNTNLKVKYVRDDLREDYHGDPVLMFRLDEYERLITEGNWLKHMVENELPGNRYVELIESIPGIGRQTAVQIMSMIVDPNRFEDGKKICAYFGMVPRVRDSGGKEHHGKLTKNGDKMMRSIMERVTSAHVRFCESSVTAYFKAKEPVMGTKKATVTASRKMLTMILAILKRGTPFRA

SEQ ID NO: 132920 - protein, 411 aa, unidentified
MSKLLVGVDVSLKSHHVHFMKEDGVSVADFSVSNDQTGADTLIKRMLEVAEKSQVSQLKVGMEATDQYSWHLAHYLKDQLKGYEPRFESFIYTLNARKVARFKKGYDSLPKNDRIDAWVIADHLRFGRLPNEMKDAVQYEALQRLTRTRFHFMKEIGRNKTYFLNQLFLKFSGLRQDNPFSNTFGTTSLAVIEELEPETIAEMNIEELVEFLQDKGKNRFENPEELAKYLQKLARSSYRLDKAMQDPVNLSLSVTLSTIQHMESQVKRLDKEIAKLMKGIPQTLTSVKGIGDVFAAGLIAEIGDVSRFKSHHSLAKYAGLVWSQYQSGEYESDETSRMRTGNKYLRYYLIQAAESIRKHDSEYKAFYNKKYQEVPKHKHKRALVLTARKLVRLVYSLLRTNQLYTPPERRD

SEQ ID NO: 132921 - protein, 370 aa, unidentified
MTVFMGADLHKTQITVHVRGGDKIESLSEIKKYPTTPSGYAKLLARIAGYKSAGYDVKVGVESTGNTRFFKNQVEKAGAEVTVINTLKFKVINESTKKTDKHDASTISEFLEKDMLPESYVCNQETENLRRLLKSRERLVHSIVGQKNEVHALLVSMGLSDELRSLQSKKGRQKVLDTLLSHSDLVLEAQSVKLMFQIIDQMTESVKTIEKQLTELTKDDEMVNRLMTIRGCGKITAWIIRAYTEDIGRFASAKKYAAFCGLVPWVQDSNETIHHGKITKRGPQELRTAFVQLVLGIRRCKDTSEWRIMQRLDYMKKNKGSGKSIIAAARKMAEITWALLTEKQDFDSKKMQGKYKPMNLSEQVLAAINK

SEQ ID NO: 132922 - protein, 500 aa, unidentified
MKTKSIRSKAAKSAQRKGQCHTHRKVKKVKAPRIDAAALGGLEQLNLHAAGIDVGSTENYVGLPAHVLKPGESAVRDFGVFNEDLDATVQCLKDYGITTVAMEATGIYWLALYDKIEAAGIEVVLVEPRSVKQVPGRKSDVLDCQWLQQLHTYGLLRGSFRPDEPIRRLRALTRQRLELVQAGGACQQHMQKALVPMNLQLHLVVADIIGETGLRIIEAILQGERDPEVLVKLRDPACRKSTVAEMKAALSGHYREEELFVLGQSLEGWKFFQKQLAECDEQIVRVIQVMPTAQPAQLPVPPKPVPAAAEKKDPKKEKRINGGNNALHVDAAAFSQQLQRICGVNLAGVCGLNLLSVVMLIAEIGVDMSRWPNAKAFCSWLGLCPGLKISGGKVLSRRTRKVVNRASIILRVAVLAIGRTDTWLGRFYRRKKAHLGAPKAITATARKLACVVYHLLKYQEDYVPLDITIYELKAADARRRRLRREAEELGFEVVEKQKVA

SEQ ID NO: 132923 - protein, 356 aa, unidentified
MTRSTPVQSYVGLDVYVGIDVHQRTYTVWVQVEQEKAKKWTMTASPLQLGEQLRKYFSGGRIHTVYEAGFSGYGLHRELKRQGIDSIVVHPASVEVAAHNRVKTDKRDAQKLATQLEAGRLNGIRIPSPEQEQRRLLSRTRSQLVKNRARIKTQIRMKAHQFGLIDPDERREMSLRWVDDLLAKEISLEFTLVIRALVAVWKSMTEQIRTLERQLQHQANADPTEATYRSAPAVGPISARVLANELGDMSQFKNERQLFSYTGLTPSEHSSGDTVRKGSITKQGNAHLRGILIEIAWRARAKDPDLARHYDQLSTRMGGKRAIVAIARKLIGRIRAAFRKGELYQTNYQGDLATTS

SEQ ID NO: 132924 - protein, 335 aa, unidentified
MDVLYQSCAGIDVHQATVVVCILHGPLTSTRPKREMAQFDTTTKGLKACHDFLSQFHVEAVGMESTGVYWRPVWHELCDDFELILAQPAHMKAIPGQKTDKKDAHWIAQLTRIGLLPRSFVPDETIQELRELTRQRKHYVESRNRETNRIHNILQSGGIKLTTYIEDIMGASDRNLLQLLIDETSLTPRMIHQSVYTSLKRKVPQLLEALDGYFSPHHRFMLGQSLEIYDFYQKQIDCLEERMNGYLNLYERPVEILDSIPGIDLITASVIISEIGADMSQFPTAGHLASWAGLCPGNNESAGKKRSTKIRHGNSYLKRCLCQAVFAAKNKKEVH

SEQ ID NO: 132925 - protein, 327 aa, unidentified
MEQRVLGIDVAKETLDIALSDGIHLNHGQFSNDQKGHEQLEQWLRKQTDSSVHVCLEATGQYGDAVAEYLFAQGFPVSVVNPARIKHYGNSKLRRNKTDKADAQLIAEYCLREKPAIWTPPPASFKDLQALVRHLEDLQNAKLQESNRLQSGVHTSFVVDSLTSLCDFLDDQIKQTKKTIQDHINQHEDLKRMQELLVTIPGIGKLTAAKLLGEIRNILDFQSARQLAAYAGLTPRNFLSGTSVHKKSRLSKTGNANLRKALFMPAIVATKYNPIIHSFCTRLSESGLKPMEVIGAAMRKLLHLVYGILKTGRPFDPKYVNPMQAFS

SEQ ID NO: 132926 - protein, 392 aa, unidentified
MVISVGIDVSKDKHDCFIVSSEGEVLADVFTIPNNMDGFHRLLQRIQDCTNSQDKIKVGLEATGHYSYNLLGFLLDNGLTTYVLNPLRTNLYRKSLSLRKTKTDRVDARTIASMLLSDAGLKPYTDTAYHNEELKSLTRYRFDKVKERAKLKSSIARLVCILFPELEKLVPSLHIASVYALLEEFPGAKQVANTHLTRLKALLETASNGHYKRDMALEIRNAAKNSIGSQMPAKSLELQHTIRLIRELDREIDEIEEQIQSIMDELHSPITTIPGLGFRMAAMILAEVGDFTRFDSPDKLLAYAGMSPSTYQSGQLKNCYPHMEKRGSRYLRYALYNATKYVCHWDPTFADYLAKKRAEGKHYNIAISHAAKKLVRLIFAMEKSRQPYCSAA

SEQ ID NO: 132927 - protein, 372 aa, unidentified
MPDVTSVAPADPRLWVALDVHKLSIVAATLPPAGGRPDVARIETTEKAIRRFIDRLGGPKGLAVCYEAGPGGFALWRLLSLMGVACDVIAPSLVPVRAGDRVKTDRRDAKKLVALHRGGLLRYVQPPTPETEGLRDLLRCRDDLRCARTAARHRVGKALLRHGRVFRDGVKSWTVKHRAWVARQRLDDPLAHLALEQMLIHLESVDRQLAALDQRLEQIAGDERWAWQVDRLRGYRGISTLTALGLIAEIGDFARFSHPRELASWLGITPSEYSSGDSQHRGHITKTGNRHARRLLIEAAWHYRHTPRRPTSSPPPSERAWHAQIRLHHRHRHLTERGKRSTVTTVAVARELVAFLWADLTDQPTRDQAHAA

SEQ ID NO: 132928 - protein, 317 aa, unidentified
MTTPNEAYVGIDVGKTWLDVAVWGEAAVWRVSNDGEGVGKIMTRVAAMEPQLIAVEATGGYEQMLVQTMLLNSLPVAVVNPTRVRALSKATGKLAKTDVIDARLIAEYAFKIQPEALGPKEANEIRLNALVTRREQLVEMRTAEQNRLGTAQNSMQADIREHIEWISVRIQELEAQINELVDCLPEWRAQAERLDSIPGVGMITAVTVLAEMPELGQLDRQKIAALAGLAPFNRDSGQKRGQRRIFGGRKGIRRVLYMACLSATKCNPVIRSLFERLMKKGKAFKVAITACMRKMLTIMNAMTRDQVNWRAPKPISV

SEQ ID NO: 132929 - protein, 362 aa, unidentified
MLYTGIDLHRRSIALCTLNADGTVVGRAKIKTDSHAVLAYFQQWTEPQQAVVECTSNWYWLCDLLGSQGVIPVLAHAKYLKAISYAKVKTDAIDAHTLAQLLRMGYVPEAHQLPPEYRAMRDLLRQRMVMEHKRTILMQHASSILAKFNIVDLPCSAADPDFAAFVASCVLPEQYAMTALMFHQQCLQVCVHKRTLETYFKARLRPSLTLQLLISIPGIGDITGAIIATETGDIHRFPDAKHYCSYCRLAPGAKDSGGKHSHRSGSKDGNQYLKYAFTEAAIKAMMYYPDIKRFAGRVEHRSNPTIARTVVAKELAKIVYYVLTRQQRCLGFKGSTITKHSDWPRTCKPVRLTGDTVLLPTV

SEQ ID NO: 132930 - protein, 388 aa, unidentified
MFFLGIDIGKNSHVASLIDDKKKVIFKAFSFSNSTEGANSLIEKLEPFCDSLDIAMEATGHYWINLFSFLLQKNFSVHLINPIQTDGWRNSTEIRKRKNDTIDSILIADLLRYGDFVESTLSNEDYLSLKNLTRFRSYLISSTGDLKRKTIALLDQVFPEYEKCFSDVFGKTSKEILLSFTTPQEFENISSSKLTKALENITLKKFAKKKIEELSEKAKTTIGIKFCLDSFSLQIKMLIEQIIFIETQVESIEEEISTIMSKLDSPITTIPGIGSVIGATILGELGDISRFSNASKVVAYAGLDSVVSQSGNYEAKSMSISKRGSSYLRKVLFQAALRAEFCDPVFSDYYQKKIAQGKHHLVATNAVARKLCYTIFAVLTKNEAYKIQ

SEQ ID NO: 132931 - protein, 345 aa, unidentified
MKNMYYIGLDVHKRTISYCVKDGGGAIYAEGTIPATRFDLDRWMRTLPQPWTAAMEATVFTGWIYDHLQPHAAALKVAHPLMLRAIAAAKKKNDRIDASKICDCLRCDFLPECYMASTAIRERRRMLRYRNLLVRQMVQMKNKIGVLLMEAGVSYNKQRLHKAGYFRELLATNPDIDEGLCSLLRLCRETVVRLQRTESALVRSLERDSLLVERVERLMTIPAVGPITALTWALEVGDARRFSSIKKAISYCGLCGAEKSSANTVQRTPLSKQRNKHLQTTLIEAAKMAPRNSSELAILYDKEKQKGNVNRATLAVARKLVAYLMAVDRGQRNFQVMEASHCTAA

SEQ ID NO: 132932 - protein, 340 aa, unidentified
MEKRYIGIDLHRNRFTCCMRLENERTYVTEWELEDLGKFVRKLRPTDEIAVEITGNTRLFYDAVAPHVARVVVVNTNQFKVICQSVKKTDPHDARALALYLSKDMLPEVRMKDKEHGQLASLTQTRDTLVKLRTALKNKINNILSARGLNLAREALSSEKKLEEVLGLPFDEIVRIELRVIVEQIRSLNKSVAELEKTIGEEGSKLDGYKGLASIKGIGKITGAILLSVIGDVNDFTDEGRLASYFGIVPRVANSNETERSGRIHKRGTKLGRTALVQSALIAANYSPYLKRFYEQVKARRGAGKAIIALARKFLGIIYRTLKNKWVFEDFSNFALAEAS

SEQ ID NO: 132933 - protein, 430 aa, unidentified
MTGLRESCVGSGAHEVRCTPGSTLGEVRDFVRRIGRLCGRSGAPKMGGFKDGMWAGASSAQDTIVSCHCLTELKEVPMAIVGGLDLHRDQITFDYIDTATGEVHTGQVKEACRETLRGFLAGLGTTDADFVLEGCTGWWYVADELAAAGMRAHVADPAEAAALRGRKKRAKTDRADARHLRQLFIDGRVPESWIPPAHVAEARRLVRLYLALLHDRNGWAQRVHAINFHHGCPKLPSDVTMSDHQALAAKAAVGLPGADRHSVETALRVINQFSDELAIVHRQLVWIGDHQPGCTAIRTLYGVGELVAPIVWAELGDTRRFGSSRQAVRHTGLDITVYDSDGHRSKGHLARQGPGALRWALYEAGKCASHRGAPDHAYYESVKARAGHVTASLAVGRKIIRRCYHILFALGDDALAEPTSQRARPDYIAA

SEQ ID NO: 132934 - protein, 329 aa, unidentified
MSPDLQGRVADMINESFVGIDVSKAWLDVGFLATGSAERLAHDEVGIAGLCQRLCEQPPTLVVMEATGGLETALASALAAAGVPVAVVNPRQVRDYAKACGRLAKTDRIDALILAAFTQAIRPQVRILKDEETQALAALLARRRQLIDMRVQEKLRLDRAEVVQQTSLKEHIAWLDERIAALDIDLTHRLRTSEVWREKDDLLQAIPGVGKVTRMTLLAELPELGKLDRKEIAALAGLAPFNRDSGKHRGERVIWGGRAQVRQVLYMAALSATRSNPPIREFYQRLCAQGKPKKVALTACMRKLLTVINAVVKNNSPWCASGLDLQHSC

SEQ ID NO: 132935 - protein, 364 aa, unidentified
MKRSLKYVGLDVHQATTVTSVREESGRVIAQTVLPTDGRMLVEYFRGMRGSIHVAFEEGTQAQWLHDLLQPVVAQVVVCDRRGTTARGNKGDQPDADALSEQLRRGALRSVYHGSGERATLKEVARTYRNLVEDTTRVMLRLKALFRARGIKTAGRGVYRPDERADWLAQLDTAAGPGASRGAHFRAATLYAELAVLQALRPTARRALIVEAKRDPAWAVLRRIPFLGPIRVALLLATLQTPWRFRTKRQLWGYAGLAVVTRTTAEWALVDGRAVRRRRPPMTRGLNRNHNRVVKEVFKSAATAAATRSGPWQDWYQEMLKRGMREELARVTLARKLAAITLHLWQTGARYDPSHLMPSTVPAR

SEQ ID NO: 132936 - protein, 495 aa, unidentified
MKSSEKVLRPKHTRVGRIALDGSRSCEPHLKKVSPSTPVRPAASVLKSERTIAREARCIRLTGDRAEDARANERQKNMKAWKEITYYAGFDWARDRHAVVIVDRRGQIVEDFIFEHSSEGWGKFSQKTTGFEPLAVAIETNQGAAVDQLLQRGYTVYPVNPAAAAAYRKRKAPSGTKTDQLDGWSLADALRMDGHGWKALQPSDELTEQLRLLCRDEVSLIEQRSALVNQLEQALSEYYPAALEAFENWTNPSTWDFIIQFPTPEALTKAGRRRWEKFLHSHRLWRPETVEKRLAVFAQADQFKGSSGVTKAKSQLALSLCKLLRTLQQQLDQYRKQIEALFAKHPDHHLFGSLPGAKDMLAPRLLAAIGSDPTRYGSFQVLQSLAGTAPISYQSGSIHKAQVRWACDKFMRHTVHLWADCFRKASVWGQTYYRKKREQGKSHACALRCLGQRLLKILFRILTDKRPYDAELHARNQQKHGSWVLALVNQTTTAP

SEQ ID NO: 132937 - protein, 400 aa, unidentified
MIDAIRWDEKSRSPERDAISSQVIHALEAQENKETGMKKISTTTAKAFRKMEKLTIGLDLGDRSSCYCVLDERGELVLEQKVSTTPKAMEEVFGGMPRSRIALETGTHSPWVSRLLSELGHEVIVAHARNVRLIGESRRKDDRLDAKTLARLARIDPQLLCPVKHRSAKAQAHLTVIRARAGLVRARTALINVARGLTKSYGERLRGCSPRNLNKRAEGLSVELRTALGPLLEEIESLSERIREYNQRIEGIAQEHYPETALLKQVKGVGTLVALTYMLTLEDPHRFSKSRDAGCYAGLQPGRRNSGQSQPQMRISKEGDAYLRGLLVQSAHHILGPFGADSDLRRWGLKLAERGGKNGKKRAIVATARKLAVLLHRLWVSGEVYEPFYSSSRRVLVAAA

SEQ ID NO: 132938 - protein, 523 aa, unidentified
MVIKRSSKKSKSRAAEFLQKPRGVIQPRVQKVGPEHFGIISVDCAKARSKWMLADFYGKVLVTPTEVAHNRIELDAMVAQVRAALVAHNLRDCLVAVERTGRYHHFVKNAFAKADFDTRTVHPYATKQFRQPASPDVKTDDADLGAIHRVAANGFALSEPTPTSAWRELQLAVRHRRDLVRKSSALACQIREHLDAALPGYATCFDKLWESNVAMPLIRQFGSAQAICAQGVAGMAQFLRERQIRFQQRTLNTVLAWAQSAAAPDLAADYHRQIGLAYVDDHQRKSQEILVLERDLAHRLAQTPYVLLMSTPGVNVVTAAEFAGEMGPIENYANPRTITGRAGLFPSRYQSDRVDHADGPLVRRGNRALRAAILLIADNLIKCNGHFGALATRWRLLGKDPRDTHVKVAMRFCRIAYHMVAGRQVFHHPCLRTRSYILEKLIAFHVEHETPCKDYLQDINYAINQIPQKEHAAEAKPLADRLQEAQDRGRKGPQPLSEIIAIVLARLGLGAIQSTPSGDPDLT

SEQ ID NO: 132939 - protein, 417 aa, unidentified
MNESGQWQQHRAFGAVDWGSEKHYVVVVDQAGKVIEDFEVEHRALGWKKFREKLQAYGSIPFAIETSQGAVVEQLLEAAMIVYPLNPKSAQAYRQRKAPSGVKDDQLDAWSFADALRVDGHGWKPLRPEEPLIKELRLLCRDEVTLIEQRTAFVQQLRHALAEYYPAALEAFEDWTSVSAWMFLQRFPTPGALAQAGKRQWQKFLHSRRLWGSDQGPRRMEIFAHASELAGTQPTINAKSLLALSLVQMLFSVDKQLAVYRQRIEELFARHPDHDLFGSLPGAGAKIAPRLLSEIGDERQRFDGDAQALQCLGGTAPVTKRSGKYRHVHQRWACDKHLRHAIYLFAEQSLSRCVWAELYYQHHRQKDRSHANAIRRLGHRWLKIIHKMWIDRTPYNAELHHRNQLQHGSWIFQLRPT

SEQ ID NO: 132940 - protein, 354 aa, unidentified
MKQDIKKLAQGKRVFVGIDVHDKSWTVTALAEEELLFTHTIPGQWQALKQLLDPLRGSAQLFSAYEAGFSGFGLHDDLVNWGAKSIVVSPAHIPVVAGSRVKTDSKDSVKLAVCLAKGLLTGIFVPSKAARAQRQIMRTRKQMVNQRTRCKNMLKSMGHFHGVIIPKYAGLWQGAYLIRLRQVIWANLDLQLSANCHLDQIESLNASIAQLDARLKKMSQESEFAEKAKRIKTIPGVGPVVSMSFLLEIPQLEQFARGKELASYLGLTPGQYSSGEHVRMGGITRQGKADLRGLLVEASWVWVHKDPAARKRYSRLSATRGPKRAIVAMARKLALVIRAMLMNQEDYQTERVAA

SEQ ID NO: 132941 - protein, 397 aa, unidentified
MIAVGIDVSKSKSTVAILNGDGSIRAKPFDVHHVADELQALVDYIKRTSEPPTILMEPTSHYHYPLLKAFTEAELPVCLINPYQMKKYGDTELRKAKTDKRDSLRIAQYALEKSYSLIPYTPQDQKYEDLRFLSRQYSQRISTLTVAKVQLLSLLDETMPGITTILPLKSRDPDNCVLLRFIKRFKSFDVICKMGKTRFLDSYQVLVKKTKDRFAGSKGLAIYELVLNSVTTRGENPLSAMTQDQCVDLVSTSQKAADEINLQMRIIAETMPEYKVLRSMAGVGDRLGPIILGEIGDIRRFHSGKALNAYAGNDAPPYQSGQFESRNRHISKRGNPALRKACFEVMQALKLTKPQDDPVYLFLLKKEQEGKPYNVAKMAAVNKFLRIYYARAMELYK

SEQ ID NO: 132942 - protein, 364 aa, unidentified
MTRVAQNVKEGKNIFCAIDLHQEKMLAGIAVDQGLPEFRELDTREESGVKGLLSLLQSCGRRFPGARIRVCYEASGSGFRLADRLEEAGYWVAVLAPTHLPSSPKQRSNKTDKRDVVRLLEALRGHVLAGNSLPVVWKPPAELREDREVVRRRLGLGDKIAGVKNEIHGLLRRYGRRAPEGIKNPWTKKHVRWLETVAAELPAGGGTVLRGLLRELRFYQEELVRGGKAVAALAEEERYRKQVEALVAIPGVAALTAMVFLTELGDLSRFPNRRALGSYLGLAPRAWESGERSDRKGHISKMGSPRVRKVLNQASWALVRLAPSWRAWFKKRMRGQKQERKKALIVGVMRQLGIRMWHLAQEAA

SEQ ID NO: 132943 - protein, 419 aa, unidentified
MPSKKDNTSVVSVVHHICCGLDVHKKMIAACIISSDAGEGQRSEVMEFETFTDDLIKLRDWLLERECPVVAMESTGPYWTPIHNILEGYVQVILVNPRHMKNVPGRKTDISDSRWLSGLLRYGLLKAAFIPPKYQRQWRDLTRMRKNYMETAGHFKRRVHKLFQEANIKIDSVLADLFGTTGRNLMRLLVSKESSLTFSEVENCLRGSLREKGRELYRSVKGFFEEHHRMLLTVLLDTIEKLESQIVELELRISQVLKTSEELIERLKEIPGVGDVSAHAVLAELGPTLEAFPTAAALAAWCGVCPGNNQSGGKRFSGRSRVRNHHLKTIMVEIAWPAVKKSGSYYKAKYYALKSRLGGKKAIIAVAHRILKAIYYVIKHGVRFKDLGEAYLLERSKASKIRYLCKQASLLGFELKPVI

SEQ ID NO: 132944 - protein, 409 aa, unidentified
MLKIIYPNCCGIDVHKTFVVAVIAITDKQGITCYHRKRFSTFTNGLVQLRDWLEYYSCFDVCMESTGKYWIPVFNILEKSCKICLAHPKYVKAIRGKKTDKKDAQWIADLFKHDLVASSFIPPLKIRQLRDLFRYRMKLTQLQVSEKNRYQNCLTWSNLQIASVVSDVFGKSAQAIIQSILDNPEEKPNMEQLVHKRMKDKVQDLKIAIEGDVTPEQAEKIRIIKEHYDALAVCKGDLETMIRNLGQEYQEQVKLIQTVPGFKEELSALRIISEIGADMTVFNTAGKLCSWGGLVPANNESAGKKFSTRISKGSHYLKPFLVQIANAVVKSEKYPELRNKYLKLKKRRGHRKAIIAICRRLLIAIYHVLLKQESYNPRLQGLTELRNPDKTISVQDAVRFAQQHGFKVL

SEQ ID NO: 132945 - protein, 338 aa, unidentified
MEYGAIDLHARYSQIRIVDAEGRLVREQRVVTSRERLLAVFSGQGRLRILLETGTESEWVAQALEGAGHEVIVADPNYAPMYGEVRRKVKTDRRDVAALAEANRRGWYRATHRVSAAQRGVRQVLRSRRQLVSMRSGTISVMRALLRQGGYRLASGSASRVPARLTRLCLPEDLAVTLTPLRRMVEALTDEIAGVDARLQTDVAADPVVQRLQSVPGVGPIVALTFRAFVDDVTRFGTAAQVSAAIGLVPREDSSAERRHRGHITKAGPSELRSLLIQGAWACWRSHRSASLRAWVDRLAARRGRRIAVVALARRHSRILFALWRDGSVFNAATLAAA

SEQ ID NO: 132946 - protein, 340 aa, unidentified
MDKITKKSAFIGVDISKDHIDCALMKLDCPGLFKDKRFDNNLDGFESLEEWLHGSDIELKNSLLCMEHTGTYGLLFFAWLSQSDIDFCVEPGLRIKRSLGMTRGKNDKVDARRIADYAYTNINKLSLFSFPSEQILQVKQLLTYREQMVRIRTSLKNSIKSHQQYEQITKKDTVTKDISDQIKQYNQRIKQLEKEITGLIEADQQLRKNFELATSVKGIGLVIAAFMLVTTNNFSSFENGRKYACYIGLAPFEHTSGTSIKGKTSTSHLANKTLKTLLSKGANSASKWDPEISAYFIRKTEEGKDYKVIMNAIGCKLINRVFATVKRQTPYVITYQQKVA

SEQ ID NO: 132947 - protein, 374 aa, unidentified
MWKSPIKEQQVMNSVPVYVGLDYHTSFVQVCIVNSEGAAVVNRKCANAVGEIVRCVEGLGEVKRVAVEACCGATDLAEDLAAATGWCVSLAHPGYVARMKLNPDKTDYGDARMLAELCRVGFIAEVWAAPSAIREMRALVRAREDCVKRVRAVKCRVLALLREQRIAQPKFSRWTKAWVAWLVSEHSISRAGRVVIELAMAELAAIKGMIARFESELEDLTRDDPVVKKLRGIKCVGKVTAWVLRAIVGRFDRFRTGKQLARFCAVTPKNASSGERVADAGLIRAGDMLLRGVLVQLAHRLIRFDARWKTLADGLHEGRAPTGVKVGAIANRFVRWLFHQMKGVPQHTIETSKDGTDGKKIGTGGERKEMSVAA

SEQ ID NO: 132948 - protein, 512 aa, unidentified
MITIPAVRECCAGIDVGKRGIAIAVLTGPADKEAAIQTRWLGTTVPELEALREWLLQEKVSSVAMESTGSYWIPIKNVLEKGLEVMLVCSKKHHPKKGEKTDFRDAIQLAHLHRHGMLTGSYLPERGVVELRDLTRRRKKLLGNLGSEKNRIQKVLEVANVKIGNVLSDVFGVSGQEIVEALVSGREIGEQEIAGMAKTQLKTKIPQLIETLKGHQMNEHHRWLIQQSIEHIVLLDRQLEQLEDRIMEKVEPYRKQLDLICTVPGFKEMNGAALLAEIGPDMSVFPDGDHLCSWGGRCSGNNRSAGKSKSGRVKKANKFLGCTLGQAAISAVKKRDCIMRRKFQRWVKRMGGKKANVAVGHSLLKVVWCVLKTGNPYREPDPGVMHEMERQKLVHHHARRLRALGAEPEAVEAIVEQLLRPAPTAEESQSSVTIEEACPAEPTPVTVTRKPRRSSPPKGRGEVCRGKLGFRVRQTRKPPSVIKEQSGPLTNVSGNKRRNRSQRRRGSGNDSA

SEQ ID NO: 132949 - protein, 345 aa, unidentified
MSELYSGRQFVGMDLHRRRSVLVRMTESGERLETVRIVNTVDRLADVMSRAGECPEVVLEATYGWYWAADTLAELGASVHLAHPLGVKAFSYRRVKNDQRDAADLADLLRMGRLPHAWIAPPETRELRELVRHRAKLVAMRSQCKAQVHAVLAKRGIWVPMTDLFGVEGNLLLDKVTMPAPYKARIASLRRFIEGFDAEIDLFTGLVQRRLTHDAGYTAIQQIPGIGPVLAAVFVAEIGDVHRFAGPAQLTCWAGLTPSHHESDNTVHRGRITKQGSRLVRWAAIESVKILPDTSRIGAIREQVAHRRGNRNIGAVAAARKQLELVFYALRDHHVRALHRSPRAA

SEQ ID NO: 132950 - protein, 342 aa, unidentified
MQQSIFVGLDLGSSHCHQTVINSDGALVRSRSVPTGEYHLRNAFADLHGDVHVHAEASELSDWVRVIIKPMVTRFVVSHPRSLAWIAKDSVKDDAVDARKLAELLRFNLVHEVYYEDRADRRSFKQLVVHHEQLSREQARLKSKIKARLRTLGIIRKDTRLFSLTGQDELFASITDPLIAQIFRQSFAVLNQMLTSLAEAKTAMIGFSRRLPEVRLLQSAPGVGQITACRFVAYVQTPQRFSNKRKLWRYARLGITRRESNGKRLSHPHLDPAGCGSLKDVSRKIFEAARRTKTDNSFKRFYEQSLDNTKNAVHARLSTQRKILATLRAMWQANQPYRDGGG

SEQ ID NO: 132951 - protein, 444 aa, unidentified
MKCEFTSKVTTNQIKQEASYMKRTQNEKILQIKFETLVVGIDVGKETHYARAFDCRGIELAKLLRFSNTNQGYESLEEWMQEIMKKQGKTEAIVGFEPTGHYWFTLGDHLQRKGHRLGIVNPFHVKCTRELDDNSQTKNDKKDPKTIAMLVKDGRYRDVYIAEDVFQELREAVSERERLVEQLVGLSNQIIRWLDIRFPEFNEVFKDWRGLAAWLILKQYSTPANVVEAGTSEIVNTWKKGMKKPSIKKAEKLVRIASESIGRTAGSEAAEASLQNLLTQYEMILKQKQDIEKLLQELLIRVPNATKLVEIKGIGMVTAAVIVSEIGDISRFKDPRQIQKMAGLSLRENSSGKHKGKTTISKRGRKRLREGLFRAIISMLATNQEFRTLHQRNISREKNPLNKMESIIALCGKLTRVIFAILTKGNDYDASKMLNDINRSMKVA

SEQ ID NO: 132952 - protein, 316 aa, unidentified
MLHQPLDVSQAGAPAILGCDVAKATIQIHDNASGRNWSIPNKPQPLAALIAQHPHHHILVEATGGYEIALIEIALAHERTVYRIHPNQARAFAQSLGQRAKTDPIDAAALALFGHMFHARLRPFHLPSQDERRLRQLARRRDELIAMRTQERNRLKAPEPLTPRDSMTRMLAHLADEIACIQAEIERIFLGNRQLAEKQAVLCAIKGLGKTTAHNLLATLPELGALSGKHIAALGGLAPHAHDSGSRTGYRKTGKGRSEVRRILFMATLAATRHNPTIKAFYDRLIANTKKPMAAIIACARKLLTIANAKIRDAQI

SEQ ID NO: 132953 - protein, 365 aa, unidentified
MDRNRMSVGLDVHARSVVACGLDGQTGELFERRLTPDHGEIAAWIGSLPGPATVTYEAGPTGFGLARFLTADGIGCQVAAPSKLQRPSGDRVKTDVRDARHLARLLHLGEIVAVAVPSVEQEAARDLVRARDDVRGDLMSARHRLSKLLLRQGIVYYGGKPWTGSHDLWLRARRRTEVFTLPGLGLAFDIAYDTMLATVARRDRLDAAITVMAASSEFTPVVIRLGCLRGVATLTSFGLAVEIGDWTRLSGRSIGSYLGLVPTESSSGGSRSQGSITKTGNGHARRLLIEAAWHHRQPYRRPGVDLRRRWEQATPAARDRGQRANRRLHGRWAAFDARHKRAVVANTAIARELAGWCWSLAVLDG

SEQ ID NO: 132954 - protein, 453 aa, unidentified
MPVRNRNVVHKPAKSRAALTITHPNAAGIDIGSAAHFVAVPPDRDDQPVREFASFTVDLNALADWLTACKVDTVAMESTGVYWIPLFELLESRGFTVLLVNARHVKNVSGRKSDVLDCQWLQQLMTYGLLSGAFRPADQVCVLRSLWRQREMLLRSQARHVQHMQKALTQMNIQLTNVLADVVGATGQKILRAILAGERDGQTLAALKDVRVRASKDEIAKSLQGNWRAEHLFALRQAVGAFDFVGTQLAECDHEIEAQLQSLQAHDGEPAKGKKRSRARNAPKFDLRTQLFQMCGVDLTRIDGIDVTTALAVVSEIGVDMSRFPTIKHFTSWLGLCPGTKITGGKVMSGKTKRVVNRAAQALRLAAAALRSSKSALGAYFRRLCSRMDKPKAVTAAAHKLARLIYTMLTKGEEYTDQGQDYYEERYRERVLRALSQRAAKLGMKMVAIEQPA

SEQ ID NO: 132955 - protein, 351 aa, unidentified
MMLIGVDYHPSFQTIAFLMEETGEYGEQELNHSDGEAEKFYRELKQRGISVRVGMEATGYSRWFERLLAELGFEVWIGDAAEIKTKRVRKKKTDREDARLLLKLLLENRFPRVWVPSPENRDLRQLLWHRHRLVQMRTRIMNQLQAVAMNEGYRWKKKLFSARGRAKLEKLSLAPWASRRRKELLELLDQLDPKTAELTAAVEQEAKKRPDVVQLMTHPGVGPITGLAYVLIIGTPERFPCGKQIGSYVGLIPCEDSSAGRQRLGHISKQGNTLLRFLLVEAAQAAARCNPDWRRRYQHLMMRREKRIAKVAMARKLAVRLYWMWRNGWDYSQLVEFGSHAGKLGTGHGAK

SEQ ID NO: 132956 - protein, 454 aa, unidentified
MAKKREKRECRAVVLEPDAAGIDIGAEEIYVAVPPDRDEESIRMFSSFTCDLHALADWLQQCRIRTVAMESTGVYWIPLFQILEARGLEVYLVNARYLKSVPGRKSDVSDCQWIQYLHSVGLLRASFRPSMDICAVRSLWRHRASLLQMASEHIMHMQKSLSQMNLQIHHVLSDLTGASGQAILDAILAGERNPVQLAQLCNCRVKSPREKVAKALEGDYRPEHVFTLKQSLDGYRYYQKLIAELDREIQRLMQTLPSAVESGQEIPQRTKHSAFQRQGNDPGFDLRAQLYRIAGVDLTDIPGVSAVTAQVILTEVGPDLHRFRHASAFASWLGLCPENRVSGGKILSCKTRRVKSRAALALRLGANSLCRAKGYFGEFFRRMRAKLGTAQAITATAHKIARVLYHVLLTKEPYAETVFHRSDEHARRRAEMRLRKQAALLGFQIIPVPADSAT

SEQ ID NO: 132957 - protein, 341 aa, unidentified
MLHAGLDLSRRRLDVCLIDDAGEVVEHTAAPPDADGLRHLAGRLRGQPVRAVIESMTGARFVHDTLEELGWEVLVADAQKVKGLAPLACKTDKIDARVLAELSWRDLVPAIWLPDPSIRRERELARYRLHLVRHRTTLKNRIHATLMTFGHPCPVSDLFGHAGRELLDRLAIPDPWRRNVDVSLELIDDLELQIASLTVELRRQGADHRYIPLLVTAPGFGWINAYTVASEIGDIERFASPTKLCGYTGLCPRVYQSGASDRRGPISKQGSRYLRWALFEAALHACNHPIYAERYQRTKKRLGRQRGPKVAQITSPETSPKRSGTCSPATSPSLRQAPVFV

SEQ ID NO: 132958 - protein, 438 aa, unidentified
MTGPHAGGTATEEKTMDVLYERVAGLDVHKDTVASCVRVSSGGQTSRECRTFATTTEGLTALAAWLEENRCTHVAMEATGVYWMPVWKILGHGDFELIVANAAHIKNVPGRKTDMNDAMWIADLQACGLIKASFVPPEEMQELRSLTRTRKQLVREQTRHAQRIQKTLAEANIRLDSVLSDIMGASGRRIIEAMIAGVRQPRKLAELASKQIKASPKELYDALHGRLTDHHRFLLELHLRQWDGLDTAIRNIDREIDERIARMDVQIGAGRAPFRNLIDLLNTVPGVSTVSAQTILSEIGHDMNRFPTAGHLVAWAGLCPGHNESAGKRKSSRLRKGAPWLKTMLVQCAWAAKRKKDSYYRAQFFRLQSKRGPQKAICAVAASLLTAIYHILKHGTDHHDLGAAHFDRRPTELKTKRLVAQLAKLGFTVQLQPIVQAA

SEQ ID NO: 132959 - protein, 392 aa, unidentified
MYIVGIDIGKNHHEASIVSPEGKQIGRSLRFATTHKGADSLMSFIFKNIGNSPCVFGMEATGHYWYPIYSFLKAKGYTIYVINPIQSDSLRKMYIRQTKNDSIDSFLIAEVIRFGQFGTTSMADENILAMRQLCRYRDSVISSRTEIKLRIGTIMEQIFPEYEKQFSSLWVSTSMGILEKYLTPENIENAPIDELFEIIKDKSHNKLTMKKAISIREAAADTFGIKIAQDAFSFQLKQLIDRMNFLDKQIEALDCQILEYYEKFDCYLHTIPGIGIIGAATILAEIGDISRFKNSSSLIAFAGIDPTVRQSGEFNSTHNHMSKRGSPYLRHAIFLAATTCSFHNSPLNAYYKKKRDQGKHHLTATGAVARKLTTVIYAVLRDGKPYEPKSFC

SEQ ID NO: 132960 - protein, 403 aa, unidentified
MEEIGIDVMVGIDMAKGDHFAEAITMNGEELFARSLANDEADIEAMIDAAAESGRVALVIDMTSSVAQLLLTVAVRRQIPVAYVTGLQMRRAAQLYAGSAKTDPRDAFVIADFARRNADRLTWIEVSDELLVRLRVLNGRDVDLAADTTRTINRCRDALVAVSPALERAVGPRLGQLGVRDVLTKWPTPTLLRAAGRIKIRNVIKKRSPRLASKVADEIWAALEAQTVTLPAEATWGEVIADLLADLDRVHGRRDELTATIEEVFLSHPLGAVLVTLCGFGPRTGARTLAEIGDPNRFETGSRLASYAGLAPTDWRSGKSINGSFQARGGNHRLKNAMFLASFVATQHDPSAKAYYQRKRAEGKKHNAAVICVARRRCDLILAMLKTGTPYDADRHANTPIAA

SEQ ID NO: 132961 - protein, 372 aa, unidentified
MESILYVGLDVHTSNYTLCTYSIETDREFGLVQFKPDYLNIVRYVKRLKEHHGQDTRIVCGYEAGGLGYSLYRSLAACGIECVIMAPSTIPKAPNERKTDYRDAAKIARCLAYNSYRSVYIPDREDEAVKEYIRMRDNMKDHIKQLKQRILALCTRWKKEFTGTKKPWTVAHMKWLQHLEFEDPIAQEAFDEYVIQLNEANARLKRYDERIEKWAELPRYAEKVSRLTCFCGIKTHVALATIAEISDFDRFPNANRFASYLGLVPGEYSSGNSVNRLGITKQGNSHIRKLLTEAAQCYSRALPGKPSAQLLKRQEGNDPKVIAYATKGNERLKRKYRSIASRKPKPLAVTATARELACFIWGMMTNHLEQVY

SEQ ID NO: 132962 - protein, 398 aa, unidentified
MTESSDYESVQIFIGVDVGKDTHHAVAVNRSGKRLFDKALPNDEAKLRSLISDLKQHGQILLVVDQPATIGALPVAVARSEGILVGYLPGLAMRRIADLHAGEAKTDARDAAIIAEAARTLPHALRTLKLADEQIAELSMLCGFDDDLAAQTTQASNRIRGLLTQIHPALERVLGPRLDHPAVLDLLQRYPSPEKLASLGEKKLATQLCKLAPRLGKRLAADITQALTEQTVVVPGTNAAVVVLPRLALQLITLRKQRDEVALEVEQQVLAHPLYPVLTSMPGVGVRTAARLLTEVACRAFASAAHLAAYAGLAPVTRRSGSSIRGEHPSRRGNKTLKRALFLSAFAALRDPISRAYYTRKMSQGKRHNQALIALARRRCDVLFAMMRDGTFYTPTAS

SEQ ID NO: 132963 - protein, 355 aa, unidentified
MLADRVDYIIGVDTHTATHTAAVVTPTGAALAHQTVPADADGYLHVYRFAVEQAPGRRVWAIEGTGSYGAGLTTHLLEQGEWVVEVDRPARPARRNGAKTDDLDAVRAAREALGREHLAQPRQRGDREAIRVLVTTRQSAMQARTCAINHLKALVVNAPERLRRQLRALATDQLLARCARVRSHPTQPIEYRATIAALRRTAQRSLALAAEADDLHAELDTLIRRRAPWLLAEPGIGVICAAQLLNAWSHAGRLRSEAAFAMLGGAAPIEASSGKVVRHRLNRSGDRQLNRALHTIVLSRMAYHAETRAYVARRIAEGKTAREIQRCLKRYLARRLFKLLEAPPAHAQKEKIATT

SEQ ID NO: 132964 - protein, 329 aa, unidentified
MSEIVVGLDVHLKNTQVTVMKSDGEIVKRERVGTSKAELRRCLASVPKGSKVALESVGFCWPWIDFLRELEFEVLLANPVRVKLRAEDIKNDKVDSRTLAHLTRMNWLPTCYIPPNELRWLRSLLRHRAFRTKFSTAIKNRTRSEFGKRNITLSVDLKTKRGRKVASELEVFEVSQNIELLNLIEEQSKRIKTMLMEKYGQVEPVQLLMSIPGVGFVTALTLYAEICDIKRFSNAEKLAHYAGLVPKVRQSGEHSSAGRESKGDKWLKWVLVEAAWSHIRFCPDGHLAQVFEDTLRRKRNSKDAIKVVARKLVNVVWYVWTYEKEFTVK

SEQ ID NO: 132965 - protein, 413 aa, unidentified
MKVVYQTCCGVDVHKSFLVATIIKTISGVEPSYQKKRFSTFNNSILQFKNWLIENQCRDVCMESTGKYWIPVYNILEKDCSIVLAHPKYVKAIRGKKTDKKDAKWIADLFKHDLVAGSFMPPAGIRQLRDLMRYRFKLTCFKSSEKNRLQNCLTVSNIQLGNVVSDTFGKSAQAILDKILENPADTSFDLEPLVFKSLKKKLPELRDAIDGYITPEQAGKLKVIKSHYENLESRKAELEELILALAAPYQQELAILQTAPGISSDFTAIGIISEIGTNMEAFPSAKHLCSWAGLTPTNNESAGKKKSVRVSKAGCYIKPLLVQCANAVVKSTKHPEMRNRYLRLKKRRGHKKAIIAIARMLLTALYYMLKNGENYNAELYRKSDLPPVDREITVEQALMIARNQGYKIKSATA

SEQ ID NO: 132966 - protein, 384 aa, unidentified
MNEHILYVGLDTGKNQIDIAVAEPLPGGEVRYWGKVANEATALDRVIKRLQQGGRLQVCYEAGPCGYGIYRRLNAKPHVSCEVVAPSLTPRRPGVRVKTNRRDCLTLVKLLRAEELTAAWVPDAAHEAMRDLVRARGAAVADLVRCRQRIAGFLLRQEIRYVGKPWSKKHRVWLARLELAAPAHRLMFGEMLEALDQAQARRDRLTDHISELLPSWSLAWLVEAVQALRGYRLINAASLVAEVGDPRRFASPRELMGYLGMVPSEHSTGDKVWRGALTKTGNRRARKVLIEAAWTYARRAKAASTRAGRHPPAVRAIAEKARHRLSGRYRRLTAGGKLGVVAIAAVARESLGFIWAIAHAAGAVANTTPTSRPASGAGRGSRVW

SEQ ID NO: 132967 - protein, 395 aa, unidentified
MYTLGIDVAKHRHHATLLDESGATVFRNVAVAHSREGFEQLLAKLAATASPDGIRVGMEATGHYWMVLYEALTQAGYTVDVINPLVISARRNITIRGSKTDSIDSLLIALVLRETQLKVCAIADDQVQQLRDLTRLRFECAQTAIGEKHRLVSLLDLAFPEYGDHFSDLFGSSSRAVLAAFPTARQLAKVDIRRLTRLLQESSRGYFGRAQAQRLKEAAKNSFALAARAEALALEIRFVIERLNLLIEQIAQLEKRWQTMMVEQRNLLQSIPGLGKVWAPTILAEILPVFQPEHKHGARKLVAVAGVDVKLSESGDSKGHGKMSKRGSRYLRTAVMQAAEIAVFRKHDPLFTAIYKRQKDRGKHHMVALTHVANKMLHVIFSVLKNERPYTPILT

SEQ ID NO: 132968 - protein, 351 aa, unidentified
MEKYIGLDVHAKSCTAAIIDGRGKRLGSQVIETNGKSLVEFFKLQAGRVHLCLEEGTQSAWLTEVLRPYVAELAVTVPRQRRGQKNDELDAYTLAEQLRQGAFTIRVYQQVGPFGELKQLVKTHLSLVIDTRRVQSRLKALYRSRGIATAGQEVYAQSTRSDWLSQLPKSSLRSAEVLYSQYDALCEIRDQARRDMVRESHRFPITRILETCPGMGEIRVARLVSVVVSPQRFRGRRQFWSYCGLGVVMRSSSDWDQDPSGSWHKVRKPVTRGLNLNFNRMLKDVFKGAATTVLQQGGEEPLYSEYQRQTLGGTKPDLAKVTLARKIAAISLTMWKNEEKYDPKKRKQVLA

SEQ ID NO: 132969 - protein, 274 aa, unidentified
MSTAPFVGIDISKDQLDIAVRPTNERKRFANNDEGVDMLVPTLQALQPALIVMEATGSYHRLVLGRLVAAGLPAIAINPRQARDFARAIGRLAKTDAIDADVLAEFGEKIRPELRAVATEATQHIEAICTRRRQVVSMLAAEKNRIHTAPSSMRAVIKKHIQWLEKHIEELEKELDKQIRSTPAWRDKDDLLRTCKGIGPITSHTMLACLPELGTLDRGQIAALVGVAPFNNDTGKHRVGAMSKVAAPMFVLYSIWLPSLRSVSMPLFVLSIND

SEQ ID NO: 132970 - protein, 354 aa, unidentified
MAIIGALDVHRKQITFKWLNTETGEINRGRIVPALRKTVREFFVPFKGLDAHFALEATTGWRFIAEEISRAGLRAHLAEPADTAALRGSKRRAKTDRRDCDHMMDLLLTGRLPESWLPPEHVLEMRTLVRLRKGLVDERCEWQQRIHAQLFHRGLPSIRFMTTEGRGELAAADLSAAGRRVATIGLEVMEQLDQQLLPLDAYLVRFAKLQPGCRALKQRLFGVGTITAVFIWAELGDCVRFSSSDDAVRYSGLDITVYESADKRPPGHLSYQGPEALRWALYESAQSACRRSSPDRVYYEQVKARLNHKRACLSVARKICRRAHHILRSLGDNAFAPVDASVLPSFERPASKTA

SEQ ID NO: 132971 - protein, 369 aa, unidentified
MKMNSKNNKEKARQKALQAKSRKMKLTVGIDLGDEWSHCCFLGEDGEIVEECRVKTTREAVKSRFGELKLAVIALEVGTHSRWVSQMLSEFGHEVIVANARELRAITGSDRKSDRVDAEKLARYARVDRRILRPIKHRGEEAQVDLVVLRARAVLVKTRTQMVNSVRGMVKSFGYRMPKCSTERFVKLNNEVPEKLREHLAGLMEVLEHVQKQIEEYDQRVEKLAKEKYPETTVLRQIWGVGEITSVSYVLTIEDKGRFEKSRDVGPYLGLRPRRSQSSESDPELRITKAGDCFLRSLLVECAQRILSKKGPDTALKQFGLRIEARGKKKAKKRAIVAVARKLAGLLHKLWVTGEVYEPFPEATVRKAA

SEQ ID NO: 132972 - protein, 416 aa, unidentified
MNAVGIDISSRKSTVAVLRPLGEVVRLPFDVTHDTEGLASLAEQLKALDGETRIVMEHTGRYYETVAKALHEAGLYVSAVNPLLIKEYGANSLRRVKTDKADAVKIARYALDNWADLRDYTPMDTTRYDLKTLNRQFQLASKQRTASANNLIALLEQSFPGIRKCFDSPVRSDGTQKWVDFAHTFWHVDCVRKQSLNAFSERYRKWCRHHGYFFKQSNAEEVYTLAKNAVVLTPKSQVIKVLVQEAANQLTSISRSVETYRTEMERLASMLPEYPVVMKMYGVGKSFGPQLMAEIGDVRRFERKQALVAFAGIDPMPNQSGDKNVRSNKSSKRGSPYLRKTLFNIMGIYLKCAPKDEPVFQFLDRKRSEGKPFYVYMIAASNKFLRRYYAKVRDYLSILENLPPVDMDSTRLKAND

SEQ ID NO: 132973 - protein, 429 aa, unidentified
MSSIENSNHNPPPAGQAEPAPEAWIGLDWGHQQHAFALQDRSGHSERGPLVHTSENLHQWLRQIGQRYGGRPVALAIEASRGAVIHALLNYAWLTIYPINPITSARYRVAFTPSGAKDDQPDADVLLELVRDHAAKLRPLEVQDPQTVKLTELVQVRRDIVDRRTQALNQTTSLLKTYYPQALELAGDLNTGMALDFLSRWPDLISLKAAKPATLKRFYYQHNVRSAEVVAARLEFIQKAVALTSEESRVSVAVLQVRHLVDQLRAFRKHIDIFDQEIQTAFRAHPEAALYRDLPGAGKQLAPRLCAAFGTLRTTYPDPASLQKNAGVAPVRVKSGHQLWTHWRWQAPKFLRQTFVEWAGQTVVYCPWATRYYERMKKKGKKHAAILRALAFKWIRILWKCWKDRKPYDQAAYLKQLSHRKSPNAVAAS

SEQ ID NO: 132974 - protein, 371 aa, unidentified
MKEYSTFVGMDVHKNSIEIAIAQRGRNGEVRNYGKIDGTLEALDKVVRKLVSKGGPLHFIYEAGPCGYAIYRHLTAKGYDCGVVAPSRIPKKSGDRIKNDRRDACMLARLDRAGELTSVYVPFTEDEAIRDLTRAREDAKIDEKKSKQRLLSFLLRSGLRYTGKKTWSKAHMRWLSDIKRPHPSQQIVLQEYIDTITECSLRVHRLTDQIRQLLPQWRMFSVVKALQALRGVSLIVSATTIAEIGDLKRFKNPTELMSYLGLVPSEHSSGEKTRRGSITKSGNGHVRRVLVEAAWAYRLPARISRVLLKRQEGLPKEVCEISWKAQVRLCLRYRRLWAKGKPKQVIVTAIARELCAFMWAIANEIQVSAAT

SEQ ID NO: 132975 - protein, 397 aa, unidentified
MIAVGIDIPKAKSTVAVIDSDGTVLASPFTMAHTQPEMEAFVTYLKGLGEPTTILMEYTGHYHYPVLKKLQDEGFPVCIVNPYQMKKYGDVEIHKAKTDKKDALRIAAYALEKSYKLVPYSSMEQKYEDLKFLSRQYSQRITYVAKLKVQLIALLDQTMPGITRILPLNSRNPEKCALLLFIKRFKSFDEIQRIGKARFLASYDVLAKKASERSASSKGLSIYELAVDSITTRGEDPYIWLSQNQCVDLLSATQNAADEIISQMRNIAETIPEYKVLRAMRGVGDRLGPIILAEIGDVHRFHSGKALNSYAGNDAPPYQSGQFESRNRHISKRGSSALRKACYEVMQALKLIKPQDDPVYLFMLKKEQEGKPFNVAKMAGVNKFLRIYYARAMELYK

SEQ ID NO: 132976 - protein, 342 aa, unidentified
MQVTTIGLDIAKNVFQVHGIDAKEKVVVRKQLRRSQVIAFFKALPPCLIGMEACATAHYWARELRKLGHEVRLMPAKDVKAYVKRNKNDAADAEAICEAVRRPTMRFVRIKSAEQQGQLMQHRTRDVLIRQRTQLINALRAHLAELGIVAAKGDSGVKELLAIVADDRDERLPIDARASVIVLAAQLEALQTLIGSIEKRIKMQHRSNETSQRVETIPGIGVLGATAIVATVADPTIFRSGRDFAAWIGLVPRQDSTGGKQKLGPISKQGDQYLRRILIVGAISVLRRALQNPGKYPWLTQLLARRPFKVVAVALANKMARTAWALMAHGGTYRAPELAAAA

SEQ ID NO: 132977 - protein, 354 aa, unidentified
MSHHHNVTAGIDIGDRYSHLCLLDTESGEVIEEGRIPTNTKAFQRRFSGAEPMRIAIETGTHSPWISRMLQECGHEILVANARKVRLIYGEGRKNDKIDAEKLARLARLDPKLLAPVKHRGEASQAHLALLRSRDALVSARTKLVNHVRGAVKSFGARLPKCTAQSFHNRVAEHLPQELAPALGPILKTIASLTERIRDYDRKLEGVAEEIYPETKLLRQVHGVGVLTALAFVLTLEDPPRFAKSREVGAYLGLVPASDQSGGSDPQKHISKHGNKMMRKLLVSSAHYILGPFGEDSDLRRHGEKIASRGGKNSKKRAVVAVARKLSVLLHRLWVTAEVYDPLYNANHRESQAA

SEQ ID NO: 132978 - protein, 366 aa, unidentified
MQKKNVRAQTLFVGVDVHKDSHTAVGLSPFGEKVFEVTLGNHERDFASLMTRSQDEAKKASLSVRFGLEDVHSWGERLSSFLCEAHQPVVAVAPILVDRVRKRTTHPEKNDSLDAQGVAQVMIQRIDTLPEYTITDESRRAKHIRELACDREWLVKERARLKNQLHTLLYRIHNSDYKTKFSNPFALKALRHWLRSVPKDVDPLLVRRMKRAIRRLRTLRDEIKELEEELAQLLADGNYTLPTLSGCGTVIAGEIIGEIGDITRFSSPGALAKYAGCAPREYSSGTTIRWRKTRSGNRRLNRAFHRIALSQISRSGNSAAKEYFQKKVGEGKTKAQALVCLRRHLVTIVWMMMKHRVEYSYPQKSA

SEQ ID NO: 132979 - protein, 412 aa, unidentified
MDVYCGIDWAEDHHDIALVDRDGTLLARRRVSDDAAGLVMLLALLAEHGDTPDDLIPVAIETPRGLLVACLRATGRQVYPVNPMSVARYRDRYSVAGRKSDHGDSFVLAGVLRTDMHAHRPLPADTELAQAIAVLARAQQDAVWDRTTAHNKLRSHLREYYPGFLAAFAAAKGGITRPEARTILAAAPTPADAAALTLTQLRALLKKAGRSRGIDAEAARLRETFRAEQMRQLPLVEQAMGRQSLALLGQLDAACAAAEDLERAVTESFNLHPDAGIITSFPGLGALTGARVLAEIGDDRSRFQDAKGLKAYAGAAPITRASGKTKSVTHRKIKNNRLAAAGYNWAFSALTASPGARAHYDRRKDTGDRHAAAQRNLFGRLLGCLWHCLITGQGYHEATAFPAATKQTRQAA

SEQ ID NO: 132980 - protein, 354 aa, unidentified
MTETAVDMQVVVLGVDTHQQTHHAAIIDTLGQPLADQEFSATADGYRQLLAWARTHGRLEQAGVESSASYGAGLARELTAAGVEVIEVNAPDVRARRAQGKSDQLDAYAAAMAVLTGRASGHAKDTSGVTESIRMLYVARRMAVDHRTQLGDQLRDLCTTAPDEFADQLKARTTTPQRLALVESLTAPASLTDPRAAFVFTAKSITQRYRQTHREVTTLTRELKTLLKSLVPTVLALPQVGPITAARLLITIGQNAQRMRTEATFAKLVGVAPLPASSGKTVRHRLNRGGDRGANSALHMIVVGRIKSHAPTRAYLTRRENEKTKKEIIRCLKRYVARELYKAFTTDLGALDNL

SEQ ID NO: 132981 - protein, 331 aa, unidentified
MNLDSQGRATKTVVPNAGVDVSKDHLDIAWLEEQLRVPNDVKGWCEAIERLRAAGVDLVLLEATGGLERGFIVALQQAGFEVARVNPRQARDFAKSMGQLAKTDRVDARVLRDLADVVARHPRRATFIAPASDTQREHLRALMVRRRQLVDMRVAEANRLAMATQRTTRSILSVIKLLDKQIKSIDSDIDKYLDDHFKDLRAILQGTKGVGQVTTGALLSGLPELGRLDRRAICKLVGVAPLASDSGTHRGVRRIWGGRADVRTALYMATLSAKRYNPVIRQFWHRLIAAGKPKKVALVACMRKLLIILNAMVRDNAAWDASRAPTQAPSA

SEQ ID NO: 132982 - protein, 390 aa, unidentified
MHVVAHQPEAPGAIRSDLGAIFVSLELSRSTWLITSLSPCAGEKMSKHGVAAGDIGALLARFSEFKQKAFARTGKFFPIIVIQEAGLDGFWIHRVLQSEGIESHVVDPASIATSRRRRRAKTDRIDGEALLRALLAYKRGEPRVCAMVKAPTPEEEDRRRLSRERKTLIGERVEHVNRIKGLLFCQGVSDYEPLRRDRRQRLDELKTGDGRALPDHLKAQISRELDRLELLLEQIKAVEAGQNTLFAAAKAEAPTPAPVTMLLDIKGIGPEFAAILWMEAFFRSFANRKQIAAYAGLAPTPWQSGAVNCEQGVSKSGNPRLRTTLIQLAWLWLRHQPQSALALWFKERVTRNGGRFKKTTIVALARKLLVALWKYVTAGIVIEGAVMKAA

SEQ ID NO: 132983 - protein, 355 aa, unidentified
MNDEKYIGLDVHQATIVVAVLDSTGKLVMESILETEAATILQFFAGLRGTLSVTFEEGTWSVWLYDLLKPHVDKLVVCNPRKNALLKDGNKSDRIDARKLAELLRGNQLKPVYHGETGVRMLRELARSYLTIVKDLSRVMNRLKAVYRSWAIPCAGRDVYYRRHRAQWLAKIREAGVRRRAERLYEQLDMLQHLRQQARRELLAESRKHAITAKLRQIPYLGPIRSALAVALIQTPHRFRSKRQLWAYSGLALETRISAEYRLVEGQVRRSKKLLSIRGLNKDHNHDLKGLFKGAATMASVRSGPFQDFYQAALAKGIKPTMARLTLARKLAAITLTLWKKGENFDAEKLKSQAA

SEQ ID NO: 132984 - protein, 479 aa, unidentified
MARTRKKPVPAPAGEGVEVIDAPVQVIARAAAIDVAKGSGMVCTRLPSETRAGRRTQRVQEVTATFAAVVALMDHLVNQGIERLVLESTGDYWRIWYYLAEAAGLEVWLVNARDVKHLPGRSKSDKLDCVWLCKLNEWGMLRRSFVPPEQIRDLRALTRLRTHLVHDRTRHQNRIEKILEDALLKISSLISDLMGASGRRMLAALVNGERSPKALAALGDYRLRATPAQLEAALTGRFRDIHAFEIGMLLELTDDLTAKITRLDQQITGLLEQIPGISGACTSCGVIGGGGHAPGCASDQAKVLSVIERLDEITGVGIPTAQVIIAELGTGMTQFPTPGHAAAWARLTSRTIQSGTTARNGRTGKGNPYLRGAFGAAVMTAANTDTFLGERYRRIARRRGKQKAIVAVARTICEIAYLIINDPGFRYIELGAGYYARLDPKRQTSNKIRELEKLNPGMVVTLTPREPDPGTPATQAPAA

SEQ ID NO: 132985 - protein, 492 aa, unidentified
MENTTSIYSKQNPKIRQILEQAGSPAKALCGAFDYAKAKHVVLLCNGFGDIIKKSFPVDNSPKGIEKLLEEVRSTCAHRGIKKEHVFFGGEDSPSYAQNFIQALSDKGYLVARVNAWEAKQQRDNHQASTDQLDVRAIAKTLLSKTSYCDQDQPKAILTLKEFCRTRSHFVDHSTEQKLHIHHQASRLFPQFLNQKQSGIAPFSRSGLALMAEGFCPEQIRRRRRDHLVGFLQRHGQEDPEQAADKLKALAAEVLAPCSQMLVCWQAALAQHVLQYQSLCQSVGALEKEMARSLAKTGGALLTTVGGVGVVLASGILAEFGDPAGWKAVRFLCSYSGIVPRTSQTGGPDKPAHTGTVQRRCNRRAKNWIVQAASSIGKCGPTELQSQYAQLQANGQHADFVMSKRLLRIFKDLVRRGTVYRPKALLSPETPTSEWIAYYRELWDRLLKKWHGLIEWEELFDPCYPLGQWRQMAQELYKLSLPLPKKRPGKAT

SEQ ID NO: 132986 - protein, 385 aa, unidentified
MFQCSGSSQAAVDYNSTIIGAIELSEKKWVLAVQLPEVGRHSRHALDACGDGLVSFIERLKAKCASAGRKIARVILTHEAGRDGFWLARFLARRGIEVHVMQPSSLPVDRRARRAKTDMIDVEMLLRTLMAWLRGEPRVCSMVPIPSEADEEARRANREREDLTRERRSIVNKIDGILATLGIKGYKALRRGRREQMNCVRQPDGEPIPSQAKARIERLLDRLELVMKLIEQVESERDAVLKKDAPADEAERMIRSLTALRSIGPDTATLLVREAFVRRFRNRRALGGYVGLGGTPFSSGGSEREQGIGKDGNRRVRAAMVELAWTWLRWQPESALSVWFRARAGAMGGRIRKTMIVALARKLLVALWRYVNDGVVPNGARLKAA

SEQ ID NO: 132987 - protein, 412 aa, unidentified
MNQDKLYVGIDVSSKNNVCYLMYSDGSKHSSFSVPNNRNGAKIIVDRVTSVLLLQDIPQVVIGMEATSVYGDNLMRFLRESGSLGRFERSLHMLNPKQVKKFRDAYSDLPKNDHVDSYVIADHLRFGRINKEVYMDDYKYQALKMYTRARHQLVQELTREKQRFLNTVFISFSGLTQEKIFSNKFGATSMALIEEFSSLDELAYMSTDVLVDFIRKKGKNHFDDPEEIAEAVQRAAKNSYRPPQVIADAAKQMLAISMNTIRLLQKQIKEYDKAIEKMLEAFSQTLTSVKGIGNIYAAGIIAEIGDINRFPSQASLAKYAGLVWTQHQSSDFEAEDKRMIQGGNHHLKYYLCEAANALRRCDPEFKHFYALKYKEANKHNHKRALALTARKLVRLVYTLLKTNRLYIPPEEY

SEQ ID NO: 132988 - protein, 353 aa, unidentified
MTQINNALAEAVQAALHAERHPTGAAAIPTAPEAIPLSSEPDHWVGIDVAKAHLDVATWPTVERWHVTRDDAGLVALTEWLRARAPKGIVLEATGGLEVPVVTALVEAGFPVAVINPRQARDFAKALGRLAKTDALDAAVLAHFGHALRPEPRPWKAADAQALTAVIQRRRQVVERLTAEQNRLASAHPQVQPDIKATIAWLEQRLKDHDGDLQQRLRASPVWREADDLLRSVPGIGPVTSVMLLACVPELGTLDHRQIGALVGVCPFNRDSGQCRGRRMIFSGRAGVRAVLYMATVTASRCNPVIKAFYQRLRAAGKPAKVALTACMRKLLTILNAMLKAKTPWQPPAECKP

SEQ ID NO: 132989 - protein, 340 aa, unidentified
MKLYGAIDLHSTNNVTVVIDEQDRVVYQKRLPNDLALILNELLVYQAELQGIVVESTYNWYWLVDGLMERGYKVRLANTAAIQQYNGLKYTDDNSDARWLAHLLRLGVLPEGYIYPRADRPVRDLLRKRSQMVRQRTTNLLSIQNLMTRNTGSSLSAKQIKGLDVQQVDELLPNPDLALAVKANLSVLCSADEQTKILERTVIERVQLRPQFCFLKTVPGIGKILALTIMLETGDIRRFSSVGNFASYCRCVGSQKISNSKKKGKGNTKNGNKYLAWAFVEAANFAIRFNSKIKSFYQRKKAKTKGVVAIKAVAHKLCRASYYIMRERVPFNITKAFGPK

SEQ ID NO: 132990 - protein, 364 aa, unidentified
MTAVQAERQADSSAVEVVGGVDTHKDTHTAAAVDTAGRVLGSAQFPTDAAGYRALLRWLRGFGTLLLVGVEGTGVYGAGLARLLAAQGVAMVEVDRPDRKARRWQGKSDPVDAEAAARAALARVRTGLPKQRDGRVEALRALRVARRSAVGHRADVQRQIKALIVTAPESLRAQLRALPDRELIKVCADQRPDRAGAGDAGTATKIALRSLARRHRALSVEIADLDELLGPLVAQINPGLLALKGIGPDVAGQMLVTAGENADRLTNEAAFAMLCGVAPLPASSGRTTRHRLNRGGDRAANSALWRIVITRMATDQRTKNYIARRTAQGLTKPEIIRCLKRYVAREVFLALTSASAEKRPAKAA

SEQ ID NO: 132991 - protein, 386 aa, unidentified
MQASTVAAPTAGHIGTIFVAIELSQRSWRVALHSPDKDKISHHKLEGGDHAELLALVGRVRERAARALGGVPAVASCYEAGYDGFWLHRLLLAAGITNYVFDPASIAVDQRARRVKTDRIDGERMLRTLMAYLRGEPRVVRIVRVPAAEQEDARRGSRERDRLIKEQTAHTNRIKALLRLLGMAVGNPRRRDWLSWLAAQRDWQGQAVPPRMLSEIRHEHARLMLVRDRLDVLAQEAAAAEPSPAEAEMTRRSELLRRLKCLGPAFATTLTSEVFYKDFRNRREVGSYFGLTPSPWRSGGIDRDQGISKAGNPRARCAAIELAWLWLRHQPDSKLTLEYRKRTLDAGKRIKRVAIVALARKLMVALWRYLTTGLVPEGAVLKAVKI

SEQ ID NO: 132992 - protein, 341 aa, unidentified
MSEAFIIGIDLAKRVFQIHGADVAGKVLYRRKLSRPQFNRFLNEHPSCIFAMEACASAHHWGRQALAAGHEVRLVPARYVKSFVKRHKSDVVDAEAITEAAMRPSMRFVPVKAPEQQAQAMLFRTRELFVRQRTQLINSLRGYLAEFGIVLRLRIRNADILKREVEEQAHKLPDEAKRLAERLLAQIETISAEVEGLDHSIKMHAETSEETRLMQTMPGVGPMSAIAISAFCPPAENFRTGRDFAAWLGLVPRQHSTGGKERLGRITKIGQKDVRRLLIIGPMSVINSIERWKRCAEPWLARMLETRPRMVVAVALANRMARRLWAMLMTGQIYRIRGAVA

SEQ ID NO: 132993 - protein, 364 aa, unidentified
MDNATHLGLDVHKDTIAVAVLRPGQIEPDERTIANTPEALRALIRRGSFEYPVACYEAGPTGYETHRLLGTLGVPCDVVAPTMIPRRAGARVKTDRIDARNLARLHRAGELTPIRVPTPSEEAIRDLVRVREDIKDDRRRTQHRVKSFLLRQGRRYPGRDKGWSDKFDLWARSQRFEEPAADAAYRHYLAALDVRRSQLATITAEIEAAAQLPLLAEPVAKLRCLRGIETLSAVSITAEVCDFRRFPSAPSFMAFTGLVPSEHSSGPSVHRGSITKTGNAHVRRVLVEAAWSYRHRPAIGINLRRRSEGQPPEVLAYAWAAQCRLYSRFHSIAATKNRNVAVVAVARELSGFIWGLMTDRVDVA

SEQ ID NO: 132994 - protein, 352 aa, unidentified
MVTVGIDPHKHVHVAVAVDAAGRQVGRPLTVKNGPHLITGLLTWIRSTSGGTPVTWAIEDGHGFARRLADGLLLAGQEVVWVPTRLMVAHRKLHAATSAKSDPVDAAAAAYAAIATPGLDRHRIDEQVRELRVLVDHRADLVKRRTMVINQLKAQLHLWLDHTPGDLLRAKTVASVTALVADASLRPHVRQTLHDMLTEVAALNHRVRADDITIKELVNPLAPTLLQITGISHTSAAVLIAEIGDITRFSSSAKLARYTGCAPIPVYSADNERHRLHRGGNRRLNSVFYTAAIVQKRWDPAAQKLLARHASAKGTRGARRILQRHLVDVVHRAMHADQETWTHQIARCQQAA

SEQ ID NO: 132995 - protein, 341 aa, unidentified
MEYFAGIDVSLEESSVCVVDGTGKIVREAKVASEPEVLAAWFAESGLKFTRIGLEAGPLSQWLHAGLTAAGVAVILIETRHLKAALGAMKVKTDRNDARGIAQLMRMGWFRPVHVKTLPAQEVRALLIARQLLLRKLRDVELGIRGLLRGFGLKVGKVSTGKYEARIRELAAGHPMLEPVTAAMLQARASLRAEYAKLHRMLLRIVRADAVCRQFMTAPGVGPVVAVSYRTAVDDPTRFRKSRDVGPYFGLTPSKYQSGEVDRTGRITKVGDAMVRTALDEAANVILTRVTRFSSLKAWALRIAKQRGVKRAKVALARKLAVVLHRMWVDGTDFRWRKAPA

SEQ ID NO: 132996 - protein, 335 aa, unidentified
MEFEFFIGIDVSKNELDFSVQQGKHFLFHQEIINEPEAIKSFLKELIKLDGFCLSNAVCCMEHTGIYSNHLLSCLYQQRANICLESATKIKKSLGNLRGKNDKVDSQRIANYAYKNRDELRLWAPRREEVQQLAHLSSTRSRLIKAKKMLKTPLKEYGSFVKTKTSKQNASVCYHALKGIEASLENVERTIMSIINNDPELKRLFSLVTSVVGIGRVTAVQMLVTTNEFKNIDNARSYACYAGLVPYVEESGIFKGKGRISHLANKKVKTLFHMAALVAIQHNEELRCYYERRVNIDKKNKMSVINAIRNKLVQRIFACVNQNRMYEKNYLKLVA

SEQ ID NO: 132997 - protein, 335 aa, unidentified
MSSLVCGLDVHKDRVYATVMNYGGKVIEKRMLSNDEVAGFLSRYPIDRVAMESSTSVVPVYRALRGRGYEILVSHPKKTRLIAESRIKTDRVDSWAVTELARLDALPLSYMPPDDVAALREKVRRRAFLVRMRSKLKVKIKAQLVINGFTPPSEYGLFTVKGLEWLRSLQLDAVDSYLPVMQTLDIQVGKLSRELRGMVSGDEDVRLLMTIPGIGYYSALLIKSEIGSVDRFPDGEKLCGYAGLVPSVSISGKYRRLGSITKEGSRWLRWIMVECVHTHLKYDTSITRAYHAIAERKGARVAKVAAARRLLMCCYSVLRNREPYYDPAGHYQASS

SEQ ID NO: 132998 - protein, 425 aa, unidentified
MSYRIAGIDVHKRMLAVVVADVAGEGEYEFERRKFGATPDQLQVLAQWLAQQEVQEAVMESTAQYWKPVWGALERYGKAGCKEREGAGPMSGTLHLAQAKSNRGQRGRKNDFADAERLLKRLVAQELILSFVPEPEQRLWRTVTRKKYQLTRHMARVKNQLEALLEEAHIKLSSLISDLLGVSGRRMLQAVAEGESDPAKLASLADQRLRASAEQLRDALGASTDLKPGRLVKMALEELGLLQTQIEELDQESAGLLSPHQGAVERLAEVPGFGVDSSQQIIAEVGPTAATFPSAKHFSSWVGSCPGQEESAGESKSSRSPKGNRNARRLLNQAAQCAVKVKGGIFEVVFRRMVPRLGYKAAIWAIAHRLGRLIWKILHDGVRYEERGPAVSAKSKKARAVRMIKQLRELGYRVEPPNPQMENAR

SEQ ID NO: 132999 - protein, 343 aa, unidentified
MEHFAGLDVSVKVTSLCIVDDAGGIIREAKIESDPDALLQVLKSGAYHFKRIGLEAGPLSQWLFSALAEAGLPVICVETRHMRAALKAQINKTDRNDARGMAQMMRAGLYRPVHVKTVRSQKLRMLLTHRKLLQSKAIAIENDLRATLRNFGLKVGMAGAVKFEARIKELVENIPDLAILVEPLLIVRRTLREQFGIVHRRLLAVVRQDEVCRRLMTVPGVGPVVALTYRSTVDVPARFRNSKAVGAVFGLTPSKYQSGEIDRTGAISRCGDEMMRVMLYEAAQSMLYSRKWSWLKAWAMQIARRRGIKKAIVALARRLAVVMHRIWVDGTEFRWTKQEAAAA

SEQ ID NO: 133000 - protein, 393 aa, unidentified
MVCVGIDVAKDKHDCFILSSEGKVLTDVFTIANTRDGFELLLQTIRSCTSPTDNIKVGLEATGHYSYNILGFLLDKGLATYVINPLHTNLYRKSLSLRQTKTDRIDARTIASMLMSDVDLKSYTDTAYHNEELKSLTRYRFVKVQERAELKQSVSRLVNILFPELEALVPTLHMASVYAMLSEFPSARQIADAHLTHFKTVLSDASRGRYDREKAVEIREAARRSIGSAMPAKSLELQHTIRLIRELDKEIKEIEAAIKAIIDEMAPPILTIPGISYRMGSMILAEIGDFSRFDSPDKLLAYAGLSPSTYESGKLKATGPYAHMEKRGSRYLRYALFNAAKYVCIWDPSFSAYLAKKRAEGKHYNVAISHVAKKLVRVIYAMQKSGQPYRSAA

SEQ ID NO: 133001 - protein, 346 aa, unidentified
MAYYVGLDVSVKETSICIMDDKGVVAARTDVSTDPDLIAQFISKHASEVERVVHESGILAIWLTRELEKRGVPIICIDARLAHKALSGRINKSDQGDAEGLAQLARTGWFTQVHIRSEASERVRVLIGARERLIRMRKDLEGHVRGVLKVFGICMTSVATGKLRKGFRDQLTAVADTDPAIKMMSETFAPLHKTLCIARDALDDEVRAIARESDLARRLMTVPGVGPIVALAYIATLDDEKRFRKSIDVGAFLGLTPKRHQSGEVDWSGKISKCGDCDMRRLLYSAASTLISCTRKPSRLKEWATKLAERKGHKKAAVAASRKIAVIMHSVWRHGTVFEPGMEGAG

SEQ ID NO: 133002 - protein, 349 aa, unidentified
MRIIGCDLHSRQQTLAMLDTETGEVKECVLRHEGEEVRRFYAGLPGPVRVGIEATGSMQWFLELMEELGVECLVGHPAKIRAYEPRKQKNDRRDAQLLLQLLEDERFPTIWMPSIEQRDVRALLRHRHLWVRMRVRIQNALQALALSHAIRRGAGLWSEAGQYSLLELNLPPFMEDRRNELMTLYRQLQADIEVLDQRVAETAEQRPLSRMLMTHPGVGPNTALATEVYIGDPTRFADGKALSSYVGMIPKENSSGKHQRLGELTKQGNAMLRYLWCEAARHAVRRDAELKRFYTRKLAQKGMGKAAVAAGRKLGVRLWIMLRDEIDYDEFCRRGKRQRGEAHAEMPER

SEQ ID NO: 133003 - protein, 369 aa, unidentified
MTTEATAVIGGVDTHKHTHYAAAVDDQGRFVDHQEFPATDPGYQALLSWLRDLGEVQAIGVESTGSFGATLTRALTKAGVRVVEVNRPNRVARRMDGKSDRLDAEQIARAVLGRVSTAVPKAKSGAVEVIRTLRVTRASAVKARTQAFNTLWGVMIGAPSPLRDELVVLTKRTLVNRCLRLRPETDDFLSLSGDPDRLLLAAVKTSLRDLARRWKLLDEEIKGLNRKIDAMVRATAPELVELHGVGVEIAGQFPVTAGDNADRIRNEAAFAKLCGVAPQPASSGRTTGRHRLSRGGDRAANSALYIVTIVRMRHHQPTRDYVERRTLEGLSKREIIRCLKRYIAREIYANLPPSAVTTTETVHLDQTAA

SEQ ID NO: 133004 - protein, 355 aa, unidentified
MKDQAIQYVALDVHQATVVACVRDEHGAIVMRATVPTEGRAILALVRGAGPRVEVVFEEGTQAQWLHDLLEPHAERVVVCNVRGKSEVTNKSDRIDASDLSERLRLGSLKTVYHGATNMLTLKELVRNYNSLVEDATRVMLRIKALFRARAIPTPGTSVYRAAQRQAWLDRLTTPGARFRAKTLLEQLDLLLELRPKAKAAMIADAKKHPGWKPLRSIPFLGEVRVAQIMAIMATPHRFRTKRNLWPYCGLAVITRTSADQQFVDGKLRPRTRAPRTRGLNRNHNPMLKSIFKGASTAAAAKAGPLKDIYEACLARGTKPELAKVTLARKIASIALRLWKKGELWDPKKLTLQTT

SEQ ID NO: 133005 - protein, 343 aa, unidentified
MNITTIGLDLAKSVFHVVCFNKQFKEVKKRMLRRNQVLQFFAQLQPCLVAMEACASSHYWGRELRALGHDVKLIPPQHVKPYLRGNKNDYNDARAIAEASTRPSMTFVAIKTTEEQDMQAIHRMRAQCIRDRTALSNSTRGLLGEYGIVLPKGLATLRKSIHGLLEDAENGLSDRFRNLLARRYGQFVELDEHIAFYTNELELLSQQDDACQRLQTVPGFGPIVSSAFRSVIGDGRAYGHGRDASASLGLVPRQHSSGGKNVLLGISKRGDSYLRSQLVHGARAVVIQAARKDDPLSKWINRIRAERGWNKAVVAMANKMARIGWAILRHNTIYQPASEPSVR

SEQ ID NO: 133006 - protein, 475 aa, unidentified
MSHQTKLSETKRSTRASAKSAAVKPSSEALNVVHPNAAGLDLSRDEIWVCVPSDRDPTPVRLFGTFTPDLQALVDWLIHCQVDTVAMESTGVYWIPIYELLEARGIKPYLVNARYVKIVPGRKSDVLDCQWLQKLHRLGLLSASFRPDAEMVALRVYLRHRAALLEQRAPSILHLQKALHQMNIQLTQVLTDVTGQTGLQIIRAIVAGERDPHQLAEFRDGRCQSSQEEIAKALTGNWKPEYVFVLKQALEGYDFYTQQVTACDAEVERFYAALKPRWDAPDVIPALPRIKRDSRSKNQPAGNVRQALYRVVGIDLTAVDGLNEASVQTILAEIGTDMSPWPTVKHFASWLSLAPHNDISGGVVLHSHTLKSNNRARQAFRQAAESVARSDNAFGAYYRRLRAKYGPQVANVATAHKIARVVYFMLKHHVPYDPTKAEEAEARRHERELKRIQRQAAQLGYSLTPNSAKTPAPVT

SEQ ID NO: 133007 - protein, 401 aa, unidentified
MKKFNPEQHRIETASALEIVRTAENVDVYAAYVGLDVHKETIAVAVAEPGREEPIYRGEIANKPKSVQKLLAKLSETYDGGLLLFCYEAGPCGYVLYRQILASGHDCQVVAPSRIPKAPGERIKNDRRDALKLARLLRGGDLTAVWVPDQEQERMRDLSRARDDMKGQERKARQQLNAFLLRHGYHWPRGKSRWTPAHENWLAGLKMEHPWQQVVLEEYIAAERAAGERVAQLNDHLMRALPEWSLAPVVDSLIALRGVDKLAAIVLLAELGDISRFQSPRQLMAFLGLVPSEHSTGTRRRQGGITLTGNAHARRMLVESAWSYRFPARQTKHLKGKARNASPEAKQIAWKAQTRLCGRYRTLIRVGKNTKLVCVAIARELAGFIWDIVRHEMPRRGAQAI

SEQ ID NO: 133008 - protein, 357 aa, unidentified
MRRPKVKSNDKLIAGIDLHGNNLVIGVINQDGTRLLHRKLDCSLEQVEEFLRPFKLRLQSMAVESTFNWYWLVDGLRAQGYPIDLANPAKIEQYSGLKHADDKDDAFHLADLQRLNILPKAHVYDPELRPVRDLLRRRTNLVHQHTALLLSMQSLYARTTGQRLELGEAKKLEPKQAPQLYEHPANQLIAQVQVEHIQALAKSIHRIEKAVLACAREIPLYEKLLTLPGVGRILGMTITMEVGDITRFKTAGDFASYCRMVDAKRLSNGKCKADNNRKCGDKYLAWAFVEAAHFARRYDESCRRWYDRKAAKAGKIVATKALGCKLAKAAWYVMVQQCNYDEKRMFPELANKPMKTS

SEQ ID NO: 133009 - protein, 308 aa, unidentified
MHQTRRSAVHPPGRRVPSPDLGRETAITTIAHPESTRVTVGVDTHGEVHVASARDQLGRRVAITLVPTSPAGYQHLLDWARQLGEVAAFGIEGTGSYGAALARFLRANGQQVFEVNRPDRATRRRKGKSDPLDADAAARAVQAGDAAGLPKAGTGTVEMLRVLRVARQSALKARTQATNALRALLVTAPAELREQLRGLSKTTLPRTAAALDPGQLTSPTAATMLALRTLGQRHAALTALEAEINRLVARHATPLLALFGVGPDSASALLVAAGDNPERLCSEAAFAALCGVSPVQASSGKTVRHRLM

SEQ ID NO: 133010 - protein, 353 aa, unidentified
MIHVGIDLHSRNMTLVAINDNAKLLAEEKMTNTPANLSAFFDRFSGPIRAVVECTSYWYWVADWCNGQDIPLTLAHAKMLKAISYAKVKTDAVDARTLAELLRVGLIPEAHQCRRDQRDLRELTRGRLRMIGRRSSLQSSLWQLAGKYNVIVQDVGWRYLGKLGDFLQQQLPDVAWIEAQLLLDQIRLSQDHIIVLEKSIEEQTDFHGDVERLKALPGFGLVCAWTVVAEIGDITRFPSAKQFLSYCRLVPGSKDSGGKHRHRSKNKDGNRYLRIAFNQAAIIAYRDYPVVKEFYKKITRRSGKHVARTVVGKELAKIVWHMLSKNEEYKGFKGRMTRITTQNYWPQPISPNA

SEQ ID NO: 133011 - protein, 428 aa, unidentified
MSERDYNRQAARRQRVSKATLIVGVDVGKAFNAVGFMNKDGNVLGSCSKLYNSREGFEQFVKMIEGLKARHRLRDVLIGMEPTGHYWRKLAYFAIEHGYEVRFVRTTALKHHRELDESSSAKSDRRDALTIANITRESKYIDTVIEDGVLRQLRTLSKARERLLRYSVSAKNSLHAALDDYFPELHEIFRSMGARSLWVILEKCPFPGDVVLMKASTLQEMIARSSRKKAGSARKAKALYEAAQKSIGVKQIGTADRYRVRMCLEEVKRTVLTLKDMDRQLKSMAKDIPSASYLMSIPGIGPLSVAVFLGELGNPAHFHNARQIVKYAGYDPQESDSGSWIGRKFISKKGRWLLRKYLFFMSMRVVVLTKYFQEYYHRKLETKNRVGQLPRRKEILCAVAIKLIKVIFALLRDKRSFEDTASAAVVIA

SEQ ID NO: 133012 - protein, 427 aa, unidentified
MKQEDISRIERFRQFRKQIRGSDKYLTVGIDVAKSKHYATFATTQGRIGHKGLVFENNASGFEHLLTQVQFYQDRDGFEQVVFGLEPTSVYQKPLAEFLIQQDYLVVYVTNEAIKDNRRTLDGRWDKHDKKDSANVADLVGQGKCQYYDLPNIHLRDIRNLLLLRKRLKKQLHGCRIRIRNNLVAQYFPELDRLWHQREAENLAIVRWCLSPAKINQLRFEDFFQMVTTGKKGLRQYQRLRKIWEMAPYSIGCRPGQTLELEAQIMVGLVEYIKKQLDQVQKMIEDLCRSFVEYEYLLSIPGFGSYIAATVLAAIGNPLRFNKASELIRLAGFDLSAKRSGKTSSSAVPVISKKGKVELRYALYQAALIASSRTPRFKAYYHRVLEGRQREKGIRTKMRVKLAVKLLVIAWTLMKKREYFDPDCITI

SEQ ID NO: 133013 - protein, 434 aa, unidentified
MSLNTINPHCAGIDIGSDSIFIGLEEKEVAFFGTFTDDYLKAIAYLKGHNITSVAMEATGVYWITLFDMLEGAGITVTLVNGKQVKYLPGRKSDVADCQWLQQLHSFGLLRPCFIPDEITRQLRSYTRLRADHLSMASSHIQHMHKALTLMNIKVQNVISQVHGVSGMRIITAIVMGERNPERLADLCESSILKTKREKVIASLKGNFKAEHIFALKQALSAYDFYQKQITECDQQIESLLKQHTDDLPTPSKTTPPKNARHNAPKIDELHTKLMKMTGGNDPSQITGLTDKTLLELLAETGTNLEAHWKTEKHFSSWAALSPTMHQSGKTNKRRKIKKNSRAGQIFRQAALSIANSKHSAFSAFYKRLKAIKGFRHALKATARKLAVIYYRIMTKGFPFVEQGIVRYQQHFKEQQLRLLQKKATSLGFQLLQT

SEQ ID NO: 133014 - protein, 345 aa, unidentified
MKQIYIGIDVGKKFSAVCVLDHNGKELRTDRVETLAHDAWLKLLQRFKGATLRVAFEVGPHYDWMFDLFAPFCLEVLVVAPGDKPLKKTDRTDAARLARLLWRGDLQSIYVPPSQIRRDRRLVARLHALSGQIGTTKIMMRDMLYTAQLTCPHSDLAGAKAREWLASALLKLEAQEQLLLEQLLAQLALLQDQYQQLYALISERLKEYPEAKLLRSIPGFGPLVTLAVLSALGQIGRFATPDQLASYFGLCGRVDQSGDRLQIFSITRRGNRHARWLLGQAVTHLICRDPKARRRYQKLRRKKKAKVARVALMRWITTIVWRMLKSNEQYRLNGQKGNYRGKRAA

SEQ ID NO: 133015 - protein, 297 aa, unidentified
MDKYIGIDVHSASCTIAVVDAHGKRAGLHVVATNGQKIVECLAVIPGQRHVCFEEGTQSGWLYEVLEPHAVEVVVAGVAGSRGAKDDKRDAFGLAEDLRLGAIKTRVFKSGGPFKPLRELARTHRMVVADVVRTKNRIKSAYRSRGVPVAGKSAYSSAGREQWQEQLPEAYRGPLLTLYAELDALEEVRSDAEKALVQEARKFPITKLLATCPGLGAIRAAQLVPIVVSPHRFRTKRQFWSYCGLGIVMRSTSDWLPDPPGTSTSVPVSFGKAKSFRDDDARTRPRSRGCDSLLLLA

SEQ ID NO: 133016 - protein, 411 aa, unidentified
MENILACCAGLDVHKESVEACVRRIEPNGRVHSETRHWGTMTRDLLEMAAWLAAEGVKNVAMESTGVYWKPIFNILETRFTVLLVNARHLKQVPGRKSDVRDCQWIAQLLQCGLRKGSFIPPRAQRDLRDLTRHRTQLVEEKTRTINRIQKVLEDANIKLASVATDVLGVSGRAMIQRLIEGETDPHKLADLARRQLRGKIPDLEKALDGKLTDHHRFLLKLLWKELAQQEEVIVELEAQIEEQTRPFAAEIGCLDAIPGVDRRVAQVLMAEVGADMKPFPNDQHLSSWAGMCPGNEESAGKRTRRRITPGNRWLKKTLAQAAWAASHTKNTYLASQYRRVAGHRGKKRALIAVGHSMLVIFYHMMRSGASYADLGGDFFDRLEPGRLTHYYVKRLERLGHKVTLETNVAA

SEQ ID NO: 133017 - protein, 407 aa, unidentified
MISVGIDISKDKITVCALEQGSKIIWKPFDVSLNKTEVEELIEKLEKLKEEVKITMEATGKYHLPILYELKDRGYFVAVINPLKMKQYCRALNFRKAKNDKIDAKQIAEYGLMYWKDLEEHKVDEENYRVLKELNRNYQHYMDLRINQMNFIDQTIHQTFPGIKKLITHGSGDFSKDKLLDFLGKWWHKDLILEKTEEEFVEEYKTWAKEKRYHPNVNKAKSIYKLAEDSISTQPSHNSKIETNIREGINLIKQINQILNSILSQMIEISEPLEEYKEAKKFSGISEKLAVQIVAEFGDLSKFKNKKSLISFMGIDAPPYESGNFKSDQRKISKRGNAILRKVGYQAMKCMMSAKKPENEIYKYMIKKEKEGKAKKVCKFAGLNKFLRIYYARVMESKAQKQELKVA

SEQ ID NO: 133018 - protein, 341 aa, unidentified
MNVTTIGIDLAKTVFSIHGTNQHGKVVVRKRLNRPNLLAFFAQLPPCLIGMEACSGAHYWARELTKLGHDARIIAPRFVAPYRKSSKNDDNDAEAICEAVSRPNMRFVPIKTQDQQAVLCLHRIRRGLIKERTAQINQIRGLLAEFGLIIPQGRYHARHRIPEILEDAENGLPMLARRLLNNINQRILQLDEEILTYDREIESMARRDEQAKRLMAIPGIGPQTDTAILASAPDPRQFKSGRHFAAWLGLVPRQYSTGGKPRLGRITKRGDKYLRTLLIHGTRAVIAKLADKQDRLSSWAKELVERRGYKRAAVALAAKNARIIWALLMNQTEFKTQPVEG

SEQ ID NO: 133019 - protein, 330 aa, unidentified
MTHYVGIDVSKAKLDVAWLKDIDKIKVKTKVFANEAADFNKLIDWLKANINPDLTDIHVTLEATGIYHENIAYYLHEQGLNVSIVNPAFVRSYADSLGSRHKTDKKDSILLARYAYTAKPDLWTPPPAEARHLKSLLSRLDALQEDLQRELNRQEKADATDTAPIVKESIQQMINALKSAIAKLNDDINNHIDKHPNLKQDQQLLESIKGVGPVVSKQMVSLMHNKQFTKASQVAAFLGLVPKQVESGQFKGKSRLAKNGSSDIRAKLYMAAVVSTQWNPDIKAQYERLLARGKPKMQAVCAAMRKLVHICFGVIKHQMPYQPQVAHITT

SEQ ID NO: 133020 - protein, 424 aa, unidentified
MENTAARKRKQVPEGYLIIGVDPHKKRHAAVAITQDFTTRDKFKFDNTREGLETMLRRARMEMVKCGCRGVMFAIETGGHYWRNVAYFLEEQGIPFRFINQFTLKRRREGKDLNRRKNDYRDSEVAAQLLCTGEFTESKLPQGVYAELRTAHNAYRRLVKERTRITNLVKGLLDALFPEFTQVFKDPCGLTALSVLFICPIPRVITGMTEDEFVATIEAQHKGRRLMRRKLRALHYSARTSIGIEAGARSVSSEISFLVEKLELIRRHIRIIEQTLVRLVDETEEGKYLLSIRGLNYIAVAGLLAELGCFKAYRSAKQMIKMAGSNPTESESAGKKRARTPMSKQGRPVLRYCAWTSVIPMLRFNPDFRAWAKQRRERPVHANPLGGREVVGAALNRLLRLAFALVKNQTYYQVSKPEPTLVAV

SEQ ID NO: 133021 - protein, 405 aa, unidentified
MGSTQLYVGIDVHKRVQVSTILSLPVLKNKNNEWKKVKPILIKNNIKDYESLHKAIHRQAKDASSVSIAVDRTGSYSLPIVHFLVSKEYKVYFLTNQSVKAAKERLLKEENKTDKLDSAILAYLMYLRDYHGLSLNISATQPDLESHASLLRSLVLQRAQYVRLEVQATNRLHQYLLVVFPEGEMNYFNQLLRIAPYYPTPRDILCNGLNGIEKITEKDRKSIIALAQDTIGVPGEPYHWIISDLCEQRLDAHQKVLLISRQIKKEVDAHPYGTILRSFPYVGDVIAATLIGIVKDISYWPNDKTLKKVLGVYGREYISGASPPVRRPGKSGNRAGKVALFQACIGCIKKTSPNNDFKDYYERQMNHNKIWIQAMANTSGKMAEIMYHCLKTGVKYQYQGKYKGP

SEQ ID NO: 133022 - protein, 340 aa, unidentified
MNVTTIGIDLAKSVFQLHGVDAAGEVVFRKKLRRAGVLEFLRDLRPCLIGMEACATAHFWGREIGALGHEVRLIPPAYVKPYVKRQKNDAADAEAICEAVTRPNMRFVPVKSAERQGVLMLHRTRDLLMRQRTMTLNAVRSHLAEFGIITAQGPHKILTLIRAIRAGEVPGLPPIACAALESMATQLDNLASEIRRLERQLMAWHRADETSQRLETIPGVGIITATALAASVPDPSVFKTGRQFAAFLGLVPRQNSSGGKDRLGRISKMGDGYLRRLLVVGATSVIRRADSNPSATGTWVRGLLERKPARLVTVAVANKTARIAWVILARRETYRAPMTA

SEQ ID NO: 133023 - protein, 367 aa, unidentified
MSNSRIQSKALNTKLSWEIIGLDLAKNDLSFVGITLEGEIIRIDRLSYEQLVEFSRDTDPTTFAMEPCCESHYLTNQLELYGHQCRIIPGKAVQNYIDTYFSGQKNDLNDAEALAFLGQQKRLKFVRAKNRDEMQLQTLLTVREHYIDEYRKTLTSLKGVAQYWGLRLAKSLSSEMRLIALIEDADLPEDVKGIFKEMVKTYKDLQKKARELTKKIEAFTQGDEFCHKIRKIPGLGPISSAGLKVAIGDIARFPSPRTLPAYFGLVPRNITTGHSLKMGKITKRGDKLVRTYLVQAASSLLMLDGKGKFRDCQLRRWIQRKRQTLNHGKLVVALAAKLLRIVWAILSKNEAFDYRKAGVAKCSLPKT

SEQ ID NO: 133024 - protein, 367 aa, unidentified
MRKHITTTESAVTRKRAKRKLTVGIDRGNRSSRYCILDEQGEVLAEGSVATTKKGFAQVFGSKPRSRVALEVGTHSPWVSRYLADLGHEVIVANPRRVRLITDSTRKDDRLDAKTLARLARIDPELLSPIRHRSERAQADLMVIRARALLVEARTMLVNAARGLTKSYGERLGSCGTGQVGEELAQSLSEALQNALKPLLAEVESVSAHIREYDEQIENIGKSRYPEIGLLKQVHGVGTLTALTYVLTLEDPYRFRRSRDAGAYLGLRPRRRESGDSRPQLRITKEGDAYVRKLLVQCAHHILGPFGADSDLRRWGLELAARGGKNAKKRALVAVARKLAVLLHKLRVSGEVYEPLHVRRGNKTVAA

SEQ ID NO: 133025 - protein, 450 aa, unidentified
MRMQPEEIPDDDHELVIERVCAIDVAKASGKVCVRTPHPNRPDRRTSRVWDVSATSRAVTELAEHLIGEGIERVTVESTSDYWRIWFYVLEAAGLDVQLVNAREVKNVPGRPKTDKLDVLKVAKPTEKGLLRPSFVPPVEVRQLRDYTRLRVDVTRERTRYWQRMEKLLEDALIKVSSVVSRLDSMSVRDMLEALIAGERDPRRLAELARGKMRPKRAALIEALTGRFDDHHAELARLLLSQIDALSTHIDTLTRRIDELLAILTDPTRGPDGGYRIGDDGAAPFVNGLQAAKRLAEITGIGPVSAPVILAEIGMDMTRFPTAAHLVSWAKLSPRTIQSGATQRGGKTGKGNPYLKGVLGEAAAVAARTDTFLGERYRRIVKRRGKLKALVAVARSILVVVWNLLADPTAHFHDLGADYHTRRADTDRRLRNHLAQLAALGYRVTVEPAA

SEQ ID NO: 133026 - protein, 330 aa, unidentified
MMEKRGPAAGAGPKHRVRRTAAEHYAGIDVSLELSSVCVVDAQGKIAREAKVAREPETLVAFFKEMSASVPRIGREAGPLSQRLYAALVEAGFDAVLLETRHVKAALSAMTAKTDRKDARGIAQLLRMGWFRPVHCKSLGSQEVRALLTARQQLLSKLADVELSIRGILRGFGLKMGVTTRKTFESRARELAAGRTMPETEIAAMLTARAALLAEQNRLHKTVLKIVHDDQACRRLMSIPGAGPIVAITFKTAVDDPTRIAKSKAIGPLFGLTPRKYQSGETDVTGAVSCVGDTKVRTALYEAANILLSRMKRFSALKRWGMDVAKRRGP

SEQ ID NO: 133027 - protein, 411 aa, unidentified
MELLHPRCAGLDVAKDEVVACVRVPDGHGGRDQEVRTFQTFTSGLEALAGWLAGERVTQVVMEATGQYWKPIWYVLEERGFELLLVNARHVKILPGRKTDVCDAAWLAELLEHGLLRGSFVPPAAIRELRDLTRYRKRLIQAHTAEVQRVQKTLEDAGIKLDSVAADVLGVSGRAMLAALVGGERDPVVLAELARGRLRAKLPQLRQALRGRFGDHHALLLRLALEHLEHLEGAIATLDTEVDRVIAPFARARDQLDTITGVGKRAAETIIAEIGVDMTVFPTAAHLASWAGRCPGNNLTGGKRRSGKPTKGNRWLGEVLIECAWAAARSRDTYLSAQYWRLARRIGKKKAAVAVGHSILVIAWHLLTSDCDYADLGGDYFVRRDTDRQRQRAVAQLQALGYRVTLEPLAA

SEQ ID NO: 133028 - protein, 360 aa, unidentified
MCQNELLRSQSEGPPIDKIIRIGMDTSKHVFQLHGVNAEEKSVLREKMRRKEMIGFFTTCSPTLVAIEACGGSHHWARLLASFGHEVKMIEPQLAKPYVKRNKNDAADAEGLCEAMSRPTMRFVPVKTVDEQAALMLISVRTRLIANRTQLANAIRGYANEFGVSAAKGLAHIPMLLERIQADATVPELAQELFMSQAEEYSQLEKKIADVEAKVKAWQRNDERSRRLNTIPGIGPIGSALLIMKTPAPELFQSGRQFAAWIGLTPKDHSTGGKLRLGGITRAGDEALRAVLVAGATAVIHHARRSGKASQWLAELLRRKPPKLAAVALANKMARIAWKLMISGQTYSAQSGAALTGCAT

SEQ ID NO: 133029 - protein, 325 aa, unidentified
MTMNNAFNHVIAFDVAKHSLAVHILPGDESHTIENKPKVIRKLLIAQMRRNANLGLGPLLVVCEATGGYERHLLEVCEELRIATHKAHGSRVRHFAKYLGLIAKNDPIDARVLALYGLKTENLRLHSPLAPELAALLDLRARRDQIQAMLLAETNRLEHVRHASVTRSLKEHIAILRKALAAIEAKIAAHFQASEALARKAALMRTLKGIGPGTATVLLAYMPELGTFSRAAAACMAGVAPFDDNSGKTSLPRHIEAGRAAVRKALYMAALTAIRHNRIMKSYAERLRRNGKCAKVVITAVMRKLIVTLNAMLRTGEPWRHAQTA

SEQ ID NO: 133030 - protein, 326 aa, unidentified
MEHELHYIGIDTAKEKLDVDVLRPDGRHRTKKFANTTKGHDELVSWLKGHKIDHAHICIEATGTYMEPVAECLYDAGYIVSVINPALGKAFAQSEGLRNKTDTVDARMLAEFCRQKRPAAWEAPHPLERALRALVVRHQALTDMHTQELNRAETAREVQRPSIDAHLLWLEAELKRLEKQIKDLTDDDPDMKHRRKLLESIPGIGEKTSAVLLAYIGLKDRFAHARQFAAFAGLTPRRYESGSSVRGASRMSKAGHVSLRRALYMPAMVATSKTEWGRAFRDRLAANGKKGKVILGAMMRKLAQVAYGVLKSGVAFDASRHNPVAA

SEQ ID NO: 133031 - protein, 390 aa, unidentified
MHYIGIDMSKNSFNFCVIDETEKIIKQGSFPVSKDGFANFLKLISSFDNPLVLVESSSRYHLPLVYSLVSNNFPVYVVNPKAVHKFINFKSPNNPSKSDSKDAFFIALFTKYESNNLKPYSPSDSLKLIARKIDSISKDIAKTKTQINQHIDVLFPELSKRVNIFSKAILNLLLYYPSAFDISNANVNEINKFLYTPIGRKVSISADELILLAKNSVGVNNVALKVSLKADIERLFFLENQLKELESVFTDMMKDFFCDDIEIVSSIAGISERLACRFIAEIEDISRFENAKKLISYAGTDPVVKQSGKWKVRMSISKQGNPFLRNILYQMATGVVMWNEIFREYYRRKYQQFKSRKKAMIAVVNKLVRVIFAMLSNRQFFNHPSLISNT

SEQ ID NO: 133032 - protein, 449 aa, unidentified
MREPQEIQDEEHEQVVERVAAVDVAKASGMVCTRVPHPSRPGKRLSRVWEVAATTGAIIQLAEQLVGQGIEKVTVESTSDYWRGFYYLLEAAGLGVQLVNARDVKNVPGRPKTDRLDAVWLAKLTERGMLRPSFVPPAEIRQLRDYTRLRVDLTHERARYWQRLEKLLEDALIKVSSVASTLDTASTRDMLEALIAGERDPGVLAGLARGKMKAKRAALAQALTGRFDDHHAELARMLLDQIDALSAQIGTLTARIQELLAAIPAAQGVDADGTTGPGAGSGADAAVLPAAARLDAVTGIGPGAAQVILAEIGLDMGVFPTPGQLVSWAKLCPRTIQSGAKTRAGTTGKGNPYLRGVLGEAAAAAAKTDTFLGERYRRLVKRRGKLKALVAVARSILVIVWHLLADPAARYADLGAGYYADRIDKGKKARNHIRQLEALGFTVTLAPAV

SEQ ID NO: 133033 - protein, 298 aa, unidentified
MRYFGLDVHKVTCEGAELLPGNSIRRFHFRNEKKEWKRFAKELDGNCKVALEATGNASMIYDILAGHGAQAVVVNPMRTRAIAEARIKTDKVDAEILARLLAADFVCACWVAPKEERELRTLLQHRAALKKQVVSLKNRIHAVLSRHAIKVPVSDLFGVKGRQFLRELEELPEVEKIVLTSNLKALEALEAEIVAIEKELNLKAIALPGINILLGIPGIDVLAALTILAEIGDIKRFPSAKKLASFSGLVPSVHQVGQDQVHRAHHQGRPEHAALDPHPDCPEGGNATRSPAGLLFKA

SEQ ID NO: 133034 - protein, 377 aa, unidentified
MKKHSTAKKNQKAPTKTKSTIRHMAGKSRLTIGLDLGDHTSRYCILEEAGEVGSEGQMPTTPAGLKSLFGKMASSRVALEVGTHSPWVSRQIAALGHEVIVANPHKVKLITQSARKNDRIDAQKLARLARVDRKLLSPIRHRGEQAQADLAVIRARAELVESRPGLINCARGLAKPMGERLKKCDADQVEEALAKPLSEAVKIVIGPLLKSVEAIREQIGGYDEKIEEIAKRYPEVELLTQVYGVGALIALTYILTIEDAERFQHSRDVGAFLGIQPKQRESGNSQPELGISKTGDRLLRSYLVQAAHCNLRRGAPDSDLRAWGLGKVGAGGKRAKRRALVGMARKLAVLLHRLWVTGEVYDPLYNRKAAQAVKATA

SEQ ID NO: 133035 - protein, 375 aa, unidentified
MPTNLRYLGLDVHAETIAAAIAEPDGEVRALGILPNRPEAITKLIRKLEPRHGLHACYEAGPCGYVLYWQLTQLGVHCDVVAPTLVPTKPGDRIKTDRRDAARLARCYRAGDLTPVWVPDAAHEALRDLVRAREAAKQDQLRARHRLGKLLLRRGIRPPPAAKPWTQRHRRWLDTLQLDPPALQATLDDYLHEVDHAAARVERLEGALDNAIAAAPAPLRAVITALQTLRGVRQVTAATIVSEVGTLSRFTHPRQLMGYSGTVPSEHSSGASVHCGAITKTGNAHLRRVLVEAAWAYRFPPRCGKALRTRQRGQPDTITAIAWKAQHRLNTRYRRLLGRGKPTAQVVTAVARELVGFIWAIGVATERASTAAAAA

SEQ ID NO: 133036 - protein, 338 aa, unidentified
MSDRTSESDRIVIGVDPHKASWTAAAVGPGLRPLATIRVPVDPQGYRDLRRFAARWPAAVWAIEGAGGLGAPLATRLSADGIAAVDVPAKLAARVRMLSTGHGRKNDDADATSVAVAAQSAAGLRTVTVDEAVTALRALVEHRDDVVKARTQTVNRLHALLTQLLPAGAPRQLTADTATQLLRPVRPRNIAARTLRRLAAELITEIRHLDRRISVANTEITHAVQASRSTLTELRGIGHLNAGKILARVGDVHRFRSAAAFASYTGTAPIEVSSGDVVRHRLSRAGDRQLNCCLHTMAITQLQRDCPGRTYYLRKRADGKSHKEALRCRKRRLSDVVY

SEQ ID NO: 133037 - protein, 351 aa, unidentified
METQITAVPKLFIGIDIHKRSWKVHCATELFSGRSFSMAPEPGQLRAYVGKHFPDHEVSVAYEAGCCGYRAHRCFESYGWKSLVVNPADIHRKGKERHTKTDKIDAQLISRELKDGRLESIVVPDKKREELRSLFRRRNDLVKDFRRIKSYIKMQLLYFGTKVPEEFDNDHWSHAFRGWLDALEFEYPTAKKTLESRMRSFRFIDQELRDVSTQLRRYCKVHYGKDYMLLRSIPGIGGIVACGILCELGDLRRFKSVKHLAGYVGLAPGVHQSGGTHRTMGMAMRAHRLIRSYFVEAAWQAIRADPVMQGYYRKHMGKDTKKIIIKVARKLLSRTLAVIKTETPYEVGVVE

SEQ ID NO: 133038 - protein, 437 aa, unidentified
MSDQKALELRVSVDVGYRRHSVAIGLPSGEVLEEFEIAHRPEGFEEFFSRIEKHHKARRCGVAVAMEGYNGCARPLDRMVRRRGYRLYNINNLKLARFKEIFPGAAKSDRIDARKGLELFQLSDHLPLAKEVLQEVKGTPQENEVLKRLTRRRRRLVDERIRVISNLQTDLQAVCPGLLEMTKNAGNQWFLNFLVSAQSLPQLARLRPSTLLKIPAVGRKYARLIEDWQKRAHFSEEVEWVSEMIHEDAQRGLELDEKIKALKAKIKEVAKDSTMAKILLSIPGFGTICSAELAGEIGTIERFSKEGSLALYIGMSTLDNSSGKYQGSKQPKHVNTRAKAAMMIALDRHRKYVPQSQRYYEKKRSEGKKHNQAIRSLGRHLSRIIYKMLTEGREYEMRPEKGNTKGKVSPRSLIKTQIRKPKISAKGKNNNIYQQNT

SEQ ID NO: 133039 - protein, 350 aa, unidentified
MLIIGCDYHPGFQQIAFVDTETGECGERRLTNCAEAEQFYRQLQERSLRVRVGMEASGHARWFERLLSELQFELWIGDAAEIRTKRVRKQKTDRQDAQLLLRLMVEDRFPRIWVADTENRDLRQLLWHRHRLVQMRTRVMNQLHVVALNEGLRRKKALWRPEGRNQLQSLKLAPWASRRRQDLLDLLDQLTPKIQELTRALEAEVEKRPVTRRLMTHPGVGPLTALAFELVIGTVERFDCGKQIASYVGLVPTEESSGDRRRLGHISKQGNTLLRFLLVEAAQVTVRSSPPWRSKFFHLALRRGRKIAKVAMARKLAVHLYWMWRQGWDYGQLEKLGSHAGEPGNPHGVQ

SEQ ID NO: 133040 - protein, 281 aa, unidentified
MNKRDEGGVEVSAEQLLVGLQREGAPRARREFPNTPEGHEALVRWLAAPGRSVRVVMEATGLYGLDLALRLDAAPSVEVMVANPRAVRHFAIALMKRSKNDPIDTDVLVEFAQRMPFQRWVRPSPAALALHALARRLESLTQMHAAEKNRLHAAQLSAALPVAVTRDLKLSLRSLERALQRLTRQAVEVIGQDPDLNLRYQLLLSACGIGPTSAVQILAQLAVLPADLDVRQWVAQAGLDPRQYSSGSSVHKKTRISKTGNCHLRRALYMPVRQLTDRPPP

SEQ ID NO: 133041 - protein, 408 aa, unidentified
MTRYYIGVDWGDRLHQVYVGDEQGKKVREMKVPESVEGLAEIGRWLDEQRAGGFELWAAIEKPAGRIVDFLLDHGVEVYPVNPKAVDRVRDRYRMSGSKSDAFDAYVLAEFLRTDQAHLKALRPSSDKAQELKMLSRDQRRVARHKTRLLNQLTITLKEYYPRPLDAFENIETELALDFLTRYPTPAHLGVLKRKEFNRFATQEHSVSKPRCQELWDKLHQPQLAVPEHVVRAKAQLTEVLIDQLRASIKAVKTYNHKVESFFASSPAAPLAKTLPGGKSGTLVASIWAELGDAVGRWESPGHLQAEAGTVPVTKASGKSHVVLFRFACNKHLRYAMHWFSFVSLNNCEWAKLYYRSHRDKGHTHPQALRALAAKWLKIIFVMWRDHKPYDEKFHLANIALQKLRQAA

SEQ ID NO: 133042 - protein, 391 aa, unidentified
MIYVGIDVSKDKHDCCIVNSDGKVLADVFTVENNMEGFDLLFQRLKSVARDLDNVKVGLEATGHYSYNILGFLLGKGLATFVLNPLHTNLFRKSTSLRRTKTDRVDARTIAAMMMSGVVLKSYTAISYHNEELKSLSRYRFDKVCQRAKLKQSVSSLVTILFPELENLVSTLHIASVYALLAELPGAKQVASCHLTHLTNLLSTASKGHYGRSKAIELRNAARRSIGSAMPAKSLELQHTIRLIRELDAEISEIETALKQIIDQIASPILTIPGISYRMGAMILAEIGDFSRFDSPDKILAYAGLSPSTYQSGKLDNAYAHMEKRGSRYLCYALYNATKYVCHWDASFSAYLAKKRAEGKHYNVAISHAAKKLVRLIFALQRSGQPYYPAA

SEQ ID NO: 133043 - protein, 387 aa, unidentified
MPQCNDLSRSLVAFQQDNTLVAVVELSRSSWLVAGLVPGIGRHPLKKLDPSEEALLALLRRWRDEAAGAGRTVTRVAVAFEAGRDGFWLARWLRARGVEAHVIHPTSVAVSREHRRAKTDRLDTELLKRAFLGWLRGEPDHCSMAAIPTLEQEDAKRPSREREGLVGERTRIVNRMKGALARLGVRGFKPTLRGAPERLEALRTAEGAPLPPNTLAELRRDMARLRLVREQIAELEAARLERLRQAPEDRPHAMVRLLARVVGVGLETADMLVREVLSRELRDRKALARYAGLTGSPDESGARRREKGLARVGNARVRRGMLQLAWRFLRFQADSQLARWYRARTADARGGTRKAMVVALARKLLIALWRLATTGEAPEGVALRPAA

SEQ ID NO: 133044 - protein, 352 aa, unidentified
MAHLAPPRVTIGVDTHLDLHVAHAKDQLGRRLATVSVPTTPAGYRSLLAWARGLGEVEAFGVEGTGSYGAALARFLRAHGQVVVEVNRPDRQARRRRGKSDPLDAEAAARSVQAGEATVAPKAGDGVAEMLRCLRVARASAVKARTQAGNAIKALLVTAPAELREQLRGLPTAKLVATAAAFPAGKPATPTAATMLALRLLAVRHQALTAEVTALDRELERLTAKAAPRLRALFGVGAESAAALLVAAGDNPDRLHSEAAFAMLCGSAPIPASSGKTVRHRLNRGGDRQANAALHRVVIVRLRWHQPTRDYVARRLAEGKTKREVIRCLKRYVAREVFAALNQLDHDLAEAA

SEQ ID NO: 133045 - protein, 338 aa, unidentified
MIVVGLDVHKHSLTAVVVDELGRTVAEHTSASRGDEVVAWARSLGDDRLWAVEDCRHVTRSLERTLLGAGERVVRVPPRLTAPQRRRGRSRGKSDAIDALAVARVALQEPDLDRPRAGEETLRELKLLVDHRDDLVAERRRCQQRLRWHLHELDPALTVPLGALDRAVWLERLGRQLARREQATQVRIARDLVGRCRTLTSSIGELDRELHARTKTLAPRLLELAGCGALSAAKLLCEIGPIDRFRGDAQLARHAGVAPLDASSGKHQRHRLDRGGNRQLNCALHRIAVTQGRVHPPARAYLERKQSEGKTRREAIRCLKRQLARTVYTTLKNEPLLT

SEQ ID NO: 133046 - protein, 320 aa, unidentified
MTTHYVGVDISKVKFDAARLSAEGKYKHKKFDNNADGFAAFTAWLAGFGDEKPTIGMEATGAYSIPLADFLVGEGYAVSVVNPTKIHAFARTELGRAKTDKADAKLIARFMQEKKPPPWNPPPANIRDLQALLRRVEHLSEMRQMEQNRLDTAAPAVAESIRAILGSLDKELKATRERILRHIGSDPNLRARGDLLDSIPGVGEATRAHLLVALSEHYGFGNAKQAVAHIGLDPKIRQSGQWVGETHISKAGAPLLRKALYMPAVVAKRHNPVIRAFCERLKANGKKGKAIICAAMRKLVHIAFGVLKSGKPFDPKLALA

SEQ ID NO: 133047 - protein, 363 aa, unidentified
MQSTTVIGFDQLAATTVAAVLLANHRTPALHTLTSDAPTIVRFVERLRRQGPVTCCYEAGPCGFEVQRALTARNIPCDVIAPALIPRRAGDRVKTDRRDAGQLAILYRAGALTAIHIPTEQEEAARDLLRCREDIRADLLRARHRLSKFLLRHGRRFTGTKKAWSKRHDAWLRTHTWPSAALGQTHAACLRAVDEAVERLRAVEEDLQGLLDLEPLRSRIARLRCFRGMNDLTALTIAAELGDARRFASAPRVMAFVGLVPSEHSSGTKQTRGAITKTGNTHLRRILVEAAWHYRHRPFCRRRAAASATRRAANNPCAGVGRAAAPASSLSSTCRPRETEPAGHHRGRPRALRLRLGGPGPVS

SEQ ID NO: 133048 - protein, 314 aa, unidentified
MKKAVEIFVGIDVSKAWLDVGVHEQKDTTRFSNDEAGIIRLVKKLKKLKPKLIVLEPTGGFEMLVVAELSQASLPVAVVNGKRVRDFAKATGQIAKTDKLDARVLAHFAAAIRPEVRSLRSEEEEQLTALLTRRRQILDMLTVEKNRLVSVRAKMRPDLEAHIHWLSNHLKELDQEIEEFVKGSPLWTQKDALLQSVPGVGPVTSATMLGMLPELGCLNRQEIAALVGVAPMNKDTGNKQGKRSIFGGRADVRSVLYMAALSAKKHNPFIRKFYQRLIQHGKEKKVALTACMRKLLVILNAMVRTNQPWRSQTA

SEQ ID NO: 133049 - protein, 358 aa, unidentified
MADKVTEAAVVGGVDTHKDLHVAAVVDQNNKVLGTQYFATTRQGYRQMLAWMTSFGALKRIGVECTGTYGSGLLRYLQNAGLEVLEVTAPDRMERRKRGKSDTIDAECAAHAAFSGIRTVTPKTRNGMIESLRVLKTCRKTAISARRVALQIIHSNIISAPDELREQLRNMTRMQLIRTLGSWRPDASEYRNVTNVYRISLKSLARRYLELHDEIADLDVMIAAIVDELAPELIKRNAIGYESASQLLITAGDNPQRLRSESGFAALCGVSPVPVSSGKTNRYRLNRGGDRAANSALHIIAIGRLRTDDKTKEYVARRVAEGHTKMEAIRCLKRYISREVYTLLRNQNRQVNSIPITA

SEQ ID NO: 133050 - protein, 400 aa, unidentified
MKGFLHMKLIGIDIGKNKHFFCVMDQQTGEIISQPISFSNDKEGFDFLVQKIKSYPKDSILIGMEDTGHYHFALLKYLLNLQYTVALINPKTTDFNRKIQGGITKNDKLDTINICDVLDTPERKKQYRITKVNSFDLYEQKQLTRHHHNLKEEENVYKNRLQKCIDIVFPEFNNLFNSKYGTVYMNILKMFGSAENIANTDIRTIRKCFEIEGRGNRISLTPERLKECAGSSIGISSSAEVIQIKHLTAQIELIEEQLTEIDKKIEEFSIQNNSPILSIPGISHFSGTSILAELGDISNYSKPSQIIKFAGVAPLHYESSQFNAQHTAITKKGSKYLRKTLYQIILPVIRHNPVFNKYYQLKISQGKGHRCAQGHCVRKLLRIIYHLLKTNQQFDPQLLR

SEQ ID NO: 133051 - protein, 350 aa, unidentified
MNHKCKIIIGIDTHKATHVAVALDTQGTRLAALSIPTNPKGYLELERWSQSFGEVHAFGIEGTGSYGAGLSRSLLAQGHNVVEVTRPNRQLRYTQGKTDTLDAEGAARSVFSGQATARPKTQTGISEMIRHLKVARDTAVKSRSQAMVTLKTLIINAPADLRDVLDEIRGKVALIRHIAAFRPGEINNTTASAKAAMRALARRWLWLHEEIITHDKELERLVTERAPELMTSHGIATLTVAQMLIVVGDDPTRIRSEAAFAKLCGVCPIPASSGKTHRFRLNRGGNRQANAALYRVAIVRMRSHEPTLAYVRKRTKDGKSKSEIIRCLKRYIVREIYSQLCVPKSAQIAT

SEQ ID NO: 133052 - protein, 347 aa, unidentified
MDHIGIDVHKRESQICLLAEGGELIERRIRTEPERFAAVLGGRPRARIVIEASTDSEWVARCLESLGHDVVVADPNFAPMYATRTRRVKTDRRDARALADACVLGAYRPAHRLSDPQRHVRGRLLVRDALVRTRTRYISLIRALLRQQGYRVPSGSAEAFATRVRALALPGPLLSLIAPLLAVMRPLNRQLEYSDATIEHLAAHDERVQRLRTVPSIGPVTAAAFVATIDDVRRFSHAHQVEAYLGLVPRELSSGDRQHRGAITKAGPPRPRWLLIQAAVSILRRRPPEAEALRAWALRIAARRGKQIAVVALARRLAGILYALLRDGTVFTPRRSPQPVAAATLLV

SEQ ID NO: 133053 - protein, 317 aa, unidentified
MAEVTFPQLIQRACGIDVHLKVVVATIDGAGIQRETRSFKTFTSSLNELKEWLLSNGVTHVAMESTGVYWKPVYKVLEDSIPDVWIVNARHIKNVPGHKTDKMDSEWICKLLLAGLLKPSYIPPKEQRQLRDLTRYRNKLIQQIASEKNRMMRILEDCNIKLSSVVSNTSGTTATSLIDMLCEGKVLTLDDIKSVYHGKLSASPEELLEACTGFVEEHHIYLLQMIRKDIDQTQTLVDDLSERIKRLLSKYENVLELLREIPGFSTKVVEDLVSEIGLDMSHFPSEKHLSSWAGLSPGNNESAGKKKAHESLTETNR

SEQ ID NO: 133054 - protein, 363 aa, unidentified
MHSENIAAYVGLDVHKETLAVAIAAPERLGEVRYYGTINNEAQAVRRLFQKLQGLYGNILSCYEAGPCGFGLYHQLTAMNIKCQVIAPSRIPKSPTDRIKNDHRDAISLARLLRAGELTPVWIPDLTHEAMRDLIRARAAAKRDSRVARQRILSMLLRTDKHYAGKHWTGKHRTWLANQSFSQPSQQIAFQHYCQSLEQIEDRILQLDQEISRLLPEWSLCNLVCQLQALKGVGQLIAITLVAELGDFSRFSNPKQLMAFLGLVPGEYSSGNSIRPRGITKVGNSELRRLLYEAAWSYRTPAKVGAWLIYYRPDSVTQYSKDIAWKAQQRLCSRYRSLTAKGKKSQVAITAVARELTGFMGGS

SEQ ID NO: 133055 - protein, 264 aa, unidentified
MSKITITGIDLAKNIFYLHAVDSTGRQVKAIKLSRSRLGEYLHRSEPVTVAMEACASAHHWGRLCQLLGHEVRLISPQFVKPFVKSNKNDRNDARAICEAAQRPDMHFVPVKTVEQQAVLSLHRVREMLIGQRTATINQLRGLLTEFGLTAPAGRRALHNTIPAMLEDLMKISPTFLVSCIRQQWEHIGELDQRIDNVTSQIEMHARQSDVTRRLQTIPGIGPITASALEAYVGNATQFRAGRQLAAWLGLVPRQHSTGGNPCC

SEQ ID NO: 133056 - protein, 345 aa, unidentified
MDHFAGLDVSVKETSVCIVDDTGKIVREVKVASEPEALLAVLKNPACCFKRIGLEAGPLSQWLYGALAEAGLPVICVETRHMRAVLKAQINKTDRNDARGMAQMMRVGLYRPVHVKTQRSQKLRMLLTHRKLLQSKAIAIDNDLRGTLRNFGFKVGTVGAARFEARITELIENIPDLAVLVEPLLVVRRVLREQLGILHHRLLAIVRNDDVCRRLMTVPGVGPVVALTYRATVDVPARFRKSKAVGAVFGLTCSKYQSGEIDRSGRISRCGDDMMRVMLYEAAQSMLFHSTKWSWLKAWAMQIARRRGMKKAVVALARRLAVIMHRIWVDGTEFRWTREQAAAAA

SEQ ID NO: 133057 - protein, 347 aa, unidentified
MRFYTKAHRHYCGIDLHARSMYVCIVDQDGAVLLHRNLACDPARFLLMIRPYREDLVVGVECIFNWYWLADLCSSEGITFVLGHALYMRAIHGAKAKNDRIDSRKTAALLRGGLMPQAYVYPPEMRATRDLMRRRLHFVRHRGQLLAHIQMTHHQYNLPSPGRRISYRSNREGLEAGFEDASARESVAADVTLANHYETVINELELSVLRQARGHDPNSLQLLRSLPGIGKVLALTILYEIHDIRRFERVQEFASYSRLVKCQHSSAGKVLGTGGAKIGNAYLKWAFSEAAVLFLAKCPQGKELLARIERKHGKAKALSILAHRIGRAVYFMLTRQKAFDLTRFMRS

SEQ ID NO: 133058 - protein, 334 aa, unidentified
MKQVTQVGVDVDSEQLVCLMQRAEQRQPLATFANTAAGHKKFIRWATKGGRPARVCLEATGIYSLEFALALHQAKNMQVMVVNPRAIKDFGRACMQRAKTDAVDAGGILEYLQRMPFTAWQPPAPEILELQAINRRLVQLTTELTREKNRRHASEFAGASGDAIAHDIEINIRHLERRIERMHESGRKLVRGAPALATKLAHLVSAKGIGEASAMRLLAELLVLPDDLAAPQWVAHAGLDPRPYESGTSVHRPRRITKVGNRHLRAALYMPALVAIQHEPNVKAFYDKLVARGKKPMQAVVAVMRKLLHAIWGMLKHDQDFDGNKFFKIANENA

SEQ ID NO: 133059 - protein, 344 aa, unidentified
MGEVSTIGLDIAKSVFQVHGVDVGGAVVIRKRISRSKMLEYFGDLPPCLIGIEACPSAHHWGRELQALGHTVRLIPPSYVKAYLKRSKNDANDAAAICEAVTRPSMRFVPIKTKEQQTALMLHRTRHLLVRQRTMLSNALRGHLAELGIVSAKGRNGTAELLKIIADGGDSRVPPAVRGILNVLARQYSAIGIEIASVDKGIMALHRGCEASRRLAEIPGIGPIGATALVAEIGDWMAFSSGRSLAAWIGLVPKQYTTGGKDKLGSITKQGNRYLRWLLVVGAMAVIRYARKHGTERRPWLARLMERRPTKVAAVALANKIARMAWAIMVRGERYKEPKLLLAA

SEQ ID NO: 133060 - protein, 340 aa, unidentified
MSEAFDPRKSTTAFDQASTLVVVVELSGKSWRVGANAPGVSRRPLRTVAARDIGAVLEAIERWKGEANKVGCEVGRVVVGYEAGLDGFWIARALRAHGVEVYVMHPASISVERRGRRAKTDRIDVDILLRTLLGWLRGEPRHCTMAPIPSEAEEDMREPGRQREALTAARLKVENQMRSLLARFGVADFRPRLKKAAEFLSRLRTFDDRPLPPNTMASLERLLAQHRLLSKQLKGIETAREQVVAVADPDRLQRMIQLLAGVVGVGVETATTLVYEVFSRRFRDRRALAAFVGMTGTPYDSGGSKREQGLSKNGNPRVRRILTQLMWRWTIFQPQSALTS

SEQ ID NO: 133061 - protein, 394 aa, unidentified
MIYAGVDIAKMDHVIGAVDERGAEMCRPMPFKNTEAGLERAVAWLEGLAESPSDVVVGMEATGHYWMACYSFLVARGYSVAVINPMQVKAVRKLKGLDKVKNDRVDAGLIAEALRIGQYDETRLATDEVASLRSLSRYLQSLRGMIAELKTQCICLMDAHFPEYAGIFSDMFGAGSRAVLSKSPLPFELARRRADSLARDIAEASRRGGRSAGYAAEIKAAARSSIGVRLGQEAASFQVKSLIRQIEFAESECAKVEARVRALLDEVEPLVLTIPGVSYVTGAQIVSEIGDVSRFRNAPALVSYAGLNSSVSQSGQFDSGGGPITKHGSPYLRRALWLAANRARQCDPGLRAFYEKKRAEGKPHRVAVTAVARKLCHIVFAVMRDQAPYDPGRE

SEQ ID NO: 133062 - protein, 370 aa, unidentified
MKSIIYVGMDVHKASFTLSCFSVTTQETFATVKISPDAKAIKKYLDGVSLSRSEKCEFVCGYEAGCLGYTLYHQLTAMNIRCVIMAPTTILRNSKRVKTDHIDAENLARCLAYGGYKSVYIPTAQDEAVRDYLRMRDDHKLMLKKIKQQINAFCLKHNKIYPGNKSKWTQAHVKWLNALEFDGYLQDAFNEYMITYRELTDKVERLESQIEQLAELEEYRDKVKKLICIKGIKTHTALSLIVETGDFSRFQSAERYASYIGLVPGEHSSSEDQNRLGITKAGNRHMRMLLTEAAQCYSRGVPAKKSKDLKSRQKGASPEVIAYADKASIRLRRKYIRMELVNKKKANVAKIAVARELACFIWGMMTDNIA

SEQ ID NO: 133063 - protein, 325 aa, unidentified
MRQPQSQVKPQTQVGLDVSSQTLDVHIRVDGKAFSVPNTDAGLDQLCEILSAYSVSMILMEATGGYEDNVACYLQLQGFDVVVINPRFARRFAQSMGRLAKTDRIDAAILAQMAFMIDSGPDRDRYIKPVTDEQRKQLSRLSSRRRQVVDLITVEKQRLTHADDYARESINGIISLLNVELKRIESDILRYVKKNFSELANRLLSIPGVGEQAVTVLIADLAELGHVNRRRISALLGVAPFNHDSGKFKGQRRIRDGRQTVRNVLYMGVISATRFNPVIKAFYDSLLLRGKPRKVAIIACMHKLIRIINAMMRTGKPFDMSLHGV

SEQ ID NO: 133064 - protein, 343 aa, unidentified
MDHFAGLDVSVKETSVCIVDDTGRIVREVKVASEPEALLAVLKNPAYHFKRIGLEAGPLSQWLFSALAEAGLPAICVETRHMRAVLKAQINKTDRNDARGIAQMMRVGLYRPVHVKTLRSQKLRMLLTHRKLLQAKAIALENDLRSTLRNFGLKVGMVGTVKFEGRIKELVENLPDLAILVESLLIVRRVLREQLGILHRRLLDIVRNDDVCRRLMTVPGVGPVVALTYRATVDVPARFKNSKAVGASFGLTPSRHQSGESDRPGAISRCGDEMMRMMLYEAAQVMLSRTNKWSWLKAWAMKIARHRGMKKAIVALARRLAVIMHRMWVDGTEFRWTQDVVAA

SEQ ID NO: 133065 - protein, 389 aa, unidentified
MIFVGIDVAKCKHDCFILNSDGEVLFDVFSIDNNISGFESLYQKLLSVAVDLSNIKVGLEATGHYSYNILGYLLNKGLPTYVINPLHTNLYRKSLSLRKTKTDKVDARTIAMMLMSDVDLKSYSNTLYHNEELKSLSRYRFDKVQERAKLKQSVSRLVTILFPELESIISTIHLISVYKLLMEYPGASHIASAHLTSLSNLLSEASNGRYNKDTAVIIREAAKNSIGSVMPAKSLELKHTIKLILEISSEIDEIEMEIKAIMDQINSPILSIPGISYRMGAMIIAEIGDFSRFDSPDKILAYAGLSPSTYQSGQFQSSHSKMEKRGSKYLRYALFNATKYVCNWDPTFCEYLAKKRAEGKHYNVAISHAAKKLVRVIFHLEKTGQLYIK

SEQ ID NO: 133066 - protein, 351 aa, unidentified
MTMVGGFDVHRKQITFDYVDDDGLVRVGEIRPATRTTLRHWLSEHCPAGDAEFALEGCTGWRYVVDELATAGVVAHLGDPAEIATLRGPKKRAKTDRADARLLRTLLLEGRFPESWIPPAHVVEVRTLGRLYCTLMDERRAWQQRIHAQLFHQGCPPIRALLSVAGRDALAQAELSAAGRQYVDTALRRIDELTVEIGPVRGQLVSFARAKVACQALQARQYGVGWLCAAIMWAEIGDARRFSSSDQLVRFAGLDVTVYSSADKRSPGHLSRQGSPELRWATFEAAKCAARHGSPDHAYYQRLATKHDGHNGKNPTLAVERKILRRSYHTLRELGDAALAMPVPEEQGVAA

SEQ ID NO: 133067 - protein, 357 aa, unidentified
MSTQNNKLDFTDQEFNIGIDVHDKNWVVSIRNNKMELKTFSMNPSPKELYRHMNHNYPGGQYNSAYEAGFSGFWAHRELEKLGIKNIVIHAADVPITNKEKTNKDDKIDARKIARELDNNSLNSIYIPNEFNQQLRSLNRLRSRAVVSQTRVKNRIISHLYYYGITVPSNQEMPRWSGYFINWLKSIEFKHKTAKTYLLFCLEELLQHRKRIAQILRELKLYIKEHDLYQQIEYIRSVPGIGYVSAMVFYTEIMDINRFKKFDNLLSLVGLVPSTASSGDKSSEKGLTPRRNRFLRHMIIESAWVAVRKDPALLAAFNKLTKRMKKQDAIIRIAKKLLNRIRYVWKNQTYYVNAVIE

SEQ ID NO: 133068 - protein, 407 aa, unidentified
MDVIHAKCAGLDVHQKTIVACARVMTGKTVEHHLHTFGTTTGELLALADWLARHEVTHVAMESTGIYWKPVWYALESQFELLLANPMHVRNVPGRKSDVNDATWIADLLAHGLVRGSFVPPEPVQELRDLTRTRKQLMRELARHLLRIQKTLDHANLKLTGLLSDILGVSGRAILDALVAGERDPERLADLATGRLKASRAQLVAALHGRITPHHVFMLKLHLTQIDALRAAVRDVEARLGEALAPFRPAVERLTTIRGIGPLAASVLVAELGVDMSRFPTPGHLRSWAGLSPRQDESAGKRRSTRTLAGNPWLKTTLVQAAWSAVRKDDTYFRAQFLRLKARRGPKKAIVAVAASILTAAYYVLQREVGYHDLGGDYFSQRDKAKIARRLLARLQDLGLTVEVRAA

SEQ ID NO: 133069 - protein, 345 aa, unidentified
MKYYAGLDVSVKETSICIVDQTGKIYREVKVTSHPDDLIAVLKDPAWNMERIGLEAGPLSQWLFEGLARAGLPVICIETRHTKAFLKAQPNKSDRNDARGIAQMMRVHLYRAVHVKTLTSQKRRALLTARKLLQDKAIAIENDLRGLLRNFGLKVGVVGSAKFEARIRELVEGTLDLVEIVEPLLDAGRNLREHFATLHRKLLMIARDDEVCPLLMTIPGVGPVVAVAYTATIDIPQRFKNSKAVGPILGLTPVLNQSGESHRVGRVSLCGDGMMRTLLYDAAQVLLNRVAKWSWLKAWAMSVAKRRGLQKAMVALARRLAVIMHRMWSDGTEFCWSREKLPAGA

SEQ ID NO: 133070 - protein, 341 aa, unidentified
MTIVGGLDLHRGQLTFDYLDQDTGEVTTGRIVPADRLQLRDWLERFAGTQQVAFALEGCTGWRYVVEELQRAGIAAHLAEPAETAGLRGPKRRAKTDRADARHLRELLLGGRVPESWIAPAHVLEARATIRLYKDLLDERTAWLQRVHATLFHQGVPIIAKLTTPEGAARLVSADLSAAGRQAVAVGLRQIQRLSGEMGPLREQLADLSARQVGCRALRETHYGVGALTSVAIWAELGDCRRFGSSDDAVRHTGLDITVYASDGKRTKGHLARQGPAVLRWALYEAAVFAGRASSPDHAYFRQVKQRLDGQRALLSVARKLARRCYHTLRGLGDQAFAPAA

SEQ ID NO: 133071 - protein, 373 aa, unidentified
MNKKNYLRQVVGVDVSLQRLDVAISALDEQVVAHVIASTHFDNTPKGFKDFIYWIERKRVKEVPLKIVLEATGVYHENLAHAMDKGGYEIAIVMPNKIKNYCNSTSVRSVTDKISARQIAEFGLVKVLDNWQKPPQVISELKHLARERNTLLEVRSMAMNQLHAYTVAYNDDKHTIKRSNQRIAMIERHVKEIESEIKAIVAKEENAWLREKIEKICTVPGLGFITVLNIVAETDAFNLIRSSRQLVCYCGYDVVFKESGTSVKKKTRISHRGNSYIRKALYFPAFVAKQHNPVYEAFYERLFARQQVKMQSYVAIQRKLLVLIYTLWKKDEVYDPNFVWTGKADTGSGGNQPARNSLSDRDGQEEGSRALFF

SEQ ID NO: 133072 - protein, 318 aa, unidentified
MTAQLLALAAGIDVGQRFLDVGFAPSGKTFRVPNAAGGIAALVERLTQAGVGRVVLEAIGPYARQLVSALAVAGFEVGLINPRRIKAFREFEGRRAKTDRLDARLIARFALAMTDAIRPLPTAEQLALKALSTRRRQLTEMIAMEKTRLKQTAEPLLLANHRATIAALTAQCRHIETELARRIAADPQLACSFEILISIPGVGERVATALITELPEIGRVDRKAIASLAGLAPHISQSGNAPPRAAIAGGRPCVRTALYMAALVASRHNPEMKLAYQALRNQGKPAKLALVAIARRLLVTANAMVKSNTRYTPHSLDN

SEQ ID NO: 133073 - protein, 348 aa, unidentified
MVVIGVDSHKRTHTVVAVDEAGRKLAERTAPATADGHLELLGWSRTWPERTWALEDCRNLTRRLEADLLRGGEAVRRVPTKLMAGARRSAREPGKSDPIDALSVARAALREPDLPVARLDGVERELRLLVDYRDVLISDRTGHQSRLRWFLVELGIPEPPSRKLTVPVVLAGVDLQLVGRTEPCARIARNLVARISEMTAAIDDLARQIGELTETLAPSLLDLFGCGSLTAAKLVAETAGIGRFRSRAAFAAHNGTAPIPVWSGNLVRHRLSRGGNRQINAALHRIAITQLRCPSLGQAYVAKRLAAGDTKTEAIRALRRRLSDEVFRRMQADEAARAATECVARAAA

SEQ ID NO: 133074 - protein, 413 aa, unidentified
MTNPYHLFVGIDLGSDFHQVCVVDQEGKILGQRKIEHAGGAIQQMLAWLAELAGGASPETVAVAVEAPRGAIIDALLEHKYAVFSINPKQMDRFRDRYSVAGAKDDPRDAYVGANSLRTDLSHFRRLCADHVQVVRLRELSRAHDALQEDWRRNANQLWSYLQRYFPAMLKLSSAADELWVFDLLEQSQALSQCAAALGTEELAKLLRRNRIRRFSAEQLHHSLQDRLALAAGVEEALAEQVLLLLPRLRLLHQQRMEVDRRTESLLEEMAEEKFPEHRSVEILRSIPGLGRVFLATVLSEAGRPLLDRDYHGLRALAGAAPVTRRSGKTTIISMRRACSDRLRNAVLNSANTHVQKDPRAKLIYARLRGKGNTHARALRGVADRLLELICILLSSDQLYRIERRQAPKTDAA

SEQ ID NO: 133075 - protein, 365 aa, unidentified
MNTCERSKTLFVGVDVHKDTHTAVGLTPYGEKIFEMKIGNEAADFTSLIERAQGEAERTGLSPSFGLEDVHSWGERLSSFLVGEGVPVCAVASILVDHARKRTAHPEKNDSLDAQGVAEVMIRKIDSLPAHTLTKDGEIAKNIRDVSFDREHLVKERTRLKNHVHTLLYRIFNTAYAKEFKDPFSVKALRHWMKSRPKDISPFLVRSMKRKVRRLMDIREEIMELEHELETLIKESGHTIHTASGCGVVIAGEIIGEVGDISRFHAPASLAKYAGCAPRECSSGKTVRWRKTRSGNRRLNRSFHRMALSQISRMGNPAAQAYFKRKVSEGKSKSQALVCLRRQMVNIIWMMMKHKTEYRYPQKND

SEQ ID NO: 133076 - protein, 360 aa, unidentified
MEDCQVAMTRQIVGGVDTHKDLHVAAVVDEHDQVLATQSFATTRQGYKQMLAWMRSFGELQRIGIECTGTYGAGLLRYMQAADISVLEVTAPDSTDRRRRGKDDDMDAQNAAHAAFAGKRTVTPKTRDGMIESLRVLKACRKTAVAARRVALQLIQSTIVSAPDDLRDSLRKLTRMQLIRTLAAWRPDLSDYRNVATAYRISLKSLGRRYLELHDEIADLETMIGAIVNELAPALVSRNSIGQECAAQLLLTAGDNSARLGSEASFAALCGVSPVPASSGKVTRHRLNRGGDRAANSALHIIAIGRLRTDPRTKTYVAKRISEGHSKLEAIRCLKRYIAREVFTLISQRRTEINRTPSIA

SEQ ID NO: 133077 - protein, 387 aa, unidentified
MPQPNDLSRSLVALDQNSTIIAVIEMSQSSWLVAGMLPGIERQPRKKLEPNPERLLGLLHRWRDEAVRAGRTITRIAVAFEAGRDGFWLARWLAARGIEAHVIHASSVAVSREHRRAKTDRLDTELLKRGFLGWLRGERGHCSMARVPTIAEEDAKRPNRERNCLVGERTRVVNRIKSTLARLGIRNFKPTLRKAAERLASVHTPEGMPLPPNTLAELHRDMARLGFIVSQIRQIEEARQKRLEQQHETGPHAMVRLLARIVGVGVETADMLVHEVLSRPMRDRRAVARYAGLTGSPDESGARRREQGLARAGNARVRRGMIQLAWRFLMFQKESALAVWYRARTADSRSGTRKTMIVALARKLIIALWRFVTIGEPLEGVVLRPAS

SEQ ID NO: 133078 - protein, 322 aa, unidentified
MQGKMTSVRAELAVYAGIDVCKAWLDVYVHPTGQSFRVPNSKKGCKHLALELTSANAGLIVMEATGKLHRLCHRELSAAGFAVAIVNPYRSRKLADAFGQLAKTDAIDARLLALYGEAISPAVTPVPAKTLAELQELVLARQAAKAQETALKNQYGAAGSPVLKRLLKALLDAQARLIDGLKAAIAAILSKDAGLKRRFEILASIKGVGPVVAATLVACLSELGVLSGGKIALLAGVAPINCDSGEMRGQRHIKGGRAHVRSALYMAAVCAIRCNPDLKAFNDRLRAAGKAPKVALTAVMRKLVRLANTLITEDRFWTPKHA

SEQ ID NO: 133079 - protein, 344 aa, unidentified
MKITTVGIDLAKSVFQVHGVDGHGKPALKKRLKREQMAAFFANLPPCLIGMEACGSAHHWARKLEGFGHTVRLMAPQFVKPYVKTNKNDAADAEAICEAVARPNMRFVPVKNVAQQAVLALHRVRQALVKARTAQSNQIRGLLGEFGLIIPKGIAHIGRRVPEILEDASNELPGSFRQLLERLMDHLKDLDRQVDELEIQIKSWHRDNAASRKLAQVPGIGPITASALVATVGDARNFDNARQLAAWLGLVPRQHSSGGKSLLLGISKRGDTYLRTLLIHGARAVIRAAEHKADKSGWLQALLKRRNKNVAAVALANKNARIVWALLAHDRDFRADYTSTRAPA

SEQ ID NO: 133080 - protein, 421 aa, unidentified
MGKLIERCAGIDIGKRFLVCCVMTGAAHEEPRSETRRFDTTVPGLTRLRNWLNEERVTDVVMESTGSYWIPVFNLLEGHVTVVLANPEEVKNRKGHKTDRKDAGHLADLLRHNHVKSSYIPAEPVRQLRDLTRRRVQLTQDATRERNRVQKLLEQVNVKIGSVLTDVFGVSGLHMLLALLDGRAAPEEIAGLARGSAKRKTPQLIEAIEGNRMSDHVRFLIRGCLRHLACLEEEVEELDAEILRRMQLSTFQKAFTLLQTIPGVGQLSAATILAETGPDLDSFPTVEQMASWAGLCPGNRESAGIQKGPQTTHGNPYLCTALVQCAWAATRKRDSVFRSRFQRLAPRRGEKRAIIAVAHHMLIILYCMLKRGVPFLGAEHAPKQRRRERRAHHHLRCLRRLGFSVEIRLSSESTPPDTISR

SEQ ID NO: 133081 - protein, 347 aa, unidentified
MRFYTESHQHYCGIDLHARTMYVCILDAEGQVLLHRNLPCDPERFLRAIAPYRDDLVVAVECIFTGYWLADLCAREGIAFVLGHALYMRAIHGAKAKNDRIDAHKTAALLRGGLLPQAYVYPAEMRATRDLLRRRLHFVRHRGQLLAHIQNTHHQYNRPSPGKRIAYRSNRDGVAEGFEDSSVTQSVEADVALIDHYDAVIRDLELTVLRRARGHDRDSYERLKTVPGIGKVLALTILYEIHSIDRFSKVQEFASYSRLVKCQASSAGKVKGTSGAKIGNAHLKWAFSEAAVLFLAKCPEGKKLLARLEKKHGKGKALSILAHRIGRAVYFMLKRKRAFDLARFLKM

SEQ ID NO: 133082 - protein, 421 aa, unidentified
MNQLTDTEYRAYVGIDWAAAKHDICVQSADGGAREFARISSQPEGIEAWAQDLYRRFGGPIAVALELSKGPIVSALQKYDFLVLYPINPLQLARYREAFTPSGAKDDPSDAELAVDLITRHAERFTPLKPQSVGMRKLIALVEQRDKFLGDRGRLVNRLGHALKQYYPQVLEWFNEHHTLVFCDFLSRWPTLTQVKRARKASLERFFRSHHVHSAELIEKRITAIKATMPLTADPAVIEPHRLQVEILIEQLRITIRALKRFDDEIAATAHKLPDYDLLFSPLPGAAQVLAPRLLAAFGEDRQRYPQADALQKYSGIAPVTKRSGKTTWVHWRWQCPTFVRQTFVDWASQTINKSAWAGAYYRQQRAKGCTYQVAVRALAFKWIRILHRCWLDRTPYDESKYLEALRRKGSPLLKYLAQAA

SEQ ID NO: 133083 - protein, 405 aa, unidentified
MPTICPRACRKWWARSALPTLVIAQTGIVGVFRKEWPATDVHPAAGRWRSDRVRPEPLWLPRSVIVVSTFIGPGWLPEQLGSLHKAGSRKMTQTNMTTAGIDTSKLKLDIAVHGRTERWKVANALPGWRALAANLAKADVTRVGIEATGGYERGVVEHLRAAGLIVLVLQPVQVKAFGRVHLRRAKNDALDAELIAACAAAIDRLRMVPDARLTELAGHLTFLEQTEEDIARFKTRLEHIDEPGLRRIVNSDIARLKARKAAQIRDIAKRLRAHDDLAERLDLVLSIPGIGERTALALLIRMPELGQVSREEAAALAGLAPFDDDSGQRKGQRRIAGGRGRLRRSLFAAALPAAYRWNRALIALYARLKARGKAHNAALVACARKLLIYANTVVQRGTPWTEKAA

SEQ ID NO: 133084 - protein, 391 aa, unidentified
MSMYFIGIDISKYKHDCCIISAADQKVVSKVTIKNNKAGFNELLTIIHSLANPADIRIGFESTAHYTLNLELFLENSLLTFMEVNPVLISEYKKSKTLRRTKTDSVDCESIARWLMTVEYKPHSKGFYHAYSLKSLTRLRDKLIRQRSFYLVKITNVLDHTFPEFKPFFNERLSKTALYLLENYGSAEKMARMNSASYEKLRSVSRGKFSPQQFLRLKELAANTVGVNNSIFDVELNSLLSLYKSLVKEIDTIEKEINKLIEEVHPHYMSVPGIGPLSAAVIYSEYGDISNFTNPGQMLAFAGIEPGINESGTESHGGKMVKRGSSQLRYTLINCCLPLIRFDMTFATYYAKKRGEGKPHRVAITHVAKKLIRVIYALESQDIDFNAQKLR

SEQ ID NO: 133085 - protein, 354 aa, unidentified
MPQSSTLYVGMDVHKESIAVAYVGQDHGAEVISLGTVGTRQCDIDKLIRQLQSKSKQLVFVYEAGPCGYWLYRYLTKKGYVCWVVAPSLIPKKAGDRVKTDRRDAMQLARLMRSGDLTPVYVPAVDDEAIRDLSRAREETLRDLQTAKLRLKAFLLRHDIRYTGRANWSPAHLRWLSEVVCPTPVQQIVFQEYVQTVTDQTERLQRLEQALHEQVQTWRFSPVVEAFQALRGVQCIVAVTPVAELGDPTRFDNPRQLMNYLGLTPSEYSSGARRQQGSITKSGNTHARRALVEGAWAYRYPAKVSRHLQLRLEKLPKAIQAISWKAQVRLCKRYRQLMAKGKNAHQVVVAIARE

SEQ ID NO: 133086 - protein, 370 aa, unidentified
MLDTTTFVGLDVHARSIKAVSLDVMTGEVRCATFGYDAGAVAEWVRSVDPKARCVYESGVTGFDLQKRLSGLGVDCVVGAVSKMIKPSADRRRKNDRNDAEFLARMLSVGNVVEVWVPDDECEAARDLTRALEDARDDLSRSKQRLSKFLLRHGLAFDERTPTGRRKGNWTRAHWSWIESIRFAEGADNEVLAYYVDAVRRAAEEKARLEGLVEGEARKPRWRRRVDSLRCLKGVDTATAADLVFEAGEFSRFRNARSFAAWVGLTPSEHSSGESDRRGAITKAGNKHLRKALVEAAWHYLTCSARPKDLARGQAPDPGARRHAAKGVRRLVERREALLARGVHNNKANVATARELACWVWAVGLMAEEA

SEQ ID NO: 133087 - protein, 414 aa, unidentified
MLKIVYPICCGMDVHKSFIVACIASTNKQGVTTYKSKRFSTFTGDLRQCADWLSENNCKDVCMESTGKYWIPVYNILESTCNIVLAHPKYMKAIRGKKTDKRDAKRIADIFKHDLVAGSFIPPADIRQLRDLVRYRWKLTNFTTGEKNRVQNCLTGPNFKLDDVFSNVFGKAASAITARILENPTEKITDVSGFRTKSMKATNEQVLAAVDGEMCAQQAEKLRIIRSHMDSLQLCKINLESLILATAEKYLPQLNLVMTAPGIQSFAAIGIISEIGVDMSVFPTSKHLCSWAGLTPQNNESAGKKKTTRISRAGAYIKPLLVQCALCAVRAKQFPEVRNRYMALKKRRGHKKAIIAIARMLLTVIYNMLKKNEPYNPELYRKGDRPPAHREVSVDEAIFILQRQGYLVTAPPAS

SEQ ID NO: 133088 - protein, 408 aa, unidentified
MQVLYTRCAGLDVHKDTIVACVRCVSPPLHQEVRSFGSTTTGLLALADWLAEHGCTHVAMEATGVYWKPVWHVLEDEFELVLANAAHIKNVPGRKTDVNDAMWIADLLAHGLIRSSFVPPQAIQQLRDLTRTRKQLVREVSQHSLRIQKVLEDANLKLGSVLSDVLGKSGRAMLDAIVAGQTDPEQLAALAQGTARHKTAELREALRGRISEHHRTMLKLHLQVVDALQRTLAELDTAVGKALAPIRQRARLLTTMPGVSDLTASVVVAEIGVDMSRFPSAGHLISWAGLCPRSDESAGKRRSTRVRQSGTWIKTTLVTAAWAAVRVKTSYLRAQFLRIKARRGAKKAILAVAASMLTAAFHMLRDGTEYNDLGSDHFDHQDRSKTIRRLLKRLQDLGCDVPELTHAT

SEQ ID NO: 133089 - protein, 460 aa, unidentified
MNPKRSKSRNGGKMPMVHPNAAAIDVGATMHMAAVRADRAPEPVRSFGTFTTDLHRLVDWFTECGVETVVMESTSVYWIPIFELLDARGFTVFLVNARDAKHVPGRKTDVSDAQWLQRLHSFGLLRASFRPKGQIAELRAYVRQRERLLEYAASHIQHMQKALTEMNLQLHHVVADITGATGLRIIRAILAGERDPEALACLRHYSCHSSAETIAKALTGSYRAEHLFALEQALALYDAYHEKASACDARIEAVLKDLIVHRGHGHGSAPRASRRRNRTNQANALAFDVREALFALLGKDITTIGGLGPYLSLKLIAECGDDLSSWPSAKHFTSWLGLAPSNKVSGGKMLSSRTRRSGGRAAALLRLAAVTVGRTDTALGAFYRRLSARIGKAKAVTATARKIAVLFYNAVRYGMDYVDPGASSYETRYRTRVVNNLHRRAKAFGFVLQPLEPKVGAAVS

SEQ ID NO: 133090 - protein, 415 aa, unidentified
MKFEKDTSGIKRYIGFDIHKEYALVGGQNARQEWVMQSRRVGLEKFRAWAQANLCLGDAAIIETTTNVWDVYDIVAPLVSYVVVAHAGGVRQIAEARVKTDKKDIERLLKLLIADIVPEVWVPPVAVRELRGMISYRNRLVKTATMIRNRLQSLIHRHNLLLPKGALTDKAWWETQTLNALEKIQIRQELELLAGLDKNKTEVDAELGRQCLGEQWGRQAVRLLQLSGFGVVMTMTVLSAIGDISRFEDAKKLVGYSGLGPGVHDSGKEHIEKRITKSGRKELRWALVEAAWRAIRISPYWKEQYEKYLRRMRKPNQAIVVIARKLLVAVWHVLSKEETDEHVSEEDLAYKMLVLAWDLDEEVRMGLSYKQFAKYALMKLGVETDITRFVRKNVARRVAPKAEVLARMEELGLTC

SEQ ID NO: 133091 - protein, 345 aa, unidentified
MEPMYYIGLDVHKRKISYCVKDLGGKVCAEGSIPATRFDLDHWMKTLPQPWSAAMEATMFTGWIYDHLKPHAAALKVAHPLMLRAIAAAKKKNDRIDASKICDCLRCDFLPECYMAPTAIRERRRTLRYRNLLVRQMVQMKIKISSLLMEAGVSYNKQRLHKAGYFRELLATNPDIDEGLRSLLRQCRETVVRLSKTESALICSLEHDRLLAQRVERLISIPAIGSITALTWALEIGEVQRFSSIKKAVSYCGLCGAEKSSGNTVQRTPLSKQRNKHLQTTLIEAAKMAPRYSATLALLYEREKQQGNANRATLAVARKLVAYLMAVDRGRTHFLVVDRETCVAA

SEQ ID NO: 133092 - protein, 417 aa, unidentified
MNVNRNEYLNLRICGIDPHKSFCKAVVVDERTLNTVDEFDFKNNRNGVLSLIERLRALDCNNVVIENTNNFSAALYITLKRHGFKVASVNPALVPKKRKKSDRIDAKWLAISYLYELVEEDYIPPAEIQYLRDLTRLRTKLVGMRSMLKNKVHALLTRADIHLSDVFSDIFGRQSIAILNSLAEGLTDAIQNLKVKRNVAKQVKDAIENSFLELLNCSVLRILLSLIQVFNEEIKRLDQMIAAHIDEHKRLKKLVKLIMSVPGVGFITAAIIVAEVGDFTRFSDAKKLVGWAGLAPQVSESAGKQRNGKITKRGSPYLRRALHEVANVITRSKSPRELYEFYKRISGRSGRYKAKTALARKILTIIYHLVVQDEHFESRHEGYKRLHERKVKQFVSLSRAGRDRLAEWSESSRQLAG

SEQ ID NO: 133093 - protein, 441 aa, unidentified
MNSKSLEAKRHFINGKTIIGIDPAKKKHQAVIIDPVGVPVGNTFKFNNSFYGFHQELFHKLNSYISELSPDKVVFAVEISINFWQKLCCFLCNKGFTVLMVSPLFTHHERPKINNNFSRTDPKDALAVANCARQGYFNFYRQYPSDQNAMHRLSITYDKLKVHMTQTKQRIRSQIELIFPEFINALEIDTDTARYLLSKYLSPKDFLGINIFLEIPEVMKVSGRQHGEATLKALKEAAKQTIGINLTDEELLSERITLNCWLGEYILLKEQIKYVLDQLVALAEETPYFSIVSSLKGISDITAARFIAELRDLSYFDHYKKIEAISGINLKLSQSGQYTGYRRITHIGNHRLRAVIYSMAEETKNHIPEVRIRYLKRQMKQPRYRKNVIASCSNLLKLIVALVKEEHKYEYKQEKQKELAVLELKYKEFKEKKKKNYKKSA

SEQ ID NO: 133094 - protein, 338 aa, unidentified
MELYAGIDLHSNNSVVTVLDEQDRTVYAKRLRNDLDAIVAALRACAGTMRGVAVESTYNWYWLVDGLQAAGFTVHLVNTAAVKQYDGLKHSGDFSDARHLAHLLRLGILPVGYIYPREERAVRDLLRKRSQLVRQRTTQILSIENLMARNLGARATGNEIKRWEARNINAMELLDEQKQALKATLAVMKCIDGQVDRLERSILANVKLREDYKGLKTVSGIGEILAVTIALETGDIGRFAGPGNFASYARMVDSRRESNGKKKGEGNAKCGNKYLAWAFIEAAHFAVRFDATIKRWYQKKCAGSLSVVAIKAVAHKLARACFHVMKDGTPFDAAKAFG

SEQ ID NO: 133095 - protein, 372 aa, unidentified
MNTIYIGVDFHARQQTICYLTTETGELVTAELKHQDKAAVRTFYQQFEEPVIVGLEASGYSPWFEGLLEELGHQVWLGDATEIRRRARWRQKNDRRDAELILDLMLHDEFPRLHRLPVQSREVMRMLRYRQKLIKIRTMSKNSLQSLALQSGLARRGRLFTREGKAELNAAVMSPAMQWQRAHWLQLLEPLNQQVLEAMTWLKAASQNDVSIARLRTHPGIGLLTSLCLVHTLQPVSRFRNTRKVAAYGGFDPVERSSAEHKRFLGISKAGSRLLRHLMVEAANIAVRKDEDLKRFYQRLAHRRGRPKAKVAAARKLLIRAYIMMRDEIDYAEFRRRAVAARLARIGHGPKVPGVVIGQPASTERQEPPRGK

SEQ ID NO: 133096 - protein, 446 aa, unidentified
MTAPASQSVRPHTPASLTPDEKVAFAARFPVHVGVDTGKSFHKLVARGPDGRRTKALRVDVSRASFEAAHQFLADTFGIAPDRVLVGLEFAGHHGFTFTEYLRQRGYAVVAVLPSVTKKLKEIEDNSPRKDDAKDAAQVCKLLASGLFVGVAQLSEQVAEMRVLATERHRLAVEGTRLRNRLHGCLDQAWPEFAAHFALLVAPTPLALLRRWPLPADATAADPRTVRALVERVSRNHISPERVAHLLDTARDTVGLRSAPDARRSEITRLLTRLDLVRAQAGEIETRLAELVAAHPAARALATVPEVSAVCAATLVAELGTPETYVAPRQVLKLAGMNLARKESGTSVRGRVRQTKRGRPLLRRQLFLLAGRWCTRRGLYHEDYVALRLRNGGSKTSALCAVARRLVPMLLHVMQSGEAFDVATWRAGRSASPPPALPPATLQRAA

SEQ ID NO: 133097 - protein, 326 aa, unidentified
MMPHFVGLDVSQKMTAICVVDNAGRRLWRGQCPTAPEQIAAMVRRHAGDDSRIGIETGAMTPWLVHELRALGLEVICLDARHARAALKMQINKTDQNDAEGLAQIVRTGWFRSVHVKSLDSHRARALLGARAQLVGMTTRLSNHIRGVLKTFGLLPGAMRGFRFDRKVEVLLQDRSDVAPIVRPMLVAWRQLREQISAFDKAIRVLVRSNSACRLLMSVPGIGVLSVLAYVSMVEDPARFSRSRSVGAHLGLTPRQYQSGEIDRHGHISKCGDTLARTLLYEAAVVIMTRVKKASELKDWALAIAKRSGIGKARVALARKLAVMQR

SEQ ID NO: 133098 - protein, 402 aa, unidentified
MQEPSAPSGYAVFLGLDVGKGEHHATALDPEGRRLHDKPLPQDEHALHALFEQLAVHGRVLVVVDQPASIGALPVAVARDVGVDVAYLPGLAMRRIADLHPGNAKTDARDAYVIAEAARTLPHALRRVDTGDEALADLEVIVGFDDDLAAEVTRVINRVHGLLTQVHPALERAIGGRLHHKAVLELLHRFGGPTGLREAGKRRIAATVKPRAPRSHQAIVEAVMTALEEQSVTVPGTRAAELVLPQLADQLSGLLAQREQAAAQVEEMLDAHPLAAVLTSMPGVGVRTGARILLEVGDGSTFPTPGHLAAYAGLAPVTRRSGSSIRGEQPSRSGNKNLKRAMFLAAFASLSDPTSRAYYDRKRAQGKKHNAALICLARRRCDVIYAMLRDGTPYQPRPATAA

SEQ ID NO: 133099 - protein, 342 aa, unidentified
MKQYVGLDVSQRETAVCVVSETGQLIFEGKAKSDPGALTNLLRKHAPLAERIGFETGAMASWLWHELRRVGLPVVCIDARHAHAALSVRMNKSDQNDARGLAELVRVGWYREVKVKSEESQNIRAILVARSRLVSMRRDIENQIRSLIKECGLLFPRAIGQQFRKKVSELLGQDHQLLGVIAPLLSIHEHICQQQSKFDDEVRRLAKSDETTRRLMTVPGVGVVTALTFRHTIDDPSRFRSASTVGAYLGLTPRRNQSGETDTNGKISRWGDRLLRTYLFEAATVLLYRTKKWCSLKAWGMKLAKRIGMKKAKVAIARKIAVILHCIWVDGTSFDWSQAKPT

SEQ ID NO: 133100 - protein, 346 aa, unidentified
MDQQQQYVGLDVSLETTSICVIDKKGITVWRGKCASTPESITEAVHTYAAAVVRVGLETGQLSNWLTLNLRRRGLPVVCLDARHAKAALSLQINKTDANDALGLAQIVRTGWYREVAVKSMDANTLRMLLVSRAQLVSQRQTIANTIRGLLKTFGVVIVRGAKGLFPVRVREQIVGNDVLAAIVEPLLTVWHALREQIAIFDRQILARARADAAARRLMTIPGVGVVVALAYTAVIDDPARFRRSASVGAYLGLTPRRYQSGEADTSGHISKCGDALLRAYLLEAATVLLQRHSRASTLKTWGLALAKRIGMRRAKVAVARKLAVIMHRVWSDRSEFRWGDVPVAA

SEQ ID NO: 133101 - protein, 342 aa, unidentified
MKREIYIGVDVSKNWLDLAYYDGIDIDWKSGHIRVDNNKSGYRKISIWLKKLQIAKGSALFCMEYTGLYCYNFRIWLESEGITYGMVNPRKMHRFEPDLGEGEPALDRIKTDEMDSFRIAIYCEKHSRKIKSSPSSLPGPAFFNLKRLLAERRQYVKHSVLYKQQLHDISAYDTEESCKRKQAGLKSLSVLRRQTDIEMRRIIKSDEAIYKNYQLLCSVIGVGLVIAVETIVLTENFTAITDPRKYACYVGIAPGRKESGISIRGGDHVSKKGFKQAKANLSLVALQAIRHDSNIRSYWHRRKADGKHTGVVLNAIKFKMILRMFAVIKRQKPYVEMDAYMK

SEQ ID NO: 133102 - protein, 331 aa, unidentified
MVYAGIDVHRKRSQVSLIDVDGRELLNRNVDNGSEAMLDILEDLEPGTPVAFEAAYGWGWLADLLEERELEAHLVHPSACKAIASARLKNDKVDARMLAHLLRTELLPEAWIAPKEVRDLRVLLRHRASLVRVRTSLKNRIHAVLADEGLKVEGEKLWSDEGQQWLAGVSVRGMHRRVIDDCCGMLDALAIPIGRLETDIRKQAKTDPRVEALCVMPGVGLITAMTLVSEIGDINRFPTARKLCAWAGLTPTVRNSDNKVRHGHITKAGPAAVRWVLTEAGYHARRFPPFNSTFEAMTKRRGKHIAGVALSRKLLARSFHILKSLEAAKTQ

SEQ ID NO: 133103 - protein, 366 aa, unidentified
MKKISTVQTNSNEIFKEQKVTIGLDLGDRWSFYCVLDEAGKVILEQKVPTTPEGMKQTFARIPRSLMALESGTHSPWLSRLLTELGHEVLVAHAQKVNLITKSTRKDDRHDAQTLARLARIDAELLCPVRHRSAQAQIHLTVIRARAELVRARTALVNAARGLVKSYGQRLPKCGTEQVSRELAAKLSTEMREVLEPLLREIESLNERIKEYEQRMEKIAKESYPYVCLLKQVKGVGTQIALTYVLTIEDPYRFEKSRDVGCFLGLRPGRRNSGQSEPQKNISKEGDRYLRTMLVQGAHYILGPFGADSDLRRWGLKLAERGGKNAKKRAVVAVARKLAVLLHRLWVSGEVYEPLRNSNKAMRAAA

SEQ ID NO: 133104 - protein, 368 aa, unidentified
MKKVLHVGLDVDDKNFHIGAFCSETGEVFELTSRPTLGDLLKKLEKFKDQNFQIKLCYEATYIGYSLCRSLRKENIDAEIIAPSLIPEMASKRVKTDRLDANKMAKYYASDLLTKIHVPTVEDEHERDLIRSRSFLVDQRKDLKKHILSACRRNNINYKQEANSKSHWTIAHVDWLTSEINKMSGVLRSTLELLMHQLKKLDECINEFIQKITELSETEKYRKKKDSLNCFRGVDTLTSMTLITEIGDVKRFKHPKQLTSYAGLDITEYSSGGKEKKFGITKMGNKRIRTAAIESCQRLEKSNLLSRRLRGHREQQDIKIIDVADRCMYRLKKKSKRLIEAGKHKNKVKVACAREFLNFIWEALQIAA

SEQ ID NO: 133105 - protein, 467 aa, unidentified
MKPKRYQSPGKPRVSPMLLERINPHVAGIDCGSAEHFVAVPPDRDPVPVRAFSTFTDGLIQLADWLTACRITSVAMEATGVYWIPLYELLETRGFEVLLVNARHFKNVPGRKSDVSDCEWLRDLLSVGLLRGSFRPTAGIVALRTYLRHRQTLVETASTFIQRMQKALVEMNVQLPLVVSDITGATGLRILRDIVAGQRAPQHLAQHRDPRCRATETELIAALTGHYQPDHLFVLQQNLEGFDVCQTQIARCDATIEGHLRTLTTPVPAPAAPLPPSRSRRKTPKNNDLPFDVRTPLFQLTGGVDLTQIDGIAGQTALKLISEIGTDMTRWPTAKHFTSWLTLAPNNKITGGRVISSRTRRSANRAAAALRMAAMSLGRTQTALGAFYRRLAARLDKPQAITATARKLAVLVYRALKGELVYRDPGADHYDAQQRSRALRRLRQRARVLGFELVNSTTGEVLVAGVS

SEQ ID NO: 133106 - protein, 346 aa, unidentified
MMIIGCDFHPSWQQVNWLDTETGETGEQKLVHASGDAKQFYQKLAAPGLIGMEATGNSQWFVELVEDLGHEIWIGDAAQIRASYVRKQKTDKRDARHIRKLVVEGRFPRLWTPDREQRDLRQLVLHRHKLVMIRSRVKNELQHLSLNKGMQRKGKLWSQVGQKLLRELPLKPWASCRREDLLGLLAMLNQQVGTLDDAVQHAAEENPQARLLMTQPGVGPNTALAYVLTMGDVSRFARGKQVASYLGLIPREHSSGGKQKLGVITKQGNRMLRSLLVEAAQIAVRFDPGMKKQYLHRCHQKPKGVAKVATARQLAVRLYWMLRTNVAYPEIVRIESSPRVALVGAS

SEQ ID NO: 133107 - protein, 318 aa, unidentified
MTDQLPSLCFIGVDVAKDEVVAGVHGSTSSEAVENKTAALKRWLKRCPPGACIGLESTGRYHEQLAALAYQAGFTVYLLNPRDVRHYAQALGKRAKTDHVDALLLARFIAHEHAELHPWQPPTPAQRQLDTLLKRRAAVVKAQGMLRQTLAHLGTLEAEAKVAMTGIDALLKAIDRKIEQALSTQESIKAEAACVQSIPGIGLLSGAGLLNLFRRLPSARADAIVAFTGLDPRPCDSGKKRGTRRLSKRGPGELRRLLFNATMSAAKTAVWKPYYERERAKGLPTTAALICLARRLVRIAFALFRKGALFDPAMVKIA

SEQ ID NO: 133108 - protein, 331 aa, unidentified
MDVCFVGIDVSSKTFNVCIQRDQKLIEWELPNTPKGYTKLLKDLNKYKVAVRIGMEATGVYHLNLAFYLSQAKHTEVMIINPFVMHSFAKSIAPRGKSDRKDACMILKYLERMPFESFIPPEQELLHLRSLTRRIEQITVDVRREKNRLHAMHSASIVSPFVLAQCKQSISDLKSSIVELQIEMERLIRASSSSKTASQVEILQSIPGIGLRTAIVLISEIGLLPEGLTVKQWVAHIGVDPCQRQSGTSVHTRSRISKRGNKHIRRALFLSAMSASQFSLPISEFKNELVARGKSKKQALVAVMRKLIHCIFGILKHQTPFDPSLFRGRTS

SEQ ID NO: 133109 - protein, 457 aa, unidentified
MTLPPPAFAGLQTGNRGTRRRAPVSDRPGASLAAAGPSLPLPLQGAELSLALPEALFFTGIDWAEVTHAVCVTDAAGKITAEFTIEHSADGIAMLIRRLARHGDPADMPIGIERPNGRLVDLLLEAGHPVVPVSPNAIKTWREGEVLSGAKSDAGDAAVIAEYLRLRQHKLRVATPYSGETKALRTVVRTRDDLVAMRVAATNQLSALLGAYWPGAKAVFADVESPISLAFLTRYPAPALAARLGEKRMTAFLVKNGYSGRRTAAELLARLHAAPAGTADETLTEALRDAVLALVAVLTALNTGVKDLGRSAAAHLGEHPDGKIFTSLPRSGHADWMLAEWGDCRQAYDGPDAVAALAGVTPVTKESGKHRAVHFRWACNKRFRKAMTTFADNSRHASPWAATIYNDARASGKDHPHAIRILARAWIRVIWPCWLHGTPYDPARHGAAVALTKPIAA

SEQ ID NO: 133110 - protein, 329 aa, unidentified
MKKKHSIGVDVSKMTLDIVFKNNQKHIKISNDLKGFKSFTKEIKSLGLPLEDCLVVMEHTGVYSYPFENFLSKMGISFSKVPALQIKRSAGIVRGKNDKADAKQIADFGDLHQASLKLCVCSEKTNYLKSLLSLRERFVTQKAGYIASLKEQEAFLGINKSSPLLKTQKRMIAQLTDQIEEIETEIKKVISEDEAMKKNYELLVSITGVGFVVACSMIVFTNNFTMFSDARKFASYCGIAPFDHSSGTSLVRRPRISHLANKKIKCLLDLAARCAINYDLELKAFFKRRTESGKNKRSTINIVRNKLVYRMFAIVKRETPFQKNYQNAA

SEQ ID NO: 133111 - protein, 394 aa, unidentified
MSMFAGIDWGGAHHQLAIVDDVGDVKVNQRFAHTSDGVGELLAVLDALGTATPVAIERSEGILVEALQLAGHLVFPVSPRVSARARERYQAAARKDDRFDAFVLADTLRHEHGRWRPLAIPSPTLAELRVLVRDRRRILENQRGVESQLRSALEAYHPAAVKLFSSVDRSITLAFVRDYPTPEMATRVGSARMQRFLDRHSYTGRVPAEVLVDRLRTHLLTASAGSVEGHRFGALALVDQLDLLNRQLKAFDAHLADVFAAHPDNAIFASFPAAGPVIAASLLAEIGEDRDRLPTVEVLLAEAGLAPVTHSSGKVTRVRLRRACNLRLRDTFNWWAYTLKRIDEPSRVTYLAALDRGQHSHRALRTIGARWARILWRCWRDHTTYDPDRRTATL

SEQ ID NO: 133112 - protein, 454 aa, unidentified
MAQGSGLTRGDRNRNRRIEAVREAVRRDQAVLAVDLGEDKQVAVVLDHEGRALARKVVKAKAHQLADLLEWGAERAVKAGFAGLTVACEPTGHRWKALMGLADSAGHGFACVQSLAVARAREGDDYTRDKTDHRDAYLIGKLVIRLDCYLPERADEDWARLRHLGARRFALVTDVTSCMQQAGDLLGCAWPEPLAAARRPLESVTWLAGMAVITSRCCGQPSRLRKMGYEKFLAAVRRELPRWGGKFVRHSIVQALWEALAGTGGVAAQRPGALERLHLLLEDWRVLRARLADAEERMTGLLDELGLTELVTSIDGVSALSGAVMLAETGDLSRFTSGRAVVKHAGLNPSEHTSATINGQTRISRRGRPALRSAAWRAAWGALRHNKVLAAKHAHLTGRDANRLADGQARTACAATLLRWLWAVITTRTMWDARIAAGEIPAPRRAAETIAAAA

SEQ ID NO: 133113 - protein, 348 aa, unidentified
MAHFVGLDVSVKETSVCVVDDAGKVILEQKVPTEPADIIALLASLGVPYGRIGIEAGPLSQWLVNALTAAELPVICVETRHMKALLTAQQINKTDRNDARGLAQMMRVGLFKPVHVKTLVAQEQRMLLTSRKLLPRKLLDVECDLRGTLRNFGLKVGVVSRSRYEARVHELVEGFPRLAAIAEPLLNVRRVMRQQLAVLHKMLLDTVRDDPVCRRLMTAPGVGAVVALTYRATVDQPQRFVHSRAVGAHVGLTPRRYQSGEIDYDGRVSKCGDALLRTMLYEAAHSLLTHDGKWSWLKAWGARVAQRRGIRRAIIAVARRLAVVLHRMWVDGSEFRWSKDNTAVPAVV

SEQ ID NO: 133114 - protein, 436 aa, unidentified
MPGNEGVVHVEEITEEPVQVVARVCAIDIGKAGLVACVRVPHDTRPDRRVQEIREYTTVTPALLELADWLRVERVELVAMEATSDYWKPVFYLLEAEGFECWLLNAKHVKNVPGRPKTDRLDAVWLAKVVERGMCRPSLVHPKPIRQLRDVTRYRRSLVREQTREKQRLEKTLEDAQIKLDSVISDLHGVSGRQMMQAMIDGQRDPKVLAEMAHGSMRRKIPQLREALTGHFDDHHAFICATMLRRIDALAADIANLDTRIEELIAPFAAVVEKLDEVTGIGVQSALEIIAEIGVNITVFPTAAHLVSWAKFSPIDAQSAGRKKANSTGKGNPWLAATLGEVVAGLSRTSTFLGDRYRRLARRRGKKRAVVAVGNSVLTIVWHLLTDPDARYQDLGPGFHESRIRKQRRQRDLIRQLEQLTGQKVDLQPLPQPAIA

SEQ ID NO: 133115 - protein, 364 aa, unidentified
MGYDDRSVNQIVYPKHERRPSMQFYAGIDLHTRNSVVCVIDQKERKLVWATAPNDLPSILSLLEKVPRRPSVAIEATLNWYWLVDGLEEAGYNVKLAHTMGLYMITGAKVKTDRRDAFSLARLLRLDAIPEAYIYPKDTRPIRDLLRRRTRMVRLRAEAYVAIKRKFQQYGLPCSDKAIQGVDEEELLRSFTHPGIRAGLGMEFERIRLYSRELKTVEKYILSTVKNKPIFEHLQTIPGVGKILALTIYYEVGDIARFASAKQFCSYARVVPGLAQSGDVIRRGRGSKQGNPHLKWAFNQAAAISVRHYGYVRSFRQKHLARRRSKARRLISLSIVAHKLAIAAYHVLRDDVPFNKELMFGKAS

SEQ ID NO: 133116 - protein, 386 aa, unidentified
MQKLNDFSRSLIALEPDGTLIAVIEMSLSSWLVAGIVPGVERQPLKKLTVDESALLKLLHRWREEAEKAGCRIERIVVAFEAGRDGFWLARWLKARSIEAHVIHAASVAVSREHRRAKTDRLDTQLLKRAFLGWLRGERDHCKMVDIPTIKDEDAKRPNRERENLVSEQSRIINRMKAALIRLGIRGFNPKLKRAAGRLEDLRTPEDEAIPPNTLAELRRDMERRRLVRDQIRQIEEARLERLDHAPGDGPHAMVRLLARVIGVGIETADMLVHEVLSRNMRDRRAVARYADLTGSPDESGRKRREKGLARSGNARVRRGMIQLAWRFLLHQKDSALTRWFRARTENARGTRKPMIVAMARKLLIALWRLVREGIVPDGVVLRPAQ

SEQ ID NO: 133117 - protein, 446 aa, unidentified
MKKKEVTSTKAQKAVLKKINYYVAGIDLGSEEMFVAIIEKEVRKFSTFTRGIEEAAAYLKTEGIEKIVMEATGVYWIPVYEYLEEKGFLISLVNGAHAKNVPGRKTDVLDSEWLRELHTYGLLRASFIPDEKIRELRYYVRLRDDHISMGATHINIVQKNLDMMNIKLHKVIDSVMSKSGLLIVRAILSGERDSEKLWDLCKDYINDKKKTDVINSLKGNYREEYLFGIKQALEMWDHYQVLLKQCDLEIEKILSQMTSNQENPQGLTSPKKLKKNKPEIEDFHLLMTKLTLGKDTTAIAGINDYSALKIIAETGTDLSKFKDEKHFTSWLGLAPSAHQSAKKKKRKGHRHCNRAGMIFRQLAVNVGNGKHTALSSFYKRIRSRAGKMIAIKATARKIAVYFFNLLTKGFAFVEEGIKKYEKRYSVQQENFLQRKASEMGYELVKI

SEQ ID NO: 133118 - protein, 319 aa, unidentified
MKYTPIGVDIAKHLIQVHFINEHTGEVVDKQLRSKDFLTFFSNREPCLIGMEACGGSQHWACELAKLGHKVRLLQARFVKAFVIGNKNDVMDARAIWMAVQQPGKEIAVKTEEQQSVLVLHRSRRQLVKFRTAQVNALHGTLLEFGETIHKGRAAMDRELPTALERMRVKLPPYLIALLEEQYNRLSELDSLIDGIEKQLISVAKQSETCKRLMEIPGVGPLIATAAVATMGEASAFKSGREFAAYVGLVPKQTGSGGKVRLLGISKRGDTYLRTLFIHGARAAALLAKEPGPWITELKKRRPTSVAIVAMANKLARTV

SEQ ID NO: 133119 - protein, 349 aa, unidentified
MILVGCDLHTRKQQVALLNTDTGELRDQELSHVGDDVERFYAALSPPVTVGIESTGYSLWFHALLQRLGHTLLVGEAAKIRAMVVRKIKTDRRDARHLRDLLKDNRFPVVWIPDPTTRDLRALVKHRLRLVRIRTMVKNGLHAIALNQRLALGPSLWSRQGLAQLQALVLLPHTRRRREDSLELLHWLNRHIDALDLHVATAAAADPAARRLMTHPGVGPLTALTTVLVLGPVGRFPSSKHVVSYIGLAPAISASADKYRLGHISKQGSALLRWVLGQAAPLATRGDAALKRIYFAVLRRRGRPKAKVALARRLLIRLYVMLRDQIDYDEFCRRGRTRREGLELARTPV

SEQ ID NO: 133120 - protein, 321 aa, unidentified
MDSPPSRASYVGIDVSKARLDVALLPSGKSFAVGNDEEGFDELLGRLEGPSDSALVVLEASGGFERPVAAALAASGIAVCVLNPRQTRDFARATGKLAKTDQLDAKALARFAEAVRPAPRTLPDAEAEEFRNILARRRQLIQMMTAEKNRLGATTSEAVARRIRAHVRWLEKELSRTDRDLDETIENSPTLKENEALLRSVPGVGPVLCRTLLAELPELGSLSPKELSALVGVAPLNRDSGTLRGRRAVWGGRGRVREALYMGALIASRFNPHIKGFYERLVEAGKPKKVALVACMRKLLTILNAVMRERTPWRYPHALNS

SEQ ID NO: 133121 - protein, 387 aa, unidentified
MGRRKKKVPAAVVGFDVGKSFHWAFGVGAGGEAVLSERVDNRPAAIDRVLAEAGAGALVVVDQRRNIGALVLSRARGAGMRVAYLPGKAEKQAREMFPATAKTDELDAEVIARTALGMPWALREVPEEDERRASLRMLSSQRSFCVKGRTESLNRLRAVLLEADPALEAALDPSRRWQLEVLAALGSAHGCAAAGEERYRRLAGARGGREDTLWEVLSASAASRPEVRAEGALVSMLAGQVLARDAEVDALDAAIGELLEGDATYEALLTVPGVGPRTAAALVTSVDVAMFRSHDELASYCGIAPADSQSGTSARSTRPKRGGSKPLKNLLIFSCNSLIGTKNEFGRYYDECRGRGMRHNKALKAVARKRLKVIYAIMRDRVPYRAA

SEQ ID NO: 133122 - protein, 415 aa, unidentified
MDVLHDRCAGLDIGKKDLKACVRTPSPTGRRSRRQEIRTFATTTNALLELWDWLVDQQVTLVVLEATGDYWRGVYYLLEDTLNVILVNAAHAKGLPGRKTDVSDSAWLAQLGECGLLKASFVPPEPVRHLRDLTRYRTALTVERSREAQRLEKELEDAGIKISSVATDILGVSGRAMLTALIDGEDDAQVMADMARGRMRSKIPALVQALTGNFGEHHSFLCRMHLTRIDELSATIEELSARIDQEMRPFAPQIERLVTIPGVKKTTAEVIIAETGSDMTRFRTPGNLASWAGVCPGHHESAGRQHSGKRRHGNRWLGGALGTAAMAAGRTRERTYLGARYARLVPRLGKQKTIVAVEHSILTAVWHMLTDNVDYHDLGGDYFTKQDPERAMRRIIRQANALGLTVRFDPIPDVA

SEQ ID NO: 133123 - protein, 412 aa, unidentified
MSLALPEALFFTGIDWAAATHAVCVMDAAGKIMTEFTIEHSADGIAALIRRLARYGDPADMPAGIERPNGQLVDLLLEAGHPVVPVSPNAIKAWREGEVLSGAKSDAGDAAVIAEYLRLRQHRLRVAAPYSDQTKALRTLMRTRDDVVVMRVAATNQLSALLDAHWPGARAIFADVESPISLAFLTRYPTPAAARHLGEKRITAFCASQGYSGKRPAAVLLARLRSAPAGTTGPALTVTLRDAVLALVAVLTALNTAVKDLDRSAAARLGEHPDGEIFTSLPRSGQVNAAQMLAERGDCRQAYDGPDAVAALAGCTPVTKQSGKHRDVTFRWACNKRFRQAMTTFAGNSRHASPWAAKIYDDARAAGKDHPHAVRILARAWIRVIWPCWLNHTPCDPARHGAAAALAEPIAA

SEQ ID NO: 133124 - protein, 370 aa, unidentified
MAKRSMFVGMDVHKESIDISVADEGRHGDVRRYGVIAGDLDALAKVMRALRAPNRVLHFVYEAGPCGFGIHRYLTTQGEDCVVVNPSSMPKRSGDRIKTDRRDGEALARLHRAGELTPIYIPTADDEALRDLVRAREDAVGLSTQAKHRVKAFLLRQGRRYPGRAGWTRPYRRWLADLSFPRAPQHIALQEYRDTIDETERRVERLTDQLRQLAPAWRWAAVVEALQALRGVSFVTAVGLVAEVGDIRRFTHPRELMAYLGLVPSESSSGPRVRRGRITKAGNPHARRLLAEAAWAYQGMPRIGRQMLSRQEALPQSICDIAWKAQLRLTARFRRLVARGKAKPKVATAVARELTGFIWAIAKQVQPAAT

SEQ ID NO: 133125 - protein, 344 aa, unidentified
MEYFAGIDVSLRSCALCIVDGKGKVLLERELPCEVSDIAEYLGTFPHPIERVGFEAGTMSQHLFHGLKTEGFDVVCMEARQVNAALSAMRNKTDKNDARGIAQVLRTGWFSPVHMKSREAHGVRALLSTRKALLKKTMDLANEVRGLLKIFGIRLPMTVKHGSFDGVVRPLIEMDEVLTHALVPLLDARVVLYQHFLELDRRVKRAASQDEVCMRMMTVPGVGPIASLTFKAAVDDPTRFKRSRTVGAHFGLTPRRYQSGEHDNPGRISKAGDRDVRATLYAAANALLMRTMAGSQIKSWGMRLVRTKGRRRAVVAVARKLAVLLHRMWVDGTEFRQDQVGGKA

SEQ ID NO: 133126 - protein, 436 aa, unidentified
MKKHLPVLDPLAAFIDVGSEHMHVSVGGDVPVVFGTVTSQLHALRDWLLGQGVHSVAMEATGVYWLPVYGVLEAAGLDVRMVNGRQTRNAPGRKTDMHDAQWGATLHMHGLLRAGFVPTADIRRLQDYLRLRADHVSQAASCVQLMQKALERMNIKFHDAISDLAGVSGMAVMRAIVAGERDPAALLALCGLQIRRTKAELVTESLRGTWNEEHVFALEQALQSWDHYQRLIVDCDRRIQSILPPHDPTRPKLPKTVKRGGTNAPHIDMLREILAQMCGGRDLTIIPAHTHYSALQLIGETGTDLSKWPSEKHFTSWTGLAPGNHDSGKRKGHVKRTRNRAGKLFCMMATSLVRSKHIALGAFYRRLAMRRGGLVAIKALARKLAAWYWRVMVKGDDYVEKGIAHYEEQVRKQKERALNRLAKELGRQLVPTAQPA

SEQ ID NO: 133127 - protein, 316 aa, unidentified
MSETGCFVGIDVAKDRLEIAVRPSGLRWECANTEAEIMAAVERIQALEPTLVVLEATGGLEVPVAVALTSRNVPMAVANPRQARDFAKAAGILAKTDRVDAHVLAHFGEAVRPTARPLPDALQRDLGALATRRRQLVEMLVMEQNRLTRASPRVRPQVKRHIAWLKQEVHQADTDLGSLLRQSPVWREKDQLLQSTPGVGRVLSLTFLASLPELGTLNRKQIAALVGVAPFARDSGTLRGRRQIWGGRAPVRAVLYMATLTAIRRNPVLRDLYHRLVSRGKLKKVALVACMRKLVTILNAMLKRRTPWAPQPLLSP

SEQ ID NO: 133128 - protein, 322 aa, unidentified
MRYIGIDVSKATFVVAYSSDKGGEIRTFNNTTTGIKQFIGALPKDGSIHCVMEATGNYSAMLLYLLNVAGIAVSMENPLKIKNFARAMLSTVKTDKIDARLIALYGEKMNPQPFKVQGEAILRLRQKRTVIRQLTKQITAMSNLRGSLACLPVPDKGATHTVDETIEFLEKRRDRLQSELTDLVEVEFSRQLALLTTIKGIGITLATALIITTGGFTYFQNAKQVSRYLGICPTYEQSGTSVNIRGHINRNGDAYTRGLLYIAAWPASRFNAQCKETYTRLRQNGKPGKLAMIAVANKLVRQAFAVVAHDKEYIDGFVSNRP

SEQ ID NO: 133129 - protein, 345 aa, unidentified
METMYYIGLDVHKRTISYCVKDGSGKIHAEGAIPSTRFDLDRWMKTLPRPWTAAMEATLFTGWIYDYLKPHAAAVKIAHPLMLRAIAAAKKKNDRIDANKICDCLRCDFLPECYMAPTETRERRRTLRYRNLLVRQAVQIKNKIAVLLMEAGVSYNKQKLHKVGYFRELLATNQDIDEGLRSLLRLCRETVVRLGKTESALVRSLQRDLLLVERVERLMTIPAVGPITALTWALEVGEVSRFSSIKKAISYCGLCGAEKSSGNTIQRTPLSKQRNKHLQTTLIEAAKMALRNSPDLAIIYDREKQKGNANRATLAVARKLVAYLVAVDRRKKDFLTVEKENRTAA

SEQ ID NO: 133130 - protein, 405 aa, unidentified
MWYAGIDWADQHHDAVVIDEAGKRVGTTRVAHRAAGLDTLVTFLKGIGDIAAHPDHLACIVETNRGLLIAALLDAGLPVYPVNPKTVDRHRKPAGAKTDAIDAYLLARTGRSDRADLRRLTPDSPLIAELKALTRDQDTLIQSQTRLVNQLTACLKAYYPVALDLFGKLQQPTTLAFLQAFPTPEQARAATVEQIATVLKAAGHATAEVKARQIHDRLSQPQLRGDAVVTRTKTRLMLTLAAQLRVLLPEIAAYDDEITRLFRLHSDSRACASLPRAGTRLAPRLLAEWGDERGRYTDAASVQALAGTSPVPFQSGNFAKAHRRYACNKPLRNALQQFAWQSTQKEPWALTDYQRKRRDGKSHAMAVRALANQWVRLIYALWTNHDTYDPATFLAAQQAHAPRAA

SEQ ID NO: 133131 - protein, 422 aa, unidentified
MNTLGNNSFTAFVGIDWADATHDVCIQGGGDEHREFARISHQVDAIDTWAQSLYRRFGGPIAVALELSKGPVVYALQKYDFVVIFPVNPTTLAKYREAFTPSGAKDDPTDAELALDLILRHPDRFKPLAPQSVEMRTLVSLVEQRRRLVNDRVRITNRLRNTLKQYYPQALQWFDRIDTPLFCDFIERWPTVIQVKRARRTTLATFFNKHNMRFVSVLETRLQSIKTTTPLTLDDAVITPHRLQALVLVDLLRATLVAIKRFDAAIADLAPKHADYALFDGLPGAGPSLAPRLLVAFGEQRERFSNAAELQQYAGVAPVTERSGNKHWVHWRWQCPTFLRQTFVEWSAQTINKSFWAGVYYQQQRDKGCSHQAAVRALAFKWIRILYRCWQSRTPYNETVYLKALQRKGAPLLKQADATVLT

SEQ ID NO: 133132 - protein, 345 aa, unidentified
MELFTVGIDLGKTTFHLVGMNQRGEVLVRKRFSRLQLLHFTANLKVDLIGMEACGGSHFLGRALREQGHEVRLIPAQYVKPYVKTNKSDYIDAEAIAEAVGRPTMRFVPIKSDDQLDLQSLHRVRERWVMRRTAVVNQIRGLLLERGITLRKGRRYVDAALPEILADATSKLSGALRVLLMELKQELAQLAEKIDRSDDAIAQIARENEACRRLVAIPGLGPVTATAIIATIGNGAAFRKGRDFAAWLGVVPEEHSTGGKQTLWKIPRRGNQYLRRLFVQGARAVMQHKGRQSSGLSAWLMQLTARTHHNIAIVALANKLARMAWAVLAKNEVYRPPLLNVTASA

SEQ ID NO: 133133 - protein, 348 aa, unidentified
MKYYIGLDAHSTTSTFAVVDENGQCVLRETVKTAEQSLVHVINRVQGERHMTFEESSISQWLYVLLKDKVDDLLICNPTYVAKKQGAKTDFRDALHLAQELRTNHLQPVFHDTSHWMEIRTTVSGYLDIVEEIVRFKNRLKALFRAEAIQTDENSFYKNQTRVKELKNPSARFVAEKLFNQIEFLEAEKEKYKELFERNRKKYKPIRNLMTIPGISIIRANIIAAIVCQPARFENKHRFWGYCMLVRHIQISGGKIYGNKRFFGRRELRNVFIGAAENVMRLDGELRDRYDVLRAKGIDHKDAKLNLARQIASIALCLLKNNDRYKENYGEYLLERKQLRKEFFAQTV

SEQ ID NO: 133134 - protein, 338 aa, unidentified
MSRQYVGIDLHRRRSVIVRMTEAGETLSTVSIDNDPVALALEVARAGPDPEVVLEATYGWYWAADVLEAAGAKVHLAHPLGVMMFSHQRVKNDRRDATNLAELLRMGRLPEAWIAPPELRELRELVRYRAKLVALRSGLKAQVHAVLAKEGVHVPMTDLFGVAGNHLLDSLQLAPAFDLRVRSLRELISVYDSQVVAFERLCARQLAGHPGYRAIQAIHGVGRVFAALFVAEIGDVTRFAGPRQLVSWAGVTPRHHESDTVVRRGSITKQGSKLVRWAAVEAVTQARGTSKIQLDRHRIAERRGTGIAKVAAARKLLTLVYYGLRDGEIRCLTRPQAA

SEQ ID NO: 133135 - protein, 443 aa, unidentified
MTRRCFGLDVHRDFAQVAIWQDGLVRQAGQIAMTAEALKVFADSLAPSDEVALEATGNTNAIVRALRGRVARIVVGNPQKTRAIAEAKVKTDKVDAEILAQLLAADYLPAVWVADEATQARRRQVARRAHIVRQRTRLKNQVQAVLHRNLIPRCPAADLFGRKGRAWLAEQPLPADERQAVSALLRQLDFHGEELRLIDRELARVALGCQDTKRLMTIPGVDVTVAMSITAAVGDFQRFCSPNKLVSYLGLNPRIKQSGGQPASHGRITKQGRAHARGMLVEAAWVAVKTPGPLRAFYERVRARRGMQIAVVATARKLAVLCWHMIARGEDYAFARPSLTAKKLRALELQAGMPARRGQKGRAAGYSLKDVRAREKQMAEHAERAYRQLVADWQAKAPQPRVGVAAANGARLSRPSNGATAARQASAPEPALRSGVDHAHPRR

SEQ ID NO: 133136 - protein, 371 aa, unidentified
MKKSSMFIGLDIHKDSIEIAIAEAGRDGEVRSYGGIDGTLDALDKVIRKLVSKGCNLHFVYEAGPCGYDVYRHLTAQGFDCVVVAPSKIPRQSGNRIKNDRRDAQMLARLHRAGELTAVYVPFVEDEAMRDLTRAREDAKAVEKKAKQRILAFLLRHGHRYSGKSSWSRAHFRWISILKMPHPAQQIVLQESLDALAECTRRVDRLTEQIQTLSPQWRLFPVTQALQSMRGVSLIVATTTIAEIGDLTRFGRPAELMSYLGLVPSEHSSGQTTRRGSITKTGNGHVRRVLIEAAWAYRLPARVSRKLLIRQEGLSQEVCAISWKAQLRLCARYKRFTANGKSHQLVVTAIARELCAFMWAIAHEVQGPVKM

SEQ ID NO: 133137 - protein, 350 aa, unidentified
MIIIGADYHPGFQQIAFVDTETGELQERRLQHREEAENFYRDLAAQGMKVRVGMEASGQARWFERLLAELQFELWIGDAAEIRTKRVRKQKTDRQDAQLILKLMLKDDFPRIWVPSWENRDLRQLLWHRHRMVQARTRIMNQLQAVALNEGLRCKKRLWREARREQLEAVRLAPWASRRRRDRLELMDRLNPTITDLTQTIEQEVEKCPEARRLMTHPGVGSLTALAFVLIIGRAERFQCGKQIASYLGLVPLEESSGQRRRLGHITKQGNSLLRFLLVEAAQVSARSIPEWRAKYFHLAMRRGRKIAKVAMARRLAVRMYWMWRKGWDYEQLAKFGSHAGQPGHRDGAR

SEQ ID NO: 133138 - protein, 410 aa, unidentified
MRIIALDVHRTFAQMAVLEDGKIRNAGKIDLEHNRLLQFAKRLKPDDEIIIEATGNTSAIVRLLSPFVGRVIIANPILVRAIAWAKVKTDKIDAAVLAKLHASGFLPEVWMPDEETETRRRVVAERTQLVSQLTRLKNRIQSVLHANLIPPYKGVLFSKRGRAWLEAQPLAEDQRRVVLRHAGELDRLGSELAEVDKSLAQKALEEPRVKRLMTITGVNATVAMSVLAAIGDIHRFSSPEKLVSYFGLNPRVRQSGDKPAYHGRITKQGRAHARSMLVEAAWVISGVPGPLRAFFIRIRDKRGKHVAAVATARKLAVILWHMLTKDEDYAWNRPALLQWKLRKLELKAGHPSRRGGRQKGSAAAHSNKSVRAREREAIGNAEEEYRRFVATWKQQSPKGCSGATNEVRRS

SEQ ID NO: 133139 - protein, 467 aa, unidentified
MQNSREKTKQPDHEIEVEGMPVVRANVAGMDLGSKQHWVCAPKKEQPGREVEHFGATTPELEKMAEWLKERNVESVAMESTGVYWIPPHEILERHGLEVVLVNTRELARVPGRKKTDRADCKWIQRLHSCGLLTGSFRPSEQICMLRTLVRDKGNLVAEAGDWLRRMQKSLDQMNVRVHRAVSDIDGVTGLAIMRAIISGERDARKLAQLRDPRCRKSEEEIAQQLSGHWRADHLFSQQQALKMYDAIQERIAAYEQEILRKLAEMEREECRGQQAPKPKSPQKATAIKKRGQEPMRQALFRISGVDLTGIDGIGVETVQTVISEYGPDLSRFPTEHQFVQHITLAPHRPTSAGKPVKTRKRRGGASTRVAGVLRMAALSLRHSETALGAYYRQIARRTGGDVAVFASARKLATLIYRLLRWGQPYVDEGAAAYEKRYQEARLKSLAAAAKSLGFQLAPKPSEPNPA

SEQ ID NO: 133140 - protein, 405 aa, unidentified
MFVGIDWASTEHAVCVLDQTGTTVRAFRIPHSAAGFDDLVARLRRLGAPAGLPVALERPDGRLVDRLLEAGHPVVPVRSNAIKAWREGEVVSGAKSDAGDAKVIAEYLRLRHHQLRTLTPFSDATRALRAVVRARGELVRQRVAAINQLTATLDAFWPGAKAVFPDIEREIALAFLQRYPTPESAAGLGEQCMAAFLTRHRYCGRTPAAELVARLRAAPAGLAGGAEATARRDAVLAFVGVLRALNQAIRDLDRSVIARLGEHPDSKVFASLPRSGQINAAQMLAEWGDCRDAYQSPEAVAALAGIVPVTKQSGKHAAVSFRWACNKRFRNAMTTFAHNSRLASPWAAKVYADAIARGHDHPHATRVLARAWVRVIWRCWIDQIPYDPAKHGAAQKLTEMATSAA

SEQ ID NO: 133141 - protein, 343 aa, unidentified
MGEVSTIGLDIAKSVFQVHGVDVDGAVVIRKRVSRAKVLEFFSTFPPCLVGIEACPSAHHWSRELQALGHTVRLMPPSYVKAYLKRSKNDANDAAAICEAVTRPSMRFVPAKSEQQQSGLMLHRSRQLLVRQRTMLSNAIRGHMAELGIISAKGRNGTAELLKIVANEDDDRLPAVARFSLDVLARQYVTITAEIGAIEKRIHAWHRSCEQSRRLEEIPGIGPIVATALVAEVGDWKAFSSGRNLAAWIGLVPRQHSTGGKERLGGISKQGNRYLRWLLVTGAMAVIRYARQRGTKRLWLARIMERRPIRVAAVALANKIARMAWAMMVRGECFKEPRLLPAA

SEQ ID NO: 133142 - protein, 362 aa, unidentified
MNESAKLLPQKYMEGDKVHVLGIDVSRGKSNCALLHDHTVIKEFQIIHNKSGLAKLKSIITSDLPVMAVFETTGIYSRVLTRFFSEEGMNYLEINPLESSIRMAGLRRQKTDRSDAVKLALLGIDQKSLIHGRRPYSRPYEQLHLMAHRYLEITKERSRIINHLHAALDQTFPELNDIFNPIRSVLGLTFVSLFPHPDFLTGYIPGTMAKQIIGLVSPKIHSDLIVRRCNEVWQAGQLSYPAQPANSFLTNQIHSYCEEIQRYNQAHDLLKRQLITYAKTFPEFKLIASIPGAGEISTALLLGFTGKIARFPSYKQLNAYVGIDLRRTQSGGLKEADRINRAVKFLVLVVTPMPVFYCLIPS

SEQ ID NO: 133143 - protein, 349 aa, unidentified
METILSIDLGKNKSVACIFDKKSFNAKFKTIKTTAAVLRELVDKVKPDIVLFEVGSSAGWIADMLNDMSVPFKVANTNHPAWKWRNNSKKTDRDDAYRMVTMYLNNSLPTVYIPNKEVRQKRSLVNYRQSLVGRITQSKNTIRSILSSVDISMPSGKKGWSQKSLEELKKIAINIQEIGSDEDFWQGELYAELEVLEKLCEQLKNITAKLNSLAEKDENIQLIKTIPGVGNRVAEAVVAILDDPHRFKSAKQVGSYAGLVPRCYQSGQMEKNGRITRQGDSLIRALLVQVSWLGLRYEWMREIFDRVQKGSKSRNKIAIVALARHILVRCWAMLRDGSKWHGSVAMVKK

SEQ ID NO: 133144 - protein, 343 aa, unidentified
MKNHNTIGVDLAKNVIYVSVLSSRQKLLQSKEVNRSKFKQFLANQKPAMVAFEACATAHYWSRFAQSHGHTTKIIPALAVAPFRQGHKTDKNDALAVAEAANRPNIKEAPYKTINQQAVQSIQRSRELLVSDRTALSNHIRGILLEFGFAIRQGYSALYQHVPDILEDGENELPDSYRATLNMLYVRLRDLRENIDFMDKQIATVIKQNPACRQLTKMEGVGPIGAILLFSSLGTGEAFNNGREYSAYLGLTPKQFSSGGKTNLVGISKHVANKRLRSILIQGARAYIHKAKLGNTVKDQWLLALIDRAGTGKAAVALANKNVRTAWALLTQGTEYQKTVLIV

SEQ ID NO: 133145 - protein, 331 aa, unidentified
MMDVYYAGIDVSARTLDSALALPDMPVRQGHFANTPSGHRQLIKWLTKGGRSVRVCLEATGLYSLGVALALHEHRHCEVMVVNPKAIKHYAQARQQRAKTDVLDAQLMLDYGQRLPFVPWQPPAPEILHLQAITRRISQLKVESTRERNRLHADAYRTGMTDLIKRDIQVNIRHLERRRARLEAEGQALVLAAPSLCAPFQRLLSIPGIGETSALRLLAELAVLPAEMKPPQWVAHAGLDPRPHESGSSVLSPRRITKAGNKYLRAALYMPALTAIRHQVNIKAFYDKLVAAGKKPRQAITAVMRKLLHAIWGVWKYDQNFDGQKFYKIAA

SEQ ID NO: 133146 - protein, 422 aa, unidentified
MLEETHDTEEIIGRVAALDIGKAELVCCVRVPSAQGSGKRAQEVRTYPTMTRSLLVLADRLRELGVTRVVMEATSDYWKSPFYVLEAHGLEVWLVNAKDVKHLPGRPKTDRLDAVWLAKVAERQMLRPSFVPPPPIRRLRDLTRYRADLVAVRTAEKNRVEKLLEDAQIKLSVVASDIFGVSGRDMMAALIAGERDPKALAQLARRRLRAKRSLLEEAFYGHFSDHHAFLLQTMLARIDQASADIATLEAHIEAEIAPFAQAADRLDEITGVGRAAAQVIIAEIGVDMGRFATPGHLVSWARFAPGVKESAGKKKGKGTTGHGNPYLARVLGEAAAAAGKTSTFLGERYRRIARRRGTKKAMVAVGRSILIIIWHLLSDPDARFHDLGPGFYDTRIDADRKKRNHIRQLEALGYTVTLQPAA

SEQ ID NO: 133147 - protein, 395 aa, unidentified
MFIVGIDIAKRSHEAIIIAEDGQVVRKAFSFRNNCTGYNLLLEQVRRLTLVKSQIVFAMESTAHYWLALYARLLKDGYTVMVLNPIQSHSLRELYIRKAKTDARDSLIIADLVRFDRCKASNVPQDKILALRELCRSRAYLVDMAADLKRKLIALLDRIFPEYESLFDSVFSKASIAVLRKYSTPQKVKNANLRKLTDILMESSNGHFGEWKAHQLKEAACSSFGIDDSGGVYSTLLGMFLEQILSLTAQADSLEKQISVFFQEFNNPLTSIPGVGTVLAATSLSEIGDITRFSSADKLLAYAGLDPSVKQSGEFKSNQNRMSKRGSPYLRRAIWLASTVAVHRDPMFQTYYEKKISEGLHYMNVIGHVSRKMTAVIFAVLRDGQPYQPILQSAG

SEQ ID NO: 133148 - protein, 343 aa, unidentified
MKIIRVGVDLAKSVFQVHGVDRDEKSVWRRKLGRNNWLEILLENIEPGCEIGMEACGSAHHWARKLQAQGYTVKLIAPQFVKPYVKSNKNDANDAEAICEAMSRPSMRFVSVKTVEQQDTQAVHRIRSGLMEQRKAKANQVRGLTSEYGVVAPKELLHLRRAIPCWLEDAENGLSGRFRKLLAGLWHDLRELDHRIAELDREIALIAAADPVATRLQQLRGVGPMTATALVATVGDAHQFANGRQMAASLGLTPKQNSSGGKERLGGISKRGDAYVRCLLVHGARAMIRTAKAKDDRLSQWVTRIATTRHPNVAAVAMANKTARIAWAMIRNGTDYQPELVAG

SEQ ID NO: 133149 - protein, 372 aa, unidentified
MNYNTVYVGMDVHKESFTLCSMTIEDEKASHYQKTEADYKKVLKYLEFLRTIYGDNAKFICGYEAGCLGYTLYHQLLSQHVECVILAPTTMLEQRSRKRIKTDKRDAEIIAKCLAQHNYSPVHIPTATDEQTKEFLRMRDDHKLALKKIKQQILAFCLRHNYRYDGNSHWTAAHLRWLKSLQPEALYKEILDEYLLTYTTLSDKLERLDKRIEELASKDEYKEAVKKLCCFIGVKTHTALSVLVEVGDFNRFASAKNFASYLGLVPGENTSSDDRNLLGITKAGNRHVRLLLTEAAQSYARGQIGYKSKDLKSRQSGNSAQVIGYADKANERLRRRYYKMVLGQSKKHNVAKVAIARELACFMWGIMTDHIA

SEQ ID NO: 133150 - protein, 412 aa, unidentified
MKRIKFVGLDVHAETIAIAVAEQEGEIRSLGMIPNREESVGKLVKKLGPVEELRFCYEAGPTGYALYWQLTRMGAKCEVVAPTLVPVKAGDRVKTDRRDALKLARNYRAGELTAVWVPDAEHEALRDLVRAREAAKKDQLRARHRLSKFLLRQGRRPPVGVTSWTVKYLEWVKRDVHFAVKAQEATLLDYLHEVEHMAARIERLDSAIEEAVKVAPAKMRAVIEGLQALRGIAQISAVTIVAELGEVTRFSKARELMGYAGIVASENSSGERQRRGGITKTGNAHLRRVVVEAAWAYRHRPAIGFTLRKRQENLGEEVKEIAWKAQHRLHARYGKLMAKGKNKGVVVTAVGRELLGFIWAIGVQVEAEQKKSLRQALEVRGSQEAAWVAVEGHTKENPRYTYAVGLAPNPRF

SEQ ID NO: 133151 - protein, 338 aa, unidentified
MDKFSGIDLHSNNSVVVVSDEADRILYQRRLPNDAVQIRAALAPHREDLVGVVIEATYNWYWLVDDLMKEGYPVHLANPAAIRQYEGLKYSGDFTDAAHLAQLLRLGLLPEGYIYPAQERQVRDLSRKRMQLVQCRTAQILAIENLFSRQTGGQMQGERVKRLDETQVNRFGFAPDVSLAMQANLAVMQTLQDEIGLIEKRLMERVKLHPDYALLNSVPGIGPVLATTIMLETGTISRFAKVGNFSSYCRCVDSRRESNSRRKGAGNTKNGNKYLAWAFVEAANFAIRSCPEARRFYERKKRARNRIVAIKALAHKLARACYHMLREHKPFEVTRCFG

SEQ ID NO: 133152 - protein, 364 aa, unidentified
MERERTSVGLDVHARSVVACGIDDDTGEMFRARLAPQPEVILGWLRELPGPLAVVYEAGPTGFGLARFLTGQGVRCVVAAPSKLQRPAGDRVKTDAKDALHLARLLRLGEVTPVAVPTVTQEAARDLVRVREDVRGDLMRARHRTSKLLLRQGIVYAGGTAWTAAHHHWLGRQRFAQPALAAAYDSAVETVLLTADRRDRLDKAIVKLAEDPAWSPVVSRLSCLRGVSTLTAFGLTVEVGDWSRFTGSSIGAFLGLVPTEHSSGASRSQGSITKTGNTHARRLLVEAAWHHKRPYRPSKALRTRWDAAPAAARARGHAGNQRLHQRWQAFDERSKRPVVANVAVARELAGWCWSLAMLDDTTAA

SEQ ID NO: 133153 - protein, 310 aa, unidentified
MEATVVGIDVSKNTLDVHVHPAGEAFAVARNADGIDALIARIAPLGVHAVAVEATGGFETVVAASLGGAGLPVIVVNPAQVRAFAQALGKRAKTDPIDAAVIARFVEATKPQIRPLPDEDTRILADLVGRRRQIIQMIVAEKQRERQIPNRTLKKSAARLIKALEKELTVLDTGIDDSVRGSPVWREKEDLLQSVPGVGPVTARSLLAELPELGTLTRREVASLAGLAPWTRQSGKWRGKSFTGGGRAGVRSAIFMAAMVGARRNPVLQAFHQRLIAAGKPKLVAIVAVARKLLTILNAILRDKTPWQTA

SEQ ID NO: 133154 - protein, 402 aa, unidentified
MNAVGIDVSKGKSMVAIMRPFGEIVSAPFEIKHTASDINSLVELINSVEGESRIVMEHTGRYYEALAHQLSQANLFVSAINPKLIKDFDNDSLRKVKSDKADAVKIARYALDKWQNLKQYSVMDELRNQLKTMNRQFGFYMKHRTAMKNNLIGILDQTYPGVNTYFDSPARSDGRQKWVDFASTYWHVDCVRKMSRNAFIGHYQNWCKRKKYNFSQLKAEEIYGKAKELVPVLPKDDITKLIIKQAVDQLNSASTTVESLRTLMNEIAAKLPEYSIVMAMKGVGTSLGPQLMAEIGDVSRFTHKGAITAFAGVDPGVNESGTYVQKSVSTSKRGSSSLRKTLFQVMDVLIKTHPQDDPVYQFLDKKRAQGKPYYVYMTAGANKFLRIYYGRVKEYLASLPES

SEQ ID NO: 133155 - protein, 404 aa, unidentified
MNAVGIDVSKGRSTVAVLRPYGEVVASPFDVAHTGSELKALADFINKLRGETKVVMEATGNYYEPIARYLHEQNIFVSVVNPVLISDFGGNTLRKPKTDKKDSLKIASYALSYWHDLKEYVPQEDLRKSLKLLNRQYQQASKLKTMMNNNLISLLDLTFPGINKLFTSPSRESDGHEKWVDFVLAFPHCDMASKLTVKAFSKKYKKWCTGNSYYFTEAACEKIYDFSKDCISSVSSAESIVFAVIQAARMLNSAIENCHAIRLEMNRVAAQLPEYDTVMSMYGVGKAMGPQLIAEIGDPRRFHSRKAITAYFGYDSENNDSGQKVSKSNSMTKKGAGALRRTLFIIMQIMLKTKPVDNPVYDFLIKKQSEGKHYYSYMNAAANKFLRIYYARVKEVLTAAENST

SEQ ID NO: 133156 - protein, 420 aa, unidentified
MRNAGIHANSLLEVRRMYNAVGIDVSKGKSTVAVLQPGGTVIRKPFDVSHTSQNLNELADYLSSLDGTTKIVMECTGRYHEPMVRALSEAGLFISIVNPHLIKNFGNNSLRKVKSDPADARKIARYTLDNWTELRQYSGMDNTRTQLKTLNSQFSFFMKQKVAAKANLIALLDNTYPGVNKLFDSPTREDGSEKWVDYAYSFWHADCVRKIGLKAFTERYMSFCKKHHYIFQQDKPEKLFNASKELVAVFPKEKTYKLLIQQSIQQLNLASEHVERLRREMNELASTLPEYSTVMGIYGVGKTYGPQLIAEIGDVSRFTHREAMTAFAGVDPGVDESGQHKSKSNRASKVGSARLRKTLFQVMTTLLQNAPEADPVYRFLDKKRSQGKPYYVYMTAGANKFLRIYYGKVKECLRNLEQTE

SEQ ID NO: 133157 - protein, 354 aa, unidentified
MIIIGVDFHPEFQQIALVDTDGGEFQEKRLMHREEAEGFYRALAAAGQKVRVGMEASGFARWLERLLTELQLELWIGDASEIQSKRARKQKTDRQDAQHILKLMLKDDFPRVWVPNWENRDLRQLLWHRHRLVQARTRIMNQLQAVAINEGLRCKKRLWRAGGRQQLESFSLGPWASRRRGDLLGLLDRLSPMIAELSQAIEQEAEKRPEARRLRTHPGVGALTALAFVLIIGDVKRFQCGKQIASYTGLVPLEKSSGNRRRLGHITKQGSSMLRFLLVEAAQVTVRSVPEWRSQYFRLMVRRGRKTAKVAMARRLAVCLYWMWRQGMDYEELDKFGSHAGQPGNRDGVQRSIE

SEQ ID NO: 133158 - protein, 352 aa, unidentified
MITIGVDFHKRTSSYQVLNENGISVKQKKFENDREAIRQFVQSIPGPKQLAMEATRSWGLYHDTVCDLVDHFRLGHPAKMKAITESETKNDRKDADTIARLAHFGFLPEAHVSLPMIRQLRSVLRFRHFLVNQRRSIRNQVQTLIDRNLWPTERPGSFKNLFCKRGVAWLQSVSLPEKERFILNQCLAQFHELSVKVAEIETLLESQTFEVENLSHLRTVPGFRMSKVNALIVLTEASDITRFRKARAFAHYAGLVPQEFSSGDKHRTGRLVKQANMHLRTALIESTLAAIRVDRGLRNYYQQVKARNGSGAAIVATARKLSFVVYSVLKEQRAYRPEPLRSPAAVCHSWAV

SEQ ID NO: 133159 - protein, 321 aa, unidentified
MNKNATVPKYVGVDVAKATLQVHLQGHQIEFENTASGHIQLCNKLRALTEPHVVCEATGGYEAAMAQAFHDANITVSVVNPAHVRAAAKAQGKRAKTDPLDAASLTDYGQRFQPAPTPEVAALQRQIRHLVLWLKQLIDAMAVAKAQAEHQLDAFVKQQHAQLLTHYHQQIKLTEEKVKTLLAQDHALQQRVDCLMEIEGVGLRTALMVLAYMPELGTINRGQAAALAGLAPWTRDSGTMKGKRCIGGGRAEIRPVLYMSSLSSIRYNSILKAFYKGLRERNKPGKVALTAVMRKLLVYMNYKLKHLQSPLAEQKLQTPKL

SEQ ID NO: 133160 - protein, 346 aa, unidentified
MEHYVGLDVSLKLTAICIVDSTGRIRREGVVQSDPEAIAAFIKSNAPHVARIGLETGATSTWLWTELNNLGLPVICIDARHAKAVLKMQINKSDRNDALGIARIMQCGWYKQVRVKDLDSHAVKALLVSRALLVKIKRDLENQIRGLLKNLGLVIGPAKMNVFAMRAAELIKDRPELAVAVTPLLTARTALEQQIADLDRKVMKLARSNAQVQQLMTAPGIGPVTALCFLATIDDPTRFKRSRSVGAYVGLTTRRYASGEIDWTGRISKCGDKMLRGYLYEAANVLLTRVAKWSALKAWGIRLAKRSGLRKAKIAVARKLAVILHRMWIDGTEFRWSSKETAMQTA

SEQ ID NO: 133161 - protein, 342 aa, unidentified
MNIVYVGVDLGSSNFHQVAVNQAGVSKVNREFATSEANLIKAFADQRGEIHVHLEAGELAPWAISIIRPLVSRVVCSHPQSNAWIAKDADKSDRIDAFKLADLLRLNRFKEVHYPQQQSRRDFKTLVQHYDELTQQQARLKTKIKARLRMQGVIVRGEGLFSSKGRKAVLAAVKSVAVRTAIKQLYAVLDQSIESQTEARLLMRRAAQAFPEIRILQTAPGVGPIGACRFSAYIHTPSRFSSTRKLWKYCRLSVSHRSSNGKPLRRPRLDRNGCGRLKDVTRKAFEAALRTQRDNGFQRAYLRALETTHDKTHARLTVQRKIVSTLRAMWLNQTPYRDELMR

SEQ ID NO: 133162 - protein, 405 aa, unidentified
MWYVGLDWADTHHDVEVLDEAGKRVGVRRFAHSHQGLNELKQFMLSIATDPEQLACIVETNHGLLITFLLEAGIPVYPVNPKTANHLRKAAGAKTDQIDAHLLAKLGRLDLGELRRLEPDSAIVQELKTLTRDQDALIQTQTRLVNQLTACLKEYYPAALKLFTKLQQRSTLLFLQAYPTPEAVQAASLDEITATLRASKHTNPSQVAPQIFAEVHRPQLVASEVIVRAKSRLMLSLVKQLLVVLQEIASYDKAIRPLFLSHPDHELWSSLPRAGKHLAPRRLPEWGDDRTRYANATSVQALAGTAPVPFQSGQYAKAHKRFACVKPLRNALYQFAWQSTRQEAWALAYYQRKRARCGKSHSMAVRALANVWVRIIYRMWQSKTNYQTVTFEAARLAHAPRQHVA

SEQ ID NO: 133163 - protein, 311 aa, unidentified
MTTAGIDTSKLKLDIAIHQRTERWQVPNTLPGWREMIIHLGKAGVTHVGIEATGGYERGVVEHLRLAGFTVLVMQPIQVKAFGRVHLRRAKNDALDAVLIAACAATLDPPKIAPDPRLAELAQEMTFLEQIEEDIARFKTRLEHIGESRLRRMVTGDIARLKARRAAQIRMLVRHLRHHEDLGKRFDLVLSIPGIGERTALALIIRMPELGQISREEAAALAGLAPFDNDSGQYKGQRQIAGGRGRLRKSLFAAALPASFQWNKALIALYARLRAKGKEHNLALIACARKLLVYANTVVQRGTPWVENATG

SEQ ID NO: 133164 - protein, 364 aa, unidentified
MLFVGDDWAEDHHDIEIVDEHGKGWADLDIAEAASMVKVGIETDRGRWVASLISTGYEVFAINPLSVARYRERHWTSGAKSDAADAHLLAEIVRLDRAHHRPVAGDSMQGEAIKLAARAHQSLIWDRTRHVLRLRSTLREYFPAALEAFPDLDAPDALELLGQAPDPDTAARLTNARIAAALRGARRRHVETRAKELRRLLGQQELRQPPVLQTAYAAVVASEVAIIAALNVQIERLGAVVGEHFGRHRDAEIYTSQPGLGVILAARILGEFGDTPDRYTDAKARKNYAGTSPITRASGTKKVVIARYARNRRLGDACSNGRSARCADHPAPPPTTSNSVPETSATKPPFASSPTASSASSTAA

SEQ ID NO: 133165 - protein, 414 aa, unidentified
MESTDRCIAGMDVHKKMLAVVVRRQHGAAVEYLKKQFGTTRREIEHLAAWLQHEGVSEVVMESTAQYWRPVWYGLEAHFALHLTHPLKTRAPRGRKRDFRDAQRLADRWHSGDLEDSFIPGAEQRSWRWLTRTRVHSKRKMGVIRCQVEGLLEQGGIKLSSVVSDLFGVSGWAILEKIAKGESDVEAMVQLACGGLRKKTTKLREALEGRLEPIYQLLLRQHMDQVRLLRKHVEEINEALAVAMKEHVAALCRLSKIPGVDLYAAQELLAEIGPRAAAFPSAEQFASWVGVCPGSQESAGVNYSRRSPKGNRYLRRLLMQTAWGAIHTKKTFYAGLFQRLKPKIKAKGAAWAVAHRMAKVIWLVLHEEVEYQEKGPALPNQRTLTRKLRTLVREFQRQGMDVKAIFNQTLEAHA

SEQ ID NO: 133166 - protein, 477 aa, unidentified
MVTNRVEEILDEPYEQVAQRVCAIDVAKDSGKVCVRTPAESGSGRRVSKVWDVPARTNAIIELGDHLACQSIEKVTLESTSDYWRIWFYLLEARGLDVQLVNARDVKNVPGRPKTDKLDSVWLAKLTEKGMLRPSFVPPKQIRVLRDYTRLRVDLTAERVRHWQRLEKLLEDALIKITSVASRIDLISVREMIDALVAGQRNPKVLAGMARGRMRLKHADLVEALTGQFDDHHAELARMLLDQIDALTVQIDTLTQRIDAVLADMPIPPPPPEPDPDGDGPAPTRRAEILAARRRPTGDAPGSSGPEPATRVITALDLIDILDEIPGIGRHNAQEIIAEIGLDMTRFPTAEHLVSWAKLCPRTIQSGNKSSAGKAGKGNRYLRAVLGDAAAGAAKTQTFLGDRYRRLIKRRGKIKTLVAVARSILVIIWNLLAQPGMRYYDLGVDFHTQRIDTARRTRNHVRQLEALGYTVTLTAAA

SEQ ID NO: 133167 - protein, 349 aa, unidentified
MDHIGIDVHKKDSQLCVLSGDGELLEQRIRTEAGRFREVLGSRPPARILIESSTESEWVARCLEALGHDVVVADPNFAPMYAQRRRKVKTDRRDARALAEACVLGAYRRAHRLSDAQRHVRGRLITREALVRTRSSYIALIRSRLRQHGWRVRSGGADAFIRRVRELPLPGRLLSEVAPLLAVMRHVNRQLAYSDERVETVTQTDERVRRLRTVPSVGPVTAAAFVAALDDVTRFRRAHAVAAYLGLVPRELSSGESQHRGRITKAGSPRVRQLLVQAAVSMLRVPDPQTAALRAWALGIAARRGKKIAVVALARRLAGILFAMLRDGTTYEPRAARCLHGGAAHTARA

SEQ ID NO: 133168 - protein, 345 aa, unidentified
MKIIGCDFHPSFQQIAMCDSETGEFQERKLSHADGQAERFYLELGGPALIGIEATGNSQWFLDLVGRLGYEIRVGDAAKIRASYVRKQSTDKRDARHLLTLLLEKRFPQLWTPSAAMRDQRQLLRHRDKLVEIRTKVKNSLQHLAMNRGMQKKSRLWTRLGMEQFQQLAMPGWAGVRREDLSHLLKQLNGQIETLDRAVEQAACQHPQARLLMSQPGVGPVTALAFVLTIGEVTRFAGSKQLSSYLGLVPSEHSSGSKRRLGAITKQGNRFLRKLLVEAAQTAVRKDEGFRKEYQHRCRRRPKGVAKVAAARKLAVRLYWMLRSNVSYPEIVRVESNPRVPLGDV

SEQ ID NO: 133169 - protein, 440 aa, unidentified
MSKHRDRVCGADVHKDLIVAKITGGGEDPIEASFGTTKSELKRFEQWLIANNCKQVAFEATGVYWMPVHDLVSLSIDTIVANPWQIRTIPNDKSDAKDADRISELCQNGQIKRSRVFSDEYRDLRTLTRTRSGYVRMRTQIKNRIHKHLSSHGIKLSSCIEDIFGKSGRYILNGLVNETSIHDILKGIPSGKVRKKEDLIRASLCNSLNEVNRHIVGDMLYILDNIDSKIEDTSRTIMNKLQPRIKDLAIVMSIPGIGFVAGSTILAEIGDYHDFETPKSLVKWSGLNPGENESAGKKRPCGITKRGSKYLRTMLTEVAHVIAKSGNSRLSEFFQRLKARKNYNIAITALSRKILCLIHHLLTNQEMYQEDHCKKRQQNTSESDNDIPSSPDTRLDDKVAAIVDAFYHLKGRKRKNVLRERSGSSSRSGALSKRLSGGDG

SEQ ID NO: 133170 - protein, 377 aa, unidentified
MAEITRALIARVGVDLAKTVIQVHAVDKAGRRVVSRALKRDQFLGWCTQLPSGCLVAMEACSGAHAWGRRLRAMGLDARLIAANFVSPYRMEGKSGKNDMTDAAAVCEAASRPTMRFVPIKTPEQQGVMALHRVREGLKEERTACINRIRGVLAEFDLVFGKSPKVLRAVLPDVVEDASNELSGRARLVVQRAFEHWRELDEHLRWCDRQIGEHVRSSVEARRAAKITGIGELGASALTASVSDFRQFKSGAQFGAWMGIVPRQNSSGGKIGLGRITKRGDDYLRTLLIQGAKSAVMSAAKRDDPTSRWLQALVERVGWQKACVAMANKNARILWAVMTREQAFEPGHVSEKPAAKCAKPAGGQAQDAVARPVASVA

SEQ ID NO: 133171 - protein, 343 aa, unidentified
MTIIRIGLDTSKSVFQVHGVDEQERPVLRRQLRRGQIEKFFAKLPPTRIGLEACGASHHWGRVLRDLGHEVVLIPPQYIKPYVKRGKNDAIDADAICEAMSRPGMRFVPIKSREEQAALMLLKVRDLLTKQSTMLSNAIRGHAAEFGVVGAKGPQKIKQLLERIAEANMPEPARELLNSLANQLAAIEVRLAALEAKLMAHHKADPRSQLLATIPGVGPVTAVSIALKVPDATLFRSGRHFAAWLGITPREHSTAGRQRLGKISRQGDEGLRRLLVLGATAVIQQVDRRRKADKTTGSDAPWLLQLLARKPKKLAAVALANKMARTIRAMLVSGELYRRPQAA

SEQ ID NO: 133172 - protein, 458 aa, unidentified
MYRELQPFREALSHELKASLFPAAAGVDPNKLLETYLDRLTMYVGVDVADQTFTVLALDAGKEILGSLEGCSNDPHGFEHLIAWARDLRDQHGLRIIAIAGETTGIYYWALWDFLGEQPDVARVLYNPRTTEHMGEVLSKKVRNELVDALLLAEQLRLGSTPEVLLQEDADLLTARYYSRAARDLAQQINRKKNQLRALLRAYCPPLSQVFPGGKLHHPAVYALLHENLFPDEFVQAGAEALATTLVAHCKTAFGLAEAQRLVEMCRQTLIRPIGRDVIRQLAHAHIQDITTFQQRKAFYLKTGYALIEHRQETQLLRTVKGAGISNTLALVSEIGDVQRFPSGEHLASFLGLTTSKHISGATLFRAKRITKQGSPNGRYAAVNVAQHLSHRVPRYQAMYQRIKGRKPARKGHFIALVAIARDFVSNVLYDMWRHQRPFFLEVSDYRDYRRKNQHTDD

SEQ ID NO: 133173 - protein, 426 aa, unidentified
MKEKIDYLSTLFVGIDIASRIHVISALDFNQDFFIKMKPVQNTQEGAALLESMIVDVLKVNHPFKYVVIAMESTEFYGVHLANYLSASNLLAPFSVRVYCLNPKEVKNYKKSFNDIGKNDGIDSFVIADFARVGRISIKPWCGSQYLALQRLTRHRMHITECISREKTYMLNNIFLKFSEYALLRDGEHPFSNKYGAAAEATLTEFTTNEEIVNSSVEDLVAFINTKSRGRIADPKETAKIVQAAARNSYRLDKCLYEPLTISIASSFNCISSFEKELKAIDKAILQTVQGLNPEEYTVLNSIPGIGKVYSAGILAEIGSVRAFQNANALAKYCGIVWNDNDSGDFEAKDKRMSKAGNSYLRYYIIEATGSVIRHCPEYERFYQKKYAETRNHQHKRALALISRKFIRLFYGLLDKSQLYSPEKSR

SEQ ID NO: 133174 - protein, 408 aa, unidentified
MQVLYPRCAGLDVHKDTVVACVRCVSEPEHHETRSFATTTRELLALGEWIASHGCSHAALEATGVYWRPVWHVLEGQVELVLANAHHIKNVPGRKTDVNDAMWIADLLAHGLIRSSFVPPQPIQELRDLTRTRKQVVREISQHSLRIQKVLEDANIKLGSVLSEVLGVSGRAMLGAIIEGERDPHKLADLAHGTARHKHDALVEALHGHIRPHHCTLLKLHLNLIIALEHTVAEVDAAVGKCLDPIRQRARLLTTMPGVRDTVAEVIVAEIGIDMTRFPTPGHLLSWATMCPRNDASAGKRRSTRLLKGNNWLKTALVTAAWAAVRTKTSYLRAQFLRLKARRGAKKAIIAVAASMLTAAYFILRDGVPYRDLGPNHFDRQQRGKTVRRLLRRLHDLGYNLPPQHQPV

SEQ ID NO: 133175 - protein, 481 aa, unidentified
MSQRKRSTAQGKPTPKPSRLPREQPPVLTVRNPHAAGIDVHSDMHMVCVPPDSVESPIEGDSGGLPAHVRRFGANSCDLHAIADWLKECGVTTVAMESTGVYWIPLFELLEARGFEVWLVEPGQLSRCGARPKTDVLDAQWIQRLHSYGLLQPSFRPADSIVALRGYHRQRQMQIRYAASHTQHMQKALEQMNVKLTEVVSDITGLTGQRIIAAILAGERDPHRLAALRDPKCKNDLETIARALEGAWRPEHLFALRQAYDLYQFHHRQIAECDAMIQAELARLPNRSGDKPFTAKPRRCGRKPNDLSFDACGPLFGALGLDLTEIDGIDVGTALVILAEIGIDVSRFPTEKHFASWLGVCPRQHESNRTKKRRGPRKGKNRVAIALRMAAQALGRTQSPLGLFYRRIKSRIGGKGAITATAHKLACLVYRMLKYGREYVRQSMEEYETKVREQQERSLRRKAAALGYELISKQGAARGRS

SEQ ID NO: 133176 - protein, 339 aa, unidentified
MKHTVVGVDIAKRVFQLYWVEVETGEIVNISLKREKFLEHFANRALCLIGMEAGGGSQHWARQLQGLGHEVKLLPGKWVKPFVGGNKNDVADARAVWTAVQQPGIKTVAVKTEAQQAVLALHRMRQQLVKFRTAQINGLRGLLAEYGEVMPQGKAGIRKGISKVLQCLAERLPAVLIDTLREQFARIGKLDVQVAEIERRLRQWHKDDPGSQRIGAIPGVGLLTATAAVATMGDARVFRSGREFAAWLGLVPRQSGTGGRVKLLGISKRGDTYLRTLLIHGARSVLANSKEPPQWVTNLAKRRPQNVVVVALANKMARTIWALTFHDRAYQKGFVSQPA

SEQ ID NO: 133177 - protein, 397 aa, unidentified
MTQAYAVFCGIDVGKGEHHTVGLDQNGKRLFDKALPNDEARLRAVFDQLAARGRLLIVVDQPNTIGALPVTVARACGHDIAYLPGLSMRRIADLYPGQSKTDARDAHIIADAARTMPHTLRQVDTGDETLTELGVLVGFDDDLAGEATRTSNRIRGLLTSIHPALERVLGPRIAHPAVLEILSRCGGPEGIQNAGRRKLTAIAVKHAPRMGVRLVEEILAALPAHTVVVPGSRSAESILPKLADSLKTVLLQRKQMAVDIEEMLADHPLSHVLTSMPGIGVRTGARILLEVGDGTAFASAGHLASYAGIAPITHRSGSSIRGEFPSRSGNHKLKRALFLSAFAALHDPASRTYYDRKRAEGKKHNAALICLARRRCDVLYAMLKNTESYRDPARQAA

SEQ ID NO: 133178 - protein, 343 aa, unidentified
MERYVGLDVSLKETSICVVDGKGEIVSEGTVISEPAAIAAFIEEKAMGAKRIGLETGPTTTWLWHELRALGLPVICIDARHAKAALSLRINKSDRNDAYGLARIMQAGWYKEVQVKSLPCHQVRALLNSRAQLVKIKRDLENQIRGLLKNLGLRIGKAGGRRFHHRVEELVAGHRLLQAAIRPLLGVRETVGLEIDGLTRKLLAMARDNDACRRLMTVPGIGPMNALAFCAAIDNPTRFKRSRSVGAYFGLTPRRYASGEVDWTGRISKCGDGLVRSYLFEAAGVLLTRVAQWCKLKAWGHRLWKRIGFKKAKIAVARKLAVILHRMWRDGTDFIWSDKEVAA

SEQ ID NO: 133179 - protein, 431 aa, unidentified
MDTQQFEVIRPKCAGLDVHKKSVVAAVCTSDPVTLTASYKTKVFNTTNSDISALRDWLLAQDCRDVCMESTGKYWIPVFNILEPHMHVILTHPKYVKAIKGKKTDKRDAKWIANLFRFDIVKASFIPPADIRALRELSRYRLKLSYMRTAEKNRYQNSMTISRIRIDCVLTDPFGLSATRIMDYLLSGEPFDEEKCRSLIDRRVKASKDEVMDTIHGYHILEEQKFKMTHAKAHMDFINKSIDEIEAELFLRSRQYDVQVKRIATVTGITELSALFILSEIGADMSVFESDRHLCSWAGLTPANNESANKKKSTRCSKAGQYLKPLLIQCALAAVKSRKEPYFAIKYQRLSRRRGKKKAIIAIARMMLTSIYHMLSDNEDFHPDDYEATINPPKQKPVVLTLDNTLQFLREQGADPETLKLIQQQCVAQVG

SEQ ID NO: 133180 - protein, 365 aa, unidentified
MNKCHSNTELSSHEETRCQFNGGTGAIKLGIDVHQDFYVVVEQVGGSNPKPPQRFQKEAFLFWAARLKQKSGAQVYALYEACGFGFSLQRKLSALSIKCYVVCPQKLDEQNRRVKTDGLDAKALCLKLDRFVQGNRDALAIVRVPSEEEEQARAIHRQREQLVKARKQLEAQGRSLMVNHGLEPVQNWWKPRTFTALPMPQWMKELLANSQPILVALQQKIMALTVQLQSAASPEQPCGLGKMTSVVIDREIGDWNRFSNRRQIASYTGLCPGEYSSGNTRLRSCVTKHGNPRLRAALVELAWRLVRFQPKYKPIVKWRATLAKGALATGAARKKAIVAVARQLAVDLWRIKTGRLHAEELGLIN

SEQ ID NO: 133181 - protein, 345 aa, unidentified
MQPMYYIGLDVHKRKISYCVKDSSGKIHIEGSISATRLELDHWMKKLPQPWSAAMEATMFTGWIYDHLKPHAAALKVAHPLMLRAIAAAKKKNDRIDAGKICDCLRCDFLPESYMASTAIRERRRTLRYRNLLMRQMVQMKIKTGALLMEAGVSYNKQRLHKAGYFRELLATNPDIDEGLCSLLRLCRETVVRLGKTESALVRSLERDSLLVERVERLMTIPAVGPITALTWALEVGDVQRFSSIKKAVSYCGLCGAEKSSGNTVQRTPLSKQRNKHLQTTLIEAAKMAPRYSPQLAILYDQEKQKGNANRATLAVARKLVAYLMAVDRGQRNFQLAETRSNIAA

SEQ ID NO: 133182 - protein, 355 aa, unidentified
MNSEKYIGLDVHQATICVAVMDPKGKVVMESILETKATTILEFLAGLRGTLSVTFEEGTWAAWLYDLLKPHVANLVVCNPRKNALLKHGNKSDKIDARKLANLLRLNDLEPVYHGETGVRMLRELARSYLTIVKDVSRVMSRLKAIYRSWAIPCAGRDVYYTRHRSEWLGKIPEAGCRRRAEQLYQQLDMLQPLRQQARRELLAESRKHTITAKLRQIPSLGPIRSALAVALIQTPHRFRTKRQLWTYSGLGLETRDSGEYHYVDGQVRRRKKQVFIRGLNKDHNHDLKGLFKAAATRASVRPGPFQDFYQRSLAKGIQPTMARLTLARKIAAITLTLWKKGENFDAEKLKAQAA

SEQ ID NO: 133183 - protein, 330 aa, unidentified
MEYFYCGIDVSKDSLDYAVCNQQDKNILLLEKTDNTISGIRKMIKLIERKVKSRQVWYCFEHTGHYGLLLAHILQSQQQKYSMVASIDIIKSSGLTRGKSDPIDAQRIAIYAATFTHKLKPTKLQSESVLRMKTMLTIRDHYVRIRTQLKNAHKSMIITSKVVPMKTEINDYKREIARYDIKITRLEKRIIELINQDNDLKQSYDKIIKVTGIGLITAASILLYTNNFKSFNNPRKFNCYCGLAPFEYTSGTSVKRKDKTSRYRNKELKKLLFNAANTAIRHDQQIKTYFNRKTKEGKHKMSVINAVACKIIYRVFAVANRDEPYVNFSV

SEQ ID NO: 133184 - protein, 415 aa, unidentified
MKTYILRDPKPVEPQKSIRSPRHQLVITAIPITVVGRPSVSAKDPVLFIGLDVHNDSIAVSLAPSDSTEVRRYGIIGGEHDDVLKLAHKLQAAHPGMILKFCYEAGPRGFALCRCLQMHHWNCILVCPSKIPRKPGERVKTDRRDADDLARLYRAGELTGLYVPEPVDEAMRDLIRARFQVGRQQHRARQQLKMYLLRHNLRYGGQTSWSPAHLRYLAKIKMPFPVQQIVFQEMLDAITETTARLERYDLEIERAMPGWRWEPAVRALMSLRGMALLHAATLVAELGDFNRFEHPGQLMGYLGLVPSEHTTGKDRQQGGITKMGNAPARRALVEAAWQYRVPARLSPHLKKRQEGLPKAITDIAWEAQRRLHHRYTHLTRVGKKKSQVAVTAVARELTGFVWAIARQVKPVTAQP

SEQ ID NO: 133185 - protein, 406 aa, unidentified
MSKVRDVDATTRAVTELANDLLGEGIERVTVESTSDYWRIWFYLLEAAGLRVQLVNARDVKNVPGRPKTDKLDAVWLAKLTEKGLLRPSFVPPAPIRQLRDYTRFRVDLTRERARCWQRMEKLLEDALIKVSAVVSRMDSMSVRDMLEALIAGERDPRRLAGLARGKMRPKYNALVEALSGRFDEHHAELARMLLDQIDALGAQISTLTTRIDELLAALIDTPGPAADGSVRDRDGEVELMVTGLDAAERLAEITGIGPVSAQVIIAEIGLDMARFPTAAHLVSWAKLSPRTIQSGAIQRSGKAGKGNPYLKGALGEAAAVAARTDTFLGERYRRIVKRRGKLKALVAVARSILVIVWNLLSDPTARFHDLGPDYYTRRIDTERRARNHLAQLAALGYRVTVEPAA

SEQ ID NO: 133186 - protein, 419 aa, unidentified
MSFKIFKFNCCGLDVHKTWIYACIGITDSNNRTEYKQARFSSFTKGLNELCDWLAKYNCKDVCMESTGKYWIPVFNILEQHSFWVTLSHPKYTKPMKGNKTDRKDAKWICDLYMCGMVKPSFIPPADIRELRDLVRYRFKLTCMITGEKNRAQNCLTVSNLKLDDVFSDVFGKSSRSITEHILQHPGEKFDIAPFVDSRCKTPITEIQAAVDGAISKEQVVKLRQCLDHIDELNKHISEVEQEILRLSDKYEAALNLIRTVPGFNKNPLTAIQVLSEIGGDMSVFPTAKHLVSWAGCCPRNDQSNQKIKSTRISRAGSYFKPVLVQVANALIKSKKHSEFTSRYKRIKARRGHKKAIIAICRMILTAIWHILTDLKPYTPEGFLESRPVNKEKVLTISQALNLIKQRGYIIKDDVGPVT

SEQ ID NO: 133187 - protein, 449 aa, unidentified
MREPHEIDDEEHEQILERVAAVDVAKASGTVCIRVPHPSGQGRRRTRVQTMDATTNAVLELAGYLVAEQVQKVTLEATGDYWRIWFYLLEAAGLDVQLVNARDVKAAPGRPKTDKLDAVWLAKLTERGMLRPSFVPPAEIRRLRDYTRLRAGLTRERTRYFQRLEKLLEDSLIKVSSVASTLSTVSARAMIEALIAGERGPRVLAGLARGAMRVKHAALVEALTGAFDDHHAELARMLLDQIDALSAQIDRLTARIEEQVAAISAAWGADADGATGPGAGLGEGAPALPALDRLDEIPGISRATAQGIIAEIGLDMTRFPTPGHLVSWAKLSPRTVQSGAKNRAGKTGKGNPYLKAILGETAAAAARTDTFLGERYRRIVRRRGKLRALVAVARTILVIIWHLLASRTARFCELGANYYANRIDKDKKARGHIRQLEALGFTVTLAPAA

SEQ ID NO: 133188 - protein, 344 aa, unidentified
MDSIGFDLHLRESQLCVLAADGTEQQRRIPTSVAGLNAFFAARAPAQIVLEASTESEWVAQHLEQLGHVVRVADPNDARLYAGRSRHIKTDVRDARALAEAARRHDWHVAYRPSPARRRLRQELAGRELLVRTRTRLQAQVRSLVRAAGQRVPPAKPETFAERAASVPVPDTLAPLLANLLTVHTAVQAQVLACTARLTALALGDADVVRAMTAPGVGVVTASAYVAALDDVTRFPSGEQVACYLGLVPRERSSSESRRLGGITKAGDTRVRWLLVEAAWTIRRGRTAETAALRAWCQRVERRRGRSVAVVGLARRLAVILYTMWRTERAYEPTRLRGAPGGTA

SEQ ID NO: 133189 - protein, 343 aa, unidentified
MTKIIRVGVDLAKNVFHIHAVDENEKTVWQGKYNRNNWIKAIVKRTPQAATIGMEACGSAHHWARELIKLGYDVKLVAAQFVKPFVKTNKNDKVDAEAICETISRPNMRFVSVKTVEQQDLQAMHRIREELISQRTSKANQIRGLTAEYGIFAPVGIHHLKKYIPVWLEDAENSLTPLFRELLQMMYNDLTLLDESIDSITNRIRISLNNNPAAQRLMEITGVGPLVCSALLIDLGDGLAFKKGRDFAASLGLVRQHSTGGRDRLLGISKRGNGYLRKLLVHGARAAFRHVNDKADPLSLWIKKLSLTKHANVAIIALANKIARISWALVARNAKYDVSLAAA

SEQ ID NO: 133190 - protein, 391 aa, unidentified
MVYVGIDVSKDKHDCHILTSNGEVLCDNFSFPNSMEGFNAFMDLITDCCKGDFGNLKVGLEATGHYSKNLLLFLYKSKLFVVVLNPLSVNQSRKAGSLRKTKSDKNDARFIAEMLFTNKSCSYQDQSSDISALKSLTRARYRLVKEIQPLKNRYRRSVQLLFPELSTFFSSLYLNTVFSLLKVLPGAKDIAECNILKLSNILSKSSHGKLKRDKAEALKFAAVNSIGSYNIGDAIELKFIIERIEFLKTQESELETNIKTIMQKINSLITTIPGIGFILGAIILAEIGDISKFSSPSKLLAFAGCEPSTYQSGKFTAANTPMVKHGSKYLRNALYLATTMAYLHSPSFRAYIDLKRSQGKHYYIAISHGMKKMSRVIISILTTDKPFVEVI

SEQ ID NO: 133191 - protein, 346 aa, unidentified
MEYIALDVHKNYTWARVENSKGERLYESRLAHAQGSIKNFVRRWSGGSLAAVETVGNWYWVVDEIEAGGATPQLVNARLAKLMMGSVNKSDKLDTKGINRLQRTGTLPTVWIPSSVVRDQRELPRTRMVLSSQRTQLKNRVHATLGKYGHTIQGASDAFGKKGRKIIEELLVKLPPHTEQTLRVVLDELDHVTDNLKRIEGQMLKSFSPCPQTNWLKSLPGVGDILAVVIFAEIGTIERFSRAEQLASYCGLVARENSSGGKIRFGAVRRDVNVYLKWAFVEAANSAVLNAGRCDYAHVSRLYGRLKPRRGHGKAKVAVARHLAEACFWMLKKGEPYREPMPSTQR

SEQ ID NO: 133192 - protein, 375 aa, unidentified
MRLDGYERILGLDLSKRTFKACILSRDRNFEDRKIIPGSMSPEGRRQFISTLGKTDIVAMEGGTSSSNFAREIEASGVKVLLLNPGKLHIIYQSQVKTDRQDAVKIARYVRDTAEESIVRIPVPSQEESNIREVMNSYDFAKKQRTMLVNKLHSIFNMNGIPTVKRSDLSDNRSRIDAISAHLDGLPFEDACMVESMITVTENHIEGYREMMRRHILENPETALPWLSLPGIGLITAASLLAYAGDCSRFYSPGQLRNYVGLVPRIDQSGDHSYIGGISSYGCKTIRKNIVQAGWSFEHRSNDCPLKREWDALAARNKRKQTIAIHMANKLLSIGWTLQKKRELYNGFVDHSYLIRKLRQEKLEAIDTSSFPELG

SEQ ID NO: 133193 - protein, 347 aa, unidentified
MRFYTRTHKHYCGIDLHAETMYVCIVDQDGVVLLHRNIPCEPDRFLRAVAPFREDLVVAAECIFTWYWLADLCVQQGIVFVLGHALFMKAIHGAKAKNDRIDSRKIAGLLRGGLLPQAYVYPAKMRATRDLMRRRLHFVRLRGQLTAHIQMTYHQYNRRSPGKRITYASNREGLSEGFADASVQDSLNADLALISHYDLIIQEIETAIRQHARRHEPNNLALLKSIPGVGDILAMTIIYEIHDIRRFEGVQQFASYSRLVKCQASSAGKVTGTSGNKIGNAHLKWAFSEAAVLFVGKCPDGKKLLARIQRKHGKGKALSILAHKLGRAIYFMLARQRAFDLEKFTRS

SEQ ID NO: 133194 - protein, 340 aa, unidentified
MSLVLQSILPYPDSCLGTSPHQQGWDTKMEKLSYGGIDVSKDRLDVVVLPEGWFFSVSNDTAGWAELVARLRPLAVSAIGLEPSGGYERGIIRALLAAGLSVRRINPNKLRQFARARGILAKNDRLDARLIAEYVAIMPTRVVQRDDAVERLAEIVTMRRQLCDEHVAVENQAAHLEDAMLRRLSKRRLTRLEADIRLLDKRLAEMVATNAAFARLYDLLTSMPGVGAVLAFTLIALLPELGKMSRKQIAALVGLAPYDFDSGKLKGHRSIYGGRMSVRNVLYMAALSASRYNPALKAFSNRLAGADKKSKVIIVAVMRKMITTLNAMLRDNAAWQPRSA

SEQ ID NO: 133195 - protein, 343 aa, unidentified
MQAVTTIGLDIAKSVFQVHGIDAEGQVIIRRQLRRRYVLAFFEKLAPCLVGIEACAASHHWSRQLQALGHTVRLMPPAYVKPYVKRQKNDAADAEAICEAVTRANMRFVPTKTPEQQSCLMLHRTRHLFIRQQTAVINAIRSHLAEFGIVAPVGRHGVEQLLNIAADLSDERLPDVARRCVAALGAQLKVLKVQILAFDRQIMAWHRSNATSKRLDDIPGVGPALATALVASVGDPRAFRSGRDFSAWIGLVPRQRSSGGKDKLGSICKQGDRYLRSLFTTGALAVIRYAKIHGTHHRPWLTALLTRRPTKVAAIALANKLARMAWAMMAKNESYREPAALAA

SEQ ID NO: 133196 - protein, 448 aa, unidentified
MPVLAETVRPGGEEVTGVDRVMIGVDPHKLSVTFEARDSREVLRAKGQFGTDARSYRQLLAYARQWPERIWAVEGANGIGRPLAQRLLASGERVLDVPAKLAARARVFDTGQGRKTDPADAHAIVMVALRDKRLRELGTDPGLTVLRLLCDRRDELSRSRAQALNRLHRLFLELIPGGAPVKKSTAQYQALLARVRPRDLAGKTRRRMAAEELADLGRLDAKLKAMKAELKAAVLASGSHLMDIHGIGPAAAARILADVGDIARFPNRAHFASWTGTAPIDASSGQHTHHRLSRAGNRRLNHVLYMAGIVQLRNDTPGRAYYRRRVAEGKTSMEAMRCLRRRLSDVVYRQLAADTQPQQAGPGGHSGATLLSSAADLPPGIGTSDQPLPGPAPATLPPSLTAPHSPAAQPGASPRRRTRGVNVERPTGRTTLTPTSAGAHSKSPGPPS

SEQ ID NO: 133197 - protein, 415 aa, unidentified
MEVMHPRCAGIDVSKRDAKVCIRIQGGGSRKTSSTVTTWGAMTNQILALRDHLAAQQVTVVVMEATGDYWRPFYYVLETDFEVLLVNAREVKNVPGRKSDVSDAAWLADLAAHGLVRASFVPPEPIRQLRDLTRTRTHITQGRTREIQRLEKLLESAGIKLSSVATDITGVSGRLMLQALIDSDGAADPAAMADLAKRRMRSKIPVLTEALNGRFTAHHAFMTQLFLDRIDGHTKDIAILSERIDELMKPFLPARELLESIPGFSQIIAEIFIAETGGDMTQFRTPQQLASWAGVSPGSNESAGRVKSTKTRPGNRYLKGALGVAALNQAKSKKTYFSAKYRRLASTRGPMKAIVAVEHAMITAAWHMLTNGEFYRDPGADYYTRQDPAKTRARAVRQLEALGYQVSIHPIQQAG

SEQ ID NO: 133198 - protein, 338 aa, unidentified
MNLSRIGLDLAKQVFQVHGVDRHEHVVCRRQLKRAQVRDFFRHLPPCLVAMEACGSAHYWARELRELGHTVRLIAPQFVKPYVKGDKHDAHDAEAICEAASRPSMRYVPVKSAEQQAVQSMHRVRSRLVRARTALCNEVRGLLGEFGLIATRRGRAATMALLETVMATEPASLPAPMGELLRELKDELQTLEARIARLERQIQAHVRGDARIQRLLAVEGIGPISASAVAASAGDARQFRTGRQFAAWLGLVPRQHSTGGQQRLGNISKRGDTYLRTLLIHGARAVVRCCANKTDARSRWLQGLLQRRPANVVAVALANKNARILWALLSRETCYRPG

SEQ ID NO: 133199 - protein, 309 aa, unidentified
MGTIVVGIDVSKDRLDVHVHPAGTMLSCSRDAAGIEDLIGELERLGAQLIAVEATGGFETVVVASLAAAGHPVVVVNPAQVRAFARAIGQRAKTDPIDAAVIAHFAAATKPPVRPLPDATTQALADLVARRRQIIQMIVAEGQREKRASPRARKSIARLRKTLQSELSDLNDDIGETVRGSPVWREKEDLLASVPGVGPVTARTMLAEMPELGSLDRRQIAALAGLAPFTRQSGKWRGKSFIGGGRASVRAVLFMAAMTAMRRNPALRAFHQRLRSAGKPKMVALIAVARKLLTILNAILRDKTKWQTA

SEQ ID NO: 133200 - protein, 356 aa, unidentified
MSSEVKYIGMDVHKEAIVIAVRDTRGHVVMESIVETKASSILQFIRGLQGELHVTWEEGTWAAWLYDLLKPHVHRVLVCNPRRNALLKEGSKNDKVDARKLADLLRTGMLRPVYHGEHGLRTLRELARTYQTLSQDLNRVMNRLKALYRGWGIACGGTQVYAPRYRDEWLGKIEHAGVRRRAELLYQQLDGLQALRRTLRSELLAESRKHKASKLLRQIPSIGPIRAARLVALMQTPHRFRSKRQLWTYSGLGIETHASAQYRFVRGELQRAKKPQQIRGLNRNHNHEMKDIFKGAANRASCGVGPLHDFYVALLDKGMKPEMARLTLARKIAAIALTLWKKEERFNAEHLKTQAA

SEQ ID NO: 133201 - protein, 425 aa, unidentified
MSLVQPTESLAVLVAIDIAKLRHDVLLEAPGWKSRKRMILPNTATEFRLFADFLHGLKHPVRVVFEATGNYHRPLAHFLKTEGFHLELIASLAVARTREAMHNSWDKNDPKDAQVLLHLLKTGVTQHYHDPLANQIHDFQELSLTYAQISLEKTRTQHRLLTHYLPLYFPEIERHYHASRSEWLLSFLQVFPTPARITRLSMEDFVQQAWPVVGRKVSKQRLLEDIYRMAQSSIGIPVDEDSEAVAMFRVVLGEMIRLCQLRDQLEQRAALHLKDNADFRRLQQIPGIGPILALTILAEAGDLRRFSHHRQFLKFCGLDLSTQQSGQFRGSTKLSKYGNARLRCAFWMAATVAVRQTENSFRDKFERYLRRDPSSADRKRMAYVAVAAKMARVAHGIIKTGTDFRCFYEAAAPSGRAASPGPSRP

SEQ ID NO: 133202 - protein, 410 aa, unidentified
MDVVYGRCCGIDIHKRIAVACVIVSEKKGRTRKVIRTFGTMTDDLLALADWLASEGVTHVAMESTGVYWKAPFNLLEGQFEVLLANAQHIKTVPGRKTDVKDAEWIADLLRHGLLRASFVPDRPQRELRELTRYRTSLVRERAAEANRLQKTLEGANIKLGDVATNVLGLSARQMLDALVAGTAEPATLAQLARGRMRAKIPQLERALSGRFAAHQRFSVGQQLAHIDYLDEVIERLSAQVAERLAPFDTMIERLDAIPGIARRTAEILLAEIGSDMSRFPTAAHLASWAGMCPGHHESAGKQYDGKTRKGSPWLRQALIEAAAAAGKTKDTYLAAQYHRLVPRRGRNKAAVAVGHSILVIVWHLLQHDCPFVDLGSTYFDERDRAATERRLVRRLEQLGYSVRLDRPAA

SEQ ID NO: 133203 - protein, 350 aa, unidentified
MELAKINSDYYCGVDLHDKNMFNCIMEKDGKILYHKRIRNNPEDFKRIITKYKGSISIGVESTHNYYWLYDLCKKEGIPFYLGHAYYLRAIRGKKKKDDKIDSKTLADLMRTNFFAIGYPYPKARRGIRDLLRRRTKLVQQRAGVYNHIHLVYSQQGEENVNLSELKNKTERINMLEKFDDPGINYTIEIDLDYIDYLDGLINKLEKRIKEKAGLEEKETIELLKSYPGIGDILSLTILYEIDTIDRFPTVQKFSSYSRVVKTQRESNKKRTDNKNQKIGNPYLKWAFSQASVMAIKYSPEIKKYFERLKKRMPKQKAMAVLRHRLAIAVYKTLKNKEPFNLDKFLQTSK

SEQ ID NO: 133204 - protein, 396 aa, unidentified
MISIGIDVSKRKSTVAIINVMGEILQTPFDIEHSKHGLEKLWDLIKDYPKDQVKFIMEATGIYHLGLLNELQKQGYFVHVANPLLIKKYFDAEIRKGKTDRKDALKLSRYGTEKWWLLQEHSTTDQVYLDLQFLSREYNSFLAAKIKLKVQLSNLIERTFPGLEKILKGHYWALLLDFYELYPCASLVREMSEKKFSTKFIKLAAKKGHRKGAQIAQSIYQLAHECVTFEPNNQVAALSVKHCVTLLRSTEEATIDIITQMNELAKELPEYEVVKKMKGVGDKLAPRLIAEIGDVRRFKDSKSLIAYAGIDAPPYQSGQFEGTNRHISKRGSKSLRKCGYEVMMALKSSKPKEDNAVYEYMLKKEAEGKNKKLVKIAGLNKFLRMYYARVMEVYQN

SEQ ID NO: 133205 - protein, 357 aa, unidentified
MRKSIKNLSAVTTIGLDIAKNVFQVHGVDAAGAVVVAKSIRRAQVLAFFASLPPCLVGIEACGSAHHWARALIAMGHRVRLIPPAYVKPYVRRNKNDAVDAEAICEAVARPNMRFVAVREVENQAELMRHRTRELLAGNRTRMLNALRGHLAEIGVVAPQGAQHAYALKRLLTAGHDDSGEIVVPDSVRKALAPLAQQIDAIDEEIEAIDDQIKAQVKGDDLARRLATIPSIGPITASALVATVRDPSAFASGREFAAFIGLTPRQNSSGGKERLGSITKMGDRYLRKLLVVGACAALVHRKGHNDALRVWADQLMARKPAAYKFKLTAVAFANKVARIVFALMTHGGEYVERPVAA

SEQ ID NO: 133206 - protein, 346 aa, unidentified
MLHVGLDLSRTRLDVHAMNEAGTPVLATTAAPDAGGLASLVARVGAFGQPVAAAIESMTGARFVHDQLELRGWEVEVADAVKVKGLAPLAAKTDRIDAWVLAELSRRDLVPAIWLPDPAVRAERERARWRLHLVRHRTALTNRIHATLLAFGHPCPVADLFGAADRRLLAGLALPEPWAGDVAAALRLIDSLDAEIDGCEAALRTAGADHPYVPLLMTAPGIGPVLGYTIAAEIGDIARFPTAKKLVGYTGLCPTVRQSGRKDHRDSLAKNGPKYLRWALIEAATHAARHPAYAERYQRTKTRLGRQRGARIARVDLARRLAEAIWYLLTTSKPFAPAGAAKPLAA

SEQ ID NO: 133207 - protein, 411 aa, unidentified
MEAIVERAAGLDVHQGSVVACVIIGAAGRRTSRETRTFGTMKRDLAGLRDWLIEMGVTHVGMEATGIYWHPVHAALEDAFVVSVGNASHMRNVPGRKTDVKDAEWIADLVRHGLVRASFVPPPEVRVVRELIRHRKAVVGTLASERNRTLQLLESANIKLASVMSKLFGVSGMLMLQALAEGRAAPVEMADLAKRRLRRKVDQLALALDGRLAEHQRLLLGLHIRRLSEIERDLAEIEAAIGAAMRPFVAQQACLATIPGVDELTAASIIAEIGVDMSAFGTAQRLAAWAGVCPANHESAGKQKQRGTRKRNTYLKATLVTAAIPASQAKGTYLRDKFHRLKARMGMKKAAMAVAHKILIAVFHMLQRGVGFADLGGGYLDRVNKHSTAKRLACRFTALGYDVMLRPKATA

SEQ ID NO: 133208 - protein, 403 aa, unidentified
MIFVGNDWAEDHHDVHVMDEAGRRLDARRLPEGLAGIRELHELIAAHAEEPDQVVIGIETDRGLWVDALSAAGYQLFAINPLAVSRYRDRHHVSGAKSDASDAKLLADLVRTDRHNHRRAAGDSVQSEAIKVLARAHQTLIWARSRHTLALRSALREYYPAALKAFEDLDDRDALAVLGRAPTPEQGVRLTLPAIQSALKRGGRQRNIAARAREIQARLRTEQLAAPAALSAAFAATTRATVAILVELNRQIGDLETSLANHFETHPDADIYLSLPGLGVILGARVLGEFGDDPNRYTDAKSRKNYAGTSPLTIASGRKRAVLARHVRNNRLYDAIDHWAFCALLASPGARAYYDQHRAAGNTHHQALRTLGNRLVGILHGCLRHHSRYNEHTAWAHRNPAAA

SEQ ID NO: 133209 - protein, 347 aa, unidentified
MKFYNQQHKYYCGIDLHARKMYVCIIDQKGKNKVNQNIKTDPEMLFELIFPYIDDIVIGVECVFCWYWVADLCSEHKIPFVLGHALYMKAIHGGKTKNDKIDSYKIALLLKGGNFPTAYSYPAEWRATRDLLRRRMYLSRRCSELVAHILNTNTQYNLPGFNKKLSRKYNHEGVAERFEDPQVRKSVEVDLEMINYLNQVLKKLEWHIEKTARQHNYHTLYLLRSIPGVGQILALVILYEIHAIKGFPRVQDFSSYARLIRPVKESDDKWAGHSNKKIGNHHLKWAVKEAAILMLRDSGQAKNYVAKYERKYNKGKALGIFTHKLGRAIYFMLKNKEAFDMKQFFGQ

SEQ ID NO: 133210 - protein, 315 aa, unidentified
MSDNRPFVGIDVSKQWLDVALQSQERAWQVPNDEAGVAQLVAQLGDLSPALIVLEATGGLETAAVSGLAAAGLPVVVVNPRQVRDFAKSLGRLAKTDRLDAYVLARFAEAVRPEVRPLRDAQAQELEALRARRAQLVQMLAMEKNRLSGAPKSVRPSIKALIRHLEQQLRETDHRLRALLRESPLWRQLDDLLQSVPGIGKVCSITLVSALPELGRLNRRQIAALVGVAPLNRDSGTLRGRRTIWGGRAAVRSALYMATVTAVRCNPIIRTFYQRLVAAGKRPKVALVACMRKLLTIINVMVRTQTPWRVVDGGP

SEQ ID NO: 133211 - protein, 348 aa, unidentified
MNNHSVKGTIKVLGIDLAKNSFQLHGIDKDGNVVLKKNLSRKKLAVFINNLPPCLIGIEACGGAHHWVRTFSAFGHSVKMMAPQFVKPYVKSNKNDAVDAEAICEAVQRPSMRFVPCKSIAQQDIQSIHRIRSQLVGRRTAQANQIRGLLMEYGIIIPKGISHVKKNIPQILEEAENYLTPLFRQQLHELYEEMVHLELRITAMEKKLKTISVEHQACQLLLTIPGIGLLSATALIAAIGDISVFKNGRELAAWLGLVPRQHSTGGKPTLLGISKRGDCYLRTLMIHGGRSVVRVAHRYQDRRNLWVKELKQRRGENIAAVAVANKNARIVWALLSNQNNYCAAHEIN

SEQ ID NO: 133212 - protein, 320 aa, unidentified
MDKEKLYVGIDVAKASMDIAAHPSAQQWCLTNDDNGIDQAVSHLKDLAPTLVVLEATGGIELPVAAAIAAAGLPVVIVNPRQVRDFAKAIGRLAKTDSLDAQVIARFAAAVQPTPQTLPDPDSQEFSALLARRRQVVEMLTAEKNRLSSARKVVRQRIQSHIAWLEQELANIDGDLKHKVQDSPIWREKDALLRSAPGVGPVLSVTLLAALPELGTLNRRRIASLVGVAPLNRDSGALRGHRTIWGGRSHVRASLYMATLSATRHNAVIRAFYQRLRAVGKVPKVALTACMRKLLTILNAMLKHHTSWDHALPQTIGSRY

SEQ ID NO: 133213 - protein, 337 aa, unidentified
MIVIGVDVHKQSLTAVAVDEAGRALAEVTVAAAPELLGWSASLARERLWALEDCRQLTRALERTLVAAGEGLVRVPPKLMAPQRRAGRTRGKSDPIDALAVARAALREPRLDHPRPGEQRLRELKLLVDHRDDLIDERRRAQQRLRWHLHELDPEWAVPLGALDRGVWLDRLGRRLARLEQTAQVRIARELVGRCRSLTRMILDLDRELQTAAAQTAPALLALPGCGAISASKLLGEIGPIERFESDAQLARHAGVAPLEASSGKHRRHRLDRGGNRQLNCALHRIAVTQARVHPPARAYLERKQAEGKSRREAIRCLKRQLARTVYTTLKNAPLLT

SEQ ID NO: 133214 - protein, 414 aa, unidentified
MGEALRLFVGDDWAEDHHDVEVMDRTGRRLARARLPEGVAGMARLHAIVGELAAAEIEDAGGVEVLVGIETDRGPWVAALVAAGYTVLAVNPLQAARFRDRLGVSGAKSDAADAHVLADMVRTHAHELRPVAGDSAQAEAIKVVTRTHKTLIWERTRHTQRLRHALRDYFPAALAAFEDLDATDTLELLAAAPTPAQAARLTTKQISAALKRARRRHVTDKAAAIQAALRAEHLGQPEAVTAAYAASVQALIAILTVLNTQVATMQGQVEAHFGQHPAAEIILSQPGLGPILGARVLAEFGDDPDRYATAKARKNYAGTSPITRASGKKKVALARFVHTDRLIDALLTQAFSALRRSPGARAYYDRQRARGASHNAALRQLANRLVGILHGCLKTNTRYNETIAWSHHSQSAAA

SEQ ID NO: 133215 - protein, 340 aa, unidentified
MKTTTLPTAVGIDVAKATLSVCVLYPDGKEHALTFRNIDTDINKKLLPSLYHYTGKVVMESTGHYHWKSAMLLKEAGCDVRVVNPLLAKQYTAGNIRKVKNDPIDAQSLARMARVADNLPSSFSDTPESLWMRKKLGLLASLNKHVQGINSTLSSTEEAQGIVSGEDSAVVTEIKETVKTLRLTMTKLEKECVRETMKDPVLKEKMKLLATVPGLSPFVSALYLHWFTDESVKNPKSWIAYAGLDISVRESGTWRGKCRLTKRGNAYLRKRLFSSAWGAWMNDPQFKAYYDELKEEGRPHTECLLILARKIVRISFMVLKNNTPYDATKCFSPTIPALTI

SEQ ID NO: 133216 - protein, 350 aa, unidentified
MRHVIGCDVHKRYSVFVAINTHGKLSKPTRVEHDRDGFRAFLQALPPHCEIAVEATGHWYWIIDEMEKAGHQPHLADPHESKKRMGKPNKHDALDAGGLAILLHNGTLPESWIPPGELRDVRELLRTRMALRDLRTALKHRIHAAIDRYGLHNDAISDLFGKAGREFLLHQLSGLPPETHAMLLLELDAMDDLTPRIESIEARVAEVIVPSPEVQILLTLPGAGQILAPLLWLEIGDVERFPRAENLASYAGLVPRVFSSGGHTVLGHTNRYVNHYLRWAFVEAATCAAHLHAYRESHIGVLFQRLLPTRGYGRAIVAVARHLAEASYWMLRKRQPYRPPTPKLPSSRIG

SEQ ID NO: 133217 - protein, 416 aa, unidentified
MKIYPRTRPIQRYIALDIHKEYILAGGMNASQEWILPSRKLEMSRFEEWAKRHLCESDAVVIETTTNVWDIYDKVQALAGHAVVAHAGAVRQIAEARVKTDKEDVKRLIRLLIADIVPEVWIPPQPVRELRGLVSYRIRLVKTSSMIRNRLQSLLHRHNLVLQEEGLVDGEWWDRQEKICALEKLQIRQELCMLEQIEKHKAEVDQELGRQSLGETWGKPALRLMQLPGMGVVLAMTILSAIGEIQRFADASHLVGYSGLGAGVHDSGQEHIEKRITKSGRKELRWAMVEAAWRAVRMSPYWKEQYEKFLKRMRRPNPAIVVVARKLLVAVWHVLSKEELDERASEEDLAYKMLLWSWSLSKEVRQGLTYKQFAKYALMRLGVQTDITRFVRGKVPRRIAPREEVLERMTELGLRC

SEQ ID NO: 133218 - protein, 330 aa, unidentified
MRKEMVAGIDVSKDVLDVAVRRDERRLETAHFDNDVGGHRKLVAWLTKRGCTARVVLESTGTYSLDVALALHHARGIAVMVANPRAVKQFAGALMQRSKTDLTAAAALREYAARMPFVVWQPPAAEVLALRGIARRIAALVVERTRERNRLHAVRATAEQLAIVVNDIEVNIRHLERRIELLTAEAVALISEHGELHRAFERLTSVPGIATHSAVQLLPELLVLPDDMTVRQWVAHAGLDPRACQSGTSVDKPARISKVGNAHIRRALFMPALVAVQHEPHVKAFFDKLVARGKKPIQVYVAVMRKLLHAIYGMFATETTFVGAKFHATA

SEQ ID NO: 133219 - protein, 338 aa, unidentified
MAECCFLAIDIAKNVFQLHGAASDGSVVFRRRLMRDQLPEFIAKLPACVIAMEACASAHHWAEFRRFGHDVRLISPQFVRPFVKGSKNDGNDAEAICEAMQRPNMRFVPVKTIEQQDIQSLHRVRSRLVSERTALVCQIRGILAERGIVFAKALTRVRREVPVIAQDLNNPLTPILRTMLTELMDELSALDVRIKRFDHHIDAVFQSNEACQRIARIEGVGPKTATAFVAAIGDPHEFKNGRHFAAWLGLVPRQRSSGDRQLLLGITKRGDKYLRTLLVHGARAVLRTAPKKNDAKHAWALEVASRRGAPKAIVAIANKMARVIWVLLAKKEDYRPAV

SEQ ID NO: 133220 - protein, 405 aa, unidentified
MTVYIGIDWGEKKHDVVCLNATGAVITQFPIVHSAEGLLHLDSKLRQLAPSPEHLRIGLETAHTLLIDWLWERGYSQVYVIPPLLTRSCQRRYRQSGARSDRRDAYLIADLLRTDGQRLYPWHPDSALTLQLRAQVRWGLCLGRQQRRLSNQLRAVLLRYYPAALQVFGALDSQITLHFIQTYPTPQAAARVTWEEFAAFAQAHRYPSQRLLACFARLHARQPAAAPAVVQAYQPQAVHLATSLLDTVRTLASVRRAVTALFRQHPDHPIFASLPGTGELLAPALLAKFGDDRARFPQASTLQALAGTCPVTEQSGQRRRVLFRQACDREFRQIAQQWAKCSIEHSDWAASYFHEAQQRGQSASHAYRCLANRWLAIAWTLWQRRQLYDEAYHLQQRAARCRPRS

SEQ ID NO: 133221 - protein, 388 aa, unidentified
MPQSNDLSRSLAAFDQDRTLIAVIEMSQSNWLVAGLVPGLERRPLKKLSPDEDALLKLVQRWRNEAAQAGREITRIVIAYEAGRDGFWLARWLRRRGIEAYVIHPSSVAVSREHRRAKTDRLDTELLMRAVLGWLRGEKRHCSMAAIPTIEDEDAKRPSREHEKLVGDRTRLVNRMKAMLARFGIRTFKPTLRKAADRLDGLRTAEGTPLPENTRAELRRDMMRLRMVREQIKEIEQERLRKLTAAPAEKGPPTMVRFIARIIGIGIETADMLVSEILSRGLRDSKAVARYAGLTGAPDESGRRRREKGLAKAGNARVRRGMIQLAWRFLIFQKDSVLAQWYRARTADAHGATRKRMIVALARKLLIALWRMATTGEIPEGISLRAAP

SEQ ID NO: 133222 - protein, 339 aa, unidentified
MYPFYLGIDLHLKRTYMVLMDDKGTVIDKGRISNQEITKYLQEKVPQETYAVLEATRNWPFMYDLLTEHVQQVDLVHAKGVRAIANAAVKTDRIDASTLAHLARMNYIPKAYAASKEMRDLRQLLRHREWMVNQRSKAKNRIHAALAAYNLVSPVTDLFGVTGREYLHEMMDKELRPSACQVVEDHLAMIDHLTERIHSLEKNISLNERQEHIVNLLKSMPGVGRLISLIILAEVGDISRFHSPKSLCSWAGLTPRVHNSDAVVQHGHITKEGSRYLRSAMVQAATTACRVSPKWYRVHEHMALRCGRRAARVAVARRLLTVIYFMWKKDQPYQENYGQ

SEQ ID NO: 133223 - protein, 462 aa, unidentified
MQNYYLGIDVSKGYADFVIVNSKKHCVAENFQLDDTFDGHCRLYEILCGFFEKHPESILYAAVESTGGYENNWFSSLVSFHGTLNIRTARLNPLGVSANSKASLKRNVTDKISAQNVAEYMIAHPEKVSYQQQNHLGSLRKQWSFIKMLTKQSTQLFNQLEPLIYSANPELLAYCKDGVPRWILKLLARYPTASKLSKAKVVSVARIPYISSARAQKLVINANNSVASSTDEITGQLIKTMVKQILHLRQVIASQTEMMVKQCSVPEVDLLKTLIGINDFSAIGLILEIETVRRFSSVKKLASFFGLHPVYKISGDGTGRFRMSKKGRREPRRILFMVALTAIRANPHIRSIYLDRTQKGMEKMAAIGLCMHKILRIIYGMLKHNRAFDPEIDCNNRERNLRKRPSVQKDKNRRYQDFDSKAPISRRQHLKRKERKESHGDNDTKSGIITPVPIHNLTYIAA

SEQ ID NO: 133224 - protein, 400 aa, unidentified
MFVGIDWAAESHDLCALDDQGRVRDRATVAHSRDGLEALVRRLGRFARDGDVVVGIERPEGRLVDRILEAGYPIVIVPTFAMKDFRRRYTVGGAKSDRGDAYVIADVARTDGHRLRRLEPLSPETRALRAVVRAREDMVEQRVALGNQLRAGLEAFWPGAAAIFSDVCSEISLTFLERYPTPESAARVNEQRLALFLKKASYSGRRPAAELLERLRSAPAGVTGPEAEARADVVRASVRTMRGLNTSIKDLNRSVIAHLGEHPDAKVFTSLPRSGQINAAQMLAEWGDCREVYDHPDQVAMLAGLCPITHASGKHRDVSFRWACNKRLRVALTTFADNSRHASPWAAAIYTKAIARGCDHPHAVRILARAWVRVIWRCWQDAKPYDAARHRAATAVEIAA

SEQ ID NO: 133225 - protein, 341 aa, unidentified
MGQAHTIGLDIAKRVFQAHGADASGRVVFRKRLVRAKVLAFFAAQPPCTVAMEACAGAHHWARELGKLGHTVRLIPPAYVKPYVKRQKNDRADAEAICEAAQRPSMRFVPVKTEEQQANGVVFRARDLLVRQRTQCINALRGHLSEYGYIFPQGITHADAVIAHVEDPDSAVPESARAVLTVLIGTFQALEAQIQALDAEITQRAKADPVARRLMTIPGIGPIAATAITALVPAPEGFRAGRDFAAWLGLTPLQKSTGGKQKLGAISKMGERTIRRLLILGASAVVRWAGQRGTPAGSWLAQMLARKPKMLVTVALANKTARIVWALLVKGGVYRAPAPAA

SEQ ID NO: 133226 - protein, 337 aa, unidentified
MKFCGIDLHSNNSVVVVTDEMDRMLVSRRCPNELPVIIGLLEPHHAELLGVVVESTYNWYWLVDGLKAAGFEVKLANPVAMKRYDGLKHSDDKDDAAFLAHLLRLGILPTGYIHPPQERALRDLARKRIQLVRSRTQHILAVENIMARQFGQRLSCNEVKQLSATSVDRLGLPTDVALAMKANVAIVQALQAQIDFLEERLLHEANLRPEFSLLKTMPGVGEVLATVIMLETGDIERFADVGNFASYARCVKSAHYSNGKKKGEGNTKNGNAYLIWAFIEAANFARRFSEDAKRFFEKKKAKTNAVVATKALAHKLARASYHILKEKQPFDAKRCFA

SEQ ID NO: 133227 - protein, 413 aa, unidentified
MEVFCGIDWAEDHHDIALAGAGGQLLARRRISDDAAGLATLLELLASHGDRAEDPVPVAIETPRGLLTACLRATGRKVYPINPMAVARYRDRHSVAGRKSDHGDAVVLANILRTDAHAHRPLPADSELAQAIAVLARAQQDAVWARTAAHNKLRSQLREYYPGFLAAFADARCGITRPEARAILAAAPTPAAAATLTLSQLQALLKKAGRKRGITAEAARLRTALRAPQMRQLPLVEQAMGRQALALLRQLDAACAAAADLEQATVESFNQHPDAGIITSFPGLGSIAGARVLAETGDDRSRFADAKGLKAYAGAAPITRASGKTTAVLHRRVKNNRLADAGYTWAFAALTASPGARAHYDRRRHAGDRHAAAQRNLFNRLLGCLHHCLATGQHYDETTAFPPPAPTAHAKAA

SEQ ID NO: 133228 - protein, 399 aa, unidentified
MSERKSLELRVSVDVGSRRHSVAVGLSDGQVLEEFEIRHRGEGFQEFFSRIEKQQKAQGCKVAVAMEGYNGYARPLDSLVRQRGYRLYNINNLKLARFKEIFPGAAKKDRIDARKGLELFQLRDHLPLAKDVLQEVTGTPKENEILKRLTRRRRRLVNERVRVVNNLQADLQAVCPGLLEITTEASNQWFLNFVISGDTILQLARLGKSTLLKIPAVGRKYASLIQQWQKRAHFSEEAQWVSEMIQEDARRCLELDERIKTLETKIKEVAKSSKIANTLLSIPGFGAVCTSELAGEIGTVERFSKEGSLALYLGMSMLDNSSGKYQGTKQPKHVNTRAKAAMMTAVDRHRKYVPQSQKYYEKKRTEGKTHNQAIRALGRHLCRIIYQMLKEQREYRVRC

SEQ ID NO: 133229 - protein, 338 aa, unidentified
MNKFSGIDLHSNNSVVVVSDEADRVLYQRRLPNDPLQIRAALAPHREDLVGVVIEATYNWYWLVDQLMNDGYRVHLANPAAIRQYEGLKYSGDFTDAGHLAQLLRLGLLPEGYIYPAEERPVRDLSRKRMQLVQCRTAQILAIENLFSRNTGGQMRGERVKCLDQTQVGAFGFAPDVELAMQANLAVMQTLQEQIGILEKRLMERVKLKPDYVLLNSVPGIGPVLATTIMLETGTISRFTEVGNFSSYCRCVDSRRESNSRKKGEGNTKNGNKYLAWAFVEAANFAMRSCPEARRFYERKKRARNGIVAIKALAHKLARACYHMLREHKPFDVTRCFG

SEQ ID NO: 133230 - protein, 483 aa, unidentified
MKPKQEEKTKKATCRPAQGHWQQMNRKQRRDMTRKIQSEDINLEMVHPDAAGIDIGNESHYVAVPPTRDSEPVRRFGCTTAELKEMAVWLKQCAIRSIAMQSTGVYWIAVYDILEEAGFEVCLVNARETKNLPGRKSDVQESQWLMKLHTYGLLRNSFRPSQEVRTMRTYWRQRNDLVRAAGRHIQRIQKTMTQMNIQLANVLSDVSGVTGQAIIKAILAGERDPHELAAFRDCRVKASEEEIARSLEGNWQEDLLFVLKQEQDGYEFCQKQMAECDQRLHQYLKQREDRSTGANLPEEKRKERLRKKKKGNTPQFDLRGELFRMTGADLTQIDGIDVMTTMTILSEAGWDMSKWKTEHHFVSWLRLCPDNKISGDKVIGKGRLPTTNRVTTALRMAASTLRASNTYLGAQFRRLRTKLGAPVAIKAMAAKLARLVYRMLRYGMQFVDRGAEFYEDQHRKQQINHLKWKAANLGFQIIEASAA

SEQ ID NO: 133231 - protein, 343 aa, unidentified
MYYVGIDVSMTESALCILDGKGKIVRETKLPTDPEIIARFIAATGLAIERIGLESGCTAAWLFAGLQRHGWPVICIDARHAAAALQAGFRNKNDRNDARGIADLMRVNKYRPVWVKSPEAQRHGRLLTARATLQSQLVGLENTIRGLLCQEGIGLTDRRTAFEAAVREAIDGDCLLQAALHPLLETRNAVLRHRAALDRQILRIVRADPVCRLLMTAPGVGALVSLAFKVAVDDPRRYSRSRDVGAHFGLTPREHSSGELSYQGRISKMGDREVRRLLYIAASRMLRRDAALWCPLKVWAVRLAQRIGIRKARVALARKLAVVLHAMWSDGQVFQWRRSEALA

SEQ ID NO: 133232 - protein, 349 aa, unidentified
MKNTSSFTVGIDLGDKKHAICALDQSGDPVDERSITNHRESLRRLSQKYSGALMVMEVGSHSPWISRFLSELGHRVLVANPRKVRAIYQTDRKSDERDAKMLAKIARVDEALLYPIEHGSAEAQRDLLQIKLRDNLVRQRVDVISAVRFTLKSMGVSLKSPNTNYFARYARKALSGEQAPILELIEPSLQVIEQMTMQIKGFDKALEDLADSKYPITRTLREITGVGVITSLAFVLTIGDPERFEKARDVGAFLGLVPKRDQSGNVDHELRISKAGDKMLRRLLVSAAQYIIGPFGPECDLRRKGHRLLERGGQRAKKKAVVAVARTLAVVMLTLWKKNATYERVRTSA

SEQ ID NO: 133233 - protein, 334 aa, unidentified
MNSDTVHIGVDVSKEKLDIYVPAKKEGSRPMTKEVDNDIKGFRELRDLARKAKATVCLEPTGGYELELIAFMHKFGVPVAYTDALRVRQFARAEGSLSKNDTIDAALISRFADKIGVRVLEAQEVEAVELKRKAKFRQTMVDSRTAMINRLETEIDPEMKALLKEQIRLAGRIIDKAEKLCLDTVKKNERMDSLRERFTTIGGVGDLTAISILSSLPEIGTLSDGKLNRLVGIAPEERQSGTKEWQRRIWGGRRDVRNALYMAAVACIMWNSVLGSYYRKKRAEGHPHKWAIVPTMRKLLSLLNRMARDPDFVPAPEPESTKLNARVGRRRKAA

SEQ ID NO: 133234 - protein, 355 aa, unidentified
MSQTPNTAIAVIGIDIGKNSFHVVGHDTRGAIVLRQKWSRGQVEARLANLPPCLIGMEACVGAHHLSRKLASLGHDARLMPAKYVRPYSKGQKNDFNDAEAIAEAAQRPTMKFVATKTAEQLDLQALHRVRERLVSQRTGIINQIRAFMLECGIAVRQGIGFLRTELPTILATRTDALSPRMLRIIEELAGDWRRLDQRIDGLSGEIEALAGQDQACSRLMTVPGIGPIISSAMVAAIGTGDAFSKGRDFGAWLGLVPKQISTGDRTILGKIWRRGNRYLRVLFVQAAWVVLVKTKNWEQYGLKSWIEAAKRRLHHNVLAIALANKLARIAWAVLAKGRAFELTRTDDAGVVRPA

SEQ ID NO: 133235 - protein, 412 aa, unidentified
MSVVQFTQVLSRDCGMDIHKKVVVATVQGEGICKETRSFDTFTRSLTQLREWLVSLDITHVAMESTGVYWKPIYNVFEGFIPHIWIVNARHIKNVPGHKTDKNDSEWICQLLMAGLLKPSFIPPKAQRELRDLTRYRRKLIQSVSANKNRIIRILEDGNIKLSSVLSDTSGATAVKLIDMLCDGKQITLSEIESVRHGRCQHTKEEMLEACTGCLDEHKVYMLGKIRECNASLKEGILDFDKRIKDVLSSYHDAIERMCEIPGIQNRVCEDLVAEIGLDMSNFPTSAHLCSWAGMCPGNNESADKKKSGRTNHGDKQVKETLVEAAWAVSRAKGTFFMERFNRLAPRKGSKKALITVGHSLLKCIHYVLSTGGRYKELGDNYVPNKKEQKRKEYLKKELQKLGYSVKLSKED

SEQ ID NO: 133236 - protein, 319 aa, unidentified
MNTIGLDISQKTIDATLHKTDGSTYYTKVGNNREGFQSLKDWIKVNKVRKCVIGMEATGIYYEPAAENLSETHTVYVINPLKIKDYGKSQFNRTKTDKADSNLIAEYTKRHADKIIPYSKPKNRYLQKLINLKQQLKDHQKQIKNRLHSSDDEMIQAIHQDLIQAYQDKIDQAQTAIDAQIGKAETNGHYQNLQTIAGIGKDTAAILYAQLTDKTFQTANQFVSYAGLSPQTEQSGTSVNKKGRLSRYGHRRVKRSLYMPALVAYRTGAFPQLVRNLTNAGKPKMVIIVAIMRKLAKLAYYIVKTGKPYDSTRHKAAQA

SEQ ID NO: 133237 - protein, 350 aa, unidentified
MSQSNQYVGLDVSLKETSICVIDDADQIVWRGRTDSTPEAIASAVKQHAPHAVRIGLESGQLSSWLFHELKEAGLPVICVDARHAKAALSLKVNKTDANDALGLAQIMRVGWYREAAVKGLDCQAVRALLVARAQIVSQITTLKNCVRGILKTFGRVLPKGLRSQFPARVRAAIDGHPVLGAIIEPTLQVLEATRAQLLVYDNAVIQRARSDDTARQLMSAPGVGTVVALAYMTGVEDPARFKRSSSVTAYFGMTPRRYQSGEVDHAGRISKCGDGMVRGLLFEAAKVLLSRSARPSALKTWGEALGKRIGAKKATMAVARKLAVILHRMWTTGTTFQWNAEAASPAARG

SEQ ID NO: 133238 - protein, 376 aa, unidentified
MKRTGFRFVGLDVHAATIAAAVAEPTGEVRELGVIPNEPEAVRKLMKRLGPATPLRVCYEAGPCGYTLYWQLTRLGIACVVVAPTLVPVKPGDRVKTDRRDAKKLARSFRSGDLTPVWVPDAAHEALRDLVRAREAATKDQRRARHRLQKFLLRHGHRPPAETKAWTERYRRWLSTVRFEAPAQEATRLDYMAEVEHARERIGRLERALDDAIAAAPAAMRAVIDALQALRGIAKLAAATIVAEVGRLSRFDRPRQLMGYSGAVASEASSGPRVRRGGITKTGNAHLRRIVVEAAWSYRHRPAIGPTLQQRHTGQSDEIKAIAWKAQQRLHGRFRRLLARGKPPQQVVTAVARELLGFIWAIGVAVEGEPSERRVA

SEQ ID NO: 133239 - protein, 341 aa, unidentified
MNNLALVGIDLGKHTFHLHGQDQPGRALFRKKCSRQQMMQFFGNLPACTVVMEACAGAHFVARQLAAMGHQAKLISPQFVKPFVKGNKNDFVDAEAICEAASRPSMRFVSPKTEAQQTLSVLHRLRESLIRDRTKAVNQMHGFLLEFGISLPQGLAVMKRLSSVLAEHELPARLTVLLQRLHDHFVYLDEQIKELDKELASQLADDELGRRLLSIPGVGPITASLLAVEMGDGQQYRCSRDFAASVGLVPRQYSTGGKTNLLGISKRGDKNLRRLLVQCSRVYMLRLEHQQGPLADWVRSLLMRRHSNVVACALANKLARIAWAIATNHTEFEAGPSTMAA

SEQ ID NO: 133240 - protein, 331 aa, unidentified
MEEVKRFVGIDVAKVALDVFIGSAGGAFSVANDEVGIRELLRQMKPADFVIVEATGGLETPVASALAAAGIAVAIVNPRQVRDFARATGRLAKTDRLDAEVLARFGEAVRPEARPLADEQAQALEALVTRRRQLVEMLTAEKNRRARAPKVLHRSIDEHIRWLEKRLSEFDDELGELIRTTPLWRERDELLRSVPGVGKVLSSTLLAQLPELGMLNRKQIAALAGLAPFNRDSGNMRGSRSIWGGRAQVRRVLYMATVAGVRSNPTIRTFYLRLRTNGKHAKPALTACMRKFLVILNAMLHNKTRWQTPAPTFLTSSLSPLLGAVCEHGCC

SEQ ID NO: 133241 - protein, 412 aa, unidentified
MLKIVYRVCCGLDVHKSFVVACIASTNEQGVTTYKSKRFSTFTGDLRRCADWLSENNCKDVCMESTGKYWIPIYNILETTCNIVLAHPKYVKAIRGKKTDKKDAKWIADIFKHALVSGSFIPPADIRQLRDLVRYHWKLTNFIAGEKNRAQNCLTVSNIKLDDVFSDVFGKTATAITTRLLENNDPFDVVPYLNKRIKTPVEKIQAAVDGEMCVEQAEKLRIIRSHMNSLELCKLNLESLILTTAEKYLPQINLVLTVPGIKSFSAVGIISEIGVDMSVFPTSKHLCSWAGLTPQNNESAGKKKTTRISRAGAYIKPLLVQCALAAIRAKQFPEVRNRYLALKKRRGHKKAIIAIARMLLTAIYNILKKNEPYNPELYRKADRPPAHREIPLEEAIYLIQRQGYLVVAPTPT

SEQ ID NO: 133242 - protein, 394 aa, unidentified
MTFVGIDIGAEAHAAAAVNDQGSTVCKPFRFTADQAGHAALFTELERLAPVQLVVLEATGHYWKNLAAALVARDLPVAILNPLQSARFQQEALVRTKTDALDALGLARLGQQKRPLPATLPDHATEQLRELIRHRDRLVQDCGDRVRQLHRLLDLTFPEFKHHVALLDTALALTILKAFPTAADIAAATPRRLAKLRHGPRHFVGDPLARQLIAAAKQTVAAQSGDVYRVRIRHACEDLALWRARLLTIDTMVEALLEDHQVARLLTSIEGIGTTTAARLVAELDDPARFRSPEALACYIGLVPALKHSGKQTPKRAGLSPIGKAALRRALWMPTVHAVHASPWLRAFYDGLRARGKPGKVALIAAMRKLMVAIWTVAKQRRAWSPSPPQETTA

SEQ ID NO: 133243 - protein, 355 aa, unidentified
MTLFAGLDASVKETAVCVVDDTGKVVCEQKVSTEPDDIVRLLASIGKDYGRVGIGAGPLSQWLVNGLTAASLPVVCVETRHMMALLKAQQINKSDRNDARGIAQMMRVGLFKPVHVKTQMAQEQRMLLTSRKLLQRKLLDVESDLRGTLRNFGLKVGVVSTGKFEARIRELVAGFPRLTLVVEPLLAVRRVMRQQFAALHKMLLDTVRHDPVCRQLMTAPGVGVVVALTYRATVDQPQRFVHSRAVGAHVGLTPRRHQSGEIDYDGGVSKSGDTMLRTMLYEAAQSLLTQSGKWSWLKAWGMRVAQRRGMRRAIVAVARRLAVVLHRMWVDGTEFRWSNSTTAGGTSSRMNGRQR

SEQ ID NO: 133244 - protein, 402 aa, unidentified
MNCVGIDVSKGKSMIAVMRPFGEVVVSPFEVRHTARELSELARLLKNLDGETRVVMESTGNYHAPVAWLLHGAGFYVSVVNAMLVHDYGNNSLRRGKTDKKDAVKLANYGLDHWLTLPRYVPEEDTRLMLKTCYRQYQQYSKVQTMLKNNLISLLDTAFPDANRLFTSPPRADGSEKWVDFVATFWHCECVCGLSKKAFTAKYQKWCRKHGYNFSQDKALDIYASACGRFGVMPKTNTAKLLVEQAISQLQTTSAALAALKQEMQSLAASLPEYPVVMEMFGVGPTLGPQLIAEIGDVRRFHSKKALVAFAGIDAPPYQSGQIDVRSRSISKRGSASLRRTLFLVMGVLLQCAPMDEPVYQFMNKKRSEGKPYRVYMMASANKFLRIYYASVKAYLDSLEHD

SEQ ID NO: 133245 - protein, 276 aa, unidentified
MNVTAVGIDLAKNVLQVHGVDARGNVILRRQLRRDQVSVFFAKLPPCLIGMEACASAHHWGRTLERFGHTVRLMAPQFVKPYVKTNKNDVADAESICEAVCRPNMRFVPIKSIEQQAVLSLHRVRQGFVKARTAQANQIRGLLGEFGLVIPKGIWHIAQRVPELLEDASNELPLTFRQLIDRLTCHLKDLDRQVRELEREILAWHRSSDLSRKLEQIPGIGPLAATALVASIADARSFDNGRQVSAWLGLVPRQNSSGSPRSLGSANGAMSTCAPC

SEQ ID NO: 133246 - protein, 351 aa, unidentified
MLLIGVDYHPSFQTIAFLMEETGECGDQELNHSDGQAEKFYRDLKERGISVRVGMESTGYSRWFERLLAELGFEVWMGDPAEIKAKRVKKQKFDREDARLILRLMRENNFPQVWVPGPENRDLRQLLWHRHRLVQMRTRIMNQLHALAMNEGYRWKKKLFSEQGRAQLEKLTLAPWASRRRQELLELLDRMNPTIEELTAAVEREARKRPEAMRLMTHPGVGALTALAYVLIIGTPTRFQRGKQIGTYVGMIPCEESSARKQRLGHISKQGNSLLRFLLVEAAQAAARIHPDWRRRYIHLAMRRHKSIAKVAMGRRLAVRLYWMWRNGCEYSQSLEFGSYAGQLGTRHGVE

SEQ ID NO: 133247 - protein, 391 aa, unidentified
MFYIGIDIAKKNHEASIIDSSGKSLSKSISFPNSTKGIEKFNNFISEFGVTTNNCIIGMEATGHYWISLFSYIVDLGFTCYVINPIQSDAFRKMYVRQTKNDSVDSFIIAQIMRFGEFSISNFSDENTFALRNLTRYRFALVDECSDWKRKLVAILDQVFPEYSSLFSNIYGVASKELLSKYPLPEDMLSIPAEELGNLLCKCSKGRLGINKAEEIQSCARETFGIKFAKRSFSFQIKQIISQISFLEEQLKEIEIEISYLLEDICPIITTITGIGSVLGASIVSEIGNISRFERANQLVAYAGLDTRIKQSGDFSATNTKLSKRGSPYLRRSIWLAATVAAFKDPALSIYYQGLRARGKAHGTAIGAVARKLTNIIFAVLRDQKPYTPNI

SEQ ID NO: 133248 - protein, 352 aa, unidentified
MNRIVRVGVDLAKNVMQLHGVDVAERVVIRKAVTREKFLEWFANLAPCVVAMEACTASHFWARRLREYGHDVRLIPPQFAAPYRKGGSSVKNDAVDAEAICEAASRPHMRYVPVKTPAQQGALVLHRMRQGLIEERTALVNRLRGLVAEFGIFLPQGIHRFRERFAESVEDGGNELPGLTRVALLRGWTRIVELDAEIDWFDKQVAQHAKNDPDARRVTEMFGVGLITASAASATVGDARQFRNGRQFASWLGLVPKQNSSGGKERLGRITKQGDAYLRTLLFQCARVTLTAARRRQDRLARWVTQLVERVGYGKALIAIANKHARVLWAILAKGQRFDPSYDGQPHEVAAQ

SEQ ID NO: 133249 - protein, 389 aa, unidentified
MLLDHLSDGLTAIRTQFGAIFVSLELSRSNWLITSLSPGKGEKMSKHSVKAGDVAGLMKLFADLRRKAEARTSESYPIITLQEAGLDGFWLHRVLQQNGIESHVVDPASIATPRRHRRVKTDRLDGEMLLRALLAYRRGEPRVCAMVVAPSPEEEDRRRICRERRSLIAERITHVNRIKGLLFAQGISDYEPLRRDRRARLEALRTGDGRQLPAHLKAQIGRELDRTELLLEQIEAVETERDAMLAAARKPASEEAAPDVVTMLLALKGMGANFAAVLWSEAFYRQFSNRRQVAAYAGLAATPWQSGGIRHEQGVSKAGNPRLRTTMIQIAWLWIRHQPQSALTRWFKERSPQGRKRAIVALARKLLVALWKYVTQGVVIEGAVMKPAA

SEQ ID NO: 133250 - protein, 407 aa, unidentified
MVSVGIDVSKDKSMVCILKPYGEVVASPYEISHVETEMGDLISRIKLMDGEIRIVMEATGAYHFPVLHRLKEAGLFVSVINPLVMKKYVSTALRKGKTDKLDSIRIANYGLDNWFKLVDHRVAEEVYDELKQLGRHYSHYVKMRIQSKLTLDDLLQRTMPGIKTLLRGKRSEEPTKDKLSDFAEEYWHYDNIKKKSESQFVAGYAKWAKKKGYHQSEAKAKKIYAMALSGIPTLSSNSPSTKMLLLEAVKVLREVNRTLETILTQMQALSRALPEYNVVRSMNGVGDVLAPRLIAEIGDIRRFHSGSSLIAYAGIDSPPYESGSFIGTKRKISKRGSSLLRKTGYEVMKCVKSIKPKDDNAVYLFMLKKEAEGKPKNVAKIAALNKFLRIYYARVKEVYLQSAKSTA

SEQ ID NO: 133251 - protein, 376 aa, unidentified
MNEFNSVYVGLDVHKATIAVAVARAGRGEPEYHGEIENSGPAIRKLLKRLSPDGEVLNVCYEAGPCGYGLYRELRERGHDCEVVAPSLIPRKAGERMKTDRRDALMLARLHRSGELTAVWVPDEEQEAMRDLTRCREDMKSIELKARQRLGAFLLRHGKVYPGKSRWTQAHFRWLETVKFATPVQQVVLQEYIETVKETQRRVVALESQMREALKGWSLGPVAEALMALRGVSLITAMTALAELGDITRFDSPRELMGYLGLVPSEHSSGGTRRQGGITRTGNGHVRRVFVEAAWNYRFPARKTRCIEQRAEKTSARVQAMAWQAQKRLCGRYQSLMQAGKEKKQVTTAVARELVGFIWAIACEVTGKAHGSKVLA

SEQ ID NO: 133252 - protein, 387 aa, unidentified
MPQPNDLSRSLIALDQNSTIIAVVELSHSSWLVGGVVPGIERQPRKKLEPSPERLLGLLHRWRDEAVRAGSTITRIALAFEAGRDGFWLARWLEARGVEAHVIHASSVAVSREHRRAKTDRLDTELLKRGFLGWLRGERGHCSMARVPTIAEEDAKRPNRERDGLVGERTRIVNRIKSTLARVGIRNFKPALRKAAERLATVHTPEGMPLPPNTLAELQRDMARLSFVVSQIKEIEETRQKRLEQQPETGPDAMVRLLARIIGVGVETADMLVHEVLSRPMRDRRAVARYAGLTGSPDESGAQRREQGLSRAGNARVRRGMIQLAWRFLMFQKESALALWYRARTADSRSGTRKTMIVALARKLIIALWRFVTTGEPLEGVVLRPAT

SEQ ID NO: 133253 - protein, 387 aa, unidentified
MQKPHDNSKVCRAAFVQDSTLVVVIEMALTSWLVAGMIPGVDREPLKKIAPDPEELLQLLYRWRDEAIKAGKEITRIAVAYETGRDSFWLARWLRARSIDAHVIHATSVAISREHRRAKTDRIDTAMLRRGFLGWLRGEPGHCSLAIVPTVAEEDAKRPHRERESLVQERTSTVNRMKSILVQFGVRNFNPVLRKASEKLDAVRTPEGIPLPPNAAAALRRHMERLRVIKEQIKAIEWTRLQRLQRDPADKMNAMVFLLVRIIGFGVETAEQLVHEILFRDLRDRKAVARYAGLTGSPDESGSKRREKGLSRSGNGRVRTILIQLSWRLLKLQPGSELVLWYQKRTADAKGSRKPMIVAFARKLIIALWRYVNTGLLPEGFELKPAA

SEQ ID NO: 133254 - protein, 403 aa, unidentified
MFCLGIDVSKKSCRYLLLNQEGQKAKSFSLDNTHEAFQNLLKRLEELSIPKEDLLIGLEASGGFWENLYSHLKDNGFRVVLLNPYHTKNFREALAKKAKTDDIDALVIAQLLRTGEYVQSQVAEELIQSLRELTKLRYELMTERKNFQRQVFSLLSIIFPELEKTALKNPFSVASMAILQRFPTAKDLAQAKPKQIEKIVRSIQGNHFNIEEIGKLIQTAQTSIYSGRAKEARATSLRILLRHVQTLSSSIEELEAQIKEILSPQQAQDSFPGENLLTIPGVGDKTLAAVLSYLGTDGSGFSSSTKAVGYVGYFPKIFQSGQTHRENTICKRGPKLLRWALYMAAVASLKHNPEMRTLYHRKLSQGKTEKQALICVGKKLFQIMLAMLKSGEPYNPAKVFVSC

SEQ ID NO: 133255 - protein, 483 aa, unidentified
MSQKQNSPMPGAKTAPAGKGKRGRRGKGMCMQDRPLQEANAAGIDIGAREIFVAVPPDRDEHPVRIFSTFTEDLEKMAEWLVRCGVTTAAMESTGVYWIPLYDVLERRGLKPCLVDARGMKNVPGRRTDWHECQWLQYLHSVGLLRAAFRPDGEVCAVRALMRHRGELVAMTSQHIQHMQKALTQMNVQIQHVISNIVGVTGLAIVDAILDGERDAAQLAKLRDRRIKANEEIIRKSLQGNWRAEHLFTLRQSRKSYQHYQEQILACDEEIGRLIVAFAPRVDPTERPLPADRKRKVRGRKKKTATPQTGEAGFDLRTESYKLFGVDLTQIPGLMAMVLTLFSEIGRDMSRWPTAGQFVSWLALCPDNDISGGRVLWRGMRKVQNRAGQLFRMAAFTLHHEQSPLGDYLRRMKSRIGPEGATTATAHKIAVIFYTMVKKQVEYDASIWAEKDAQRDQRLEAKLKRQAHQRGYKLVPIEEKPAA

SEQ ID NO: 133256 - protein, 329 aa, unidentified
MGTNVLGIDVSKDTLDVVLWDQEHSQHQVFSNNAVGYARLSSWLTAQRAGTVHACLEATGQYGDGVAEHLYQAGHAVSVVNPLRIKRYGESKLHRNKTDKADAVLIAEFCVKENPPLWKPLPDSLKQLRQMVRRLDDLQCAYQQESNRLTSGVTNTWVVADLQGHLQELSQRIQAMKTAIDQFIAADPELKHKAYLLDTIPGIGMLTAARLLAEIGEISSFEDAPQLAAYAGLNPKGVRSGSSVHKKTRISKEGRAFIRYILYMPAISARTHNPIIREFCDRLAQRNLPKMAIVAAAMRKLLHLVYGVLKNDTPYNPNILKERVLALDF

SEQ ID NO: 133257 - protein, 428 aa, unidentified
MNVLNERITRITPTTIIVGIDAAKEIHWARITDYRGVDLTKPVKVHNSIDGFESLLEKIEKLRKKHGCDQVVTGMEPSGHYWRALGWYLKLHDSKPVLVGVNPYHTKQAKELNDNSQTKSDPKDALVVAHLIREGRYFDTYLPADEYAELRQLNTERQRIMKQISRANNILIALLDEFFPEYATIWGNVTCPTSLDLLNVYAFPSDIMSAPREKLLKDIRMASGGTEGIKLMEKMIKAASRSVGVKEGLRTVRLRMQNLIDELHYFKEKKDSIEAELESAMDTLQLGKVLQSMLGVGPIISAAFLGEVGDISRFSNWKQVRSLAGLNLVENSSGKHKGKTKVSKRGRPYLRHMLYLAGECGCRCNPEMRKFYRYLRDRKNNPLNRDQAFVATGLKIMRILFHLAKSGECYDPDKALGAVRLQQIASLG

SEQ ID NO: 133258 - protein, 430 aa, unidentified
MKSNTQNTKIEAITETTLVLGIDVGSETHYARAFDYRGIEYSKKPLKFSNDEAGFVTFKAWILDIKEKHGKDKVVPGMEPTGHYWFNLGKFLQDNEMKPVLVNPHHVKKSKELDDNNPTKNDRKDPKVIAGLVREGRYMIPYLPEGVYADLRTASNMRFQLQAELTRIQNRISRWFNIYFPEYKTVYGQPDAKSGMLILKVAPLPEDILTLGIDGVNQIWRDAKVRAVGKARAKTLIEAAEHSVGSKEGEISARMEIRMLLEDYESRNTRLQEVVALIEELVKKIPMAEKLLEIKGVGIKTVSGFLAEVGDISRFNNPKELQKLAGLALVENSSGKHKGETTISRRGRKRLRYLLFEVAMSLVSKNPEFRELHSYYTTRKLNPLKKMQSLMAVAAKLLRVFFAMLTKGVDYDPQKLVGDIKRPAVYLQVA

SEQ ID NO: 133259 - protein, 361 aa, unidentified
MSESMALVGLDVHKSRTVAAVLDRVTGELRVERLRGEPERVVPVFLEELDRPLQAVYEAGPTGFVLARVAEQRGLDIRVVAPGSIPRAPGDRVKTDRRDAKRLVRLFAAGELGFAFVPSEADERFRDLVRCIDDVRRDLMRARHRLSKFLLRRGVRFTGKAWTQQHERWLCTLDFEDPLSRAVFVDYLAAAQGLAQRRKTLTGVLEAAVPDSSHNETVGRLRCFRSIDTLTAAALCAEVGDFTRFAKPALLSGFLGIVPSEYSSDEKRAQGQITKAGPSNARRLLVEAAHNYRHRPAVGENLKARQSGQDPRVVEIAWRCQQRLHGRWMHLAGKRGKLAGKVAIAVARELAAFCWEAATLN

SEQ ID NO: 133260 - protein, 446 aa, unidentified
MQKSKAYRATKVKDVSVERVMENGPAGPVSVGLDVGKEEIYAVVRWSDGTFERPWKALNPAEVPVLVEMLRKVGASHSLTAAMESTGTYGDALRARLGQAGLVLHRVSGKAASDYAEVLDGVPSQHDGKDAAVIAELAAYGKSSPWPYHEPNEEDAELAYWVDWLDLQQRIQMMWICRLEALLARHWPEATRVVELTSVTLLRALAHYGGPAALAADPEAVRRLKTWGHWASTEKAERVLAAAVRTEGARQGMRDRLRMQQYATLALAAMRETKKAHRQLQELARGTEILQRMAGVVGLATTCVLWVTLGDPRNYPSGAAYRKALGLNLKERSSGKYKGRVKISKRGPANARRWLFFAALRMVQNPRVRRWYEAKKAKDNHHGKKAVTAVARKLVLALYAVAVHGQAFEAWRLFPGRSTARQALACSREMAPSPIPQGNKQRKKRS

SEQ ID NO: 133261 - protein, 389 aa, unidentified
MKIYVGIDIAKLNHFAAAISSVGEIILEPFKFTNDADGFQLLVSKLESFDKNSIIIGLESTAHYGDNLVRYLVAEFYQVCVLNPIKTCQMRKNNVRKTKTDKVDTFVIAKTLMMQDDLRFITFFDLDMMDFKALGRFRQKTIKQRTRLKIQLTTYVDQVFPEIQYFFKSGLHQNAVYALLKEAPSPKEIASMHMTHLANLLKVNSHGHFTKEQAKELRVLAQKSVGANDSAISIQITQTIQQIELLDSQLEKIEAEMTDIMKFNDSVIMTIPGIGYINGGMILGEIGDIHRFSNPNKLLAFAGLDPSVYQSGNFQAKTTRMSKRGSRVLRYALVNAAWNVVRNNATFKAYYDAKRAEGRSHYNALGHCAGKLVRVIWKMLTDEVEFNLE

SEQ ID NO: 133262 - protein, 369 aa, unidentified
MMVKRGSGLTPGPKHRRTEDNHGTLCRDRRVLELSSVCIVDAKGKIVRETKVPSDPAALVGFFRGLRIPVGRIGLEAGPLSQWLHAGLSAAGFETVLLETRHVKAALSAMTVKTDRRDARGIAQLIRMGRFRSVHCKSTGSQEVRALLVARKQLLGKLLDVEFSIRGILRGFGLKMGVVTRKNFDARARELCVGQAMLEKIAEAMLAARATLQKEYSRLHKTMLAIVRADAVCRHLMTAPGVGALVAITFKKAIDDPTRIRKSKAVGALFGLTPRKYQSGETDVTGGVTRVGDEMVRTALYEAANALLSRVTRFSALKRWGMDVAKRRGTKRAKVALARKIGVILHRMWVDGTSFRWTKEGKATQHVNA

SEQ ID NO: 133263 - protein, 326 aa, unidentified
MRIIGCDLHARQQTLAMLDTTTGEIVNMILKHEGNNVREFYSALPRPVQVGIEATGSMQWFLNLMEELGIECQVGHPAQIRAAEPRKQKNDRRDAELLLKLLAENRFPAIWLPSKELQDLRALLRHRHQWVRMRTRVQNALQSIALANGLRRGTALWSHDGQSRIAALPLAPHTAYRRSELQAMYEKFEAEIEKLNQRVEEQACGRAGALLLMTHPGVGPITALATEVFLGDPARFADSKALASYVGMIPREYSSGPRQRLGGLSKQGNPLLRFLWGEAGAHAARKDPELQRFYRRKLVQKGLGKASVAVALQARDPTVDHVAGSD

SEQ ID NO: 133264 - protein, 342 aa, unidentified
MTIQTIGLDLAKHIFHVHGVDATGQVAVSRALKRVDVSGFFANLPPCLVGMEACGGAHHWARTLMAFGHTVRLISPQFVKPYVKSNKSDKNDAEAICEAVSRPSMRFVPVKTDEQLDILAVHRLRSRLVANKIALVNQIRGLLAERGIIMAREVASLHRRLPEILETVDNGLSDNFRPLLAELYRQLVELETQIHQYDRQIRCIYTQHEACQRLGAIEGIGPLTATALYAAAGDARVFKNGRQFAAWLGLVPKQHSSGGKPRLLGISKRGDVYLRTLLIHGGRAALGRAGHKTDPRSQWLCALRARHHYNVAAVALANKNARIAWVLLARGETYRRAQPTAA

SEQ ID NO: 133265 - protein, 346 aa, unidentified
MKQIIRIGMDTSKYIFQLHGVDAAEQVVLRKRLRRSEMVAFFAKLPPTVIGMEACGAAHYWARELGQLGHTVKLIAPQHVKPYVKRNKNDGRDAEGLCEAMSRPTMQFVAMKTQEQQAALMLAGMRERLVTRQTQLSNTIRGYAAEFGLTVAKGLDKIEPLLADIATKLTLPALTRDLFAMHGREYAQLQAELKTIESRLLAWHRANADSRRLAQIPGVGPIVATTLVMKAPDPHLFPSGRHFAAWIGLTPKDHSTAGKTRLGKITRAGDERLRSVLVAGATAVIQQAKRGRGRASPWLLALLARKPPKLAAIALANKIARIAWKLMTTGESYDGARMPGASAFAA

SEQ ID NO: 133266 - protein, 425 aa, unidentified
MKQRCSVEGEFRIYVGLDWGTEFHRACVLDPTGKILRQCRVDHNGQAITDFLRSLDKLANGQPATIAMAIEVPRGPVVEAFLEGGFAVFSINPKQLDRFRDRYTAAGAKDDSRDAYVAADSLRTDQHCFRRIATDHPDVLRLREISRTEESLGEDLRRTVNQLYQLLLRYYPQLLQLNSTPDEPWIWALLEAAPVPQRGAKLTLARLKSLLAKYRIRRWTAEQLQAILRTPPLPLSAGSADAISEHALVLLPQLRLLYSQRNKVRDRIEALLDYMTLLGREHPECREHRDVGLLLSIPGLGNLIAANLFTEGTDALAQRDYDALRAHSGAAPVTRQSGKSKQVIMRRGCSERLRNAVYHLARCSVLHDPHSKRHYAELRGVGHKHGRALRGVADRLLTVLIAMLKNGKPYDATRRSHAATPAEAT

SEQ ID NO: 133267 - protein, 508 aa, unidentified
MRRAGIDIALRAAHRAAVYDDGERRGRPFPVAQTRAGIDELVRRTSAGHEGACEFVMEPTGLAWLPLAAELSRQGHKVFMPKPQKTHALRKFLAQHAKTDAIDACAAALVRHVDKDTHELRVPTATETTLRLVIKQRARLVREAAKAKGRIQSYLVLANPHLGGALGRDRTSEVATAFLRRQLDPSEVVARGKAELRRFWQRHSHGTLNEKQLEAVWAACVTTRDLYAGLRDGKRLPFEYRSLQLMVRQSLEHIEFLEGQVDELDAVAARCYAELDPERFLEREVCGFGPTIAAAVQAFAGDVERFGSVKRYAAFFGITPRTKQTGIAGEKPRQRMTKGGHNLLKQYVFLAAETARRHDPELANTYAHAIARGKHHYSAVIIVAHQLVRRVYGLLKARAAARAAGTVEPSYRLRAPDGRPLSKADARSFVAKHYPSKAAKEAAKRAAQAAPRSRSLPQGTGSSEDATKAVAAALPNGLVAEPFACEKSEDNPVSNSSNSKANISLDEA

SEQ ID NO: 133268 - protein, 330 aa, unidentified
MTHYIGIDVSKNKLDIAWLKDTDKLKFKTKVFKNDHSDYAALINWLIANITDDLNNIHITLEATGVYHENIAYYLFDKKLNVSIINPAYVKSYAASLGSRNKTDKKDSMLLARYTYSAKPKLWTPPPAEARHLKSLLSRLDALQEDLQRELNRLEKTEATDTAPIVKASIEQMIVSLQAAIVKLNGDIDDHIDGHPNLKQDQYLLQTIKGVGPVVSKQMMSLMHNKQFSQASQMAAFLGLVPKHSESGLFKGKSRLAKNGSSAVRAKLYMPALVAIKHNPDIKAQYERLLANGKCKMQAVCAAMRKLVHICFGVVKHQQPYQARVELIST

SEQ ID NO: 133269 - protein, 309 aa, unidentified
MSGQNHRSTVHSDAEASIEHDSTLYVGLDVHQDSITVAYAIGMGEVELFGKVGTMHIDIDRMCKRLQSKAQHICFVYEAGPCGYGLYRRLIDKGFDCVVCAPSLIPRKPGDRVKTDRRDAVKLVRSLRAGDLSAVHVPTIEDEAFRDLARAWSAAREDLKAARCRLKSFLLAHGVHYLGRASWGPTHRRWLSTFSFDSAWQQLAFNEHRRTIEDRLAQCERLELALHEAVTGWRFYPVVLALQAMRGINFTPAIGLVSELGDLTRFEHPRLLMAWIGVTPSEHSSGAKRRQGSITKTGNSYARKLLGIR

SEQ ID NO: 133270 - protein, 325 aa, unidentified
MYAAIDLHQKTVQLVLKDERGQIADETKINKDANNILEFLNGSKATVVMESGYNHEHIYDLLKEKGYDVRVAHPLMVKAIAYAKVKNDKVDARTLADLLRLDMIPECYIPSIEIRELRDLARRRHYFVSTRTMFKNKIHAELSRRWVEYSKADLSTEAGRKRLRSLEIRAVDDYLDSIEFLDAKIGELDNQIKEQALQDKYAKLLVTVPGISYYGALLISSEIADINRFQDPEHLCSYAKLAPGTHQSGDTQYQKVDHKGNRMLNWIMIQCTHIHVLNCNSSVTKHYNRIKETRGNKIAIVAAARKLMKAVYIMLKEERAFRLDG

SEQ ID NO: 133271 - protein, 319 aa, unidentified
MDAVLGIDVAKHKFDVTLILSNGVRRRKACANSPTGFADLGTWLRRHGAGRVHATLEATSTYGEALATALYDAGHRVSLLNPAVIHHYAKSHLTRAKTDRVDADLIAEYTAKEHPALWAPQPHEVRELQALVRRLDTLLGMQSDERNRAETALTPAVEASIAAVLRQLEEQIRAVRAQIRRHMDQHPNLRNQRELLTSIPGIGDTTAALLIAELFTKAFASARQAAAFAGVVPRPRDSGTVQGRRVMCKLGSARLRKGLYFPAMAALRCNPALQSLATRMRHAGKPPMVIIGAAMRKLVHIAFGVLKSGRTYDSLLART

SEQ ID NO: 133272 - protein, 344 aa, unidentified
MSEVTTIGLDIAKHVFHAHGADAPGAMAFSRRLTRSKLLDFFARHPRCVVALEACGGAHHWARELRAIGHEVRLIPPAYVKPFVKRHKNDAVDAEAICEAAQRPSMRFVAVKSEEQQAAALVFRTRDLAVKQRTQIANAIRGHLAEYGWVAPKGAAHLAMLADLLEGGEIGDTLPEAARPMFAMMIDMLTVLDRRIGELDKEIARRAREDEVARRLMTIPGIGPITATAIAAIAPPAETFAKGRDFAAWLGLVPKQASTGGKQKLGAISRMGERTLRRLLIIGSSAVVLQASKRGAPAGSWLEGMLAQKPRILITVALASKMARTVWALLVKHEDYRAPVAVAA

SEQ ID NO: 133273 - protein, 379 aa, unidentified
MEYCTTIGADVSDRTTKICIMTKADGGERRIVLETTCATTKADFEEAFAKFDRSWPVVFETGTHCRWMDRLFRKMGFKTIVGNPGKIPSITKSNTKNDRNDARELARLAIADPAMLHPVFLRDEVYQQMLRYHHARNVLISQRTQITNQIRGFAKSMGHRIKCSAEKFHEQSKADWPDELEECAWPLMGVLKTIALKIKAYDKLIERLAERPEFKTMVERVRVVYGVGIIGSTVFIAAIGGRPDRFDRTRDIGPYFGMIPKQDQSGDDDKQLHITHAGSEIVRTTLVECAGVVMTEKSKDTDLKLKGLRIAMHGGRIARKKAKVAVARGLAVTMLALLQHPEREYVPLSEEGKKGFERYRAEMEYLTMQKASRKEKKVA

SEQ ID NO: 133274 - protein, 390 aa, unidentified
MVQVNDLSRSLAAFDPISTLVVVVEMSKASWLVAGTVPGVERQPLKKLEPDATALLRLIERWRNEAVRAGRPIRRIALAYEAGRDGFWLARWLVSRGIEVHVIHSASVAVSRERKRAKTDRLDAAMLMRVFLGWLRGERGHCGMVAIPTIEEEDARRPSRERESLVNERSRIINRMKSALARLGIRGFKAHLRKAPERLAALRTPEGRGLPTNTIEEFRRDMARLALVREQITSIEKTRAERLERAPDTGAHAMVRLLARVIGIGIETADMLVQEILSRTLRDRRALARYAGLTGSPDESGMRSREKGLAKTGNARVRRGLIQLAWRFLIFQKDSALARWYRTRTEGPNGARKTTMIVALARKLLIALWRLVTTGEIPDGVELRPAAAMV

SEQ ID NO: 133275 - protein, 344 aa, unidentified
MSTVATIGLDVAKDVFQVHGAAANGARMFNRRLRRSEILDFFKQLPPCIVGIEACSTSHHWARSIAEFGHDVRLIHAQYVRAFVKRGKTDANDAEAINEALTSKAMRFVPVKTAEQQVSGMIFRTRAFFVHQRTQAINSLRAHLAELGIVTAKGARNVKTLAAIVEDGELPACSCLALRQFVDHIQLLDSRIAKLNREILAQTREDETRKRLMTIPGVGPITAAAIHAFVPQPREFRSARHFASWVGLTPKSHSSGASQVLGHISKMGNAHLRSLLVVGAMIVLRQVKADDVKMRWLSALKKRRPFKVAAVALANKTARIVWALLVKGGTYVGSPNSTSAVNIA

SEQ ID NO: 133276 - protein, 335 aa, unidentified
MNKYIGIDVAKATLQVYIPKSRTDLEFENSPAGLKKLYAVLKKQYKDEYPSLIFVYEPTGSYSTLLDRFSMQHSIDCFKVKPSQSSSFSKSLDNRNKSDKIDARLLHKMGAIARQKNIAVPHLDDDAHFLQSLYKYLRRIVKETTALSNYLEASLLHQEDPFIIKRLRSKIKRLETEEKEITQKILTFIKQNTAYNNDFENITSIKGVGPVAGIALFYLFLRYPDISRNKLTALCGLDPVSKTSGSSVNKKGHISKQGNKIIRSTLFMPVLCATTFNQELKTFYEHLKSNGKHSTVAQIAVMKKLILLAYSLYKNNQKYDPHRFLKYQQIKQKCL

SEQ ID NO: 133277 - protein, 325 aa, unidentified
MSLPVLGIDVSKKSLHLALLKSEHDKPLHKTCSNSEAGYKEMVRWLESRKVGSVQVCLEATGWGEEAAASALVEAGHRVSLLNPHAVRQFAGVVSPRTKTDKKDAEVLALFGLRNQADLKAWEPPPPEYVLLRELVRRREALVSIRTQELNRLEHASQSETVQRSLDTHVEHLDQQIEALEREIDEHIDKHPGLKHRSELLQSIKCVGPILAANFLAEANTLVDYFEKPRQLLAYCGLTLKRKESGTSVRGKPKMCKYGNRELRGALGMPAKTAMRWNPVVKELAQRLLAKQKPFKVVWGAAMSKLLTLMFVVIKKDQPFKLQTA

SEQ ID NO: 133278 - protein, 385 aa, unidentified
MAQLNDLSRSLTSLEPDSTIIAVIEMSQSSWLVAGIVPGIERHPLKKIEPSEEELICLLMRWRAEATKHGRTITRIAVAFEAGRDGFWLARWLRARDIEIYVIHPTSVAVSREHRRAKTDRLDTGLLKRVFIGWLRGEPDHCHMAAIPTLAEEDAKRPNRERERLVRERTRLVNRMKSCLVRFGVRNFKPTLRKAPERLETLQTPEGVPLPPNTLLELRRDMARLRFVMDQIKQVEEARAQRLEQAPQEKSHAMVRLLARVIGVGIETADMLVHEVLARNLRDRRAVARYAGLTGAPDESGSKRREKGLAKAGNARVRRGMIQLAWRFLIFQKDSALAQWYQTRTASVGKKRKTMIVALARKLLIALWRLVTTGEVPAGVVLRAA

SEQ ID NO: 133279 - protein, 411 aa, unidentified
MKNSIKATKMQSAKKHPVKTQISNTQTKKASREIEQLSQRLKHPMRDRGSQARAAKEIGCYVGIDLGDKKSNYCFIDAKGNIFAEGTLATTQTELNELFSSIPRCRIAIEVGTHSPWICALLKSHGHEVIVANPRKVESIHKNRRKNDKVDARTLARLVRADPELLYPIQHRGDQARQDLVLLRAREGLVEARTKLINCVRGQVKSVGGRLPSCSAESFHYTVVDKLPDSVKEALLPLVLQIGEMSKGIRAFDAEVVRMSSQKYPETERLQQVRGVGPITSLTYILTLEKPERFEKSRDVGSYLGLVPRQDESGETSKQLRITKTGDKMLRQLLVSSGQYILGPFGEDCDLQRFGLKLAERGGKNAKKRAVVAVARKLAVLLHRLWLTGEKYEPLHNAHLQAKTLSIAANG

SEQ ID NO: 133280 - protein, 346 aa, unidentified
MMIIGCDFHPSWQQVAWLDSETGETGEQKLLHAADEAKQFYAQLGVPALIGMEATGNSQWFIELVEDLGHEIWIGDAAAIRASYVRKQKTDKRDAAHILKLVVEGRFPRLWTPDREQRDLRQLVLHRHKLVIIRSRVKNELQHLSLNKGMQKKRRLWSQAGLQLLRELPLKPWAACRRQDLLGLLAMLEQQIGKLDQAVQQAADQHPQAKLLMTQPGVGPNTALAFVLTIGDVSRFARGKQVASYLGLIPREESSGGRQKLGAISKQGNRLLRSLLVEAAQIAVRCDPGLRKQYLHRCHQKPKGVAKVAAARKLAVRLYWMLRTQTGYPEIVRIESSPRVPLVGAS

SEQ ID NO: 133281 - protein, 384 aa, unidentified
MTIVEADRPVTGGVDTHVDVHVAAALDPIGGLFGVESFAASPAGYRKLYGWLSSFGPLARVGVEGTGAYGAGLSRFLQRQGVTVIEVDRPNRQARRSHGKSDPVDAIEAARAALSGRARGLAKSRDGNVEAMRALLVVKRSARSARVATVNQMRHLCFTGPDDLRSRLAGLSAIMLPREAAAMRPRDTGDPVAYATRLSLQMLGRRMLLLDEQIERVEGLLGELVKQTAPTLLAIYGVGPDTGASLLVAAGDNPERLRSEAAWAHLCGVAPIQASSGKVVRHRLNRGGDRQANAALWAIVFCRTVSHPPTRAYLERRQKKDAPNERSCASSSATSPARCIRTCAASSLRRRAWPKMCLTSNGLSSVRYAGPPPSTQLATRGRLA

SEQ ID NO: 133282 - protein, 369 aa, unidentified
MKKISTAAAKQTRNFSEQKLTIGLDLGDRSSWYCVLDEAGEVVLERRVSTTPKAMREVFGGMPRSRIALETGMHSPWVSRLLSELGHEVIVAHARNVRLIGESRRKDDRFDARTLARLARIDPQLLSPVQHCSAQAQAHLMVIRARAGLVRTRTSLINTARGLTKSYGERLRGCSPRNLNAETARQLSPELQAALEPLLGAIESLSQRIYEYNQQIEKIAKESYPQVARLEQVKGVGTLIALTYMLTLEDAQRFRKSRDVGCYVGLQPGRRNSGQSEPQLHISKEGDPYLRKLLVQGAHHILGPFGADSDLRRWGLKPAERGGKNGKKRAVVATARKLAVLLHRLWVSGEAYEPLRNSRREILPAAAKF

SEQ ID NO: 133283 - protein, 416 aa, unidentified
MNAVGIDVSSRKSTVAVLRPLGEVVCLPFDVTHDIAGLASLVEKLKALDGETRVVMEHTGRYYEAVEKALHEAGFFVCAVNPLLIKEYGANSLRRVKTDKADAVKIARYALDNWADLRDFTPMDAIRYDLKTLNRQFQLASKQRTASANNLIALLEQSFPGIRKCFDSPVRSDGTQKWVDFAHSFWHVDCVRKQPFPAFCERYRKWCKRHAYFFKLRNAEKVYALAKSAVVLTPKSKVVKVLVQEAANQLISISRSVEVYRAEMDRLAAMLPEYPVVMAMYGVGKSYGPQLMAEIGDVRRFERKQALIAFAGIDPMPNQSGDKNVRSNKSSKRGSPYLRKTLFNVIRTYLQCAPQDEPVFQFLNRKRAEGKPFYVYMLAAANKFLRRYYAKLRDYFASPDTLQSVAPIPATLKASL

SEQ ID NO: 133284 - protein, 326 aa, unidentified
MFYLGIDVSKNKLDCCFFYEKDYPKKKNKIFPNQTKGFDALNLWLSNLKVDPQQTIVLMEATSIYHEPLAEFLFSKDFNVCVANPARARYFAKSMSKLNKTDKVDSEVLAQFAMTSDLHYWKPLAPHIKLLNALLERRAVLLEDLLRERNRLEKADFINLVEPVLASIQASIQYLQCQIKDLDQQINDHIDQNSDLKKDRKLLCSIPAIADQTSLLMLSFFHSHTFEKASQAAAFVGLVPIHRQSGSSVRGRSQLSKAGSAKIRSGLYMSAVVATQHNPHIKELSERLLSNAKSKMMAIGAAMRKLIHICFGVLKHQQPYQANYST

SEQ ID NO: 133285 - protein, 335 aa, unidentified
MGAEYVGIDLHRRRSVIVRKNAAGDKVSSVRVANNALAIAAAVAEAGPEPEVVIEATYGWYWVRDMLQAPGANVHLANPSGLNWGTRRVKNDERDAIDLIDMLRLGRLPEAWIAPPATRELRELVRYRAKLVALRSGLKAQVHAVMAKAGVLPESADMFGKAGTTQLDAMRLGDAYDVRVESLRDLIALYDREVAMLERLIAARLRGHRGYRAIQAINGIGPTMAAILVAEIGDVHRFTSAPALCSWAGLTPKHRESDTTVHRGGVTKQGSRLVRWAVIEGTVRYHGGTKLARDFHKIAERRGKNKATVAIARKVLTLVYYGLRDGEIRCLARAA

SEQ ID NO: 133286 - protein, 320 aa, unidentified
MKSSNSTDKIFVGVDVSKATLDVYRPDTQELLKIDNSHEAITALCSQLEKKKRKVMVVMEGTGGYETLLLKLLASHKLEAAVINPKRLRNFAKGIGLDAKTDAIDAKVISKYAEVVEPQPMATKSDHEEKRGALVARRNQLLELISQETNRLKQSWDNDAKQSIQNVLEVLKKQLKDIDTKLAKMLQQDTENQRTIEVLQSVKGVGPVMVSTVLAELPEIGKLNRGEIAKLVGVAPINRDSGTRSGKRFIGGGRGQVRRVLYMATIVAIRHNPVIKAFYVHLKSSGKESKVAIVACMRKFITILNLLVKTDQLWVNKMSV

SEQ ID NO: 133287 - protein, 483 aa, unidentified
MSLITLGLDVSKGYVDVLSLDNEGVLGPLERLDDGPLGHQRLWAMLDECVQAYTAVAVGVESTGGLERNWKRCVMAWCKEHAIDRDQVRFDLLDPRIVKRTAESLGTRCKTDQSSARAIAESLHRQYDDRAILFDDPKVEACRSWFRAISAAEKREIEVINQIKALLPQIHPALVSRLSQSGLPHYALELLTQYPTAERLARARSQTVAKISGITDTVARQLITDAQQHKMAANGVAHEHHMRFLVHSLALMKQLTKEQWTKLASEISDSTEIQRLKTIPGIGDKVSLAMIAEMGTLTRFVSGDALVAYCGLDPIFEQSGDGIISKGISHRGPAKLRGILYSAARSAITHNPVIKAFFNRLRAKGKPYTLVVTACMAKLLRLMYACVITETNFDSAIHEHHLKQCNGDQRAHEPTGRQIVKEAVRDPLAPISRKEKQRRKAQEKQQVADAQRGQSLNAGSPAVADDSALGRRKIKNQEPANMT

SEQ ID NO: 133288 - protein, 347 aa, unidentified
MRFYTQQHGYYCGIDLHARTMYVCIISQDGTVLVEKNIPSRPGPFLELIAPYRNDLVVAVECIFTWYWLADLCDEEGIHFVLGHALYMKAIHGGKAKNDRIDAGKIAVLLRGGMIPRAYVYPSPMRSTRDLLRRRLHLVRHRARLLAHIQNTNHQCNHDDFRKRLTYKANREGVAEQFDDPSMRKSVEVDLALIGHYDGIIRDLELFIVRMAKQHNTDMFHRLRSITGVGKILALTILYEVHDITRFERVQQFASYSRLVKCSRESAGKRMGTGGAKIGNVHLKWAFSEAAVLYLRANPAGQKYLARLTRKHGKGKALSILAHKLGRATYFVMTRSQNFDEQKFLAA

SEQ ID NO: 133289 - protein, 351 aa, unidentified
MHLGVDTHKRSHVLVALDDAGRQLGTRPIANTPAGWAEALAWARGKHQQQRRWGIENGGSLGKGFAQCLLAQGEATVREVRPQRTAQYRRRGRTQDKTDQADALAIARLLLAEGEPLPAIPRDDGSTALRVLSDHRDNLLVDRTRLSNQLHAPMLQIDPDYQARSGALTARRGLLSCRDLLLPEADGVTLTRQRIVRQLVGQILGLEEESATITAALGARVRASRTPLLALCGVGEVIAARLIGELGIVPRVHSAAALAALAGVSPVAVSAGGRGGCRLNRGGNRQRNRVIHLLALSQRRCDPRAQASYAKKRAEGKTRRAARRCLKRRLVDVLYRCFTRGTVEQPVAVAA

SEQ ID NO: 133290 - protein, 458 aa, unidentified
MRIMYQRCCGIDVHKKMIVACLLLISDQGVQKEIQIFSTMLPDLFRLREWLTAQRCEAVAMESTGVYWKCIWNVLEGEMELLLCNAQHIKAVPGRKTDIKDAEWIADLLQHGLLQASFVPPRSQRELRDLTRYRSSLTADRARLVNRIQKTLEDTNIKLASVLSDITGKSSRAILEALLAGEQNPEILAELAHRRVQGKREQLVQALQGTLSAHHRFLLASQLRRLDFFDHQLRELDQEIAHRMGLSSEAPDPDGPDGPPDLPAKEEAAEAPDLPEAAASTPLAVQQAVSKPLSSATALRILDEIPGINERIGAIVVAELGLEMDQFPDEAHLCSWVGLCPAAKISANKRLSTKTGKGNRWLRQALIEAANAAARSKDTFLSAYYQRLRKRMGHKKALVALAHRILIIIYHVLKEQQAYQELGPGHVEEKAIEVAKRRALRTLEHLGFEVTLHETEVA

SEQ ID NO: 133291 - protein, 416 aa, unidentified
MNAVGIDVSSRKSTVAVLRPLGEVVCLPFDVTHDIAVLASLAEKLKAIDGETRVVIEHTGRYYEAVAKALHEAGFFVCAVNPLLIKEYGANSLRRVKTDKADAIKIARYALDNWADLRDFTPMDAIRYDLKTLNRQFQLASKQRTAFANNLIALLEQSFPGIRKCFDSPVRSDGTQKWVDFAHSFWHVDCVRKQPFPAFCERYRKWCKLHAYFFKLRNAEKVYALAKSAVVLTPKSKVVKVLVQEAANQLISISRSVEVYRAEMDRLAAMLPEYPVVMAMYGVGKSYGPQLMAEIGDVRRFERKQALVAFAGIDPMPNQSGDKNVRSNKSSKRGSPYLHKTLFNVIRTYLQCAPQDEPVFQFLNRKRAEGKPFYVYMLAAANKFLRRYYAKLRDYFASLDTLQPVAPIPTILKAAL

SEQ ID NO: 133292 - protein, 577 aa, unidentified
MAVTMSLDRIGVGIDTARYGHRVSFLRPDRQPAAKPITVMENHAGYQSLKERLIQLRAKNPDVIFQIRIDAAGQYAANLEQFLRGLDLPITLSIGEPKRNKDYQKAHFPKRTTDDTESQAMARFAVVEQPDATPAPTTPMILLREVVGRLQAQVKQTTQAVNRLHNVLARVFPELATLTHDIEASWVLRLLKQYPTAERIAVARLSSLEKIPHLSSEQARALHQAAGKSVASLRGPVAEALVGDLVTQLRHCQNAERSLRKLLTTTFAELPASPHVQVLTVPGVGQATAAAIVGKIVDIDRFATPDQVVGYFGVFPQENSSGVDRQGNPLPPGTMHMSRKGNDLVRSYLWNAARVAIRHNPAVRALYRRLRAKGKRGDVAMGHCMRKLLHLVFAVWKTNRPFDEKHYPWMNPGDTAPVKNSTSSSAEATGRANDKAGGHKRNKSAKKVVTPATSTVEPAPSAVKLPGAARPRVDFAFLRQQVTLYQVLAHLDLLGQLRGTGSQRRGPCPVHSHPADREHTFLIHFGNNTFKCVKADCAVQGNMLDLWAAIHRLPLYDAALHLAETFGLRRNREEPPQ

SEQ ID NO: 133293 - protein, 443 aa, unidentified
MARKKSQRHFQLIHPDCAGIDIGSREHWVGVDPRHGQVARSFTAFTDDLIKLADWLEELGIKIVAMEATGVYWIPLFELLDARGFDVYLVNSRATRQISGRKSDVLDCQWIWQLMSHGLLRGAFRPADNICSLRALVRQRATKVRDQAKALNRIQKALSQMNIQLANVISDISGVTGMKILRAILEGERDPARLAQLRNSRIKADEDTIARSLQGNWRLEHLHALDQEVACYDFLETQIVACDEQITRSLELLPVLEKAPQPSKKALRSPHRSTQDQSTLHKVLWKTMGVDLTTIPTIGVDTALTLASEIGADLSKFPSMKHFCSWLGVAPPTRISGGKQLPGKGPKVINRAAQALKQSASNARNDQSFIGACHRARLSRMDASCAIKATAHQLARLIYAMLTKGQSYVEHGIEGFEEQSKERQHRALLRKARKLGFNLVKAA

SEQ ID NO: 133294 - protein, 387 aa, unidentified
MKKFNYSIGIDVSKDNFVVSIKGSSFIKTNLAFSMDKTGFENFLSSTYQFKNSSICAFEPTGIYHTNLLNFLKTNGYNVFMVNPYKVKQFSKFIKNKPTKTDKIDSKVLAEFIQFSQDTIPSISEEKENFRQLIREKEFISVQIAYIKSEIKRLLYLVFPEIARSGNVFSSGIISILKIFPSAFSIKNISEEKFISSVEKYLPKKGKKPELELIYQLAKNSIAYYYPHYEKILKMKIDYFCFLEKQKSQISEIINQLADKIYKREIEILTSIPGIGETSAIYFISEIMDIRRFENSKKLIGYCGLDPVIKQSGRYKGQWKISKRGNSHVRRIAFIMGSCVRKNCPYFKQYYEKKRNEGKSYMEAVIATSTKLLKVIYSLLIENRLFI

SEQ ID NO: 133295 - protein, 343 aa, unidentified
MKITTIGIDLAKSVFQVHGVDTQGKAVFKKQIKRDQMVTFFTNLMPCLIGMEACGSAHFWARKLQALGHTVRLMAPQFVKPYVKTNKNDMADAEAICEAVSRPNMRFVPIKDVDQQAVLAVHRVRQGMVKARTAQANQIRGLLSEFGLIIPLGIAYINKRVPALVEEAGDALPGAFRALVQRMLDHLKELDRQVGELELQIKTWHHSSTLSRKLEHIPGIGPITASALVASIGNARNFANGRQLAAWLGLVPRQHSTGGKSNLLGISKRGDCYLRTLLIHGARSVIRFAQNRPCEKSGSSWLQTLIGRRNKNVATVALANKNARIVWALLAHDRDFRSDYARA

SEQ ID NO: 133296 - protein, 342 aa, unidentified
MTRYVGLDVSQRLTAICVVDDSGRRLWRGQCPSDPEQIERTVRRHGGDDARIGIETGPMTPWLVHELRGRGLAVTCLDARHARAALKMQINKTDQNDAEGLAQIMRTGWYRSVHVKSFDSHRARALLGARAQLVGMTTRLSNHIRGVLKTFGMLPGAGRGLPFDRRVETLLADRAEEAPIVRPMLVAWRQLRQQIATFDKAVRVLVKSNPTCRHLMGVPGIGVLSVLAYVSTVEDPARFGRSRSVGAHLGLTPKQYQSGEIDRSGRISKCGDALAGTLMYEAAVVLMTRVKRALVLKDWARSIAKRSGAGKARVALARKLAVILHSMWRSGEPFHWSEQPAV

SEQ ID NO: 133297 - protein, 355 aa, unidentified
MDSTKYIGMDVHKETISIAVLDSSGKLVMESVIETKGITIVQFIRGLRGELRVTLEEGTWAAWLYDLLKPYVHEVLVCDPRKNALLKAGNKNDQIDARKLAELLYLDRLTAVYHGEHGVRALKELSRSYVTISGDASRVMTRLKAVYRSWAIPCAGKQVYAPRYRAEWLGKIREPGVRRRAEFYYQQLDELRALRQQVRRELLAESAKHQASKLLCQIPSIGPIRAAQLIAILQTPNRFRTKRQLWAYGGLAIETHSSADHRYVDGQLRASKRPVSLRGLNRNHNHELKNIFKGAAIIAATKAGPFQEFYAALVTKGIRPEMARLTLARKIAAITLIVWKKGVSFDAQHLKPQTA

SEQ ID NO: 133298 - protein, 368 aa, unidentified
MKNITTYVGVDAHKKDLFIAMLVGDHTTPVSWQVANEPNAVRRLVRKLEREAPGPVRMCYEAGPCGYALQRQVTTPRVSCQVIAPALIPRKPGERIKTNRRDARKLAELHRAGLLTEVRPPTPEEEAIRDLCRARDDAREDFQRCRHRLGKLLLRRGLHYSGRNWTRAHRRWIESLEWTQPAERVVVDDYLLAIDHLEARLIEFDARLTEVAQTEPYREKVAWLRCFRGIDTLTAILILAELHDFRRFQTPRALMAYVGLVPGEDSSGEKQRRGRITRTGNALVRRLLVETAWHYQHRPGVGPALTRRRTGQPGRVIAIADKAQQRLCRRFRRLAEQHKPAPKVAVAIARELAGFLWAALQPAPLSAS

SEQ ID NO: 133299 - protein, 368 aa, unidentified
MSETIVAYRSFVGVDLHKDTVTLAAVDPRGESLARLKIHTKSVGKIEAWLRALPRPSALAVEAVGFVEWFIDRFRDCVDRIDIADATELANRRGKRRKNDPNDAVDIARRLARGECPLGYIADEELMQLRKLGRHWRQLGSILARAKHSMRSILLAANLRGPKLDGASAQRWVLVHGHRLKPVQRQAFRNFLEVIQLVELQRGPLRHVILKAMRHERFAPLAELLQTVPGIGPIWACVIVAEIGPFDRFPNADALEFWAGLTADMKESAGRTQSGSITKAGSRTLRWALCQAAVTSCHCDARQEAIRQRLIRRNGGVKAKANVAMGRRLLAILYAMVRDNKSYEPGPRRNRTSAANKARARKRRKEAA

SEQ ID NO: 133300 - protein, 470 aa, unidentified
MGTNQTILTEKECQKKSRKYHKALERINPSAAFVDIGSGEHWVCIPEDCCNENVRRYEAFTSNLYEIRTWLKENGVTSVAMESTGVYWIALYQILEDANIEVCLVNARDLNSVKGRPKTDKLDCQWGQRLHSYGLLKASFRPSAQICEMRCIWRIRIQMVQEMSRTIQRMQKSLHEMNLLLPKVISDITGKTGMGIIEAIINGERDPVKLAQLKDPRVKASDDEIAEALRGDYRSEHIFLLKKALEHYRFIEGQLFDYDEAIKDRLEQVQKVKELNDGDKTSNEVEHLKYKKRYPKAPSFASRTLAHEILGIDLGCVPGLSSVILLGLILEVGPDLSKWPDAGHFASWLGLCPNPRISAGRDLGTRTKKCSNRSARYFRLAAASLRRSQCSLGDFYRRMQSRHGHAHAITATAHKLAVLYYKLVKEGEQYKEINRNEYQEAMAKMRIESLKKRARLLGFQLIPIDEKASS

SEQ ID NO: 133301 - protein, 353 aa, unidentified
MMIIGCDFHPSFQQIAYVEQETGEYEERRLNHRGEAEAFYRSLAGRAVRIGVEATGNDRWFHKLMSELGHELLVGDASAIHASAPREQRTDKRDARHILRLLMENRFPAIWQPSVGNEEQRQLLLHRCRLVRMRTRIKNQLDSIAKSEGLTGSRAWSAKRRQQIEALPLTGWYAERRKDLLALLEEMDKRIDPLDKAVKAAAEQNAEAQLLMTHPGVGPVVSLAYVLILGDWRRFPRGKQVGSYLGLIPAEASSGKHQQRMGHITKQGNVLLRWLLVEAATKAQSKDPSWHRQYVRLSMNKHHGVAKVAIAHKLAVRLYWMLRSGQNYTQIVERGSHAGQSVLAGGCSSRPIN

SEQ ID NO: 133302 - protein, 453 aa, unidentified
MKKADQSNDSGASFKKRAFSQGLPVFHAYAAGIDVGDTMHDVAISNGDTGHEVREYLTFTEDTTNLVAWLVSEGITTVAMESTGVYWLNLYLMLEEAGIEPYLVNAKHAKNVTGRKKDDTDAIWLQKLHSCGLLQKSFQPEAEMRVLRDYVRQRKNLIRISSDSVRRMQKAMELMNIKLHTVISDILGKTGLQMVSAILNGERDPRELVKLKDPRIKASEEDIKKSLTGIWREEYLFMLKQAYDEYLFYQSQIAACEERIKEQLLNQAAKILDGDITGIQLKKKPRKNQFRFEIQPLLKIIVGVDLCQVDGINEVSCLELISEIGTDMSKWKSGKHMVAWLNLAPNTKITGGKIISSKMQKRKNHAGQTFRMSASGLSKCKSPLGDYARKMKSRLGKKAGVVATAHKLARIVYTMIKEKLSYNQEITANNQEIWREKRIKHLEKQLDQLKRAG

SEQ ID NO: 133303 - protein, 421 aa, unidentified
MGKADTGKVKVVSDGTLIVAVDIGMEMNRGYCTTPDGRSSKTFKFDNTRAGMDTLWDMVMINKNKFKCNEVIVGYESTGPYGEPMLHYLMKKSVKIVQVNPMHTKRVKEINDNSPLKTDDKDPRVIADIIRWGRALSIVIPEGDAAYLRRLNNSRERHVRERTALVNQLQQLVFLLFPEFRTVMKDIKCKTPLYLLKKYPTPEVISDLDKHILGEEMRKRSRGKFREHHADMLINLAKNTVGIREGAAGLSMDIRHVLIQLEMLTNLIAELESEMEIALGRISYSLKLLSMKGFGVVSVAGIIGEIGDFQKFKTRSEIMKLAGLDLYEISSGKMKGQRRISKRGRGLLRKILYYAAIQTIRKNGILHDYYTRLTDGGMKRMKALVAVSRKLLGIIYAIVRDDSEYTVNFETMKRQVTKKAA

SEQ ID NO: 133304 - protein, 364 aa, unidentified
MGLERTSVGLDVHARSVSAAAIDGVTGELIQQRLVPEQRVIIDWLRGLPGPAAVTYEAGPTGFGLARALTAAGIRCEVAAPSKIARPSGDRVKTDARDAVLLARLLRLDEIAAVRVPTVAQEAARDLVRAREDVRVDLMRIRHRISKLLLRHGHVYYGGQAWTGKHEQWLNHIHFAGPERAGTQAAYDADREAHTLAVLRRQRLDEQITALAADSEFTAVTRRLCCLRGISTLTGFALAVEIGDWDRFTGASIGAYLGLVPGEHSSGGSRHQLPITKTGNSHVRRLLVEAAWHHAPVYRIGATMRARWAQAPAAAQARGHAGNQRLHARWTQLATRRKKHTVVCVATARELAGWCWSLATLPTT

SEQ ID NO: 133305 - protein, 320 aa, unidentified
MTKKKSKSFIGIDVAKQQLDVAAHESDYEFRCPNKVSAFGALIAELISLRPALIVIEATGGLEQSVVSALHAAGLPVVVVNPRQVRDFAKALGQLAKTDRLDARVLAHFAAAIKPPLRPIKSKEEQELDSLTGRRAQLIEMLTDEKNRRASAASDTVRDKIKEHIDWLEEGIAELDQQLKALLQNSTEWQAKDKILQSVPGIGPVTSFSVIADLPELGTLNRQKISKLVGVAPLNCDSGQHRGTRHIYGGRAQVRRALYMATLTALRWNPVIKEFYERLCANQKPFKVAITACMHKLLNIINVMVRDSTTWKSKEEPIST

SEQ ID NO: 133306 - protein, 425 aa, unidentified
MDFKQNQKINQVTEKTLVVGIDIAKRTHYACFVDDRGRVIQKSFSVSQSGDGFEHFYQRVLAAMKENEKTEVIVGIEPTGHYWLNLAYFLEERGIPLVMTNPMHVKRSKELDDNLPTKHDRKDALVIARLVKDGRFSYPRILKGMEAELRAGSTFRSKLTEELGAVKNMIIRWLDRYFPEFTQVFPSFGKMAMAVLECTPFPSDLHQKQPDEVLSLYRKVEGLKSPQRPKAVRLIEVAASSIGVTEGREMARIEIATLVRRYHQLEQDIESITQHLVELVKTSVEYEWLSTVPGLGDTTIVDLLAEIGSFSHYEDPRQLIKLAGLTLRENSSGLHKGQKRISKRGRRKLRALLFRVMMPMIRHNEAFRRLHEYYTNRKVNPLRKKQSIVVLCGKLLKVLHGISTKHKAFDAQRMMRDIPSLVEAA

SEQ ID NO: 133307 - protein, 409 aa, unidentified
MQVMYEVCCGLDVHKKGVTACVLWASGRRRQIRDFGTFTRELLELTDWLRACGVTHVAMESTGVYWKPVWNLLQGQFEVLLVNAQHIKAVPGRKTDQKDSEWIAELLQHGLLRPSFVPPTPIRELRDLTRYRASLAQECNRIANRVQKVLEDANIKLSSVATDALGASGRAMLEAIVGGEESSKRLAEMAQGRLRNKIPELEGALEGRVTTHHRFLLRELLDHLYFVESKMRRIEQEIEVRLGPFPSEVARLCTIPGVDRVTAWGVLAEVGLNMSQFPDAQNLASWAGLCPGSHESAGKRKSGKTRKGSLWLRRCLCQAAWAVSTKKNNYLSALYRRLAARRGNKRATIAVAHNLLVIAYYILRDGTCYQDLGADYFDRLNPEGLRRRLTKRLEGLGFKVTLEPLPQVA

SEQ ID NO: 133308 - protein, 376 aa, unidentified
MMDEKGKVVFKAFSFSNTTDGGNALFSKLSSFSSDPSDFEIGMEATGHYWLSVYSFLFEKGFLLHVINPIQTDGWRKGTEIRKRKNDTIDSVLIADLIRYGQFVETRLADEDLFSLRTLTRFRTYLVESISDLKRKVVCILDQVFPEYQSIFSNIFGRTSKEILLQFSSPIDFENISSETLAKLLAQLSRQKVGATKAEQLKAAASSSFGITFAQNSFTFQLKALIEQISFIENQVKETETEISRIMEKLKSPITTITGIGNVTGAAIISEIGDISKFDSPRKLVAFAGIDASVTQSGEFEATHNVMSKRGSPYLRKAIFQSALIASFKDPVLSAYYQKKRSEGKHHLTCVGAVSRKMCNIIYAVLKNNEPYVPKA

SEQ ID NO: 133309 - protein, 425 aa, unidentified
MRSIALDVHRDFCEVAIKDQSGLRLAGRIKTSLAELERFAHSLAPDDQVALEASGPARAIARVLEPHVGRVVIANTRKLSAIAESKVKTDKVDAQTLCELLAAGFLPAVFSPDEFTRALRRRLQRRSKLVRSRTRAKNECHAVLARNLKGRPPMTDVFGKAGREWLAALALPADERETVEGCLREVDFLDSEVGLIERELAAQGLSSQQIRRLMTVPGVSLVSAAAFVAAIGEIQRFSSPKKLVSYVGLDPRVRQSGAAPARHGRISKQGPAEARHMLCEAAWVLIRTPGPLRAFYERVRARRGAQIALVATARKLSVLFWHLLTKEEDYAFQRPTLTRRKLRGLELKAKDGRRSWPSGHALSTKQDRAREAEFALQVETAYRRLVADWQPSGPRSGAGATRGRASSRPTSGKQRGKASVPNPAL

SEQ ID NO: 133310 - protein, 344 aa, unidentified
MHATITTIGLDIAKSVFQVHGVDANGHVVVRRQLKRRYVVAFFEKLAPCLIGIEACASSHHWSRQLRALGHTVRLMPPAYVKPYVKRQKNDATDAEAICEAVGRANMRFVPTKTPEQQSGLMVHRTRHLFIRQQTSVINAIRAHCAEFGIVAPVGRRGVEELLNVLANAKDEQVPEIARACLLALGAQLRRIKEQILEFDRVITAWHGSCETSKRLDEIPGVGPALATALVASVADPRAFRSGRDFSAWIGLVPKQSSSGGKPRLGSISKQGDRYLRGLFTAGALAVIRYAKIHGTGHRPWLTALLARRPTKVAAIALANKIARMAWAMMARGERYREPVALAA

SEQ ID NO: 133311 - protein, 404 aa, unidentified
MAPVRDVTTEAPVLHVAFELSSVSWILASGVRSSRSVRRKSVKAGDLEGVLREIAEAKHRFGLPQDARVVSCYEAGRDGFWLHRWLLEHGVENLVVDPASIDVNRRARRAKTDRLDADKLLDRLRRYTRGEGEVWSVVRVPELEDEDLRRLQREVDRLKQERCGHSVRIRSILATQGLGHLSAEEGVRRLKGLRSPAGYGLGKYTVTEIQMVWERLELAEKQLREVQKIRRELERGPADLKSVRSVLLLLALRGIGEEGAWAIATELFGWREFHNRREVGAITGLVGAPYDTGKKDHEQGITKAGRSSLRRLLVELAWLWLVLQPKSAMSQWFERRFGEGSKRNRRVGIVALARKLVVALWRWVEFGELPAGAELSRSLAPEVLKALGRGWEVAKGREVLAPTG

SEQ ID NO: 133312 - protein, 355 aa, unidentified
MSATIIGVDPHKRSHTAVVLDEAEQIAAKLRVDAGPGQVDALLGWAPGGERVWAIENVNGLGHLLAQQLIGRGEVVIDVTATLSSRARKLSGHSARKTDEHDARSVVIAAAHNNRLRRVTVENNSVVLGLLLDRRWHLVAQRQRTICQLHALLSELVPAGAARHLTSKKAAALLRRIAPASVVELERKLLARELLEDVRWLDKRIPVAKQRLSQALAAYGTTLTDICGIGEIGAATILSIVDDPTRFPDRGHFAAFNGTAPLEASSGDQRRHRLSRRGNRQMNKVIHVAARTQIRSGGPGRVYYDRKLAEGNSKMEALRALKRQLSDVIYRRLLADERARQVVRGGQTGDKPKAA

SEQ ID NO: 133313 - protein, 458 aa, unidentified
MARKRKNNNKKIGAPVLHCLNPNAAGVDVGATEIYIAVPADRDPQPVRHFSTFTEDLHAAADWLKSCQIETVAMESTGVYWIPLFQILEARGFQVSLVNARYVKNVPGRKSDVSDCQWLQYLHSVGLLRGSFRPEQAVCTVRSILRHRDSLVQMASSHVQHMQKALDQMNLQLHHVISDITGVTGMTIIEAILAGERNPHTLAALRDGRIKATADTIAKSLVGDYRREHLFTLGQSLAAFRHYQELIGACDREIAQLLETFESKMNPPEGSLLESQDGQNPSAGEPRFDLQSHLYRIFGVDLTRIPGINVLTTQTLLAEIGPDLSQFPSAPEFTSWLGLCPDNRVSGGKVLSVKTRKVKNRAATALRMAAQALHRSQSYLGHFYRRMRAKLGAPKAITATAHKLARIIYHMVTTRQAYDETICVQNEMQNRQRLEARLRKQARDLGLEIIPAKTGAIG

SEQ ID NO: 133314 - protein, 353 aa, unidentified
MHTHQKSSDPLATIGLDIGKNTFHLVGLDKPGAIALRIKVSRNQLVRRLVNLPRCLIGMEAGSGSHHIARQIEPLGHDVRLIPAQYVKPFLKGHKNDFRDAEAIAEAVQRPTMHFVAIKTPEQSDLLSLHRVRSRLVRQRTAIINQIRGFLLERGITVRQGPAPLRKVLPEVLSSPPEALSSRLVRLIAELDEDWRRLDERLAALSAEIESLSENDAACQRLMTVPGIGPIISSAVVAAIGTGSGFKQGRDFAAWLGLVPKQESTGDRTKLGRISKRGNKYLRTLFVQAAHVVLERRPAAAVRVLLPWIDRASKRLAHRNLLAIALANKLARIAWAVLARGRDYEPRITSNAA

SEQ ID NO: 133315 - protein, 311 aa, unidentified
MTDDTIGIDISKATLDIHRLSDGKMTSFSNCPAGFKEFSKFCAQTSVTRVVYEATGAYHSGLERALGALLPLVKVNPLQARRFAQAQGVRAKTDAVDAKMLAVMGNAFVLDPDEPATKLQHDLKELRAFRSGLIKDRTRIMSRQKTQTLSIICRQSKARLAQVDKHIAEIDAEVKRLIQSSDTMARSMKILRSIPGIGAVCASTILIEMPEIGRMDRKQVASLTGVAPMTRQSGQWRGKSFIQGGRKVVRNALYMPALVAMRFNPDLKAKYQAMIKAGKPPKVALTALMRKLIELANALIKADRNWEEKRA

SEQ ID NO: 133316 - protein, 441 aa, unidentified
MERFNGNRLAEFCRFKKEIRGSSEYLIIGLDIAKERHNAFFGTATGKTLHKGMFFDNTYDGFQKLLIQTDALKVQHGLRKEVFGLEPTANYHKPLGEYLIKGGHLVVLVAAAATSKNRELLDGRWDKHDTKDSANVADLIVQGKCLYYDCPGEELLSLRGLLSLKKRLKKEEHGLRVRIRNQLLAQYFPEMDQHFGSIASLNVVQRCLDPTDISLMQYDDFCRMVSPGKVNVAQQRRLMQIWRAAKQSIGCSVGEAVAIEAQIMVAGLNRVRETIKTVEDKIEDICLKFPEYSFLLTIPGFGPDISSKVLGAIGDPDRFTNGKQVLKMAGFDLCASRSGKTSNSATPVISKHGKADLRYALYQAAIISSLHSKEFIVYHTSKIKGRERERGIGTKTSWGRCVPSVFSADSIILIGPDVNGWFRLQAWTSREFVGKVVAQAG

SEQ ID NO: 133317 - protein, 372 aa, unidentified
MNSILYVGMDVHKENYTLCCYSIGDEEPKCKQTIIPDYKMILKYLERVRNYYHEEEVEFVCGYEAGCLGYTLYHQLTNHGVKCIILAPTTMGITNNDRIKTDKRDAGNIARCLAFHTYSEVHVPTKEDEAVKDYVRMRDDKKKLLKITKQQILAFVLRHGYRFSEGRNNWTIKHVEWLKSLKLGGVLQESLTEYLITYAYLTNKIEGLDKRIEELAGGERYQEKVNRLSCLLGVKTHTALGVVVEIGDFKRFAKAEKLAAFIGLVPSEDSSGGKQKRGNITKAGNSHVRRLLVESAQSYTRGKIGHKSKELKRRQNGNSPEVIAYADRANERLRRKFYRMVLSNNTNRNVAATAIARELACFMWGLMTDNIA

SEQ ID NO: 133318 - protein, 335 aa, unidentified
MNPVRIHIGVDVGKDSLDICYPDGTKEKARNIKSCRTKLIKKALKLGAIISFEATGPYEEALADECLARGVRAVRLDAWGTRKYAESQGRIEKTDAIDCEMIRDYAMSLSESKLHFIKPRSQAHKTLKRAVSTRKNLMKARAIIYNQYENLPDAEMRKCLDQTLAKLDKEIARIEGECDAAIASDDRMRELASRFQTVKGVGPCLTRVVLAYCPDIGEFSDGGIAKMCGDAPIDYESCTIKKKAKPKRGRTDLRKAMYMAAVSASRSNHILRPIYQRLVAKGKPRKVALTAIARRIAILLNNIAKYPDFIPAQDPKDVARAALPKRGRGRPRKTE

SEQ ID NO: 133319 - protein, 399 aa, unidentified
MIAVGIDVSKSKSTVAILNGDGSIRAKPFDVHHVADELQALVDYIKRTSEPPTILMEPTSHYHYPLLKAFTEAELPVCLINPYQMKKYGDTELRKAKTDKRDSLRIAQYALEKSYSLIPYTPQDQKYEDLRFLSRQYSQRISTLTVAKVQLLSLLDETMPGITTILPLKSRDPDNCVLLRFIKRFKSFDVIRKMGKTRFLDSYQVLVKKTKDRFAGSKGLTIYELVLNSVTTRGENPLSAMTQDQCVDLVSTSQKAADEINLQMRIIAETMPEYKVLRSMAGVGDRLGPIILGEIGDIRRFHSGKALNAYAGNDAPPYQSGQFESRNRHISKRGNPALRKACFEVMQALKLTKPQDDPVYLFLLKKEQEGNPYNVAKMAGVDKFLRIYYARAMETLKQQ

SEQ ID NO: 133320 - protein, 375 aa, unidentified
MKEKVRFLGLDVHAETIAVAVAEPDGEVRSLGTIPNRAESIRKMIKKLGPAEKVRACYEAGPTGYVVYWQLAELGIECEVVAPTLVPVKAGDRVKTDRRDAEKLARCYRSGDLTAVWVPDEGSEALRDLVRAREAAKQDQMRARHRLSKFLLRSGQRPPTGVRPWTRPYLIWVAQLRFTQIAQEATRQDYLHEVEHMRARVMRLEQAITEAVKLASPALQQVINDLQALRGIADISAVTIAAELGQVSRFGSARELMGYCGAVPSEDSSGKRIRRGGITKTGNAHLRRIVGEAAWSYRRPPCIWYGLRRRQESISEEAKEIAWKAQHRLHKRYMKLRAAGKAQGKIITAVARELLGFIWAIGIRAETIVSQRTAA

SEQ ID NO: 133321 - protein, 356 aa, unidentified
MFKDSAIVVAGLDLGDKYSYVCVLDPIAGEVNEETRISTTASGISNYFGSRKPMRVALEVGTQSAWVSRAIEACGHQVLVANARQLRLIYAGKRKNDRVDAEKLARLARYDEKLLAPITHRGEQAQADLANIRSRETLVQTRTALVNHVRSTVKGFGTRLPKCTTAVFHKRASEHLPAALRPALEPILDLIAQLNERIKQFDKRVLELNEGKYLETGVLRQVHGVGPLTALTFVLTIEDPKRFLKSREVGPYLGLTPGEKQSGDSNPQQRITKAGDVHLRKLLVQCAHYILGPFGSDSDLRRHGEKLAARGGSAAKKKAITAVARKLAVVLHHLWATGEVYVPLHNSKQSGIPQAA

SEQ ID NO: 133322 - protein, 342 aa, unidentified
MTCYVGLDVSMKETAICVVDETGDRIWDGKSRTDPDAIAAVLARRAAGAVRIGIETGPMTVWLWHALTERELPVVCLHARHAAAALKLQMNKTDRNDAFGLARLVRSGWYRPVAVRSMETHRLRALLITRDQLVGMSTALINKIRGLAKTFGILVGPGKGGTFERQVRATLPDDPVVAALFESLLAMLSTLREQQLAIAKQLGRVARQSGACRLMMTMPGVGPLTAVSFMTTIEDPHRFRRSQDVGAYLGLTPRRYQSGEVDINGRISKCGDRLTRKLLFEAANVMLSRTSQALALKDWAAAIGRRSGFWKARVALARKLAVILHRMWIDGRGFDPKVTAMA

SEQ ID NO: 133323 - protein, 343 aa, unidentified
MYYIGLDVHKKTISYCVKDAAGCVLQEGKIGSTRCELDVWVRTLAQPRMIAMEATIFTGWIYDHLLPHADKVKVAHPLMLRAIAAAKKKNDRIDAAKIADCLRCDFLPECHMASTAIRDRRRLLRYRRLVIRQAVQMKSCISGLLMETGVSYNKLRLHRMGHFEQLLNSSDELPDCIRPLLKMSREHIDRAIRLDRALLKSLEQDPLLVDRLQRLRTIPGVGPITALTWALEVGDTSRFRTIKQAISYCGLCGDEKSSADKVMRTPISKQRNKHIQQVLVEAARLAPRYSQELALLYERERQHGHGGRATLAVARKMVAHMLAVDRRNTGFVPAGEFKGTAAA

SEQ ID NO: 133324 - protein, 369 aa, unidentified
MEKGTTYVALDDSKRKIVAGILRSDAMQPEVRELPNDPHHVRRLFERLKREGPVAACYEAGVSGYDLYRQIRALDVACQVIAPALTPRRPGQRIKTDRRDAAKLVRLFRAGELTAIHVPDEAEEAVRDLLRCRDDVRRDVLRWRHRVLKLLARHGRVYQAGRNWSPGHWRWIRQQQFALPALQRTVDASLFALEQALARLAELDKEIVALADTAPYRTPVGWLRCFRGIDTLSAMILVAEIVDFQRFRRPRALMAYLGLVPSEYSSGDRERRGALTKAGNSHARRVLVEAAWHYRHRPTVGGALARRSLGQPAAITKHAWRAQQRLHRRYRHLVGHGKRTPVAVAAIARELVGFIWAAMTGPDGERCVA

SEQ ID NO: 133325 - protein, 407 aa, unidentified
MIYGGIDVAKYRHEVCLVNDTGDVVLQMYIDNNQSGMDKLLQTLEKLSIEPDGVKFCLEATGHYWLPIYCHLSELGFQLHVINPIQSDALRNLYVRKTKTDRKDALLLADLLRLGRAPETKLPSETILKLQNLSRLRFELVRQVAGLKNRVLGILDRIFPEYPGCFSDVFIRTSRELLKSYPEPEDLVKVDLSELSAFLKEHSRGRFGEERAKKIQSLAKSTFGITLALDAFSLQLRLLVEQIEFIEEQIKVLEEAINQVMEELRPSKDTPYRHVIETIPGIGPVLAAAIIGEIGDISRFPNARALVAYAGLDASVKASGLFEGTRNRMSKRGSPVLRNSLWLAAVSARRFNPELKAYYELKRSQGKHSSVATGAVARRLVHLIYSLWKNNRAYDPDYQWSPPGDNV

SEQ ID NO: 133326 - protein, 393 aa, unidentified
MFIVGVDIAKRSHEAIILDDSGSVVRKAFNFKNDSAGFTKLTAAMTGVSANPEDFIVGMESTGHYWLALYSALRKRGYTVHVLNPIQSNALRGMYIRQVKNDEHDSFIIAEVIRFGRYTEGGLPPSELYELRELCRARTFVVDMTADLKRKVIALLDQAFPEYETIFSDIFGLTSSELLLNCSTPEEILAIDTERLAEILEVPSRKRFRTAKAEQIKEAAANSFGVVLEYGSMGLLIKQYMEHIRYTEKQIAEIENKISELYSHFNSPLTTIPGIGPTLAAAILSEIGDISRFSSATKLAAFAGIDPTVKQSGEFTATHNHMSKRGSPYLRRAIWQASTVAVNCDPTLKAFMEKKRAEGKSYMNAIGHVTRKLTNIIYAVLRDNKPYYPRITN

SEQ ID NO: 133327 - protein, 364 aa, unidentified
MHAIANAPNNANASSAVRVAVDLAKDVFELAFADASGRTVERKRLGRAAFARAFDNRPALRIVMEACSSAHHWARRFERLGHQVVLLPAHDVRPYVRRNKTDRTDAAGLLEADRCGDIWPVPIKSPDAQGVQALHRIREQLKAQRTALINLIRGLLREFGLVIASGAERVRPATLAALEDGDNDLPMALRHSLHHLLEQIALCERGMQGIEQELDAFARRDRRSQLYLQAGGVGLLTATALSASVGELARFDSGRHLASALGLPPREHSSGNMRRLGRMTKRGDSYLRTLLIHGARSALLAAKLAQKQGKPLDRTQEWALALAERAGHNKAAVALANKTVRRLWAADRHGQAFDPNHLSTHRAH

SEQ ID NO: 133328 - protein, 388 aa, unidentified
MAQTSTFHYPSATPDFDRTLVMAIELSNTNWVLAAQVPGLPRLKAKRTIEPAAEALLAAIESYRERAKRAGHAVQRVIATYEVSWSGFWLARWLARHGVETHVVQPASVPVDRRARRAKSDGIDAEVLLRTLLAWLRGEPRVCSMVPIPSEADEDARRCIRERTELVAERVELVNRIGAVLATLGVRDYDPLRRDRRERLATLRTALGGPLPPHASAKITRILDRLDLVRAQIVELDQQRDAVLEDATPDKAGEMIQQLARLRGIGVQSATVLVREAFVREFANGKALGSYAGLAATPYSSGGVERELGISKAGNRRLRTVMVELAWLWQRYQPGSAQVRWFHERAGGTGGRMRKVMIVALARRLLIALWRFATQGVLPEGAVMKPST

SEQ ID NO: 133329 - protein, 440 aa, unidentified
MGEGVRVVYPRCAGLDVHLRTVVACRIAPGGDGKPRREVKTYRTMSGDLAALADWLAAEEVTHVAMESTGVYWKPVLNLLENRFHVLLVNAQHIKAVPGRKTDVRDCEWIADLLRHGLLKPSFVPDRAQRELRELTRYRAALTGERAAEVNRIQKTLEGANVKLGAVITNVVGVSGRAMLAAIVGGATADEAPALARLARGSMKGKVADLEAALAGRVGAHQRFLLARQLARVDELDAHLAALDDEVAARLRPQADLLERLDAIPGVGRRGAEIVLAEVGTDMGRFPTAGHLTAWAGLAPAARVSAGKRRPAGARKGDRALRAALVEAAMAAGRGKGTALGARYRRLAGRIGKKKAAIAVARQILILAYHLIRDGTAYEERGADRLDGRAKERARDRLVRGLRGLGYHVTLTPLPAPSAAGAAPPPAEAPPGAPALAPAV

SEQ ID NO: 133330 - protein, 329 aa, unidentified
MSTSVSASVVGIDVSKATLAVCYHEQGHLRHVEVSNTRAGFARLVQAAGTDCLYVLEATGTYYLALAYYLHEHGARVTVLNPLVAKRFIQMHLGKGKTDRKDAQWLLRYGQQQPAVYWQPDEAVLVECRQLEQVSEHLLKQRTMVTNSLEALGQQPVINAVAWQRLQRTRELLDEQLQAVEAELLALLETRYAPEMGLLRSIPGIGRKTAGMLLLFAGGFTQCANYRQLIAKAGLSPREHSSGSSIRGKVRITKMGGGLIRSKLYLCSLSAKRANAACKALYDRLVAKGKNGKLALIAVCNKLLKQAFAIVKSGVPYQADFSSSLACKA

SEQ ID NO: 133331 - protein, 415 aa, unidentified
MKRVIGMDIHRTFAEVVVWEDGRLRHHGPVDMTRSGLEGFGRSLRRTDEVVVEATGNAMAVVRVLSPYVDRVIVANPMQVKAIAHARIKTDKIDAGVLAQLHASGFLPEVWIPDERTERLRRLVARRNQVVRHRTRVKKEVHGILQAHLVPKCPHADLFNRRGRAWLERQVLPDDERAAIARHIREIDRLAEDLADLDRDIAREAVDDPQVRQLQTITGVNAIVATGIIAAVGDIRRFREPQRLVSYFGLNPRVRQSGLGLAQYGRISKHGRSHARAMLVEAAWAAAKAPGPLRAFFLRIRNKRGHQVAAVAVARKLAVLIWHLLTKEQDYLQDYFWARPALVAAKQRQLALKAGAPGERGVGRRGSAYAYNVKELRNSEKAATENAERAYELMVRHWRPRGPKRRTDATKEERL

SEQ ID NO: 133332 - protein, 487 aa, unidentified
MNSIFRKRNPDVQNLFESAGRPEKVMCIPFDYAKKTHTAMVCNGRGDCLRSAFNVENNRNGIDYLLSIVKGLCRKHTINIKHVFFGGEDGGAYSFNFIHALVSRGFLVLGINANEAKKERENTTASSDLIDTVGVAGSMIKMRGRTIGEATAQVISIRRLRRQRGSLLKAHSACAHRVHRVVDELFPGFLDVELSGVLPFGKASLWLMDDNFSAASILARQHPALVRHLRERQLRDPEGAADKLKQLARIALPPPECMIPALRRSLHEEMAVYGLLESSMRSLDTDIAKLLAHTPGAMLTTLPGIGLRWAPGLYAELGDPLRRRNVHSMAALGGIVPRSKQTGGPEKPAVTGHRGKNCSAFLKHILMSGAVSISQYGHPEMRQAYQTDKDMGRDARAHMAQRLLRASLYLIDNQSFFLPPSLHRGGTRDQLREYYAQTWPKVLVKWRDSGAIKQAVAEGSPLRQWRDMAQELYDLELDLKSPQTGRK

SEQ ID NO: 133333 - protein, 317 aa, unidentified
MTKIICGVDVGSTSLDAFVGPSGPAQSFCNSAEGIAALAAFCRQQNVDLVAMEASGGYEKQAFALLWAAGVPVALLNPRAVRDFAKGMGLLEKTDGLDARVIAWFAAVKGSAPNAPASPEQQRLKALVTRLRQLTELQAAQRNQGLLVSEVTVRESIAELLKVVAAQIRMLEEEIAALLGSDPLWQKLDQALRSIKGVADRTVARVMAEMPEIGTLSNKAVSKLAGLAPLADDSGKREGKRLVRGGRRNVRAILFVVAGVVRRHDPDFAAFHQRLSAAGKPRKVIRIALAHKLLVRLNARARDARKAFAAASVCQSA

SEQ ID NO: 133334 - protein, 500 aa, unidentified
MAKHKSKRTKPGVVNALEQINPNAAGIDIGAEEVWVAVPPDRDEESVRSFPTFTADLERLADWLEACGVDIVAMEATGVYWIPLFEILEGRGLRVYLVNARHLKNVSGRKTDILDCQWIQQLLTYGLLSPSFRPPEEIVAIRSLVRHREMLVQYRSAHIQHMQKALTQMNLRLTNVLSDITGVTGLNILRAIIAAERNPQVLAQFREPGCKKSQAEIAKSLEGHYKREHLFALKQALELYDFYDRQLQACDAELEAMYQQFDPPEDPGTPPPAPRRGKRRKNQAHFDLALALYRMTGVDLTQIDGLDALTVQKVLSEIGTDMSKWPTVKHFASWLRLCPNNKVTGGKVKQRGVQPTTNRASTALRVAAASLKHSDSALGAYYRRMRARHGTPSAITATAHKLARIIYFMLKERKPYHDFGADYYEPLCDYNDETTPTQNLVSRAQEAGSCLNNGMASELNQYPTRKWSQKPSAGNFQRNTNGVFSRSMRLAPNLVKRVPY

SEQ ID NO: 133335 - protein, 347 aa, unidentified
MSKIKQLDFDGKVIYCGLDTHKTNWKINARMEEIEMASFSQNPDPSLLKNYFDKNYPRAQLRVVYEAGFCGFEIQRSLTALGIDCIIVNPADVPSSDKDRKRKDDKRDARKLSIALAKGNLKGIYIPATLVRQRHRLTQDQTRCANRVKHLLLSNGIKTEEESERWSLRFIKKLQQLDCGSALLKASLQFALEQYLQTRRILKEVTLMIKDLSSQEPFAKVQAILQSIDGVGLISGMVIQSEIGDINRFKRLDSLCDYAGFVPDIYSSNDKTVVRGISKRGNEFLRETIIESSWTLIRKDPAMLMKYNEYRSRMNANKAIIRIAKHLLSRIRFLWKNEQTYVRGITG

SEQ ID NO: 133336 - protein, 331 aa, unidentified
MYVGIDYHKRYAVATSMDDKGQVVETVRLKNEPGDLIGFVDRLPEDSKIAIEATGNWYYFYELLEGKSPGIHLAHPLKTRAIAEARIKTDKIDSKILAHLLRTDLLPEAYIPPREIRDIREVLRYRASLVSLRTALKNRIHAILSKNGIIVEYADILGKGAKAQLNALEVRSCYRLGIDGYIRLTETLQQLVDEVTKTIEGIVANNPQAKLLTTIHGIGYYSALLIVSEIGDITRFPNARKLCSYAGLVPSVYSSGGKTRHGSITKQGSKWLRWILIEQSHHFAKSCDRLERMYARITYKHGKNTARVAVAREMLKIIYSMLTNNRPFLKE

SEQ ID NO: 133337 - protein, 346 aa, unidentified
MKEITTIGLDLAKHIFQVHAADAEGSPVFSRKLRRAAVLSFFMKTPPCLVGLEACGGAHYWAREIAALGHEVRLIPPAYVKPYVKRGKTDAADAEAICEAVTRKTMRFVPVKSVDQQAAAMVLKTRELLVRQQTQAINALRAHLAELGIIAATGTAKVASLIEIVRDETDKPLPQAARFALSEIADQIEGLTRKIGKLEHAIVKEAKCDDDMRRLCTIPGVGAIIAASIKAMVPDPGGFTSGRHFAAWLGLTPKPHSSGGKERLGGISKMGNPMLRSLLVLGATSVLRHVKGNASAPPWLSALLARRPFKVVAVALANKMARVIWALLTKGGTYRTSGTTSEAAHA

SEQ ID NO: 133338 - protein, 358 aa, unidentified
MNSVGLDAHKTRCVACVKTQEGRILEEFAFQNNPHGHEELITHLKAYPEVQVAIESTGNLWIPIYNRLENEHIHVTLTNPKKTRMIAEAKIKTDKLDARILADLLRANLLSASYVPPPQIRAQRSIIRERARLTQLRTIIKNRIHTLLDKQAYKSPYTDLFGKHGLEWLSKLELPAGDRILLEVNLEQVTSLNHSIDRLTETIASSAITNPEAKLLMEFTGIDYYSAMLLINEIGPIARFSSPKKLASYAGLAPSTRQSGNHTTHGPITREGNSHIRWILIEAAQHAARHDPRLNQFYRRIANRRGHNRAVVAVARKMLVTIYHVLNHQNQYRGLRPELFENKIRRLERITESSLQTA

SEQ ID NO: 133339 - protein, 339 aa, unidentified
MRIIGCDLHKAKQTIAMLDRDTGEVVEHTLSHDGEAVREFYAALPKPAVVGIEATGSMGWFVRLMEELGLTCRVGHPAAIRTAEPRRQKHDRRDAQLLLRLLLEDRFPAIWLPTAEQRDLRALLLHRHQWVRLRTRLQQALQAMALGQGVRRGGTLWSTEGQAVLAALPLLPHATDRRDALQALYRQLAAHVERLDEQVQAFAEQRPGATLLMTHPGVGPVTAATDVFLGDPSRFPNGKALASYVGLIPSEYSSGARQRLGHLSKQGNPFLRFLWGEAVMGAVRRDPELRRFFRRKLPQKGLGKARVAAARKLGIRLWLMLRDQITYDEFCRRSRRRPS

SEQ ID NO: 133340 - protein, 351 aa, unidentified
MPHKTAATVAHTIGIDAGKNTLHLIGLDDKGAIVLREKVARDRITVRLANVPQCLIGIEAGMATHYVARELSALGHDVKQVPPAYAKPFRQGHKNDFRDAYAIAEAVQRPSTRCVPVKTDDQLDLQALHRVRSRLVGQRTAVINQIRSFLLEHGIAIRQGLRFLRQQLPAILAKRSDVLSPRMIRIIEDLSGDWRRLDERIEHITAEIEVLAQGSESCRQLMTVPGVGPIIASAMVAAIGNGTAFAKGRDFAAWLGLIPKQMSTGDRTILGRITKRGNRYLRTLFMQGARVILLRPANWMKHSFGPWLTAAANRLHHNVLATALANKLARIAWTVLMQARSYEARVEPRTA

SEQ ID NO: 133341 - protein, 479 aa, unidentified
MSKKEKPRPEPGKAKVSQGKAKRKRKGMCLEDRPLLEPNAGGIDIGAREIFVAVPPDRDENPVRVFSTFTEDLEGVARWLLSCGITTVAMESTGVYWIPLYDVLEKHGVKPCLVNARGMKNVPGRRTDWHECQWLQFLHSVGLLRAAFRPDGDVCAVRSLMRHRSDRVQMTSQHIQHMQKALTQMNVQIHHVISDITGLTGLAIVDAIIAGQRDPVELAKLRDPRIKASEDTICKSLKGNWRPEHLFTLKQSRQMYQHYQEQIAACDEEIEKLLLAFEPRVDPEQKPLPPDRKKKQSGRKKKNVNPKTGFDLRTESYKLFGVDLTQIPGLNAMVLTLFSEVGRDMSRWPTPGDFASWLSLCPDNDISGGRVLWKGMRVVHNRAGDLFRLGAYALHHDPSPLGDYLRRMKSKMDAPAAITATAHKIAIIFYTMVKKQVEYDASIWAKRDLERERRFEAKLKRQAQQRGYKLVPIEEKPAA

SEQ ID NO: 133342 - protein, 296 aa, unidentified
MGMLEGQVEFVIGIDTHRDTHTAAVCDPAGALLVHATVPTTTVGHRQLLGLAQRHASGRRVWAVEGTGSFGAGLTSLLVDHGELVVEVDRPKRPARRNGAKSDALDATRAAREVLAREHLAQPRAGGDREAMRVLLATRRCVVDARTKAINQLKALIVGAPPPLRERLRHRCTAAQVRCCSRLRIHANHSIEHRVTVQAMRATARRIQFLEAEAAQHQAELDRLVAKIAPFLLSELGVGALTAAQLLVSWSHPGRVRSEAAFAMLAGVAPLEASSGRVTRHRLNRAGDRQLNRALT

SEQ ID NO: 133343 - protein, 310 aa, unidentified
MFSYPAGIDVSKGSLEVRVNQLERGVSCRNAESDFPGLIGWLKLHQVGSVLLEATGGYERNVMKALQAADFEVIRINPCRAKAFARAMGQQAKTDPIDAQCLAQFAAVIDSPGSRVTSPEHDELRALVQQRENFVHQRDDDKRRLKTASSEAVKPALQSHIDYLNQAVKSIEQLIRQSAEKLDSEKAARLCSVKGIGIVTAASLMAYLPELGEVGKRPIAALAGLAPYNNDSGNHKGARHISGGRFAARRSLYMACWVVIRDQPEFQARYKALRDKGKCAKVALIACMRVLLIRLNAMLRDGTEWKAHAA

SEQ ID NO: 133344 - protein, 359 aa, unidentified
MQIQNNKLSFKGQNIYAGIDAHLKSWTVTIQVEDRVHKTFSQSPEPKVLVDYLRRHFPEGNYFSAYEASFCGFRAHYELNEMGVKNIVVNPADIPTTDKEKKQKEDPRDSRKIARGLKSNELVPIYVMIGSSLEDRKLLRIRKTLVKELTRVKNRIKSDLNFFGIKIKPEFEKRGTHWSKRFMKWLEEVKFETESGNFSFSIQIRQAQHLREELLQINREIKKLAQTGKYKENVDLLMSTPGIGLLSAMIILTEIEDIDRFPNLDNLCSYIGITPTTRSTGENDKVGQITPRSNCYLRNTIIESSWVASRIDPALLCCYNQYLQKMEKNKAIIKIARKLVNRIRFVLKNKTKYVYSLVK

SEQ ID NO: 133345 - protein, 421 aa, unidentified
MNRKKSGPAGLQALYARACGLDVHKKLVVACVRILDTKDGTVQSTLRKFGTMTADLLELRQWLVELKVTHVAMESTGVYWQPVFNLLEGHFQVWVVNAQHIKKVPGRKTDMKDAEWIAQLLQCGLLRPSFVPERAQRELRELTRHLTKLVQQRNSVDNRIQKVLETANIKLGSVASDVLGVSGRKMIEGLLAGEKDVKVLADLAHNKMREKIPELQRCLQGEITEHHRFLLRQLLGQYDFLEKEIASVSERIGAVAPPSFRAAVEQLDAIAGVGERGARALLAETGTDMRRFPTHKHFASWAGRCPGNHESAGKRQSGKTPAANRHLDAVLTEIAHAAVRKKTSYFKAQYHRLAGRRGKKRAIGAVKHSLLVTVYFMLRDNKPYKDLGADYFDKLNPQQRIRYHVRRLQELGQVVELLPAA

SEQ ID NO: 133346 - protein, 397 aa, unidentified
MIAVGIDVSKSRSTVAVIDSNGVVLASPYTIAHTQPELHALAKYLKELKEPVTILMEYTGHYHYPVLKQLQSEGFPVCLINPYQMKKYGDTEIHKAKTDKKDALRIATYALEKSYKLVPYSSMEQKYEDLKFLSRQYEQRISFVAKLKVQLLDLLDQTMPGITKQLSLTSRNPEKCALLLFIKRFKSFDEIQRMGKTRFLSSYETMTKKTSDRYAAQKGLAIYELAKNSITTRGDDPYIWLSQAQCVDLLSAAQNAADEIILKMQNIAQTIPEYAVLRAMHGVGDRLGPIILAEIGDIRRFHSGKALNSYAGNDAPPYQSGQFESRNRHISKRGSSALRKACYEVMQALKLTKPQDDPVYLFMLKKEQEGKPYNVAKMAGVNKFLRIYYAKAMELYR

SEQ ID NO: 133347 - protein, 337 aa, unidentified
MSVYVGIDVHRKRSQVAVVTEDGTVQLNKNVVNGSEPMLRLIGELPSGTPVAFEAAFGWSWLAELLEDYGFEAHMVHPLRCKAIASARLKNDRVDAAILAQLLRADLLPEAWIAPAKVRQLRALLRHRISLVRLATQARNRIHAVAADHGYDRSASYWTGPGRGWLAELDLPAASREIITDCLAVIDGLAPVIDRIDGELHAHAKADPRVKVLRTLPGVGEFTALVMVAEIGDISRFGSARKLASWAGLTPTVRGSDLHVRHGHISKQGSVWLRWAMNQAAQTAKRSPEFAASYAAIARRRGKKIATIAIARKLLTRAWHLLNDMQAADAGTPPRRP

SEQ ID NO: 133348 - protein, 352 aa, unidentified
MKHAPEHTTGTNVAIRLPAAPPGGLTAGLDWARDDHVVCVVDTSSGAVRDRFTVEHTAAGLSAAVIRLTKLDCAEVAIERPDGPVVAELLEAGLMVVVISPNQLKNLRGRYGSAGNKDDRFDAYVLADTLRTDRARLRPLTPDSPATVALRGTCRARRDLVGHRVALANQLRAHLQTAIPGAVGLFHELDSAISLKFLTRFDTSLASLVQQMKALSEQIGEQLDLHADAHIFTSLPRSGTVRAARLLAEIGDCRARFPTPEALACLAGVAPSTRQSGRSRSVGFRWAGDKQLRDAVCDFAGDSRHANPWAQDLYTRARGRGHDHPHAVRILARAWLYVIWHCWQDNTAYQPT

SEQ ID NO: 133349 - protein, 317 aa, unidentified
MTQTSMTTAGIDTSKGKLDIAVHGRAEQWQVANMLPGWRILTNKLTKAGVSRVGIEATGGYECGVVQYLRAAGFAVQVLQPVQVKAFGRMHLRRAKNDALDAVMIAACTAALDQVRDAPDPRLAELAEQLTFLEQIEEDIKRFKTRLEHTSEPRLRRMVLGEITRMTARRLAQLRYIAKQLRAHRDLAARLDLVLSIPGIGERTALAILIRMPELGRISREEAAALAGLAPFDNDSGQQKGQRRIAGGRARLRRSLYAAALPAAFRWNRALIALYQRLIAAGKAHNAALIACARKLLIYANTVVQRGTPWTERPLGA

SEQ ID NO: 133350 - protein, 364 aa, unidentified
MLDSTTTVTVGLDVHARSIRLAAIRGDQLLEERTLAYDEEAVERLLRRWPVVRCCYEAGPTGFGLQRHLVERGIDCQVVAPGLVPQRPGERVKTDSRDARKLARLLAGGLLQPIHVPSPALEAARDLVRAREDARLDRMRDRQRLSKFCLRHGRALPTSSWTVVRRKWLGEQRFEFPAQQQTFDTYVHAVDLVDARIEQLERAIRETAEQEPWRALVARLRCLRGIDTLTALALVAEIGDFNRFNTAEEFMAFVGLVPSEHSSGEKRRQGSITKVGNGHVRRLLVESAWHARRRPKVGYELARRQRGQDAAVIERAWRCQQRLYQRWQRMAGRGKPHQKIVVACARELAGFVWAIATEQPLRND

SEQ ID NO: 133351 - protein, 313 aa, unidentified
MSNDLPQTIGIDISKANLDCYAYPAGAERQFANTAKGHKALIAWLRQWQVERIAYEATATYHRVLEVALADWPCVKLNPERARRFAQATGTLAKTDRIDAMLLARMAATLHPPVRPAQSAEQAQLAELINARDGLVRDRTALKNREKNLTIAILKRQCKQRLEQIERHIEALDTEISSLIADNAALARRHQILTSIAGVGTLTANQLIATMPELGSLDNKQAASLAGLAPVARQSGKWKGKSFIRGGRPNVRQALYMPALVAARFNPSLKAKYQKLVARGKPAKIAITAVMRNLIVTANALLKADRCWQQSIT

SEQ ID NO: 133352 - protein, 343 aa, unidentified
MQYLGIDWGTRRASWCALDEHGALREGAIPADHDGLTRLALTLDGEAVRGCIEMMSGAVWVRDRLATVGWDIRLADARKVKSIAPLACKTDRVDARVLADLVRRDLVPEVWVPGLEERANRERLRRRSHLVRLRTSAINRTFGVLTQWGLRRNLTALRKPDAINELAEHGVPPVWLQSITTLLAVIDDLDRQLDVLERELRPVARADERVKLLMTIPGIAELLGLTIASEIGDISRFPSARKLVGYSGLTPTIKQSGQSSRTGRLSKAGPDTLRWAAVEAAQQAWRANNPWHRLYTDTKKRHGKSNPAKAAVARTILIASWHVLARQEPFRPSTAAAAVAAAA

SEQ ID NO: 133353 - protein, 344 aa, unidentified
MYDCYKTFFKIMEKLIHFIGIDVSKLTIDVAIIINNDIGRIIQLVFTNDSKGFKEFKNRLNKEKIPFPETIFCMEHTGYYSKQLSRFIIAQHGNLWMEMSLKIIRSLGVQRGKNDKLDAKRIALFAQRNQQDFVPYNPPRLIVENLKTFLMLREKLINSKIALVVPVNELTCVDKAAGKIALKAISKALQGIKKNINTLDAKIDELIASDKELAEKFKLVSSVPGVARITFCYLVYFTNEFKNYTQAKQLACYCGVVPFEYTSGSSVKGKPKVHNMANKKMKKLLHTAALCAVTYYPEFKQYYERKIEEGKPKMLILNNVRNKIVLRIAAVIKNNLPYKTHVAA

SEQ ID NO: 133354 - protein, 336 aa, unidentified
MVYVGVDLHRKRSHVVALDTAGAPLLNRRIETDPGEFLRVFGELGHEPLEVAFEATYGWGWFADLLADAGITAHMSHPLATKAIASARVKNDAIDARTLAHLLRTNRLPEAWIAPPQAREARRVVRMRTSLVRIRSRLKCQVHALLAEHGVPVAMWDLFGKAGRQLLADLRLPPISQGRVEASLRLIDAISAEVEVADREIRSIFRADPRQARLTAIPRVGAVTAAVVIAEVWDVHRFPSADRLCSWAGLTPSERSSDAHTRRGHISKQGSRWLRWVMVEVAARPDIDPHFRALYDRIAARRGRKVARVALARRVLTLCYYALRDEGGCRAFPLAE

SEQ ID NO: 133355 - protein, 319 aa, unidentified
MNTQSVGIDVGKEELVACIRNSDDKTAIPAPFPNTSIGLKKLAVHLKENDITPEKPILLESTGPYHWQAARTLADLGFFIKVANPLHTKQIARLSIRKRKTDKVDAAHLAFLASQSYGYRFIETEEMAKKKALVRHFWKLRAVATNLLVHERYLKEYRHVSRASISAILVKRCEKLKKEIIEEWSVGNDVKYLDSIPGITPFLAATILAELLPLERFERIDQIIAFSGLDPSVKQTGGKKGTHGPISKRGSPTLREALFLAAFGSFSKEPMRTIYKRYKERGLHHNAILCVMARKILRIAVSLLKKRRVFDPKRLLTGT

SEQ ID NO: 133356 - protein, 385 aa, unidentified
MRGQTFIPMDYEVFAGLDVDKRSISVTFTTHQGFLKSLRMPYSVEHLLNHVRKHFPQQKVAFAYEAGPTGYGLYDGLVAQAYRCLIASPAMIPKAPGQRVKTNRLDSRGLSENLRGGQLKSIQVPSAVYRELRHLTQLRDTFVSAMVAMKQRIKSLLLLEGIEFPPAPAGSQWSVLVKDHLRKLPCSTTVRFKLDQLLDSLAFNEQQVVKTTKEIRRFCQHEPELGQCIKYLRTLPGIGGIVASQLVARIGDWRELRNIRQLAGFLGLVPTEHSTGDRTERGSITHTGDPRLRSKLIQASWSAIRQDGELREFFRSVCKTHPRPLASRVAIVAVARKLSVRISVVLMNQRAYEVRKPVHSAPLTQEETGPQGTPRRQAEPGANNS

SEQ ID NO: 133357 - protein, 423 aa, unidentified
MNPRVEIACGLDVHRSKIVGSIVHSDGGKETRTFTTGIDDAIALKNWILGNRCERVAMEATGIYWYPIYDLLEDHVTLQVVNPYFIKVMPGRKTDQMDAEWIAELCLNGMVKSSYVPPPQLRTRRDMTRTLDRLIRTRTRHKNRIHKIMIRSGIRIASHLSSLFGPSGLRILYGLLEGQSIDTILDQINNAKISRKRDELKGSICGNLDGNAVYLIRLELKAIRSLNNLIDDLKQRISVLMEPYTDDIEILMSIPGIGYDSAVNILSEIGDIHQFPSGKHLVSWAGLAPGMNESAGKRIPGHITKKGSKFLRTFLIEPSHSIAGMKRDNQLKRFFQKMRSKIGYKPAIIALARKLLMLVHHLLIHREMYHEEDFPMKKIRLPETIAPETLNPHDILNLVSDAVSSLNEPDRDHFIRNLNRITG

SEQ ID NO: 133358 - protein, 339 aa, unidentified
MMIIGCDFHPRFQQIAFVDLETGECGERRLSHPEEAERFYRSLASRKVEIGLEATGNFRWFRRLIHELGYEFLLGDPSQIRALNPRRQKTDKRDARHILNLLLEERFPAVWQPPEEDLRQLLLHRCRLVRMRVRIKNQLDSMAKNEGLLDGRGWSAKRRRQIEALPLSGWEHRRRADLLYLHDQLDEQIEPLEKAVREAAENNPQSCLLMTHPGVGPVVSLTYVLTIGDWKRFQRSRELASYLGLIPSEDSSGDKRRMGQISKQGNRLLRWLLVQAAIKAQRHDARWHRQYLRLSLNKHHGVAKVAIAHKLAVRLYWMLRSGQNYTQIMERGSHAGQSV

SEQ ID NO: 133359 - protein, 391 aa, unidentified
MSMYFIGIDISKYKHDCCIISAADQKVVSKVTIKNNKAGFNELLTIIHSLANPADIRIGFESTAHYALNLELFLENSLLTFMEVNPVLISEYKKSKTLRRTKTDSVDCESIARWLMTVEYKPHSKGFYHAYSLKSLTRLRDKLIRQRSFYLVKITNVLDHTFPEFKPFFNERLSKTALYLLENYGSAEKMARMNSASYEKLRSVSRGKFSPQQFLRLKELAVNTVGVNNSIFDVELNSLLSLYKSLVKEIDTIKKEINQLIEEVHPHYMSVPGIGPLSAAVIYSEYGDISNFTNPGQMLAFAGIEPGINESGTESHGGKMVKRGSSQLRYTLINCCLPLIRFDMTFATYYAKERGEGKPHRVAITHVAKKLIRVIYALESQDIDFNAQELR

SEQ ID NO: 133360 - protein, 343 aa, unidentified
MQTVTTIGLDIAKSVFPVHGVDAEGNVLIRRQLKRRYVLAFFEKLPPCLVGIEACATSHHWSRELKALGHNVRLMPPAYVKPYVKRQKNDAADAEAICEAVTRANMRFVETKTPEQQSCLMLHRTRQLFIRQQTSVINAIRAHMAEFGIVAPVGRKGVEQLLAIVTDASDRCVPEVARACLIALAAQLRMLKAQILEFDRRIMAWHRSNETSRRLDAVPGIGPALATALVASVADPKAFRSGRNFSAWIGLVPKQHSSGGKDRLGNITKQGDRYLRSLFTAGALAVIRYAKINGTQHRPWLTALLARRPTKVAAIALANKIARMAWAMMARGERYKEPVALAA

SEQ ID NO: 133361 - protein, 465 aa, unidentified
MKPHRRPHRKQPASGPSLLERLNPNAAGIHCGSAMHYVAVAPDRDATPVRAFTTFTTDLHRLADWLTACGVTTVAMESTGVYWIPLYEILEARGLDVVLVNARHVKNVPGRKTDVVDCQWLQELHSVGLLRGSFRPTAAIAALRAYLRHRETLVQGAATHVQRMQKALVQMNLQLSIVISDITGVTGLRIVRDIIAGQTDPHALAQHRDRRCQASAAEITGALTGHYRPEHVFVLQQNLELFDAYQRQMAACDAAIEAHVHALAAQAPAPARPVPAPRTKKKPRDNEPRFEIRSPLHQLTGVDLTQIDALGPYSALRLLGEIVTDMSRWPTEKHFTSWLTLAPHNKISGGRLLSSKTQPSANRAAAIFRMAAMNLGRTETALGAFYRRLAYRVGKAKAITATARKLAILVYRTLKDGLHYQDPGAAAYDAQHRTRVLHRLRQRAANLGFSLLNRETGELLEDAVS

SEQ ID NO: 133362 - protein, 332 aa, unidentified
MKEALAVRLLPAQSGQAARCATAMLRWAEQFGPERRWAVEDCRHLSRRLERDLLAAGEAIVRVPPKMMANTRTRARTYGKSDPIDALAVARAALQEPDLPAAQLDGPTREVRLLVDHRDNLVAERTRQTCRLRWRLHELDPTWDPPLKTLNRYKRIDEVITRLGDFDGLVARLALEHALAIRDLIRRVNDLERDIKQLVTQLAPALLSMPGCGVLSAAKIIGETADVTRFKSKDAFARHNGTAPLPVWSGNRERFRLSRAGNRQLNCAIHRIAVTQGRCHPPAKEFLERRMKLGNTRTEAVRAFKRRLSDVVYRELLADAEQNAREQFRPAA

SEQ ID NO: 133363 - protein, 363 aa, unidentified
MEIDIIGIDLGKTVFHLVGVNRSGEVVVRRKCSRGQLLRFTANLRVRLIGMEACAGSHFLGRSLREQGHEVRLMPAQYVKPYVKTNKNDYIDAEAIAEAVGRPKMRFVPIKSDDQLDMQSLHRVRDRWVGRRTSVINQIRGLLLERGITFRKGRRYAVASLPGVLEDPENGLSGALRMLLAQLQGELRQLQSEIDEADVLIAKAAGEHEPCRRLMAIPGVGPLTATAVVASIGNGTSFDKGRSFATWLGLVPGQYSTGGKQKLLGISKRGNGYLRRLLVHGARAVVECRDKQGEGAEDRFWQMDGTLSPGLSAWLNQLAARARSNVVTIALANKMARVIWAVLSKGEAYRPPLLACPADAVAR

SEQ ID NO: 133364 - protein, 354 aa, unidentified
MSETVRTAIAVVGIDIGKNSFHVVGLDERGAIVLRQRWSRGQVEARFANMPPCLIGMEACVGAHHLSRRLKALGHDARLMPAKYVRPYSKGQKNDFRDAEAIAEAVQRPTMKFVATKTADQLDLQALHRVRERLVSQRTGVANQIRAFLLERGVAVRQGLRFLRAELPRILAAPADVVSPRMVRLIEGLAGDWRRLDDRIEGLSAEIEVLARKDCGCKRLMTVPGIGPIISSAMVAAIGAGDAFTKGRDFAAWLGLVPRQISTGDRTILGKISKRGNRYLRALFVQAAWAVLIKPKSWERYGLKPWIDAAKKRLHHNVLAIALANKLARIAWRVLARGRIFEARSIDEALAQSA

SEQ ID NO: 133365 - protein, 414 aa, unidentified
MEDILECCCGLDIHKESIVACLLKGPVGEGLKPESEIREFGTQKKDLIALRKWLEDHGCRYVAMESTGIYWQPVYAVLEKALIDEMRLLVVNARHMKNVPGKKTDMRDAEWIATLLRAGLLRGSFVPERDIRDLRQFTRYRKALIRDITSQKNRIEKLLQSNGFRLSSFLSDIFCSSGLAIMHQLVQVGSISSQSLYLCLKARARQKAGVILSSLNGTLSVPQRKLLKMQLAHLADLQANLREVEEEIHDGFSQFQGPIDLLDSIPGIDQTAAYAILAEIGKEMSAFPTAQHICSWAGLAPGSHKSANKQKKQRVTPGNNYLKTMLCEVAWVIASHKKMYLSGWYWRLKQHTDSKRAIVALARKLLVIIYTMLKTNQPYNEQKFVERKNASEQRRVKRMVNELTRLGYAVSLAA

SEQ ID NO: 133366 - protein, 414 aa, unidentified
MNDPTVTPLPTAAVFAGVDWASADHAVCVIDAAGTVLWRHTVTHSRAGLTRLTGRLRELGVGRVGIERPDGPVVEALLAAGLRVAMVPPRQVKNLRSRYGRAGKDDRFDAYVLADAMRTDGHRFTDLTRDSAPTMGLRALVRARQDLVEVRVGLVNQLRHNLELAFPGAVGLFFDLHSPIARAFLRRFPAAAEAAVLDEDAMAAWLAAEGYCGRTPAAVFLDRLRTAPAGLTGIEAVARRHVTLALLAGIDAIEDQAAELTRRIKETLALHPDAPIFTSLPRAGQLRAAALLAEIGDARGRYPDAGVLAAAAGVCPFTDESGKHRNVGFRYKVDTKLRRALTDFADDSRHANPWAADIYRRARARGMRHPHAVRVLARAWTAVIWRCWQDAVPYNPDRHGALNRYLSQDAAAAA

SEQ ID NO: 133367 - protein, 398 aa, unidentified
MTESSDYESVQVFIGVDVGKDTHHAVAVNRSGNRLFDKALPNDENKLRSLISDLKQHGQILLVVDQPATIGALPVAVARSEGVLVGYLPGLSMRRIADLHAGEAKTDARDAAIIAEAARTLPHALRTLKLADEQIAELSMLCGFDDDLAAQTTQASNRIRGLLTQIHPALERVLGPRLDHPAVLDLLQQYPAPEKLASLGEKKLATQLCKLAPRLGKRLAADITQALTEQTVVVPGTNAAVVVLPRLALQLITLRKQRDEVALEVEQRGLAHPLYPVLTSMPGVGVRTAARLLTEVACRAFASAAHLAAYAGLAPVTRRSGSSIRGEHPSRRGNKTLKRALFLSAFAALRDPISRAYYTRKMSQGKRHNQALIALARRRCDVLFAMMRDGTFYTPTAS

SEQ ID NO: 133368 - protein, 344 aa, unidentified
MQHYVGLDVSVKETSVCIIDKAGKLILEVKVATNPAAILAVLTEETLAIERIGLEAGPLSQWLYSALAEAGLPVICVETRHMKAALAAQINKSDRNDARGIAQMMRVGLYRPVHVKTLASQKRRMLLTSRQLLQAKALDIENDLRGTLRNFGLKVGMVGTVKFEARIRELVADHPDLAMIVEPLLIVRRVLREQLGVLYRQLLDIVRHDEVCRRLMTTPGVGPVVALTFRATVDVPSRFTSSKAAGAAFGLTPRRRQSGEIDRMGGISKCGDAMMREMLFEAALVLMTHSRKWSWLKAWGMKIARHRGMKRAIVAVARRLAVIMHRMWVDGTEFRWTREAVAAA

SEQ ID NO: 133369 - protein, 332 aa, unidentified
MSVYVGIDVHRKRSQVAVINQDGEVLANRNVPNGVEPILRVIGDLPSGTPAAFEAAFGWGWLVELLEDYGFEPHLVHPLQCKAIASARLKNDKVDAAILAQLLRADLLPEAWIASPDVRQLRALLRHRIQLVRLRTLLRNRIHAVLADHGHDRPSGYWSGPGRSWLASLDLPAVSAEVVQDALALIDALESVIDRLDGEIRGHARSDPRVKVLTALPGVGPFTALVLLAEIGDITRFASARKLAAWAGLTPTVRGSDRTVRHGHISKQGSVWVRWILCEAAQTAKRSPQFAASYQAIARRRGKKIATTAIARKLLTRAYHLLTDASGDGAPS

SEQ ID NO: 133370 - protein, 356 aa, unidentified
MTKVTASFENNTVYVGLDVHKRSWNAAVYLNDQFVRNIHQPPTPQALHHYLTHTYPGADYVCAYESGKFGYWIQRQFKQAGITCLVINPADIPSTHKDEVYKNDTRDARGIGHALVCNQLKSIYVPTEDQEADRYLVRQRKKIWRDLVRCKNRIKGFLDYTGVTVPPQYDNSNWSKNFMNWLTALEFEHSSSRVTLNYQLRQAELLRKELLSICNDIRKLMRSKKYNRLYYLLRTVTGIGPLTAAALLTEIGDMKRFTSFYHLNSFIGLMPMEHSSGEKELKGRITVRKHRQLRSDLVECAWTAKRTDPALALYYSEQIKRGKNGKAAIVKVARKLLSRIRYVWLSGQPYQTAIVK

SEQ ID NO: 133371 - protein, 459 aa, unidentified
MARKKKLEMEIINHDAGGIDIGSRSHYVAVGQSLDDVKEFGVYAEELTQLCEWLLSYGITSVAMESTGDYWQNLFTELVKHDIDVVLCNGKFTKHPKGKKTDVKDCRWIQKLHSLGLLTSSFLPDETTEKLRTYCRQRSNMIGLSAGASRKMQKYLKFLNFRLDVVVKDVCGLTGLKIIDDICKGNLDPFLLAEHRHYNCRKSKEEIAMALHGNNRNDFLFGLKQEYQSYQFYQKQIIACDKEINRYIKEILKKSPEKKKLKTTDKPYKRLNKNAPAIKNFNQIAYQYFGGVDLMAIEGLSHSTVLSIMSEIGPDGFLKFKSSKEFVSWLRVAPNNKISGGKVLSSRIPKGSNRLKIALRQSANAIGNLKDTHLSDFFRRIAFRKGRQAAVSATARKLGVIIWTMITKKVPYIPAKEYLFLDQKRKLRIVSRIKKNIAKFDLKMEDIGFSNSQIIKANI

SEQ ID NO: 133372 - protein, 392 aa, unidentified
MVISVGVDISKDKHDCVIVSSEGEVLADVFTIPNTMDGFHCLLQRIRDCTAPQDKIKVGLEATGHYSYNLLGFLLDNGLATYVLNPLRTNLYRKSLSLRKTKTDRVDARTIASMLLSDAGLKPYTDTAYHNEELKSLTRYRFDKVKERAKLKSSIARLICILFPELEMLVPSLHIVSVYALLEEFPGAKQIAAAHLTRLKALLETASKGHYKRDMALEIREAARNSIGSRMPAKSLELQHTIRLIRELDHEIAEIEEQIQSIMDELHSPITTIPGLGFRMAAMILAEVGDFTRFDSPDKLLAYAGMSPSTYQSGQLKNCYPHMEKRGSRYLRYALYNATKYVCHWDPTFAAYLAKKRAEGKHYNIAISHAAKKLVRLIFAMEKSGSVYRLTT

SEQ ID NO: 133373 - protein, 387 aa, unidentified
MPAATSVSERPAAIRVDLGAIFVSMELSRSKWLITSLSPGGGEKMSKHVVAGGDLAGLLDLFAALQAKAQARTGHSYRTIVLQEAGLDGFWIHRALEKEGIESHVVDPASITTSRRKKRAKTDRIDGEALVRALLAYKRGEPRVCSMVRPPSPEEEDRRRLVRERKALITERVRHSNRIKGLLFAQGISKYEPLRRDRRARLAALRTGDGRELPAHLKAQISRELDRLELLLEQLKAVEAERGALLAQEQVHANAPAGMLLKLKGIGPEFAAILWSEGLFRHYDNRRQLAAYAGLAPTPWQSGQIDREQGVSKAGNPRLRVALIQLSWLWLQHQSQSALARWFEARVARNGGRLRKSTIVALARKLLVALWKYVNAGVAIEGAVLAS

SEQ ID NO: 133374 - protein, 323 aa, unidentified
MTKHITICAGIDTGKSKLDVAVEGSREQLQVENTSEGHAVLLAWLRRHRVKRVGIEASGGYEQPVVAELRRKRFVVVVFQPAQVRAYAKFHLQRAKNDKIDAALIAACTAAVRKIHPAPDPRLQPFAEQLTMIDQIGEDIARLKNRIESCRNTQIKGLWEEDLARLAKREKVELKALIASICKHPDLAKRLDLINSIDGIGLPTAVAILVRMPEIGQITREQAAALAGLAPYDDDSGEHSGTRHIEGGRQRLRHALYAAALAASFRWNKQLITLYRRLIAAGKEHKRALVACARKMLVFANTIVARGTPWQDRPPENAALTAS

SEQ ID NO: 133375 - protein, 337 aa, unidentified
MSITLVGIDLAKNIFQIHGVDEHGKPVLRRRVSRSKLLETIVRLPACRIVLEACGGAHYWARRFMAMGHQVQMIAPKFVKPFVKSQKNDCNDAEAIVEAASRPTMRYVAINGIEQQDIQCMHRIRSLLMRDRIAQINQIRGLLAEYGIVIAQSPLQVQRHLPEIIADTTTELTDFTRGMVCDMYERLKQLDEQIVRYDNKIRQIHRASAQCQRLEKIRGVGPMIATAIVAAAGDARAFKNGRQFAAWLGLTPRQHSSGNRQRLFGITKRGNSYLRMLLVHGARAVVQQAPNRHDALSRWINELRSRRGMNIAVVALANKTARTIWVLLAKEQDYALA

SEQ ID NO: 133376 - protein, 433 aa, unidentified
MLKLNYMSTLFVGIDVSSKTNAVYAMDFEENKYISSSFGNNQPGADKLVNMIAECMHKHKNLDTVLIVLESTSVYSVHISSFLSTSEVLMPYKPYVFCVNPKATSNYRKSYIGMEKTDPTDAYLIADFGRVGRTKKLEPWRGGQFIALKRLTRHRMHLSECITREKTYMVSNLYLKFSELQLLEGDDKPFGSLYGATSSAVLTEFLSPQEIIDMPEEELLTFLAGKSRNRISDLSKTSELLRKAARDSYRLDKCMYEPLNVSLASSFNCIHAYQKEIKLIEQAIEKCINGMNPNALIILQSIPGIGPVWASGILSEIGDITAFHSSDALAKYAGLYWPKGDSGDFTSEDNKMSKAGNPYLRYYLGEAANSVRKHIPEYADFYARKYAEVTKHQHKRALALTSRKFVRLVFGLLVKNQLYTGEKLDAEYNIESN

SEQ ID NO: 133377 - protein, 346 aa, unidentified
MLNKNNSNKNNQNTDNSPLILSSLIIGIDIAKSSFDISFLQNNSTFYARFCNHDDGFLDLSNYLTNHLTEHKITCLNIHFIMESTNIYWQALALWAYQAGFLVSVVNPAFIRAYAKSLGIRNKTDKQDAALLARYGRHENPPLWQPPSPIEDKMISLVRQRHHSKHKLTNELTRLETANYHTLSFIQSTISYWQTHIQKLDCVIWQTINSDVNLKVRATLLHSIPGIGKKSIPPLLALIGDGSRFASSKHLVSFVGLVPRAYQSGSSINKQTTIGHSGRPDIREVLYMPAVVVSFGRYKAFQPFVQRLLANGKCKKQVIVAVMRKLLAICYVVIKTGQPFDPSLHQ

SEQ ID NO: 133378 - protein, 333 aa, unidentified
MKKLIHFVGIDVSKETFDLALIKNNDVSQIIQKVFLNNPKGFKELNSWLKQQKTAYFDTVFCVEHTGYYSKLIAKFIIAKKGNLWMEMSLKIIRSLGIQRGKNDKIDARRIALFAHRNQQDYKPYNPPRPIIEKLKTMLMLRQKLINSKLSITIPVNELKRIDKPAGKEAMAITSITMNALGKNLLTIEQRIDDLVASDKDLAEKYKLVTSVPGIGKITFCYLAYFTNEFKNYSQAKQLACYCGVVPFEYTSGKSVRGKPKVHNMANKFMKKLLHTAALCAVTYYPEFKAYYERKINENKNRMLILNNVRNKLIIRVAAVVKNNQPYSVHSAT

SEQ ID NO: 133379 - protein, 345 aa, unidentified
MAEVTTIGLDLAKRVFQVHGVDAAGVVMVRRALRRQQVLAFFAKLPRCLVGIEACATAHYWARELASLGHDVRLIPPPYAKAYVRRNKNDPADAAAICEAVSRPSMRFVAVKTEAQQAAAGIHKVRELLIKQRTMLINTLRGLMAEFGIIVAEGPRHVSELVAILADPADARIPAPLHHGLMAIVETLRGLEQRIERVEKQIVGWGRANATCRHLITIPGYGPILSSAMTAMVVNPAGFTSARHFAASLGLVPRQDGTGGKAKLGPISKRGNGYLRRLLVNGAMSVLGSRRAKDDAWLVKLLQRKERKVVACALANKLARTGWALMMRQQDYRWPRQDQLCPDLA

SEQ ID NO: 133380 - protein, 338 aa, unidentified
MDHYVGIDLHSNNSYTAIIDNDNKKVFKKKTKNDLRLVLHALKPYRDQVKGIVVESTYNWYWLVDGLIEEGYTIHLANPSAIKQYTGLKHSDDITDAFHLANLLRLGILPTGYIYPKEERPIRDLLRKRTQLVHQRTLQIQSFQNLVSRNLGKSMKGTAIKKLSEDDVEHLFHDKHLVVAGKVSIATILFLAEKIKQLEKTLHKVAKLKDEYRLLMTVPGIQKILALTIMYETGPIERFAKVGNYASYCRCVGSRRLSNEKVKGKGNRKNGNKHLCWAYVEAAHHAQQHYEYVERYYQRKMAKTNLIVARKTIAHKLARACYYIIRDQKEFDPTRVFV

SEQ ID NO: 133381 - protein, 391 aa, unidentified
MTERKTETVNDLSRCLDPLDMDATLIAVIEMSQSSWLVGGIVPGVERQPLKKLAIDEHALLKLLSRWRAEAEKKGHRITRIAVAFEAGHDGFWLARWLAAQGIEAHVIHPSSVAVTREHRRAKTDRLDTGLLKRGFLGWLRGERGHCKMVAVPTLAEEDAKRPSRDRETLVGEASRIITRVKAAFVRLGIRRFNPKLKTAAAGLEALRTPEGEPIPPNTLAALKRDLERHRIVKQQIREIEQTRLERLGKAPAEGSHAMVRLLARVIGIGVETADMLVQEVLSRNMRDRRAVARYAGLTGSPDESGSKRREKGLARSGNARVRRGMIQLAWRFLMFQKDSALAQWYRQRTANAPSTRKTLVVALARKLLIALCRLARDGVVPEGVRLRPAA

SEQ ID NO: 133382 - protein, 318 aa, unidentified
MNTSTHQNIHVGVDTGKSQLDIFIRPIDIFFTVNNDEKGIKEAIKTIKQHVPQRVVVEATGRLEMPFIIACSEAKLPFVIANPIHIKRFAGAIGQRAKTDKLDARLIAHYSEAIQPNLTQLKPENMRLMSDLVARRHQLLAMQTMEKNRLQSLPKHLAGTIKPVLTTFKNQIEKTEQKILSLIESCPEYQNKNRLLQSVPGIGKVAAASIISNVPELGLITNKQAAALIGVAPINRESGRYKGKRVIQGGRAQVRTVLYMAMMSAMQCNSVFKDTYQRLLDAGKPKKVAIIACVRKMVVILNSMLRDGVMWNENIARN

SEQ ID NO: 133383 - protein, 317 aa, unidentified
MNSKNNQNEINVGVDTGKTQLDIYIRPFDIYFVVTNDDDGIKEAITEIKKHNVTRVVIEATGRLEQPFIMACAKANIPFVIANPVRIKRFAGVINQKAKTDKLDAKLIAHYAEVMKPELSKLKPEDMRLMSDLLSRRRQLMVMQTMEKNRLQIMPKETQSSIKPMLTVLKNQLEKIDNKLHKLIESCDEYKIKNDIIQSVPGVGKVVAFNLISEMPELGYINNKEASSLVGVAPFNRESGSYKGKRMVRGGRAQIRTAMYMAMMSAIQCNPTFKATYQRLVAAGKPKKVAIIACIRKLVITLNSMVRDGVYWDPKMN

SEQ ID NO: 133384 - protein, 457 aa, unidentified
MARKCKSKAKGRGRMLPVLHPDAAGVDIGAEEIYVAVPPDRDAEPVRSFETFTRDLQQLVDWLQQCRVRTVAMESTGVFWIPLYQILETRGFQVFLVNAQHIKNVPGRKSDVSDCQWIQYLHSVGLLKASFRPPDEICVIHSLWRHRESIMQMAAEHIMHMQKALSQMNLQLHHVLSEITGVSGLAILDAILAGERDTTKLARLCNWRVRSSRETVAKSLEGDYRPEHLFTLRQSLVGYRFYQQLISEVDQELELRMHDLPRAEGAPAQMPPRTKACVYQRAGNEPAFDLKAELFRIAGVDLTDVPGISAITAHTILMEVGPDVSRFRNASAFASWLGLCPEKQVSGGKTLSTHSRKVKNRAAIAPRLGAHCLYRAKNYLGEFHRRMKWRLGVPEAVTATAHKLARIVYHLLSTKEPYSESVLIKSDRQANNRAEIRLRRQAANLGFQLMPVPETNS

SEQ ID NO: 133385 - protein, 342 aa, unidentified
MKNEILVVGIDISKDDFHVCAKEKAADGNSKIKGSRSFKNNDKGFAELALWVSKREKSGSSVRYIMEATGSYYENLAYYLYQAGNSVSVVLPNKIKHFAKSLNVKTKTDKIDSTVIAEIGVEREMPEWQPMSINYKELRDLCREMLSLRKEKSRAMCQLHAMNYSHDKTPSVVKIKNTQIDFYEQTILEIEAEIERLVNADTDLKNRIDKIQKVKGLKLNTIIVILCETNGFQMFESIRQVVSYAGLDVVMKESGNFKGKTKISKKGNNRIRQCLFMPAMSAIQHNAKIKELYCRIVERNPDIKRKGIVAGMRKLLILIFVLWKKNEEYDPNHEWQKTDIGK

SEQ ID NO: 133386 - protein, 344 aa, unidentified
MQITTIGLDLAKNVFQIHGVDATSQVLVRKSLRRSQMLPFFAKLPPCLVGIEACGTSHHWARELIKLGHEVRLMPPAYVKPYVKRGKTDAADAEAVCEAVTRPTMRFVPVKSPEQQAALSMHRTRDLLVKQRTQLINMIRGLLAEFGVDIPKGLERALLMARQIVDGKAPEVPMEAARIVATLSQQALDIHVRLRGIDRDLAVWLRGNDVARRLMTIPGIGPVSATALAASVTDPHQFRSGRQFAAWLGLTPLQKSSGGKERLGRISKMGDKYLRKLLIVGMTSLVRRAKYNPEKIDSRLADLLARKPTRVATVAMANKTARVIWAIMARGEIYRTDHQPALAA

SEQ ID NO: 133387 - protein, 415 aa, unidentified
MALKIVYQICCGIDVHKTFVVACIASTNKQGVTIYKRHRFSTFTQGLKELLQWLLDNHCKDVCMESTGKYWIPIYNVLEKDCNIVLAHPKYVKAIRGKKTDKKDAKWIADLFKHDLVAGSFMPPADIRQLRDLMRYRFKLTCFMSSEKNRLQNCLTVSNIQLASVVSDPFGKSSQRILDKILENPDDTSFDIEPLIHGSMKKKLPELELAIDGFITPEQAGKLKVIKKHFEDLESRKAELEKLILALASPYQQELDLILTAPSFKNKFTAIGIISEIGVNMEAFPSAKHLCSWAGLTPTNNESAGKKKSVRVSKAGCYIKPLLVQCANSVVKSEKHPEIRNRYLRLRKRRGHKKAIIAIARMLLTALYNILKNKEPYNAELYRKSDALPVNREITIEQAILIAQFQGYKIKSATE

SEQ ID NO: 133388 - protein, 328 aa, unidentified
MNASELIFVGIDVSKDTLEIAFDDKGKTRQFGNDETGIAALLADIKAAQSAAGDVGAVVLEATGGFERVAAVALCGAGLPVMVVNPRQARDFAKAMGYLSKTDAIDARVLSHFARTLYGSERRADLLMRLPDAQQEQLHACIVRRSQLIGMRVAEENRLALCHPTQRKSIAAVCKVINRQIADIDRDIDARLKKHFAAKLALLADFKGVGVVTKACLMAALPELGQLSQERIAKLVGVAPLNCDSGKHKGKRFTWGGRAEVRCALYMAVMSAVRYNPVIKAFYDRLLSKGKLKKVALVACMHKMLTILNAIMKSGKPWDANHFSIKMA

SEQ ID NO: 133389 - protein, 353 aa, unidentified
MTIVGMDLGQNKSAWETLDTQTGEVSRGQVGMSDDALRKLLVNAGADQLVIESGPLAARVHDLATAAGVAVLVADATQDAWLWKNVKRKTDADDAGKLVRLAALGQINPVHIPAPAVRERRHLLEYRATLVAEQTRCKNRIRATLLLQGLKLPSGKAGWSVAAREALARRTRLLAECDPAELWRGLLKTELEHLQQVAALVATVTEKLDALGRADARVARLRTIPGVGPRTAEVIVTVLDQPQRFATRRQVAAYGGLTPRRWQSGQMDRSGRITKRGSPLLRQMLNQSAWIAVRCNPELRAFFLRVGGGQKKRRKQAIVAVMRKLLVITWALLRDETTYQATRLKTKTEKAAA

SEQ ID NO: 133390 - protein, 368 aa, unidentified
MEKTVYVGIDYHISKLTIAVKMQDQENFHSTIHLENKTKVIANYLKKLSEQFQLKICYEASGSGYHFQRLLHSWGYHCDVIAPSLIPKKAGDRRKNDFRDARELARNYAAGQLTVVHPPTQYEEAVRSVVRCRLDFKENEKRTKQHINSLLISQGHHWQKSKWTLQHRKWIQQLSFSEPFVLQVLQEHLAHLEYLETCTARLDHQIEEIAASDTYAPSVKKLRALKGLGTLSAMILIAEITDFRRFASPRALMSFLGLIPSEDSSGVKSRFGSITKAGNRRCRTQLIESVRHYIKQPRMSRQMKADCAQVDPASAGIVQKCMQRLHKRYWALTMKGKTRNVALVAIAREFVGFIWALMTSDDTAAQAA

SEQ ID NO: 133391 - protein, 327 aa, unidentified
MPLVWCPPVGRCSPVELMLQFGRVTSAVPVVCHPFGLRTKGATMGIVRVTGGVDTHADSHVAAAVDDNGGMLGVESFPSTEAGFEDLLRWLVGFGPVTQVGVEGTGSWGVGLTRFLSAADVVVIEVDRPNRQVRRKQGKSDPTDAVSAARAALSGVATTTPKTRDGPVEQMRVLLVARRSARQQRIQTLNQLRHLVFCAPESIRVRFKDRYKTGLVSEAANMRPRKGSDPVAYTTNLVIRSLARRIQSLNNEIRTVDQILRLLIAERAPSLLNLHGVDVETAASLLVTAGDNPDRISSERSWAHLCGVTPLPASSGKTTRHRLNRWR

SEQ ID NO: 133392 - protein, 349 aa, unidentified
MSMLADQVDIVIGVDTHKHTHTGAVIVAATGAAIDGVTVPTDSTGYAELVSMADRHSTRRAWSIEGTGSYGAGLTRHLVLLGERVVELDRPGRPARRNGAKSDSIDAARAGREALAREHLAEPRRDQERAAVSVLLAVRGSAVDGSRVAQQQLHALVTAAPEDLRSRFRGSTTAAMTATASRLRLSPHWDVETRSYATVLRELAQRVLSLRAVAREHERSIVSIVRSWRPDLLEVQGVGPIVAAVVLCAWSHPGRCRHEAAFASLAGVSPIPASSGMTTRHRLNHSGDRQLNRALHVIAISRVRYDAETRAYTERRRAEGKTDREIRRCLKRYIARQLFRQLENPPTTT

SEQ ID NO: 133393 - protein, 416 aa, unidentified
MKTEPKQTFERYIAIDSHKFYVVVGGINDQLDHTLPQRRLSLEKFRQWAPGHLRPTDAVVIEASTNTWVLYDLVAPLVGKIVVVHPPKVKLIASAAIKTDKIDVFKLAKLLLIGWLPEVWVPPQHVRDLRALISHRWRLVCTRTATKNRLHSVLQRNAIRAPQKQPFTPKHRGWWAELEVSTTEQLRVRQDLENLDHLTRQIAEIDAELEQLSTSEQWGQVVPYVMQLPGFGLTITMTVMAAIGDISRFPKDKKLVGYAGLGTRVHDSGLTHRKGHITKAGRKDLRWAAVEAAWSAVRYDPYWKAQFQALKQRMHPNQAIVAIARKLLIALWHVLTKKQAYRQGTEEQVVRKMIRWSWQMNEQARLGLTRQQFARYTLMHLGVGNEITRIVYGGYPRRIASVDEVLALRPELRPQE

SEQ ID NO: 133394 - protein, 408 aa, unidentified
MEKINNLMEIKPQLDCAAGFDIHKEKIQACYYVRDKVHEIKEYNTFTSDLLRLRDDVLKLEIKDGIMESTGVYWVALCSILMAADIKVHVVNAKFVKNMPKEKTDKRDAQFLCKALVNGQIRDSYVAPESQREFRNLCRERTKDTQHIDQAQNRIVKILESRNIKLRSVVKNMNTLTAKDIVRALSEGETDIEKLIKLCRGKVKKKVDLMRKALQGILTPHDRAALKRLLGDMAHYEKNITEIEAEIKTHTDKISPQLIKELDNITGVSKQSTEIILAEIGDKVDAWGNEDQLAAWTGTAPGNNETANKQRPAGRRGGNRYLRTALVQMAWAAIRTKNSYWKAIFAYYSRRMPVKKAIMIIARKLVRIIYKVIKGIRTYKDYGAEYFIKHLKERMEQKRNHNISLIVK

SEQ ID NO: 133395 - protein, 407 aa, unidentified
MQGSVITLDVSKGSCHYQGFIRKNQPSTKTRILKFTKKSFAELSAYRERLAIKAGQEDIPFIFEATGVYHKPLQKYLDDHGFTYYIISPLMSARYRKLELHSNKTDPLDCANIAKVFYEYDKLRVYQRMDKEYESLRDMNRNYEDMLVHLRKYKVRFKSMLDVIFPYYQKCFKNDGIYADLPLILLKEYKHPDIIHQTSEDIMVKKLSKLCPKHQTGYIRNKVQKVKELAEDVYSGCESTDIYVELFTELIETLQKQMKECDEQLIKIIETAAKSPYFDLIRSVVGIGDNLAARILAEIGDINQFDTRNKLISYAGLDPMIRQSGKKDGIHLSVSKKGNRYLRCLLYQAASANYRLKKNDVIYRFNQKKRQQSNPLNSKAANTATAHKILVIVYGMCKNGTYYNPYE

SEQ ID NO: 133396 - protein, 324 aa, unidentified
MTDSIVGIDVSKETLDANCARGQRKQARIFANNPDGWKVALSWLKAMGGNRAHVCMEATGRHSLGVALALHDAGHVVSIVNPAQIRDFARTKLGRNKTDKVDAALIREYVELFKPGPWAPPSVAMRRLCELQTIRAGIVSNRAEWKNRIGSGLTEGTAITLATATIEHFTAQLEAIDKAIKETIDQDVELRGRRDLLLSVVGVGETLAALLLTEMPEPGVLRRSGELVAYAGLNPSHHRSGSSIDRPTRISKIGNATLRSSLYMPALSAMRFNPAIAALVARLKNAGRLKPKQIVVAAMRKLLVICFGVLKTGNPFDSAIAMPA

SEQ ID NO: 133397 - protein, 400 aa, unidentified
MNAVGIDVSKGKSMITVMRPFGEVVASPYEVTHTDSELSKLANSLLSLNSETKVIMECTGSYYQPIAYALHEAGLFVSAVHAKLIHSFGNNTIRKVKTDKADSIKIANYGLSHWLELPRYIPEDDIRKMLKAFCRQYEKYWKLKTMLKNNFISLTDQTFPGVNELFSSPPRKSDGHEKWMDFAFKFWHCECVCGLSQNAFTERYHRWCKREGYYFNEDKALDAYACGHWFVMPKNDTTKLLITQTINQINAVSESIAVFAREMKRLAETLPEYPVVSAFYGVGDILAPLLMAEIGDVYRFQKKGSLVCFAGLEAPPYQSGKFESENRHISKRGSPHLRKALFQVMDCLIKHSPVDDPIYQFLDRKRAEGKHYYSYMTAGSAKFLRIYYARVKEYLDALET

SEQ ID NO: 133398 - protein, 334 aa, unidentified
MQNVTLIGIDLGKHSFHVHAQDKNGHALLRKKFSRNHLTAFLSTCTASTVVMESCAGAHFMARHISQFGHQVKLISPQFVRPFVKSNKNDFIDAEAICEAASRPSMRFVTPRTEDQQAMSALHRVRDALIRERVKTTNQMHAFLLEFGISMPRGIAVIRRLSAVLEEHELPPYLARLLMRLHQHYAYLTEQIEALEQELKTHMADDDTTQRLLTIPGVGLITASLLATKLGDGRSYASSRDFAASTGLVPRQYSTGGKSTLMGISKRGDKNLRRLLVQCARAFMQRLEHNQGRLADWVKAQLTRHHSNVVACGLANKLARIAWSVTTHRTAFIQ

SEQ ID NO: 133399 - protein, 410 aa, unidentified
MDVLIPRCCGLDVHQKTVVASVRILGPTGEVTRDTRTFGTTTRELEALAAWLRPSQITHIAMEATGVLWKPVWHILEPEWQLLLVNPQHLKRVPGRKTDVLDAAWIAQLLQCGLLRGSYVPPAVIRELRDLTRTRTTLEDETTRVVNRIHKVLEDANIKLATVATDIMGASGRAMLRAIIAGETDPLRLADLARRRLRLKRGALAEALYGRVTPHHRFLLERLLAQVEFLETEIHRFDQRVTEMSAPFAAALQRLDAIPGINRRLAENVLAEVGDDMAPFPSVPEMVSWAGICPGKRESAGVSHSARIRKGNRWLSRALVQAAWAARRKKNCYLATQFQRIARRRGAQRAVVAVAHSILTATFFILRDGVDYQDLGPEHFHRLSPDKVVRDLVKRLEKLGHRVTLEMIAA

SEQ ID NO: 133400 - protein, 402 aa, unidentified
MFYLGIDVAKKSSRYLVLDKEGKRVTSFTLENLKERFQNLLSRMQEAKIDGKDVLAGLEATGFFWENLYQFLQEKGFKVILLNPYYVNKFREALAKKAKTDDIDALVIANLLKTGEYMNSIVPEEKIQVLREYTNLRYEFLRAKQDYQRKVISLLDVVFPEYERTALRNPFGVAPLQILKEFPTAKDLALAKPRQIEKIVRSIQGNNFDVKEIQSIIDWAKNSIYSGRAREARGVSLKMLLGQVQGLDSNIQEIDKKIEDILSPGPDDSFPGENLLSIPGVGKKTLAAVLSYLGIDGSSFATAKKVAGYVGFFPKLYQSGETRSENRISHRGPKVLRWALYMSAVACLKHNKEMRTIYHRKISQGKTAKQALIVVAKKLLQIMLAMLKSGKSYNPIQVFANT

SEQ ID NO: 133401 - protein, 404 aa, unidentified
MWFAGIDWADDHHDLVVIDGEGQQVGARRVKHTPAGLTELTEFLASITGPERKAELACIIETTHGLLIAALLAAGYPVYPVNPKTVDRKRGAAGAKTDQIDAYLLAKHGRSEFADLRRLEPDSPLIAELKALTRDQDSLIQMQTRLVNQMTACLKAYYPVALLLFTKLQQRCTLHFLRSYPTPQAARQATAEQIATVLKQAGHPTPEKQAAKMVATLHQPALQADEVTTRTKARLLLALVRQLLPVLEEIASYDQEIERLFLTHADSQIFRSLPRAGKRLAPRLLAELGEDRRRYQNAASLQALAGTSPVPYESGKYAKPHRRYACIKPLRNALQQFAWQSTQKEVWALDYYQHKRTQSKSHSVAVRALANIWCRIIFAVWTKRECYQTSTFEAAQRRHALRAA

SEQ ID NO: 133402 - protein, 369 aa, unidentified
METKESNPINFLYVGVDVHKDQHTAVATNCFGQALLEKEINNSKEEFEKLVKGVKTLAEAKNLKVIFGLEDTSAYGQRLARHLCQENFPVKVVSPVLVDRERRKLTHPEKSDSQDALGVAKALISKIGTLPNFSISKTNEITKELKDLVIDREFLVKEQTRIKNQLHRLFHKAYNSEYRLKFKNPFAVRALRYWLKNPVPAELKESLVLKNQIKRKVRRLKDIRKEVMEIEEEMNILLNQMNQKLETLNGCGLVSASSVLAEIKNIDRFQSSSSLAKYGGLCPKEKSSGKSIKHIKTKSGNRRLNKAIHRIALAQIGRQGNVYGKEYFKKKIAEGKNKAQALCCLKRRIINIIFAMLKHKTAYDYAARC

SEQ ID NO: 133403 - protein, 431 aa, unidentified
MPFAGFDIHLKSVEAVLLDEAGVLLLRRNFPATRAAIVEFARRHLTREYRVALEATFHTWAIAALLEPWVAEVVVSNPLRTRAIAEAKIKTDRVDATVLAHLLRLDYLPRVWQPDADTCDLRRQTTERAALVSDCTRIKNRIHAVLHQRLLTPPGGDLFSPANRRWLAEVDLDARGRQSLDRHLRHLAFVEAELAAQQTALARQAYADPRVKLLMTLPGVDCAVAQALLAALGDVTRFPTAEKAAAYLGLVPSTHQSADHCYHGPITKQGRSHARWLLVQAAQHIDRHPGPLGVFFRRIARKKNRNVAVVATAHKLVRIAWHMLRRQEPYRYAQPKTLEAKFTRLRVRATGQRRRGGLPKGAPRPAAYGTGVRTRAVAGLDEIYDGQGLPPLPAPAPGEARMLDDTGTAAWAASIRRRVRVPRGRPPRPQH

SEQ ID NO: 133404 - protein, 401 aa, unidentified
MVSDFKKGRYNLMKIFVGIDIAKLNHFAAAISSDGEILLEPFKFTNDADGFQLLVSKLESFDKNSIIIGLESTAHYGDNLVRYLVAEFYQVCVLNPIKTCQMRKNNVRKTKTDKVDTFVIAKTLMMQDDLRFITFFDLDMMDLKALGRFRQKTIKQRTRLKIQLTTYVDQVFPEIQYFFKSGLHQHAVYALLKEAPSPKEIASMHMTHLANLLKVNSHGHFTKELAKELRVLAQKSVGANDSAISIQITQTIQQIELLDSQLEKIEAEMTDIMKFNDSVIMTIPGIGYINGGMILGEIGDIHRFSNPNKLLAFAGLDPSVYQSGNFQAKTTRMSKRGSRVLRYALVNAAWNVVRNNATFKAYYDAKRAEGRSHYNALGHCAGKLVRVIWKMLTGEVEFNLE

SEQ ID NO: 133405 - protein, 375 aa, unidentified
MTSVALSSGPIHLGLDVSKDQIAVGILRPEQESPDVERIIHDEASVRRLIDRFPDRGRLKTCYEAGPTGFGLYWLLRSMGVACDVVAPSLIPKAPGDRVKTDKRDCKRLARLHRAGQLVAIHVPSPQEEAVRDLCRARAAAVADRTRARHRLSKFLLRNGRPWRGGEAWTFKHEQWLSGQHFDDPALRATYAHYRAMLIGRDAELAAVEADLAHWFTHGPFAAAVARLAGYRGVSQLGALTIASEVGDWKRFGTARAVMSFAGLVPSEYSSGASTHRGRITKAGNARLRTQLLESAWSYKHRPYLSLDLRRRQQGLDPATVARSWAAQQRLCARFRRLDARKTSRNVVAVAIARELAGFLWAEMTADQPPTGSTR

SEQ ID NO: 133406 - protein, 380 aa, unidentified
MTQAYIGLDVHKTTISIAIAFFGNDDPVSYGKCSSDINRFLKTLRRLMRKHSYEKKDIMLCYEAGPCGFVLARHLLRLGLHTVVIAPSLIPRQSGNKFKTDKRDAKELARHFRSGNLTPVHIPDESDEVIRDLCRARTDAVDDCRRSRQRMLSFLLRNGHHYTGKSHWTAAHMRYLRELVLQNPSQKVILEEYLQTIDSNMQRVADLEENMRTLQADWARSKFAEALQGFRGFQLVASMIITSELGDLTRFNHPRKLMAYLGLVPTEDSSGDRRRQGAITKCGNSHARWILVEVAECYRYDPKISRALSYRQEGLSKSVKDLSWRAQKRLNHRYVRLLMRRLHKNKIKVAIARELAAFIWELGQIIKKESSIPDSQRYAA

SEQ ID NO: 133407 - protein, 341 aa, unidentified
MSTATLVGIDLGKHSFHLHGQDKAGREVFRKKTTRQQMMRLLGNLPSCTVVMEACAGSHFLARQLMAFGHEVKLISPQFVRPFVKGNKNDFIDAEAICEAASRPTMRFVTPKTEAQQTLSVLHRMRESLVRDRTKTANQAHGFLLEFGISLPKGLSLVRRLPCTLGEHELPPRLATLLKRLHEHFCYLDEQIRALDKEMDNQLAADDLGSRLLSIPCVGPITASLLCAEMGDGKQYGGSRDFAASVGLVPRQYSTGGRANLLGISKRGDKNLRRLLVQCARVYLQRLAFQQGALADWVRSLRERRHSNVVVCALANKFARIAWAIAANHSEFEAGPSALAA

SEQ ID NO: 133408 - protein, 339 aa, unidentified
MAETKNVIWAGFDVGKASFVAALDDASAPERRKVTSLPCRKFKRNQDELKKFFQWAQELFFEAEIRIVMESTGCYSQQLDGWIGELHPNVAVTIENAGNIHAFIQSLNLPHKTDRLDAQAIARFGTERQPKPTPRPSKTILVLRDLCHTRTALIKAKVEFQNRQETLSEPFSIEINKQTILMLEEKIKEVDLKIKECAKGDSDIRREIELMCTLPGVSFVSACEIIAELGSLKQYSAKELSSLSGLAPRIKESGSSVHASYMSRRSSGRLRQILYLDSMIGVKNIPVLQEFHQRLLEKGKKKMTARCACMRKMLLILRSIVVHQTPYRPDFSKKVIISI

SEQ ID NO: 133409 - protein, 451 aa, unidentified
MEILYTNCAGLDVHKKTVKVCLLTPGSNGRPHKEFRTYATTIEELLNLSDWLHEQGCTHVAFEATGVYWKPLYNLLEGHFEILVVNAQHIKAVPGRKTDVKDAEWIADLLQHGLLKASFIPSGSQRELRDLTRYRVKLTEEKAREINRVQKTLEDTNLKLGDVVSDIMGKASRRILYAIADGETDPSRLAAFAIGRVRASQEQLEAALTGRVTDHHRFLLREHLTQIRHLELAIDRVTAEITRRFTPPSPPEEPTASEKEDEATQERASESTPLPEAPVPPQAALSWTQAVVLLCSIPGISERTAIGILAEIGTDMQQFPTAAHLASWAGVCPGNHESAGKRLSGKTRKGNPQLRCLLVQAAHSASHQKHCYLAEQYRRIAKRRGAKRAAIAVAHSILVIIYHLLSNQTTYLEKGETFFEERDRQGMEKRLVRQLSRLGYQVQLQPIDQAG

SEQ ID NO: 133410 - protein, 415 aa, unidentified
MAKVMEAVICCCAGLDVHSKTVATCVRRVDDQGKIHAEVRTFGTMTRDLLSLCDWLTEEGVSHVAMESTGVFWKPIYNILEEQFEILLVNARHIKNVPGRKTDVKDCEWIAQLLQCGLLRGSFIPPRPQRELRDLTRMRTQLTQEMSRIANRIHKVLEDTNIKLGVVATDILGVSGRQMIQALIAGETDTVKLADMARGRLREKIPLLEQALVGKITEHHKFMLKALMDQLIYLESQIERFNQRIEEAARPFDKAITALIPMPGYERASAQSVIAEIGPDMNPFPTDDHLCSWAKICPGNNESAGKRKSGAAGYGNRWLRATLVQVAWAASHKKNSYFRAQYRRLAGRRGKKKAIVAVAHSILTVTYFILKLERSYKDLGGDYFDRISRDRIRRYHTKRLESLGYEVFITDKEAA

SEQ ID NO: 133411 - protein, 328 aa, unidentified
MCTLGIDVSKNKIDLCLLTAGPGGKKKHKVLTNEPAVARKVVDWLNAQRCVPESVTVVLEATGIYHENLAYGLHEAGVSVCMANPCRVREFAHGMDILNKNDAVDAFVLACYGELKSPAVWVPPSPEVRKLRALLRQRDALREDVQRTVNRLEKANSTSTPQEVIRSLERTKSWLNEELARIEKLITDHTDNDPGLKADLDLLKSIKGVKDQVGREMLALLKDGMFKSASQVAAYLGLTPVEKTSGSSVRGRPHMSKTGPSGVRAKLYVAALTASRWNKQAKAIYERLVAKGKAKKAALGAVMRKLVHLCFGVLKTRLPWDENYVATA

SEQ ID NO: 133412 - protein, 354 aa, unidentified
MNNESPEGVVHMQVSTIGVDLAKNVFQVHGVDSAGKVVITRQLRRKQVIDFLSKIPACLVGMEACGTAHHWAREVSKLGHTVRLMPPSYVKGYVKRSKNDAADAAAICEAVTRPSMRFVPIKSVDQQALLMLHRTRDLLIRQRTQLINALRAHLAEFGLVAETGREGLAQLAAIITDESNREALPSAMKQALQAIVDQLAALELQIGTLDRAIHAHHRANDMSCRLETVPGIGVIGATAIASTVTDPSDFKSGRDFAAWIGLVPRQHSTGGKERLGGISKQGDRYLRRLLVVGATAVVRHARQCPQKHPWVMKLLGKKPAKLVAVAVANKMARIAWAIMAKGGHYRAPELAAAT

SEQ ID NO: 133413 - protein, 375 aa, unidentified
MSDHSEAFVAFDTSKLRNSVAIAEAGRAGEVRFLGEIENSAAATAKLVRKLAGKYQRLTFCYEAGPTGYGLYRQIKSLGYECLVVAPSLIPRKPGDRVKTNRRDALGAVKLLRAGELTAVWVPDPRHEAMRDLTRARGAAVEDLRRKRQQVSAFLLRQGRHYSDGKKTWTKAHMNWLASQKLEHPEQRIAFEEMLLAVRQAQERIERLEQAIRAAVPDWSLAAMVTALMAMRGIDLVSATALLGEIGDLSRFQTAPELMAYLGLVPSEASTGDTVKHGPITKAGNRRARRILVECAWSYQHPPRVGKEKQEKVAAAPRAVREIAWKAQCRLNRRYRALIRRGKLKTVAVTAVARELAGFIWAIGREVTTADAAAR

SEQ ID NO: 133414 - protein, 326 aa, unidentified
MQSFLGVDVSKAKLDVALWLPNDKFKSKVFANDRQGHQALVQWLKGQLPDGLQDLHICMESTGSYHEALACAVHDQGLKVSVVNPLLVKRFAQSNGQRNKTDGADAKCLAQFCKEKRPERWQAPSAGVRALQALVARLGTLQDMRLAECNRRDVAHPSVTNSIACVIAELEAAIAQVKAQIAQTIDDDPDLKRRAQLLDTIPGLGEKSIAQLLAYIGRPERFNNVKAVSAFASLTPMIQQSGTSLDKRRGTHPMGHQELKRALYFPAMVAGRHNPLVAAFWNRLKAQGKPGKVIVVACMHKLLAIAYGVLRSGQPFNANHPKPQAA

SEQ ID NO: 133415 - protein, 318 aa, unidentified
MSDSVFVGIDVSSQTLEIASSAAAKTWQAANDTAGIEQLVVQLTGMKPALVVLEATGGYEFEAACAIQAAGLPVAVVNPRTARDFARAMGALAKTDTLDARMLATFARVLHQHPERERFIKPLADAQLQRLQALVLRRRQIVQMLTAERQRMRISHAAARPSIERVIEFLKAELGDSDAEVADHVQRHHAELAAALSSVPGIGAASVAVLLAQLPELGKLDRRRVAALVGVAPLNRDSGQMRGQRSIWGGRADVRRTLYMATLTAVRHNPVLAAHYERLLAAGKRKKVALVACMRKLLTILNAIAKHGSTWNLSLHHA

SEQ ID NO: 133416 - protein, 363 aa, unidentified
MTVYIGVDFHPYEQSVAYASDEDGEIGYRRFLHSDKQSIRAFYRKCGSDAVIGVEATGCLWWFEKLLADGGHKLKIGDPRMIRRAALSRHKNDFRDAETILDLLMRGAFPSIVPRSEESREVLDLLHYRQTLVQKRTSIANQLQAFARGKGLARFRMPAVKGRRQLVDAPVTEIETLLVTSRLVLFDEITAQMKALESRLEKLAAEDERARLLMTHPGIGVINALALVHTLGEVRRFRRKEEVVAFVGLDPLEKSSGQTKRIGQISKHGSRLARHLLGQAAQACRDRRIRKFYLEVSRRRGRPKAKVAAARKLLINCYVMLRDGIGYEEFQRRGEVGLCEGSGEARAKASVSGGLMARPAISI

SEQ ID NO: 133417 - protein, 376 aa, unidentified
MSDHSEAFVGLDTSKLGHAVAIADGGRGGEIRFYGEIENTPAATAKLVRKLAAKYERLTFCYEAGPTGYGTYRQITSLGFDCVVAAPSLIPKRPGDRVKTNRRDAVSLAKLLRADELTAVWVPDERHEAMRDLTRARETAMLDLRTKRQHVSAFLLRLERPYPERKKTWTKAHMGWIASQKLDHPEHRIVLEEMMLAVRQAQERLERLEQAIAAAVPDWSLAPVVTALMAMRGIDRVAATTVLAEIGDLSRFQTPLELMAYLGLVPSEHSTGDEIRRGPITKAGNRRARRMLVECSWSYQYPPRVGRAKQPKVDAAPPAVREIAWKAQHRLYRRYRALIRKGKRKTVAIVAVARELAGFIWAVARATTTARAAVAS

SEQ ID NO: 133418 - protein, 348 aa, unidentified
MDFIKFCVGIDCGKEELVCCFSGLDQDLFLKDFAVKSFANNPKGFAQLLKWVGSFKASKDLTFVMEATGVYHEDLAFFLDEKGFHLSVVLPSKIKHFRKSMEIKTDTDYSASIGIAHFGLSRKLSKWNKPHPVMRTLRNLTRERDQVITDRTSSRNALHALEHSHAPNKSSQKRLKARIKLCDAQEKEIEQEISAVVKANVDLHERIQNICTIKGIGLITAAIIIAETDGFAMIRNKRQLVSYAGMDVVEKQSGISIRGKSKISKRGNRHIRKALYFPSITAIKYNPDLKDQFIRIQIRTAIKMKGYVAIQRKLLVLIYTLWKKNEPFNPEYQNQYNEIKKIGPVIAD

SEQ ID NO: 133419 - protein, 452 aa, unidentified
MSKTKPKSLEVALPILHPQAAGLDIGAREIWACAPTDPTTLTVRSFGTFTPDLHGLADWLKTAGVQTVAMESTGVYWIPVFEILEACGLEVYLVNARHIKNVPGRKSDVQDCQWIQRLHRHGLLSASFRPEAEMRALRSYLRHRAMLLEYRAAHIQHMQKALQQMNVQLTQVLSDITGVTGLEIIRAIVAGERDPVTLAQLRHPRCKSSSDDIAKALSGHYRAEHVFALQQALALYDFYTQQLQACDQQIEHQYSAIKPTVEDDLPPLPPDPKVNSHSKNAPTFDVRNQLYRLTGVDLTVVDGLDDSSAQTILAEIGTDMSKWPTVKHFCSWLGLAPHNDITGGKVIKSRTMTIHNRAAQALRMAAQSLNRSQSALGAFYRRMRARLGGEQAIVATAHKLARIIYYLLKHRVPYQPITAEVYDQHQRDRELKSLQRKATQLGYSLIQLPAQS

SEQ ID NO: 133420 - protein, 373 aa, unidentified
MGRNVIYVGVDVDDVRYHGCALDPRTGEVLAFHCRPTLKGLVGQLEKVAEYFGDVELKLCYEASYVGFALQRDLQRRGYDCEVVAPSSIPRRAGKSVKTDRLDAADLAQYYANGLLTVVAAPEAELEQDRDLLRSRQQLMQHQGMVRRHIQSLLRRNGFHYKAETQRKSHWQKHHYGWLERTVEGCSGSLKANLSLLLRQLKSLDDILADYGQEVDALAVTPRYQEPVKALTCYKGIKHLFALTMITEIGDVKRFPHPRQLVSWVGMDIREYASGGKSNRLGITRQGNRYLRTAFVEANQRGYRTTRLSKDIKTRRVNAKPEYIAIADRCLRRLNKKGNRLLMAGKHPNKVKVACAREMVGFVWESLNRAAAT

SEQ ID NO: 133421 - protein, 404 aa, unidentified
MELTAIYRCVAALDVHQSKLTVCILYETESGEIITELKEFGGFKRDRRAMADWVASFQPELVVMESTGIYWKSPYAALEKQGLTIWVVNARHVKQVPGRKTDFADAQWLAILARNGLLRGGFVPPAVFRELRLIARQMQKLTGILSGEKNRLHKILSDGGIRLGVVVSDIHGKSAKAMIKGLLAGESPEQVLKYASNRLKASEEELLDALAGDLSPSHQFVLTELMAHIDELEARIETFRQALLQGLAPYQAILRSLQTIPGLDETGAALLLVEIGDDMSAFGTPERLASWAGVCPGNNESAGKKKTGKTRKGNPYVRRILCEASNAASRTQCRLQDMFKGLLIRRGRKRAIFALAHKILKIVFLLIERGDYYRDATVDYEKLSVQRNAPRWIKTLKKYGYIAA

SEQ ID NO: 133422 - protein, 345 aa, unidentified
MDKPRYYVGIDIASATFTSAVGSMGDKWQLEVRPATFANDYDSFPKYLSWLKAHGLTPENSVICMEATGVYGEVLTHFLLANHYAVSVEPPLKVKRAFKPEGTKSDPVDSVQIGEYAYRFYDQLSFWRPRAEILEQIQTLLTVREQLVVERSGHSNSLQALKRKKVHTPLAETIHAQARAELKSHIQAIETEIQRLIDQDPDFRHLIGLLMSIPGVGLLLAAHLLIVFQSTDQPLSPKRLAAYIGICPLEHSSGTSRHPTPTSRHYGPPALRKLLYLAALSLRTHNQPFRTYFERKTGQGKPKQLVINNIANRLLKIIVAVVRSKTAFIQNYRSVNPGLLKKALT

SEQ ID NO: 133423 - protein, 402 aa, unidentified
MNCVGIDVSKGKSMIAVMRPFGEVVVSPFEVLHTDSELSELARLLKNLDGETRVVMESTGNYHAPVAWLLHGAGFYVSVVNAMLVHDYGNNSLRRAKTDKKDAVKLANYGLDHWLILPRYVPEEDTRLMLKTCYRQYQQYSKVQTMLKNNLISLLDTAFPDANRLFTSPPRADGSEKWVDFVATFWHCECVCGLSKKAFTAKYQKWCRKHGYNFSQDKALDIYASACGRFGVMPKTNTAKLLVEQAISQLQTTSAALAALKQEMQSLAASLPEYPVVMEMFGVGPTLGPQLIAEIGDVRRFHSKKALVAFAGIDAPPYQSGQIDVRSRSISKRGSASLRRTLFLVMGVLLQCAPMDEPVYQFMNKKRSEGKPYRVYMMASANKFLRIYYASVKAYLDSLEHD

SEQ ID NO: 133424 - protein, 417 aa, unidentified
MSLNIDEAKFFVGIDWASEIHAVCVQDARGRQVAAFTVEHTADGLAGLTRRLARIGDPGCLPVGIERPDGRLVDALLEAGHPVVPVKPNAIKTWRDAEVLSGAKSDAGDAEVIAEYLRLRHHRLQPATPYSPETKALRTVTRTRGDLVDMRVAATNQLSALLDLHWPGAKAIFADVESPIALEFLTRYPTARHAAHLGVKQLAAFCAKHGYSGRRTGEQLLARLRAAPTGTTDEVICEAVRDAVTALVTILTAVGAALKDLSRSVIATLGEHPDADIFTSLPRSGQINAAQVLAEWGDCRQAYDSPDAIAALAGVTPVTKESGKHRAVHFRWACNKRFRVAITTFADNSRHTSEWAADVYTRARARGHDHPHAIRVLTRAWIRVIWRCWTDQVPYDSDRHGNAIRLTQSGQNKLLAA

SEQ ID NO: 133425 - protein, 344 aa, unidentified
MTIMIVGIDLGKNSCSIAGLDETGRVVLRRRMQPKSIPGFAAKLPPCVFAMEACCGAHHLGRLLTENGHEIRLMSPEYVRPYVKAQKNDDRDAEAIAEAATRPTMRFVELKAQEQLDVQSLHRVRSRLVRARTTLINQMRAILLERGTIIPQGRRQFEKAFEALLADAGFMAGNRVRRLLLELRKEWIDLDRRIDALDQEFLALARKDATTRRLTSIPGIGALNATALVAAVGDASSFDKARDLGAWLGIVPRQYSTGGKPRLLGISKRGNKYLRTLLIHGARAALPSLARSQTALGAWLRGLLTRRHRNTVVVALANKLARIAWATLRRGVTFQPSLAAIPAG

SEQ ID NO: 133426 - protein, 374 aa, unidentified
MKKNTIFVGLDVHKDSIDIALANEGRDGDVRFYGTIDGDLDSLHKAIRKIQGANRGTELRFVYEAGPCGYEIYRFLKGNGFDCVVVAPSKIPRKSGDRIKTDRRDALNLARLHRSGELTAVYVPGVEDEAMRDLTRGREDMVKALRVSRQVLLGFLLRHGYRYSGRSYWSKAHWSWIADIKMEHRAQQITLQEYVHMVQEQVERVQRITQEIQELIPQWRLAPVVKAIQSLRGVSLIVAATTCAELGDLSRFDSAKQVMAYLGLVPSEHSSGQTTRRGGITKTGNGHVRRVLTEAAHAYSHPARESRVLSARLEGLPPKIKEIAWSAQVRLCGRFKRLLARGKNRNTVVTAIARELAAFMWAIAQIAMPAGQNQ

SEQ ID NO: 133427 - protein, 398 aa, unidentified
MTKKNTLKSLPTDTEFRVVGLDLAKSDVSVAAIPVDDNTPSLVDRMTYADLLDWAGKISPTLFAMEPCNGYSLLCLQLENLGHEIKVISGWTVSMWINTHLSGQKTDLNDAIALARLAVSDAELTPIRHKSITEIRIQTVQAVRQQLMSQRSKSIVSFKALAQQWGIPCAAGHRNLKKLRESIEAKVDLITRPVANAMLFLLDAVKSLDRQIRQLNQTLQELVMSDERGRLLQSVLGVGTQISARVITVVGNVERFNSPRSLVAYVGVAPRNFITGHKNLTKKKHGNCPDLSHKGQGKISRRGDKLLRSLFIQGAACLYMQFCKDQLPECQLKRWILKQLAMQKPYGKLMVSLAAKLIRIVWAVLTYGEKFNIQKAGMTRSMWSEMALETPLNKEVPA

SEQ ID NO: 133428 - protein, 407 aa, unidentified
MKQLFVGIDVGSRDNAVYIMLPDGSKHSSFSVQNNLGGAQTLSKRVVAALEASDLSAVVIGMEATSVYGDNLMCFLREDGALGRFERKLHVLNPKQVKKFKDAYADLPKNDAVDAFIIADNLRFGRITNAVYMDDYRYKALQNLTRARFYAVQNLTREKQRFMNYLFMKCSGLAQEKVFSNNYGAAPLAVFEEFETPDDIANMDVEELAVFIAEKGKNRSPRPLEIAKEVQAAARGSYRLPKTVNDSVNQVLSISISSMRAIQTQIKALDKEIERQFENIPNTLTSVPGIGKVFSAGMIAEIGDINRFDGQASLAKYAGLAWTQHQSGNFEAQHTRLIKSGNRFLKYYLCEAAFALVRCDTEYRRYYDLKYKEVNKYQHKRALALTARKLVRLVFRLLKDNRLYIPA

SEQ ID NO: 133429 - protein, 323 aa, unidentified
MSQNNSSILHAGLDVAKLSLELHLAGRPHSLANDPRGHAKLLRLLRAHPTAHVICEATGGYEQPVVRALQAAGIPVSIIEPGRVRNHARAKGLRAKTDRIDAALLSHFGATHSPPPTPADSARQQQLSAWTQRRRQLLDLLTMERNRAEHYLDRFCLRQSRQLQKTLDRQIQACEQAITALIAGDADLGRKAGRLREIPGVGQVVAATVLAEMPELGRLNPETAAALAGVAPYNADSGPVTGPRHIAGGRKPLRCALYMAALSAVRHDPVLKKFYQRLRDGGKKPLVALTACMRKLIILMNRLLKDETFKMQNSKNRKFSLAL

SEQ ID NO: 133430 - protein, 313 aa, unidentified
MKETTTVGIDISKDSFDVHIDTTSQFLHLENTPTGIQLLLEALRELSVSLVVMEATSKYHYLLASMLTEAGLAVAVVNPRQVKNFARALGKIAKSDPIDAKTICEFGKRMQPAPRPLKGNELQELSLILARRRQLVQTRTMEAARCQEKPSPFIEQGIAKHIAWLNAEINALDLEIKARLKESEELTIRRKLLDSVKGIGPVTQAVLLTQLPELGKLNRRQISALVGVCPYDRDSGSLRGKRAIWGGRSGVRAMLYMAMLSAVRYNPQIKMFYTNLVSRGKPKKVALTACIRKFITILNAMFRDERMWAELKS

SEQ ID NO: 133431 - protein, 410 aa, unidentified
MEVIHPRCAGVDVSKRDAKVCVRIAGAGRRSATSTVSTWGAVTNQVLSLRDHLIQEQVTLVVMEATGDYWKPFYFLLEDALNVMLVNARHVKNMPGRKSDVSDAAWLADLGAHGLVRGSFVPPEPIRQLRDLTRTRTAITRERGREVQRLEKLLEDAGVKLSSVASDINGVSGRAMLEAMIAGQRDPAVLADLAKRRLRVKIPALTEALTGRFSEHHAFLARLHLDLIDRHTTAIQEVTDRIEVVVEPFRGFRELICTIPGISTLVADVITAETGADMSRFPTAEHLASWAGTSPGSNESAGRVKSTNTRPGNPYLKGALGIAAMSVARSKNTYLAAKYRRIASRRGPMKAIVAVEHAILIAIWNMATTGALYDDPGSDFYTRRNPDKTKRRAIEQLRGMGYNVTLEPTG

SEQ ID NO: 133432 - protein, 309 aa, unidentified
MKEELVYVGVDIAKAYLDAAIGNEKRRFANDALGHRQLINWIKQMPASVQVICEPSGGYERALVRALVAAQLKISLVPANRVRQFARAAGILAKTDRMDAKVLCAFGEAMQPGTISASQLEQEHLRELESQRRHLTHLLVMEQNRAARMSDLWVCKLNRRLITQIKKQIEQVDLLIQQQIKASRELSSKAEKLTAISGVGARTAALLLAQMPELGQLNRREVAALVGVAPFNRDSGRMRGKRAIYGGRRSVRHGLYMAALVAARHNPILRAFYLRLRAAGKPAKVALTATMRKLLIVLNSSLKPDLTYA

SEQ ID NO: 133433 - protein, 343 aa, unidentified
MKISRVGIDLAKNVFQLHGTDHQGKAVWKRKLTRDKWVQSLLDKIEPGCEMGMEACAGAHHWARVLQSRGFTVKLVPPQFVKPYVKSNKNDANDAEAICEAMGRPNMRYVQVKTVHQQDMQATHRIRSELMNHRKAKANQIRGLVAEYGLVAPQQHHCLRAAIPDWLEDAENGLTGMFRRLLYGLWADLDRLDRRIVELDKEIEHLAKSDPVAQRLQQLRGVGPLIATALVATIGSGTQFKRGREMAASLGLTPKQCSSGGKERLLGISKRGDSYLRSLLIHGARSVILHAKHKEDRLSCWVRELAARRHINVAAVALANKTARMAWVMMTKDVDYDPALMTG

SEQ ID NO: 133434 - protein, 358 aa, unidentified
MKYIGCDFHPSFQVIAMLDKETGESMERRLLHTEEARAFYQGLKGPVVVGIEASGNTHWFESLLAGCGHQMWIGDAAAIARQEGRKQKHDRRSAALILKLMLENRFPRIWVPTVEERDLRQLLIHRQHLVRMRARIKCQLQHIALNQGWQKKHKLWSKAGLELLRSLVLEPWTGQRRDTLLEMLQELEDKIRPLDQAVEKQAQSREAARRLATHPGVGPVISLATVLTMGEVSRFPDSRSWVSYLGLNPSEKSSGQRRRLGAISKQGNPFLRYLLVEGAVSATKGDKSLARMYARLKAKKHHGVAKVAVARKLAVRLYWMARTEKSYPEVVRTQGSQSLPVAAVKAVRLNRPPASHQK

SEQ ID NO: 133435 - protein, 379 aa, unidentified
MVDYSEAFVAFDTCKARNAVAIAEAGRDGEVRFLGEIDNSGEAIAKLVRKLAGRYARLMFCYEAGPTGYGIYRQIRSLGHGCVVVAPSLIPKKPGDRVKTNRRDAVSLARQLRAGELTAVWVPDPAHEAMRDLARARGAAVEDLRAKRQQVSSFLLRLGRHYPGKTTWGKAHLNWLAGQTLDHLEQRIAFEEMLLAVRQAHERIARLDAAIRQAVPDWSLAEVVTALMAMRGMDLVSASALLAEIGDLSRFQKPRELMAYLGLVPSEHSTGDKIKRGPITKTGNRRARRILVECAWSYRHPPRVGQDKLAKVAAAPAAVRELAWKAQCRLSGRYRALIRKGKLKTVAVTAVARELCGFIWAVNREIVTTSVATGQRVAD

SEQ ID NO: 133436 - protein, 427 aa, unidentified
MQLNINRIEGFRQLRKEIRGSKEHLIVGIDVAKDRHNAFFGTATGRILYKRLIFDNDIEGFEKLLLQAEAVRVQHALETVVYGVEPTANYHKPLGEYLIRKGQIVVLVCTEAVKKNRTLLDGRWDKHDTKDAANVADLISQGKCQYYEYPSEELRDLRNLLSLQRKLKKLEQALRMRIRNHLVARYFPELDKCCNWGAHEGLAIVKSCLDPALISKLQYDEFLRRIQTQGRNQAQQKRLSAVWQNANRSIGCEVIPSVEFESRMMVEQLGHIRMAITDTQQQINAVCQVFPEYEYLLSIPGFGPLISAKVLGAIGNPYRFNKGSQLLKLVGMDLSASRSGKTSDAVTPSISKKGKSDIRYALYQAAMIASNKNKYFIAYFTNKLRGRQRERGIKTKMRVKLAAKMLIIAWTLMKKKELFDPEYLNIE

SEQ ID NO: 133437 - protein, 366 aa, unidentified
MKKQTKQAIRLKKLCNEVTRILNLGLDEHYWQVTVAMQEDGGRIKVVGKMSHEAFLDWVKKKVAEGWEIRSCYEAGACGYWLHRELEKLGVKNLVVTPRAMGKTGQKQKTDKRDAVELCDTLDRYLRGQHRALSVVKVPTPEEEAKRALIRHHRQIMKDRCRCEARGKGLLCAQGIRVRGCWWKDQTWQELSTDPRLKDWLKQQLEHWRSQILSAQEKQLSLREEIAALAPARLPKGVGAYSAAVLHYELRGFERFKNRRQISSITGLCPGVHQSNGHGKEGSINRCGIGAVRWVLVEMVWRLMIWQPQYPPVRRLAAGLVKSRRAKKRLVVEAARRLAIDLWRLSTGQTTPEKLGLIMQDHSQSH

SEQ ID NO: 133438 - protein, 342 aa, unidentified
MDEIKLVGVDIGKSAFHLVGVDASGAVQLKRRCSRPQLLALMAKLTDCVVAMEACCGAHHLARQIIPLGHDVRLIAPQFVKPFLKSNKNDYLDAEAIAEAAQRPTMRFVPVKTVEQLDLQALHRVRERLVGKRTAVINQLRSFMLERGIVFRQGRRHLAGQMPALFADERSPLSPRMQAIAQGLWREWQQLEREIDDVSIEIDSVAKTDPVCRRLMTVPGIGPIVATALVAAVGDGSAFQRGRDLAAWLGLVPRQHSTGGKPKLLGISKRGNSHLRRLFIHGARSVAMHSDRKRGLGLWLTGLEQRAHKNVAVVALANKIVRISWAVLARGEDYRVPAAAAA

SEQ ID NO: 133439 - protein, 463 aa, unidentified
MTIDKKLWRNRKERKELARRLRSEDPGLAVVHPHAAGIDVGNGAHYVAVPPDRDSQPVRRFECFTADLYRLADWLHNCGVKTVALQSTGVYWIPLYDILEERGFEVYLVNARHTKNLPGRKSDVQESLWLLKLHTYGLLNNSFQPTSEIRVLRTYWRQRAEHVRGVTTCIHRMQKAFTQMNVQLANVISDLSGVTGQKIVRAIVAGERDSWKLAELSDPRIHASKEEIAKSLEGNWRQELLFVLQQEVEMYDTYQRRIAECDQELQKHLTRFADTVPSPAKVEAKKKGKQDKHHPQFDLADELQRITGVDLTRIDGINVMVAQTLVSEVGLDMGRWKTEAHFASWLGLCPDNRISGDKVLARGTRHVVNRAATALRMAATTLLKSQTYLGAQYRRLRSKLGAPKAITAMAHRLARLVYRMLKYGQQYVDKGAAYYEQRNRQQQLEFLRKKAAQLGLQVTATHP

SEQ ID NO: 133440 - protein, 405 aa, unidentified
MDVVYPRCAGIDVHKKVVVVCARVKQKRLSRSFGTTTAELRELRDWLVSLEVTHAAMESTGSYWKPVFNLLEESGVEAIVVNAAYVKAVPGRKTDVNDAQWLAELLRHGLLRPSFIPNREHRELRELVRYRRSVMQERTREILRIQKVLEGANIKLASVTSHLMGVSGRAMLEALAAGTEDPEELTALARGRLKAKREALLLALDGLMSSHQRFLLAEQLRHVDELEERIERLSEEIGRRMCPCEAQLDAIDEIPGVGRTTAEEIIAETGVDMSRFPTSRHIASWAKVCPGNNESAGKRKSGRTGRGNPWLRSTLVEAAVCCGRTRNTYLAAQYRRLAGRRGKKRAAMAVAHSILVIVYHMLRDGVAYADLGHDYFDRRSKPALAARFKRRLEALGYSVTIEEAA

SEQ ID NO: 133441 - protein, 363 aa, unidentified
MIVIGADTHKRTHMLCAVDAGTGQLRGDRQIAATEAGHLEGVRFGCALDDERVWAIEDCRQVSRRLEQALLAAGERVVRVAPSMMGASRRGEREPGKSDQIDALAVARAVVKDGAERFPAAHLDEQAMEIRLLHDHREDLVGERTRVQNRLRWHLLALCPEVEHSLRPRALNLVFHLDRIDRRLRRLPTSARARVAREQLAQIRSLTRRIDALEDELRVMLAAHRPRLLAELGCGTLTAATLVGRTAGAERFATDAQFARQAGVAPIPVSSGERQRHRLHRGGDRQLNRALHTIAITRARLDPASRAYIERRIKEGRTRREALRCLKRHLARRFHRLLADSDEPSDRDKVIVTTPPASTPCLI

SEQ ID NO: 133442 - protein, 416 aa, unidentified
MQKKDCIEFEQVVERGCGMDVHKETVVVTIRGKGIKSVTKSYSTFTSSLIKLKEWLKKHGITHIAMESTGIYWKPVFNVLGDDFVILLVNARHVKNVPGHKTDKKDSRWLVKLLLSGLLKGSFIPERPFRELRDLTRYRKKLVQQVTADKNRFLKILEDSNIKLSMVLSNVFGVSGTKMINHILSVESYRPEELMQYVHGKVKASRADIQEALTGYITDHHKFMLRTILGNMAKTESTIAEIDQKLDAVLEPYNLERELLETIPGVGREVAIAIIAEIGTDMSRFPDQKHLASWAGMSPGSNESAGKNKSGRITHGNKHLRGHLTEGGWAAAKTKNTYFSSKYKSLVGRRGKKKAIIALGHKILIAAYFIIKDKVEYKELGEDYLDNFRKDKLIAYYRKQIERLDPNLEFDKEEAA

SEQ ID NO: 133443 - protein, 342 aa, unidentified
METAVTIGLDLGKSVFQVHGVSAAGTVVVQRRLTRSKVLTFFAKQAPCLVGMEACAAAHHWGRELSKLGHRVRLMPPRYVKPYVKRQKNDAADAEAICEAVTRPTMRFVEIKTCEQQGTLVLHRVRLMLTRQRTQLSNAIWGHMAEYGLVAPVGRNGLQRLIAILGNPDDERVPAVARASLAPLVSQFGLLNDQVLDNDRRVRASARSTALGCRLMEVPGVGPVLASAMVATVPDPTAFKSGRDLAAWIGLVPRQNSSGGKEKLGGITKQGDRYLRQLLVAGALAVIRYAQRHGTKRPWLVHLLARRSPKIAAVALANKMARMIWAMMMTGERYREPRVAAA

SEQ ID NO: 133444 - protein, 347 aa, unidentified
MRFYTKQHLFYCGIDLHARTMYLCILSQDGEVMLHRNMKASPDTLLKAIAPYRDDMVIAVECIFTWYWLADLCAQEGLPFVLGHALYMKAIHGGKTKNDKIDSQKIAVLLRGGMLPQAYVYPAAMRATRDLLRRRTHLMRKRAELLAHIQNTNSQYNLPEIGKKIAYKANRDGVAERFPDPAVQKSIEVDLALIGHYDQLLRDVELSILKTAKQHHAQTLYLLRTVPGIGEILSLVLLYEIHDITRFPRVQDFLSYCRLVKCTKESAGKRYGTSGTKIGNAHLKWAFSEAAVLFLRANPAGQKYLTKLEKKHGAGKALTLLGQKLGRTVYYMLQRQTAFDMGKFLNG

SEQ ID NO: 133445 - protein, 377 aa, unidentified
MKRVKFVGLDVHAETIAVAVAERDGEVRSLGVIPNREDSIRKLVKKLGPAEQLRFCYEAGPTGYALYWQLTRMGAKCEVVAPTLVPVKAGDRVKTDRRDALKLARNYRAGELTPVWVPDAAHEALRDLVRAREAAKKDELRARHRLNKFLLRHGRRPPMGVKPWTMKYLEWVKREVHFEQLAQEATLLDYLHEVEHAAARIMRLDGAIAEAVKGAPLKMRAVIEALQALRGIAHVSAVAVVAELGELSRFARAKQLMGHGGIVASEDSSGERTRRGHITKTGNAHLRRVVVEAAWAYRHRPAVGSTLRKRQEHVSEEVKEIAWKAQQRLHQRYRKLLAKGKNKGVVVTAVGRELLGFIWAIGIKVETAQKESLQRAA

SEQ ID NO: 133446 - protein, 386 aa, unidentified
MLSIVRGGMDVHEADAKIALITSKWNGQEKARGDFTPGTIIHEERIVNRPDRIRKTFKCLMKKYGKLEMCYEASSCGYVLQRQLTEMGIECRVVAPSKIPKKPGDRVKTDRRDARKLAKLFWADQLTYVRVPEKAEEAVRDLVRCRDAFRKDVTRARHRVQKFLQRHGLNYEGKSNWTQRHWKWLKGLKFEGYEKWVYEKYLVDLEWKKSQLEEADGEIEKVASTEEYREEVGRLRCLKGIDTLSAMTLIAETVDFKRFPSAAGLMDYFGLVPSEDSSGKRERRGSITKTGNGRVRRILVEAAWHYQHRPALSKTLRKRQEGQPEWVKSHSWKAQRRLCKKYRGVIEKGHVKQVATVAVARELVGFIWAIMQPHEPGSEEFEFSEA

SEQ ID NO: 133447 - protein, 345 aa, unidentified
MNNTIVGVDLAKNVIQVCLVKHNEVISNKEITPEQFMLWLINTKPVTIIFEACGMSNYWKQSALKHGHDAKLVSARLVAMIRQNQKTDKNDALAIAQASQLTDVSFINGKNVKQQEMQSILRMRELAVKQKGAIRQQIIALLLEFNIRVSAKRGGLSGVVQAVLEDADNGFAFPFRQSLEATWQSYLSLVSGIKSYETALESILKEHPDCQKLLALEGVGVINAVNLYITIGCSDTGVFKSGKEVAACIGLTPVQHSSGGNVKIGAISKRSRSPLLRSCLISGAMSMVNQVGKREPKTEKERWLKQLIERRGKLCAAVALANKTVRTAFALLTQGTEYKAQPLMA

SEQ ID NO: 133448 - protein, 354 aa, unidentified
MKVTTIGLDLAKNVFQVHASDAHGAAVLRKQLRRAQLSEFFAQQPPCIVAMEACAGAHYWGRKLRTLGHEVRLMAPQYVKPYVKSQKNDAADAAAICEAATRGHMRFVALKTVDQQSVLALHTVRSGFVKQRTALSNQIRGMLAEFGVVLPQGLSKLAQQLPVVLADQGNELTGVVRELVQMLQTQLAHLDELVARLERQIRVWATQDQAAKRLQQIPGIGPITASALAASVGDARQFEDGRQMAAWMGLVPRQHSSGGKSVLLGITKRGDKYLRTLLIHGARAALKAYQRNPAKMPQQLAHLLQRKHPNVVCVALASRNARVAWAMLSRREDYKGGPSVNLPALPSSPGLAPI

SEQ ID NO: 133449 - protein, 381 aa, unidentified
MVTGGVDAHSDSHHAAALDERGRLLGDSAFATSAEGYQELLAWLESFGQVARVGVESTGSYAAGLARFLAARGVAVVEVNQPHAHTRRRRGKSDPLDAEAAARKVLAGEAAGVPKHTGGIVESIRQLRVAREGAVKANTAALNQLYELVITAPDELRQQLAARKTTRGKAVLCLRLRPDRARLHEPLQAAKLALRSVAERVRDLDRQIGLLDQDLAPLVATAAPRTMSLLGVSTQHAGQLVVTAGQNIQRLPNDGAFARLCGASPIPASSGRTSRHRLSRGGDRKANRALHLIAVCRLRYCARTRAYANRRTAEGLSKPEIIRCLKRYIARELYHTLRADLADLNLSAASAQQAVTINCGAGPIGITLTRSTTSRRRRRRT

SEQ ID NO: 133450 - protein, 279 aa, unidentified
MQPYFVGLDVHKQVIAYCVKQGDGQLVSDGKIKATRAALAEWVGSLPRPWVGGMEATMFSHWIYAALQPHAAELFMGHAARMKAISAGKKKSDKLDSRTIADLLRCNVFPKCFVISPELGRLRQQLRFRHLVVKQQVAFMNKTAGLLMETGVEYERRRLHGKQYFSELMATTHWVNQELKPLLKFSRQQIESLAGMDKRLIRMLEKHPQLKARVAALRTIDGVGPILALSWALETGTPDRFPSIKDAQSYCGRVLGVGRTAEAPSALQATEQTFADGAD

SEQ ID NO: 133451 - protein, 315 aa, unidentified
MTKHLPQVNVGVDVSKDRLDVYLLERDLSLSVPNHEHAIASLIQRLARYRLERIVIEATGRLEHAFVSAAIAKGLPVVVVAPLKVRRFAQAAGQLAKTDAIDARLIAQFAAALKPPTRPAIDANSQIIKDLVVRRRQLTSLRTTEKNRRSVMPEALTPSIDRIIEALDREIAALEQLIQDAIEQQAAWRHKRDLLTSMPGIGPSVASTLIGDLPELGSLSRRQIAALTGVAPFNRDSGNFHGKRRIRGGRAHSRTALFLSAMVAIRYNPDIKRFYQRLLQTGKHKKVALTACIRKIVTALNAMLRDNQPWQSSFA

SEQ ID NO: 133452 - protein, 406 aa, unidentified
MCCGLDVHQATVVACVRHPTKGGRRKSEVRTFGTTTAELLQLADWLTEHEVTHVAMESTGVLWKPVFNILEGSFAVILVNARHIKAVPGRKTDVKDCEWLAQLLEHGLLRASFIPPPFIRELRDLTRYRKTLIQQRAAEANRVQKLLESANIKLGLVATDILGASGRAMLQALVRGERDGAMLAELAKGTLRQKRARLAEALTGRFTAHHGMMLNEVLAHIAYLEATITRLSERIEAALQPYAEQVAHLQSIPGVDQTAAETIIAEIGLDMQQFPSAAHLASWAGICPGNHESAGKRKTGKTRKGNTWLKPVLTECGWGAGRARRTYLGAQYARLGQRRGKKKAVLAVGHSILVSVYHILRDGVPYHDLGPEHFDRLATERLTRHYVHRLEQLGHRVTLAPEAEAV

SEQ ID NO: 133453 - protein, 370 aa, unidentified
MNQNILFIGMDVHKESIEIAIAEGGSQEVRRYGNIGGTRDAMRKALAKLTASGKTLHFCYEAGPCGYELYRYLISEDHHCFVVAPSLIPKRPGDKVKTDKRDAVQLARLFRAGELTPVYVPDREDEAIRDLSRAREDAMLVQKAARQRLKSFLLRHDIRYTGKRSWTEKHLRWLADEVRCPSAAQQVVFQEYVNAMTEAKQRLLRLNEQIEYFVKQWRLYPVVMALMSMRGVQMIVAVTVVSELGDLSRFENPKQLMSFLGLTPSEYSSGGRTSRGRITKTGNGHVRRILIEAAWCYRYPAKVSPEIQKRQEKLPLTIRNISWKAQLRLSQRYQHMQRKGKPHNVTVVALARELAGFMWAIANEVTYPVK

SEQ ID NO: 133454 - protein, 316 aa, unidentified
MGNLINTINIGIDVAKDELVIFFDGDQSSISIANTQSALSELAQVWQSYPQLQRIVIEASGGYETLAVSILANGELPVSLVNPKRVRDFAKGLGKLAKTDRIDAALLAVFGQMTAPPLYLLPSPEQAQLAELVARRQQLVLMKAAEQTREKQAAATIKPSITRHLQWLETEIQSIDTDLKQKIKDHQPFQELDERLRSVPGIGPATSAMLLAELPELGKISAKEIAALVGLAPYAADSGRHRGQRRIRGGRRQVRKSLYMATIAAIRCNRTINQFYQRLKEHGKPTKVAIIAAARKLLCVLNAIARDNNSWSPVSI

SEQ ID NO: 133455 - protein, 286 aa, unidentified
MLTIGVDAHKETHVAVAVDAAGQECGQWAGPNSAEGWAAIRAWAQGLGAERRWGIEGAWNDGRGLAQALVTAGELVHEVNARWTVKERRRARNRSKTDQRDAQAIALYVWREGTMLPPVASEDDSAVLEVLVSQRDAAVAEATRLRNQAHHLLLQCDPSYRKHVPALTTEEGIAALEQYQAPATSVLAQTRAAAVRMLGQRLRLAVAQAEDLKTQIEARARAGFSPLIQLKGINALTAGALAAILGPGRRFRTDADLALYAGVAPLEVSSAGRVRHRLNRAGNRQP

SEQ ID NO: 133456 - protein, 322 aa, unidentified
MSLPNPLCVGIDVSKASLDIAFNSELPQFTADNDPDGFDSIIIELKKHTVALILLEATGGLEAAVACSLQAEGFDVAVVNPRQARDFARAMGYLAKTDRIDARVLAQMAEVINRHPERDRFIRSIPDKQRQILTAMVVRRRQLITMLVAERNRWHPSHPQSRKSIDIIIKALDDELARIDADMNDHIRNHFKELAERLGSIKGVGTVTVAALLGEVPELGHLSRREISALVGVAPVNRDSGTMRGRRTIFGGRAGVRTTLYMATLVATRFNPVIKAFYMRLVIAGKAKKVALVACMRKLLTILNAMLRKNEEWDESYHHVAS

SEQ ID NO: 133457 - protein, 333 aa, unidentified
MNYVGIDVSYKELVMAVSVKGVFRKTKTFENTSSGHKLIIKQLSKLNGHSQVCIEATGIYHFDLALALSLTKNSDVMVLNPKVSHSFANVLMKRSKTDAIDAEILATYCELMPFESWQCPADELISLRAISRRIAALSKLKSQTKNQLHALTAIKGTPRIVIGHTDDLILVLESQILALRDSALSLILQHEELAEAFRLITSIKGIAEASGIQILSELMFLPRDMNQKQWVAHAGLDPRHFESGSSVSKKPRISKAGNKYIRQALYMPALVATRHEPHIKAYYTHLIDANRLKKVQAICAVMRKLLHAIHGMFKTGQVFDGSRFYTIKNKVEA

SEQ ID NO: 133458 - protein, 345 aa, unidentified
MTIVETRAITGGVDTHADVHVAAALDLVGGLLGVREFPVSPAGYACLLSWLSGFGTVTLVGIEGTGSYGAGLARHIAAAGVRVVEVDRSDRQDRRRQGKSDPLDAVSAARAAQSGRARGAPKGRDGAVEAIRALMVAKRSARSERVQTINQARALVLTGPDDLRTRFARHTAAGLVSGLASLRPRPGDVVGYATRIALRELGRRAEFLDGQLERLDELIAPLVAARAPALLALHGVGPDTAALLLVAAGDHPERLRSEAAWAHLCAAAPIPASSGKVTRHRLNPGGDRQANHALWRIVLTRMSAHPPTLIYVERRTREGLSKKEIIRCLKRYVAREVYRHLRAAG

SEQ ID NO: 133459 - protein, 351 aa, unidentified
MLLIGVDYHPSVQTIAFFVEETGEYGEQELNHSDGQAERFYRDLKQRGICVRVGMEATGYSRWFERLLAELGFELWIGDPAEIKAKRVKKQKFDREDARLLLRLLRENNFPQIWVPDPKNRDLRQLLWHRHRLVQMRTRMMNQLHALAMNEGYRWKKKLFSEQGRAQLEKLALAPWASRRRQELLELLDRMNPTIEELTAAVEREARKRPEAMRLMTHPGVGPLTALAYVLIIGTPTRFQRGKQIGTYVGMIPCEDSSARKQRLGHISKQGSSLLRFLLVEAAQAAARIHPDWRRRYMHLAMRRHKSIAKIAMGRRLAVRLYWMWRNGCDYSPSLEFGSYAGQLETRNGVK

SEQ ID NO: 133460 - protein, 330 aa, unidentified
MFISVLLKGGREVIMMIEPITKCVAGLDVHKKMVTCTILEEKPEGELKSTTREYLTFQEDLKKLSNWLYESKVELVIMESTGVYWQSAYEIIEEKGILCYVVNAYHMKNVPGRKTDMSDSQWMAELGRCGLLKPSFIPPREFRELRMLTRYRKKLRNMQSSEKNRLHKILELGGIKLGSVVSDIDGVSARDMIAAILDNRPIEDIAILARGRLREKIPSLIKSLRGELTDRHKYLLGTISRHIKWLETEITSIDDQVAGVIKPYRKECELLETIPGVDKISAAMLLGEIGVKMEVFGNKSRLSSWAGMCPGNNISANKKKVEASAMGINL

SEQ ID NO: 133461 - protein, 380 aa, unidentified
MCMLRTLRSGPDVVDGARSRHRCAIRCSSETNHIEGAVHMQVITIGIDLAKNVFQVHGVDANDKVVFNKPLRRSQVLPFFAKLAPCLIGMEACASAHYWARELKKLGHEVRLMPARDVKAYVKRGKNDAVDAAACCEAVRRPTIRSVPVKSPEQQAQLMQHRVRDLLIGQRTQAINALRSHLGELGIVAAQGYEGLKELLAIVADTSDTRLPENARASLSALVAQIASCQAEIGAIEKRLLAQHRKNADSKRLETIPSIGVLSASAIVATVPDASIFKTGRDFAAWIGIVPREDSTGGKQRLGPISKQGDQYLRRLLIVGAFAVLRQARAHPEKYPWVTQLLARKPKKVVAVAIANKTARIAWAVLTKKENYRPQMNAVA

SEQ ID NO: 133462 - protein, 411 aa, unidentified
MRLFVGDDWAEDHHDVEVMDEAGTVLARKRLPEGAGGMARLHALVGGLLGEDADDSEVLVGIETDHGPWVMALLAAGYRVYPVNPQQSARFRARHAVSGAKSDAGDAHVLADMVRTDSHQLREAAGDSAEAAGIKVLARTHKTMIWERTREVQRLRHQLLEYFPAALEAFGDLDAPDVLELLAKAPDPQRARKLTRAQVSAALKRARRRNIPDKATAILAALRGEQLAQPAALTAAYAATVRSLIAVIAALNEQVTVLEEQVREHFGRHPDAEIILSQPGMGAILGARVLAEFGDDPGRYRDGKARRNYAATSPITRASGKRKIVAARFVHNDRLVDALNAQAFTALTASPGARAYYDELRTRGISHNDALRRLANRLVGILHGCLKTRTLYDEATAWGHRQNQPQSPAAA

SEQ ID NO: 133463 - protein, 387 aa, unidentified
MPQPNDLSRSLVALDQNSTIIAVIEMSQSSWLVAGMLPGIERQARKKLDPSPERLLALLHRWQDEAVRAGRTITRIALAFEAGRDGFWLARWLAARGIEAHVIHASSVAVSREHRRAKTDRLDTELLKRGFLGWLRGERGHCSMARVPTIAEEDAKRPNRERDCLVGERTRIVNRIKSTLARLGIRNFKPTLRKAAERLATVHTPEGVPLPPNTLAELQRDMARLGFVVGQIREIEEARQKRLEQQPESGPHAMVRLLARIVGVGVETADLLVHEVLSRPMRDRRAVARYAGLTGSPDESGARRREQGLARAGNARVRRGMIQLAWRFLMFQKESALALWYRARTADSRSGTRKTMIVALARKLIIALWRFVTAGEPLEGVVLRPAS

SEQ ID NO: 133464 - protein, 472 aa, unidentified
MNHRRLVGIDLGVASAPTVRILDGEGTTLAKRKCWPTKKSLAEIEAVALAGCPEGTTLEVVMEPTGPAWLPVAVFFSARGHRVFRVSSQKAADLRRFLSRHTKTNGIDADTLARLALLDPAGLQVLCLPDADRAALDRRVRACDRLTQAGAEHKRRIKDLVRQLLPMSPLTGELGAADLAVLERFGDPNTLVKVGEKRLVVLIARASHHHQGAERARQWLEAARASLDLYGDHPAVAFAELAAEVATEVRLLRALQAELAVHAPRREEAYRRVDPTALARSLPGLAEVGGPALVAAMGDPRRFYKGKAFRSYTGLVPRASETGDTDRKGQPISKAGPSLLRTTLVRAADHARKVDPQLARIYYVQMVERGKNHLGALCVVAANLAERGWRTMERATPYVLCDIDGRPVSVPEAKAIIAERFSVPADVRARRRSKKGGGKAPKNVLSGQSTPRARSGSTRGHLPPTPSSALAS

SEQ ID NO: 133465 - protein, 341 aa, unidentified
MSIFVLGIDLGKNVCSLVGLDETGAVVLRHRLRRDGVVDFVGKMEPCIVAMEACCGAHHLGRVLGAGGHTIRLMSPEYVRPYVKANKNDDHDAEAIAEAATRPTTRFVPVKSEAQSDIQALHRARSRLVAERTALINHLRALLLERGIVVAQGRRKLEDVLGVFADEDDSRLSSRVRLLVEDLRAEWRSLDERIAAFDTEFVRMARDDDTARRLSTIPGIGVVNATALVAAVGDAASFGRGRDLAAWLGLTPRQATTGGRPRLLGISKRGNRYLRANLIHGARAVLPRIVAQDTPLGRWARRLLERAHKNIVVVALAAKLARIVWAVLRKQRSFDPAIAAA

SEQ ID NO: 133466 - protein, 347 aa, unidentified
MTLYAALDVALEKTALCIVDREGAVVLEASIATDPDVIAESLAPFRLRLARLGLEAGPLSEWLVRGLQQHGLQAVLMETRHVRAALSARVAKTDRNDARGMADLLRMGWFRPVHVKSMDAREHRALLTARSTLVRRLKDVENSVRGLLRGFGIRLAVMLRGRWDAKVREAIAGHPALPAILGPLLVARSALRDQVAIIDKRVRDAARQSDVCRRLMTTPGVGPIVALTYQAAVDRPDRFHSSKSVGASFGLTPRRYQSGETDRVGSITRAGDPSVRVALFEAAHVMLTRSAKWSSLKAWAVKLAQRRGLKRAKVALARKLAVILHRMWVDGTEFLFTAAPVAPALAA

SEQ ID NO: 133467 - protein, 343 aa, unidentified
MKITRVGVDLAKNVFQVHGVDRAGRRVWQRQLKRSNWLSMLTEAVEPGCEIGMEACGGAHHWARELKSRGYQVKLISPQFVKPYLKSLKNDVNDAEAICEAMARHHMRFVAVKTVEQQDIQAMHRVREGLMNHRKAKANQIRGLVAEYGLVAPRQMAPLRRAIPCWLEDAENGLRQPFRVLLHGLWEDLQRMDERLKVLDKEILMLSESHPDAKRLKQLRGIGPLTATAMVAQFGDGRHFKRGRQASASVGITPRHAGTGGKNYLFGITKKGNPYLRSILIHGARSVVSKAKHKDDRLSRWVTELAERKHVNVAAVALANKTVRIAWAMLRNGTDYDPELAMA

SEQ ID NO: 133468 - protein, 283 aa, unidentified
MRFYTKQHKFSCGIDLHARTMYLCILDQEGKIVLHRDIKTNPDTFLKTIAPYREDIVVAVECIFTWYWIADLCAEKGIPFVLGHALYMKAIHGGKAKNDKVDAYKIATLLRGGMMPMAYVYPSAMRSTRDLLRRRTHLARKRAELIAHIQNTNHQYNFADMGRISRKCDRNKAGVADRFTDPSVQKSIELDVALIDQYDKLLNRLEHELSLIAKVHDADSYFRLRSIPGIGRILGLTILYEIHDISRFHECRTSFPTAGSSNAQRNLQASSSAPRGRRSATSI

SEQ ID NO: 133469 - protein, 383 aa, unidentified
MTVAQDGVIGLADRLAAVSHSDGVNGVARWARPKHRGETAVKHYAGIDVSLEESHVCVIDELGRVVKELVVGSDPRSLAGSFGPWRGSLVKVGLEAGPLSQWLHAGLSCAGLPMECLETRQLKAVLSASPVKTDRKDAHGIAQVVRMGWYRRVHVKSRTAQERLALVTSRKLLVNKLKDLENGIRGLLRGFGLKMGQVGRSKFEWRVRDLLSREPALRSIFEPLLAGRGALRGQFALLDRQVRQTARQDADCRRLMSMPGVGAVVALTFQAAMDDPGRFAHSRSVGAHFGLTPRRYSSGEIDRSGHISKCGDEMVRTALYEAATTLLCRVARWSALKAWAVRIAKARGLKRARVALARKMAVVLHRMWQDGTEFRWSKAESAA

SEQ ID NO: 133470 - protein, 308 aa, unidentified
MPQTIIGCDLSRSWLDVHALPEGKACRVANTRDDIAVWLAGLGPDPLVIFEATSGCDRTLIAALSAAGIAYVRVNPTHARAFARATGVLAKTDRVDARVLALMGWKLQPEAATPPSPERMRLGDLLRRRTQLVEMRKAEKVRRHDAGQPDILAGIERAIAFLTREIELIDQQVADLIAQSPELAEQARLLRAVPGIGPTVLATLLAELPELGTRCRRSIASLAGLAPLARDSGTRRGKRSIWGGRRRVREALYMATLNAMRRIPKLAALRERMQAAGKAPKTIIIAAARQLLVILNAMMRDKQPIRLT

SEQ ID NO: 133471 - protein, 341 aa, unidentified
MTIAVVGIDLGKNSCSVVGLDKAGAVVVRRRMRREGVIAFAAKQPACVVAMEACCGAHHMGRILAAQGHTVRLMSPEYVRPYVKAQKNDDRDAEAIAEAATRPTMRFVELKSEEQLDMQTLHRVRDRLIGDRTSLMNQMRSLLLERGHIIPQGRAKLREHLSQLLDLEVSPLTPRIRELLIDMRQRWEALNKRIGDLDAEFVEAARADKRTQRLLTIPGIGALNATALVAAVGDAHTFNRGRDLTAWLGLVPRQATTGGKPRLLGITKRGNRYLRKNLIQGARASLPVLSKSQTRLGAWLRALSARAHHNAVVVALASKLARIAWALLRHDQRYEPTPLAA

SEQ ID NO: 133472 - protein, 396 aa, unidentified
MISVGIDVSKGKSTVCIMKPCGEILESPFDIGHTADELDSLISLIKSFDEETRVVMEDTGHYHLPVATYLSSHNIFVCCVNALRMKKFCSQSIRRAKTDKIDSIKIASFGITYWNELVKAYPSNVIYDELKFLARQYYQVTGMLVKSKVNFSNLLDQVMPKINDVLSNQGENHKLTEFVNRYIHFQNILDMGEMKFTSDYCKWAKKKGYHLNERKAAEILALAQNGIPTLPNSQSVKIAVSEAVKLIHSIEESRNTILAQMQDLCNTLPEYSVVKEMDCIGDTLAPRIIAEIGDVRRFKNKHSLIAYAGIDAPPYQSGAFHASERHISKRGNSYLRKTGYEIMQSLIKHKPADNAVYNFIQKKRSEGKCGKEAMIAGLNKFLRVYYGKVMEFYSEH

SEQ ID NO: 133473 - protein, 341 aa, unidentified
MVHVGLDLSRTRLDVHVMDEAGAPLAVTTAVPDGGGLAALACQIGGFGGPVYAAIESMNGARFVHDQLEMAGWQVEIADAQKVKGLAPLACKTDKIDAWVLAELSRRDLVPAIWLPTPAVRAERERARWRLHLVRHRTALKNRIHATLLAFGHPCPVSDLFGVGGRELLARLALPEPWATDTAAAVHLIDQLDAEIADCERALRHLGADHRYVPLLMTAPGIGWVLGYTIAAEIGDITRFASPTKLAGYTGLCPRVYQSGGKDHRGPLAKNGPKYLRWALIEAAVHAARHPLYAERYRRTKTRLGRQRGPKVAQVDLARRLAEAIWHMLTTNKPFAPAGAA

SEQ ID NO: 133474 - protein, 343 aa, unidentified
MQVSTIDVDLAKNVFQVHGVDSAGKVVISRQLRRKQVIDFFSKIPPCLVGMEACGTAHHWAREVSKLGHTVRLMPPSYVKGYVKRSKNDAADAAAICEAVTRPSMRFVPIKSADQQALLMLHRTRDLLIRQRTQLINALRAHLAEFGLVAETGREGLAQLAAIITDESNREALPSAMKQALQAIVDQLAALELQTGALDRAIHAHHRANDMSCRLETVPGIGVIGATAIASTVTDPNGFKSGRDFAAWVGLVPRQHSTGGKERLGHISKQGDRYLRRLLVIGATAVVRHARQYPQKHPWVMRLLAKKPAKLVAVAVANKMARIAWAIMAKGGHYRAPELAAAA

SEQ ID NO: 133475 - protein, 376 aa, unidentified
MQLKTWAGVDVSARSLAVRRWRDGNEDEGSFPNDTAGHRALIKWLGRAARVCLEATGVYHLQLALALRKAGVEVMVVNPRVAKDYAKALSNRSKNDRVDAAALLSFARRMEFIPWEAPSEAKLELRELGRRLSELIQARTDEKNRLHARKVSKLSASVVADLTQHIAQIDKRVKQIETTAVTVIGTDADLLEQFDLVRKARGFGRRSAVLLLAELVVLDPTMTVREMVAYAGLDPRVYESGTSVQKVVRISKIGNARLRAILFMNALSAIRHDRGARLFAAGLVARGKKKMQAIVAVMRKLLHGIWTVLQRRVAFDSSVLFAASLAKAESSDSAVAANQPGPGEDHPKGRSEAEELPQQLDPRPASAKRRKRARAA

SEQ ID NO: 133476 - protein, 351 aa, unidentified
MMIIGVDYHPSFQQVAVLIEETGEYDEQRLNHEGGEAERFYRDLKRKGIRVRVGMEATGYSRWFERLLAELDFELWIGDPAEIEAKRVKKRKTDREDARLLLRLMREDRFPQILVPSPENRDLRQLLWHRHRLVQMRTRIMNQLQALAMNEGKRWKSKLFSQKGRAEFEKLALGPWASRRRSELLELLDRLNPSIEELTTAVQQEVNKRPEALRLMTHPGVGPITALAYVLIIGTPERFTRGKQIGTYVGMIPIEESSGGKQRLGHISKQGSSLLRYLLVEAAQAAARYNPHWRRRYIRLAIRRHRSIAKVAMGRRMAIRLYWMWRNGCDYSPSFEFGSYAGQLEKRHGGK

SEQ ID NO: 133477 - protein, 360 aa, unidentified
MQAQNYELNFTGHNIYVGMDVHLKSWTVTIRTEHLEHKRFTQPPNAQVLYNYLTRNFPGATYYSVYEAGFCGFWIHRQLEALGIRNIVVNAADVPTKQKEKVQKDDPVDSRKLARSLSSGDLEAIYVPLESTLEERALLRMRSTIVKDMARFKQRVKSFLYFTGIPYPEQFGNSGSHWSKNFIRWLKDDVHLSQECGQQVLSIHVQEVEEQRKLLLLVNRQIKALATKEKYASNVALLKTIPGIGLIAAMTLLTEIETIERFENTDHLAGFVGLVPGKHDSGEVKKNGEMTFRGQTKLKTIIVESSWIAARRDPALSFAYSNFVKKMEPNKAIIRIARKLLNRIYVVLKNKQEYVTGIVK

SEQ ID NO: 133478 - protein, 423 aa, unidentified
MNRRRKYRAVSVKNVDLKSVEQLAEGRLTIGLDIAKAEVLAVVRDKTGEFLRPWKAKQITEIAVLVDLFKAIAVERPVVFGMESTGTYGDCLRQAMTDAGLEVHRVSGKAKSDYEEIFDGVPSAHDGKDAAIIAELVATGKSQVWLHQPDSELYSQASIEVAWLDSQQDIYQIWLGRLEALLARHWPEATTVLKLSSVTLLKVLAHYGGPSKVAGDVAAVRRLQRWGGPYLQEEKIREFCLSAKMTVGVRMTDAEQRQMQLYAEQALAAYREVQRSQSKLKKLCGESELLTALADVVGHGTACVLFVALGDPNQYHCAEAYRKAMGLNLKERSSGRHQGKLKITKRGSSLARRWLYFAALRMTQKPGVAKWYAAKKEKEKNRGGCGVVAIMRKLALAIWHVAVHGVTFDTRRLFPGKPLTPGR

SEQ ID NO: 133479 - protein, 364 aa, unidentified
MPMLEGKVDHVIGVDTHRDTHAAAILDRNGGLVAHLEVPSSQAGCEALLRFVAERALGRRCWALEGTGCYGAGLASVLLGHGEWVTEIDRPKRPRGRNGAKSDPLDAIRAGREALSREHLACPRQRGQREALRVLQLARSGAVKVAADARRQLKALLVTAPEPLRAGLRTGTALQQARVCAALGASAADPVEHRATVRALRVTAARMLTAYREARQLEQELRALVTAVAPALLAQPGVGPITAAQLLISWSHPGRLRSEAAFAMLAGVAPIEASSGRVVRHRLNRGGDRQLNRALHTIVMIRETWHEPTRRYVARRIAEGKSEREIRRCLKRTVARGLFRLLTRTVLPATGPGGLGAWRPAPPR

SEQ ID NO: 133480 - protein, 321 aa, unidentified
MTTVHTDVPQLGVGIDVSKARLDIDFSDDRGAFSTDQDPAGHARIVQALKDTSASRIVLEATGGYERLLVAELAAAGLPVVVVNPRQVRNFAKATGRLAKTDAIDAKVLALFAVAIQPPLRPLEDQQTQAFSDLLTRRRQLIQMHVAESNRLGLVRDRRVQNSLEDVLNMLDRQIAAIDEDIDKHIHNSPIWKAKEEVLLAVPGIGPTTARTLLAELPELGTASRQEIAALVGLAPFNRDSGSMRGQRKIAGGRASVRSVLYMATLTATRCNPVIRSHYQQLLAKGKRRKVALVACMRKLLTILNAMLRKNEPWRSTIETT

SEQ ID NO: 133481 - protein, 344 aa, unidentified
MEKHTLIAVDLAKSVFEIAVSHEDGKVAKRRRLQRSAFLDFFAAAPKATIVMEACGSAHFWGREIEKLGHRVVLLAPHQVRPYVHRNKTDRTDAKGLLEAYRNEDFRPVPLKTLAQQALTSIHRLRAGWITARTAQVNSLRGLLREFGHVIPQGIERVLPEVRLLVADADADIPDSLRPILFAACEEIDALTTRITLAERQLEALAEETPVVAQLRTVPGIGLITASALVAIVGNVQRFPSARHFASYLGLTPKEFSSGSHRRLGRISKRGDIYLRTLLIHGARSVLFHARRARTHDRLRTWALALYARANHNKAVVALANKLARIVWSTWKHGRDYDARPKAA

SEQ ID NO: 133482 - protein, 321 aa, unidentified
MANVSKIIGIDISKEKFDVCFSFQPCGYSSRTYTYDNEGIRSFLKDVPQDCVCIMEATGVYHLRLAYCLNKHGVFVSVVNPLSVKNFSRAVMCRTKTDKADARQLVDYARRMELTEWKPTPDNYIRIQQIYRTIELFVTNITQIENQLEAMSHSPVRDKMLCSMLKRDIKLIQKRIERLEKQIEELIAKDDKYVVSRIRTIPGVGNKTSIALLTATKGMHGFDNYRQVSSYFGLCPRIYDSGKSVHGKAHICKMGMGWIRKLLYMCAISASKYNKACKNLYSRLTEKGKPIKVIMIAVANKLIKQIFAIIKNNKEYSEFYA

SEQ ID NO: 133483 - protein, 323 aa, unidentified
MAGQIVYVGIDVGKEHLDVARHGEDEVWRFANDESGIQALLDQLAPFAPKLVVLEATGGFEFPAAAALAAASIPVVIANPRQTRDFAKSTGQLAKTDTIDARGLAFFAARIQPEVRGLPSEETRALEAIVARRRQIIEMTTAEKNRLGFALKPVQKGIQKHIRWLERQLSDVDQDLDSMIRRSPVWAAKQDLLQTVPGVGPNLSRTLLAALPELGRLSHKQVAALAGIAPIARDSGKFRGKRVTWGGRASVRAALYMSVWSAAKWNPVIRVFYDRLRAKGKPAKVAQVACMRKLLTILNAMIRDGVEWDPSIPLEQLRVQHSC

SEQ ID NO: 133484 - protein, 368 aa, unidentified
MSETIVAYQKYVGVDHHKCTVTLASVSADGEIRKLTISTKSTGKIDAWLRALPAPVWMAVEAVGFVEWFIDRFRECVARIDIADATELSNRRGKRRKNDPNDAEDIALRLARDECPLGFIADDELMQLRKLGRHWRQLSRLLSRTKHSMKSMLNAANIRGPKFDAAGAHRWFLAHGHLLKPAQHDAFSDFIDILVLVERQRERLQRKIILANRSERFAQITELLKTVPGIADIWGCIIAAEIGPFDRFPNADTLQFWAGMTADLKESAGRTQSGNITKAGSRTLRWALCKAAVTLCRSDAKQEVTRQRVIRQVGGVKAKANVAMGRRLLSILYAMVRDGKPYKNTEPTTHNRAANRAREAIRKRKEAA

SEQ ID NO: 133485 - protein, 298 aa, unidentified
MKITTIGIDLAKSVFQIHGVDGHGKTLLKKQIKRSEMATFFSNIPPCLIGMEACGGAHYWARKLVGQGHTVKLMAPQFVKPYVKTNKNDAADAEAICEAVARPTMRFVPIKNVHQQAVLAMHRARQGMVRSRTAQANQIRGLFAEFGLVMPQGIANLYKQVPALLEEAKDELPGMFRELVLRLLTHLKELDRQVGEMEVQIQAWHRSNALSRKLEKIPGIGPLTASALVASIGDAKSFENGRQLAAWLGLVPKQHSSGGKQTLLGISKRGDCYLRTLLIHGARAVIYAAQRNLPVQDG

SEQ ID NO: 133486 - protein, 428 aa, unidentified
MKRKAAVCLPFILTRGLLWFLPEQSRTNGRDTRVPEALQYKQFELANTPMKTELYVGLDVDKEWIVTAVAEWGRNGPVHDLGAISNDLHALEKLLARLRKRYGPDVRICACYEAGPWGFGIARRLHQLGVECTVVAPSLTPTRSGDRLKTDKRDARKLARLLRAGELTEIYIPEPTDEALRDLCRARSDAVDDRRRSRHRLKAFLLRHGYRYEGKSAWSAAHERYLRELVLPHPAMKVILEEYLISVQMASERIARTEAAMSDLLGKWRLEPAVRALMAMKGFQTVAAMIVVSELGALDRFTHPRQVMAYLGLVPSEKSSSDRRRQGSITKCGNAHARWLLVECTQHYAAPPKVSKELSRRQQNQSRAVRLISWKAQNRLHQRYVRLMARRLQRNKVIVAVARELCGFIWELLRSQECYHAPCPSGMN

SEQ ID NO: 133487 - protein, 426 aa, unidentified
MRLFVGDDWAENHHDVELMDAGGRRLAKARLPEGVAGIARLHAMIGEQLGEDADEDDAGQVAIGIETDRGPWVAALIAAGYTVFAINPLQASRYRERHGVSGAKSDAADAHVLADMVRTDSHQLRPVAGDTAQAAAVKVVTRTHKTLIWERTRCTQRLRHALRDYFPAALEAFEDLDAADTLELLARAPEPASAAKLTTAQISAALKRARRRDVAAKAERIQAVLRAAHLGQPDVVAAAYAASVRALTAVLITLNEQVKTLHGQVEAYFGQHPDAEIIASQPGLGGVLGARVLAESGDDPTRYASAKARKNYAGTSPITRASGKKKTVLARHVHNDRLIDALMSQAFTALRVPQEHAPTTTSSAPAAPGTTPPCASSPTGSPASCTAASRPAPSTTRRPPGRSTQRPRRRLRLDIQAPGMSVLSAT

SEQ ID NO: 133488 - protein, 422 aa, unidentified
MAVFCGIDWAEGHHDIALIDGDGSLIAKRRINESLDGVAELAAMLATAGDSAETPIPLAIETPRGLLVAVLRATGRPIYPINPLAVARYRERTSVSGKKSDHVDAMALANILRTDAHLHRMLPDDSPEARSISVLARAYQDGVWRRTKLVQELRARLREFYPGFLAAFAAGSGSGRGLSTTQLASGDARAVLAIAPSPADGLTVSKARIETALRRGGRQRRISSLAASVVAGLRVPQLRQDPRVEQAMRVETLTLLGVLDVACASVDQLADALVEAFSQHPDHEIITSFPGLGDISGAIVLAEIGDDRSRFRDDRALQAFAGSAPVTRASGKSRTVTRRRTKNNRLAAVGYSWAFTAAARPSPARDHYLRRREHGDGHPAALRHVFNKMLGQLHHCLLTGHTYDSTKAYPHALPRHSEAVAA

SEQ ID NO: 133489 - protein, 356 aa, unidentified
MLNDAKYIGLDVHQATISVVVLDGTGHLVMESVIETKAATILQLLHGLSGSLHVTFEEGTCAAWLHDLLKPHVAKVLVCDPRKNALLKAGNKNDRIDARKLADLLRSGLLSAVYHGENGVRTLKELARSYLTLTRDTTRVMNRLKALYRSWAIPCAGQKVYAPHHRNQWLAKITEGGVRRRAEFYYQQLDALQTLRQQVRRDLLAESRKHGAMKLLRQIPSIGPIRAALLIALMQTPHRFRTKRQLWAYSGLALKTSTSGEYRILEGQLKRSKKFLAIRGLNTNHNHDLKNIFKGAATRAAAVPGPFQEFHAALVAKGMKPTMARLTLARKIAAITLIVWKKGVGFDAEYLKQQAA

SEQ ID NO: 133490 - protein, 324 aa, unidentified
MNPSNESFIPSDVFIGVDVSLSHLDIAVRPSGERFTVDNDGSSIDDLIKHLQKLRPSLVVLEATGGYEIPFVSAAGAARLPVVVVNPRQVRDFARATGRLAKTDSIDADVLALFGERVRPPIRTLPDEDTRRLDALVTRRRQIIGMIVAEGNRLPSAPAALRRDIEAHIRWLQKRLRDLDKDLREEIHQNPLWCEKDSLLQSVPGVGPQLSAALLTGMPELGSLDRRQAAALIGVAPFNRDSGTMRGRRTIWGGRASIRSALYMAALTATRHNPVISEFYRRLRDAGKRAKVALVACMRKLLAILNAILKTNTPWRLAPNHVHP

SEQ ID NO: 133491 - protein, 335 aa, unidentified
MTKVTTVGVDLAKSVFTIHGVDAAGRTVLRKTVRREKLLELIAALPPCLIGMEACSGAHEWARRFERHGHRVGIMMARFVAAYRKSSKNDGNDAEAICEAVARPNMRFVPVKSVEQQAILSVHRVRQGFIEQRTATINRMRGLLAEFGVVLPQRADQVRRAAIVVAEALPVLAREAIADLRAHLTYLDARISHYERQLISLARQHEPARRLQGVPGVGPLTASAITASMASGHEFANGRQFAAWLGLVPRQYSTGGKMRLGRITKRGDGYLRTLLMLGARAVLQSAARRTDRLSRWALALRARRGYHRAIIAVAAKNARIIWALLARDREFVLAV

SEQ ID NO: 133492 - protein, 315 aa, unidentified
MICGVDVSQQSLEARIEQDGPGASFPNTNAGIVQLAEFCRAHQVHLVAMEASGGYEQLVLLLLSAEQIPVAILNPRAVRRFAEAMGYLEKTDALDAGVIAHFARTKKSQPSSPGSAQLQHLRALVTRLRQLTDLQTAQRNQQLLVTDPTVQQLCQQLLEVVKTQIRSLEKAIAQLVDADPLWQQLNQSFRSIKGVASRTVSRLMAEMPEIGTLSHKQIAKLAGLAPLACDSGKARGKRVIAGGRRPIRDTLYMVAGIVARFHPDFIAFRQRLTAAGKAKKVVRVALAHKLLTRLNAKAREVRLKFAKTTLLEKPC

SEQ ID NO: 133493 - protein, 343 aa, unidentified
MQIRSVGIDLGKTTFHLVALSAAGKVLLRKKFTQKQLVIFTANLQTSLIGMEACSGAHFLGRVLREQGHDVKLIPAQFVRPFVKSNKNDFLDAEAIAEAVDRQNMRFVPIKTDDQLDLQALHRVRDRLITRRTSVINQLRAFLLERGLVFAKSPAKLRERMPEILENAEEYLTPRMRNLLALLWNEWKDLEQQVVDLNHEVELIASSDAACLRLRQIPGIGPLIATAIVASIGNGAAFHKGREFAAWMGLVPKQYSTGGKAKLSGISKRGNRYLRKILIHGARAMVLRCKRERIPMGAWMTALETRAPRNVLIVAAANKLARIAWAVLSSDQDYRAVQEPVAA

SEQ ID NO: 133494 - protein, 340 aa, unidentified
MTAHVCGIDIGKTTFHLIGLSKEGQIIAKRRFTRKQLIIHTVNMPACLIGMEACPGAHYLARVLRAQGHEVKLMPAEYVRPFVKSNKNDYIDAEAIAEAVQRPTMRFVPIKSEAQLDLQALHRVRDRWMGRRTAVINQIRGFLLEHGITIAAGPAHLKRQIPSILEDAENLLSPRMRALLVELRDEWEKLEAQINEIDREFSQAVKKEENCRRLLTIPGIGPLTATALTAAIGNAMAFHKSRDLAAWLGLVPRQHSTGGKSRLLGISKRGNPYLRRLFIHGGRAVLARAKRDNHTFGGWLDRLEARSPRNAVVVAMANKLARIAWAVLTRGQVYCATACP

SEQ ID NO: 133495 - protein, 478 aa, unidentified
MNSNSALPASTLPVSSLSSLCLCECYRIKPVLRILVDEKAVSPSNGSKYMSEVVYHRKETAMIANSLMQRRSAIKPDTLVVGIDVAKFNHVARAVLPGGAVTRPFDFANSQEGFLSLYAQLAAWKPTPTSAVIVGLESTGVYWINLARWLAEHGCQVVQVSGLYVHHAKELADNSRGTSDGKDALLIADLVAQGKYLGFVRPAGVLADLRQLVGLRQRLVRERAARYNLLHQSLDLLFPEFVAVFRDVTGPSARRVLRRFPTPAAALAHPPDEMRRLLSEDGRVQANVAKLARLQAAAQQSIGMCEGTTGLEYALNDTLLELDSLDARVRQVEAEISRLLAQVDETPILTSLVGPMTAAVILGETGGLKQYSCAAAVLKLAGLNLYQISSGQYCGDRHISQMGRSLLRQTLYLAALQHTHPGAPLYPYYAELLQRGKPKPVALIAVCCRLVRLLYALVRDGRCYSSQPPENNRQTLAA

SEQ ID NO: 133496 - protein, 430 aa, unidentified
MKSNTQNAKIEAITEKTLVLGIDVGSKTHYARAFDYRGIEYSKKPFKFSNTEVGFATFKEWILDLKERHEKDKVVPCMEPTGHYWFNLGKFLQDNEMKPVLVNPHHVKKSKELDDNNPTKNDRKDPKVIAGLVREGRYMIPYLPDGVYADLRTASNIRFQLQAELTRIQNRISRWFNIYFPEYKTVYGKPDAKSGMLILKAAPLPEDILTLGIDGVNQIWRDAKLRAVGKARAKTLIKAAEHSIGSKEGTMSARMEIRMLLEDYESQNMRLQEVMVLIEELVKEIPMAEKLLEIKGVGIRTVSGFLAEVGDISRFNNPKELQKLAGLALVENSSGKHKGKTTISRRGRKRLRYLLFEVAMSLVAKNPEFRELHNYYTTRRLNPLKKMQSLMAIAAKLIRVFYAMLTKGVDYDPKKMISDIKRPTVYLQAA

SEQ ID NO: 133497 - protein, 340 aa, unidentified
MGYYVGLDVSLKSTHICVLDGERLVVWRGVSDTQIAMIAEHLGRWSKQIVLVGLETGSLTPWLYHGLSDLGLPMVCMDARRASDALKARAEKTDKADARALAEMLASGWYSAVHVKSLESHQLKALLGARDQLVRVKRQLYGQVRGLLRPFGIKISQRVGAKSFDEAVRMACNKEDVLYIAVGALLDTLANVASQIAVLDKQVRTLAQKRKACWHLMSVPGVGPITALAFTAAIEDPRRFSSNRDVGAYLGLTPKRYQSGERDVSLSISRQGDEMVRHYLYEAANCLLTTVTGASALKSWGLKMVRRCGAKRARTAVARKLAVLLLRLWKQESHFEAQSA

SEQ ID NO: 133498 - protein, 357 aa, unidentified
MKITTIGLDLAKHWFQVHGVDANGRVVVRRRLWRSGVIAYFRSLEPCLVGMEACATAHYWARELIALGHRVKLMPPAYVKAYVKRNKNDAADAEAICEAVARPSMRFVPVKDAEQQSVLMLHRARSLLVRQRTMLVNALRAHMAEFGIIAPQGLRHVEILTKTIAHQQERLPELARAILQMIVGQLNGTMVRIREIEGQLARWHRESPVSRLLATVPGVGIMGASALAATVADPTLFRSGREFAAWLGMTPRQNSSGGKECLGRTSKRGDKYIRSLLTAGAVAVLRHARNRPTRDGEWVRALLARKPTKLAAVALANKTARIVWAVMMRGRAISLKKFSGGRHNHRQPIQHARVKRT

SEQ ID NO: 133499 - protein, 332 aa, unidentified
MYYIGMDLHKQDLVMAVEDEHGPVGRVRRIACRDVDAIHAAVGRWRPFRAVVEASASYRWLYDLVSQQGEMVLAHPLRLRAITAARAKTDRLDARLLAQLLRANLIPAAYVPPARYQRLRDLTRTRARLSYGATLAKNQMHALLARANVHPPLKTLFGPRGRRYLAGLDLGLSGNLARDELGRRLEHYGREIAMLDAHLEAVASEFPQAEALEVLHGIGRYSALLVVAEIGEPERFRNARQVGAYAGLTARVHQSGGHEHRGGISKQGSRWLRWILVQAAMKLVRRDERLANFYQRVRKRRERNVARVAVARKLAGICWVRLRRWQREQAAA

SEQ ID NO: 133500 - protein, 340 aa, unidentified
MEKSEQTQPYNWVLGIDVSKQSIDACLIRSSDGQIFENKFNNNLSGFRHLKGWCKQQQCECDAATLCCMEHTGLYTRLLVHYLVSREVAIWLESSLQIKRSQGLVRGKSDRIDAQRIARYAHVYQNKSSVLQITSLTLEKLKDLQANRKRFLTALQILRTSTEELKQFDPSTGKTIEQTNREAVRGLEKSLEKVDEQILRFISDDENLKQKYDLMLSIKGVGKVLAAMLLIYTHGFNRLADGRKLACYSGVAPFVYESGTSIKGKTGVSKFANGELKKVLHMAAISSAHHNPELKVYYERKVKEGKNKMSVINAVRNKLLHRIVAVVNRGTPYELELKNS

SEQ ID NO: 133501 - protein, 488 aa, unidentified
MAKRSKSTFERLSGSRRKRTQRRDLRRRVAAGDPGLTIVNPHAGGIDVGNASHFVAVPPDRDAHPVQEFGSWTADLIRMAEWLKACRIDTVAVQATGVYAIPLYDVLTEHEIRVVRVNAQHTKNVPGRKSDVPECQWLMKLHTYGLLRDSFRLDEKMQSVRTIWRLRDRHVKDASGAIQHMQKALTKMNIQLANVISDIRGVTGQAIIAAILQGERDPYQLADRKDERVKASREEVARSLAGNWRDDLLFELQQAVDSFHFAHLQMQECHRKLENFLASLPTRTLDIPSEPVGAKADTVLKPRKAKRAKKPKRPRGNEPTLDLEGELKRICGVDLTSIDGINVITAQTIIAEIGTDLSGFPTENHFASWLGLTPGKDISGGKVIGRGRRKGQNRVAAALRIAATTLLESKSYLGGRHLRRPLPSKTAAVKAMARHPGVLVYRLLTYGQAWVDRGAAKFEQKRAELELARLNFQARTRGYKLTPITQAS

SEQ ID NO: 133502 - protein, 387 aa, unidentified
MISVGIDVAKRSHEACFMDAEGREVGRTLRFPNTAGGVATLSDRLRGLEQPVSIALEATGHYWLALHQRLTQEGFPVQVVNPIQTDAYRRTTVRKVKTDRRDSWVIADFHRIGRVRPGYVPDATIFQLRELTRFRFKLVDQVGDAKRKALTVLDRIFPEYESFFSDVFIASSRQLLRAATTAEEFASFDLEELAALLRRSSRGRFGRDKAQVIQMAARNSLGLSSLGPVAALEMQCLLDQIEFLEGQIAQVEAAIEELMASTEQYLITIKGIGAVLAATILAEIGDINRFSRLESLVAYAGIDPAVYSSGEFTGTQAKLSKRGSPYLRRALWLAATSARRFNPDLQEYFEGKIKAGKPYGIAMSAVCRKLLARIYVVLKENRPYEVR

SEQ ID NO: 133503 - protein, 408 aa, unidentified
MQVLYPRCAGLDVHKDSVVARVRCLSAPQADETRTFATTTGALIELQEWLSAHGVTHVAMEATGVYWKPVWHLLEGYFELVLANAQHIRNVPGRKTDVNDAAWIADLLAHGLIRSSFVPPAPIQELRDLTRTRKQLVREISQHSSRIQKILEDANLKLGSVLSDVLGQSGRAILKALIAGEADPEKLADLARGTARKKRSELIEALHGRIRAHHRGLLKVHLELVAALEQALTDIDAAVGKNLAPIQHSARLLTTMPGISEVTAHVVVAEIGVDMARFPTAAHLLSWATLCPRNDESAGKRRSTRVRKGGTWLKTTLVSAAWAAVRVKGSYLQAQFLRLKARRGAKKAILAVAASMLTAAYHMLKNGVEYRELGGEHFTQRDRSKAISRLLRRLQDLGCQIQLAPQTA

SEQ ID NO: 133504 - protein, 338 aa, unidentified
MPLYGGIDLHANNSVVVLLNEQDQRIYHKRLPNDLATIVEQLAPYHADIEGLVVESTYNWYWLVDGLMDAGYRLHLANPAAIQQYSGLKYTDDHSDARWLAHLLRLGVLPEGYIYPKAQRPIRDLLRKRAHLVEQQTANVLSVQNIILRNTGARLSANRIKSVSQAEVEALLPDADQALAVSSALAVLHCLAEQIKTVETRVRTRIQSTPLYELLQTVDGIGPILAQTILLETGDIGRFPSVGDYASYCRCVDSTKVSNGKRKGQGNVKNGNPYLAWAYAEAAHFARRFNLRVQRYYQRKQAQTNVPVAHKTVAHKLARACYHMMRHQVPFDAAKAFG

SEQ ID NO: 133505 - protein, 362 aa, unidentified
MSNGIRWVGLDLHASQTACAIFDSDTGELITRRVMGRPHEVMGVLEQLAPPVRAVYEAGPTGYGLARRGRAAGIDVQVCAPGMITRAGSERIKTDKRDAIKLARLHAAGQLVLVYVPTLEQEQLRDLARCREDARQDLMRAKHRVGKFLLRREIYYPGRGRAWTREHRAWLASMHFADAASEATFADYLHAHDTLTARRDQLDRAIDERARDCCWAPLIARLRCLHGIDTLGAFGLCAEVCDFQRFPRATSLSAYLGLVPCENTSGDKRRLGSITKAGSTLARRLLVEASYHYRRPPRIGGGLLRRQDGADAWVVDLSWRCQRRLHGRWQRLRSERHKHNGIAAVAVARELAHFCWELAITD

SEQ ID NO: 133506 - protein, 342 aa, unidentified
MLNIGLDLHERTSSICILDSSGRIQRREKISGHPRRVVEFLRTIDEPFCVCFEASTNYGWMHDELTSVATKVVVAHPSRLRLIFMSKRKNDRIDAERLAKLLYLNEVPTIYVPSIDIRSWRKLIEYRKRTVNGRTRIKCALRALLRTHGIETIRGRAIWSQKGLAWLQSLSMPTEAATFERDEAIDDIAYFNRKIDRTERKLAAIAKHHPGVTLLRTIPGVGIRTAEAFLAYVADPGRFRAKSIGPYIGLVPSQDSSASVNRLGRITKDGPGTLRGLLAEAAWQSIRRSAGLKAFFERVKRDDPGRQKKALVATAHYLSRIMLAMLKSGETWREEENRPAAA

SEQ ID NO: 133507 - protein, 342 aa, unidentified
MLYVGLDIHKSHITVCVLDSNGKVFQRWQVSDAAELMTRLKELPPFEVCYEASTGYGRFYELLTTVAAQVAVAHPGLLRLIYQSKKKNDRADALKLAKLLYVGEVPKVHVPPADVRAWRELITFRKRLIEKRTRAKNGLRCLLRSLGINPPKEFGLWTKKGTAWLRSLEFEQPLHSVKRSMLVEELDTHSKHIRLVEKELLEFSKDNPAVQLLQTIPGVGLRTSEAVVAFIDDPHRFANSKRLGSYFGLVPSQDQSGRINRLGHITKEGAPVVRAMLTEAVWQAVRRSPTVKSFQMRVQRGESDRRKISVIATAHYLVRVMWSMLKNGTVWKEQKTAVTAAA

SEQ ID NO: 133508 - protein, 312 aa, unidentified
MTEHCYCGIDVAKERLDVQVLPHRQRFSVDNNATGWAELVERLHALAIAAVGIEPSGGYERGIIRTLLAAGLSVRRINPNKLRQFARARGILAKNDRLDAQLIAEYVSIMPTRAVQRAATAERLAEVVTMRRQLCDEHVTIENQAAHVEDAILRRLNKRRLARLKADIHLLDKRMAEIVAADAILAQRYELLTSMRGVGPTLAFTLIALLPELGQMSRKQIAALVGLAPYDFDSGKLKGHRCIYGGRMPVRNVLYMAALSAARYNPILKIFHNRLAATNKKPKVIIVAVMRKMITNLNAMVRDNAAWQPRAA

SEQ ID NO: 133509 - protein, 341 aa, unidentified
MKPELSVVGIDLAKSIFHLVGLDERGKIIVRKRLARGEVLPFMAQLPRVRVGMEACGGAHDWARHLREQGHEVKLMAPHYVKPYVKTNKNDLRDAEAIAEAVTRPSMRFVPIKNVAQQDLQALHRVRERLMGARTALVNEIRGLLAEYGIVLPTGVNAFRNALAAKLEAEHAKLTPLSQELFGKLWAECKQMEAEVAYYDEKLQAMATTHPESQRLLTIPGIGPITATALIAAVGEVGGFTNGRQFAAWLGLVPKQYSTGGQTRLLGISKRGDSYIRKLLIHGARATLRWARTKTDRRSRWIRGLLERRGWNRTAVAVANKNARIVWAVLSRGGVYEESTN

SEQ ID NO: 133510 - protein, 365 aa, unidentified
MCHRVIVADESLEGAVHMQVSTIGIDLAKNVFQAHGVDSAEKPLLKKQLRRGQVIEFFGKLSPCLIGMEACATSHHWARELRKLGHDVRLMPPSYVKAYVKRGKNDAADAAAICEAVRRPSMRFVPIKSAEQQSALMLHRTRDLLIRQRTQLINAMRAHLAELGLVAQKGREGLQQLMRTVADTDDEALPSDARFACQAIVAQLQAVQMQIAGLEKRILQAHRANPASKRLDAIPGFGVIVSTAVVATMTDPKAFKRGREFAAWIGLVPRQNSTGGKERLGSISKQGDRYLRRLLVVGALAVIRSARARPDKYPWVVAMLSRRPAKVVAVALANKMARIAWAILAKGETYRAPAHSNSGAIAVSA

SEQ ID NO: 133511 - protein, 408 aa, unidentified
MEVMWARCAGLDVHKDTVVACRRVQKGREVQHEVRQFSTVTRELIELGDWLEAGECTHVAMEATGVYWKPVWHMLEGRVELVLANAAHIKNVPGRKSDVNDATWIADLLAHGLIRNSFVPPQPIMELRDLTRTRKQLSREIVSHTQRIQRVLQEANVKLDSVISNVLGVSGRRILRALIKGERDPNMLAGLGSPRLECSPQALVEALRGRVTAHHRFLLDQHLDLIEKLEGTIRQFDEQIERVIQPFRGVVERLSTMPGISRVSAQALVAEIGVDMEAFPTVGNLISWAGLCPRLDESAGKQRSSRVRKGACWLKPMLVQCAWAAARSKGTYLQSQYLRLKSRRGPKKAIVAVAASMLTAAYYIIRDGVDYRDLGGDYFRRRDSERVAQRLAKRIRELGYEVAISKVA

SEQ ID NO: 133512 - protein, 387 aa, unidentified
MAQVNDLSRSLTTFDPISTLVVVVEMSKASWLISGAVPGVDRQPLKKLEPDATALLRLIERWRDEAVRAGRPISRIVLAYEAGRDGFWLARWLIARGIEAHVIHSASVAVSRERKRAKTDRLDVAMLMRVFLGWLRGERGHCGMVAIPTMEEEDARRPSRERESLVNERSRITNRMKSALARLGVRGFKPHLRKAPERLAGLRTAEGTGLPTNIIEEFRRDMARLALVREQINSIEKTRAERLERAPDTGPHAMVRLLARVIGIGIETADMLVREILSRKLRDRRAVARYAGLTGSPDESGLKRREKGLSKAGNARVRRGLIQLAWRFLMFQKDSALARWYRTRTEGPSGARKTTMIVALARKLLIALWRLVTHGEVPDGVELRPAA

SEQ ID NO: 133513 - protein, 320 aa, unidentified
MAILYAASIVGVDVAMAELVIAQRGAERTHTLLNERAAIQHWLKTLPEGSAIALEATNTYHLDLVELAHDMGHRVFVVDAARVNKYRDSLGKRAKTDACDAHLLARYLEKEGDELRQWSPPPVLHTRLKHLLHRRASLIASQTSLRQSWRDEVELRKEFEKLMRRFNHLVKSIEKQLKDVLVEFGELDQVKRCQRIEGVGFLTATALFAAFLRGEFKNVDAYIAYLGLDLRVSDSGNKSGRRRLSKKGDPEVRRLGFNAAMAACRSATWNPYYEKKVREGKARTEALTILMRKIAGVAYSLLKKKEDYDPARRLGVAPQT

SEQ ID NO: 133514 - protein, 349 aa, unidentified
MDHYAGLDVSLEETAICVVDGTGRIVKEARAASEPDALINALTGMNLPLERVGLEACSLTAWLHDELRQAGLPAICIETRQANAAMKTMPNKTDRNDARALAQIMRTGWFRQVHVKSRECRLWRSLLVARRTVLNEMRSIENVVRAILREAGLKLGMPGRAAFAGRVRELAGDDQAVMPLLEPLLAILATMLDGLARLTKQVQAIVREEEVCRRLMSVPGVGPITALAFRATIDRPERFRRSRDVGAHLGLTPARYQSGETDIQGKISRCGDELARTALYEAAHTLLVRSKKWSALRAWGMRVARARGMARARVAVARKLAVILHRMWSDGAEFRFGKQPGASAGLVAA

SEQ ID NO: 133515 - protein, 450 aa, unidentified
MQSKDLNSGVIELLRPNAAGIDIASQMHYVAVPSDRAEQSVRKFGSFTDDLYEMARWLKSCKIDTVAMESTGVYWIQPFLVLEEYGFDVFLVNARHIKNVSGRKSDIKDCQWIQQLHSYGLLNKSFQPEDLTRELRTYVRQRKNLTQGYSTQVQLMQKAFDQMNIKLHNVIADITGKSGLLMIEAILQGERDPHVLAELADSRIKASQEDIVKSLHGIWRQDNLFELKQAYEIYQVYRDKIADCDKQIEAVLKKIADKANNAENTPRDNNRRKANGKNKFNFNASSYLNDISGVDLTEIFGISELTVAEIVSEIGTDMSKWATEKHFTSWLNLAPNTRTSGGKRLKSKPMKKKNKAGQAFLIAASSLKASNNWLGEFYRRIKAKNGSPVAIKATARKLAIIFYKMLKDKVDFNPLPLEEYNQYFKERKLKYINKQAFNYGLKLVSVEFVS

SEQ ID NO: 133516 - protein, 402 aa, unidentified
MAQLGRPGRGQRRQLLGQDRTRQPVISAAVLDVVDGARSSASKCHRVVAPKRTTLRGAVQMEISTIGLDIAKNVFQVHGIDAAEKVVVRKQVRRGQVLAFFEALPPCLIGMEACATAHYWARELTRLGHRVRLMPAKDVKAYVKRNKNDAADAEAICEAVRRPTMRFVQIKSVEQQGRLMLHRARDLLMRQRTQVINALRAHMAELGIVAAQGREGIKELLKIIANEEDARLPVDAQASLIVLAAELQAMQTMIGSIDKRIMAQHRSSEASRRLESIPGIGVTGAAAITATVPDPKVFRSGRDFAAWIGLVPRQDSTGGKQKLGPISKRGDRYLRRILVVGACAVLRYARQQPQKYPWLTQLLSRKPFKVVAVALANKMARIAWALLAKGGTYRAPALAAAV

SEQ ID NO: 133517 - protein, 355 aa, unidentified
MSARRVWVGLDVGADEMAVCGIDDQGAVLFEQLIPTAARDLNAILLPVKRRIRLVALESGPQAIHLTRSLRRLGYRVAVFDARQASKFLAIRRNKTDRNDARGLADIARLARDSVSEVRVKSPECQRLKSMLVTRQKLVQLRMTSEGAMRSLIRLNGGRLKKSSSAAALRKNVEIQLKEIRKSARIDLSQDVQPLLSLSEAIRISLEGIDETLSRMAQENPICRGFMKIPGIGPVCALSFYSAVDDPMRFNRNADIGPYLGMVPVVRQSGQTSSRLGISKRGDSMTRSYLATAALVHLRFARSALSEWGAELMARKGKRQAQIAVARKLAVMMLAMWKSSEPYDPQRGLLDCKAS

SEQ ID NO: 133518 - protein, 359 aa, unidentified
MLETMTYVGLDVHARSTHAAAIDVASGELRRARFGGGSDEVIAWLRELPRPLGGCYEAGPTGFALYRAAEAAGLRIDVIAPSKTPRAAGDRIKSDRKDAELLARLLLAGQLKAVAVPPPPFEAARHLARAREQVRGDLMRCRHRVSKLLLLHGRVYEGSAWTKTHRRWLAQQCFDEPATELAYLDCLAAVDGLVARKQALDERLSRLAFDGDWSQTVARLRCFRGIDTLTAFVLCLEIGDFARFPKPAKLTSWLGLVPSLDQSGESRRQGAITKTGSGYARRLLVEAAWHYLPRPSEGPTIAARRAGQPDHVIQIAHRAERRLHRLYQRLRERGKPGNITTVAVARELACFLWAAAVSE

SEQ ID NO: 133519 - protein, 386 aa, unidentified
MSQPSNILLPAINYHHTLVLAIELSNKSWVLAAQVPGLPQTKAQRTIEPNKNALLAAIDGYRTRAAAVGYTVDRVITTYEAGWSGFWLARWLMAQDVEVHVVQPSSVPVDRRLRRAKSDGIDAELLLRTLLAWLRGEPRVCSMVPIPDEADEDARRCVRERTELLSDRVGLTNRIGAVLATLGVNDYNPLLQSRRRRLTELRTGLDEPIPSNALAKIERLLARLELVLAQIAELERERDEVAAADAPDRAGKMIQQLASLRGIGVQSATVLVREAFVRHFPNGKALGSYAGLTSTPYSSGGINREQGIGKAGNRRLRTVMVELAWLWQRYQPGAAQVAWFRDRVGSTGRRIRKVMVVALARKLLIALWRFVIDGVMPEGAVMKPSI

SEQ ID NO: 133520 - protein, 339 aa, unidentified
MPLYSGIDLHSNNMTAAIMDETGKRILKKRLVNESDVVLTTLEPYRNELVGIVVESTYNWYWLVDALMDHGYPVHLANPSAIQQYSGLKYVDDNHDAFWLANLLRLGTLKEGYIYPQKERPLRDLLRKRWHLVKLRTSLIISLKNILSRNFNLQMRSSRIKGESIDTFVSALPGEDNLTLVVRTSKASIDFLTVQINEVESAVLKQAKTQPCYAKLLELPGVGKILALTIQLETGPVDRFSKVGNYASYCRKVQSRWLSNEKAKGRGNTKNGNNYLAWAFSEAAEQARRFDPASRTFYNRKLNQGNAAMAHNALAHKLARAAYYIMRDNVSFEEAKMFA

SEQ ID NO: 133521 - protein, 462 aa, unidentified
MSKKRTYGSADVEHVDVAALVAMLTVGCIVAVDVAKTKFVAAIARATGEVLKIVRFSHPVQTLTFLKLVEAIRDAKLSPRVVMESTGTYGDALRYQCHLRGVAIEMILPKHTHDFAEVVDGVPSTHDAKAAVTLVQLTLIKPGRRWTPDDDGRRDLRALLDQRSLQTKELDVYHGHLEAYLARHWPELLSLIDVREQRSWMTLLKAYPGPHRVAEAGSEAAKLLHTASHGRFSKEHIKAIVDAAGTTFGVPMRQSEEAMLRFLVENMEEHTKGIDALDDELAQRVKEDDVASRLAAVVGPACAASIVSRLGSPTLFASAGALEKAMGLNLKVRSSGEKQGQLHITKRGPAQVRQLLYFAVLRMLQADPIVAAWCKARKSYDGESGKRKAIVAVMRKLVRALWHVAKGPRFDASKLFDVRRLDLTSASAESKVSPPTSVPQLAPTRAPSRSRRRAKDISQQVA

SEQ ID NO: 133522 - protein, 391 aa, unidentified
MIYIGIDVAKDKHDCFITNSDSEVLFKAFTILNNLDGFNDLYQKIESVMDDVTKVKVGLEATGHYSYNLLGYLIDKGLPTYVINPLHTNLYRKSLSLRQTKTDKVDARTIASMLMSDVNLKSYSDTSYHNEELKSLTRYRFDKVKERAKLKTSVSRLVCILFPELEKLVPTLHIASVYAMLSEFPGAKQVANAHLTRFTNLLSEASKGRYGKETAIAFRDAARTSIGSNMPAKSLELKHTIKLIQELTSEIDEIEHEIKLIMDELNSPILSIPGINYRMGAMIIAEIGDFTRFDSPDKILAYAGFSPSTYQSGQLDGAYSHIEKRGSRYLRYALYNAAKYVCIWDPTFAEYLAKKRSEGKHYTVAISHAVKKLVRVIYHLEKTNQQYIKAA

SEQ ID NO: 133523 - protein, 427 aa, unidentified
MNYTQNQKISQISPSTLIVGIDIAKDKHVARAQDDRGIEFGKRLFFENRIHGFKMLLNWVKKHQQENDKIHVIFGVEPTGHFWLGLAYFLKAKGYDFVLVNPMHVKKSKELDDNSPTKNDTKDARVIAQLVKDGRYSVPNLLGGIYAELREGVKLREQLSKQLIVIEGRIQNNIQRYFPEFLDVFKAWDGKASIATLRLFPFPKDLKKMTPEEVLVRWKPFVKRGVGIKRATKLVEAAKKSVGIEVGLRFARKELHNLLDQFELYKAQLKELDEELEDLVLHVPGAEEMMDIKGVGSITVATFFAEVGDINNYRHPQQLVNMAGLSLREHSSGKYKGQTRIDKRGRKRLRKTLYLAIRPLVRYNPAFRTLHEYYTTRPNRPLKKQQSLIALCGKLLRVFFVIGQKQCRFDERKLLQGIPELKKLQAA

SEQ ID NO: 133524 - protein, 412 aa, unidentified
MNAVGIDVSKGKSMVAVRRPFNETVAKPFEVRHTGSELKQLADYLKSLDGETRVVMEHTGRYYEQIAQYLHDAGLYVSAVNPKLIKDYGGGTSLRHVKTDKADARKIAGYALDRWAELRQHTPMDTIRYQLKMLNRQCGLYTKTKTMMKNNLIALLDQTYPGVNALFDSPVREDGTQKWVDFAASFWHVDCVRGMSRTAFVQRYAKWCKQHRYQARAGRAEEIYEHSQDLIAMLPKDAMTKLLVKQSVDAINAVSATLERLKAEMLKLASLLPEFPVVMAMRGVGDTLGPQLMAEIGDVARFAHRSAITSFAGVDPGANQSGTHEAKSVRISKSGSPELRKALFLVMDCLIQTKPQDDPVYLFMDKKRAEGKPYLVYMTAGANKFLRIYYARVKEHLASLKGNPVPDPEGHT

SEQ ID NO: 133525 - protein, 418 aa, unidentified
MKKHNNSQKKSEPTSKRAKPRGPVQRDTKEVLAELVGKLKEKLDPKKVAASSAGEERQRGELGPNLDRLTVGVDLGDQWSNYCILGLEGETLAEGQLRTTQEDIAEFFQALNAARVIFEVGAHSPWVQEVICGCGHEVLVANPRLMEGSKRRKRKNDRIDANKLARLGRVDPKSLHPIQHRSREVRQDLVVLRARDALVAARTELINATRGLVKSMGTRLPKSSSPSFAQKAEEAIPLEIREALLPLVRMAAALSECIQGYDEKIEKLGREKYGHTALLRQVKGVGPITALAYVLTLENPDRFVKSRDVGPYLGLVPKQEDSGESQPQLGISKTGDTMLRKLLVGSAHYILGPFGPDTDLRRYGLRLCERGGKNAKKRAAVAVARKLAVLLHCLWVSGEVYEPLRQGMSATIAPAVAA

SEQ ID NO: 133526 - protein, 309 aa, unidentified
MTDTYIGIDISKDRLDIAVIPSREKWCCGNDEAGIGKVVNRLKKISPLLIVMEPTGGHEAPVAAALSAEDMNVAIVNARQIRDYARATGKLAKTDELDALVMAEFASVIKPQSRQLRDEESQEIKASVSRRRQLLEMITAEKNRLAIARKHLKPGILAHIEWMKQEIEEIDGNIRQQIESSAMWREKDNLLQSIPGVGRVLSATLLAELPELGSLNRKQIAALVGVAPFNRDSGMMRGKRSIWGGRMPVRRVLYMAALVGTQHNPVIKSIYQRLLERGKAKKVAIVACMRRLLIIMNAMIKHGQSWQHA

SEQ ID NO: 133527 - protein, 344 aa, unidentified
MLYVGIDLSSKSFVVHAIDERKRVVLRSEVAASREGFRRVVRELGPGAKLVVFEAGNQLKWVADFWKKQTGVQVHVVHPNEVKWISASSGKTDAVDARKLAELARGDLLPRAVHVVEGTARELRELTSARKQLMQKRVGLDNTLRGYLKQEGVQLGAKFFSRVDWEERLEKLRVSATLRQIVGAFLPAMEQLREAEQVLLKRLAAVSTEEIRLVETIPGVGVLSSRVLVGALDNADRFDDRKAVAKYGALAPTVRQSGAMLHLGRVNRDGRQEIRRVLLQCAHIVVRMKTAGSRPLREFFQRVEAARGKKRALIALARKLLTIAYGVLRSKTEYDPVKLAAYAG

SEQ ID NO: 133528 - protein, 344 aa, unidentified
MKFYCGIDLHARDSFVCIIDDNDRVLLKERIDNRLELFLYHLNSFTPRPSVVVESTLNWYWLVDGLMDAGFEVTLAHTLGLYMITGAKVKTDKRDAFNLARLLRLDAIPKAYIYPKDKRPTRDLLRKRSRLVTLRAAEYGNVRRMLLQQGIVSRSLTEIKHLDEEQISHYFEHPIIRCHCLMEIERIHFFTRQVKILEEIILGTVEDQPTFELLQTIPGIGKILALTVLYETGDIDRFPSAKHYSSYSRVVPGIAQSGNAIKRGRGSKQGNPHLKWAFTQAATLAIRYYAPIRKFRQTHMNRRKSRAKKLISISIVAHKLAIAAYYVQKNQVSYKEELMFRNYQ

SEQ ID NO: 133529 - protein, 342 aa, unidentified
MEITTIGIDLAKNVFQVHGVNKHGKVLLRKQLRREQVATFFANLQPCLIGMEACGSAHHWARKLQMFGHTVKLMAPQFVKPYVKSNKNDAADAEAICEAVGRPSMRFVPIKNIEQQSVLSLHRVRQGFVKARTAQANQIRGLLGEFGIVVPQGIAYVAQRVPELIEDASNALPGSFRLLINRLLEHLQLLHRQVDEIEAAIKAWHRDNAVSQRLEKVPGIGPLTATALVATVGDAKNFDNGRQLAAWLGLVPRQHSSGGKQNLLGMSKRGDAYLRTMLIHGARSVIYRATQKADPNCWVFNVTARRNKNVAAVALANKTARTVWALLVHERSFQPGYTPRTA

SEQ ID NO: 133530 - protein, 368 aa, unidentified
MDQNITVVGLDVHKATVVAAILPPTATRPTQTVTIQNCPKAIERLVKRVPDDGRVVFVYEAGPCGYQVHRQIAQTGRKCVVIAPGLTPVRPGDRVKTNRRDAEKLARLYRAGELTEVRVPTCGEEAARDLVRIREDALEDRLRARHRLSKFLLRQGRLYRETKAWGVAHRAWLRGQRFEWPPLQQTFEGNLRAVEEAEARLESLNQQVLDFAQSGPYRMAVRYLRSLKGLETLGALTLAVETLDFGRFERAPAYMSLTGLVSSEHSSGGKERRGSITKAGNAHLRRILVEAAWSYRLKNTVSPQLAERRRSCPPEVIQIARKAQDRLHRKFWRLVSRGKPSQVAAVAVARELAGFVWAIARQVPAAAT

SEQ ID NO: 133531 - protein, 384 aa, unidentified
MAQMALQTNDSGLAGVLYMALELSKSTWKVGFEYQGKRRIKNVKGGEVGGLRQALEEAMQKPGVPEGAVVRCCYEAGRDGFWLHRLLEGWGVENVVVDPASIEVSRQARRTKTDRVDLLSLLSKLRQYHAGELGVWKVVKVPSEQDEEGRLLHRELERLKKERTGHVLRIKALLFAQGVRVEQVGGKKWAGYLMGLTRHDGRALPADLMAQVRRESERLAMVQEQIQAIEKEQERRVREAAEVGGVMAMVQALRQLKGIGSVAAWVFVMEFFGWRQFKNGKEVGALAGLTGTPYASGQMQREQGISKAGNRRVRALAVEIAWLWLRHQPDSALSRWYAERFAGTSKRHKRVGIVAVARKLLVALWRYLQTGELPTGARLKPAKA

SEQ ID NO: 133532 - protein, 338 aa, unidentified
MNYLGIDHHRQYSHITLLDEEGKVVKSGRVANLRRELEGFLQGARDVKAVIEAGRSSYTMVDVLEGLGIETAVAHPKEVRAIAKAKVKTDERDSYKLAHLLRTGYIPEVHKRSRENRSSQRVLRQRAFYVGKQTAVKNRLRALLAQQSEEIRCEVERVEDLFTEKGMKVLKGLVLPEREAKLVGALVRTNDHLQERINETNALVKELYEAMPSAQLIQTVPGFGIFLAVLVAVEIEDIGRFEDVSQFHAYAGVIPSTHSSGERSWHGKIIKEGNRWLRWAAVEAVWPALRADFDIRCFYDRLKKRKGANAAKVATARRLLTIIFRMLKENRSSIPYKR

SEQ ID NO: 133533 - protein, 414 aa, unidentified
MEQKLIYLGIDWADDHHDIVITDDSAKTLNQFQIDHTPDGFALLHANIANYQKSPADVLIAIETNRGLLVHELIRTGYTVYAINPKAVNRYKDRHVLSKAKSDILDAQALAHLLRTDRHRFKALVPLPEDYRLLDRFCGDLRKLIDEKSRIVNQTISCLKEFYPKALELFSLNSQIFIDFLKAFPDHDTLRACKKKTFLAFIKKHRYPYPGKIKELWETIQSSTLQADTVTARAGKLRLLMLLDQLENLKIHCTHYEQEIQKILDTLPESNSIQSLPGVGDRLAPELVAALGPNGKDTHHRFHSAEEIAKLSGCVPIVKQSGKWEKVSIRHACVRSLRRTFHDWAFTSLKSSTWARAYYDYHKARNQSHFTILRNLGKKWIKILFAVWSKGTTYHEALHIQNLKARNIPWAMAL

SEQ ID NO: 133534 - protein, 429 aa, unidentified
MTKISHKTEQPVLVAIDIAKHRNEVLIAVPGRQRRRRLTVRNAREDVDRLVETLAAFEVPVQVGFEPTGDYHRPLAWRLHQAGFDLRLISSLSLARTREAMHNSWDKNDPKDAQVMLHMMQTGLTQIWHDPLVHGVNDIQELSKTHAVISQTKTEFWHRLRTHYLPLYFPEVERFMGNSRSDWFLAFLEQFPTPGSITCMSEDAFIEAAWDVVGKKVSKARLLADIYATAADSIGLPVDQETPAIRMFRLVLGQGRHLIAQRDQIEQQASDLLGTHPDFVRLRTIPGIGPINALTILAEAGDLRRFGHHRQFLKYCGFNLSTQQSGVFRGQTKLSKFGNARLRRTFWMAGQVAIRQRENSFRDKYERYIARDHSDPHLKRKALTAVAAKIARTAHSVIKTETDYRPFFEGRGPRRKDPALQVPLRHASS

SEQ ID NO: 133535 - protein, 344 aa, unidentified
MDHFAGLDVSVKETSVCIVDDTGKIVREVKVASEPEALLAVLTNPAYRFKRIGLEAGPLSQWLFSALAEAGLPVICVETRHMRAVLKAQINKTDRNDARGMAQMMRVGLYRPVHVKTLRSQKLRMLLTHRQLLLSKAIALENDLRGTLRNFGLKVGMVGKVKFEARIRELVENLPDLAVLVEPMLIVRRVLREQIVILHRRLLAIVRDDEVCQRLMTTPGVGPVVSLTYRATVDIPARFRKSKSVGAVFGLTCAKYQSGEVDWDGRISRCGDEMMRTMLYEAAQAMMRSKKWSWLKAWAMQIARRRGMKKAIVALARRLAVIMHRIWVDGTEFRWTREQATATA

SEQ ID NO: 133536 - protein, 338 aa, unidentified
MSIIAIGLDLAKNVFAVHGIDEAGKAVLIKPAVKRDALLPMIAKLPPCLIGMEACSGAHHWARQFQTFGHTVRLMAPKFVAPYRLSGRKGKNDAADAQAICEAVQRPHMRFVPIKSEDAQGRLSIHRVRQGFVEQRTATINRIRGLLSEFGIVLPLKAEVVRREAGLHLEDLPGWANTAIGDSLSELHHLDGRIAEYDQHIKVMAQSDERGRQLMAMPGIGPTTASALLASIGNGHDFKCGRQVSAWLGLVPGQYSSGGKQRLGRITKTGDSYLRCLLILGARAVLLSSKNKTDRLSRWAQSVAERRGYWKAVVAIAAKNARMAWAMLSKGEAFKPLA

SEQ ID NO: 133537 - protein, 341 aa, unidentified
MSSIKALGIDLAKLVFSIHGVDEHSKPKLRKTIKRNKLLSEVAKLPPCIIGMEACSGAHYWAREFTKLGHDVRIMASKFVIPYRQSEKNDANDAEAICEAVTRPKTRFVSIKSEEQQAVLCLHRIRQGAIKDRTARINRLRGLLSEFGIIMPKGRYPAQNAIAGILEDAENDLPFLARELLNDLWQSIRGLNEEILKYDRKLYALANQMKAAKRLMSIPGIGEITATAVVATVNDAKHFDTSRSFAAWIGLVPRQYTTGGVVRLGRISKRGEKHIRTSLIHGARAVIANCKNKTDRTSLWVKDLVERRGFKRATVALAAKNARLIWALLHSEKEYQVDYVK

SEQ ID NO: 133538 - protein, 359 aa, unidentified
MSHQSTPSTVATIGIDIGKNTFHLVGLDQRGNIVLQLKTSRAQLERRLANVPSCLVGMEACSGTHHIARQLEALGHDVRLIPAQYVKPFLKGHKNDYRDAEAIAEAVQRPTMHFVSIKTPDQMDLLALHRVRSRLVSRRTGVINQIRGFLIERGITVRQGPVPLRKALSDILSSNSGTLSPRLVRLVSDLGEDWRRLDDRIATVSAEIEALAKQDGPCQRLMTVPGIGPIISSAVVAAIGNGSGFRQGRDFGAWLGLVPKQESTGDRTILGKISKRGNKYLRTLFVQAAHVILARRPSTAMRGLWPWIEQASKRLHRNMLAIALANKLARIAWAVLARGHEYQPRIMPHAALQEPAPLT

SEQ ID NO: 133539 - protein, 403 aa, unidentified
MSEQIPLEIRVSVDVGCHSHNVAIGLSSGEVLEEFQIPHRPEGFQHFFSRIEKHQKKRGYPVAVAMEGYNGYARPLDGLVRARGYRLYNINNLKLARFKEIFPGAAKSDPIDARKGLELFQLRDHLPLAKEVLQEVGAVPAENEVLKRLTRRRRRLVNERVRVVNNLQADLQAVCPGLLEITNEAGNQWFLGFLVSADTLPQLSRLRKSTLLKIPAVGVKYAGLIQSWQKRAHFSEDVEWVGEMIQEDAHRVIELDHKIKALEAKIAEVAKSSKIAKVLLSIPGFEPTCTSELAGEIGTVERFSKEGSLALYLGMATLDNSSGKHKGSKSPKQVNTRAKAAMMTAIDRHRKYVPESQRYYEKKRLQGKAHNQAIRALGRHLCRIIYKMLKEEREYEIRSTEGG

SEQ ID NO: 133540 - protein, 427 aa, unidentified
MTTKNGDKQEPQFAAFLAIDWADQKHVWSLQSADSDLREQGEVEQTPEAIEAWVAQMRQRFGNRPIAVAVEQTRGALVFLLSKYEQLHIFPVPPAMTANLRKAFYSSGAKDDPKDSDLLLDIVVLHREKLRRLSPDTEATRLIQNLVEERRKLVDEKTAQSNRLMAHLKIYFPQIPRLFEDVGSPLVCDLLERWPTLEELQKVRPAALRNFFRQHRCRQELIESRVQAIGSALPALGDQAVVKAKMQVVKVTVQLIRILHQGIKALERQIQEAAEGHPDFFIFDSLPGAGAVMAPRLLAAFGSQRERYESAEELQTWSGIAPVRASSGKQEWVHFRYACPKFLRQTFHEWADYSIRQSEWARAYYELQCRRGKKHHAAVRALAFKWIRILYRCWKDRVAYDESIYVAALEKRKSPLASAAMAAEVGL

SEQ ID NO: 133541 - protein, 375 aa, unidentified
MKQYSKYVGMDVHKERITVAVAQANRKAPLYYGEIENTSEAIAKVVKRIAGQEETAFCYEAGPCGYGLYRQITAMGHRCEVAAPSLIPKKSGTRVKTDRRDALALAGLYRAGELTPVWVPDKEQEAIRDLTRAREDMKIMERHSRQRLGGFLLRHGKVYPGRSKWTQGHFRWLEGIQFETASQQIVFQEYVDMVKHTQGRVAAMEEEMRKALDGYTLKEVVEGLMALRGIDLIAAMTIVGELGDISRFTSPRQLMAHLGLVPSEHSSGGKRRQGGITKTGNSHVRRVLVEGSWSYRLPARKTAHLQRKAAKASKAVQEIAWKAQKRLCSRYWYLVYKGKLPVESVTAVARELVGFIWAITCEVMGNKRSLPVGKG

SEQ ID NO: 133542 - protein, 337 aa, unidentified
MDTSKHVFQLHGVNAAEAVVLRKKLRRKEMVAFFEKLAPTVIAIEACGASHHWARLLQSFGHTVKLIPPQLVKPYVKRGKNDAADAEALCEAMSRPTMRFVPVKSPEQQAALMLVSVRDRLIRNRTQLANAIRGHAAEFGLTAAKGMAHLVPLLERIQADESLPPSARELFAMQAKEYEELQTQIGEVDAQLMARHRADECSRRLAKIPGVGPVGAMLLRMKTLAPELFRSGRQFAAWIGLTPKDHSTAGKVRLGVITRAGDEGLRNVLVVGATAVIQQAQRHERASPWLAALLKRKSPKLAAVALANKTARIAWKLMLTGKDYSAIPAPAAVAGAA

SEQ ID NO: 133543 - protein, 457 aa, unidentified
MRSSEKPRRKTAARMLPVLHPDAAGIDIGAEEIYVAVPADRAEHSVRSFGTFTRDLHDLCDWLRDCKVRTVAMESTGVYWIALFQLLETRGFEAFLVNASHVKNVPGRKSDVSDCQWIQYLHSVGLLRASFRPSDEICVVRSLWRHREGLLQMASEHTQQMQKALTQMNLQVHHVLSDITGVSGIAILDAVLAGERDPIRLAALCNRRVRSSRDIVAKSLEGDYRSEHLFTLRQSLAAYRFYRGLMADVDKEIEKFLGAMSSSANVQPKRPTGTKKRIYQRAGNEPAFDLKSELYRIAGVDLTDVPGLSTLTAHTIIMEIGPDVSRFKSASALASWLGLCPEKKVSGGKVLHSGTRHVKNRAAIALRLGAQCLYHANNHLGEFYRKAKWRLGARAAVTATAHKLARIVYHLLATKQPYTEEAFQKADTQARTRAEKRLRQQAATLGFRLSPAVNATL

SEQ ID NO: 133544 - protein, 393 aa, unidentified
MHNFLAIDVAKGKSMVTLVSSNGEVLINPYEVNHSIIDFTNLLNRIKKLKLDNISVIMESTGIYHRPIERFLVENNFKVFVINPIYGKMKKRNLRKTKTDKEDCFNLVNLFISNTFKEYIKPDQLYLDLNALSRQYFALDELCVNIKNRYRNLVYLCFPEYENIFKDSLIYSNIALKFIEAFPHADIIFNTRIDKLQNFFKKHKFRYWKSKAFKIKEISSSSYPSVNMNDEIVSNLSQIARLVNEYQKAIDIIKYKITFLAKKSKYFEPINSIYGIGEFTTSIIIAELGDINRFNNIKELTAYCGLDPSIKQSGKSINVHGPISKSGNKYMRKILYITCSNIIRLTAISKSENDIEIYYRKKRNEGKHHYASIVACTTKLLRKILALCKQLDN

SEQ ID NO: 133545 - protein, 320 aa, unidentified
MLSLCGIDVSKDRLDVIVLPEEQRSSVSNNRAGWADLVERLRGCSIAAIGLEASGGYERGVMRALLAGGLPVRQVNPFKLRQFARASGVLAKNDPLDARMIASFVGIMPTRPAQRPTPAAELVAEMLAVRRQLSSEKVAAENASRLLEDALLRRLSRRRIGRLAADIELLDKRLVEIVATDAALAHRYRLLTSMPGVGPVLACTLIVLLPELGGMTRKQVAALVGVAPYAFESGTLKGRRCIWGGRANVRQVLYMAAMSASNWNPGLKAFHDRLEAAGKKPKVTIVAVMRKMITTLNAMVRDDVVWADRHSGRNSVTTAQ

SEQ ID NO: 133546 - protein, 360 aa, unidentified
MKIVGCDLHAKQQTIAMVDTETGEFTEKTLTHEGNKVREFYAGLEGPVVVGIEATGAMQWFLQLLEELGIECRVGHPAKIRAKETRKQKHDRRDARLELELLMEDRFPTIWMPSSEQRDLRTLLRDRHQWVKVRTRVQNTLQAIALNHALRHGHALWSPAGQKALQALALSRYSSQRRDELLHLYVQLQKRIKELDRQVEEEAKRRPQALRLLTHPGVGPITALATDVFLGDAHRFATGNQVASYIGMIPCEHSSGKRQRLGKLSKQGNALLRYLWTEAVMHAAAKDPELKRFYRRKLIQKGMGKARIAAARKLGIRLWIMMRDQIDYEEFCRRGKLRQSGEAHAGMPDFNSGPASAVTG

SEQ ID NO: 133547 - protein, 459 aa, unidentified
MKHVVTILIGQADGAVSSETREFGGFKRDMRALVAWLQTHRIQQVVMESTGIYWKSVFAHLEAAGIAALVVNAFHVKNVPGRKTDVGDSEWLAQLARFGLLRGSFIPPKDLRELRGVSRYRRKLTGMLAGETNRLHKLLDDAGIKLGGVVADLDGVCASKMVEGLIAGGKPDELAALGRGKVRAATDILEAAMDGELSARHRLVLDMAHDHLRDLEGKLAALDRYLIAAMQPYAWAWRLLQTIPGIDAISAAMILIEIGDDPHRFGSPARLASWSALCPGNNESAGKRKSGKTRHGNPIVRYLLCEAANAARRTKTVFRAKYESLVIRRGHKKTIIALAHKLVRTIYFVLSRRKPYRDSTVDYEAASVAKNAPRWIRALKTYGYWPQVAAPNSPIAMTATRSSLHRHSPSRTPHIGIWGPSTPRSQRGRACPVTTSANRQPNAPHRRAIARLPPHPLSR

SEQ ID NO: 133548 - protein, 322 aa, unidentified
MQGKVLPERSATQVYVGIDVCKARLDVYLHPLGAKFAVSNDAHGFRRLKRSLEGHEVALVVMEATGKLHRAAHRSLVAESFAVAVVNPLRARLFAEAAGALAKTDGVDARMLAVLGESMKPSPTAPPSALMQTLRDVLRCRDAAVAARTALLNQLGEASVPVAIAEIKRQIRAVETSLANLEAEIERLIAADPSLARRLAVLTSIPGIGTTTAVALIVGLAEIGSLSDKQAAMIAGLAPIACDRGEQAGARHIRGGRPQLRRALYMAALSATRCNPDLKAVYDRLRAAGQKPKVALVAVMRKLVILANALVTQNRLWEPNHA

SEQ ID NO: 133549 - protein, 395 aa, unidentified
MLFIGDDWAEAHHDIEIEDEAGRLLVRKRLVEGLAGVTLLHELIAEHLDPSGEPDQVLVGIETDRGPWVQALLATGYLVYAINPLQVARYRERHSTSGAKSDPGDAHLLAEIVRLDRAHHRRIAGDSEIAEHVKVAARAHQTMIWSRVRQVNTLRSLLREYYPAALAVFGTDLASPDALAVLAAAPTPELGRRLSQSRIETLLRKAGRQRNIAATAARIKTALGSDQLTARPGVVPAYAASASALVAVLTTMVTQTEVLAGQVEQGFGRHPDVEIYRSQPGLGVILGARVLAEFGDDSDRYADAKARKNYSGMSPITRASGTKRVVLARYARNRRLGDALFRQAYSALRASPGARACYDRQRARGASHYQALRTLANRLVGILHGCLSHHMRMTS

SEQ ID NO: 133550 - protein, 447 aa, unidentified
MRIVYQCCCGMDVHKDSVTACLLVTNQSGTVRTEKREFGTMTRDLRQLASWLASEGVQAIAMEATGVYWKPVWNILDAEKKFELLLVNAQHIKCVPGRKTDQKDSEWIADLLQHGLLRASFVPPVEIRRLRDLTRMRAKIRQTLASFANRIQKVLEDANIKLGSVASDVLGVSGRHMLKALLAGEQDPQKLANLAQGHLRKKLEPLQLALEGHFTEHHRLQLKFLLDFVEFGEKQLSNLDSEVQLLLTPVPSEPSVPNADDGKLAQAKDAPPQGKSRLQTAVELWDSIPGIDQLAATTLVAEIGANMDQFPSARHLAAWAGLCPGNNESAGKRRSGKTRKGSVWLRRALCQAAWAASRTKNTYLAAQYRRLIVRRGKKRTIVAVAHSMLIVAYCLLKRNCVYQDLGASYFDRLDERALTHRLVKKLIGLGYQVTLKPGRAETAPATA

SEQ ID NO: 133551 - protein, 478 aa, unidentified
MKKHKKTKPEPNEAKPLHEPVADAGGIDLGATEIWAAVPPDRCQSPVRRFGAFTEDLNAILAWLLECGIRSVAMEATGVYWIPLYQLLADAGLKVCLVNARHVKNVPGRKSDVRDCQWLQYLHSVGLLMASYRPDQAVCQARTIYRCRQNLLQQGAEHIKRMQDALDQMNIKLHYVIDDLSGQTGQAIIEAILNGEREPLRLAKYRDRRIKASEETVAKSLEGDWRREHLFVLRVAWQNGKHVQEQIKKCDQELMEYARQLEASTIVAKPMAPIRIFCLNPEPGVRQLNLSPAADTRPSKRRRKTSKNEPDGPWREELHRFFGVDLTLIPSIGILSGITFMTELGNDLSAFKTSQHFSSWLCLCPDNETSASKVLHRSTRRSQNRVRQALRMAASSLHHDKSYLGDKYRRLRTKLGAPKAITAMAHQLARIIWHLLTYRVPFDIGIFAALEKANQMRRLKRLHSNALQMGYQLTPIPA

SEQ ID NO: 133552 - protein, 344 aa, unidentified
MGISTIGLDLAKTVFQVHGIDASGAVAVRKTLRRSQVLPFFAKLPSCLIGMEACGTSHHWARELMKLGHEVRLMPPAYVKPYVKRGKTDANDAEAICEAVTRPTMRFVPVKSPAQQATLALHRTRNLLVKERTQLVNMIRGLLAEYGIDIPRGLERAVAMARRITDGEILDLPDEASTSIVVLCEQALACHERLRTIDRAMLASQRANDVAVRLATIPGIGPVGASALAASVADPHQFKSGREFAAWLGLTPLQQSSGGKERHGRISKMGDKYLRKLLIVGMTSLVRRAKYKPDSVDPYVARLLARKPARVATVAMANKAARIAWAIMARGGTYRAPAQRLLAA

SEQ ID NO: 133553 - protein, 343 aa, unidentified
MDHFAGLDVSVKDTSVCIVDETGRIIREVKVASEPDALLAVLRNPAYRFKRIGLEAGPLSQWLFSALAEADLPVICVETRHMRAVLKAQINKTDRNDARGIAQMMRVGLYRPVHVKTLRSQKLRMLLTHRKLLQAKAIAVENDLRATLRNFGLKVGVVGAVKFEARIKELIENFPDLVALVEPLLVVRRVLREQTSILHRRVVAAVRNDEVCRRLMTVPGVGPVVALTYRATVDVPARFRKSKSVGAVFGLTPSRDQSGESDRPGAISRCGDEMMRTTLYEAAQVMLLRSAKWSWLKAWAMKIARHRGMKKAIVALARRLAVIMHRIWIDGTEFRWTREAAAA

SEQ ID NO: 133554 - protein, 340 aa, unidentified
MSMNPNSCLGDRARILQGRERTAMSIANEVFVGIDVSKAELEVCWLPQRERLQVARDEGGLVRLVERLKELGPSLVVLEASGGYEMPVAMALAGASLPCVVVNARQVRDFAKASGKLAKTDRIDAQVIAEFAQAIRPQVRALPDAAAAHLIALVARRRQLVEMLTAEQNRLALSHAAVREDLKQNIAWLKSRLQDLDGELARAVRSSPLWRENDKLMQQVPGVGRVVSAVLLALLPELGRLSPKKIAALVGVCPFNRESGRWNGKRAIFGGRAGVRSVLYMAIVSAIRWNPLIKTFYQRLLAAGKPKKLAMTACMRKLLVILNAMMRDRSDWNPNGALAT

SEQ ID NO: 133555 - protein, 383 aa, unidentified
MKAVCGLDVHKDSVYLCILSEFGELIEEVFGVLTYQLEKMRDLMLHHHVVEVSMESTSVYWIPIWRVLSPHFKLNLANPYFIKQLPGRKSDVKDAQWIAECTMKELIRGSFVPPETIQQLRQYDRRIFDLNEEIVRKLAKLDAVLQRCNIRLSNYVSNVDSKSYKAVVRALSQGITDPEELVKLIHGRIINHHGKDVITASLKGVVSLAEIDMMSQLRDELDLAEAHKEKCQAKMLEICEREFPEELKRLQTIPGIKERSATSLIAEIGTDMDKFETAGHLASWSGLKPRNDESNKKIKSRSITHGNVYLRKTIIECAWAASRKTDCFFSRFSYHQTQVRKKNKMKVLVAVARKMLVAIWHVLHDNTNYIDFKTDRKPSQTKG

SEQ ID NO: 133556 - protein, 388 aa, unidentified
MQTVADRPEVPTAIRTDLGAIFVSLELSRSTWLITSLSPYGGEKMSKHAVRGGNVAGLLERFAQLREKTRARTGKVFPFVVIQEAGLDGFWIDRALQNEGIESHVVDPASIATSRRRRRAKTDRIDGEALVRALLAYKRGEPRVCAMVKAPTPEEEDRRRLCRERKVLIVERVRHVNRVKGLLFSQGISGYEPLRRDRRERLDTLQTGDGRLLPDHLKAQVRRELDRLELLLEQIKAVEAERDVLLAAQQVAAPAPAAMLLDIKGIGPEFAAILWSEGLFRHFDNRRQVASYAGLAPTPWQSGSVDRDQGVSKAGNPRLRTTLIQLAWLWLRHQPQSALALWFEERVRRNGGRLKKTTIVALARKLLVALWKYVTAGVVIEGAVMNVA

SEQ ID NO: 133557 - protein, 359 aa, unidentified
MQKYNISFKGQNIFIGIDVHDKTWEVAVLTESGYLRRYSQESSAKVLFDFLRKHYPDGNYKAVYESGFTGFSTYYALQEFNIDCVIVHAADVPSTQYENVLKTDRIDAAKLARALKKGEILRPIYIRERDNIDDRAVLRIRKSIQKQIAANKTRVKFLLYNNGVKIPQQFRKRNSYWSKAFTSWLLKDVKLLSSTRVSLDLLVKQVLEMRKTLLEASRELRKLSESDRYRHNFELLLTIPGIGPHVAMSILTEIYDVKRFSNERKFAHYLGLIPTSHNSGEHTSSGFKTFRGNKHLGPMIIEASWVSIQKDSGIGAFYSAQLKKMKPQLAIIKVARKMSNIIYSVLKNENRYIPYQWDN

SEQ ID NO: 133558 - protein, 355 aa, unidentified
MSHDVKYIGMDVHKEAIVIAVQNESGKLVMESVIETKASSILQFLHGLRGELHVTWEEGTWAAWLYDLLQPHVQHIVVCNPRRNALLKEGNKSDKVDAGKLADLLRTGMLRPVYHGEKGLRTLRELGRSYQTISKDLTRVMNRLKALYRGWGIPCAGTQVYAARAREEWLSKIPHTGVRRRAELLYQQLDGLQALRRNVRPELLAESRKHKAAKLLRQIPCIGPIRAARLIGLMQTPHRFRSKRQFWTYVGLAVVTRSTADHEVVDGVLRRSKRPVSTRGLNRNHNHLLKRVFKNAATSACHSGPFKAGYDVRVTQGMAPSLARLTIARQLAATTLAIWKRGEQFDPERKKQQAA

SEQ ID NO: 133559 - protein, 489 aa, unidentified
MKGQRAKRNQNNQKTSKKTSGKATPGKWDEMNRKQRREMMRQMQSGDLSLEVIHPDASGIDIGNESHYVAVPPSRDSQPVRCFGCTTAELKKMAEWLTQCGIRTVAMQSTGVYWIAVYDILEAAGMEVYLVNARETKNLPGRKTDVQESQWLMKLHTYGLLRNSFRPSQEIRILRTYWRQRHDLVRSAGRHIQRMQKALTQMNIRLANVISEISGMTGQAILKAILDGQRDPRELAAYRDHRVEASEEEIAQALEGNWQEDQLFVLRQEQAGYEFCQKQITECDQQLAQYLARLEDRTQGATLPEETRKGRLNKKKKRPQFNLREELFRMTGTDLTQIDGIDVTVAMTVVSEVGWDMSKWKTENHFVSWLKLAPDNKISGGKVIGKGRLPTNNRATTVLRMAATTLRESDSYLGAQFRRFRTRLGPPVATKAMAAKLARLIYRMLRYGMKYVNQGAEFYETQHRKRQVIHLKRKAAQLGLQIIEVADAA

SEQ ID NO: 133560 - protein, 434 aa, unidentified
MHPRDEPVEVSGDVIFVGDDWSEAHHDVYVCDPDGEQLARQRIAEGLDGIARLHGVLAEHADDPSEVVIGIETDRGLWVTALAAAGYTVYAINPKAASRYRDRHSLSGAKSDAGDAKMLAELVRTDRHNHRVIAGDSDLSDSVKVLTRAHQNLIWDRTRATNRLRNALREYYPAALATFPDLADRDALAVLGRAPTPQQGAALTRARVRAALKAGGRRRNIDARAGEIADGLRVDALAAPEPVVAAFAATTTAAVAVIAELNTQIAALEQQLGDHFEQHPDAGIYRSQPGLGVILGARVLSEFGDDPTRYADAKCRRNYAGTSPITRASGNRSVALARYIRNRRLADAIDQWAFCSLSNSPGARAYYDVHRGNGDSHHKALRALGNRLVGILHGCLRTHTRYHEHTAWAHRPENNLTDATPDTPTSEEKLRDAA

SEQ ID NO: 133561 - protein, 419 aa, unidentified
MNSSKTKKVKIINEKTMIAALDIGKGAHFAYFRAPNGKDIKPFSVYNFKKSFDTFWMRLCQFKREQGLEEVVIGFESTGPYAEPLFHYLRKKPAMLVQINPMHSKRVKELTGNSPNKTDTKDPRVIADVISLGHALTLVVPEGAAAHLRRLTQARERAIKSRTAMVNQLQHLLFVIFPEFLKIFKNISTKSAMYLIKNHPSPESITSAGLESLTEILRKVSRYQLTHGRIKELFEAAKRSIGIDEGKESILMEIEHLASNIAHERCFIDELEKQMAKHLDQIPYSHSILSIKGVGLITVAGLIGEVGDFKKFHTISEMMKLAGLDLFEVSSGKHRGKRRISKRGRSLMRKLLYFAAINVVKSHGIMHEQYQEMLNRGMVKMKALVAISRKLLGLIFALARDNTVYVENYSTIHHLKVAA

SEQ ID NO: 133562 - protein, 400 aa, unidentified
MRVVFGIDVSKVSSEVAILVNCEKVHNYTMSNDAIGFSRLLGDLKTVHKPEIIFEATGVYSRRLQAFLDEHGYAYTRLNPLEAKKQLDSLRVRKTDQIDAEKLAQSQFVLNRKPTYVQEEVYQNLRDLSRFYQNPTEDIVRAKNRLHKVLQVTFPELENILSTPSGEQYWNLVIAFPCKDFVLDLSKDELSESIHQSTSKRISDKRVVYLAEKLIALANQSYCAVKKTSPMLEEVRYYTKELLRLSEQRQAVLDEMVELAQPLPEYDILLSIPGIAETTATSIIGELGDIRRFQSANQINAFIGIDLRHYESGNFLAKEHITKRGNPYARKILFKCIHNIASANHTNPCHIADFYKKRKRQSQTTSTKPHTIASIHRLIRTMYYLIMHNKLYDYASTQNR

SEQ ID NO: 133563 - protein, 435 aa, unidentified
MEVNGKFAKNDKLSFITDDMLIVGCDIGSETHYIRAIDVRGRELSPGAFEFSNTSEGFENAKAWVLALAAKHDKKQIVLGLEPTCHYWFALAAWMISNGISVVQVNPYAVKQSKEIEDNSQLKDDRKDPKLIANLVKDGNYGMPYLPEKVYADMRRLSMFRDQFTEDRIRNINRLHRELKIYFPEYMDAFGKIDGAFTLEVLKVSAIPTDITALGAEGMKNIWHNAKLRGRGYSRANEIVNYAEKSVGLTDGTDAGREAVKWYAEQILRLDEQLAEIESALHEKCREIPYAENILAINGVGENILAGILAELGDISRFDDVKEIQKLSGMGLVACSSGKHKGQTKISHRGRKRLRYWLFQAAKSAVSHADEFKQLHEYYTTRSNNPLKKMQSLVVIACKILRVIYTILKTGTTYDSQKLLKDIKHPAASQAPMAA

SEQ ID NO: 133564 - protein, 474 aa, unidentified
MKDYFMGIDVSKGYADFVILDKKKWVVEQNFQLDDTFEGHTKLYNVLETFLVNHPKGVLYCGVESTGGYENNWYHSLHTYQKDLNVYVARVNPRGVKHHSEAGLKRNKTDKMSAQNVAEYLIVHREKVNYEKEDYYASARKQWKFVALLKKQKCQMLNHMESVLYSAHTQLLKYCRNGIPQWVLNLIIRYPTALQLSRARIAAVSKIPYISLERAGTVVADAKRSVASATDNVIKTLILNLAGEIVHLQGVIKEQTRMMVELCNLPEVALLKSFQGIGDFSAIGLLIEIGVIERFPTIKHLASFFGLHPVYRISGDGMGAMRMSKQGRTQPRWILFNVALSAITCNPHIRSIYLELVENGMNKMAAIGVIMHKILRIIYGMLKNNQPYQPEIDQANRATLREITRTQAKDKSRRYQTLDRNAPISRRQKKKRNEREQSHNDHIIKSGIIAPANQELKIPQELLQIIQRFASRNL

SEQ ID NO: 133565 - protein, 337 aa, unidentified
MKYCGIDLHSNNCVVIVSDETDRIVFSKRLPNELGRIREALELHREELTGLVIESTYNWYWLVDGLMDAGYRVHLAHPSAIKKYEGLKHSGDFADAAYLAQLLRLGLLAEGYIYPREERAVRDLARKRMQLVRYRTAQILSIENIVTRQTGARLKGQAVKRLRAEQVDEFAFAPDIALAVEANRAVSQALGQQIEALERRLKERVSLRPEYRLLKTVPGIGETLATTIMLETGCIGRFAQVGNFSSYCRCVDSLRESNGKKKGEGNSKNGNKYLAWAFVEAANFALRYCAQARSFYDRKKSQTNRVLAIKALAHKLARACYHMLRDQKPFDVSRCFG

SEQ ID NO: 133566 - protein, 416 aa, unidentified
MQVLYERCAGLDVHRDTVVATVRSPGKRRGSRSTQTRTFRTTMRALAELSDWLACESVELVGMEATGVYWKPVFTSLEDRFTCWLVNAAHLRNVPGRKTDVADSVWIARILECGLVRPSFVPVQEFRELRDLVRARTAVSQERVRVIQRLEKVLQDAGIKLTSVASQVWSKTSRAVLEALLEGVTSPVELAALAKGRLRSKREALEEALEHRFRVEHHGVIVRGLLAHIDSLEQRLDAYDAEIAARLAPHEEILELIRTIPGVGLKVAQVMAAEIGLDMSAFPTSAHLASWAGVCPGNHASGGKRKGGRSRPGPKWLKVALTEAAWGAVKAKDTYLSAHHKQIAGRAGGYKAIGATRHDIVVAYWHIVHDHVPYRDLGPDWAARRFSPAHRAKRLTAQLEALGYDVTIEPASAPPA

SEQ ID NO: 133567 - protein, 409 aa, unidentified
MIYCGIDWAERTHDVALVDDSGRLLAKRHITDDAVGYKILLDLLAEYGDTAENPIPVAIETSRGLLVAVLRTGKRQVFAINPMAAARYRDRHSVSRKKSDPGDALVLANILRTDMHAHRPLPQDSDLARALAVLARAQQDATWNRQQISNQLRSLLREYYPSALAAFEPWKNGLCRREAQELLRAAPTPARASRLTRKQLQAALKRAGRQRGIEAEAERLRDVFRADWAHQPPLVEDALGKQMLALLVQLEAACTAADNLSEAVEEAFPQHSDAEIILSFPGLGVQLGARVLAEIGDDRNRFADARGLKAYAGASPITRASGKKSSITRRWVKNDRLNHAGYLWAFSAITASPGAKTHYRRRRDEHGDWHAAAQRNLFNRMLGQLYHCLQHRKPFDEHTAFPVDLAAAA

SEQ ID NO: 133568 - protein, 400 aa, unidentified
MIDVSDIGAFLGLDVGKGEHHATAVTPTGKKAFDKRLPNSEPKLREVFGKLQAKHGTVLVVVDQPASIGALPLAVARDMGCPVAYLRGLTMRRIADLYPGEAKTDARDAFVIADAARVMPHTLGSVELEDETIAELEMIVGFDDDLAGEATRISNRLRGLLTQIHPSLERVLGPRVQHPAVLKLLDQFGSPAQIRKAGRRRLVTLIRPRAPRMAERLVEDIFTALDEQTVTVPGTEAAALIVPSLAGSLAAVLDQRKLLAGRIEELLEAHPLSKVLTSMPGIGVRTGARILIEVGDGSTFPTAGHLAAYAGLAPATRSSGSSIRGEQPARRGNKQLKRAFFLSAFAALGDPASRTYYDKKIAQGKHHTQALLCLARRRADVLFAMLRDGTFYESQPAKSG

SEQ ID NO: 133569 - protein, 364 aa, unidentified
MKRKVYVGMDVHKETIQLASLPSNTKALVKEQQIKHEEGQIKKFIQKLKSEGTEIHCCYEAGVTGYPLYRYLKTLGVNCIIAAPGKIPRQSSDKIKTDKRDAIKLAKLLRSGELESIHVPSEEDEAVRDYLRSRDSLRLDLGRNRQRLMKFLLRKGIKYSTTKYWTASHYKWLNNLHFENEILQATFNDYYSRVRVQEENLKAMDQKIREIAESEPYREKVGILRCFRGVDYLTAMFLLSEVNDFKRFKTAGSFMSFLGLVPGEYSSGSKRKQTGITKTGSPRLRRILTEAAWQHRFPGTGSKVVVARRVGQSALVVSLAEKASLRLHKKFKSMQLRGKTPQVMITAVSRELSGFLWAAMNLVA

SEQ ID NO: 133570 - protein, 391 aa, unidentified
MIYIGIDVAKDKHDCFITNSDSEVLFKAFTIANNLDGFNDLYQKIESVMDDVTKVKVGLEATGHYSYNLLGYLIDKGLPTYVINPLHTNLYRKSLSLRQTKTDKVDARTIASMLMSDVNLKSYSDISYHNEELKSLTRYRFDKVKERAKLKTSVSRLVCILFPELEKLVPTLHITSVYALLSEFPGAKHIATAHLTRLTNLLSEASKGRYGKDTAITFRDAARASIGSNMPAKSLELKHTIKLIQELDSEIDEIEKEIKIIMDEINSPILSIPGINYRMGAMIIAEIGDFNRFDSPDKILAYAGFSPSTYQSGQLDGAYAHMEKRGSRYLRYALYNATKYVCHWDPTFAAYLAKKRAEGKHYNVAISHAVKKLVRVIYHLEKTKQQYIKAA

SEQ ID NO: 133571 - protein, 423 aa, unidentified
MEVIHERVAGLDVHQATVVGCMRVMAAGRAARECRTFATTTDGLLGLLAWLAENRCTHVAMEATGVYWKPVWNILCEGDFELILANAAHIKNVPGRKTDMNDAMWIADLLACGLIKASFVPDAPMGELRTLMRTRKQLGREQTRHVQRIGKALEEANIKLTNVLSDLMGASGRRILEAMIAGVRQPHKLAALASPRIKATPKELYDALHGRLTDHHQFLLKLHLQQWDALDASIREIDREVDARIARIDQEVKSGRAPFRDLIGLLCTIPGVAKLSATSILAEIGHDMSRFPTAGHLVAWSGLCPGQNESAGKRKSSRLRKGAPWLKTMLVQCAWAAKRKTDSYYRAQFYRLQSRRGPQKAICAVAASILTAIYHMLKDGTEHRDLGADYFDRRQPERKAKRLVAQLAKLGFTAQLQPAKQAA

SEQ ID NO: 133572 - protein, 372 aa, unidentified
MEQPSRLFIGLDVSKLKISVAVADGERGGEVRFFGDIPSDPASVSSIVHKLAKRGAKLHFCYEAGPTGYELYRQLTEMGHDCTVVAPALIPKRPGDRVKTNRRDAVSLARLHRAGELTAVWVPDRGHEAMRDLVRAREAAQEAQKRARQQLQSFLLRHGRVYSGRSSWSLAHRRWISTLTFEHPAHFIVLQEYCQAIEDAEVRLKRLTDLISETVKSWTMAPVVEAYQALRGVSLMAAVVFVAEIGDIRRFENPRQLMAFLGLVPSESSTGEHVKRGGITKAGNSRARRMLVEGAWAYRFPARVSRSKQAQLEGLPRTVCEIAWKGQLRLCSRYRNMILAGKHKAIAITAIAREMAAFLWAIGQEVQPAHHA

SEQ ID NO: 133573 - protein, 420 aa, unidentified
MRNAGIHANSLLEVRRMYNAVGIDVSKSKSTVAVLQPGGTVIRKPFDVSHTSQNLNELADYLSSLDGTTKIVMECTGRYHEPMVKALSEAGLFISIVNPHLIKNFGNNSLRKVKSDPADARKIARYTLDNWTELRQYSGMDNTRTQLKTLNSQFSFFMKQKVSAKANLIALLDNTYPGVNKLFESPTREDGSEKWVDYAYSFWHADCVRKIGLKAFTERYMSFCKKHHYIFQQDKPEKLFNASKELVAVFPKEKTYKLLIQQSIQQLNLASEHVERLRREMNELASTLPEYSTVMGIYGVGKTYGPQLIAEIGDVSRFTHREALTAFAGVDPGVDESGQHKSKSNRASKVGSARLRKTLFQIMTTLLQNAPEADPVYCFLNKKRSQGKPYYVYMTAGANKFLRIYYGKVKECLRNLEQTE

SEQ ID NO: 133574 - protein, 387 aa, unidentified
MPASGPRPDQVAVQVNLAAIFVSLELSRSTWLITSLVPGGGDKMSKHSVHGGDIAELMTHLAKLRDKAHARAGASFPIITIQEAGLDGFWIHRVLERAGIESHVVDSASILTSRRRRRAKTDRIDGEALLRTLLAYKRGEPRVCTMVRTPSPEEEDRRRLCRERKTLVAERVAHVNRIKGLLFAQGICDYEPLRSDRRQQLEALRTGTGCPLPPHLKAQIGRELDRLELLLEQLKAVEAERNALLEPANDAASIAVQALAGLRGIGPEFTAVLWSECLFRSFRNRRQVAAYAGLAPTPWQSGSVRHEQGVSKSGNPRLRSTMIQLAWLWLRHQPTSELSLWFRERVKRNGGRGRKTAIVALARKLLVALWKFSSSGVVIEGAMMKTA

SEQ ID NO: 133575 - protein, 417 aa, unidentified
MIQAVVERCAGIDVGKTFVVVCVMTGAANEEPHVERRRFGTFNEDLERLRLWLKDERCTHAVMESTGSYWKPIFNILEESIEVILTNARDVKARKGHKTDWKDSWWLAHLLRHGMIRPSFIPERGIRELRDLTRRRKQLTYEATGVKNRISKVLEDANIKIGSVLTDIFGVTGRAILEALLDGNMNPSEMARLARKSAKRKIPEITASLTSHRLTETQRFLIRQSFRHLQFLTSCIKELEEEIRRRILSVPEYREASSLLQTIPGIREDAAAAIIAEAGVNMGQFPSAKHLSSWVGLCPGNNKSADLEKAGPTTKGNAWLRALMVECAWAAAMKRGSYFRSRYQRLLPRTGKKRAVVAVAHSLIKLIYEMLSTRTPYRKAAEEVEYERTRMQYVRHHLKALARLGYIVPELSSPPSG

SEQ ID NO: 133576 - protein, 427 aa, unidentified
MNFYNHRKLGFIYVGIDCHKATHTAVIISPFNDKLDTLTFKNTNEDFNKLLDMVSKYTSKDVSSIFGLEDTKHLGHSLCEFLLSHNQVVKHVNSNYTYNERKKHPIIDKTDELDAECIAKVTLDELDNLPDAKDDEIYWTLKQLIKMKRTISKNNTKLKNKLHAQLLHHYPNYKEFFSKIDNVSALDFWETYPSPEMIKDLSPEQLKEGLNTKGKFPLTKANTILHLIKDYDYKETIYQDNRNMLIKTIVKNIKANNKQLEEFEKEIIKLYDKIDIKLHTFIGLTKITSAEIVSEIGNIKRFSNSSKLAKYCGVAPVNFSSGNHDKTVRNEYGNRHLNGYIYYLACRSICTGKGSNTPHNPIFLDYYYKKIEEGKTKRQALTCVMRRIMNIIFNILSKGVPYEHPDELNKKCLDNIKQKNEEKTDKV

SEQ ID NO: 133577 - protein, 317 aa, unidentified
MRASAAFFVGIDVSKQQLDIAVRPSGESWTVAHEEAGLSALVARLRGLAPTLIVLEATGGWEVPVTGALAAAALPVAVVNPRQVRDFARSTGLLAKTDRLDAQLLAQFAEVVRPAPRPLPDAQAQELTALLQRRRQLVEMLTAEKNRWPLAARRIRPQLQAHIAWLHQQIAQFDEDLRQLIRSSPLWREKDDLLRSTPGVGPVLATTLVAALPELGTLSRRQIAALVGVAPLNRDSGTLRGRRTVWGGRAQVRAVLYMSTVVAVRHNPVLIAFYQRLRAAGKAPKLALTACMRKLLTMLNAMLKHHRRWAPVRAQHA

SEQ ID NO: 133578 - protein, 368 aa, unidentified
MSKSITFVGLDVHKNSIAVALADAGRNAEVRNYGIIGGALDDLDRLIKKLTATGKELHFVYEAGPCGYDIFRSLTEMGFDCAVCSPAHVPKSPAERIKTDRRDAMMLARLHRAGELTYVFVPRADDEAMRDLTRAREDAVKAQRVARQQLGGMLLRLGYKYSGKNWSLQHFRWLADQKMPLPAQQVVFQEYIHAIKETTERVGRLTSQIEAHIPEWRMAPVVMALHALRGVSLIVASTTVAEIGDLARFENPKKLMAFLGLVPSEHLSGEKKRQGKITKTGNGHVRKVLVEAAQSYCHPARVTRHLLKRQEGITQEVRDIAWKCQTRLCARFRRLMATGKNRNTVVTAIARELAAFMWAIAKQTPIAV

SEQ ID NO: 133579 - protein, 431 aa, unidentified
MKVLYERVAGIDVHKDMIKVAIRSPGEKPWTRRTEILEYRTFFGVLQAMARELRRRGVTHVVMEASGVYTEPVYYALCEQDFTEVAVINPAHAKALKGHKTDAKDCARLAELFECGLLRGSYIPSAELKEVRDLTRYRMKTVQARTSEIQRLGKALESAGIKLGSVASSITGASATAMIEALIDGERRGGVLADLARGRMREAGKLADLSMALTGRFTEHHALLCRLHQDRIAGFDAAVAGLDERIAGKVTRWQREAGLLTSVPGFGDVVAQAWLGEIGPAPHRHFATCEKLASWVTLCPGNNISARKRKHGRTGDAGTYIKPMLVQAAWNAIRARGRLQARYNRLVRRFGGDKNPGAKKKAIIAIAHTLLKIAYQVLKSGTPYQDLGADFYTRRESPEQKQAWLERQLQKLHPGCTIAITISPPEAALGA

SEQ ID NO: 133580 - protein, 423 aa, unidentified
MLEEVEDHQDIIVRVAALDIAKASLVCCSRVPGPAGTGKRSQEVMSYPTMTRSLQVLADRLMDLRVSRVVMEATSDYWKPVFYLLEAYGFEVWLVNAKDVKHLPGRPKTDRLDAVWLCKIAERQMIRPSFVPPPPIRKLRDLTRYRAALISDCTGEKNRVEKLLEDAQIKLSVVASDIFGVSGRDMMAQLIAGQRDPKVLAQLARTQLRVKISQLEEAFVGRFSDHHAFLLTRMLARVDTINADIADLDSRIEAEIAPFASAVARLDEIPGVGTRVAQVIIAEIGLDMTRFPTPGHLTSWARFAPSVKESAGRKKGKGTTGHGDAYLAGALGQAAVSAAKTNTFLGERYRRIARRRGKQKAIVAIGRSILVIVWHLMSDPDARFHDLGPDFYDNRLGPERSKRNHIRHLEALGYKVTLEPAAA

SEQ ID NO: 133581 - protein, 430 aa, unidentified
MKSNTQNKKIEAITEKTLVIGIDVGSETHYARAFDYRGIEYSKKPFKFSNTEAGFVTFKEWILDLKEKHEKDKVVPGMEPTGHYWFNLGKYLQDNEMKPVLVNPHHVKKSKELDDNNPTKNDRKDPKVIAGLVREGRYMIPYLPDGVYADLRTASNIRFQLQAELTRIQNRISRWFNIYFPEYKTVYGKPDAKSGMLILKEAPLPEDILTLGIDGVDQIWRDAKMRAVGKARAKTLIEAAEHSVGSKEGAVSARMEIRMLLEDYESRNMRLQEVMVLIEELVKQIPMAEKLLEIKGVGIKTVSGFLAEVGDISRFNSPKELQKLAGLALVENSSGKHKGETTISRRGRKRLRYLLFEVAMSLVAKNPEFRELHNYYTTRRLNPLKKMQSLMAIAAKLIRVFFAMLTKGVDYDPKKMVSDIKRPAVYLQAA

SEQ ID NO: 133582 - protein, 322 aa, unidentified
MAMLSFGGIDVSKDRLDVAVLPEEECSSVPNDAAGWAELVERLRGFSITAIGIEPSGGYERGAMRALLAAGMPVRQVNPFKLRQFARASGVLAKNDPLDARMIASFVTIMPTRPAQRQTPAAERLAEMLAIRRQLSTEKVAAENGSRLLEDAMLQRLSRRRIVRLAADIDLLDKRIVEIVATDDALVHRYRLLTSMPGVGAVLACTLIALLPELGRMSRKQVAALVGVAPYAFESGTLKGRRCIWGGRAHVRQVLYMAAMSASNWNPVLKAFHDRLTAAGKLPKVVIVAVMRKMITMLNAMVRDDVVWADRLSGRHVLPTAR

SEQ ID NO: 133583 - protein, 340 aa, unidentified
MNATTYGLDVAKRVFQMYWVDAQTGEIANRRFGRDELIGFLVQRPAGRVALEACGSGHWWARKIKALGHEVVLLHAKFIRPFVQTNKTDAADARAIWTAVQQPEMRTVAAKTADQQAMLSLHRMRALLVKLRTMQVNQLRGLLYEFGATFRAGRMAGLAEIQVRMAELADTLPEAMLCSLQDQLKRIDALELDIDRLEQRIGAWQKQEAECRALAAVPGIGKLTATALVAMIGDAKTFKSSREFASFLGLVPRQSGTGGKIRLGSISKRGDPYLRTLLIHGARSVMYHAKVPTRWQKEIQARRPANVAAVAMAHKMARTAWAILAHGQAYRKDYVSVKPA

SEQ ID NO: 133584 - protein, 336 aa, unidentified
MIVLGADTHQRSHTIAAVAAATGELLGEKTVQVGARGFASLLVWARGLEGERIWALEDCRHVAGSFERFLIARGERVLRVPTKLMAGARRGGRERGKSDSIDSVAVARAALREGLDELPVAQLDGPELDIRLLVDHRERLVRQRVGLNNTMQWHLHDLWPELQLPGSSLFYGNWGPRVARRLARAEQTMRVRIARDELRRIRERSQTIKALEAEIAGLVAQIAPQLLTEPGLGPLTAAKLVGEIAGAGRFSSDAKLARAAGLAPIPVSSGKTNRHRLDRGGNRQINAAIHRIAVTRGRCHPETRAYLDRKRAEGKSTREAIRCLKRHLARRIWHLL

SEQ ID NO: 133585 - protein, 389 aa, unidentified
MLGKGQLNHDFNPRDYDIFAGLDVDARSISASFGESDGMIRSLRMPSRAENLLAYVRKQFPRQRVAFAYEAGPTGYGLYDQLIAAGHRCLVVAPSMVPSAPGQRVKTNRLDGLKLMTGLRGGQLKSIQVPSTAYRDLRHLTQLRDTAVRQATAAKCRIKALLLFEGIPFPECPVTNPWSNRVIQQLKGLPCAPAVRFKLDQLLASLAFGREQVAQTTREIRRFCTQEPELNRCRAYLTSIPGIGEIIASQLLARIGDWRHLRHVRQLAAFVGLVASEHSTGEDIRRGSITRSGDGRLRAKLIQGAWSAIRRDGELREFYQRIYQRHPQHQAARKAIVAVARKLTTRIYAVLVEQRPYQIRGQDGVLQEEAVRPLERLDASQNPGRVSLS

SEQ ID NO: 133586 - protein, 397 aa, unidentified
MRAKVAQIGLDGHRTFSNATARDGEGRVMWRQRLEHADRPALAEQLRQWPAGTPVLLEATFGWGWMSDELVDAELEPHLVSSNKVAAWRDARGIAKSNRTDADLLSELEMSRRWWEVWLAPVEVRDQREWLRYRMTLVALSTGVKNRIHAVLHRHGIVNQESDLFGRSGREFLKLLVAPGDATLRDSSRAVLAGYLKLLDQLRGQIAAVTRELRRQLERHPAAGRLRSLPGIAWILAYTIVAEVGRIERFPSAKHLASYSLLVPRSYDSGDDDGSDPHGRHVGHAGRRTLKWAWIEAAHGAVRWGGRFREIFDRHSDGGKKNRGRAYIAVAHELCRLAYSLWKQDRDWSEEPPQRPGQRPAQRQCGKRGTRVKQQHRTRPGTGQPDHPMVAAVTTNS

SEQ ID NO: 133587 - protein, 307 aa, unidentified
MDVSKDHLDVSVRPDGTHLLVPNTDDGLDQLVARLGPLGPVLVVLEATGGYQRRAVAALTLAGFPVAVVNPARAREFAKALGRLAKTDAADATVLAEFAEKVRPPARPLPDAAARQMQELLARRGQLVGMRTMERNRLAAASDRAVRRSIEAHLAWLAGQIDAAEEELDAAIEASPVWRAKDELLQSIPGIGPGVARTLLFELPELGRLSREQIGALAGLAPVNRDSGRWSGKRFIAGGRAVVRTAVYMATHAARRWNPALKAFADRLAAAGKPPKVVLIAVARKLLVIANAILRDQQPWRDVAAAA

SEQ ID NO: 133588 - protein, 401 aa, unidentified
MNTGHERLWVGIDVGKGHHWAVAVDDMGEAVFSRKIPNDETEILQLIATACDAAEHVQWAVDLRGKTATLLLVLLTAHGQQVTYVPGRSVNRAAEGYRGEGKTDAKDALVIADMARIRRDFTTITIPPEQVCTLRLLTANRRDLIAERVRLINRMRDLLCGISPALEGAFDYARSKGAVTMLTRYQTPAALRRTGVKRLATWLQRRKVRNPQNIAEKAVAAADRQHTALPGETRAAALLGGLAHQLLALDERIASNDREIRETFRSDDRAEIIESLPGMGPILGAEFVAIAGDLSTYRDAGRLAAHAGLAPVPRDSGRRTGNLHRPKRYDRRLRWVFYLSAQSAMQYPGPSRDFYLRKRDEGLRHVQAVLALARRRVDVLWAMLRDHRPYVLAPPTVPASG

SEQ ID NO: 133589 - protein, 385 aa, unidentified
MGKVVIGVDPHKRLNAVCVVDSRGQVVASDQFDNSAAGFRELKKFWRQWPQRSWAVEGANGVGKHLAQRLVAEGETVLDVSTRRAALARVHAGGNGRKTDDTDAESIAMVGLRNPGLAEVRPDALTVELKLLANRRDELVSMRIQAACRIHRDLVVVLPGGVSKRLSARYARQVLARVRPRDELGRLRRQLLADQVSDLEAIDRKILAINKQIRAKIKAAKTTVTDVFGFGPINTTRMLGDVGNVARFKSRHHFASYNGTAPTVWGSGGPSQPAVNPKGNRKLNHAIHLAAVTQVRSKTSEGHAYYARKVAEGTTPTEAMRALKRRISDTVYRHLVADAAASAERGPGGQVGATPTASATGSTPTAGSSARPQPGPRSKATPPAA

SEQ ID NO: 133590 - protein, 410 aa, unidentified
MEVLHAHCAGLDVHKDSVVACVRHMADGKVTAPVKTFKTTTAELMLLSDWLSAEGVTHIVMEATGVYWKPVWHILSDGEFELVLANAAHVKNVPGRKTDVNDAMWLADLLAHGLIRPSFVPDEPTQQMRDLLRTRKQMVRERSSHVQRIQKTLEDANIKLDSVVTDILGLSGRRIIEALITGQTMPQALATLAHRRIHASADELEAALRGRVTKHHRFLLKLHLDQIDAFDAAIAAIDQEVSANVEPFRAAIELLSSVPGIGNLAATVIVSEIGIDMSRFPTHGHLISWAGLCPRNDESAGKRRSTKMKKGAPWLKTTLVQCAWAASRSKGTYLQAQYHRLRSRRGSKKAICAVAASMLTAAYHMLKNGTFYEDLGANHFDRREKGKHILRLVNRLQSLGYVVEITPRAA

SEQ ID NO: 133591 - protein, 402 aa, unidentified
MYNAVGIDVSKGKSTVAVLQPAGVIIRKPFNVNHTSSELDELAKYIGSLEGETRVVLECTGRYHEPVVKTLSEAGLFVSAVNPHLIKNFGNNSIRKVKSDPADAKKIARYTLDNWIELRQYSSMDNTRTQLKTLNSQFSFFMKQKVAAKANLIALLDNTYPGVNKLFDSPVRDDGSEKWVDYAYSFWHVDCVRKIGLKTFTERYQAFCKKHHYNFQPAKPAELFLASKDLIAVFPKEASYKLLIHQSIQQLNLASSHVEELRSKMNELASTLPEYATVMGMYGVGKTFGPQLIAEIGDISNFSHREALTAFAGVDPGVDQSGTHNSKSNKASKCGSNRLRKTLFQIMSTLLQTAPEDDKVYQFLVKKRAEGKPYYVYMTAGANKFLRIYYGKVKECIRNLEQ

SEQ ID NO: 133592 - protein, 325 aa, unidentified
MTASLSSDNSFIGIDVGSTSFEAAWHRGGCAQYANRPDAIAAFLARLRAEPGIQRIAIEPTGGYEKLLVTALRRAELPVEMVHTSRFRAYRQLIGVRAKSDSSDARLLAAYAAAPDEIRRQDNRVVLPEDADREELAALGVRRDQLNRMIHAESCRLANVRSTLVRQGISRHLEALRQEVREIGVAMKAIVRQRQDLSRQKRLLRTIVGIGEVTAVMCLARAPELGRISNKAAAALIGVAPFVHESGGLSAPARIFGGRADVRRVFYMAAVTASQHNPVLATFYEQLIAAGKPPKVALIAVMRRLVVFANGVLRSDEPWKRGMAP

SEQ ID NO: 133593 - protein, 427 aa, unidentified
MSYRIAAVDVHKKMLAVVVTDVAGEGEFQFERRKLGATPGELHVLAQWLERQGVEEVVMESTAQYWKPVWGALELYWKAARQRREGAPKMAGTLHLCQAKSNHGPRGRKNDFADGERMIKRLVAQELVLSFVPEPEQRLWRTVTRRKYQLTRAKVVFKNQLESLLEQAHLKLSSFVSDLLGVSARRMLKALAEGETDPATLAAMADCRLRATPEQLRDALGACAQLSEVFRRLLKMTLEELQLIETHIEQLEREAMGLMQEHQGAVQRVAEVPGFGPDSAMQMIAEVGPEAASFPRDKSLSSWVGVCPGNEESAGESQSTRSPKGNRHMRRLLNQAAQSAVKVKGSIFEVTFHRLLPRLGYKQAIWAIAHRLCRLLWLILHNGVRYEERGPAVSAKSKRTRTARMIRELKKLGYRVEGGPLAAAARA

SEQ ID NO: 133594 - protein, 344 aa, unidentified
MKFTRCGLDIAKLVFQVHGVNEYGVVKGRKTLPRAKVLEYFAQLAPCLIGMEACGGAHYWARALSKLGHTVRLMAPQFVIPYRKRGKNDANDAEAICEAVGRPNMHFVAVKTEEQQSVLMVHRARNLVVANRTALVNQIRGLLGEFGMVVAKGVGTLRAQLPRMLEDAETGLPALAREMLSGLLEQLRDLDQRVRQYDLKIRQLAQQSEPARRLMQVEAIGPQTATALVASMGDPHVFESARNYAASLGLIPRQDSSGGKTRLGPITKQGDRYLRTLLVHGARAYLRVVDKKTDGKSVWVRRLKERRHVNIAAVALAAKHARIAWAMLAKGAEYRPMQPEEVAA

SEQ ID NO: 133595 - protein, 324 aa, unidentified
MSKCKEFFGIDISKDVFDVVDASDKHHQFKNDHSGFKEFSKLLSEKSHCVMEATGSYYQGLATWLYDSSILVSVVNPLSVKRFIQMRLKTSKTDKMDALMIRLYGESEDPKLWTPPSKLIIEATELHKLIELLVRQRAGLKNRLHALESKGITRSLVVTSVLRQIRNLSNEITELELKLEALIKEYEPDLLTRLCSIPGIGKRTAIYLIVLTRGFEKFESSRQLISYFGLNPIIRESGSSIRGKSRISKTGDNQVRKLLFMCAFTACEHNKACREIYQRLTAKGKSKKLALIAVANKLLKQSLAIAKSGLYYDENYRSVNVTLG

SEQ ID NO: 133596 - protein, 387 aa, unidentified
MIYVGIDIAKQKHFAAAMTADGEVLIQPFGFNNDSEGFSLLMSKLKTLDKENILIGLESTSHYGENLICFLYNMGYHIAVINPIQTATLRKSNIRKTKTDKVDTILIIKSMILNNHRIFTQADIESIRLKSLCRFREKTKKAKARLKIQLVSYVDIIFPELQYFFKSGIHIITSYELLKKHSNPNDIAALHLTYLGNLLKKASHGRFGKEEAIALKGLAKSSVGTGDVYLSIQITQTISQIELLEKQINELDESIKSIMLEMDSVILTIPGIGFLNGAMILGEIGDISRFANPSKLLAYAGLDPTVNQSGKFNAKTTRMSKRGSKLLRYALINAAWNVSLNNKTFNDYFMLKKSQGNNHYAALGHVAHKLVRVIFKILKDNVAFNLD

SEQ ID NO: 133597 - protein, 377 aa, unidentified
MSSSIIWIGMDVHKDTVMVAVFTDDAREPEIVQQLPNDPRKLKRFFQRWGRRGEIRSCYEASGAGYVLQREITEWGHDCEIVAPSLIPIRPGERQKHDRKDATQLARLYRAGELVTIRIPSAAEERVRDLVRCRQCFQREILRSRHYVTKFLARRGLVYREGTNWTRRHRSWLQSLFQQGGLEPEDRSVFSEYLALLDYKVSRREDLDGQIEKLAFSPAYKPKIDRLRCFRGVDTLAAMTLVTEIGDWRRFERPGQLMAYLGLVPSEYSSGDREHRGPITKAGNSRCRHVLVQAAWKYKHRPTVSVDLKKRQSGQLPQAIAHAWKAQHHLHKLFHRIAARKSSRIAVVAVARELVGFLWAVMQELETEQAVTLSTAA

SEQ ID NO: 133598 - protein, 390 aa, unidentified
MLKYSLGIDVSKASFHACISTIDIKQAVKVHRSGSFSNNERGFNELLGFIASEHKDISLPLVVIMEATGIYHERLAMFLYLQHFAVSIVLPNKAKSYIASTGTKTKNDSADAKALSRMGAERALQLWEPMGEFFYTLRGITRQYQRLQQIKTMLCNQGEAIEYGAQQIEAVTASNKAMIASVDESIAQLQKAISQHLASDKEVARKITHLTSITGVGELTVAVVLAETNGFALFNNNRQLISYCGYDVVDDQSGTRVGKTKISKKGNSRIRRCLHMPAMCVVRWKVKVFGDLQERIYERTGVKMKGYVAVQKKLLTIFYTLWKNNTAFDDQYWNRANTAKTTSDGEAGHSSRYSSPEENKEAEKKLAPHRGRAKQGMQPSDGVGVRILSV

SEQ ID NO: 133599 - protein, 355 aa, unidentified
MDSRKYIGMDVHQATISVAVRDSAGKLVMESVIETKASTILEFIQGLRGSLCVTFEEGSSAAWLYDLLKPHVAEVLVCNPRMNALLKTGNKNDQVDARKLSDLLRAGLLSPVYHGDCGVRTLRELARSYLTITKDVTRVMNRIKGLYRSWAIPCAGQKVYSPRHRSAWLEKLTEGGVRRRAEQLYQELDALAKIRRETRRGLLSESRKHPAHKLLGEIPRLGLIRVALVIALLQTPHRFRTKRQLWAYCGLALQTRISGEYRVSEGQLQHAKKAPALRGLNVNHNHDLKSLFKSAATQVGAGKDPLGEFYENLLSKGMKPAMARLTLARKIAAIVLTVWKKGARFDPEQLKAKCA

SEQ ID NO: 133600 - protein, 443 aa, unidentified
MTRKNQKRFEVIHPDCGAVDVGGREHLAAVDPTKCDEPVRRFSTFTDDLHAMADWFESMGVKTVAMEATGVYWIPLFEILDRRGFEVYLVNSRATRQITGRKSDVLDCQWILQLMTHGLLRGAFRPSDDVCSLRSLVRQRGNKVRDQAKTLSRMQKTLVQMNIQLAQVISNIAGVTGISILRAIVEGERDPDVLAMLRDKRIKADQATVARSLRGNWRAEHLHALSQELAAYDFLEKQIGECDQAIAYALERLPTLQAAVIAPSKTLRNPHRSNEQQLILHRALNKVMGVDLTAIPTIGIDTALVLASELGADLSRFPTSQHFCSWLGLAPPTRISGGKPLPGKTVKVINRAAQALKQAASIARNDKSFIGASHRARLTRMDTCCAIKATAHQLARLIYAMLTKGQPYVEKGIEEFEERSRDRQMRALERKARKLGMHLVKAA

SEQ ID NO: 133601 - protein, 312 aa, unidentified
MHELFVGIDISKDKLDVHVRPSGEYITLGTAPAGLHDLVARVQAWGPALIVLEATGGYEVVVAAALASAALPVAVVNPRQIRDFARATGQLAKTDALDAAVIARFAEAVRPPVRPLAPPAAQALGELVTRRRQLLEMLGAERNRQAQARDRQGQRQLGTHVRWLTKALADLDRDINDTIRSSPVWRATDDLLKSVPAVGPVTAHTLIAQVPELGQLGRRQIAALIGVAPLNRDSGPLRGRRMIGGGRASVRQVLYMAALVGVRYNPRLAAFYSRLTGAGRPKKVALVATMRKLLTILNAIVRDQRPWQPQNA

SEQ ID NO: 133602 - protein, 339 aa, unidentified
MTIAFLGIDLAKNVFALHGVDATGRACLVRPSVRRDQLLESVAKLPPCTIGMEACSGAHHWARQFADFGHTVRLMAPKFVAPYRMSGRRGKNDAADAAAICEAVQRPAMRFVPIKSELSQCRLAIHTVRQGWVKARTATINRLRGLMSEFGIVLPLKAQTVRQLAAEQAETLPHWARTACMDLLDELRRLDERVAAYDEHIQVMACADDRSRRLMQMPGIGATTASALLASIGHGHDFANGRQLAAWLGLVPGQYSSGGKQRLGRITKAGDSYLRTLLILGARATLAAATKKKDRLSRWAVALSERRGYWKAVVAVAAKNARMAWAMLAKGEDFKPVTT

SEQ ID NO: 133603 - protein, 410 aa, unidentified
METIVERPAALDVHKAQVTACVRVPAADGKGREQYVAEFATTVRGLLALRDWLAAHRVQQVTMEATGVYWKPVWAIIEDEFPLLLVNARHVKQVPGRKTDVSDAAWLCQLAEAGLLRASFVPPKPIRALRNLTRYRKTQIQERAREANRLHKALEDTGIKLDCVATDILGASGRAMLAALIEGTTDPQLLAELAKGRLRAKLPALREALEGRFDGLHAVWIGAILAHVDFLDEQIDRLSDAIEEQLAPFAAAVELLCSIPGVQRRSAEVIIAEIGVEMSVFPSPKHLASWAGQCPGNDQSAGRRRSGKSRHGSKWLDWALEEAALAAVRSNHVYLAAQYARLRPRRGHKKALGAVKHSIICACWHMLTTGELYHDLGGDYYQRRDPERTTRRLVGQLEALGHTVILQEAA

SEQ ID NO: 133604 - protein, 341 aa, unidentified
MKTKQHFLIGSDISKKWFDATLLVMNGRHPSVIETKRFDNTKKGFICFLKWLIKNGVTDLGQALLVMENTGLYNRLLWVFCQQHGLPVHVGNAAEIKWSFGLTRGKNDAVDSRRLAEYAAKNAWKLKPTPAPSPELWQLKDLVTARTKMLRQKTALSVHLGELRGVNSPEVQQIMEAGHRAALEGLKASIKAVEAEIKRIIRQDEALWENYKLVKTVPGVGHVIAVYLICCTNNFTRLISGKQLACYAGVVPFEHSSGSSVRGRSRVSHMANKELKRLLHLGALSVRTHNPEFRGYYERKKAEGKHSMCVLNAIRNKIVLRVAAVIKAQQPYVSREVKMAA

SEQ ID NO: 133605 - protein, 420 aa, unidentified
MRSIGLDVHRDFCEVAIAEAGEVRSAGRIETTPATLELFAQSLCASDRVVLEVTGNAWEIARILEPHVGQVLVVHPGDTGIRQARAKTDRLDARALAKLLAAGSLDGLWMPDEQTRALRRRLARRSQLVRARTRAKNECHAVLVRRLIKKPAVSDLFGLAGREWLREVALPVEERETVDGCLRQIAFLDEEIAEVEKRVARDGLTSPQVKRLMTVPGVNVIVAATFLAAVGDVSRFPGQRQLVGYLGLDPRVRQSGSTPATHGRISKQGSASARHALVEASWSVVRQPGPLHAFYQRIRARRGHQVAVVAAARKLACLFWCMLTRGQDYAFGQPSLTKKKLRRLELQAGAERGKVRPGIWATNDAMRQAERELAHQAELAYQRTVADWQAATATKGASATPGRASSGPSRGQVARQTTRP

SEQ ID NO: 133606 - protein, 351 aa, unidentified
MQTEQTAQPKLYIGIDIHKRSWKIHCATDLFSGKSFTMPPNPEVLQAYVAKHFPDHEVSVAYEAGCCGYYAHRSFEGYGWCSLVVNPADIHRKGKEKYTKTDKIDAQLIARELKDGRLDSIHIPDVAREQLRSLFRRRNDLVKDFRRIKSILKMQLLYFGVHIPEEFDNDHWSHNFRYWIDGLEFVHPTARDTFDSRMRSFRFIDKELRDVSTKLRAYCRKHYKKDYYLLRSIPGIGGIVACGIICELGDLRRFNSIKHLAGYVGLAPGIHQSGDNQRSTGITMRAHRLIRSYFIEASWQAIRTDPIMQAYYRKHIGKNVKSIIVKVARKLLSRTLAVIKTEIPYSIGVIE

SEQ ID NO: 133607 - protein, 342 aa, unidentified
MKVYIGVDFHARQQTVSYLTTEDGEIHQCKLDHQEDDIAGFYRQFEGEVVVGIEASGYIEWFEEMILGIGHEVWVGDSAEIRRRARRRQKNDKRDSMLILELMIKGEFPKVHRQTTESRQVLKQLRYRHRLVKIRTIAKNNVQALALSGGLLTKRLYSSKRWQELQRLEREPMIEEQAKQLVKVIEQLTVEIKRVEQWLRKQAETDPRVLLLQTHPGVGLLTSLVLVHTLWPVERFPNGRKVTAYLGMDPVEDSSADRRRIGSISKQGSRLARFLVVEAASTAAKSDKGLKSFYQRLSNRQGKPKAKVAVGRKLLVRCFIMLRDQIDYDEFLRRGVEVRSSR

SEQ ID NO: 133608 - protein, 343 aa, unidentified
MQTVTTIGLDIAKSVFQLHGVDAAGQVVIRRQLKRRYVLAFFGKLPPCLVGVEACASSHHWSRELQALGHTVRLMPPAYVKPYVKRQKNDAADAEAICEAVTRPTMRFVANKTPEQQSCLMLHRTRHLFIRQQTAVINAIRAHLAEFGIVAPVGRNGVEQLLGVVADSNDKRLPEVARACVAALGAQLQMQKAQILEFDRMIRAWHRSSEASKRLDEIPGVGPVLATALVASVADPKAFRSGRDFSAWIGLVPKQNSSGGKDKLGSISKQGDRYLRSLFTTGALAVIRYAKIHGTKHRPWLTTLLARRPTKVAAIALANKIARMAWAMMARGERYKEPVALAA

SEQ ID NO: 133609 - protein, 381 aa, unidentified
MSEISMIGLDLAKNVFQVHGIDAAGGVVLRRQLRRGAVEKFFAQLQPCTVGMEACGSAHHWARVIGRYGHQVHLMPPAYVKPYVKRNKNDGRDAEAICEAVSRPTMRFVPVKSAEQQAALMLAGVREQLVDRRTQISNAIRGYAAEFGLIAAKGLSKIEPLLARIAADTALPELAQDLFAIYGQDYARLKVQIAKTETKLMAWHKSNELSRRLAEIPSIGLIGASLLAMKVTDPHAFRSGRDFAAWLGLTPKDHSTAGKTRLGVITRAGDEALRSTLVAGATSVIQQVKKGRGHPSPWLVDLLKRKPAKLAAVALANKTARVAWKLMISGEHYNRARDFGRGEAPVVDREERRAALCGGSAQRSSLRSRATPPQTAEMARA

SEQ ID NO: 133610 - protein, 341 aa, unidentified
MSLIKAVGIDLAKLVFSIHGINEHDKCKLRKTVKRNKLLAEIAKLSPCIIGMEACSGAHYWAREFTKLGHDVRIMACKFVIPYRQNEKNDANDAEAICEAVTRPKTRFVSIKSEEQQALLCLHRIRQGAIKDRTARINRLRGLLAEFGIIMPKGRYPAQKAIAGILEDGENNLPFLARELLDDLWQSIKALNEEILKYDRKLYALANQMKDAKRLMSIPGIGEITATAVVATVNDAKHFDTSRSFAAWIGLVPRQYTTGGVARLGRISKRGEKHIRTSLIHGARAVIANCKNKTDRTSLWVKDLVERRGFKRATVALAAKNARLIWALLHSEKEYQVDYVK

SEQ ID NO: 133611 - protein, 408 aa, unidentified
MKRYYIGVDWGDRWHQVYVGDEQGKKVREIKVPQSVEGLAEIGRWLDEKRAEGFELWAAIEKPAGRIVDFLLDHGVEVYPVNPKAVDRVRDRYRMSGSKSDAFDAYVLAEFLRTDQAHLKARRPSSEKAQELKMLCRDQRRVVRHKTRLLNQLTTTLKEYYARPLDVFGDIETEVALDFLTRYPTPAHLSALKRKGFNRFATQQHSVSKPRCEQLWEELHQPQLAVPDHVVRAKAQLVEVLIDQLRASIKAVKTYNHKVESFFASSPAAQLAKTLPGGKSGTLVATIWAELGDAQGRWQSSGHLQAEAGAVPVTKASGKSHVVHFRFACNKHLRYSMYWFSFVSLNNSEWAKLYYRGQRDKGHNHPQALRALGAKWLKIIFVMWRDHKPYDEQFHLANIALQKMRQAA

SEQ ID NO: 133612 - protein, 349 aa, unidentified
MEVLIGVDPHKATNVVAAIDEQGELVGQETFPATRKGLRTLQRWAKRFPERRWAVEGASGIGRPLAQKLLAAGERVVDVPPKLSSRVRVLSTGNARKNDRLDATFTALAALRNDRLSSVQPEDGPESHVEILRLLTERREDLVSERTRAFNRLHVLLRDLLSHPVRKQLSTDAAAKLLRRSRPKHPAGQLRRRLASEVVRDVRTLDRRIAELDERIATEVKASGTMLTEIFDVGPILAAKIVGIVGDVSRFPSKAHFASYAGVAPIEASSGEVVRHRLSLAGNRSLNQVMHMIAVCQARSDPRGRAYHRKKLAEGKSRREAMRCLKRRISDAVFRVLVTDSKVASQTVS

SEQ ID NO: 133613 - protein, 267 aa, unidentified
MKITTIGVDLAKNVMQVHGVNERGEPVLKKQLRRHKVTAFFANLGPCRVGMEACGSAHYWARELERLGHEVKLMAPQFVKPYVKSNKHDAADAEAICEAVGRSNMRFVPIKDTEQQAVLALHRARQGFVKSRTAQANQIRGLLGEYGIILPQGISHIGKRVPELLEDAEKGLPDTFRALLARLAEQLKILDQQVGELEAEIERWHRANEASLRLAQIPGIGALTASALVASIGDARQFENGRQLAAWLGLVPRQHSSGGKATIITTG

SEQ ID NO: 133614 - protein, 398 aa, unidentified
MEVMDAAGRRLSAAKLPEGIAGMARFHAMIAAQLDPDADLAAQAGQVLIGIETDRGPWVQALIAAGYRVYAVNPLQAARYRERLGVSGAKSDPADAHLLADMVRTDSHQLRVVAGDSDLAEAVKVVTRAHKTLIWERTRHTLRLRSTLREYFPAALAAFEDLTDADTLELLAKAPDPASAARLTTTQIMAALKRARRHHRDRRAGEIQAALRTEQLGQPAVVARAYAVAVRAQVAILGVLNEQINLLQEQVEAHFGQHPDAEIYTSQPGLGQILGARVLAEFGDDPTRYGDTRARKNYAGTSPITRQSGKKKVVLARYVHNDRLLDALGGQAFAALTRSPGARAYYDKQRDRGLGHRAALRQLANRLVGILHGCLKTGTRYDEATAWSHAQQDQQVAA

SEQ ID NO: 133615 - protein, 421 aa, unidentified
MKRESQEEFAAFVGLDWADAKHDICLQATGTERREFLILEHRPEAIDAWVQTLRTRFNGQPVAVCLELNKGPIVSALRQYEFLVLFPVNPLTLAKYREAFTPSRAKDDPTDAELQLELLLKHRDKLTPLIPQSPTMRALAQLVEHRRRVVGDKVRLTNRLTSALKNYFPHVLQWFPDKDTVLFCDFLSHWPTLKAAQLARRTTLEAFFRAHHVRAADVIDARIQAIKSAMALTTDDGVITPNVLLVQALIAQLRVTLQAIADFDTAIAQRAQAHPDFPLFDALPGAGAVFAPRLLVAFGEQRERFTSAEDLQKYAGIAPVTERSGKKSWVHWRLQCPTFLRHTFVEWAAESTRHSFWAQVYYQQQREKGKAHQAAVRALAFKWIRILSRCWQERTPYDESVYLQALKRRSAPLLYNLASGS

SEQ ID NO: 133616 - protein, 440 aa, unidentified
MKKGTIKLLRPNAAGIDVGSQMHYVAVPSDRSEQCVKKYGSFTSEIHEMAKWLKQCNIDTIAMESTGIYWIQLYLLLEEYGFEVFLVNAHHIKNVSGRKSDVKDCQWIQELHSYGLLNASFQPNSSTRELRTYLRHRKSLTQSCSTQILLMQKAFEQMNIKLHNVITDICGKTGQLIINAILSGERDAKNFIQYVEANIKATKEKIIESLTGIWRDEHVFELKQAYELYIIFKEKINDCDIQIEKTLRKIEAGKTSENKDKRKVYTKNRLNFDGTKYLKNILSVDVTKIFGISELLALEIISETGTDMSKWMTKKHFTSWLNLAPNNRISGGKLLKPKKSQKKNKAGQAFLMAAYALQRSDHWLGHYYRKMKARNGPLVATKATARKLAIVFYEMITKKVEFNPISVEKYNEKFRQQRIKYLQKQATDIGLQVIPIESVS

SEQ ID NO: 133617 - protein, 381 aa, unidentified
MNATSLAVSDQSTDDVIVGVDLAKNVFQLCVADVAWRPVESQRLSRAQFERWFANRAVSRVVMEACGSAHHWARWLAGLGIAVTLLPARYVRAYVKRNKTDAADAAALLEAARCADLHPVRIKSVEQQALQALHRTRSLWQGDRTRRINTLRGYCREFGIAIALGSRLGTEQIARVLAEPRSGIPELLRATMVLLVEEVRLLEARIGALERELATLVRHTPACTTLLSVPGIGLLTSTAMVAATSGDVTHFEDARHFASWFGLTPKEHSSGQHRQLGRISKQGDRYLRMLLTHGARSVLRAATAARNAGKPVSGLRAWALAVQDRSNHNKACCALANKLARIAYACLRDHAAYNEEKPNSRLTRKKTERLSFEMPQGALAT

SEQ ID NO: 133618 - protein, 409 aa, unidentified
MERVIERGAGLDVHRDSVAVCVRGPGPEGARVQYVRTFGTTTVELLALRDWLDTQGVTHVAMESTGVYWKTVYYMLEEHCTCLLVNAAHIKQVPGRKTDMKDCVWIAELLEHGLLRGSFVPPPFIRDLRDLTRYRRVLIEERTRQANRLHKLLQEAGIKLASVASDILGVSGRAMLDALAQGTTDADLLADLARGKLRRKLPALRQALTGRFRPHHAFVASQILAHLDYLDEALETLTARIGEVLLPFAAVIQRLDTIPGYSTQTAEEIVAELGFDMSVFPTDRHLSSWAGLCPGNNESAGKHRSGRTRKGNRWVRQTLVRAAHAARYSKDTALAARYRRIARHRGEKKALVAVAHALLVTAYHVIKEQTTYRELGFDYNDRRDADRARRRALAVLHEQGYRVTLEPAA

SEQ ID NO: 133619 - protein, 342 aa, unidentified
MNVSMIGFDIAKGVVQVHGVDACGQVAVRKRLSRAGALAFFERLKPCVVGLEACGGAHYWARELSRMGHEARLIAPHYVKPYVKRSKTDAADAAGICEAVGRRHMRFVPIKSLDEQAQAQAHKARSLLVARRTALVNALRAHLTEFGIVAPVGPAGSARLIELLRFGEAPIPDLAVEALVDLCDMIEATAAKIAAFDARLKAVALADEACRRLMKVPGVGPVAAGAIRALAGDVTRFANGRDFAAWLGLTPRQNSSGGKIRLGGITKAGNRDLRALLVLGQMAVFRHASAHPEKAAPWVAALIKRRPPLVAAVAMAAKTARIIWAMLARGEAYRSRCAIQAG

SEQ ID NO: 133620 - protein, 372 aa, unidentified
MKGENVIFIGLDTSKLKISVAVADGERNGEVRFLGDISSEPTSVDSIVKKLARRGAKLHFCYEAGPTGYGLYRQIIELGHECIVVAPSLVPKRAGDRVKTNRRDAISLARLHRAGELTPVWVPDEGHEAMRDLVRAREAAHEAQKQARQQLQSFLLRHGRIYTGRKTWTRAHSRWLASQAFDHQAHQILLAEYCQSIEDAAVRLERLNKLVVETAASWSMAPVVAAYQAMRGVAFITAVTFVIEIGDVRRFDNPRQLMAYLGLVPSESSTGERVRRGGITKAGNIRARRALIEGAWTYRYPARVSPTIQARLEGLPKSVRDIAWKGQVRLCTRYRRLISAGKAKTVAVTAIAREMAAFLWAIGQEVEPLGNL

SEQ ID NO: 133621 - protein, 315 aa, unidentified
MIIGIDVSKQTFDAAWVSADQGHHQTYDYNEKGISALLKDTPSTAHYVMEATGVYHTRLALLLYQSGRKISVVNPLVIKRFAQMQLSRVKSDKADAELIRSYGEQHTLSPWSPASTDVIELQQAHSWLDDLIRERTRLQNRQEAHVHQATASAYVKKQMKTQLRHLDKQIKDCEHHLEVIVKKSFADVYARLLTIPSIGSKTVIELIVVTDGFYRFEDVKALCAYIGVSPTTFRSGTSVKGKGRIAKMGQGRMRQLLYMCSWTARNCNPACRALYLRLKAAGRPPKVISIAIAHKLLRQAFAVATKGIPYSENYA

SEQ ID NO: 133622 - protein, 384 aa, unidentified
MDNVISHGTTDRIKSTCFMAIELSKAKWLVGMLTPLSDKISLRSIPCGAVQSLIEIIDRTLDKVLRATGQPARIVSCYEAGYDGFWLHRVLDAHGVTNHVIDAGSLLVSRKARRAKTDRLDAEKLVRVLVAFWRGEPKVCSVVQPPSIDEEDAKRQHREREFLMKERVQHIGRIKGLLATQGVYEFQPSRRDWQSRLAKLITGDGRPLPPRLAAEIDRHCRRLATVNAMLKEIDEERDAEVKKAAPLAPCGSEAQRLAQLKGIGSQIATVLATEVFYRRFKNRRGLGSYLGLTPSPFQSGGMDREQGITKAGNPRARTISIELAWLWLRYQPQSTLARWFHERTNGLKGRIRRIIIVAVARKLMIALWRYLETGLVPDNAELKA

SEQ ID NO: 133623 - protein, 343 aa, unidentified
MNEISMIGLDLAKNVFQLHGVSASGKVVLRRQLRRGALEKFFAKLPPCTVGMEACGSAHHWARVISRYGHQVKLMPPAYVKPYVKRNKNDGRDAEAICEAVGRPSMRFVPMKSVEQQASLAVQSTRALLVRQRTMIANSLRAALSEIGIVAKQGLEGLRELMERLQAPCAEIPEMMRGALLLLAQHWQALDADERGLERQITKAARCDRDARRLMAVPSVGPMIATTVLAKVPDAKVFRSGRDFAAWIGLTGKDHGTGGKHRPGRISRQGDRVLRALLISGASAHLRQQIARGVSDPWLRDLLARRPYKVAMVAFAAKTARVIWAMMVKGEAYRDRASASAAA

SEQ ID NO: 133624 - protein, 387 aa, unidentified
MPQPNDLSRSLVALDQDSTIIAVVEMSQSSWLVGGVLPGIERQPCKKLEPSAERLLGLLHRWRDEAVKAGSHITRIALAFEAGRDGFWLARWLRARGVEAHVIHPSSVAVSREHRRAKTDRLDTELLKRGFLGWLREERGHCTMARVPTIAEEDAKRPNRERECLVGERTRIVNRMKGTLARLGIRNFKPTLRKSAERLATLHTPEGSPLPPNVLAELQRDMARLGFLICQIREIEEARQKRLEQEPETGPHAMVRLLARVVGVGIETADMLVHEVLSRPMRDRKAVARYAGLTGAPDESGAKRREQGLAKAGNARVRRGMIQLAWRFLLFQKQSALARWYQARTADARAGARKTMIVALARKLLIALWRFVTTGETLEGVVLRPAG

SEQ ID NO: 133625 - protein, 387 aa, unidentified
MSQTAAALIPAPVAYASTLVLAIEVSNKSWVLAAQVPGLPHTKAKRTIHPEAGALLAAIAGYRARAAATGHSIERVIAVYEAGWSGFWLARWLIRHGVEVYVVQPSSVPVDRRMRRAKSDGIDAELLLRTLLAWLRGEPRVCSMVPVPDEADEDARRCVRERTELISERVGLTNRIGAVLATLGVTDYNPLLRSRCRRLAELRTGLGEPLPANAHAKIKRLLARLELVLTQIAELERERDAVVETEASDKAGKMIQQLISLRGIGVQSATVLVREAFVRRFANGKALGSYAGLASSPYNSGGINREQGIGKGGNRRVRTVMVELAWLWTRYQPSAAQVCWFRERIGSTGRRVRKIMVVALARKLLIALWRFVIDGVVPEGAVLKPAA

SEQ ID NO: 133626 - protein, 353 aa, unidentified
MSDLAEEREVILGVDTHLEVHVAVLIDLVGRVVATASVPTTASGYDQLIEWACGFGRLTRAGIEGTGTYGAALARRVQEHGVQVLEINRPDRSRRRLRGKSDPTDAENAARAVLAGEANAIPKAQSGVVEALRAVSMARRSAVKAKTQAINQLRALLVTAPASIRAALWKMKPEQCVACCARLHSLGDTPLLKALTSTLRLLARRWMSLAKELHQLDAALAELTQRAGRRLLARFGVGPQTAATLLVTAGDNPDRLRSEAALAALCGASPLEASSGKTTRHRLNRGGDRAANNALWTIAMVRMRSDPRTRAYVARRTAEGLSTKEIQRCLKRYIARELYPLILADLAESVCPT

SEQ ID NO: 133627 - protein, 423 aa, unidentified
MSYKIAGIDVHKKMLAVVVTDVEVDGEYQFGRIRYGSTPEHLRLLAEWLIAQQVEELVMESTAQYWKPVWGALERYWKPICQERKGAGPMSGTLHLAQAQSNRGRRGRKKDFPDAERLVKRLVANELTLSFVPDAEQRLWRTVTRRKYQLRCNHVRLQNQLEGLLEECHIKLSSLVSDLLGASARRMLKALAEGETNPAALAAMADKNLRATPAQLCDALDACTELKPIYRQLLKMFLEELHLIDQQIGKLDQELASLLSRHHDAVVHLAEIPGLGVDSAQQIIAEVGAGAATFPSAKHLSSWVGACPGDEESAEVSKNHRSPQGNRHMRRILNQAANAAVKSKGTIFEIGYRRLISRLGHNQTIGAIAHRLCRLIWIILHRGVRYEERGPSVSAKSRRHRTNRMIRELRSLGYRVQPLGTTA

SEQ ID NO: 133628 - protein, 362 aa, unidentified
MQAAGSRRARPEINHKEVSVDGFYYIGLDIHKKVIAYCIKALDGSMIDQGTIVADRQSLGVWVKGLPGPWIGAMEATLFTGWVYDLLKPHAVALKVAHPAMLQAITVAKKKNDRADAEKIADLLRVNLLPECHMLSEEMRELRRILRYRNHIVRTAVKMQNKMSGLLMEVGVSYSKKRLHGKKYFHELLDRVDEIPPSVKELLLLSRSGYEMFRSFQKRLVETLRADSLIRDRVHRLMTIPGVGEITALTWVLEIGDPDRFSSIRKAVSYCGLCSAQKESAGKEQRGPISKKRNKHLQTMLIEAAKLAPHWNEHLAIVHERELKKGNKNRATLAVARKIVAYMLVVDRKGADFKLPSEIRAA

SEQ ID NO: 133629 - protein, 375 aa, unidentified
MNKCHSNTELSSHEGTRCQFNGGRCAIKFAEGRIRPVCGLGIDVHQDFYVVVVQEGGANPKPPQRFRKEAFLHWAAKLARSGAEVHAVYEACGFGFGLQRNLTALSIHCYVVCPQKLDEQNRRVKTDGLDAKALCLKLDRFVQGNRDALALVRVPTEQEEQQRAIHRQREQLVKARKQLEAQGRSLMVNHGIEPVQQWWKRNSFAKLQAPAWMKELLLNSQPILLGLQEKISALTIQLQSAAVPNQPRGLGLMTSVVIDREIGDWRRFNNRRQIASYTGLCPGEYSSGNTRLQSCVTKHGNPRLRAALVELAWRLVRFQPNYKPVVKWRATLAKGALATGAARKKAIVAVARQLAVDLWRVRTGRCKAQALGLVL

SEQ ID NO: 133630 - protein, 346 aa, unidentified
MNITTIGIDLAKSVFQLHGIDSYGKVLIKKQIKRAQMAEYFVNLKPCLIGMEACGSAHHWARKLEGFGHTVKLMPPQYVKPYVNTNKNDAADAEAICEAVTRPNMHFVPIKSTEQQAILSLHRIRQGYVKARTAQANQIRGLLAEFGLEIPQGIGYIAKRVPDILEDASNELPGILRIEIQSLLEHLNELDTRADNCEKKIVAWHKQSETSKKLEAIPGIGPLTATALVASIGEAKNFKNGRQVAAWIGLVPRQHSSGGKQNLLGISKRGDIYLRTLLIHGARSVIYRSGQKENPTDRQSWLNQLTQRRNKNVAAVALANKNARIVWALLNHDRDYQDNHKMLVAA

SEQ ID NO: 133631 - protein, 349 aa, unidentified
MYYVGVDYHKRYSVATVVDSDGLMLARKRLDNQLEAFREFLQPYDKAEVEAVVEATRSWGVAVDILEQVADKVILANPGQVKLIAKARISTDKIDSLALAKLLRVGWVPEAYLRPRTNREHQLILRVRCFFVQLRTRVKNRIHDLIDRQSELVRETATGFSDLFGKRGMTWLRTLELDYPHSTLLERLLAAYDALDAQVRQSDRLVAELFTADDDCKLLKKTPGIGVFFAVLIKTEVGSIERFPSSARFCSYAGVVPSTQSSGGKVWHGRIIKQSNRWLRWALVEAVIPATVADAGLRAHYEYYRRTKGSKVAKVVTARRLGCIVYRVLKERKPYYERPVQSRGYRQAG

SEQ ID NO: 133632 - protein, 358 aa, unidentified
MTTVSKKQKWFNAIHLTPADDLYVGIDAHKKSLHVALFLNDAPAIDFVMPPDSEKLIDTLNKLRPALRMVVYEAGPTGYSLARAMQNVNLPVNVVAPSKTPRQSAPDSKTDSLDARKLAEYAAKGLLRHIAIPTRHQEAQRQLTRLREQLVAKQTRVKLQIKGFLLQHGIDQPQGLSRWSATAVEYLKKVLLSEQLRYCLDILLDELSFIIEQRKLTEQRIKEAFSEKPHSTMCKLLTTHPGVGPVIAAQFAAEIFNPRRFTDKTQLAKYVGFAPSVRQSGQMLRDGPILKTGRPQLRCSLIQGAWLWIRKDPNAYNTFCRLIHNTGHKNKAITAMARKLAVHLWKMACDNKPYSCAV

SEQ ID NO: 133633 - protein, 355 aa, unidentified
MSSEKYIGLDVHQATISVGVMDSQGKVVMESIVETKASTLLEFFAGLRGSLFVTFEEGTWAAWLYDLLKPHVTEVLVCNPRKIPLLKQGNKSDKIDARKLAERLRLHDLKPVYHGETGIRMLRELARSYLTVVKDLSRVMNRLKALYRSWAIPCAGRDVYYTRHRSQWLEKIPEAGTRRRAEQLYQQLDLLQHLRQQARRELLAESRKHAITAKLRKIPSLGPIRSALAVALIQTPHRFRSKRQLWTYSGLGLETRDSGEYHFVQGQVRRRKKQATIRGLNKDYNHDLKGLFKGAATRASVKPGPFQEFYQRSLAKGIKPTMVRLTLARKIAAITLTLWKKGEDFDIHKLNSQAA

SEQ ID NO: 133634 - protein, 310 aa, unidentified
MKQIRDKVGGLDVHRDSVVACWRVQSPDGSIESTKASFATTAKGLGELAAYLTQASVTTVVMEATGVYWKPVYYSLEGLFAELWLCNAQHVKNVPGRKTDLCDAEWLADVAAHGMVRPSFVPPPEIRELREITRYRRTQVEERGKEIQRLEKVLQDAGIKLTSVASAVWSASSREMIEALIVGERDPKVLAQMAKRRMRTKISRLEEALSGRFGDHHAIVCRQIIDHIDFLDRAIESLTAEITERLLPFEGAVTTLCSITGVSHITAETIIAETGADMSRFPTAGHLCAWAGIAPASYESGRQATTCRDP

SEQ ID NO: 133635 - protein, 411 aa, unidentified
MMIIGCDFHPRFQQIAFVDRASGEYGERRLQHRGEAEEFYRRLARQQVRIGMEATGNYGWFCRLAEEQGHELVLGDATRIRAAAPRKQKTDKRDARHILDLLLENRFPAVWQPDAANQDLRVLLTHRVKQVRLRTRLKNQLDGLAKSEGYLSPRVWSAGRRAELEALPLCGWLDRRRQDLLELHDELDKRIAPLDEALREAANEDAAARLLMTHPGVGPVVSLAFVLTIGDVSRFQRGKQVGSYLPPQRRRPVAGDPGFGLIPSEESSGQHRRLGSVSKQGNSLVRWLLVQAAALAQRYDPSWHRQYVRLSMNKHHGVAKVAIAHKLAVRLYSTPATKTRRRGPRIGCCVRGKTMSSYPYAVRMRDSPCSAVVAYKHTDRLIGHPVSPCNSREFEQAIMAQYRAEYMVGGT

SEQ ID NO: 133636 - protein, 415 aa, unidentified
MEVVHPRCAGIDISKKDAKVCVRVQGSGGRRTSSTVTTWGAMTNEILALKDFLVEQRVTVVVMESTSDYWRPFYYVLETDVEVLLVNARDVKSVPGRKTDVSDAAWLADLGAHGLLRASFVPPEPIRQLRDLTRARTHITQGRTREIQRLEKLLESSGIKLSSVASDITGVSGRLMLQALIDSQGTADPAVMADLAQRRMRSKIPVLTEALNGRFTAHHAFMTRLFLDRIDGHTKDIATLSERIDGLMKPFLPARELLESIPGFSQIIAEIFIAETGGDMTQFPTAGHLASWAGVSPGSNESAGRVKSTKTRPGNRYLKGALGIAALNQARTKKTYFSAKYHRLASTRGPMKALVAVEHAMLIAAWNMLTNSEFYRDPGPDYYTRNDPAKTKARAVKLLEALGYDVTLQQVAQAG

SEQ ID NO: 133637 - protein, 368 aa, unidentified
MSQTPRTSITAVGIDIGKNSFHIVGQDDRGAIVLCQKWSRSQVEARFANMPPCLIGMEACVGAHHLSRKLKALGHDARLMPAKYVRPYSKGQKNDFRDAEAIAEAVQCPTMKFVATKTADQLDLQALHRVRERLVSQRTGIINQIRAFLLERGIAVRQGQRSLRAELPRILATPPDVLSPGMVRVIEGLAADWRWLDERIEGLSREIEELAKRDAGCERLMSIPGIGPIISSAMVAAIGTGDGFAKGRDFAAWLGLVPRQISTGDRTILGKISKRGNRYLRVLFVQAAWVVLVKVKPTRWEGHGLKHWIEAASKRLHHNVLAVALANKLARIAWSVLAVVEPSRQASFKLRNRSRESPLTYLPRSARG

SEQ ID NO: 133638 - protein, 394 aa, unidentified
MVACLLTPETPHKEIRTFGTTTDELLRLIDWLQGAGCTHVALESTGVYWKGLYRLCEGLFTVIVANAQHIKAVPGRKTDVRDAEWIATLLQHGLLRPFVPPRPQQELRELTRYRTTLVRERAAEVNRIQEVLEGANIKLASVASDVLGMSGRAMLEALVAGTTDAAVLADLARGKLREKRPALEAALSGRIEPHHRFLLAEQLCHIDALEESIARLSAEIAERVRPFEEEVALLDTIPGVARAGAEALLAEIGPDMSRFPSARHLASWAGICPGNNESAGKRKSGKTRKGSPWLRSLLVEAAWGASHTKDTYLSVQYRRLAARRGRKKATFALGHSILVSAYHILATHTPYSDLGSTYFDERDRTSVEQRLIRRLERLGLKVNVEPLIPTPDAA

SEQ ID NO: 133639 - protein, 417 aa, unidentified
MQSASTSLPAVAPDGVTAGVDWASTDHVACVVDAAGKVVTRFTAAHTADGLKALVKGLARVRAAEVAIERGDGLMAGALLAAGLTVVVISPNQVKNLRSRYGSAGNKDDRFDAFVLADTLRTDRARLRPLTPGTPATITLRSAVRARRDLVAHRVAMCNQLRAHLALVFPAAVGLFADLDSPVSLAFLARFDCQDRADWLSPRRMAAWLKSAGYSGRTRPGVLHGRITAAPRGATGDDGTARTHVTRALVTVLVTLAGQIKALAAQIAEQPGLHTDGHVFTSLPRSGTVRAARLLAEIGDCRQRFPDPSSLMCLAGVAPSTRQSGKIKAVSFRWAVNKQLRDAVCDFAAGSRHASPWAAQLCNQAIARGKDHPHATRILARAWLYVIWHCWQDHTAYDPAQHRALQRLLAQDQLAAA

SEQ ID NO: 133640 - protein, 355 aa, unidentified
MDSVKYIGMDVHKEAISIAVLNSSGKLVMECTIETKAITILEFLKGLRGSLHITLEEGTWAAWLYDVIKPHVTELVVCNPRRNALLKEGSKSDRIDARKLAEVLRANLVRSVYHGEQGVRTLKELARSYLAINKDLGRVMSRVKAIYRSWGIPCTGKQVYAPRYRSEWLGKIREAGVHRRAEFYYQQLDALRPLRQEVRRELLAEARKHDAWKLLRAIPFIGPIRAALIIAFLQTPHRFRTKRQLWTYIGFGIETYSSAEHRCVNGELKRAKKPVSIRGLNRNHNHDLKNLFKSAATVAAAKPGPFQEFYDRLVAKGIRPEMARLTLARKMAAITLTIWKKGARFDAQHLKPQTA

SEQ ID NO: 133641 - protein, 413 aa, unidentified
MDKIYDICCGIDVHKKLIVACLSHKRKKELREFGATTRELMELAEWLQKNECEIVEMESTGSYWKPLYNIMESYGLHAIVVNPAHMKAVPGRKTDVKDAEWIAELLQHGLLQPSYIPSKDQRELRELVQYRKSLVGERTRELNRLQKMLEGANIKLSGTVTNINGKSARKILEYILSGNEIDEKKYDEMYEEKLIAHNLKASKEQILDDLKGFMSPLQRRMLKELLQHLDELNVHIENLNDEIDNFMKPEEKQASQVIQDVTGIGNTSAQTIIAVIGTDMERFPSDRHISSWAGLCPGDNVSAKKRKSGKIRKGNALLKSTLVLCAHAAVRHKSSYFHAQFKRISTHRGKKRAYVAVAHSILIAIYHILKDGVKYQDLGAEYYNQFNAERKIHAYLKKLKALGWELPKEAVPA

SEQ ID NO: 133642 - protein, 345 aa, unidentified
MKNSNVIGIDLAKHVIQVCKIDKHGELISNKAISPSKLKELLAKTVPSIVAMEGCGACHYWSRLAQKQGHDVRVISPKKVKGFLQGHKTDANDALAIAIASIQLGMQFSQIKTEEQQSLQTLETSRKFLGKELVALNNHIRAYLYEYGITLRRGHKSLRETMAIVLDDLDTRLPTCLKNTLGLLWERYKLTVEQLTEAEKYKAHLVNQLEPCQRLMDLEGIGKVCASMLYANIGDGREFKNGRQASVYIGLTPKQHSSGGKTYMTGIDKRGGNKELRAALYQGALSVIYKLPSEPRTLKEAWLIELVKRAGVKRTCIALANKTVRTAWALLSTGKSYEPALLGRS

SEQ ID NO: 133643 - protein, 396 aa, unidentified
MPLFCGIDRATDHHDIAVVDDDAAGFSQLLTLLAEAGDIREDSIPVAIETDRGLWVAALRETGRVIYPINPLSASRSRYAVSGSKSDATDAVLLANIIRTDPDAHRLLPADTQLAQAIRVLARAQQDAVWARQQIGNQIRDLLKDFYPAALAAFAELPSGGLARADARTILAAAPTPAQAAKLTPARLRRLLVKAGRRRDLDRDVERLRALFTDTYLHQPPMVENAMGIQLATLLRQFEAACAAADELAEAAIAHFEQHPDAAIVISFPGLGNLTGARVLAEIGDDRARFADARGLKAFAGSAPITRASGKKTVVTHRYIKNRRLTVVGSIWAVASLRGSPGARRHFDARRAARDWNRQAQRHLFNKFLGQLHHCLQTGQPYNEHRAFPPPFTLAA

SEQ ID NO: 133644 - protein, 318 aa, unidentified
MNVIGLDVSKDTIDATLITTKGSKDYIKISNNTEGFENLINWIKTKRIRKIAISMEATGIYYEQAAEYLSALYTIFVINPLKIKEYAKSQFSHTKTDKADSKLIAEFASRHLDKLTSFRPSENPILYKLINLLQQLKEQQKETQNRLHTAKDIYIKSTHEAIIELLEEKIDQTSKRIEGMIKQKESLNIEYQNLQTIPAIGKETAVILLRHLTDKNFETANKFVAFAGLSPKIEQSGTSVNKKGRLSRYGHRQLKRALFMPALVAYRMNAFPQLVSNLEAAKKPKMIIIVALMRKLAKIAFYIHKTKKPFDKARHQTV

SEQ ID NO: 133645 - protein, 377 aa, unidentified
MSNCTRYLGLDVHAETITAAIAEGRGKIRSLGKFRNRPEPVRKLIEKLGGGKNLKVCYEAGPTGYALYWQLTKLGVDCEVIAPSLIPKKAGDKVKTDRRDAEKLAQSYQSGDLTPVWVPTLEHEALRDLVRQRAAAKTDESRAKHRLVKHLLRRGLREPGESRAWTHPWWRWVQSLKFEYEAQQVAFADCIAEVLHMGERLARLDKAIDRIIESAPAQMRAVIEALQALRGVAKLTAVTIVTEVGTFKRFQRPTEMMGYTGLVPSEYSSGGRESKGCLTRTGNAHLRHVLGEAAWHARHRPWLNLRMKKVLPTLPAGVAEIAWKAQERLHRKFTKMIYCGKHPGKVASAVARELVGFVWAIGTLVESGLDGDRRARA

SEQ ID NO: 133646 - protein, 414 aa, unidentified
MAEEETISWFAGVDWGSERHQVCLLDARGGTVGEREFPHSGEGLAELGDWLLSMASAAGTVAVAIEVPHGPVVDVLIDRGFVVYAINPKQLDRLRDRFSVAGAKDDRRDAYVQADSLRTDRRLFRRLQVADPRLIELRAWSRLAEELGAERVRLSNRMRHQLWRYYPQMQKLTKDLAAPWFLELWAIASTPAKAGRLRKSTVERLLKQHRIRRMDAETVLRILREPAIKVAEGVAEAASIHIRSLVARLRIVNRELREAERKLDELCTAVSEIEQTSGESLQRRDVAILRSMPGIGRINLGTLLSEASGPLSRRDYEGLRTLSGAAPVTKRSGKSLIVVRRYAAHVRLRNTVYHWARVATQRDPRCRARYTALRKRGHSHGRALRGVADRLLALVCVLLQRQTLFDPYFGRPTA

SEQ ID NO: 133647 - protein, 359 aa, unidentified
MKIVGCDFHPAWQQVAIFDPETGEISELKLLNGDGEAERFYRELEAPALIGIEACGNSQWFIELAERLGHAVWIGDAAQIRASYVRRQKTDRRDAGHILKLLMESRFPRLWTPSAEQRDLRQLLIHRHKLVEIRTRIKNGLQHLALNRGMQKGSRLWSARGRADMEKLPLAGWTARRREDLLRLLGELDRHVDELDQAVKCAAAEHPQARLLMTQPGVGPITSLAFVLTIGDASRFRHSNQVASYLGLIPREHSSGGKQRLGAITKQGNRFMRQLLVEAAQSVTRLDEGFRKQYQARCHHKAKGVAKVAAARKLAVRLYWMLRQNVGYPEIALIESSPAVPLAGKSHADELSGRSRIQQ

SEQ ID NO: 133648 - protein, 346 aa, unidentified
MVVLGIDAHKRTHTVVAVDEAGRQLGVKVTQATSTAAHLELVVWADRFGAERRWAVEDCRHLSRRLEADLLGAGEVIVRVPPKMMAHARDSARTYGKSDPVDALAVARAALRGPGLPAARLDGPERELRLLADHREDLVAERTRAIGRLRWHLHELDPSWDPAPRSLTARSNLAAVAARLAPMAGMVAVIAADITARIAALSADIKDLERQIIARVKVLAPALLAVTGVAGLTAAKIVAQTAGVTRFKSKDAYARHNGTAPLPAWSGNRVRHRLSRTGNRQLNCALHRIAVTQKRCHPPAQAYLANRAAAGSTGPEALRALKRRLSDIIYRALLADSATTPSAQAA

SEQ ID NO: 133649 - protein, 342 aa, unidentified
MSDVTTIGLDLAKNVFQVHGIGADGEVVIRRQLRRSQVLPFFEKLSPCLVGMEACASAHHWARELGALGHEVRIMPAHYVKPYVKRNKNDAADAAAIAEAVTRPSMRFVAVKGPEQQGLMMAHRTRALLVRQRTMLVNAIRAHLAEFGIVAPVGLRGLKSLLAVIDDGEDEHLPPSAWECLGSLARALAAVEREAALAERRIHAWHRQNQASRNLASIPGIGPIIASALVASVSDPGVFRTGRELAAWIGLVPRQNSTGGKARMGRISKQGDPYLRWLLVAGAMAVIRHGRKTGFRDNPWLADLINRKPAKVAAVALANKNARIAWALLTSGETYRPQTARA

SEQ ID NO: 133650 - protein, 351 aa, unidentified
MVYIGVDLHRKKSQVAAIDPDGKLVFNRKVRTGPAEMQQLIDELRPQPIQVAFEATFGWGWFADLLAELGIPAHMAHPLATKAISSARVKNDAVDAKTLAHLLRTNLLPEGWIAPPEVREARRQVRMRAGLVRVRAKLKAQVHALLGEHGLQPDVVDLFSNKGRELLQELQMPAISRSRLEACLRLIDEVSLEIVIAEREIYQTIKEDERVKRLLPIPGIGPIIAATILSEIGDITRFSSPDKLCAWAGLTPSEHSSADNVRRGHISKQGSRWLRWVMVEAAVHAFRDVELRQLFIRIARRRGAKIARVAVARRLLTLVYYALRSETGCRSYPVSSNPKVEARSMAVMASH

SEQ ID NO: 133651 - protein, 313 aa, unidentified
MTQSIAQSVGVDISKDNLDVHLHPEGTSRQFANSPAGHKALLAWLNAYRITRIAYEATGAYHRAFEQAACDWPLVKLNPRQARRFAQATGTLAKTDRVDAAMLARFAAVLEPEIRPVRTPAMADLRELVVAKRGLVKDRTALLNRAKTLTLALLKRQSDRRLAQLNKQIAAIEAAAQAIIVADLALARRCEILQSIAGLGETTATTLVAEIPELGALAPKQAASLAGLAPITRQSGQWRGKSFIQGGRAAVRNALYMPALVAIRFNPDMKAKYDQLIVAGKPAKVALTAIMRKLIILANALLKADRNWQPKLA

SEQ ID NO: 133652 - protein, 373 aa, unidentified
MSVYVGIDVHRKRSQVAVIDQDGEVLANRNVPNGVEPILTVIGGLPAGTPAAFEAAFGWGWLVELLEDYGFAPHLVHPLQCKAIASARLKNDKVDAAILAQLLRADLLPEAWIAPPAVRQLRALLRHRAQLVRLRTLLRNRIHAVLADHGHDRSAGCWTGPGRAWLASLPLPEVSREVVQDDLALIDALQVPIDRLDWEVRQRARSDPRVRVLTQLPGVGLFTALVILAETGDITRFGSARKLASWAGLTPTVRGSDRTVRHGHISKQGSAWLRWILCQAAQTAKRHPDFAASYQAIARRRGKKIATTAIARKLLTRAWHLLTDAERAASHQATATTSAPAPPAGTRSPAGRGRQAPGELAFSHEPATPRSMT

SEQ ID NO: 133653 - protein, 309 aa, unidentified
MEIVVGIDVSKERLDVAILPQEEVFAVGNDHAGIDELAERLKGIGVDAIALEATGGFEMLAVAGLSAAGLTVLVVNPAQVRAYAHAIGRRAKTDPIDAAVIAAFVLATKPEIRPLRDAETQALSELVARRRQIVQMIVAEENRLRMALAKQAQKSIKRLLKALRRELESLDADLDSHIRKSPVWRVREALLTSVPGVGATTARTLLAELPELGSLDRRQIASLAGLAPWTRQSGKWKGKSFIGGGRGKVRAVLFMAALVASRYNPDLKAFRDRLVAAGKPKIVATVATMRKLLTILNAIIRDGRPWQNA

SEQ ID NO: 133654 - protein, 340 aa, unidentified
MGEVTTIGLDLAKHVFQVHGVDAEGATVLRKQLRRAQVLAFFSRLPPCLVGLEACATAHYWARELRALGHEARLMPAQYVKAYIKRNKHDAADAEAICEAIGRPTMRFVPVKTADQQAAVLLHRGRERLVRQRTGLVNALRGHLAEFGVIAPQGLRNVGKLIAIVRDEGDARLPDLARQVLQVLAAQIEQLEAAVAAIEKQLMAWHKSNPVSQRLASVPGIGPIIATAIAATVVEPSGFRSGREFAAWLGLVPRQNSTGGKHRLGGISKRGNQYLRRLLINGASANLLRSKATNADPWVIGLRQRRPSLVVAVALANKTARIAWAVMHRHENYQRVAAAA

SEQ ID NO: 133655 - protein, 360 aa, unidentified
MLIIGCDFHPSGQQVFVMERESGEVVGERWLNHGGDEVDQFYASWSPGAEVGVETSGNMQWFERKLEQYGHRLRIGDAGKIAAMDVRKQKHDRRSAQHIATLMCQGTFPDLRWRPTLSERDQRQLLLHRHKLVRMRAQVKNQLQHIAINQGQQKKQQLWTKKGRELLEKLELEPWTGRRRDDLLALLDTLEGHCATLDQAVERAAEENAAARLLKSHPGIGPVISLAFALTVGDISRFDRSRQVVSYLGLNPAEDSSGERRRLGSISKQGNSFMRLLLIQGAQTAVRGDAELGRQYRRLAARKNKAMAKVMVARKLAVRMFWILKTRRSYPEVVRMRGSSSHPGVETTAALSERPASPQA

SEQ ID NO: 133656 - protein, 373 aa, unidentified
MNGLLLQPARRQGTPARGAPPPPAAGTAVTIAVDLARSKWVYACRWDGAERRRLSTPAGLRHLQALVGEYLPQSGAVTVVYEACGFGHQIAWWVAAQPGATVLVVAPSTVEQAPGTRVKTDGHDAGALAFKAERGLLRSVYIPPPALHQDRQLSRTYAQVCGDRRRAQVRLRLTFQEQGALDAPARTAGWAALERWIATQQATLPAPVQACVAELLHQRAAAAASAQRLRTQLVALGRTAPYRAVVDALSAQPGVGRFTAGRVVLELGDITRFPTAPSLAHYLGLTPAEASSGETIRRGHTRKCGPGAVRGWLLQCAWVAIRPGGDAALRAGFERLAPRLGRKRAIVAVARRLALRLRARWRAALAAPPAAAP

SEQ ID NO: 133657 - protein, 511 aa, unidentified
MSGRNPKTPPRQPRPAPARPGRPPDDLRRLARSAAQQRRHAEECARIAALPVRDQHAAGIDAGDASHWVCVDAAPDGADTVREFAAHTAGLRQLVAWLQLCGVTTVALEATGAYGHVLFLTLLEAGLTTIMIPPRLARQIRGRPKTDRRDCQWIQRLHKLGLLPAVFRPDEATHTLRDYVRQRANLVRLSAQHIQRLQKALELMNLKLTKVLGDITGVTGLKVLRAILAGERDPLKLAQRRDRRCKHTAAEIALALDGRYRPEHLLELRCNLTLWEKYQEVIATVDVAIAAQLRAMRRHTELPPLEPRTRVRGRKPHDPGFDVRTALYYVTGVDLIAIEGIDEVHALTLVSELGTDLSKWPTLKQFCCWLGLCPNWKKTGGKVQSSHTRRGKNRAARALRLAAWALMRSQSYLGAYLRRQRSRLGAPKAITALAHKLARIVYNLLRYGVAYMKQTEEAYAEQVRARLEKQLRRRAVELGYELRPIEPKLETLIVGGEELTVTADGEIVAAK

SEQ ID NO: 133658 - protein, 379 aa, unidentified
MSTGEGFRQCVGIDISKEKFTASLYMYDRLSDEGCCTGSIDFTNTKQGFNQMVKWSRKEALKGHPLTYLMEPTGVYYEPLAYHLNKIGQTLYVVLPNKARKFCEAEGIKTKTDAMDARCLALMGCTSRKLRPWSPPKAIYHELRQLTRFRADLCKLRTSVTNRQESLQHMEGASKNVQKGCEKLVAEIDKLMEKNEKDILAKIAEDKELEARINRIATVKGIRVPTVTCIVAETQGFHLIENRKQLTSYAGLDVMAKQSGKEDPKHAISKKGNANIRAVLYMPALSAAHCNRQAKAAYGRICQKHPKEKMIGITAVMRRLLLLVYTLWKSGEEYDENKDVNSKPKKKEHALDHAQEDYILNTNEPVDWNATDENGQPPF

SEQ ID NO: 133659 - protein, 367 aa, unidentified
MKDSMFIGLDVHKATISVAVADGERGGEVRDWGKLPNRPDRVRKLAEQLGSKGRKLYFCYEAGPCGYGLYRQLVELGHDCIVVAPSLIPLKAGDRVKTDRRDARMLAKLHRANELTAVWVPDVEHEAMRDLVRARATAVRVANQARQHLQSFLLRHGRQYPGKKSWTKAYRRWFSTNRFEHSAQQIVFQDYIHAVTDAEARVVRLEAQIAELLPDWSLAPVVQAIQAMRGVAFIVAVTVVAEVGDVRRFPTPRQLMAYLGLTPTEHSSGNTVRRGGITKVGSSLARRVLIEGAWSYRMQPRVGRKQVDRMEELPQAVRDIAWKGQLRMCQRYKHLVGSGKPPVVANTAIAREMAGFIWAIAQEVTPA

SEQ ID NO: 133660 - protein, 407 aa, unidentified
MIFVGDDWAEDHHDVHLMDETGTRLASRRLPEGLAGIGEFHQLLARHAEEPDQVVIGIETDRGLWVEALNAAGYQVYAINPLAAARYRDRHHVSGAKSDAGDAKLLADLVRTDRHNHRRVAGDSADAEAVKVLARAHQNLIWTRNRHTNALRSALREYYPAALAAFDDLHDRDALAILGRAPTPLQAANLSLSKIRSALKAAGRQRNLDTRAQDIQTVLRTEQLAAPGAVTAAFAATTRATVGIIAELNRQIADLETELATHFETHPDADIYLSQPGLGVILGARVLGEFGDDPNRYTTAKCRKNYAGTSPLTVASGRKRAVLARYVRNRRLYDAIDQWAFCALNTSPGARLFYDQRRAAGDLHHQALRALGNRLIGILHGCLRHRVRYSEHKAWAHRQNNSDTQAA

SEQ ID NO: 133661 - protein, 338 aa, unidentified
MNITRIGIDLAKQVFQLHGVDNHGKVLVRKQLRRAQMLAYFGKLTPCLVGMEACGSAHYWARELAHLGHDVRLMAPQFVKPYVKRGKNDANDAEAICEAVSRPNMRFVTVKTVEQQVMQAEHRIRTRLIKTRTALSNEIRGLLAEFGIIVPTSLGQLRRALPELLEDGENGLLGHFRMLLAELAEELRNLDDRLKVYDVRLAQHARADDRVKRLLAVEGIGPVSASALVAMVGDGKQFGKGRDLAAWLGLTPREHSSGGKQRLGRISKQGDKYVRMLLIHGARAAMNAAANKDDPRSRWVVSLAARRNKNIATVALANKNARIAWAILSRGDDYRVSV

SEQ ID NO: 133662 - protein, 354 aa, unidentified
MKRTTKYVALDVHQATTLASVREESGRVIARSILPTDGPALTEFFRGMRGAIHVAIEEGTQAQWLHDLLAPHVDRLIVCDRRGQPRQGNKDDRHDADALSEQLRRGGLRAAYHGGGTGAGLKELTRCYQNLVEDTTRVMLRLKAVFRARAIQTPGRAVYRPARRAEWLAQLPPGGARVRAEALWAELDALVALRPKAKTAMLATAAREPGWAVLRTIPCFGPVRVALLLATMQTPWRFRTKRQLWAYAGLAVVTRSSADYVLVDGQAVRRRRAPLTRGLNRNHNRLLKHVFKSAATAARARPGPLQDLHRALVARGLREPLADVTLARKLAALTLRLWKKGERYDPTQLTQQAR

SEQ ID NO: 133663 - protein, 356 aa, unidentified
MERYIGLDVHAASCTLAVISQAGKRLKDFPVETNGQALVEAIRMIPGHKHLVFEEGLQSAWLYETLSPHVDETVVAGITESRGQKDDRRDAYGLAEKLRRGTLEKRIFKAPRQFSVLRELSRIHITAAHDLVRVQSRIKSLYRSRGIGVPGGSVYSARHREQWQERLPASVQTRATRLYEQFDFLAEQKKQAERDLLGESRKHPIVRMLQTAPGFGPIRSARLVPIVVTPHRFRTKRQFWSYCGLGIVMRSSSDWVQTPDGGWIRAPIQQTRGLSRQYNRVLKDIFKGAATTVITQQNKDAIYADYQRMLDSGIKPSLAKLTLARKIAATVLRMWKDEEEYRPEPVRRSRMTDRDA

SEQ ID NO: 133664 - protein, 419 aa, unidentified
MKPSKTKKVTFVNEKTLIVTVDIGKSIHYGYFRAPNNKEVKPFPFHNSWHSFEKFFSKICQFKKEQDLEDIVIGFESSGCYAEPLCHYLSKKPVKLVQINPMHTKRLKELTGNSPNKTDRKDTRVIADIISFGHALTVVVPEGAAAELRSLSHARERAVRYRTVASNQLQDLMFKIFPEFLSIMNNTSTKSAIYLMKNTPSPEDIVHLGLETLTNVLKKVSRGRLGIERAKELFEAALNSVGIEQGKKSILLEIEHLIFQIENKSRFIVFLEKQMNEYLKQIPYSRYLLSIRGISTITAGGLIGEVGDFKAFDRIREIEKLAGLNLYEVSSGAHRGRRHISKRGRSLMRKLLYYAAVNTVKSYGIMHEHYQKMIKGGKPKTKALIAIARRLLSIIFALVRNKTIYVDHYNDNHNCKDAA

SEQ ID NO: 133665 - protein, 316 aa, unidentified
MYLGIDVSKLTIDCCLIVDGQNYQKKFQNNKGGFEQLINWLQSHKVNDKLHCVCEATGTYYEALAEYLYSRYTITVENPRKIKGYAIAELQRSKTDTQDAKLIAQYCQDRKHKLKAWKPPTKEQKQLQEIARYLDYLKQQRATEKAKQHEAPDYIKSHIQTTISNLTAQIQIVKKQLLQFYKDNPSYNKLRKRLKTITGIGEQATAVLLSTYKRHEFKNARQFTAYLGLDPRKFQSGTSVNGKSRISKIGSSEIRKSLYMPALVAYRCNAFPEFVGRLKNKGKHIKLILIAIMRKLAVIAFTILQNGQDFQVERYK

SEQ ID NO: 133666 - protein, 409 aa, unidentified
MQALVERGCGLDVHQATVVACLLIVLKDGKVRKQMRTFGTTTRELLSLREWLLSEGCTHVAMESTGVYWKPVYAILEGALEIVVANAQHVKKVPGRKTDVKDADWIADLLCHGLLRSSFVPPQPIRELRDLMRYRRKLVESQTAERNRLLKLLETANIKLASVASDVFGVSGRLMLQALAEGKATPQEIAQLAKGLLRKKIPELEPALEGRLEEHHRFLLELQLRRLQAVEDLVVLERRIQEKLKPYAAQLALLQEIPGVDWTLAAVIIAELGVDMKVFQSVSQAASWAGVCPGNNESAGKRKSSRIPKGNVYLKTALVEAAQSAAKAKGTYLRDKFYRLKARRGYKRAVVAVAHKILVAIYHMLSQEVSYQDLGDVYLDKLNKHHLTRNLVHRLERLGYTVTLEQKAA

SEQ ID NO: 133667 - protein, 363 aa, unidentified
MPQDSTDVAIIVGVDTHNDIHVAVAIDTLGRRQGQLTVPATAAGYQQLHRWALNLGPNHGFGVEGTGSYGAGLARYLHRHGAHIIEVNRPDRATRHRLGKSDPIDAEAAARAVLAGTATGTPKHGDDYVEMIRILKLTRDSAVKSQTQATNQVRAVLVTAPPQLREALQHLPRVALLQRCAALRVGELITPLAAAKHALRLLARRALALRAEAKALRAHLTELTAAACPALVELTGIGPDSAAALLISAGDNPQRLRSEAAFAALCGTNPVPASSGKTTRYRLNRGGDRQANAALHRAVVTRMHWHEPTQAYVQRRTTEGKTKPEIMRCLKRYLARQVYRCILPAPVGEKAPAPNQKDSERAA

SEQ ID NO: 133668 - protein, 413 aa, unidentified
MDVLFERCAGLDVHQATVAVAVRIPGSGKVRTQVIQTFGTTTPDLLTLRDWLSTHGVTHVALESTGVYWKSVYYLLEDAFTVLLVNAAHMKNVPGRKTDVQDCAWIAQLLEHGLLRGSFVPPPAIRELRDLTRYRKAVIQDRTREVNRLHKVLEDAGIKLATVATDVLGVSGRAMLAALLAGTTDPAVLADLARGRMRAKLPALRQALTGRFRARHAFLIGQILAHLDYLDETLAALSREIATQLTPLASAVTRLRTIPGVEQRTAEVLVAEIGVDMRRFPTAGHLVSWAGLCPGNNESAGKRHRGTTRKGCKWLPITLIEAALGAIRKKGCVLGARYRRIMRHRGHKIAVVAIARTILEIAYHLLARETTYQELGADYFDRRDKERATHRYVRLLEQLGYHVTLEDPTPIAA

SEQ ID NO: 133669 - protein, 371 aa, unidentified
MKSIIYIGMDVHKKTYSLCALLKETGEIIGETKIPADVSLIIKFIENAKKSVDSDDVQIKTGYEAGCLGYSLYWQLAEKGIECDILAPSTMHRSAKNKVVKNDRRDAKNIAANLANGTYKSVYVPTDEDVEIKEYIRMMHDFKIELKKVKQHINAFLLRFGHHYPGKSKWIPAHIKWLKELELSDMYREILDEYLSQLEILSEKIERYKYRLEELSQKETYNEKIGQLRCIKGIDTTAAMTMHAETSDFDRFPTANAFASYCGLTPGEDSSGDSYHRLGITKQGNSMIRTTLVEAAQTLVRGTIGKKGKKVKSKQKDQDVKVIDYADKAVIRLQKKYHRMIFRGVKRNIAITAVARELACFVWGIETGHIS

SEQ ID NO: 133670 - protein, 351 aa, unidentified
MDIIGLDLHQRESQLCICDADGTITERRIVTSRERFTAVLGDRPRAKILLEASTESEWVARHLESLGHEVLVADPNYAPMYATRSRRTKTDRRDARTLMDACQTGAYRLAHRLSEPRRHVRAELAVRDALVRTRTRYVALAKTLVRRDGLRVTSSESHLVAQRIGALSLSPALEAELQPLFTVLAPLNEQIAAADRRVATLAATDPVVARLATAPAIGPVTASAVVATIDDIARFRSAHQFEAYLGLVPGERSSGEKRHVGPITKAGNSRVRWLLVEAAWRLLRTKSPEAAALRTWAHGVAGRRGKKIAVVALARRLAGVLYAMWRDGVSYDASRIRGPRIAAAEVTARAG

SEQ ID NO: 133671 - protein, 343 aa, unidentified
MQVVRIGLDLAKYVFEVHGVDKHGKVIVRKRLRRDAVARFFANLPACLVGMEASNGAHYWARMFTELGHQVRLISPQFVTPYVKSNKNDRNDAEAICEAVGRPSMRFVPQKSTDQLAVQAVHRIRRRLVADRVRLVNQIRGLLSEHGIVIARDIAQLRRGLAVIVGNINDGLSEMVRALMRELQAELAELDARITAYDRRIREIFRASEQCQRLGKIEGIGPVTATALIAAVGDRSCFKNGRQFAAWLGLVPKQRSSGGRTRLFGISKRGDRYLRTLMIHGARAALSRAGGKQDPRSLWLGKMRQRRHPNVAAVALANKNARIVWAMLTGDTAYEPALSVKAA

SEQ ID NO: 133672 - protein, 343 aa, unidentified
MTKLNVIGVDLAKNVIQVSVLSPSNQELRNSALTRRKFSEFLGRQRPSLVAFEACATSHYWARVAQRQGHEVKILPAKAVFPFRQGHKTDENDALAVAEAARRPNVKLAPLKTVEQQGMQAIQRSRELLVHERVSLANHLRGLLMEFGIVIPQGFASLYRLLPEILEDGENELPDLYRPTLNLLYGRLCDLREDLERLNREIEVLVQANPVCRRLTALEGVGPIGSVLLYATLGTGEAFTNGRQFSAYLGLTPKQFSSGGKVNLVGISKRVANRRLRAVLITGARAYVYRMKEPKTAKDRWLWAIVERSGKCKAAVALANKNVRTAWAMLTQNTEYQRYPLAA

SEQ ID NO: 133673 - protein, 331 aa, unidentified
MDFKEALGIDVSKQTIDVVLHVNGGYSQFINSTTGYKAMLLWVKKKTGLNLVQVLICFEHTGLYSMPLAVFLNERNTSFSMVAALEIKRSLGIVRGKNDQIDAKRIAGYAYLRKEQLMAFELPSTNVLKLQKLISLRERMVNQRAGYMGSLREYRCMLKQKDYALLCSTFKKMIHYLSKQIGAIENEMKGLIAEDEKMGILYHLIVSVKGVGLILASNLLVVTNCFRSFADSRKFACYAGIAPFEKQSGTSLNAKSRVSHFANKKIKSLLNLSASSAIQADPELKAYYQRRVEMGKSKMSTLNIVRNKIVHRIFAVVKRGTPYVSLYKHAA

SEQ ID NO: 133674 - protein, 321 aa, unidentified
MSQNTSAIIMNDKKTSVYAGLDIAKASLQLHLQSKSFDLANAAEGHAQLLKRLAALPGVHVICEATGGYERAVVAALHAAQIPVSVINPARVRQFARASGELAKTDPIDAATLTAFGQAFAPEPTPPRTATELKLAALVSRRAQLPELRVAEARRADTCADLDLRKLFTPWLAQMEKQIAKVEVLIEALLKERATLADQVQRLDDIMGVGRLTAVMVLATMPELGTLNRGQAAALAGLCPYNRDSGQWAGKRCISGGRAEVRRALYMAALSASRSNHLLKPFYDRLIAAGKPAKVALTAVMRKLIVLMNHLLKNPNFSLAH

SEQ ID NO: 133675 - protein, 347 aa, unidentified
MTVYIGVDFHARKQTASYLTTADGEIQQVELEHEKDYVRTFYEQFRGQKVIVGFESSGYAAWFEELMEELEYETWIGHATAIRQFARRRQKNDRRDADLILELMVRGDFPRLHRYSRESRETLQQLRYRQRLVKMRTMVINSLRFMVGSRGVTLRGTLQSRPGQARLEQVALPGPLGQQRDELLRLLIEIQQRVETVEGWLKQKAEADPRVQRLRTHPGIGLLTGLGLVATLESIERFSHSRKVTAYVGLDPVEDSSGERRRMGSISKQGSRLLRLLLVEAGQVAARRDPELGNVYRRVTLRRGHATAKVAVARRLLVRAFIMLRDEIDYPEFCRRGVAARSSRGSA

SEQ ID NO: 133676 - protein, 391 aa, unidentified
MSGTSDRVVIGMDPHKRSATIEVMAGDETIVGGGRFDTDRDGYTAMRKYANQWPNRVWAIEGCQGIGRHIANRLLADGEQVVDVPPKLSARARVFATGQGRKTDATDAHSIALVGTRMAGLRPLVNDEQLALLRILVDRRRSLGEDHTRMVSQLHQLLLELIPGGAKKSLSAAQAKALLATVRPRDTVGKARRRAAAELIGDLERIYRRTKDADKEPKELVASTGTTLMDLHGIGPSGAARLLVEVGGITRFPNRAHFASWNGTAPIDASSGEQVHHRLSRAGNRQINRVLHIMATVQLRNPTEGRAYFDRKKAAGKTSMEAMRALKRRLSDIVYRRMIDDATTTVTGPGGQRGTTTDSSVTSSHPQASSSEKSLPGPATSQPRTPLPTSA

SEQ ID NO: 133677 - protein, 458 aa, unidentified
MMPRKKVTSKNDRAMPMVHPNAAAIDVGATLLMAAVRADRTSEPVRSFGTFTTDLHRLAAWFAECGVETVAMESTSVYWIPIYELLDARGFTVFLVNARDAKHVPGRKTDVSDAQWLQRLHSYGLLRASFRPKGHFIELRAYVRQRERLLEYAASHIQHMQKALTEMNLQLHHVVADITGATGLRIIRAILSGEQDPKALARLRDYRCHSSTETIEKALAGNYRAEHLFELEQALALYDAYHEKVLGCDIRIEAVLKELSIGRGHNCEALPSSRRRTDQINGLAFDVRLALFALLGKDITRVDGFGPYLALKLIAECGDDLLAWPSTKHFTSWLGLAPNNKISGGRVLSSRTRRTGSRAAALLRLAAVTVGRTDTALGAFHRRLSARIGKAKAVTATARKIAALFYNAVRHGMEYVDPGASFYDTRYRQRVVENLHRRAKTFGFVLRPIEPASVGVVS

SEQ ID NO: 133678 - protein, 464 aa, unidentified
MKVAKVNHQNRKPKKMRAPSFPIINPNAAGIDIGSAEHWVAVPEDRDEQPVRRFDCFTQDLHAMAAWLKQCRVETVIMESTGVYWIPVFQILETHGFEVKLVNAKHAKNVPGRKTDVLDCQWLQRLHTYGLLSGSFRPDDAICVLRSYWRHRDTLVSYVSSHVRHMQKALTQMNVQLHKVISDITGVAGMSIIRAILNGERNPLKLAQMKNNRIRSTTETIAKALDGDYRQEHLFSLKQAVELYDFYQQQIQACDREVQAYLSQLDGIDIALNPIPPSRRRIQKHKGNQPDFDLRTHLYRISGVDFTQIDGLDVLNVQTILSEVGLNPDAFPTVKHFTSWLAICPNNRITGGRIKSRSTRKAANRATEAFRMAAYSLMHSSSALGAFCRRMRARDGSPKAITATAHKIARIFYQMWKYRTPYEDLGADYYEQRYKERVLSGIKKKAKQIGYFITLTPMPQQVVS

SEQ ID NO: 133679 - protein, 407 aa, unidentified
MRDCCCGVDVHKSFIIAVIASFIGKDVVFTKPTRFSTFSKGLREFKDWLRIHNCFEVCLESTGKYYVPVYRIVSDDTFHVDVVHPKYVKAPRGKKNDKRDAKRIADMYLRDHIAEYSIIPPADILAIRDITRYRRKTVNMLAAEKNRMSNCLTVSCIKLDEVLSDIYGKTGQAIIGQIIDTGGCDFDPSPYIDKRVKATLEDFRMALEGDVTPATHAKMTMIQQRLAFLGKQKTELELTMESLTKDFNRQLEILDSAPGVDSISAISILSEIGVNMKEFGSVKRFLSWVGVVPQNNESAGKKKSTRIGKGNTWLKPVIVQCANAAIKDKKHPEVREKYLSIKKRRGHGKALVAIAKRLMTSIYYMLLRNELYNPGIGKDSAPKRGKIVLEKLIEHYRLKGYTIITEG

SEQ ID NO: 133680 - protein, 356 aa, unidentified
MSRTSASKTHPKAATPVSITPVIKQCIGIDVSKDTLVVCFSQMDNRQQIHCKATKRFANRKGGWKALDSWMKMLSTPQVPLWVVMEATGVYYESLAYYLKMQQYQISVILPNKSKSYMQSLNIKTKTDGVEARALAQMGLERKMKLWRGCSQIMLTIKRLCREREALLENITAAANQLHAHKHEYQPDEKTLQRTNRHLKFLRKQIAEIDLQLEKTLQQDTVLKAKVDNVCSIKGVGMLTALIIVSETNGFELIENKAQLVSYAGYDVVERQSGSSIRGKTRISKKGNSHIRRALHYPALSAVRYEGHLQDLYERVTERNPKVKMIGLVAVQRKLLVLIYTLFKTNQPYDPKYATT

SEQ ID NO: 133681 - protein, 441 aa, unidentified
MERFGLLFPRSAGIDVGSMLMVVSYTDRNDMINVREFNSFTQSLVELSELLQGEGVEQVVMEATGEYWKTLYCILESHGIQVLMANPSHYRNVSAQKTDINDAQWLHQLLAHGLIRSSHIATELYRQLRRYVHERKTCQDLKSDTLNRIQKTLTLMNIKFQHLISDIEGISGMKILRAIISGVSEPETLLNLVSLNRLKARPEDLMSSLEGDYQEHHIHILASMMKAYDFHKSQMLEYETYIEATLEKLVPVSDSGETLAVIGKKKVKARKNEYHFNLSDYLESIFGVDLTAVDGLDEIGLLAILSVTGTDMRKWPTASHFASWLNLSPRPKISGGKKIGNEKRSTNNPATQAFRLAANSLWQNKGPIGQQYRKLAATKGSAKAIKAIARKLATIFYNMVLKKEAFDPKKIQQNVEIREAKRIARLLKDAANMGYTIQKVA

SEQ ID NO: 133682 - protein, 346 aa, unidentified
MVLIGCDFHPSWQQVSWISRETGEVGDQKLVHEPGAVEKFYRRFPAGARIGMEATGNCQWYLEWMAKLGHEVWIGDAAKIRASDARQQKHDKRDAQLLVKLLDEDRFPRIWVPSREQKDLRQLLIHRNKLVRIRAQVKNGLQHLAMNQGLQKKKRLWSAAGQQALRELPLAPWASRRREDLLKMRSELDAKIDALDRAVVEAAEKDARARLLMTQPGVGPITAMAFVLTIGEVSRFPRGKQVASYLGLIPREYSSGGHQRLGSISKQGNTFLRMLLVEAAQGAVRCDAGFRKEYLHRCHRKPKGVAKVAAARKLAIRLYWMLRTNTAYPEVVRIESSSRVPLVGAS

SEQ ID NO: 133683 - protein, 390 aa, unidentified
MNDTGEKLAAKRFPEGLEGIAGLHALIAEHTTDPGEVIVGIETERGMWVQALIAGGYRVYAINPLSVSRYRDRHNVAGAKSDPGDAKLLADLVRTDRHNHRPVAGDSDEAAGLKVLARSHQNLIWDRTRHTNRLRNDLREFFPAALVAFESLADRDAVAVLGKAPHPELARRLSVAQIRSALRKGGRQRNLDDRATQIQAALRTPQLTAPPDVAAAFAATTKALVEVIAGLNDAIGELETELATHFDEHPDADIYLSLPGLGVVLGARVLAEFGDDPDRYDNAKSRRNYAGTSPLTIASGKKHAVLARHVRNRRLYDAIDQWAFCAITTSPGCRQFYDHRRTTGDLHHQALRALGNRLVGYLHGCLRTRSTYNEHTAWAHRQPAPTQTAA

SEQ ID NO: 133684 - protein, 344 aa, unidentified
MNHIGADIHIKNISFAVVNELGTVRYKREIDTSERGIVEYVKSIGKPRIVIIEEGSLADWVKEILEQRGDRVVITDPKRNRWIGKSQQKDDDIDAEKLAQLHRGGYTKEVVHLDKEQRGFKGLVMYYHDQVTMRTRLKNKLKAKFRQQGISCSGKTVYDKKHQEEWLSKLPERAHLRWQVEGYMRQLHEADEHIAAILKKMKMVSRSYPEVGMIRKIPGFNWITGCTVVAVVGDMRRFSTKKKLWMYSGFGMMRRKSSRVIYEEHLSRDYNRALKCAFTIASKGAIRSKDNPFRRQYHRLVMERGILPYRAELTIARSLATTVYAMWKKGQAYDPKLRDYPVAA

SEQ ID NO: 133685 - protein, 362 aa, unidentified
MNLKYSVGLDVSSKKINACMCVIDEKQKVVVKSSTIICNTLKGFATLEEWIIKHKKEAIPVVVCMEATGIYHENCAYYLHGKDFNVSIILPNKAKKYLEAIGLKSKNDSIDAKGLSQMGAEQCLEFWEPMGTFFYELRLLTRQHQNVTELKTVLKNQLSALSYAMHHLDAVNNQLEQTIILFEMQLEELDKEIKAHLKSNNEVHEKAENILKMKGLGVLTLSTVLAETNGFTLFNNYKQLVSYAGYDVIEAQSGTRVGKTKISKRGNSRIRRALHMPSLVVIQCKVKPFKDLYDRTYEKHGIKMKSYVAVQKKLLIMIYHLWNKNEVYDADYQLNIQEEEQKFSLGQLASEKTQSQKNSPNL

SEQ ID NO: 133686 - protein, 341 aa, unidentified
MNYAGIDLASKSSAVAVVDEQGNVMEQREVATDAGQLAKVLAPFAPVSVVVESSPLAEWACQVLEEAGHQAQIIDARAAKHLMDARKKTDRRDAQTLAQIVRSGWFQPVHRKSDSARLERTQLQGRQGLVRTYCSIDSQIRGLLRAHGICLGLVSKSRFAQRVRERAQQHSEALVAVLEPLLAVYEHSLEQAEAMKKQMQAQQREDELQQQLQSVPGVGPLTAKVFASTVDDPRRFANGEQVADYAGLTPGVTQSGERCVRGSITRQGDHLLRWHLVEAAHAMIRQGSDCRLKRWARQLAETKGAAKARVALARKLAIVLWRLWLKGERFEPEHGTTGAAA

SEQ ID NO: 133687 - protein, 315 aa, unidentified
MAEPFFAGIDVSKDHLDVAVSQGDEIIECFQKPHTEDTILGLVEKFKEIMPKRIVAEATGGFERALAAYMFEAGLPIVVINPRQARDFARATGILAKTDKIDARCLARFGAVIKPPSRPIKDAQRQAITDQVTRRRQIVHMLAQEKNRLSRTVEPVRADIEHHIAYLKERLDKSNKDIQQIIEATPVYQETVELLSTVPGIGPVTSASLIANCPELGSLNRRQIAALIGTAPFNRDSGTRSGPRCVWGGRRTVRHQLYMATVSAIRCNYKIKSFYIRLITAGKKPKVAITACMRKLIVILNAMVKHRKPWQVGAV

SEQ ID NO: 133688 - protein, 348 aa, unidentified
MQRSGYWIGVDLHSRVIQVCVLDAQGTVVLEERCKGASLAEGRKLVEELAEQFPEGQVAVEALGCNRWFVAACREASLKVTVANASKLQLKKAGKKTDRRDAYEMARRLRLGDVARNAKTYYPTDQEYGLRQLLRRRHGLVQLRTALVSQIRAMLRSYRAPQPRGDLYGKQSLQSLRATELINPLETVVLRTQVNALEALQASVSNLDRLVASESKKGASAALRLLPYVGPLTAATLVAELGDVHRFRNSKAVASYAGLVPRVIESGQRSYHGPLVNHGNRELRFVLGEWAVQLLARHELIKRWARPRLKRSPKNKVRVALARRLLVGVWHTLRTGEVFDLERCLALN

SEQ ID NO: 133689 - protein, 343 aa, unidentified
MEHCGIDVHSKSSEVVIVDERGERSDGARISTTESSLRRWFGGRAPMVICLEAGGQSAWVARILTSLGHDVVVANPARVRLIAEATLKNDQVDAETLARLVRADRRLLCPIIHRSADTQRQRGVLRARRALVNARATCLNTSRGILRSFGFRTPSRTAERLAASLVDSQIPEALVAVVAPLVQLALELDEKIAALDAEVETMGEAYPEVALLRTIPGVGPLVGLAFVLCLEDPSRFRRSRDVAGYLGLRPTMRESGSTSRYGRITHQGDTEMRRLLVQAAHGVLRSRADSDLKQWAQGLVARVGKKKAVVALARKLAVVMHTMWVQGEPFRPVRDTIDVDMAA

SEQ ID NO: 133690 - protein, 359 aa, unidentified
MAENQSSKATVVGGVDTHKELHVAAIVDQHNRVLGSEYFPTTRHGYKTMLKWMRTFGQLQRVGVECTGSYGAGLLRYLQRAEVEVLEVTAPDKTDRRKRGKDDTMDAENAAHAAFANIRTVTPKSRDGMVESLRVVIVCRKSAVAARRISLQMIQMNIVSAPDELREVLRKMTRMQLIRTLAAWRPDVTDYRNVTSAYRIAFKSLARRYLELHDEIADLDVMIASIVDELAPELIAKNSIGYQSASQLLITAGDNPSRLKSEASFAALCGASPIPASSGQTNRHRLNRGGDRAANSALHIIAIGRLRTEQRTRDYMEKRQADGLSKLEAIRCLKRYIAREVYFILRNRNRAINQTQIAT

SEQ ID NO: 133691 - protein, 411 aa, unidentified
MTERVAVVGVDWGDKEHVFEIRAADGSKRRGSFPSKPEAVHGWVAWLREQYPDGTIEIAVEQSHGPLIYALSRYDSLRLLPVQPARTSAYRRVARPSGAKSDPIDAGLICDYVEKHGQDLTALAPADPLTRELQILVEWRRKFVTTRVAQCQQLRDTLKQYFPQALDWSGELGCPMSLAFLKAWPELETLQRSRPATVRQFYTCHGSRSAKLIELRLSEIAAAVPLHRDRALIEALSLIVTTLVGMIRATLEQIARFDDRIAQLWSTHPDRELFESLPGAGPVLAPRLAVALGPDRSRWTATQLQTFSGIAPVIAQSGSRRWVHSRWRCPKFLRQTFHEFAELSIPHCSWAAAFYKTQRQRGKRHHAAIRALAFRWIRIIVRCWIDQRPYDNDRYLKRLAQAGSPLATVAA

SEQ ID NO: 133692 - protein, 356 aa, unidentified
MRRKDQRQEVSFRGKEVFVGIDVHKESWQVTVRTEGEEVFHGRIASEYRVLQRVLNRFAGSKMKVAYEAGPCGFGLHDQLNADQIEGIVVPPSLIPIESGNRVKTDKRDSRKLARLLESNMLKRVHVLSPEDRADRELLWTRRQMVEHRNDVARQIKSKLLFYGIRSPFPAKAGWSKGFIRWIQGLNWEWGSVKVSLESLVELYEYLTGRIVGLNRKVAELSRSDKYRGRVKLLRSVPGIGVLIGMEILVEIQDMARFHRADELASYLGLTPSEFSTGQYVRQGRITRCGNKRVRICLVESSWHLITKDPWMRRKYEGLRQRKGGKRAIIAIARNLIIRVRRILLNEEPYIVGAVA

SEQ ID NO: 133693 - protein, 341 aa, unidentified
MERLYYIGLDIHKKTISYCVKKVDGTIVEQGAIAAQRKTLLKWMGGLPGPWLGAMEATLFTGWVYDFLKPYAIDLKVAHPEMLKAITAAKKKNDRADAEKIADLLRVNLLPECHMLSEELRELRRILRYRNMIVRTAVKMKNKMSGLLMEVGATYNKEKLHRRKYFNNLLERVEDVPDSVKDMLKLSRSSLEMFEAVQKKLVHTLREDKLIHERVERLMSIRGVGEVMALTRVLETGDSSRFHSARQAISYCGLCSAQRESAGKDQRGPISKKRNKHLQTMLIEAAKLAPRWNPQLAVLHEKEVNQGNRNRATISVARKLVEYMLAVERQQKDFVPPVLAA

SEQ ID NO: 133694 - protein, 316 aa, unidentified
MEIAPIFIGIDVSKARLDVAMRPSAEKLSVSNDEAGIQALVKRLSELKPVLIVLEATGGLERSVSGTLGSAQLPVVVVNPRQVRDFAKALGQLAKTDRIDAEVLAHFAEVIRPPLRPLPDKVSLELRALIARRRQLIEMMVAEKNRLSAASKAVRKRIEAHIRWLETELDRADKDLDQSIRQSPIWQEHQDLLRSVPGIGPVVSRTLLAELPELGRLNRKQIAALVGIAPLNCDSGTFRGRRGIWGGRATVRAVLYMAALVASRRNSVIRNFYKRLREKGKAPKVALVACMRKLLTILNAMIKHKTRWSENILQTS

SEQ ID NO: 133695 - protein, 359 aa, unidentified
MLTQSNKIDFNGQHIYAGIDAHLRSWNVTVMTEELIIKTFSQNPSPEILHQFLTRNFPNAIYHTAYEAGFCGYWIHNRLSALGVDSIVVNPADIPTTDKEKVNKTDQRDSKKIARSLRSGHLKGIYVPSLKTLEDRNLLRTRGVLVRDLTRNKNRIKSFLYFRGIEIPERFKSKSTHWSKRFMSWLKSVELSEKSAQKSLNLIIESSEKLRLTILEATREIRELSQSEAYAGRVLLLRSIPGIGSLAAMTLLTELEQINRFSNFDQLCSFVGLIPSTNSSGEKENIGELTHRGNNFLRCIIVECAWIAARRDLALNKSYHEYCKRMEPAKAIIRIARKLLNRIRFVLKNNQPYESSVVK

SEQ ID NO: 133696 - protein, 342 aa, unidentified
MKFYCGIDLSARDCHVCVIDEQLKVMVQQKLRNELPKICRLLGPYKANLKIVVESTFNWYWLIDGLQAAGFEVVLAHTLGLYLITGAKVKTDRRDAYALAKLLLVGVVPAAYIYPVETRPVRDLLRRRLHLVQVRAGEYGSLRRLLLRQGILSSKQQEIKTATETELEQWFAHPLVRLHASQELQRIELYSQQIAELEKTILLLAKTEQSYELLLKLPGVGQTIALTILYEVGELTRFANVKVFSSYCRVVPGIAQSGNVTRRGRASKQGNHYLKAAFSQAAVHAVPCYPKVRRYYERQLKRHQGRGRQMICYNIIAHKLAQAAFHVLKEQTEYREELLFGR

SEQ ID NO: 133697 - protein, 411 aa, unidentified
MSDSIFVGIDVSTKSNKVCILDASGNRLANMSVHNNSYGSSQIVNRVIDLLCKTGCTKVSFGLEATSVYGDGLIFYLKQDKLLKNYATKVFLLNPKQVHNFKKAYSELPKTDDVDAWVIADCLRFGRINLREIYFDEQYKALQRLTRARYHVAQNIVREKNRYLTNLFLKFSGLYQENLFSNKFGATAMELSNGAFSLDEIVHMPVDELAQFINTSGKGKFADPKALADGIQKAARSSYRLPKTVEDSVNRVLAVSTLAIKSYLEQLKSLDKSISSLMETIPNTLTSVKGVGPVYAAGILSEIGNINRFKGQASLAKYAGLSWSRYQSGNFDSDNTHMINSGNRYLRYYLIEAANLVRRHDPEFKRFYELKYRETPKTPHKRALALTARKFVRLVYALLRDQRLYIPSRIE

SEQ ID NO: 133698 - protein, 350 aa, unidentified
MQKIYIGVDFHARQQTICYLTTDSGELRFHQLPHQDKAAVRAFYAQFRGSVVVGLEASGYSPWFERLLEELGCEVWLGHASEIRRRARWRHKNDRRDAELILDLMLHDEFPRLYLPPLPSREVLRMLRYRQKLIKMRTLGKNSLQALALQSGLAKGPHLFTKAGLQELRRAPMSAAMQWQREQWLQLLEPLNQRLLETMLWLKQQSQADARISRLRTHPGVGLLTALCLVHSLEPVSRFSNRRKVTAYAGLDPLERSSAERQRFLGISKAGSRVLRFLLVEAAHTAIRKDAQLGQFYQRLAKRHGRPKAKVAVSRKLLIRTYIMLRDEIDYAEFQRRAVAARPVLPAHGL

SEQ ID NO: 133699 - protein, 415 aa, unidentified
MIPAVVERCAGIDVGKKFLAVCVMTGPASEPASEETRKFGTIRSELEKLRAWLKSSGCTHAVMESTGCYWKPVLNVLEDDAEFSLHIVLANPQQVKAVTGHKTDPHDARWLAHLLRHGMIRPSFIPPRAIRELRDFTRRRKQMIGLAAQERNRVQKILEDANVKIGDVLSDVFGLSGQLMLEALVAGNATAADIAQLAQRGARKKIAELTAALEGHQMRTAHRTLIRHAMRHLAFLAGEIEALDHDIEQMIESGGLKQPHQLLQSLPGIQATAAATILAESGAEMKQFPSAAHFSSWSGLAPGNNESAGIRKRAPSLKGNPHMKTALVEAAWSATRTRHSEFESRYRQLHARLGHKRALVANAHTLVIRVYEVLSTALPYQPQTGLPPRDLQRLIRHHSRRLNCLHRWLSLPQIT

SEQ ID NO: 133700 - protein, 435 aa, unidentified
MSNILFENLFISVGIDVGADFSWMSIALPNQTFVGKPFKLLHSDLNSLSLAVSKIKEAEELYSLESRIFLESTGIYHYPLFCYLRDKGFNVSVINPIITKNSTNMNIRKVHNDRFDSKKAALVGLKPDLKVSLMPSDLALDLRNLSRAYYDLMDNRSAYVNKLQGELRMIFPQYLNIFSKITTKTSLALLEKYTSPEAFLNASKDEIINCIRSTARFGLTYANNKYNAIIQAAKDATTFGYSVSSNFKRIRLFIRFIRNYDDEVSSLLSDMHELVDANKTTDFVKQIRLVESYKGAGFLSAVSLMGEIGDFSSFHSPKQLFAYFGLDPSVKQSGKFEGTKITMSKRGSRIARRVLHTMALISISKNRDGSAKNPVLRDYYLKKCQSKPKMVALGAVMHKVCNIVFAILRDEKEFSIITPEDHQMNYLKAKCDKAA

SEQ ID NO: 133701 - protein, 456 aa, unidentified
MDTLHRVCAGLDVHKDTVVACVRRLDDRGRPHQEVKTFGTTTPDLLELLDWLLGQQVPLVAMESTGVYWKPIFNLLEGPVEVLLVNPEHIKKVPGRKTDVKDCEWIAQLLQHGLLKASFVPPRPIRDLRDLTRQRSQLVGEKASVSNRIQKVLEDANIKLGSVASDVLGVSGRDMLRALLAGVDSGEALANRARGRLRDTLPPLRKALTGRVTEHHRFLLGMHLDHLTHLETLIGRLDQRIGKEMEKDRPPEPPEPKPPGVSPEPASAEKPGTPVDVQGSSAQAAKGSGGLGLWQSLWLLVTIPGINRRTAEVVLAEIGTDMSRFATPQHLASWAGLCPGNNESAGKRRSGRTTHGDRWLRSILVQAAWAASHTKATYLSSQYRRLARRRGKKKALVAVAHTLLVMCYEVLKKGEAYHELGADYLDKLEPDRRTNQLVRQLEKLGHKVTLEPKAVA

SEQ ID NO: 133702 - protein, 425 aa, unidentified
MNYKQNEKINQVKESTLVIGIDIGSTTQYARAFDWRGIELGKVFTFSNSREGFESFKAWMQHLQDKYRKSDVIVGIEPTGHYWFDLGAYLEDEGILLVMVNPYAVKQTKELDDNSQSKNDRKDPKVIAKLVTEGRYSAPYTPDGVYADLRIMVANRKRLIREMTQIKNRFARWFAIYFPEYTDVFGDYEAQSSMLLLKKVCTPEAIVELGAEKINQIWRDAKLRAVGMKRATTLCETAKRSIGLKKGSSAARYEMKLLLEDYEYKKAQLDAVMEEIEKLCRKIPESEQMLAIKGIGVITVAGFLAEVGDVRRFESPRQIQKLAGLSLRENSSGKHKGQTTISKRGRSKLRAVLFNAAIPLIAKNPEFKSLHEYYTTRANNPLKKKQSVIAISCKLIRVFYAILANGVTYDAQKMLSDIHRQPQAA

SEQ ID NO: 133703 - protein, 467 aa, unidentified
MQVRLGIDIACRAVHRAACADQTGTIVWSGHQFRTCAAELEALWARLPGDATEVLVVMEPTRNAWVPLAAWFRRRGATVVLVPAEQSADLRAYYAKHTKTDRLDAELLARLPLLHPDGLHPETTNGPGDPLKRAVKIRSGLVHRRTACMQRLDALLEILGPDWVAALGSDMTQTAFKFLAGWANPHQVKRLGRARLARWFQRQTRKAWGERRADAVVSAAEATLALWGPTGLDYEALAADIATEASLALELSRQIARLDERIFDLYCDADPDHILLSVPGVGKILASQIRGRLGDPRRFTSLAAARSFSGLIPHQHSSGLTDATGGPTKHGDACLREALFLAADHARKTDPTLAARYQRLMCQTGRHHTSALCTIATVLLTRIVACLRNGTPYQVRDVDGSPITPAQGRAIVAERYQVPPDVRAARRVISNARSRHRRRDERIEQGVAKRSTMTPVPPASLTPTGSP

SEQ ID NO: 133704 - protein, 449 aa, unidentified
MSKISPQINGLPVIHTRAAGIDIGSRFHVVAVPANLSEDPVQTFQAFTADIQRMTDWLKTIGVETVAMESTGVYWVPVFEILESAGIHVIVANARETRSVPGRKSDINDAQWLQRLHACGLLRASFRPDRAIAALRAYLRHRERLLDYAAAHIQHMQKALIFMNLQLHHVVQDITGVTGMKIIRAIVAGQRDSQVLAEFRDVRCKSSVETIRAALVGNYQPEHVFALKQSLALYDFYQAQVDECDIEIEQALVALKADKPEPEEPLPKARHRTKQPNAVNFDVRTSLYQMVGVDLTQIHGIGPFLALRLIAECGTDLSKWPSAKHFTSWLTLSPGCKISGGKILSAHSRKSNNRLTAHLRLAAVTVGKTNTALGAFYRRLAARIGKAKAVTATARKIAVLFYNAMRFGMNYRDPGADQYEQKYRERVIKQLHRRAAEFGFELKDIECVS

SEQ ID NO: 133705 - protein, 404 aa, unidentified
MKGPIVSIDVSKGKSDYQAFKNLNVKYTGSRSIKHTKEGFDEIVNLVREMEKKLETEVCVVYEATGVYHRVLKKVLEDNNIKQFIINPLLSAKTRKNDSLRCPKTDKLDPKSIAKTYYSHSLHNSHKPETIYHELRELSRYYEDILVHIRKDKVAFRAQLDIVFPGYDTLYDDLYGPVALAVIEKYPHPEMLQKKKINTVSKVIQSKTCHRQAVSDTMADKAIAYSKTIYSGCDKDDIEVLILQRLIKKLKEDMAEAERTIGEMIKLAQELPDFSIIKSIPGIGDNLAARIIAELGDMTRFKKKNELVAFAGLDPRISESGKNDGDHMHITKKGNKRLRCLLYLAVTCSIRLKRDDNSIKDFYIKKKQQSNPMCSKAAKTACASKLVRIIYSMCKTGELYQYNK

SEQ ID NO: 133706 - protein, 419 aa, unidentified
MKVIYRRCAGLDVHEKTVSVCARILRGKELEIIEATFSTFTEDLEKLRAWLRRNHIRRVAMESTGVYWRPVWNILEESGKLDLILLNPQHVKALPGHKTDRVDAARIAELAQYDLVRASFVPPPEIRELRDLVRRRVHLQQDRNRVSNRIHRLLELQNIKLSSVLGKMIGATARSILEGLASKMTMKPEKLALLARHKRVRDRQPELAKALRCQPNDHFRFLLSELLEEQDRLTAKMRLLEERIQQRMEPYRELIERMCEIPGIERLTAWMVISEIGVDMSRFPTAGHLASWCGLCPGNAESAGKRHSGRTSKGNRYVRRALVQAAWAAARISRRRTFFTTLFYRISSRAGTKKAAVAVAHRLLCVIYSMILTGSNYREQGAEYFDRLHPERTRKRLTARLERLGFLVTLAPKPFPESS

SEQ ID NO: 133707 - protein, 365 aa, unidentified
MIVIGTDTHKASHTAAAADAATGQVLAERTVRAKRRSFEDLLRWARCLGGEQVWALEDCRHVSGALERFLLARGERVVRVAPKLTAGARDSARERGKSDAIDAVAIARAAIRHGIETLPVAQLAGIELDIRLLVDHRERLVATRTRLINDLRWHLHDLWPELEIPTGGLIAVHWPERLAGRLARAEQTTRIAIARDELRRIRELTRSINALEQELAPLVAQAAPQLLAERGCGVLIAAKLVGEIAGIQRFPTDAKLARIAGSAPIPASSGSTIRHRLDRGGNRQINCALHRLALTKSLHDPDTAAYLDRKQAEGKTRREAMRCLKRHLARRVWHLLQPTDTTLPRSPHPTVTIHCNTPYNNFSLT

SEQ ID NO: 133708 - protein, 356 aa, unidentified
MSEKLNSKIAVIGIDIGKNSFHIVGQDRRGALVLRQKWSRGQVEARLANLPPCLIGMEACTGAHHLSRKLQALGHDARLMPAKYVRPYCKRDKNDYRDAEAIAEAVQRPTMKFVATKTADQLDLQALHRVRERLVSQRTGIINQIRAFLLERGIAVRQGLRFLRAEFPDILAKRTDVLSPRMLRIIEDLSGDWRRLDERIEGLSSEIEALARQDQGCARLMSVPGIGPLISSAIVAAIGTGDPFSKGRDFGAWLGLVPKQMSTGDRTILGNISRRGNRYLRTLFVQAAWVVLVKVGPKQWERYGLKSWIEAAKKRLHHNVLAIALANKLARIAWAVLHNGRTFEHVKTNATVSRSA

SEQ ID NO: 133709 - protein, 361 aa, unidentified
MTGSGLTAAAARVMSAVPASGQVKVGVEAAGHYHRPVLDHRWPDGWEVLELNPAQVAEQRRVQGRRRVKTDVIDLEAITELVLAGYGRPVTGRDVVIGEVSAWASHRSRRVATRSATKNQLLGQLDRAFPGLTLALPNVLGTQIGRLVAAEFADPARLAGLGVNRLIRFAATRELQLRRPVAERLVGAARDALPTRDAAIARQILAADLVLLADLDDQIQYAETALGSLLPHSPYATLTSVPGWAVVRVSNYAAALGDPQRWPGPRQIYRASGLSPMQYESAHKRRDGGISREGSVALRRALIDLGLGLWLNEPAAKNYAHGLKDRGKHGGVVACALANRANRIAHALVRDHSTYESARWA

SEQ ID NO: 133710 - protein, 386 aa, unidentified
MIFIGIDIAKSTHFASAVNSDGEVLVKPFKFTNDNSGFNLFIDTFKNYDLSNCLVGLESTGIYGDNLTTFLFDKGFKIGRINPIQTDSLRSSNIRKTKNDKIDTFLISKCLMLGNYTLVTKKDIQIINLKTLCRFKFDVKRSQSKAKVQLVTCLDIAFPELAKFFNDNLHIKSSYALLSKYPTAKIIANTRIDALSNLLYSASKGHFKSDKAIALKELAKNSIAMDNPAIGIQIKMLIEQIQMLQKQLDLLDIDISNIMEELNSPILSIPGIGTWLGAIIISEIGDISRFSSATKLLAFAGLDPSVRQSGNFNATNTKISKRGSKHLRYAIHYAAELIIWNDDTFYQYYTTKLAQGKSYLNAIGHVAHKLTRVIFKLLTTNTTFKS

SEQ ID NO: 133711 - protein, 306 aa, unidentified
MYLGLDVAKDTVVLASEPAGVAGTFATDVAGLTALVAQCQAQGIALCVLEATGGYEAPVAAALAAAGLPVAVVNPRQVRDFAKALGRLAKTDAIDATVLALFAARVRPTPRALPDDATLELQAVLLRRRQLLDMLQAERQRHLRSHGRVRANLRSHIHWLERSLADTDDQLRELITSSPVWRVQDELLHSVPGVGPTLASTLLALLPELGQLDRRQIAALVGVAPLARDSGTLKGRRTCWGGRAPVRAVLHMAALVAARWNPMLRVFYHRLRAAGKPAKLALTAVARKLLVLLNAMLRDGQRWRHA

SEQ ID NO: 133712 - protein, 427 aa, unidentified
MNYTQNYKINQVEEETLVVGVDIAKKTHYARAFDWRGLEVSKVKKFNSDKEGFEEFSRWVKEVSKKAEKTKVIVGIEPTGHYWFTFGAYVINKGMQIVQVNPSHVKKAKELDDNNPSKTDKKDPKTIAMLVKDGRYLIPYYPKDKYAELRTGYEMRETHLKNITRIKNRITRWLDIYFPEFRKVFKTWNGKTAIMTLEKHALPIEIIEMSAEEILNEWREEIKRGNVGISRAEELLKAAKDSVGIIEGLEMAKHEIKELIKEYEFFNKQIEETEQRIKEIAITINGIDEIVSIKGIGIITAAGFMAEVGDIKRFNHAKQIIKLAGLNIKENSSGKHKGRTKITKRGRKRLRSLLYKAMLPLVGKNEEFKKLHNYYTTREKNPLKKKQSMIALCVKLIRVIFAIITKNKKYDPVKLLEDIKRPELKIA

SEQ ID NO: 133713 - protein, 374 aa, unidentified
MLSARPAGACRPPPDQQKELAITTIADPERPRVTVGVDTHLDVHVAHAKDQLGRRMATVSIPTTPAGYQDLLAWARGLGEVQAWGVEGTGCYGAALTRFLGDQGQVVLEVNRPDRQARRRRGKSDPVDAEAAARSVQAGEVTTVPKAGNATVEMIRSLRVARQTAIKARTQAINALKALLVTAPAQLREQLRGRSAAMLVRQAAALEPGPLVTPTAAAKLALRCLACRYQALHAEVATLDTELARLVAKAAPGLVARFGVGPDSAGALLVAAGDNPGRLRSDACFSMLCGSSPIEASSGKTRRHRLNRGGDRQANAALYRIVVVRLRWHQPTKDYMARRLKEGKTTKEIIRCLKRYVAREMFTVLNQTVPTPAT

SEQ ID NO: 133714 - protein, 389 aa, unidentified
MLLDHPSDGPTAIRTQFGAIFVSLELSRSNWLITSLSPGKGEKMSKHGVTAGDVAGLMQLFADLRRKAAAGTGESYPIITIQEAGLDGFWLHRALQQNGIESHVVDPASIATPRRRRRAKTDRLDGETLLRALLAYKRGEPRVCAMVVAPSPEEEDRRRLCRERATLIAERITHVNRIKGLLFSQGISDYAPLRRNRRSRLETLRTGDGRELPSHLTTQIGRELDRIELLLEQIKAVEAERDALLAAARKPASEEAAPDAVTMLLALKGMGANFAAVLWSEAFYRQFANRRQVAAYAGLAATPWQRGGIRHEQGVSKAGNPRLRTTMIQFPWLWIRHQPQSALTRWFKQRSQQGRKRAIVALARKLLVALWKYVTQGVVIEGAVMKPAA

SEQ ID NO: 133715 - protein, 412 aa, unidentified
MRRVIGIDIHRTFGEVVIWENGVLRHAGRVDMTRTGLEGFGKNLRATDEVVIEATGNCLAVSRVLSPFVKRVVIANPLQVKAIAHAHVKTDKVDAGTLASLYAAGYLPEIWTPDAATERLRRLVARRYQVVRHRTRLKNEVHAILHAHLIPKCPHSDLFNGRGRAWLSRQPVPDDERAAIERHIRELDRLAGDLDLLDREVAESALGDAAVKRLMTITGVNLTVAAGLMAAIGDIARFSSPQKLVSYFGLNPRVRQSGLGAAHHGRISKIGRSHARAMLVEAAWAAAKTPGPLHAFFVRIRARRGHQVAAVAVARKLAVLCWHMLTKEEDYLWARPALVANKMRAMELQAGRPQQKGNRRGPAYAYNVKALREQEMQIARQAEQSYERFVAAWRPRPPRDRARGRLKPARPE

SEQ ID NO: 133716 - protein, 374 aa, unidentified
MADYSEVFVGIDTSKLRNAVAIAEGGRNGEVRYLGEIETTEAATSKLVKKLAAQHRRLTFCYEAGPTGYGLHRLIKTLGHECVVVAPSLIPKKPGDRVKTNRRDALNLAKLLRAGELTAVWVPDARHEAMRDLVRTREAAVDDLKSKRQQVLSLLLRLGQHFMGKRTWTRAHMNWLVSQKLAHREQRIAFEEMLLAVRQADERVIRLERAIAAAVPDWSLAKVVTALMAVRGLDLISATIFLAEIGDLSRFASPRQLMAYLGLVPGEESTGDRVWRGGITKAGNHRARRILVECSWSYRHPPRVGKKKLAKVEAAPAAVQEIAWKAQARLTARYRALARRGKRPTLVVTAIARELSGFIWAVNRAVGAPATAAV

SEQ ID NO: 133717 - protein, 371 aa, unidentified
MELSKTHGPQQGAALIKRTTKHGALDVHQATTLASVREDSGRVIARTILPTEEPALVEFFRGMRGTTQVAFEEGTQAQWLHDLLVPLVDRVVVCDRRGERRQGNQGDQLDADELSEQLRRGSLRAVYHGSGQRATLKELTRSYANLVEDPTRVMLRLKALFRARGIRAPGKRVYHPGGRAEWLARLADRGARCRAEALYAQLDVLRTLRPRAKGAMVAEARRDPAWAVLQGIPFFGPVRVAQLVATMQTPWRFRTKRNLWAYAGLAVVTRSTADYQLVAGRPVRRRRAPLTRGLNPNHNRVHKNVFKGAAAAATGQPGPLQDWYHGVLPRGVREELATLTLARKLAAVVLRRWKTGERFDSTKLTTPARYF

SEQ ID NO: 133718 - protein, 362 aa, unidentified
MIGQRTSVGLDVHARSVVGCGLDSQTGEVLRARLTPAHAEVIGWLRQLPGPVRVTYEAGPTGFGLARALQASEIDCVVAAPSRLLRPSGDRVKTDTKDALHLAQLLAVGQVTAVVVPDEETEAARDLVRARDDVRAELTSARHRVTHLLLRQGIVYSGGTPWTGVHENWLRSHRFARPALQVAYDAALAALAAAEDRRDRLDEVIRQMAADSRFTPVVDRLTCLRGISTLTGFGLAVEIGDWARLSPTTIGAYLGLVPSEDSTGESRSQGGVTKTGNRHARRLLVEAAWHHRPPYRPSAQLRGRWRRAPSAVATHAGKGNLRLHARWRSFDARHKRPVVANTAIARELAGWCWALAVMHTEH

SEQ ID NO: 133719 - protein, 262 aa, unidentified
MFPVGIDVSKNTLDLCMLYDGIKGRIKTRNIPNNRHSVENILRWLRLQHCGPEDVHVVMEATGVYHERLATELHGAGFRVSLANPHRSREFARGMGIMTKTDKVDAYMLACYAFLKKPHRWEPPAPEIRYLGALLRRRDVLLGDALREENRLEKYLSTDTPADIISSCRRMAQLMREEVSNIERQIKAHIKACPALRRDYTLLTSIKSVGPQQGMHMLVVLRSHNFTSAEQAAAFLGVVPIEKRSGTSVRSRPRMSKIGPLS

SEQ ID NO: 133720 - protein, 383 aa, unidentified
MRTQETQGNVTDVVLAVSLELAAAKWKVALHDGHRESPSIHTVAQTDPAARLQAVLTLIATQKQAWALPDNTRIVVSYEAGQDAFWIFRALQARGIECYVVDPASIPVQRQKRRAKTDRLDVTKLVINLRAWLGGERDRMHAVHVPSAQDEASRHLMRDRGQLQKEVLQHRDRMRKLLATVGCWEDVNSRKFANRLACRQVCCHDGTPLPEELHERLLRECERLALVEKQAATLEKAYHLHLPERARERIDHLTHLRGIGPVSGSRLALELFWRHFANRRQVGACTGLVPQPYDSGQTQIDQGISKQGNRRVRALLIETAWTWIRYQPSSLLTRWFNERTKGTGPNRRARRIAIVAVARRLVIALWRYLKDGVIPEGAELKMR

SEQ ID NO: 133721 - protein, 416 aa, unidentified
MWMDEKTTRAAGIDWAKDEHALCVLEEAGRKIFEGRFAHDERGLAQLCGSLVDNGVVRVAIERPEGVLVERLLEAGIVVIPIHPNQLKAARPRFRASGSRAKSDSFDAFCLAELARTDEHRFRALTPDSDETKALRALTRSREDLVGSRVALANRLRAELEAFWPGAAVLFSEIDCAISLAFLARYPSPTDASKLGEKRLEGFLCGHGYSGRKSASELLERLRKAPQGRAGEAEMEARREAVLALVETLKVLVERIKCLEERIARAVRAHPDGEVFLSLFLGHNSTLTAASLVAEIGECRERYPTNEALAADAGMSPVAIESGKRKVAGFRRACDKRLRKAVATLAESTRHHNLWAKEIYRRARERGCDHAHAIRILGRAWVRVIFRMWREGLPYDPARHGGLRRLRSKEGLPQGV

SEQ ID NO: 133722 - protein, 369 aa, unidentified
MNDITYVGLDVHKATVCVAIAESGRGGELREVGVFENRPDVLRKMVARIGKHRRRLNFCYEAGPCGYGLHRLLTGLGHECVVVAPSLIPMKVGDRVKTDRRDALMLAKLHRAGELTPIWIPDASHEAMRDLVRARATAVRALSKARQHLQGFLLRHDRIYHGARAWTLAYRRWLTTVRFDHPAQQIVLQDYIHAVEDAESRRNRLTRQIEELMPSWSMAPVAAALQAMRGVALVAAVTVVAEVGDFRRFTNARQLMAYLGLVPSEHSSGSTVRRAGITKAGNALARRVLIEGAWTYRMSARVSRKLHDRLEPLSAAIRDIAWKAQVRLCARYRRLVAIGKPKVVVTTAIAREMVGFIWAIARVAQPELI

SEQ ID NO: 133723 - protein, 378 aa, unidentified
MKYATPGTLERNVCSGMTQFIGCDTHRKYSVFRIQDESGPMSPAIRVEHEKGELERFLQSLEPGSPVALEAGLNWMWMVEQIERANLEPHLTNPLEAKKRIGGVNKLDGKDAAGLLTLLRSGTLPEVWIPRGNQRDLRGLMRSRLVIRRHVSAFKCRIHGVLTQYGLKPLAEEEEEIEYRDWFTVKAREALLKVIDELPSATREGLRQEYLAMWELERHVKSQELAIQARVGSLGWLHLLRSAPGIGLILGATIWTEIGDVKRFVDAERLAAYAGLIPRTHSSGGKTWRGPTSRASNHYLKWAFVEAANVIAGKRKTMEKKHPHVVHLYERVKANTKINGKAKVAVARHLAEACWWILTKKQNYREPTSAAVASSTNG

SEQ ID NO: 133724 - protein, 347 aa, unidentified
MKKIVKLVAGIDVAQEELVVCFGRIYDDLTPELIASKTFNNDKKGFESLTGWVKKLSTDAIVARYVMEATGVYHESLAYWLDEHSYEVSIVLPNKISNYARTLNVKTITDKTASEAIALFGLERKLEQWKRPEGIYKKLRQLTRERNQLVEERTMLKNQLHAEQSEAEPYKKSEARTKKRITLLDKQEEEIKQELKQLISADQQMQRIVVLICSIPGVGLLTAATTLAETNGFDLIRNKRQLVSYAGLDVKEKQSGTSVKGKPRISKKGNKHLRKAMHLPALAAIKHDERFKAIFARLVAKHGIKMKAAVAIQRKLLEMIYTIYKTQKSYDKEYLQKQYAKINKTAL

SEQ ID NO: 133725 - protein, 427 aa, unidentified
MSYRIAAVDVHKKMLAIVVADVAGEGEFQFERRKLGATPGELHVLAQWLDQQGVEEVVMESTAQYWKPVWGMLEQFWKLARQRREGAPKMAGTLHLCQAKSNHGPRGRKNDFLDAERMVKRLVAQELVLSFVPDPEQRLWRTVTRRKYQLTRTRVSFRNQLECLLEQAHLKLSSFVSDLLGLSARRMLQALAEGETDPAVLAAMADCRLRATPEQLRDALGACTQLNGVFRRLLKMALEELELIETHIEQLEREAMELMQEHQDAVRRVAEVPGFGVDSAVQMIAEVGPEAANFDTEKELSSWVGVCPGNQESAGESQSTRSPKGNRHMRRLLTQAAQSAVKVKGSIFEMTFHRLLPRLGYPQAIWAIAHRLCRLLWLILHKGVHYEERGPAVDAKSKRRRATRMIRELQKLGYRVEGGPLPAATRA

SEQ ID NO: 133726 - protein, 371 aa, unidentified
MEQPTRFIGMDVHKETIVVAVTAAGGAGKATPYGTIPNTTAALEKLVKRLRKAGTGAVKFCYEAGPCGYGVYRTLTRIGEDCLVAAPSMIPRRSGERQKNDKRDAGSLAVLHRGGLLTSVWVPDAAHEAMRDLVRARLAAVRAVRTARQQLSAFLLRHERLYTAGRRSWTRAHRGWLADQRFERPAQQIVLEECIEAVRLAEQRCDRMDAHLCAELPNWSLFPLVQRLCALRGFDVIAAAGAVAAMGDPTRFINARDFMAYLGLVPSEHSSGQRRRLGAITKTGDVRARSVLIEAAWSYRFPARIARAKLPAIEAVPEAVRQIAWKAQTRLCHRYRRMVARGKPKPLAVTAVARELAGFVWAIAQLPDAAE

SEQ ID NO: 133727 - protein, 340 aa, unidentified
MKKFLFIGIDFSKSKFDAYLLKSMSDEEVVSGSFENNRGGYVLFLKWVSEHTMIKKEDWLFCGEHTGLYSRDLAAFLSKKNLTVWLENPYQIKCSCGIKREKTDKIDALEIARYAYRFQDKCTPYQPVDKAIESLSLLLSYRGRLIKEKVLLEVSAKETRRVISRDTISRFVFENSMRNIERIKKEIKAVEEKMHQILMDSTLKENYLLTVSVKGIGLVTAVALIVHTNNFSTFNTARQLACYCGVVPFEKSSGTSLNRGKHISHLANRELKTLLTLCARSAIEHDKELNVYYQKKLSEGKEYKVIINNVRNKLIHRIYAVVTHKMPYQENYLNPFSECA

SEQ ID NO: 133728 - protein, 446 aa, unidentified
MAARRSNKQKPAVVSGPVEIPDAEHELVIERVAAIDVAKAAGKVCVRLPGKSGRRFSRVWDVPARTGAIGELAEQLTEAGIEKVTVESTSDYWRIWYYLLEAAGLSVQLVNARDVKNVPGRPKTDKLDAVWLAKLTEKGLLRPSFVPPAEIRRLRDYTRMRADLTRERTRYWQRLEKLLEDALIKISSVASTLVTLSTRDMIEALIAGERDPYRLAELARGKMKAKHSELITALDGRFDEHHAELARMLLSQIDALNTQIEILSARIEALIAELPDDTGAIDPRTGGDAPGASTGTDIAPDPNTGAANPIRVDLAIEAECVLSTVERLDEVPGISVGNAQNILAEIGTDMSRFPTPEHLVSWAKLCPRTVQSRAGYPRRQDRQGQPVSKRCARRGRDRGRQDRHLPRPALPAPSQTPRQTQSTGRGRPLHPGRRLAPAGQPGRPLP

SEQ ID NO: 133729 - protein, 427 aa, unidentified
MSEKKSLELRVSVDVGYWRHSVAIGLSSGEVLEEFEIEHRREGFKDFFTRIEKHRKTTNSAVAVAMEGYNGHARPLDSLVRARGYRLYNLNNLKFARFKEIFPGSAKSDRIDAHKGLELFQLSDHLPLAKEVLQEVSGTPHENEVLKRLTRRRRRLVNERVRVVNNLQADLQAVCPGLLEITSEAGSQWFLNFLLSADTVPQLARLRHNTLLKITSVGVKYAGLIENWQKRAHFSDEVEWVSEMIQEDAKRCLELDEKIKRLEVKIAGIAKDSKIAKILRSIPGYGATSSSELAGEIGTIERFASEGSFSLYLGMSTLDNSSGKYQGSKAPKHVNTRAKAAMMIALDRHRKYVPESQKYYEKKRGEGKKHNQAIRALGRHLSRIIYKMLKEEREYEIRTQKGNTKAKVSSRSSLKRQIRRSKFSANS

SEQ ID NO: 133730 - protein, 341 aa, unidentified
MGKVITIGLDIAKHVFQVHGVDAAGTVIVRQKLRRSDLLAFFERTEACLVGIEACATAHYWARSIMALGHRVKLMPPTYVKPYVKRHKNDAADAEAICEAVTRPTMRFVPVKGEEQQGILVLHRARELLIRQRTMLINALRGHLAEFGIVTRVGRAGVSTLITLVEDDEHDMIPAIARDALLAVVDQLRDAHERCGAIERKIQAWHRSNVQSRRLETIPGIGPITASAIAATITDASLFRSGRELAAWIGLVPRQNSSGGKERLGHISKKGDAYLRRLLVIGAHAVLRFARNGKASTTKWAATLLARKPYKVAAVALANKMARIIWALLTKNEEFKGQPAT

SEQ ID NO: 133731 - protein, 349 aa, unidentified
MTLYIGVDMHPHQQTLAWCDTRTGETRTTDLINDPEIVREFYSSLPEPAIVGIEASARAAWFENMLFETGHKLFVGNPVLIRKRATSRHKNDRRDAELILELLLRDEFPAIWRRPPESESVLEILRLRQALVRQRTQAYNRLQALAHDVGLSKGRIRTISFQKLMKAAEMNEVSSIRRTHLFSLVEKLNEQIADLDEWLKKKADDDDAVQLLLSQKGVGYLTALATAHTLGDVSRFPRLSKQVVSFAGLDPVERSSAGKIRFGSISKSGSRLLRCQLGLAAQIASRSDPKLKSFYKRLAKKKPKAVAKTAAARKLLVKLSIMLRDKITAEEFDRRGRTVGNARRTIGLQ

SEQ ID NO: 133732 - protein, 320 aa, unidentified
MQKIALGLDISKQTIDAYFSGQEDFMRVMNNQAGIEKLIERIKTHQQHNKEIHACCEYTGVYYLPLASALHESGVKISVINPLSIKLYAEYRLRRTKTDKQDAKLIADYCEKENPPLWKPLSEKRNSLKVLNRRIEQLNVLLNIESNRQEVSDTVIKSGIERILEAIKNEIESCKKAIQNLIDSDKELSHNQKLLQTISGVGKSTAAWLLSVLVDIDKFENSKKLISYLGLSPVIKDSGTSVRQAKISKMGDKKVRKALYYPARAACLRSKLWRPWFEQKIKQGKHPKQVYILMMCKIVKYAYAVIKTGQPFDENRHKPA

SEQ ID NO: 133733 - protein, 444 aa, unidentified
MDKTLFLGIDVAMAENACCPLLEDGTEARRRFTIANNLPGAQHLVKEILVLMERFGLNRLLIGLEATNLYWWHLACFLTSCPELAPFQPRVYAFNPRLIRAFKKALADSGKSDIADAYAVAERLRFGRLPAPFMVNEVYQPLQRLTRFRCHLMHQITTEKNYFLTFLFLKFSEYQNLDPLSNTFGAASQAVLMEYLTVDEIAAAPLEELASLLAEESRNHFPSPEAVAAAVKRAAKDSYRPHPNLNEPLNLILGATLENIRTFSQQVKKVDKAIEREVRNFPNTLGSIRGLGPVFVAGILAEIQDINRFPDSAAVAKFAGLFWRTRESGSFQAEETLMGKSGNPYLRYYLIEGANSVRMHTAEYGRYYQAKYNESTKHKHKRALVLTARKLVRLVDAMLRRNQLYIPPPLNLNEEVSKQGITKARPAKQHRYRLPASHSLAACA

SEQ ID NO: 133734 - protein, 457 aa, unidentified
MGKKKQQGKSFVSLGCIEPNAAGIDIGAEEIYVAVAPDRDPEPVRCFATFTADLQAMAKWLQQCGITSVAMEATGVHWIPVYEVLEASGLRVCLVNARHVKHVPGRKSDVRDCQWLQYLHSVGLLRGSFRPESAISALRAVSRHRANLVAIAATHVQHIHKALTQMNLQIHHVLSDITGKSGLAILDAILAGKRDAQHLASLADGRIHAERETVVKSLVGNYRSEHLFTLRQSLQAYRQYQQMLVDCDRELEQRLGQLPDGSTGGQPGTPFASKKRSKRRKNQFHFDMEKELHRVLGTDLTSVPGLSALTVHTLVTEIGTDLKRFPTVGSFTSWLTLCPGSKKSGGKVLSSKTRKSNSRAAAALRLAAQTLHKSNSHLGTFYRRMRARLGGPQAITAAAHKLARIIYHLISTRTAYDESVFAQEEQKHALRHQHRLHKQALALGFQLVPLPNPEVVH

SEQ ID NO: 133735 - protein, 333 aa, unidentified
MADLNHGILGIDISKLKFDAALMVAGKIKKTHIFENAPSGFKALSNWLLKQGITTVAACMEATGCYGEALATYLYGQGFTVSVVNPAQIKSFSGAQLKRAKTDKADAKLIAQFYLQMNPAPWTPPPLHVRELQALVQRLSALVQMEGQEQNRMDTAAAVIRPSIATVLATIKAEIKTVEALIREHIDRHPGLKEQSGLLDSIPGIGKATIARVLAFIGDVQRFEHAKALAAFIGLNPTVHQSGSSVRGKPHLSKKGNALLRRALYMPAIVARRYNPVIKTFADRLKKAGKPNRVIIAAVMRKLLHIIYGVLKSGKTFDADYSQNNVLTAKTVS

SEQ ID NO: 133736 - protein, 340 aa, unidentified
MVHVGVDLDKRSSQIAVLTDDGEIVQQRLANDAVRLTKFFSQLPPQTPIAIEASGTWWWLVDLLEQLGHQPVLSNPKQTKAIAAARLKNDRVDAERLALLLRGDLLPRVWIPPTTLREARELIRHRIQLVWLRGVIRNRLQAMLARRNLQPTSGQSWLTQRGQRELQRLPLGETPSRIREDCGALLPTLDAQIRRLDADLVTRWGADPRVRRLTTIPGIGPFIAIVLVLELGDIERFASAKRVASYVGLTPRVRGSAGRVRAGHITKEGNRLLRWVLVLAATQAIRRPGPLRAWFHAVKKRRGKKVARVALARRLAEIVFHVWKQECDYFTVVRHGVVRG

SEQ ID NO: 133737 - protein, 490 aa, unidentified
MECIAIGIDISKGRCDVAILNQSGTLLAGSGGYDDIRRDHERLRDVLLALHDKHPEVRVVVGMEATGGLERNWMAFFRTEKRWEKFVFAHRLNPLAVKRYLESDLHRKADDASAALGIAQFVMEKHQERSPAPDAFDGKVAFYRVVRTQILRRTQTVQRLQSLLPAVHPGLVQYCRKGVPDWVLFVITRYPTAGKLTRAKAEKLADLPHVDLKRAQSLIEGAKESVAALNDEGTALAIGAITDEIRDLDRRIDDGKERLKALLSDDPRVALLDSIIGIGTWSAIALSLEIGDVSRFATVRSLIAFAGLDPRTSVSGDGEVKHGISHRGNANIRATLFMVAQVALVHNPVIAAFYQRLTSGEKPKPGMVALTACMAKVLRIAYALLCSGRTFDAEYEENRAASAAATRQAGRSASASATPALLQEQAPALEPQLDAPITRKEARRRREMAAKNAAAPGSGKNEVRPQTGTGASAPPLSRSQAAAKRPLRRT

SEQ ID NO: 133738 - protein, 317 aa, unidentified
MTQKQVIVGIDVAKEKIDAAIRFGAETSFANSAEGRRELPAWLKEHGVGKAAMEASGGYERSWARLLREAGVEVAIVDPKRVRHFAKSAGQLAKNDPIDARMIAWFGEVFGHASGQPHDEERQELDQMVTARIGMARLKEQIEGWGEHEQPKAVQKAHQALLKAVVTQLDKLEDVIAAKIDKTECFAQRAEIIQSVPGLAGTAAAGFIAFLPELGLVDRQAASALLGVAPFNDDSGKRHGERHIQGGRRKLRKLLFMPIVGAATQHNPVLKACYQRLIAKGKKAKVAFIACMRKLIGILNTMLARGEKWDPAKHAIA

SEQ ID NO: 133739 - protein, 337 aa, unidentified
MEQHKQYVGIDLHRKRSVIVRRTELGETIDTVRIDNDPLALAAELAKAGEDPEVVLEATYGWYWAADVLAECGANVHLAHPLGNNWGQRRVKNDERDATDLVDLLRLGRLAEAWIAPPPLRELRELVRYRAKLVHLRTSLKAQVHSVLAKEGVAVPMTDLFGVGGQRLLSEVHLGDAYRIRVESLRDLIEVCDREITMLEDQVAPVFAGDLGYHAVQAIPGVGPVLAAIFVAEIGDISRFASARHLCSWAGLTPTHRESDEKVRRGHITKQGSRLVRWAAVEAVAHQRGDTPIRVHHRRVGERRGKQVGRVAAARKLLVLVYYGLRDGEIRCLARAG

SEQ ID NO: 133740 - protein, 394 aa, unidentified
MHKKSVVAHVKVPERSEGRTFGTTTTAILELADWLGKEGVTHVAMESTGPYWKPIWNVLEGQFDVTLVNPPHMKAVPGRKTDMKDAEWICDLHQHGLLAKSYVPERAQRELRELVRYRKSLMEERAREVNRVQKILEGANIKLGSVATNVMGVSGRAMLEQLANGVDDPDELVRLARGKLRSKTTELTEALKGLVQPHQRFMLREQLLHISDLETVIADVEKEIGERLDPFETAVARLMTIPGVGRRVAEVIVVEVGEDASHFPSDRQLASWAGLCPGNRESAGKRLDARSRQGNRHVKQALVEAAWASSHTSTYLGAQYRHLSRRLNGKKAVVAVAHSLVTIVYHVLKEGVEYRELGQDYFERRDRQHIERQAVRRLQSLGYTVALTPTNPAV

SEQ ID NO: 133741 - protein, 353 aa, unidentified
MEQFIGCDAHKKFSLFIAINAEGHYGKPMRIGHDRERMRAFLEALPAGSTIALETSGSYYWLVDEMERAGHQAQLAHALTAKRRMEGRHKTDERDARGLAMLLRNGTLPRVWIPPAALRDQREMLRWRMSLVESRSQIKNRIHGVLLRYNVDVRSSDLFGDAGRAELRQRLAELPEWTRQSVEQPLETVDDLDRRIEDCEQKLEALLETSAERDLLKTLPGVGKILSAVMALEIGDIGRFPSAQHLASYAGLVPAARESAGKKRKSKCPADGNTYLKWAFIEAGNVVARWHAQWPDRHVAQLYQRVKHSSGLHGKATVAVARHLAEASYWMLAKQQLYREPNLNRQALSSTHG

SEQ ID NO: 133742 - protein, 345 aa, unidentified
MELHTIGIDLGKTVFHLVGVDLRGEVVVRKKFSRKQLLHFTANLQVGLIGMEACGGAHFLGRALREQGHEVRLMPAQYVKPYVKTNKSDYIDAEAISEAVGRPKMRFVPIKSDDQLDLQSLHRVRERWVMRRTAAINQIRGLLLERGITLRKGRRHVDEALPGILEDASAKLSGALRVLLTQLKLELDHLQMQIDEADAVIKKTAGENEACRRRVAIPGIGPITVTAIIAAIGNGAAFKKGRAFAAWLGIVPGEYTTGGKQKLLGISKRGNSYLRRLFVHGARAVLQQSAKQSSGLSSWLAQLTTRTHRNVAAVALANKLARMAWAVLAKNEPYRPPLLVGAATA

SEQ ID NO: 133743 - protein, 385 aa, unidentified
MEVVYPCCCGLDVHKKSITACVLWAEAKGKSRKEKKRFGTFTHDLLQLGDWLEQCGVTHVAMESTGVYWKPVWNILAEQFEVLLVNAQHIKAVPGRKTDQKDSEWIADLLQHGLLRGSFVPPQPIRELRDLTRYRVSLVQEINRIANRIQKVLEDANIKLASVATDALGASGRAILEAMLAGEQDAARLAEMSKGLLRNKIPELKLALQGRMTEHHRFLLRQLFEHLRFTESKRSEIEQEIDRRMLPFADKVTRLCTIPGVDRVTAWGLLAEMGMNMNQFPSSGHLASWACLCPGSFESAGKRLSGKMRKGNVSLRRCLSQAAWAISMMKNNYLSALYRRIAARRGAKRAVMAVAHALLVIAYHMLKREEDYREHLVRTTLTGST

SEQ ID NO: 133744 - protein, 354 aa, unidentified
MPRKSKDTVAVLGIDIGKNVFHLIGLDKRGAIVLRQKLSRGQLEARLANMPPCLIGMEACVGAHHLSRKLKALGHDPKLMPAKYVKAFLKGHKNDFRDAEAIAEAVQRPTMRFVATKTAEQLDLQALHRVRSRLVSERTAIANEIRAFLLDRGIAVARGLHRLRTALPGILATRTDVLAPRLLHLIEDLIGDWRRLDDRIDNVSLEIGVLAQYDTGCERLMTVPGIGPIISSATVAAIGTGDVFCKGRDFGAWLGLVPKQISTGDRTILGKISKRGNKYLRTLFVQAARVVLLRPGNWERYGLKPWIEAAARRLHHNVLAIALANKLARIAWSVLHHGRNFEVRKMSDATSQPA

SEQ ID NO: 133745 - protein, 307 aa, unidentified
MTAVGIDVGKSSLDLGIDGQAGVVRYANGQAGIAKLVKRLQALGAERIVVEATGGYEEPLLEACCDAGLWIARVNPRQARDFARATGELAKTDAIDARLLALMARMFGDRLRRHIAPPPWQRELRAWLRRRSQVVMLIQAQKQQAAMAPTAVRKLAARTIAALARELTAIEGTMKALIQEHASPALRSTKGLGPVFQATMLAMLPELGHLSRREIAKLTGVAPMNRDSGQGQGKRRIRGGRSPVRVALYMATLSAVRWDPLMKAHYQQLRARGKLGKVALVACMRKLLGIVNARRRDELRAEAAALA

SEQ ID NO: 133746 - protein, 424 aa, unidentified
MKKVDYLSTLFVGIDIGARQNVVSAINFEQEFLIKMKPVPNTQSGADQLEAILVDILSNSTFKTVIIGLESTSFYGVHIANFLSASEKLIPYKPYVYCLNPKEVANYKDSFNSLDKNDGVDSFVIADFARVGRIHTEPWRGSQYLALQRLTRHRLHIVECLTREKTYMLSNVFLKFSEFALLQGEDHPFSNKYGATASSILTEFLSSEDIANTSIEELVDFVSRKSRKRISNPQITAEILQQAARNSYRLDKCLYEPLTTSIACSFNCIQAFDKELKAINKAIEKAVMGMNPVEYQILMSIPGFGPVYSSGILAELGSVHAFPNNDAIAKYAGIVWKENQSGGFKAENTPMNKAGNRYLRYYLIEAAGSVVCHIPEYQKFYQKKFAEVTTHQHKRALALTSRKLIRMIFGLLAKNQLYSSNRVD

SEQ ID NO: 133747 - protein, 343 aa, unidentified
MEHYVGLDVSLKLTAICIVDRTGKIEREGVVASDPETIAAFVKLHAPHVVRVGLETGATSTWLWTELNKMGLPVICIDARHAKAALKMQINKSDRNDAVGIARIMQCGWYKEVRVKDLDSHAVKALLVSRALLVKIKRDLENQIRGLLKNLGLVIGSAKMNAFALRAAELIENRPELAVAVTPLLTARVAIEQQIADLDRKVMKLARSNAQVRQFMTAPGIGPVTALCFLATIDDPTRFKRSRSVGAYVGLTTRRYASGEIDWTGRISKCGDKMLRGYLFEAANVLLTRVAKWSALKAWGIRLAKRSGLRKAKVAVARKLAVILHRMWIDGTEFNWSKKEIAA

SEQ ID NO: 133748 - protein, 436 aa, unidentified
MEEVENEPLFSDRVAGIDIGKKEIMVTIRVPSDSRRGRRQQETREFRAVRKDLLALADWLRTWGVTRVGMEATGDYWKPVYFLLEREGFDCVLYHASQVKALPGRPKTDKLDSVWLAKITEQGSLAGSFVPPEDIRRLRTHTRYRRHLVQACTAEKGRCEKLLEDAHLKLSSVITDIHGVSGREMLTAIIAGERNPKVLAQMARTRMRAKIRELEEALDCSFFTSQHAFILQMMLANIDHLEDQVKELTAKITELCEPYARQISQLDAIPGFGIITAQDTIGEIGVDMTVFPTAGHLCSWARRAPQVRESAGKRKGKNATGRGNPYLGGALGEAAANAGRTQTFLGAKYRRLVRHMPKKKAQGAIGRTQLVICYELLSDPEAVYEDLGTGYYERRANIRREVRSHARAIERRGYKVILEPLDPGLDPAILPVTKAS

SEQ ID NO: 133749 - protein, 391 aa, unidentified
MYFVGIDCSKYKHDCFIATEAGEVIRDTFTFDNSGTGFSQFFSILEALSCPKSQIKVGFESTSHYMVPLMKHLSVKGYEFILLNPVIVSRFRRSTTLRRIKTDKIDAKTIAQVLASSDYESYHMQVYHFPELKSLTRLRDRLVKQRSYYLVMLTNVLDEVFPEFKEFFNDSLKSKTAFYLLDTYKIPTRMANMNASSFDNLKKVSYGKFSYAKFIKLKELAKNTIGSSSDADELEISSLLSIYKSINDEICRVESKIEEIMNIIDSPTVSIPGVGLMSAASIIAEFGDLSRFANADKMLAYAGLDCGRSQSGIADYKGKMVKHGSGYLRQALMNVVETMMIHAPVFYDFYHKKRDEGKSHRVALSHLARKLVRLIYKLETSHSRFDLNNSK

SEQ ID NO: 133750 - protein, 368 aa, unidentified
MKKVSRETAAVSELVCVGIDIGDRWSHWCGLSSEGEVAGRGRVRTDLEAMSEQGRKWSGARVAIENGTHSGWVSRALSECGCEVVVANPSRWRGTAHNSKNDANDAEALARVVRVDPQLLFPLRHRGKAEQQDLAVVRVRAQLVKARAQLVNTARGVVKSLGGRLGGADAEYFPARTWGQVPAGLRAALGPLYELLVALNEQIRKLNERIEQLSRERYPETTRLRSVPGIGPVTALTYVLTLADPHRFSSSRQTGAYLGLRPRQRQSGERDPELGIAKNGDGYLRSLLVECAHYVLSRGPDSALKRWGLALAGNGRRPKRRALVAVARKLAVLLHTLWVSGKSFRPFPEETVDAEVRAHRSLRAAAAI

SEQ ID NO: 133751 - protein, 411 aa, unidentified
MRIVGLDVSRSVAEIAYLEDGTLHAGGRTGLRRDELERFAAKLRATDHVVLEATGNTTAIVNVLRAHVARVAIANPLQVRLIAEARVKTDKIDAAVLAQLYASGFLPEVWMPDEHTLALRRQIARRSQLVRQRTRLKNEIHAVLIAHLIERCPATDLFGKKGRAWLGVQPLPLDERLGVEQRLRELDRLGDDLREVEQALAQATIDDARLRVMLTITGVNTTVAIGLLSAIGDIARFPNPEKLVSYFGLNPSVYQSGPAPARHGHITKRGRSYARAMLVEAAWGATQAPGPLRAFFLRVRDRRGQQIAAVATARKLAVIVWYVLTRGEPFAWDRPALTAHKLRALELQAGMPAQHGPRKGSAAAYSLKSVRQQERAVAEQAERTYQRLFNRWKQSRPKSDSAPIRWPQART

SEQ ID NO: 133752 - protein, 350 aa, unidentified
MKDIMIGVDLAKTVFQPHGASMTGQLKYRKKLTRPRFRKFMADQSPSMVVMEACGSAHYWAREMVRLGHDVKLIAPQYVRPFVKRQKNDAADAEAIVIAAQRPEMRFVAPKSQDQQARAVLFRARERLVHQRTELVNALRAVLYEFGHVIPKGIGNIKRIDAILEEPNCDLPTLVCDECQDLVKQIAEQTIRIDAKTKTAKEMAAAADTTRRLQTMPGVGPLTALAVEAFAPAMKNFKRGRDFAAWLGLVPRQHSSGGKERLGRVSKAGQADIRRLLIIGAMSRLNWMGRKTIPEGSWLARMLARKPRMLVAVALANKMARGIWAMLTKNENYRDPAQAAAALSTCAAAT

SEQ ID NO: 133753 - protein, 348 aa, unidentified
MDHIGIDVHKRESQIYLLAEDGEIIERRIRTEGERFAAVLGDRPRARMLIEASTDSEWVARCLEALGHEVIVADPNFAPMYATRSRKVKTDRRDARALAEACLLGAYRPAHRLSDPQRHVRARLGVRDALVHTRTRYISVIRALLRQHGYRVPSGSAGSVIDRVRRLPLPGRLLSVVAPLLAVMGPLNQQLAYSDATIEHLAVQDPRVPRLRSVPSIGPVTAAAFLAAIDDVGRFPHAHQLEAYLGLVPREYSSGETQRRGPITKAGHSRPRWLLIQAALSILRRRPPAAEALWTWALRIAARRGKHVAVVALARRLAGLLYALLRDGTVYAPRHPAALPGPVAALHA

SEQ ID NO: 133754 - protein, 343 aa, unidentified
MQTVTTIGLDIAKSVFQVHGVDTEGNVIIRRQLKRRYVLAFFQELPPCLVGIEACASAHHWSRELQALGHTVRLMPPAYVKPYVKRHKNDATDAEAICEAVTRANMRFVATKTPEQQSCLTLHRTRHLFIRQQTSVINAIRAHLAEFGIVAPVGRHGVEQLLGIAADVNDKRLPEIARACVAALGAQLRMLKEQILQFDRMITAWHRSSEASRRLDDIPGVGPALATALVASIADPKAFRSGRDFSAWIGLVPKQNSSGGKDRLGNISKRGDRYLRSLFMTGALAVIRYAKIHGTGHRPWLTALLARRPTKVAAIALANKIARMAWAMMAKSERYKEPAALVA

SEQ ID NO: 133755 - protein, 374 aa, unidentified
MADYNEVFVGIDTSKLRNTVAVAEGGRNGEVRYHGEIENTDAATSKLVKKLAAQHRRLTFCYEAGPTGYGLYRLIKTLGHECVVVAPSLIPKKPGDRVKTNRRDALNLAKLLRAGELTAVWVPDARHEAMRDLVRAREAAVDDLKSKRQQVLSLLLRLGRHFTGKRTWTRAHMNWLVSQKLAHREQRIAFEEMLLAVRQANERVIRLEQAIAAAVPDWSLAKVVTALTAVRGLDLISATIFLAEIGDLSRFATPRQLMAYLGLVPGEESTGDRVWRGGITKAGNHRARRILVECSWSYRHPPRVGKKKLGKVEAAPPAVQEIAWKAQARLTARYRALARRGKRPTLVVTAIARELSGFIWAVSRAIGAPTTPAM

SEQ ID NO: 133756 - protein, 406 aa, unidentified
MRYVGLDVGRDFAHVAVVEEKGTARRLPRVPMGDAFREFAATLGPQDVVALEASTNTWALAELLGRHAGRVVVSNPLRTRAIADAKRKTDDIDAATLAELLAADYLPEVWVPDEATRRLRRLVSLRAGLVRDRTATRNRVTAVLSRRLLRSPVSDPFGVAGRRWLTALELPPDERLALDSALRLDALLSEEIDTVARAIATMVVDDPRIRRLLTIPGIGLVTAAGILAVIGDIGRFSRPAKLVSYLGLDPRVRQSGDRPAWGGHISRQGQAHARGLLAEAAHSAIRSPGPLAGFHARVKARRGGGVATIAVARKLAVIAWHLLTRDEDYREARADLVRAKGRALERLAGRAAPGTRPPQRGATTSGPDRGRTRLRGGDDPHHPALRHAVDRVRPDDTPGRAADARA

SEQ ID NO: 133757 - protein, 391 aa, unidentified
MVCVGIDVAKDKHDCCILDSEGTTLVDCFTIPNNMDGFKSLLQTIQDCSQKSDKIKVGLEATGHYSYNIRGFLLDNDLPVYVMNPLHTNLYRKSLSLRKTKTDRVDAKTIATMLLSDVDLKSYTDTAYHNEELKSLTRYRFDKVQERAKLKQSVSRLVTILFPELEQLVSSIHGTSIYALLSEYPGAKQISEAHLTRLANILVKTSRGHYRKDKATHIRDAARTSIGSVMPAKSLELKHTIKLIQELTSEINEIEDAIRKIMDELKPPILSIPGMGFYSAAMILAEVGDFSNFNSPDKVLAYAGYSPSTYQSGKLTNCYAHMEKRGSRYLRYALYTATKYVCYWNPVFTEYLTKKQAEGKHYNVALSHATKKLVRLIYALQKSGKAYLAIT

SEQ ID NO: 133758 - protein, 420 aa, unidentified
MRNAGIHANSLLEVRRMYNAVGIDVSKGKSTVAVLQPGSTVIRKPFDVSHTSQNLNELADYFSSLDGTTKIVMECTGRYHEPMVKALSEAGLFVSIVNPHLIKNFGNNSLRKVKSDPADARKIARYTLDNWTELRQYSGMDNTRTQLKTLNSQFSFFMKQKVAAKANLIALLDNTYPGVNKLFDSPTREDGSEKWVDYAYSFWHADCVRKIGLKAFTERYKSFCKKHHYIFQQDKPEKLFNASKELVAVFPKEKTYKLLIQQSIQQLNLASEHVERLRREMNELASTLPEYSTVMGIYGVGKTYDPQLIAEIGDVSRFTHREALTAFAGVDPGVDESGQHKSKSNRASKVGSARLRKTLFQIMTTLLQNAPEADPVYRFLDKKRSQGKPYYVYMTAGANKFLRIYYGKVKECLRNLEQTE

SEQ ID NO: 133759 - protein, 320 aa, unidentified
MSVSSVTVGIDVAKTHVDVCVLGARSEAQRLNNDAEGHSALAAMLQPLGVGLVVMEATGGYEAALACALQGAGLPVAVVNPRQARDFAKSMGRLAKTDAVDARMLAELGSVLVRRQDLGRFLRPLTDERQQWLAALVTRRRQLLTMLHSERQRLQITPKKLHASIEAIVKAIKAQLDEVEAQMVTHVREHFGDLDRLLQSAAGMGPVASATMIAQLPELGRLNRRQIAALVGVAPMAHDSGASKGRRRVQGGRFEIRRVLYMATLTATRYNPAIKAFYERLKAAGKLPKVALVACMRKLLTTLNAMVRTGKPWDPSLYGA

SEQ ID NO: 133760 - protein, 340 aa, unidentified
MTVTTIGIDLAKSVFQLHGVDDAGQVVFRKKLRRGAVLDFLRDLPACLIGLEACATAHFWAREIGALGHEVKMIPPAYVKPYVKRQKNDAADAEAICEAVTRPSMHFVPLKSEARQGVLMLHRSRDLLMRQRTMMLNAIRGHLAEFGIITAQGPRKLAALLEAMREEAMAGLPDMAQSALQSLMAQLDNLANEIRTLERRLMAWHREDETSQRLETIPGVGLITATALSASIPDPSVFKTGRQFAAFLGLVPRQSSSGGKDRLGRISKMGDGYLRRLLVVGATSVIRRAGTNTSATGDWVRRLLERKPARVATVAMANKTARIAWAVLARGETYRAPAMA

SEQ ID NO: 133761 - protein, 345 aa, unidentified
MEITTVGLDIAKRVFQLHGVDAAGKAVLRRKLQRSEVLAFFKALPPCLVGIEACGTAHYWAREIRELGHEVRLMPPSYVAPYVKRGKTDAADAAAICEAVTRPTMRFVPIKTAEQQAVLMLHRTRDLLVRQRTMLVNALRGHMAELGVIAPQGIARVADLIAVLLGEDTAKVPALAREALRGLAAELEALDRRVKEIEVAIVRWHKDNEASRRLATIPGVGPITASAIVATITDPFQFHSARHLAAWIGLVPRQHSSGGKQRQGGISKQGDRYLRRLLVLGATAVIRHSRSKSTAEAGWLKSLLERRPARLVSVAQANKTARIVWALLVHGEAYRMPAAVPSGVA

SEQ ID NO: 133762 - protein, 318 aa, unidentified
MRKVFIGVDVGMDKLDVSISLDGQKYDTLQIFNNEGSILGFFDYLKTTYKKSDFYFGYEATSNYMHVLQRLVHNNDFKQIMVNPYVMAHYLKHLNSRTKNDKIDSIGIAKFIQTIEHEDFKTIFNQDDKTLRKYTSSINLLRKLDTQLKNLIHSQKENPIELLDSLLKTLLLKIKETKKGLDKEAEKVLKELFPHVIELKNQIKGVGYALLLELIPIFLKSQNYTLKQLQSFVGLSPRIFQSGSSVHKRESMSKRGSSLVRKLLYLCTMSAIQHNQIIKEKYNRLVDGGKNKMVALVACMSHLFRAVYVKFHQGLVNV

SEQ ID NO: 133763 - protein, 402 aa, unidentified
MTAGIDWATTDHAVAVVDATGTAIDRYTIPASALGLRELVRRLRHAGVAEVAIERSDGQVVDTLLAAGFTVVVIAPGQVANLRGRYRAAGNKDDRFDAYVLADTLRTDRARLQPLIPDTPATVALRSAVRARKDLLTHRVGLANQLRAHLESSYPGPVGLFADLDSPTSLRFLTRFGCQDDADWLTPSRLGTWLRNAGYTGRKDPAVLHAHLLAAPRGATGPAGTAAAAVTAAFVTTLTALVAQIHVLDRHIATLLDAHVDAPIFRSLPRCQSLRAARLLAEIGDCRARFPTPDALASLAGVTPSTRQSGKVKITSFRWAADKHLRDAVCDFAADSRHANPWAAHLYDQAIARGHRHPHAVRILARAWLGVIWRCWQDHQPYQPDQHRALQAVLHEQPRSAA

SEQ ID NO: 133764 - protein, 345 aa, unidentified
MILIGVDPDKSTHTASAVDPVSNQQAGSLMIEASLAEYRQLLAWGRRWPQRKWVVENANGLGRHLAQWLLARGETVVDVPASATSRVRQLTRGGGRKNDRIDAAAAATAHIHGDGREVNRDDHTTALALLDERRVNLAQARVRTVNQLHAVLRDLLPGEAPPQLSADQATALLRTVRPAGDVERVRKDLARDLVTEIRVLDKRLAENAVRMEELVESSGSTLMNTPGVGPVLAARLVGRASRFATAAAFANYTGTAPIAIASADKARHRLSRSGERQLNSALHTIAVTQIPMPSAPGHACYQRKLSEGKTPREAKHCLKRRLADHVWRVMIGDERRSKHRLPQAT

SEQ ID NO: 133765 - protein, 482 aa, unidentified
MKAKPPEKIQETTNRSTRGHWNEMNRKQRREMMRKIQSEDISLEVVHPDAAGIDIGNESHYVAVAPSRDKQPVRCFGCTTGELKAMADWLKQCGIRTVAMQSTGVYWIAVYDILEQAGLEVYLVNARETKNLPGRKSDVQESQWLMKLHTYGLLRNSFRPSQEIRTMRTYWRQRNDLVQSAGRHVQRMQKALTQMNIQLANVLSDVSGVTGQAIIKAILGGQRDPHKLAEFRNPRVRASEEEIARSLEGHWEEDLLFVLQQEQDGYEFCQKQMAECDRQLNHYLEQREDRSQGAPLPEEKRKGRRKKKSGNKPQFDLRTGLFRMSGTDLTRIDSIDVMTATTILSEAGWDMSKWETEDHFVSWLRLCPDNRISGNRVIGKGRLPTNNRVTIALKMAASALRLSDTYLGAQFRRFRTRLGAPVAIKAMAAKLARLVYRMLRYGMQYVDKGAATYQEQHRQLQIKQLKWKAATLGYQLIGVPAA

SEQ ID NO: 133766 - protein, 321 aa, unidentified
MTPHSIVLALLLLGWKVTATLKGAWDVTMIGAERPDTRVEVILGVDTHLDFHVAVAVDHLGRRLGESSVPTTLKGYEGLLCWAEGFGPLRCAGVEGTSSYGAGLARHLKSRGIEVLEVERPKRRRRGSRRNVEKSDPSDAERAARAVLAGEASGVPKSGDGHVEMIRTLRAARRSAMKARTQAANQLQGLRVTAPDELFNRLRGLSTKELVSVAARFRLGDDPRDVPSATKFALRSVARRYEALSEEIAELDLQLDRLVVQAAPELVSLAGIGTDHAATLLIMAGDNPQRLSSEASFASLCGVSPIEASSGKVLRHRLNLM

SEQ ID NO: 133767 - protein, 412 aa, unidentified
MEVLHPHCAGLDIHKDTVVACVRHMVDGAVKREVRTFKTTTKDLMALSEWLSAEGCTDVAMEATGVYWKPVWHILADGDFKLILANAAHVKNVPGRKTDVNDATWLADLMAHGLIRGSFVPDEPTQEMRNFLRTRKQFVRERTSHVQRIQKTLEDANIKLDSVITDIMGLSGRRMIEALIAGETDPFALAALAHRRIKASQAELEAALRGRVSDHHRFMLRLLLQHIDAIDDAIGQIDQEVDAHVEPFRTAIQILSSIPGISDLSAEVIVSEIGIDMNRFPTEGHLISWAGLCPRNDESAGKRRSTRMRKGAPWLKTTLIQCAWAAARTKGSYLQAQFQRLRARRGAKKAIGAVAASVLTAAYHMLKNGTLYEDLGSDHFDLRAKSKQILRLVSRIQNLGFAVQITPIGAAT

SEQ ID NO: 133768 - protein, 454 aa, unidentified
MKHKRAGRGGAVPSLECIEPNAAGIDIGATEIYVAVPPDRDPNPVRSFPTFTEDLLALAAWLLAGRIRTVAMESTGVYWIPLFQILEARGIEVCLVNSRHVKHVPGRKSDVADCQWLQYLHSVGLLRASFRPEEAICRLRSLLRHREGLVEMAAEHVQHMQKALSQMNLQLHHVLSDLTGQSGLAILDAILAGERNPQRLAELRDGRVKADPQTIVKSLVGDYRREHLFTLRQSLQAYRHYQTLIAACDREMEEYLHDLDSKIDIEQHPLPPESHPHKPRKNEFRFDLRTHLYRILGVDLTAVPGLNAITVHTALAEMGPDLSRFANVSAFTAWLGVSPDNKKSGGQVLSSKTRRTRNRVNRALRIAAQTLHRSQSYLGTYYRRMRARLGAPKAITATAHKLARILFHLLRTGEPYDESIFAQEEQRHRARMENRLRRQAREFGYELVALPAQA

SEQ ID NO: 133769 - protein, 318 aa, unidentified
MFVGIDVSKERLDVSVHGHKESWQFSRDESGLARLVDHLRGLGESITLVVLEATGGLERDVAAGFAVAKIPAAVVNPRQVRDFARATGKLAKTDGIDAAVLAHFAEAVRPAVQVVGDELAQALEARITRRSQLIQMLVAEKNRRATLLVQRTASSAMAKSIDVHIRWLEKQIAELDDDVDKLIRNSPVWREKDDLLQSVPGVGPVTSRTLLSYVPELGALDRKKIAALIGLAPYNRDSGQGVGRRAIWGGRAEVRSALYMATMAALRCNPVLRTFHARLKAAGKARMVAITATMRKLLITLNAMLRDCVPWTPPALKA

SEQ ID NO: 133770 - protein, 408 aa, unidentified
MNPLYVGIDVSSKSNVVYLMLPDGKKHSNFSVPNSQDGSTQMVKRILSVLTSHSLDTVIIGLEATSVYGDNLVYFLREDAILAPYNRKIHVLNPKQVKKFKDSYNDLPKNDYIDSFIIADCLRFGRINNEVYVFDYRYKALQNLTRARFYAVQNLTKEKQRFINVLFKKYSTMTQEKVFSNTFSTTAFAVYQEIESAEALANMDLQELTDFIIEKGKNRFPDPDAVAKAIQKAARSSYRLPKTINDSVNQVLSISITSMRALESQIKEFDKAIEAEIQLLPNVLTSIPGIGPVISAGIVAEIGDINRFPNQAKLGKYAGLAWKQHQSGDFDSEHTRLIQSGNRFLKYYLYEGAFSLVRCDTEYSNFYHSKYKEVNRFQHKRALALTARKFTRLVFRLLKDNRLYRAAE

SEQ ID NO: 133771 - protein, 408 aa, unidentified
MKRYYIGVDWGDRLHQVYVGDEEGKKVREVKVQESPQGLAEIGRWLDEKRAEGLELWAAIEKPAGRIVDFLLDHGVEVYPVNPKAVDRVRDRYRMSGSKSDAFDAYVLAEFLRTDQAHLKALRPSSEKAQELKLLSRDQRRVGRHKTRFLNQLTTTLKEYYARPLEVFEDLETEIALDFLKQYPTPAHLSALKRKEFNRFATKQHHLSKQRCEQLWEKLNKPQLLVPEHVVRAKAQLLEVLIEQLRASIKAVKIYNHRVESFFASSPAAEFAKTLPGGKSGTLVAAIWAELGDAQGRWESSGHLQAEAGAVPVTKASGKSRVVHFRFACNKHLRHTMYWFSFVSLNHSEWAMLYYRRQRDNGHSHPQALRALGAKWLKIIFVMWRDHKPYDENYHLANIARQKMRQAA

SEQ ID NO: 133772 - protein, 314 aa, unidentified
MKTLVCVGIDVSQSQLDVAVRPGACFSVTNDEPGWTTVVAQLRRLAPVRIVLEATGGLDVPLAGALAADGLPVVVVNPRQVRDFARATGQLANTDALDAQILAHFAEVIRPQIRPLPNAQTQALAALATRRRQLIEMLTAEKNRLRTASPSIRKSLRAHIAWLQRARTHTATELAQAIQDSPVWREKDDLLRSVPGVGPVLTTPVLANLPELGTLTNKQMAALVGVAPLNRDSGTLHGKRMVWGGRAQVRATVYMAAIVATRYNPAIKTFYQRLCGVGKAKKVALVACMRKLLTMLNAMLKHRTRWRTDLPQHA

SEQ ID NO: 133773 - protein, 360 aa, unidentified
MLYLAIDQHRKQLTVNLRNESGDVLLKRQVSTQWLRVRKFLEEVQKQGHSEGGFVAILEVCGFNDWLVKLLEEYGCRELILIQPEKRSKKKTDRRDANTLGEVLWVNRKRLLAGKRVQGIRRVQPPSERDAEDRQITALRKRLGQLRTRTINKIKHVLRKHNLEQECPTKGIDTIKGKKWLGQLALGVIDRLEMNQLLVQWQLWDEQIEKVAAEIQKRQAQSKTAAVLATIPGCAAYSSLALASRIGSIERFPRPSSLANYWGLTPGCRNSGQATDRLGSITKQGSAMARFILGQLVLHVLRRDPWMKAWYGRIKKRRGSKIARVAVMRRLATIIWQIVKHNEPYTVGGPPRRELKAQSA

SEQ ID NO: 133774 - protein, 310 aa, unidentified
MTRTQVFVGIDVSKAQLDMALRPEGRFSASNDEAGFAQILERLKAAPPTLVVLEATGGLEIPITGVLAAAGVPVVVVNPRQVRDFAKATGKLAKTDALDAQVLAHFAEVLRPALRPLPDAQALAALLARRRQLVEMLTAEKNRLSSAHTPVRKSLRTHIVWLERELSHTDRDLAHAIRESPVWREKDDLLQSVPGIGPVGTSTLLANLPELGTLTGKQIAALVGVAPLNRDSGTWRGKRTVWGGRAQVRAILYMSALTATRFNPVIRVFYQRLCAAGKAKKVALTACMRKLLIILNAMMKHRTRWAQTTG

SEQ ID NO: 133775 - protein, 347 aa, unidentified
MRFYNRQHQYYCGIDLHVKTMDVCILDGTGQVLVHRNVPSTPTALLEIVAPYRTDLVVAAECMFTWSWLADVCAAEGLTFVLGHALAMKAMHGGKAKNDKIDSHKIAVVLRGGMLPHAYVYPAAMRSTRDLLRRRLHFVRKRGELLAHIQNTRVQYNLPAFEKRLAYPGNRDGVVAHFPDPSVHKSIEVDVALIDHDDALVNDLELTIVREAKRHDGDAFHRRRSVPGIGKVLGLTIVYEIHDSTRFDRVQEFASYARLIRGAKESGGKKMGTSGAKMGHVHLKWAFSEAAVLFLRHTTEGKRILARLEKKHGKGRALSILAHTIGRAGYDMLSRGTVFSMEKFLAA

SEQ ID NO: 133776 - protein, 416 aa, unidentified
MNYNPCITIDVSQGKSHIQGFIGYNNKNRKPDNITQPKVMRHSKQGFNKIIELISIIKSKTNLVPIVIFEFTGVYHKTLEKFLQKNNIKYHIVAPLRAAKSRQNDIRSVKTDKRDCLSLARMFYDIKKDSLGKFDSESESYESMKQLNRFYENIKLRQQELKVNFREYLAIIYPNYEITKSNLDGAFKNVYPKESLGFLKEFPHPELVVKKTVQEIEETIIKYLGKIHSKFSLSIASRLLDYCKDLVSGCSFDQPLVDNMQFYISQIELYENTLNDTLDKLITLAENTSLYHLLLTIPCVKENLASRFVAEIGDINRFNSYKAIISFVGNDPKIYQSGDDLGLHKKITKKGNKHLRTIFYLIAQQMTKAKNIESSIKDFYKKKTQQGLPKLAALIACSNKLIRIIYYMNKTGCAFV

SEQ ID NO: 133777 - protein, 354 aa, unidentified
MEKTTTQACVATIGIDLGKKVFQIHGIDRFGEIVTRRSVKRRDLLPFAAKLPACLIGMEACATAHHWARELTRLGHQVKLIPPAYVKAYVRRQKNDMVDAAAICEAVTRPAMRFVPIKSAEQQGVLMLHRVRELLVGQRTALINSLRGHLAEFGVVAPQGARHVAELVAVVADAGDARLPDIAREALAPLVRQMQRLEVEIGHLDRRLLAWHRADAASRRLATIPGIGPVTASAIAASVTDPSMFGSGREFAAFLGLVPRQSSSGGKERLGRISKMGDRYIRKLLVVGATAVLRYAKRGGSPSKTWAEALLQRKPFKVAAVALANKTARIAWAVLARGETYQAGKAGAAAAEAA

SEQ ID NO: 133778 - protein, 370 aa, unidentified
MEIIIYVGMDVHKESYSLCCYDPRTDRYLYEHKMKSTTANVLKYLDNVKKQLGDVIFICGYEAGPTGFGLCRDLLRKDIICEVMAPTSLKRNANYRVKNDKIDARLLAKDLFTHDYSPVHLSSQKEEAIKEFCRMRRSLMTELKTAKQVLLAFLLRQGKHFDGKTHWSKEHRKWLKEISFEQPYLQEAFDEYLININELEARLKRVENRLEEISKDEEVESKVKKLICFCGIDTLTAVSIVSEVGDFMRFARAWDFANFVGLSVGEHSSGGKERHLGITKSGNCYLRRLFTESAKSIKKTSMKAKKSKRLIARQEGNDSKVIAYADKCRYRLKYKMINLENRGKAANVASTAAARELACFVWGMMTDHIA

SEQ ID NO: 133779 - protein, 360 aa, unidentified
MEKSSTRRQKDKPPVITKRDQVYVGLDVHKLSVHAAVRINGTLFGAKVLPAKAGAVLAFLAPFRAGLKKVVYEAGPTGYAMIRALIEDGVNAAIVSPGKIPRPAVQGAKSDGIDCRMLAEFAEKDLLSEVAVPTLDEDASRQIQRMRDGIRDRRRKAKQHIRSFLLYHGIEEPKNLASWGESAIDELQKIPMSPKLKFCLDILLEDLYHALDQMEHVNERLKVLASEKRYAKEAERLKTHPGVGDTTCIQVLTELYQPERFENSKQVAAYVGLAPQVRQSGQTRTEGALLKAGRGELRCTLLEAAWVWIRVEKRATKLYGRLVRNTGNAQKAIVAMARRMLVNLWYMLIRKEDYRPFAAK

SEQ ID NO: 133780 - protein, 412 aa, unidentified
MTNGMRRWFAGVDWGSEKHQVCLLDEAGTVVGERVFQHDAAGLAALCDWLVSVAGDTSSVAVAIEVPHGPVVDVLLDRGFAVHAINPKQLDRLRDRFSPAGAKDDRRDARVAAAGLRTDPHLFRPLQVGDPAVIELREWSRLAEELQQERVRLANRIRQQLWRYYPQLLALSDDLTAEWILALWTMAPTPAKAMRLHEATIAKLLSRHRIRRLDAAGVAEMLRQPAITVAAGVTEAAILHLRSLMARLRLANTEFHQAERKLDELCAQLSQNATAAADGPCDAAILRSVPGVGTVILATLLTEAGDPLARRDHTALRTLSGVAPVTKRSGKTCIVVMRYAAQARLRQAVFHWARVAVMHDPTSRSRYEALRARGHSYGRALRSVADRLLGVACVLLRRRTLFNPNHGTSAAA

SEQ ID NO: 133781 - protein, 343 aa, unidentified
MDHFAGLDVSVKETSVCIVDDTGKIVREVKVASEPDALLAVLANPTYRLRRIGLEAGPLSQWLFSALANAGLPVICVETRHIRAALKAQINKTDRNDARGIAQMMRAGLYRAVHVKTLRSQKLRMLLTHRKLLQSKAIAIENDLRATLRNFGLKVGMVGTVRFEERIKELVENLPDLAVLVEPLLIVRQTLREQFGILHRRLLAIVRDDEVCRRLMTVPGVGPVVALTYRATVDVPARFRNSKAVGAVFGLTPSKYQSGEINRTGGISRCGDEMMRMMLYEAAQVMLLRSAKWSWLKAWAMKIARNRGMKKAIVALARRLAVIMHRIWVDGTEFRWTREFAAA

SEQ ID NO: 133782 - protein, 356 aa, unidentified
MAPITYLPCDYDVFIGIDVDKRSFSFTTTDRDVMINRSKTIPANEDNLYRYIKNSFPDKNVLCGYEAGPTGFHLYDYLLQNEVQCIVMPPSSIPKPSDSRVKTNRIDSERIANCLRSGEARPIRVPDESYRELRHLISVRERYSADTTRTKQRIKALLLYVHLDDMMPDSEKRWSNAYIAHLKTLETPPAVDERLNLLLEDLAYTRSQMTRILRSLKSFCHVHEEIDRYRKYLETIPGIGFQVALTILARIGDPKELTNVRELGAFFGLVPTEHSTGERVQRGSITHLGNNAARALLIEAAWTTIRYDKELCQFYHRIRARHHPSCAARKAIVAVARKLTQRIYSVLTEERPYMVR

SEQ ID NO: 133783 - protein, 344 aa, unidentified
MTGDQHTAAIVVGIDTHADFHVAVALSGHGQRLGELTFAATTGGCHRLIRWVGDFGAVHAFGIEGTGSYGAGVARQLTASGYTVLEVQRPNRQVRRLRGKSDPVDAEAAARAVLAGEVHSHPKSGDSVVEMIRLLRIARHSAMTSRVQASNQMTAVVVTAPAALRERLHGLSSRQLVEVAARFRVGRLESPEDATKYALRSLAQRWLALADETATLDTALDRLTMTRAPRLRALLGVGADVAGALLVAAGDNPERLHSEASFAQLCGVAPLPASSGKTQHRHRLNRGGNRQANSALWRIAITRMSCHQPTQRYCARRTAQGLSKREIIRCLKRYVAREVYPLLA

SEQ ID NO: 133784 - protein, 337 aa, unidentified
MNTKANYKEIIGIDVSKDSFDAYLYFSAKHSKFNNEFKGFTGLLQWLKEKSSADKGQRLFIFEHTGVYSESLANFLSAKEEHFAIVSGLEVKRSIGIKRGKSDKIDARVLAEYGYRFQDKIELTKLASENLRGLKKLLSQREHYTKQLVEIKNRIKNLEEGKENLDSIEIKILDRDKQFLEEIKQFIKDIETQIDALLESDEQIKALVELIQTVPGVGKLTALYLIAYTEGFTKFKTWRKFASYIGIAPFPYSSGTSISGKTKVSHLANKLLKSKLYNVVLAAVRFDPELKKYYQRKLAEGKHTMSVLNAVKNKIIARVFAVVKRGTPYVNFMTFAN

SEQ ID NO: 133785 - protein, 343 aa, unidentified
MQTITTIGLDIAKSVFQVHGVDATGQVVIRRQLKRRSVLAFFQKLPSCLVGIEACASSHHWSRELQALGHTVRLMPPAYVKPYVKRQKNDMADAEAICEAVTRANMRFVPTKTPEQQSCLMLHRTRHLFIRQQTAVINSIRAHLAEFGIVAAVGRKGVTELLHIVADPNDKRVSEVARACLAALGGQLLSLKQQIVEFDRMILAWHWSNQTSKRLHYIPGVGPILATALVASVADPSTFRSARNFSAWIGLVPKQHSSGGKDRLGSISKQGDRYLRSLFVIGALAVIRYAKIHGTKHRPWLTALLARKPAKVAAIALANKMARMVWAMMAKGERYKEPVALAR

SEQ ID NO: 133786 - protein, 560 aa, unidentified
MDRQTFPTKIIHYSQRPKTPTIKQIIRHEIHTPALIDMRQDRPLLAVCCTDMSAGALSAQIQPFQAINPVCFLVVNLPAFPPQLDMNARATIPYPGFRYFPDTQGYRPIVTPDLPVVDSSALHQQPASPADTDTIYLLQKAHRLALLSRPQNFFFQHLLQHLLVQTQVSHQLLQPLILILQLPQPPQFRHARPGKFFLPVNGMDYLLPLRLTVRNVLTRRITMNIVFLGIDLAKNVFQLCGLNQAGKPVYTKRTGRKELLQTLANIPACLIGIEASTGAFYWQREFEKLEHKVKVISPQYVKPFVRGQKNDGNDAQAITVALMQPTMQFVPPKSPEQQDIQALHWARQRIVNHRTATVCQIRGLLLDRGIPIGSAVSRARRAIPLILEDAENGLSSRMRRTIAELYDLFNDLGRRIHFFDKEIETVFRQSEACQRIAKVKGIGPETATAVVAAIGKGTEFKNGRHFAAWLGLVPRQHSSGDRQVLMNMTKKGDKHLRTLFIHGARAVVRVATNNNDGHMNQWVNQLKERRGFNKTTVAVANKNARIIWSMLRNETGYQVV

SEQ ID NO: 133787 - protein, 390 aa, unidentified
MQVTRVAPDWPVPSLMHRRRVLADCITYVGLDVHKEWIVVAIAGGGGRGEVREYGRIANTTMALERLIGKLGQEGAELRFCYEAGPCGYGIQRQLSTNGHDCVVVAPSLIPKRAGDRVKTDRRDAASLARLHRAGELTAVWVPDAGHEAMRDLVRARLDAVHALRRARQQLSGFLLRQGRHYRRAAWTKLHRRWIAGLKFEQAAHHIVLEDYIAAVETAETRRDRLTAQIEALLPDWTLAPVVAALQSMRGMALVNAATLIAELGDLSRFANPRQLMAYLGLVPSEHSSGASVKRGGLTKAGNGAARRLLIEAAWCYRFPARVSRELLLRQEAQPKPIREIAWKAQLRLCARYRKLARTGKPANVLTAAIARGLAGFVWAIARRVPPAAS

SEQ ID NO: 133788 - protein, 387 aa, unidentified
MLSKLSCATIGRQVPERLNVGIDMGKRKWAVDVLDTRSGRHQARTFTGDDCADKTYSLIAELRKTNRDVDVIYEAGRNGFTPARCMAAMGASVAILPVNKLQVVKAGKKAKTDGLDARELSERDARDPALPRVWVPPTDAECRRQMIREQQRLKKDIRRNNSRILSIMERWPVGCTHGHRSVATWCRQLAEWEQDGTVPRSLPRSEVLIIISLVRELKALEQNQTEWEEQIARERKQQRRKAAQADRPADIDVLQQYKGLGEETVTNLCWHVGDFSRFSSGKKFAAYIGLVPVPWQSGMMNKCQGISKAGSPALRRLMVELAWLWVRYQPDSVITRKWAPRLAEKGRSRKKAIVAVARQLAVALLQRLNHGIELEGAIKNKPLASLS

SEQ ID NO: 133789 - protein, 415 aa, unidentified
MKFNTQNAKIEAITEKTLVLGIDVGSEMHYARAFDYRGIEYTKKPFKFSNTEAGFMSLQAWILDLKEKHEKDKVVPGMEPTGHYWFNLGKFLQDNEMKPVLVNPHHVKKSKELDDNNPTKNDCKDPKVIAGLVREGRYMIPYLPDGVYADLRTASNIRFQLQAELTRIQNRISRWFNIYFPEYKKVYGKPDAKSGILILKTAPLPEDILTLGIDGVNQIWRDAKLRAVGKARANTLIEAAEHSVGSKEGTVSARMEIRMLLEDYESRNIRLQEVMALIEELVAQIPMAEKLLEIKGVGIRTVSGFLAEVGDISRFNNPKELQKLAGLALVENSSGKHKGETTISRRGRKRLRYLLFEVAMSLVAKNPEFRELHVYYTTRRLNPLKKMQSLMAVAAKLLRIFYVMLTKSVDYDPKM

SEQ ID NO: 133790 - protein, 373 aa, unidentified
MSKNIKFVGLDVHADTVAVAVAEMGGEVRSVGIVAHEITAIRRVLGKLGKKEQLRVCYEAGPTGYALYWELTRLGIDCIVVAPSLIPKAASDRVKTDRRDAQKLARSHRAGDLTAVWVPDQKHEALRDLVRLREAAQEDNVRAKHRLGKFFLRHGLKDPSGKKKWSDVWWQWARKVKMPYVEQEMTLVELISEVDHQKHRLVRIEAAIDKAISEAPERLQKIVDGLQALRGVAKLTAVTLAVELGSMARFQKAPQVMSYTGLTSSEYSSGSKRRQGAITKAGNSHLRRALVEAAWQYRHPPRLMQRQKKMMKEWPAPVSDTAWRAQQRLHRRYRALSERGMPVGKVVTAVARELSGFVWDIGLTVEKDFQQAG

SEQ ID NO: 133791 - protein, 462 aa, unidentified
MPKQRRGGKNSRRVAEDILEGLPPLNLNAAGIDLGNAAHYVAVPTGRDAQPVREFGSFTADLHRMAQWLKACRVDTVVMQATGVYWIGLYQVLEEHGLKTLVVNARYTKSLPGRKTDVQECQWLQKLHTFGLLNNSFLPPAEIRALRTYLRQRENLVTGAATCIQHLQKTLTEMNVQLANVISDLTGVTGMAILRAIVAGERDAERLAQLKNERIQASRAEMARSLEGNWREELLFVLQQSLEMYDLYREKIGGCDQRIEAHLKTMTAKVDVQAQPLPEARRAKWPRKHQPRFDLRGQLYRATGVDLTQIDGIDVQTAQTIISEVGVEMSAWKTEHHFSSWLGLCPDNRISGGKVLKRRTRRVINRASTAFRLAAWNLLRSQSALGANFRRLRARLGAPKAITALAHKLARLVYRMLKFGSQYVDKGMAYYEEKYRQHQIKWVMKQAAALNLQLVPAKAVTH

SEQ ID NO: 133792 - protein, 350 aa, unidentified
MPPSHTTVGLDVGDRHSWFCILDESGEVVAEGRVRTTTEELDEHFTRWARSRVVLEAGTGSAWISRLARAAGHEVIVANPRELRKIHQSDRKNDRTDAQVLARMARFDPQLLAPITHRSAAMQNDLAVVRARDVLVRARTQCVNAVRGLVKTAGGRLTTCSTESFARKAAAQLPNGLESALEPMLKTIEALTEQIRAYDRLIDQLASRYPAIEVLSQVTGVGALTAVAFALTLGDPSRFGSSRDIGAYLGLVPRQHDSGNHVSQLSITKAGNTLLRRLLVGSAHYILGAHGPDCDLRRYGERLMARGGRNAKKRALVAVARKLAVLLHRLWVNGEAYDPLHTEREDRQAA

SEQ ID NO: 133793 - protein, 311 aa, unidentified
MTEATIGIDISKDHLDAFRLEDRAAQRFENSVSGFRALLKWLGQTPVARIVYEPTGPYHRAFEVALSGKVPLVKVNPLQARRFAEATGTRAKTDAVDARMLARMGATLKQEPDAPISRHLLVLKDLQTARAALVKERTRLRNQGHVQTTPILKRQIKARLTLVERQLTEIDAEIASHIASDEALERKRHILRSIPGLGPVAAPLILTLLPEIGTLTREQAASLAGLAPHARESGQWKGRSFIGGGRKPLRDALYMPALVAMRFNPDLKRKYQSLRAAGKPAKVALVALMRKLLETANALVKADRLWTPKPA

SEQ ID NO: 133794 - protein, 338 aa, unidentified
MQISTIGLDLSKRVFQVHGVDAKGATVIRKRLRRSEVLGFFEKLAPCVVGLEACGAAHHWARELRALGHDARPMAPSYVKPYLKRGKKNDAADAEAICEAVVRPGMRFVGVKSVEQQGALMLHRSRDLLIRQRTMLVNALRGHMAELGIVAPRGIWRVKELAAIVADEADGRIPAVARPALAALIGQIAALNAPLRRLERAILAWHKGNETSRRLATVPGLGPLGASAIAATVGDARQFRSGRHFAAWLGLVPRQHSSAGKERLGRISKMGDRYIRRLLVIGATTRLRYARGRPTPDAEWINRLLTRRPARLVTVALANKMARIAWAVMARGEIYRAA

SEQ ID NO: 133795 - protein, 367 aa, unidentified
MKKVSTAATKQGRNISQPTRTIGLDLGDRNSWYCVLDESGQVQLEQRVRTHAKALREIFGGIPRSRIALETGTHSPWISRLLSELGHQVIVANARKVRLIGESRKKDDRLDAQTLARLARIDPGLLCPVKHRSAQAQADLTVIRARAGLVRARTALVNTARSLAKSYGERLRGCNVRNMNPEKAEALSPELQRALEPLLSAIEELSERISEYNERIEALAEESYPQVKLLQQIKGVGTLIALTFLLTLEDPHRFRKSRDVGCYLGLQPGRRNSGQSEPQMHISKEGDPYLRTLLVQGAQHILGPFGVDCDLRRWGLKLAERGGRNAKKRAIVATARKLAVRLHHLWVSGEVYDPLHNSSRVIVSAAA

SEQ ID NO: 133796 - protein, 398 aa, unidentified
MTESSNYESVQVFIGVDVGKDTHHAVAINRSGKRLFDKALPNDENKLRSLISDLKQHGQILLVVDQPATIGALPVAVARSEGVLVGYLPGLAMRHIADLHAGEAKTDARDAAIIAEAARTLPHALRTLKLADEQIAELSMLCGFDDDLAAQTTQASNRIRGLLTQIHPALERVLGPRLEHPAVLDLLQRYPSPEKLASLGEKKLATQLCKLAPRLGKRLAADIAQALAEQTVVVPGTNAAAVVLPRLALQLITLRKQRDEVALEVEQRVLAHPLYPVLTSMPGVGVRTAARLLTEVACRAFASAAHLAAYAGLAPVTRRSGSSIRGEHPSRRGNKALKRALFLSAFAALRDPLSRAYYTRKMSQGKRHNQALIALARRRCDVLFAMMRDGTFYTPQGS

SEQ ID NO: 133797 - protein, 421 aa, unidentified
MKFKAQDKQNQLIENITTNHLVVGVDIAQEKHVARAVNFRGIALGNPLEFSNDEVGFQSLSRWIRDLLTSYKLTKIIVGMEPTGHYWLSLAHWLKDTGIEVVLVNPHLVKKNKENRDNTRSKSDKKDALVIADMVKNGYYSPVRFHSAAYAELRVLMANRETVVKRLVSAVNQIHRWVDIVFPELRQVFKILTCKGALATLRLFPLPADLSKLEPTDVIAGWKKSMKRHSGVRRAKLLIDLAKQTVGSFQATHAYKLHLQHLLEEYDLASTQLQRIEDEAKTVLERIPYTGKILAITGVSAIALAGVLGESGDISGYNHGNALLRHAGLNLTEASSGKWKGQMTLSKRGRPRLRHFLYLITMCMVMTNKEFKALHQHNVQVKKLKRMKSILKLCGKLARLLVGLARSEEAYKPDKVFALAA

SEQ ID NO: 133798 - protein, 482 aa, unidentified
MVARKKKSAKVKVSPLSDPLKQIHLHAAGIDAHSREHFVAVPVGSAPKDFVNPDANLPPHIRIFGTNTGDLEACAAWLQLCQVETVAVESTGVYHLALVEVLESHGITVLIADSRQTKSAPGRPKTDVLDCQWIQRLHSYGLLRASFQPGPEIRKLRAYERQREMLVSYAAMHIQHMQKALELMNCKLMNVLTDIVGVTGMLIIKAIVRGVRDPKRLAAYRHPNCKAEEAEIAAALQGTWKEEYVFELRQTLKLYEEYQRRLQDCDEQIEACLKQFQDVSKGQKLAAKKSSAKRKKHSMSFDVRGWLLKLLGVDATLLEGIDEATAFVLASELGPDLSAFATERHFTSWLGLSPNHRGSGGRVRRRSVKASATRAARAFRMAGAGCHHAKNALGAFYRRIAARSGGAKAVVATARKIAERFYRLVTKKGDYVRQAEDHYEEAYRLKLTKSLQRRAEELGYELTPIKPAANVAPTATPTATLS

SEQ ID NO: 133799 - protein, 387 aa, unidentified
MPQPNDLSRSLVALDQDSTIIAVVEMSQSSWLVAGMLPGIERQPRKKLEPSAERLLGLLHRWRDEAVKAGRKITRIALAFEAGRDGFWLARWLRARGVEAHVIHPSSVAVSREHRRAKTDRLDTELLKRGFLGWLRGERGHCTMARIPTIAEEDAKRPNRERECLVRERTRIVNRMKGTLARLGIRNFKPTLRKAAERLATLHTPEGSVLPPNVSAELQRNMARLGFVVSQIKEIEGARQKRLEQEPETEPHAMVRHLARVVGIGVETADMLVNEVLSRPMRDRKAVARYAGLTGSPDESGAKRREQGLAKAGNARVRRGMIQLAWRFLRFQKESALALWYRARTADSRVGTRKTMIVALARKLLIALWRLVTTGETLEGVVLRPAG

SEQ ID NO: 133800 - protein, 312 aa, unidentified
MTLSRGIDVHKASLQVAIADGTSWRVPTTPTALQTLGTRLTLLRPDVVGLEPRGGDERPVLEMLWAHHLPAALVQPRQVRACIRGQGVRAKSDPLDARMLAWFGLSMTPRLVTAPTPRQRQVQDLVRHRRTLVADVARWKHRQQQADDPMVQASIHHILTALTTEIAAICATIHTLVTTAPEWQRIRQILLSAPGIGAISVALLLAELPELGQVTPKQLAALVGVAPMTQQRGDGTVRAPIEGGRRTVRDGLWMPTMTAMRHNPTIRRMAERMQEKSRPHKVIVIACMHKLLTILNAMVTNDQVWEDRPQTA

SEQ ID NO: 133801 - protein, 482 aa, unidentified
MTRHVGIDLGQKGVHVAAYTDERSGTVRTMKVTHTKEGLDLFLKWATHGCEEQVQFVMEPTGLVWITIGSFLKQRGHIPCCIKPEKTADLRKFVKKHTKSDRIDAQTLSTVPRIDPKGTFPVHLPDGKVDALKRMVKRRERFGRLIEAQKKRIITLMNLAIPNVMEALGKQKFTDSGIAFMKTYCNPGKAVREGLEKFKEFWREESGSKCDPMRAEKVFQACKNAVDLYSGMSPLPFDYKEVKWEIREELNHLLYLERQSRKMGKIIKKIYLELDPYRTLESIVGIAEVIAPAFLGILGNSVERFPNANCAVSYMGCCPGKHQSGGKDPAMPMKKSGNRILKKYLYLTVATARRHDPEFAAFYARLYRRGYHHNRIMTALANKMARRVYAVLKRRDEMLKPVRGKDGSPPDGHEFTRIMYQLRSPDGKPIDKKTANTLIQTNYAREVVAPERAQRDREKRNPREETPDKKKRKRRPVKRVAV

SEQ ID NO: 133802 - protein, 355 aa, unidentified
MGTISLGVDLAKCIFSVCEMDGIGRVLRRREFRRDAFATYLAQLPAGTVVAMEACSGAHHWARRCREYGLVPRLIAAQFVRPFRKNPVAKNDPNDAEAIATAARQGNMRFVPVKDIDQQARLSWHRVREGYKAEHLAIGNRLRGLLAEFGIVVPNRDAALHRVLGDLDAHPELPGEFKELLRSLSEHWVQVHAAMAACDARIERHARQDSRCARLRAIVGVGPLTADAMVASIGNAREFKNGRQLAAWLGLVPTQHSSGGHARLGAISCRGDGYLRTLLIQGARSSLERAKRVSLDKATPEQVWIQSLACRMPFGKVIVAIANKHARQLWAMLAHDLDYDPTASLNRTMQQRTAA

SEQ ID NO: 133803 - protein, 341 aa, unidentified
MQVTTLGIDLAKNVFQVHGVDAAGTVAITKKLRRSQVLPLFERLPRCLVGMEACATSHHWARELKALGHDIRLMPASYVKAYVKRNKNDAADAAAICEAVTRPSMRFVPIKTAEQQSVLMLHRTRDLLVRQRTQLINAMRAHLAELGLVAARGREGVQSLIALVRDKVSQLPALARSALQAILSQLDALGRQIANIERHLHAQHRANEVSQRLETIPGIGVISATAIAATVTDPQVFKSGREFAAWIGLVPRQNSTGGKERLGSISKQGDRYLRRLLIVGATAVIRQARTRPDKYPWLTKLLARRPVKVVAVALANKTARIAWAVLARGEIYRAPALAVRM

SEQ ID NO: 133804 - protein, 405 aa, unidentified
MKHVIAFDVSMGKSTMVVYDDNQHCHYEGELEHTQTGFQSLKKRIDSLTGVDGQVPEIVFEATGVYSQGLEKFLQENQYPYSRLNPLEAKLQTASMRRQKTDIGDAHELARTHFRVDRTETYIQEDYYEQMRALVRYYQDIEKEIGQQSNRLHAFLQLSFPLLEKVFSKSSILFLNIVQLFPHPSSLKGMSKDQLREQIKQATRKNLSPKQAEEKATLLLSAVENSYSAIGPNDVRCQHLKQFAKRIQELRVQKKDIIKQMVGLSKGRVEYQVLISFPGIGESTAVQIIGELGDIRRFQNSKQINAYTGIDIQRYQSGKLQHQDKINKRGNKRLRKILFQVVTNMISWRAKTQNTIVDYYDKLKKQPNGKLHKVAMIASMNKFLKVAFHLIQNGLLYQYESGKAS

SEQ ID NO: 133805 - protein, 385 aa, unidentified
MKTNSQMTLDKYFRQCVGIDISKDKFTACLYMYDMASDAGCCTESIDFPNNRTGFNQMVKWSRKESQKGFPLVYLMEPTGSYYEPLAYHLHKIGQTLYVVLPNKARKFCEYEGIKTKTDAMDARCLALMGCKNRKLRPWEPPLPIYRELRQLTRLRADLVKMQTQMLNHIESIDHMEDVAPEVRKSYEKLLDTIEKQLEKNEKDIAAKLAQDKELETKVKRIATAKGIRVGTVTCIVAETQGFHIISNRKQLTSFAGLDVKARQSGKDDPRHHITKKGNAHIRAALYMPALSAAHCNRQMAQAYGRICAKHPDVKMIGVTAIMRKMLLLVYSLWKSGEEYDETRDNTHTPRKKEPQPTNSPEDCLKPNAEPPDWNAADKEGNPPF

SEQ ID NO: 133806 - protein, 409 aa, unidentified
MEVLYERCCGIDVHKSSVAACILLERGHKPQKHLRRFGCTTRDLRELAEWLRSFDVRHVAMESTGVYWKPVWNMLEEHFQMVLANAQHIKAVPGRKTDMMDCQWIAELLRYGLLRGSYVPSPVIRDLRDLTRTRATLSQEQSRISSRIQKLLESANIKLASTVTHTMGKSGRAMLDAIVSGEDRPERLAGLALGKLRSKIPQLQLALEGRIRDHHRFLLDSLLRQYRFLEAEIQALDARLEQLGEQHQELADAVARWITVPGVERVAAWSLVAEIGSDMTAFPSAAHLASWAGLCPGNHESAGKRLSGKSRKGSPWLRRMACQSAWAAVRTKNCYLSAQFKRLAARRGSKRALIAVAHSLLVIGYHLQSKGCVYQELGGDYFDQLHAERLKRHLVKRLESLGVSVTLQP

SEQ ID NO: 133807 - protein, 342 aa, unidentified
MWIIGCDYHPRFQQIAFVNTEGGECGHRRLQHVAEAEQFYRALQGQTVRVGMEAGGHARWFERLLAEVGHQLWIGDPRKIRAAETRKQKTDARDAAHLLELLRNGQFETKMRIWVPTAEARDVRQLVLHRHRLVGMRTRVKNQLRAVALNEGMGPKPGLWSQKGQAQFRALPLPVWSERRRADNLELLAELVRRTEPLDQAVLAEAERRPEAVRLMTHPGIGPITALTFVLTIGDPLRFANSRKLTSYLGVIPAEDSSGGRQRLGHISKQGNVLLRSLLVEAAHSAAQREPELGRCYRRLAMRKNPSIAAVAVARKLAVRLWWMWKRGLNYQQFRASGSHAG

SEQ ID NO: 133808 - protein, 393 aa, unidentified
MNEAGTVLARKRLPEGVAGMAQLHELTGRYLPDDPADTEVIIGIETDRGPWVAALVAAGYTVYPVNPLQASRYRERHGVSGAKSDQGDAHMLADMVRTDSHQLRPAAGDSPQAEAIKVVARTHKTLIWERTRQVQRLRHQLREYFPAAIEAFEDLDASDTLELLGKAPDPARAAKLTRAQVAAALKRARRHGIAGKTDAILAALRGEQLGQPAALTAAYAATARSLIAVISTLNEQVKILEEQVRAHFGRHPDAEIYRSQPGMGAILGARVLGEFGDDPHRYADSKARRNYAATSPITRASGKKKIIAARFIHNDRLIDALRAQAFAALNASPGARAFYDDLRARGIEHNDALRRLANRLVGILHGCLKTRTLYDEATAWDHRKNLPQSSVAA

SEQ ID NO: 133809 - protein, 384 aa, unidentified
MQDVIVAVDPAKRSHTVEVLDARERVLATLRVDNTNAGYRELRQFVRRWGQRRWPVEGAKGVGRQLAQRLVADGERVIDVPAKLSTRVRVLDTGHGSKNDPADAHAVGVAALRHRDLVEITVDDETVALRLLSDRRRELVHTRTQTLNRIHRLLSELIPSGAPKRLSATKAKQLVATVKPRDVAGRARRAMVVELIDDVTILDRKIKAVTKQIKEAVAASGTTLTDIIGIGPVLAAVILGEVGDITRFPSRHHFASFTGTAPLEASSGEVVRHRLNRLGNRQLNHALHTAAVVHISHDSRGRAYYERKKAAGKGNMGALRCLKRRLSDVVYRALIADQTAKSPGGHLGATLTASAADPIPTASTSYKPLTGLTVDLTPVLAAMC

SEQ ID NO: 133810 - protein, 393 aa, unidentified
MFYLGIDIAKNTHVASLMDEKGKTIFKGFSFSNTTEGGKSLLEIIKKHSEFTDVTVGMEATGHYWLSIYSFLYDYDFHCIHVINPIQTDGWRKGTEIRKRKNDTIDSVLIADLIRYGDFVETTLSNEDLYSLRNICRMRNYLIQSAGDLKRKVICVLDQVFPEYQTIFSNTFGTTSKQLLLDFSSPSDFEELSVETLTETLENLSRKKIGQSTAEKLINSAKNSFGVTFSKESFTFQLKLLIEQIKFIDNQVKECETKIKELMKKIDSPITTIPGIGPVLGAVIISEFGDISRFDKPSKLVAYAGIDATVSQSGEFEGTHNVMSKRGSPYLRKALFQAALVASNTDPVLKDYYQKKRAEGKHHKTCIGAVARKMCNIIYAVLKNNTPYQVPKQ

SEQ ID NO: 133811 - protein, 418 aa, unidentified
MQTELSNYTAVIGIDWADKKHDVCIHVTATGKQDLSQIPHQSEKIDEWAHSLYRKHGGPIAVALELSKGPIVAALQKYDFFVLYPVNPSSLVSYRRVFTPSGAKDDPTDAAYILNLLLRHPDQFHPLQPQSTEMRALMALTEQRRRLMDDRVRLTNRLRNALKQYYPQALEWFDHIDTLLFCDFIKRWPTVVQARRARKATLETFFRSHNMNRKPLLEKRITAIRSAVPLTTDDGVVIPYRLLALTLVEQLQTMLECLDAFDSEIAALAPQHPDYALFDALPGAGPSLAPRLLVAFGEQRERFKNAAEVQKYAGVAPVTERSGEQFWIHWRWQCPTFLRQTFVEWAAQTINKSYWAGIYYYKQREKGCTYQAAVRALAFKWIRILYRCWETRTAYDESRYLKALKERGSPLLTIAETA

SEQ ID NO: 133812 - protein, 352 aa, unidentified
MYYVGLDLHKKYITGCALDSQGAVVATERRLPPVLATVLSWLAPVGQPAAVALEATLYWAWLHDRLTAAGYQVAVAHPQQVKLICHARCKTDPVDARKLADLLRTDLLPAIWIPDAETRARRTLLRGRAWVVRTRTRVKARIQAYLAAENERVPVSDLFSRGGRAWLATVALPPEVRSQVDRLLALVEQLDVQIAGQDRTVRALARATPEAERLQTIPGIGPFGALLLLAEIGTITRFGSSHELAAYAGLVPSTRSSGGKTAHGSVGPAGSAWLKWLFVEAVQTLKRQPGPVRSKYERLLRAKGKQKATVAAARKLCCYVYWMMKEGRSYDEWLRQRQQREVRPIQAVASVA

SEQ ID NO: 133813 - protein, 418 aa, unidentified
MEVLHERCAGLDVHKKTVVACVRLARDGGVEKEVRTFKTTTADLLALGEWLDGHDVNHVVMEATGVYWKPVWHILDDGDRELVLANAAHVKNLPGHKRDVSDCDWLSDLEAHGLIRGSFVPTRQTQELRGLLRTRKQKVRERSSNTLRLQKTLEEANIKLDSVISNVIGVSGRRMIEAMIGGETDPVALAALADRRIKAPPEVLCEALRGRVTGHHRFLLGLQLEHIDALDGMIDKIDQQIDASVEPFRAAAGLLTTISGVNQLAGRAIVSEIGIDMSRFETAGHLISWAGLCPRNDESAGKRRSTRIRKGAPWLKDILVQCAWAATRTKATYLHAQFVRIRSRRGPKKAIIAVAASILTAAYHMLKNGVPYRDLGPQHFHSRNKQAQAKRLLARLRDLGFTAEFDNLKPIPDAVVSY

SEQ ID NO: 133814 - protein, 318 aa, unidentified
MVNESFVGIDVSKQWLDIGWESSGRTERLAHEEAAIAGLCERLAQERPSLIVLEATGGLETHLASALAASGLAVAVVNPRQVRDYARACGRLAKTDRIDAVILAAFARAIRPQVREPKDQESTELGALLARRRQLIDMRVQERLRLERASALQRKSLKEHIDWLTKRIQRLDIELTHRLRGSSLWREREDLLKAIPGVGVITRSTLIAMLPELGKLNRREIAALVGVAPFNRDSGKHRGERVIWGGRAHVRQVLYMAAVAAARSNPVIRSFYQRLRAQGKPAKVALVACMRKLLTIMNAMLKHNTPWNPNSLDLKHSC

SEQ ID NO: 133815 - protein, 407 aa, unidentified
MKTLGLIGLDIAKDTFTAAFLLVDLDTHTLLGEHIQTFPYDRQGWQAFLATWQRFAAPDFWLLGLEASGPYSALLEDHLLSLHRTDMALHRLSPAQVRDFAKSRSRRRTKTDRLDARTLALFLLQQWTIHSLPQPLSPDAPTPLASLAHLYDHFTQELTRIQNQVRQLLHYLFPELERRSPRFSKALRTLLLAFPSAQALAQASLADLQQTLSSAQARHLPLQELHLLAQTSFGRHDPYRAQSLRFLLHLWEHLEQQRQRLLRLLVQAVQQRFPRAWHLLTAIPGIGPTLAALFLALVGDIRRFPSPKALVAYAGLDIIQHQSGKFLGRPRLSKRGSPLLRHVLYLMAVALKRYTHRFAQAYAYYRQQGRAVRETLVILARKALIMLYHLLSRQIPFQDSPPAGAPL

SEQ ID NO: 133816 - protein, 315 aa, unidentified
MTSDRELFVGIDVSKGQVAVNVHGREENWLFPNDAEGFGQLIATLQPLSPTLIVVEATGGYEFVMVAELCAAGLPVAVVNPTRVRRFADSLGQLAKTDRIDARVIAHFASVARPPVRRLQSEEEGYLAALVERRRQVIVMLTAEKNRLYTSPPRLRSDVQEHVNWLESKLKELDDELADMIRRSPIWREKEALLRSAPGVGPVTAVTLLVDLPELGTLNRQKIAALVGVAPFNKDSGIKRGKRRIFGGRASVRRTLYMAALAATRFNPVIRRFYESLVGRGKEKKVALTACMRRLLVILNAMLRKQEPWRCSQTV

SEQ ID NO: 133817 - protein, 325 aa, unidentified
MTSQTFLGIDIAKRSFAAALLPTDGRCHHKSFDNTRDGFTQLLAWLRHHATDHLHAALEATGTYGDALALFLHQTGIRVSVVNPARIHAFAQSELSRTKTDKTDAALIARFVATQHPPAWTPPPPERRQLQSLVRRLESLQAMRQAEANRLELESAESVVAPGLREHLAHLDGQMEQLRRLITEHLRAHPSLQQHHELLMSIPGIGALTATKLLAELPGMEVLPSARQAAAHAGLTPRHRQSGTSVHGRSRIAKTGNARLRRALYMPAIVAMRANPLLREFAERLRAAGKAPRQIVCAVMRKLLHQAYGVLKHAQPFNPHHALTR

SEQ ID NO: 133818 - protein, 424 aa, unidentified
MLGVGIDWAEEFHLVALGRPGEGVFEIARVEHDPRSIDALIARIASIEPDPGEVRVVLETSYGMLVERLIDAGYTVVPVNPDLVARRRGPAKKKDDAEDARIACVIALDRFERLRVLVPHGEAAAELRSITRDDERASRDERRLLNRLRADLIATFPAALVIAGDDMGAPTFLRMLERWPTVNVLAAASRDDLVAFARSCKHGWPDRFAERVESALASDHFVARDWLVRAKTDTIRLAATQLLSLGAQRRAWERRMGELLLGAPRTGRARQPKDGDRGLAVPGGEIYLSFPGLGDRLAARVAAEIGNVTNFDTPNGLQCYAGKAPVTRRSGKHELVVANRLACNGHLRDAVQQWAFCSLRGSGWAREFYDAHRAKGNGHHAALRALGNRWLEVLWHCLTRNVAYDENVHVANRNRALGLTSKAA

SEQ ID NO: 133819 - protein, 429 aa, unidentified
MTRTKDTTVVTVLHPICCGLDIHKQFVTACLMTMDSMGKERSVLESFGTFTDDLVRLREWLLEHECPVVALESTGIYWRPVHNILEGYLTVVLVNARHIKNLPGRKTDMSDCQWIATLLRVGFVKASFIPPKIVRHWRELTRYRRSLVEALGDVKRQVHKLLESSNIKIDSVVSVLFGKTGRNLMDLLAKDQAELTLQAVQICLKGRLKAKATELFRAVQGFFEDHHRWMLREMLERIDQQEANLARVESRLRDLLQPHDELIERMTQIPGIGTTSAYAILSETGTTLESFPNAAALCSWAGVCPANNESAGKRRSTRSPVRRSHVRTHLVESAWGAVKTKGTYLRSKYFSLKSRLGPKKAIMAIAHRILKALYYIIKHGDSFRDLGENYLIDLRRHSITSYINRQAKKLGMVLISESVWNQMIDRSPA

SEQ ID NO: 133820 - protein, 424 aa, unidentified
MNLTQNDRLKQVTSDTLIVGVDVGSQTHFCRAFDWRGFELSRRVFKFSNIGMGFLTFLRWTEEIMNKTEMKKVIVGCEPTGCYWLTFQKFLQDHDVQLVTVNPFTVNRSMELDDNSPEKSDLKDPKTIALLVKDGRFSTSYLPSGVYAEIREASVCKDQIMKQHVRLSNQIQGWLQKFFPEYFECYADWDSISGLMLLREAPLPQDILKIGAGGINQIWRDTKVRAAGIKRAQTLVEAAQNSVGLEAGEAARLEIWVLVNDYILKAEQLKRLDEYLEEKVKEVPNVEKLLAIKGVGMSTVIGFIAEVGDIGRFTDPKQIQKLAGLEIVKKSSGKKKGQPRISKRGRRKLRRTMYESAKALMLWNPAFQDVFLYYRNRTKNPLGGMQAKIAVACKAIRVFYVVLQTGCDFDEEKFRKDIIRPEAA

SEQ ID NO: 133821 - protein, 397 aa, unidentified
MTEQPRVVIGMDPHKRSVTIEVMTADEEVVGGGRFDTTVEGFDAMLAHVAAWPDRVWAVEGCDGIGRHVAARLTAIGEPVVDVPAKYSARVRAFATGQGRKTDATDAHSVALIGTRVAGLRPVVNDAQLTVLRVLVDRRRSLGEEHTRKVNQLHALLLELIPAGAKKYLSGRQARLLLEQVNPTDPAGQALKRVAVEYAADLEHIYARTKDADKELKALVAQTGTGLIDLHGIGPSGAARLLVAVGQITRFPTKAHFASWTGTAPIDASSGDHVRHRLSRGGNREINRVLHTMAIVQLRTRTTLGRSYYDRKRADGKTAMEALRCLKRRLSDVVYRTMLTDYTKGAGAGPGGHQGASTGSSAAGSQPHTDTSKKSLPEPAGTDATTPTPQSVMTPLT

SEQ ID NO: 133822 - protein, 443 aa, unidentified
MHTQEQTSPMSRTIQSAFRARKSENTMNAESYAAKVAMDWGDETHAFALQGAGAKIETGSVGASAESLHGWMEQLGERFKGEPVALAVEAGRNALMHALLAYPWLVIYPVHPATSQHFREAFVPSGAKDDLPDALVLLNILTQHSNLLRPLKPDREETRKLHALVTARSGAVDRRTQLGNELRAVLKGFYPQALELCGDDLASPLALDLLARWPELKSLKAARPSTLRNFYFAHNVRRPDVVASRIERIAGARALTADPAVIQPAVLQVQLFVAVLRPMQKHIAVLDDHIAEAFAAHPDAAIFRALPGAGPAFAPRLLVGFGADRSRYPEAASIQKFSGIAPVTVRSGSQLWIHWRWNAPVFLRQTFVEWAGQTVVHCAWAKAFYRQQRKAGKRHQAALRALAFKWIRIVWRCWQSRIPYNDATYIHALARRHSPIISTLSDS

SEQ ID NO: 133823 - protein, 343 aa, unidentified
MKLSRIGVDLAKNVYQLHGVDRSGKAVWKRRLRRNQWLGAVLEVADTSCVIGMEACTGAHHWARQLQARGYTVKLIPPQFVKPYVKSNKNDANDAEAICEAMSRPQLRFVAVKSVEQQDIQATHRIRAELRGQRNAKANQIRGLTAEYGLVTPQTLLALRRAIPDWLEDAENGLTDYFRSLLHGLWNDLLTLDDRIKELDKEIERLANSNEVTRRLQQLRGVGPMVATALVATVGTGQQYRKGRQMAAALGLTPRQSSSGDKHRLFGISKRGDAYLRTLLIHGARAVVSQARHRDDRLSRWVTNIAKRSHPNVAAVALANKTARMAWAMLQNETDYDPALAVS

SEQ ID NO: 133824 - protein, 324 aa, unidentified
MIDGILGIDVCKNTLDVSISSYTKVRTKSFTNSPDGWRHLLDWLIAQKIQRVHACLESTGRYSLGIACALYEADHVVSIINPAQIRDFVRTKLGRNKTDGVDASHIREYCELFKPSPWAPPSEAHRRLGELQTIRSGIIAGLTEWKNRKNSGIVDAEAQALADATISHFTSQLGAVDKAIALTIDNDCDLQSKRDLLLSISGVGETLAGVVLAELPGPDVLRSSAEVVAYAGLNPRRHQSGTCIDRATRISKIGNAVLRAALYMPALSAMRYNSAIVALVTRLKSRGRLKPKQIVVAAMRKLLVLCFGVLKTGRPFDAAITMGG

SEQ ID NO: 133825 - protein, 411 aa, unidentified
MINVGIDWSDKAHSICILDEEGVKLCAFETPHSQQGFEKAHAMITKHAPSVDQVGIAIETKDSLFVDFLSELGYTLYFLNPKQTDSFRDRHRMSHSRSDAFDAYVLADALRTDRHKFNALSPLDEQSLLLRVLCRARVNAVRRKASIQNELTSAFKRYYPVALELFNSLDHPAAIAFLKRYTSYQLAKGASYSRIVTILTAHGMAKSAAQERARIVKEKLDQPQPVPSANVAYALTIAVESLLRQFENAVLEIQSMEAQIKKLYRDHPNKDIIDSLPGVADTLGPVITSELGEDIARYHSLRTLRAYAGTSPVTVSSGTHRGIHFRRACNQHLRRALHLAAATAIRTSPWARELYDRLKASGKTHGRALRAVADQLVEMIFVMLRRRTTYDEAYHLRMKALHGKTKNPCLT

SEQ ID NO: 133826 - protein, 356 aa, unidentified
MGDRRHRFCALDERGEVVEQDSICNDRVSLRKLAGRYHGALGVMEAGAHSPWISRFLEALGWRVVVSNPRKVRAIYQHERKSDQRDALMLARIGRMDLALLYPVRHGTAEAQQDLLRIKLRDSLVRARVAVINSVRFTLKSLGYTVRNPSSARFHKVVMEEVPESVREMITPSVQALAELTARIKMLELEINTLAQMKYPQSAQLQQIPGVGPITALYFVLKIEDPNRFAHVRDVGAYAGLCPRRDQSGESDPQLRISKRGDAYLRRLLVSAAHYILGPFGPQSALRAYGLMLAADGTARAKKRATVAVARKLAVLLLSLWKSQQPYQPFPGACLNGEQEDRRSGTIALHRMEATD

SEQ ID NO: 133827 - protein, 315 aa, unidentified
MAMSVSVSKPIVGVDVAKDELVIYQTELDLLETLPNNKPAIKKWLKALPAPVDVAIESTNIYHLEFADLAHDAGCTIYMVGGYELSHYRKGVKVRAKTDALDAKLLARYLKNEYEELHPWTPPSPLYRQLLSLFRRRAALVQARVGLVQSWANEPLLKAAFAEQIASMQRLEVLVEKMINDLLKEAGLLAHLRRCMKVEGIGFLTGARLIAAFQRGEFKNADAFIAFLGMDLRVSQSGQKDGRRSLTKRGDPEARRLLHNAAMSASRTATWKGFYEEQRAKGFSTTQALVILARKLARVVFALLKGQSEYQPKAS

SEQ ID NO: 133828 - protein, 366 aa, unidentified
MREQDERNRITIGLDLGDRRHRFCVLDGKGEVVEEGTLSNKRESLSELSRRYRRALVVMEAGCHSPWISRHLEGAGCEVVVSNPRKTRAIYQHERKSDRRDALMLARIARMEPALLYPVQHGSAQAQHDLLRIKLRDSLVRARVGVINSLRFTLKSLGYAIANPSTERFHKVIQEQVPESVDSVIAPSVQALKELSLRIKLLDREIATLARSKYPETTWLEQIPGVGPITALYFVLKIQEPARFERVRDVGAFIGLCPRRDQSGENDPQLRISKRGDAYLRRLLVSAAQYILGPFGPPSALRQYGLALARGGTPRAKKRAVVAVARKLAVLLLTLWKNKSLYQAFPLSRDGEKMRTSDLERLRCIA

SEQ ID NO: 133829 - protein, 414 aa, unidentified
MDVVVERCAGLDVHRDSVVATVRVPGKGKSRRRRAQQTQSFGTTIDQLERLADWLAGFGVTLVGMEATAVNWRPVFWVLERRFECWLLNAQHLHNVPGRKSDVIDSAWCCQLVEHGLVRPSFVPPPEIRRLRDLTRLCIAQVEERTRAIQRLEKVLQDAGIKLSSVASATYSASARAMLEALLAGVSDPAALAELAKARLRAKIPQLREALANRFELAHHGVLVAGLLAHIDALDQTVATLDARIDAATEPYAELVELLCTIPGVSVNTARVLIAECGVDMSVFPSAQHLVSWAGICPGTNQSGGRHRSGKTRHGNRWLRKTLTEAARAAARSKNTYLASHYWQIRGRRGDAKAIGATRHDILIAYYHITRDRVPFRELGPDWLARRHSPEHRTRRLVKQLEALGHTVTLEAAA

SEQ ID NO: 133830 - protein, 325 aa, unidentified
MKVNNFVGIDVSKEDFYACLHEKEPPRKFANSSAGARGFTQALKANNLLPRNTKIGLESTGPYHYLLSFICSKKGYTTHIINPLITNAYNKTTIRKIKTDQKDASLIRYVLTQGAGYPFTETTDTLILKNLVRARAYLSDMKRNMKRKAKDILYKEAIIHAPITDVNQEIFAVLSEKMKEIDRRLRTHDSAAQKLLQTIPGLGPTTAAALIAEITDIKRFSTSKHFTAFIGLDPRVRQSGTSINGKGYITKRGNKILRTLFYNCASVAIQRPNIFQDFYHQKVSEGKPKMVALIAATHKIAKVAYAVWKTNTPFDPNHGKQITEA

SEQ ID NO: 133831 - protein, 466 aa, unidentified
MPVIHSHAAGIDVGATSHWVCVPEDAVAEGQSSVREFGAFTKDLDELVEWLLKCQVKTVAMESTSVYWIPLFQKLEAAGLEAVLVNARHVRHVPGRKTDCKDCQWLQRLHSYGLLNGSFRPSDDICCLRSLMRHRDNLSKGCGQEVQHMQQALNYMNIHLHHAVSDLNGETGLRILDAILGGEREPKELVKLRDPQISRSTVEEMEAALHGDWREEHLFVLRQSLENYRHLLKQMEVCDEELEKVLAKVVVNPATVVEAERPKNPPAAEPKTKKQKKFKKLKAGTGLKRDLSAELTRICGVDLTRIIGLNVLGVLIVIAEIGVDMSRWRNAKAFCAWLGLCPGNKISGGKVLSSHTVHVVNRVAILLRTVAPAVGRSDTWLGIFHRRMRARLGPAAANTATARKLACMIYHLLKYKEEYIDVDCLIYQEKIRKSRIKKLCQQAEELGFEIYKKQRVGEEIVFEAIN

SEQ ID NO: 133832 - protein, 461 aa, unidentified
MRKARRWRRKPGKKIVDVTAGLEVLRPHAAGIDVGNAEHYVAVPPGRSDPSVQTFGSFTADLHRLAQWLQACHIESVVMQATGVYWMGLYQVLESHGFQVYVVNAKYTQTLPGRKTDVLECQWLQKLHTYGLLNNSFLPPEEIRVLRTYLRQRENLVAAAGTCIQQMQKVLTEMNVQLANVLSDLSGTTGMAIVQAILEGQRDPQRLAALADPRVQASRKEIAQSLEGHWREDLLFVLQQVHDLYFTYLESITACDRRIEAHLKTLEAKADLAAQPLPPMPRLPRRKHIPQTQLREELYRVTGVDLTRIDGIHVQTAQVVISEVGVDMTRWPDEHHFASWLGLCPNNRITGGKVIRRGTKKVLNRAATALRLAAQSLHRSKSYLGAKYRRLRARLDGPVAITAMAHLLARLIYRLLRYGTQYHDKGVEHYERKYRETQIKSLKKQAALLNMQLIPAPGVSK

SEQ ID NO: 133833 - protein, 346 aa, unidentified
MLYAGLDLSRKRLDFHLLDGEGATVEVGAAPPDADGLLALTRRLDRHREPIHAAIESMNGARFVHDRLELQGWQVEIADAQKVKGLAPLACKTDRIDAWVLAELTRRDLVPAIWLPDPLVRAERERARWRLHLVRHRSSLKQRVHAVLLTHGKPCPVSDLFGVRGRQLLAQLGLPEPWQATIEASLRLIDELDNEISNCERELRRLGADHRYVPLLLTVPGIGWVLAYTIAAEIGDISRFPNPRKLAGYTGLCPRVYQSGERDLRGPLAKQGPKYLRWALVEAATHACTHPSYRDRYQHTKARIGKQRGAKVAQIDLARRLAEAIWHMLSREQPFAPKGATDPLAA

SEQ ID NO: 133834 - protein, 321 aa, unidentified
MTYVGIDVSKVTFVVAYSSVKTNKTRTFKNTVNGVHEFVQTISASEHNCVLEATGNYSALLVYLLSEAGITISLENPLKIKNFARVMLTVTKTDEIDARLIALYGEKMQPAPYKLRSDAILVLKQKRTVLRQLKKQLVATRNLKGSMEVLPFFDPKCKKTIEKTITFLEKQIKEMEEELASLAQGEYKKQMDLLTSIKGIGVTLAAALIVATGRFSYFDNAKQLTRYLGLSPTYQQSGTSVNVKGHINRNGDSSLRSQLYVAAFSSLRCITECKACFDRLRSNGKPGKVVVIAVANKLVRQAFAVVTQGKPYVDGFKSEKP

SEQ ID NO: 133835 - protein, 446 aa, unidentified
MRHLFPLDPTRKRVVASPAPILENRAMTPDQKAAFARTFPVHVGVDTGKRFHVLVARGPDGLRRKPMKVLVSREGFERADAELQGLFPDIERSRMLIGLEFAGHHGFTFAHFLANRGYPIVNVLPAHTKRTKELEDNSPLKTDAKDAGVICKLVGDGTFVRFPFLESPYAELRVLVSFRHRLAVEATRFKNRLQGLLDLAWPEFVAQFSTLAKHTPIGLLERWPLPQDLLAAHKATVRAYARKISKGKFVAERFARLYTSARETIALPQATTERRMEILGTLARWRLVRKQMIEAEARLTELMARLPSAQALLTVPEVSAVCAATILAELGTPGDYQHPRQVLKLAGMNLIEKSSGSSQGRRRQSKRGRPMLRRQLFLLAGRWCQRRGLYRSYYEALLARNGGLKTKAVCAIARKLVPLLLAVLQRGQPFDQARWEAARHQPALTH

SEQ ID NO: 133836 - protein, 433 aa, unidentified
MHEAEDEPLFAERAAGVDIAKAGIEVTVRVPSETRRGGRQQDTRSFRTTRKDLLALADWLRVWGVAKIGMESTGDYWKPVLFLLESEGFDCVLYHAAQVKALPGRPKTDKLDSAWLAKITERGALPGCFVPPEEIRRLRTHTRYRRHLTQARTAEKSRVEKLLEDAHLKLSSVISDIHGVSGRAMLEAIAAGERNPGTLAQLARGTMRGKIARLVEALDCSFVTEEHAAVLTMMLSTIDYYTAQIGELTAKIAVLCQPYEQQIAQLDAVPGTGVITGQDIIAEIGTDMTVFPTAAHLVSWAKWCPQVAQSGGRRKGANASGRGNRYLSAALGEAAVNAGRTQTFPGAKYRRLVKRMPKKKALVATGNSLLAIYYALLSDPAAAYTDLGADYYERRANIRRQARNHVRGLERLGYKVTIEPADPATGATGEPAA

SEQ ID NO: 133837 - protein, 350 aa, unidentified
MSQNLNSVVAVIGIDIGKNSFHVVGLDDRGAIVLRQKWSRGQIEARLANMPPCLIGMEACVGAHHLSRKLKALGHDARLMPAKYVRPYSKGQKNDFRDAEAIAEAVQRPTMKFVATKTADQLDLQALHRVRERLVSQRTGIINQIRAFLLERGIAVRQGQRFLRAELPRILAAPPEVLSARMVRVISDLAEDWRRLDQRIDCLSSEIAVLARQDAGCERLMSVPGIGPIISSAMVAAIGTGDAFAKGRDFAAWLGLVPKQISTGDRTILGKISKRGNRYLRVLFVQAAWVVLIKPMSWERHGLKHWIEAARKRLHRNVLAIALANKLARIAWGVLAGSGRTFEASKLQAA

SEQ ID NO: 133838 - protein, 344 aa, unidentified
MSNLDMCGIEVSAKELVVRLRRQEDLEPLRNFTNTPEGHLIILRYLRRAGRVVRVCMESTGLYGLDLALALSGQEGIEVMVANPRAVRHFAHALMKRSKNDQIDAGVLEQFALHMPFKPWQRPSVAMLALHALARRLRELVEMQTAEKNRQHAAGLSKAIPAVVRRDLARSLRAQERAIERLTRQARKLIAQDPQLAERFELLDSVPGIGETSAVQLLGELGVLAPGLEARQSVAYAGLDPRQYTSGTSVHKKPRISKAGNKHLRHALFMPALVAVQHDPHLGAFYQHLLAKGKFKMQALVAVMRKLLHALHAMFKTHQPYDGSQLFRLNPAPAQEVTHVLVAC

SEQ ID NO: 133839 - protein, 321 aa, unidentified
MSPANVYVGIDVAKDWLDVAQRPGGEAWRVSSDEKGVAALVERLKGVRPTLVVLEATGGLQIPAVAALAAAGLRTVVVNPRQVRQFAGATGRLAKTDAIDAQVLAQFGEAVRPEVRPLPDAATQELSALVARRRQLIEMLTAEKNRLRLATKKVRPNIEAHIRWLEGELLNLEGGLGDVIRSSPVWRERDNLLRSVPGVGPVLSFVLLADLPELGKLSRKEVAALVGVAPLNRDSGLFRGRRQVWGGRSHVRTALYMAALVATRYNPVIKSFYQRLLSGGKPKKVALTACMRKLLTILNAMTRAQTSWQIPPSPLECQDSC

SEQ ID NO: 133840 - protein, 392 aa, unidentified
MFFIGIDIGKNNHVASMMDDSGKIIFKAFSFPNTSEGGQALFTKISSYSSDTSCFEIGMEATGHYWLSVYSFLFEKGFLLHVINPIQTDGWRRGTEIRKRKNDIIDSVLIADLIRYGQFVETRLADEDLFSLRTLTRFRTYLVESISDLKRKVVCVLDQVFPEYQAVFSDIFGKTSKEILLKFSSPLDFESVSSETLAELLARLSRQKLGADKAEQLKSAASSSFGITFAKNSFAFQLKTLIEQITFIEKQVKETESEISRFMEKLNSPVTTITGIGSVTGAAIISEIGDISKFDSPKKLVAFAGIDASVSQSGEFEATHNVMSKRGSPYLRKAIFQAALVAAFKDPVLSAYYQKKKAEGKHHLTCIGAVSRKLCYIIYAVLKNNQPYVPKA

SEQ ID NO: 133841 - protein, 344 aa, unidentified
MDHFAGLDVSVKETSVCIVDDTGKIVREVKVASEPDALLPVLTNPAYHFKRIGLEAGPLSQWLYSALAEAGLPAICVETRHMRAALKAQINKTDRNDARGIAQMMRVGLYRPVHVKTLRSQKLRMLLTHRKLLQSKAIAIDNDLRGTLRNFGLKVGMVGTVRFEARIRELVANLPDLVALVEPLLIVRRTLREQFCILHRRLLAIVRDDEVCRRLMTTPGVGPVVSLTYRATVDVPARFRKSKSVGAVFGLTCAKYQSGEVDWDGRISRCGDEMMRTMLYEAAQSMMRSKKWSWLKAWAMQIARRRGMKKAIVALARRLAVIMHRIWVDGTEFRWTREQAAVAA

SEQ ID NO: 133842 - protein, 355 aa, unidentified
MNDEKYIGLDVHQATIVVAVMDATGKLVMESILETKAATILQFFAGLRGTLSVTFEEGTWSAWLYDLLHSRVDQLVVCNPRKNALLKDGNKSDRIDARKLAELLRGNQLKPVYHGETGVRMLRELSRSYLTIVKDLSRVMNRLKAVYRSWAIPCAGRDVYYRRHRAQWLAKIREAGVRRRAERLYEQLDMLQHLRQRARRELLAESRKHAITAKLRQIPYLGPIRVALAVALIQTPHRFRTKRQLWAYSGLALETRASAEYRFVEGQVRRSKKLLSIRGLNKDHNHDLKGLFKGAATMASVRPGPFQDFYTAALAKGIKPTMARLTLARKIAAITLTLWKKGENFDAEKLKSQAA

SEQ ID NO: 133843 - protein, 322 aa, unidentified
MARRPQDKDGTMTLARVMLGIDVSKTRLDSFSAASLAKAFANEAAGIDRLVKLAQSLGAFVVFEATGGYEEALCLALEAAGIAYHLANPRKAREFARSAGFLAKTDQVDARMLAAYGQALDLPATQPRSPACRQLGRLVGRRDQLVELRKIEKTRLRQTNEAWALDSLKQVIAVLSEQIRRLEGLIERCIQADEALRRTRDIVRTAPGVGPVTAMVLMAELPELGRIDRRAVAAIAGLAPLACDSGALRGKRRIWGGRKRLRDALYMAALSASKGQVFRPGYEKMRAAGKPHKVALIAVARKLLVGINAAMRQNQPFALMTA

SEQ ID NO: 133844 - protein, 312 aa, unidentified
MIAHPVHVGADISKPTIDLGCPSLTLPASIPNTAAGFGSLIKILRKSPQPIHVVCEATGPYHKPFVAALHQAAILVSVVNPRLSRDFARARGRLAKTDAIDALVLADYGRTMQPAPTPRPDAQMTLLDDLVTRRAQLVDDRVREKNRLQQTTCPEALVSIKSHLRHLDGQIEKLLARIAEIIHASPALLAKVKILIAVQGVGSLTASALLAALPELGALSKNEVTALAGLAPFNRDSGAYRGSRSISGGRVEVRKALYMAALSATRANPILKAFYQRLRSNGKVHQVALTAVMRKLLVYLNSLLKKPSLLPV

SEQ ID NO: 133845 - protein, 360 aa, unidentified
MTYGSTEARKTAGVTVGLDVSDTYTSLCVVDEEGNMIEEGRVRTTTPSLERRFSALPPCRMVLEVGTHSPWMSRLLAGFGHQVIVANPRQVRLIAESDRKRDRTDAELLARLGRVDPALLRPIRHRSAEAQQDLALLRARDTLVRVRTQLISHVRGAVKATGGRLPACSATSFHRKAGPHLPAPLHPALQPLLATIADLTARIRDHDRLVEQALGERYPAARLLRQVPGVGPLTAMTFLLVIEDPGRFRKSREVGPYLGLVPRQRQSGEREPQLPITKAGDPLLRRLLVQSAHYTLGPFGPESELRRWGLGLAGAGSSRAKRRAVIAVARKLAVLLHRLWVTGEVYEPLLGERAMQARAG

SEQ ID NO: 133846 - protein, 325 aa, unidentified
MEAKKLCCGIDVSHAKLDVCYQNNLGELFHLQVGNNKQGFAKIMEHTGPDYHFVMEATGVYYIRLAFYLHKQGCDLSVVNALAIKRYIQMHLERNKTDKKDAAWICRYAIDQRPAYWQMPDSAYFESKQLYNAIRVYTEQIKRFNNQLHSLRLLPVPSKDTIKSLEKVIGFMEKQIKQLEQKLQQLLEQWQPEQLKSVSSVKGIGKRAAAMLIVFTQGFKHTQNHRQLISFAGLAPTQYSSGSSIHGKPRIYKRGGKNLRDVLYMCSMNAMKTNTACKALYDRLRANGKTGKQALIAVCNKLLKQVFAVAKNNSLYQPNYCSAKP

SEQ ID NO: 133847 - protein, 344 aa, unidentified
MWIIGCDYHPRFQQIAFVNTEGGECGNRRLQHKQEAEQFYRSLRGQRVRVGMEASGHARWFERLLAELGYELWIGDPAKIRASEPRKQKNNARDAANIQRLLLEGTFERLRIRVPTAEERDVRQLVLHRHRLVQMRTRVKNQLQAVALNEGLGPRPGLWSRKGQEQFRALVLPPWSEQRRQDNLALLSDLLRRTAPLDVAVEQQARQRPEVVRLMTHPGVGPITALTFVLTLGEPTRFESSKKLGSYLGLIPAEYSSGNKQRLGHISKQGNALLRGLLVEAAHSAARQEPELGRCYRRLAMKKNRAIAAVAVARRLAIRLWWMWKRELTYAQFCASGSHAGNAR

SEQ ID NO: 133848 - protein, 347 aa, unidentified
MTVYCGVDFHARQQTISFCDSQNGEIKSIRIFHDDLDALRRFYTQFQSPVIVGLEAGGYSDWFERFLEELGIEVWFGNSTEIRRRARSRQKNDWRDAELVLDLLMKNEFPRIHRHSPEAREVLAQLRYRHKLVQLRTQATNSLHALFIREGLSLQSKLLTRAGREKLLSHPLTIEQAKQRDEWLARIDELLEDVKRVEQELIQIAAKDDRVRRVRTHPGIGLLTGLMLVHTLCPVSRFSNSRKVAAYVGLEPREFTSDKKQRWGGISKAGSPLLRFLLVEAVTHAVRGDQELRTSYHNLLAHRGRPKARVAIARKLLVRAYILLRDEIDYATYLRTDGRSGIARVKP

SEQ ID NO: 133849 - protein, 457 aa, unidentified
MASRKRKSSPSTSLPPQLDTVHLHAAGIDVGAEEHWAAVPACDDPQPVRRFGAHTADLDALADWLWTCGITTVALESTGVYWIPLFELLEGRGFQVCLVDPSKLPRNGRPKTDVHDCQWLQRLHTYGLLSACFRPADQVVVLRSYMRQRAALLADAARDIQHMQKALTQMNLKLQHVVSDMTGVTGLAIIKAILAGERDPRTLAHLRDPRCKQDEAAIAQALYGTWREEHLFALQQALERYEFQHQQLAACDVRIAAHLETFVDRSHGEPLPPKRGKRRRHQNRPAFDPRGPLHRMTGVDLTQIEGIEETTALIVLSEIGLDMNKWPSEKHFTSWLGLSPQRRISGGKVLSSRTRPTTNRAAAALRLAAASLHHSYSALGAYFRRMKSRLGSPKAITATAHKLARLIYRMLKHGTAYVAQGLEEYEQQYRQRIVKNLSRKARDLGYELVKPGAVSPA

SEQ ID NO: 133850 - protein, 400 aa, unidentified
MRAVFGIDVSKASSEVAILVNGEKVHGYTMSNDALGFARLLGDLRTVHKPEIIFEATGVYSRRLQTFLEDNGYAYTRLNPLEAKKQLDSLRVRKTDQIDAEKLAQSQFVLNRKPTYVQEEVYQNLRALSRFYQNLTEDIVRAKNRLHKVLQVTFPELETILSTPSGQQYWNLVIDFPCKDFVLELSKDKLSEIIRQSTSKRIYDKRVTYLAEKLTALANQSYCAVKKTSPILEEVRYYGKELLRLSEQRQTVLDQMVELAQPLPEYDILLSIPGIAETTATSIIGELGDIRRFQSANQINAFIGIDLRHYESGNFLAKEHITKRGNPYARKILFKCIHNIASASHTNPCHIADFYEKRKRQSQTTSTKPHTIASIHRLIRTMYYLITHNKLYDYTLTQNQ

SEQ ID NO: 133851 - protein, 338 aa, unidentified
MYTHYLGIDLHKRSSTWVLVNQKRDVIHKQVIPVTEKALLYGIRALPAPVTNIKATLEPVCGWRWVQQYLCDQGVETVLANPTKVRLIAASKHKTDTNDARMLAELLAADYLPEAYRATPEVADLRSLVRERHYLVSVRTGFKNRLKAVVTATGVNDILENCLTKQGLQYIKEHNLNELHDHHELITTLTTYIKKLDAQIQLALADNELAKLIQTVPVAGPVTTATVVAEVGDFSRFASAKKLTNYAGLVPGQRSSGERVRHGRITKVGSKYLRHVMVESAMRLRQPQDPLLYRWYEQVKAVSSPMKARVALARKLLSIMWYMHKHNTPYTPRNHELG

SEQ ID NO: 133852 - protein, 351 aa, unidentified
MVYVGLDYHTKWSYLTILGDGSEEVVEAKLDSRCELAEFLGKLPDAKVLFEAGYGWPRLAKILEEIDVELSMCHPESNRRIACDRRKSDRRDSRNLAVYLKTGTYKPAYMPDEAVRDERQFVRGRTYLSWKITRVKNQIHSLLAYAGIPKESEAIFAMKRRSYLETVKVPEQTREILDVNIRELDFLTEQLAILDKRIVEMNRNDPLARLLKTIPGIGDISARVILAEIGDIARFPTDKSLACFTGLTPKQHQSGNTMRTMGITKEGSSHMRWVYVQAAWIALRFDPALREYYEGLEKEKGAQKAICAVAHKLAIASWHILTKRTPYRPQRPKAEGKPAVARGKSTAPAVR

SEQ ID NO: 133853 - protein, 442 aa, unidentified
MRKTPTPSRPNRRTMWPRAPEPPLENALYVGIDVSQEHLDAAVVDCRGNLIRAAQRYENTGPGFTRLWAETQALGRAPSRQPVAYALEASGIYHLGVLDFLLGRGARTWAFNPLLLQGEKQSRVRKTKTDALDAELIAQFARKEGASHRPAILDPEAMRLREHCRVRFRLVEKASDAKRQLRRDLDTLCPRLASEFTDIGSPMSVAVLKAFAQVTRRFTATVEEIEEVLRAVYREPKGRHAKAIALAKCFEERHAPEALEEPLLWEVRALVHLLELLEEQIRQAEGRICREMAERKSLVTTVPGIGPITAAVIGSELGEATRFENANQVRAFAGLDPSVYKSGKFEGTMAHISKRGSPRLREALYQAALSASRVNPACRELYERLTARGKAHRSALTAVSAKLLIQAWAVLREGKSFQIPERYRVGATGAGRPGKSEEPATA

SEQ ID NO: 133854 - protein, 369 aa, unidentified
MVSPRFLNGVRCARMESGIYHQPRQEETEMNITTVGMDLAKNAFHIVGLDEHGHEKMKKQLSRGQVLRHFANHPACVIGMEACASAHYFARELRKLGHEARLIPPQYVKAYVRGQKNDANDARAIAEAVRAPSMRFVTVKTVAQQDVQSLIRLREGAINARTAAANRLRGLLGEYGLVRGKSLSTLRRALPEILEAASNGLTDVFRRLLAQERRHLLELDAHIDTLTAELTALSKQDDRVQRLQTAPGYGPIVASVFASVMGDGKQYRRGRDASASVGLVPRQHSSGGKNVLLGISKRGDRYLRSLLIHGARAVVNAAQKKDDPLSRWINHLREKRGTNKATVALANKLTRIGWAILRNGTTYQPAQAS

SEQ ID NO: 133855 - protein, 392 aa, unidentified
MVYYVGIDVAKDKYDCFIMSSVGEVLFDCFEISNNIDGFNDLFKKIQTVSESFDNVKVGLEATGHYSYNLLGFLVNKGLTTFVINPLHTNLFRKSLSLRKTKTDKVDARTIAAMLASDMDFKSYTDTAYHNEELKSLARYRFDKVKERAKLKQSVSRLVNILFPELEKLVPTLHIASVYALLNEFPGACHIADSHLTRLKNLLYVASKGRYGDDTAVLFRDEARRSVGSNMPAKSLELQHTIRQIRELDLVIDEIESKIKTIMDEMGSPILTIPGISYRMGAMILAEIGDFSRFDSPDKVLAYAGLSPSTYQSGQLTSTYSRMEKRGSRYLRYALFNAAKFVCNWEPSFADYLAKKRAEGKHYNVAISHAVKKLVRLIFALEKSRESFVSAV

SEQ ID NO: 133856 - protein, 405 aa, unidentified
MDVIIERACGLDVHKDNITACIMTPEGKEIQTFSTKTVFLLKLVNWIKESNCTHVAMESTSVYWKPIVNLLESEGIEFLVVNAQHMKALPGRKTDVKDAEWIAKLLRHGLLKASFIPDRNQRELRELVRYRRSIIEERARQHNRIQKVLEGANIKLGSVVSDIMGVSSKDMLRAIADGEDDPEKLASFARRTMKKKKEELKIALQGYVNPHQRLMLKTILTHIDFLTEQIEMLDKEIAERVNSYEEEIVRLDSIPGIARRMAEQILAEIGADVKNQFLTAAHLCSWAALVPGHNESAGKRKSTKSKKGNKYLRSALTEAAQSVRGSKNYLGALYRRTAGRKGNKRAAIVVAHAILRIAYYLLTRKEMYVDLGEDYFDKQRQVSIVRHSVRRLENLGYKVTITEAS

SEQ ID NO: 133857 - protein, 325 aa, unidentified
MTDSRPAPQPVFCGIDVAKDKLDLARSDSAQALTFPNAPDGVRRLVDHLRTLAPALVAVEATGGYERDAVDALLDAGLPVAVVNPRHVRHFAKGLGRRAKTDAIDARVLADFARLASPRLAAKRPEKRVELEALVTCRRQLRHVQTEQSNRLGATRSPAARKAIDAVLATLAAQVADLDRQIADLIASSDDDLGPPDTLLRSVPGVGPVLSSTLLSELPELGGLDRREICSLAGVAPFNDDSGRSSGKRSIRGGRSEVRSVLYMSAVAAARCNPVIKAFAARLKAAGKAGKVVIVACMRKLLTILNAMVRDNLTWDQLDLVKLGE

SEQ ID NO: 133858 - protein, 321 aa, unidentified
MNKFIQISNHQTFVGIDVAKSSLAVFVDSTGDHLECLNQTKDLRTLARRLKKLNPSLIVLEATGGYETPAAGIFSEFGLPFAVVFPKRVRQFALGLGIIAKTDDIDARTIAYYGRIADIQAKPLLSDELRRLNALTTRRTQLIEMRIAEQNRLDVSHPEMQKNIKKHLRWLESQIIAIEGEIDASIKDDQALQEKDDLLQSVPGVGKVLSSTLLTQLPELGILSNKQISALVGVAPFPRESGNWKGKRFCQGGRNSIRKVLYMATISASRFNPVIKQFYEHLLERGKLKKVALIACSRKLMTILNAMVRNNSNWNPKLESI

SEQ ID NO: 133859 - protein, 352 aa, unidentified
MAATAQSAIAVIGIDIGKNSFHVVGLDGRGAIVLRQKWSRGQVEARFANMSPCLIGMEACVGAHHLSRKLKALGHDARLMPARYVRPYSKGQKNDFRDAEAIAEAVQRPTMKFVVTKTADQLDLQALHRVRERLVSQRTGIINQIRAFLLERGIAVRQGQRFLRVELPRILATPPDVLSPRMVRVIEGLASDWHRLDERIEGFSSEIEELAKRDAGCERLMSIPGIGPIISSAMVAAIGTGDSFSKGRDFAAWLGLVPRQISTGDRTILGKISKRGNRYLRVLFVQAAWVVLVKVKPTRWQGHGLRPWIEAATKRLHHNVLAIALANKLARIAWSVLAHGRAFETNKLLAAA

SEQ ID NO: 133860 - protein, 348 aa, unidentified
MRFYTSTHQYYCGIDLHARVMYLSIISSDGEIVLHRNMKADPESLLKAIEPYRPDVVVGVECIFTWYWVADLCAEEEIPFTLGHALYMKAIHGGKAKNDKIDSRKISSLLRGGTFPMAYVYPAKMRATRDLLRRRNYPVRKRADLIAHVQNTNSQYNQPAFGISNIAHKCRREEILGHFTDPDVYMSMRVNLDLIDQFAVQIRAMEKHVLDNAKNHDPQSLYLMQTIYGVGKVLSLTIFYEIGDINRFPRVQDFASYSRLVKCARESAGKRYGTSGSKIGNVHLKWAFSEASVMFLKGNPEGMKYKKRLERKHGKAKSLSILAHKLGRATYYMLKREKAFDMNKFLRA

SEQ ID NO: 133861 - protein, 361 aa, unidentified
MKCVQSNKLDFSGQNIYVGIDVHLKSWSVAILSEHSVLKRFSQSPEPEALHKYLVSNYPGANYYSVYEAGFCGFWIHERLTDLGITNIVVNPADVPTMSKEKLRKTDAVDCNKLARELRSGSLVGIYVPGVETLELRSLIRMRNLIVKDSTRAKNRIKSLLRFHGVEIPEEFTRCSIGCWSKRFLSWLQALELSTEYGKKTLELHLEQFIRLRKMLLQETRAIREISRKAPFEKPIRLLTSVPGIGVTTAATLMVELDDIVRFKNADHLASFIGLVPMCHSSGESNGPGDITIRRHFKLRCLLIEAAWIAIRKDPAMTVSYTEYRKRMNPQKSIVKIARRLVNRIYYVLKHEKEYIPCVVK

SEQ ID NO: 133862 - protein, 457 aa, unidentified
MPQPKRSRSRTGLSAVHPAAAAIDIGATMHVAAVGPDRDTEPVRTFQTFTDDLHRLADWFARCGVKTVAMESTGVYWIPVFEILEQRGFEVMVVNARDAKHVPGRKTDVSDAEWLQRLHEYGLLRPSFRPQAEIAGLRAYLRQRERLLDYAAAHIQHMQKALMQMNLQLHHVVSDITGVTGMNIIRAIVAGERDPNVLASHRERGCHASVETICQALVGNYREEHVFALSQAIELYDVYQTKVAACDRQIEVILKRLKKSATPPASKLLPPKHRSRQPNAPSFDARAALHAILGVDLTQIHGLGPYLALKLVGECGINLTAWPTAKNFTSWLGLAPRNKISGGKVLSSKTPRTSNRAASLLRLAAVSVGRTDTALGAFYRRLAARAGKAKAITATARKIAVLFYNTLRHGMSYADPGATYYEERYRRRVLGNLQRRAKSLGYVLQQADRDPTQVVVS

SEQ ID NO: 133863 - protein, 311 aa, unidentified
MQDTIGIDVSKDKLDAFHLATLEHRQFANDGRGFRALRDWIVGHGPSLIVFEASGVYHRQLESCLSAAGVSYSKVNPRQARRFAEATGKIAKTDKVDAAVLARMGAALQLEPQVPKVEYMSVLKEMMTARRGLIKDRVTVKTRMQTTTQALLKRHLKERLAQVAKQLKQVDQTIMDLLANDEPLIARFEILTSIPGISKVTAFSMLIEMPELGTMSGKQAACLAGLAPISRQSGRWQGKERIRGGRAFFRRAMYMPALCTIRHDLSSKKKYDQLVLAGKPPKVALTAIMRKLVVVANALLRDGRNWSENRT

SEQ ID NO: 133864 - protein, 400 aa, unidentified
MLSIGIDVSKGKSTVCGMKPGGEIVYTPFEVQHTREGMSELVSLLRSSGEEVRAVLESTGSYHCPVVAALLESGIFVSVVNSLRMKRFCSQSIRKVKTDRIDAMQIALYGLAYWQELQPARLPEDTYRELQLLARQYYQMTSMLIKAKVDFNALCDQVLPGMQELMNDHAGRHKLSDFVLRYRHTTHILEMGETRFRKDYCKWAEKKGYRNCERMAAHIFATAQNGIPVLPNAPSTQIVITEAIRVLHTVEASRDAILTQMQALAKTLPEYSLVREMPCIGDTLAPRLIAEIGDVRRFHSKRALIAYAGIDAPPYQSGKFCANNRHISKRGNRYLRKTGYEVMQSYVMHKPANDPIFTFIEKKRGEGKSGKLAMVAGLNKFLRVYYGKVTELYRSLPAIE

SEQ ID NO: 133865 - protein, 415 aa, unidentified
MDVVHEACAGLDVHKRTVVACVLRSTPGGIPDQQVRTFGTMSAELEQLRDWLVECSCSHVAMEATGAYWKPVYNVLEERDELQLLVINAQHLKTVPGRKTDVKDAEWIATLLRHGLVRASCIPDRSQRELRELTRYRTALIRERADEVNRLQKTLESANIKLAAVLSDVTGVSGQRILEALINGVTDAGQLAELAHTRVLLHKRAALEQAVVGRLTDVLRFVVQQQLRHLHDLEAQIEVCDGKLQELLRPFASELERLRSVTGVGPRTAEIILVEVGLVIHRFPSARHVAAWAGMCPGNRQSGGKRQHARSRKGSPWLRAALAEAAWAASKSKHDGYLPALFRRLTTRRGKKRAIVAVGHSILVTCYYLLTRGGTYQDLGETHFDERDRQAVVRRSVRRLQALGYAVHLEESQAA

SEQ ID NO: 133866 - protein, 465 aa, unidentified
MGAGKMNRKQRKELGRRLQSANPGLEVVHPRAAGIDVGNGAHYVAVRPEQDAEPVRRFECFTADLHRMADWLEACEVKTVAMQSTGVYWIPLYEILEQRGFEVYLVNARHTKNLPGRKSDVQESQWLLKLHTHGLLNNSFQPTAEIRVVRTYWRQRGEHVRGASTCIQRIQKVLTQMNVQLANVISDLSGLTGQAIVRAILAGERDPRKLAELSHPRIRAGREQIAKSLEGNWRSELLFVLKQEMEMYDTYQHKIAECDRELEATLKQFAAPERASTEQPKIPNAKKTKRIQRNAPGFNLTSELHRITGVDLSRIDGVNAIVAQTIISEVGLDMTRWKTEAHFASWLGLCPDNRISGDKVLARGTRHVINRAATALRMAATTLIKSQSYLGAQYRRLRTKLGAPKAITAMAHRLARLVFRMLKYGQEYVDKGTQYYEQKHHEQQLHLLKKKAATLGFQVVETGVA

SEQ ID NO: 133867 - protein, 369 aa, unidentified
MGDRITYVGLDVHKDGIVVALAEDGLRGEVRDYGRIANTAAALQRLARKIGQEGVELRLCYEAGPCGYGIQRQLSASGHGCIVVAPSLIPKRAGDRVKTDRRDAASLARLHRAGELTAVWVADAGHEAMRDLVRARLDAVHALRRARQQLSGFLLRQGCHYRRPAWTKLHRRWLAGLRFEQAVHHIVLEDYIAAVEAAQARRDRLTAQIEAMLPNWTLAPVVKALQTMRGMALVNAATLIAELGDLSRFANPRQLMAYLGLVPSEHSSGTSIKRGGLTKAGNSAARRLLIEAAWRYRFPARVGRELRLRQEQQPKPIREIAWKAQLRLCARYRRLARTGKPANVVTAAIARELAGFVWAIARQVPPALG

SEQ ID NO: 133868 - protein, 359 aa, unidentified
MQGKVKIISFQGQNIYIGIDAHLKNWTVTVMTENSLTKTISQDPDAGTLYTYLQRTFPGGNYLSAYEAGFCGFSAHRNLEKYGIKSIVVNPADIPTTDKERKQKEDRRDSRKIARSLKNGELTGIHVPDKETEELRSLVRYRKTLVKEISRHKSRIKSHLHCFGIAIPGPLAQASTYWSGKFTQWLEEVQQSTPYGGMVLQSTLATVKHLRAELLKINRKLRELEKEVMYGFKIKLLRSIPGIGLIVAVTLLSELETILRFKNLDKLCSFVGLVPRTNTSGENDKTGKITSRSNKPLRGIIIEAAWIASRNDPALAQCYLELCKRMKPNKAIIKIAKKLLNRIRYVMKNEKEYVHSVVQ

SEQ ID NO: 133869 - protein, 386 aa, unidentified
MVTPIRPRIEQETPPQSTLFLAFELGKNTWKLGFTIGVAQQPRERTIPAGALETLQQEIRRAKQRFGLPEDACVVSCYEAGRDGFWLHRHLVAHGIQNHVIDSASIEVNRRQRRAKTDRLDVRKLLTMLLRHSAGETKVWSVVRVPSVDEEDRRQLHRELTTAKQDRTRVINRIQGLLAGHGVQLTLQGDVDAQLDQGQQWDGSPLPSALRTRLKRAWQQVCFLTAHIQTLEAERRALLRRHEDPVIAQVRQLFTLRGIGVNSAWLYVMEFFAWRDFQTPKQVGALAGLTPTPYQSGQARREQGIAKAGNRHIRAMAIEIAWAWRRFQPASALAQWYERRFGHGSARLRKLGIVALARKLLIALWRFLKTGVLPEGAVLKAETPSR

SEQ ID NO: 133870 - protein, 372 aa, unidentified
MASIIYVGMDVHTTNFTFCCYTADSDRGFAVAQTEPDYRQVIKYMERVQKQRGEECKFVCGYEAGCLGYSLYHQLTRCGVDCVILAPSTMHQEKGKRIKTDRRDAENIARCLAFSLYSPVYVPTTEDDAVKEYIRMRDDIKADLKRVKQQIIAFTTRHGFAFDGKSYWTQKHLKWLETLVFEHPLYKETLQEYLILYYMLDEKVAVYDTRIEEMSHLEHYEENVQKLCCFRGVAAHTALSLLVEVGDFQRFRSAKHFAAYLGLVPGEHSSSDKQIRTSITKAGNTHLRRLLVEAAQSYNRGAIGKKSAALKARQGGNPAEVIAYADKANERMQRKYYRIAFKSRHNIAKTAIARELACFVWGMMTGNISNAA

SEQ ID NO: 133871 - protein, 459 aa, unidentified
MKKRKSKRTKGIEEARPFEGLSKVNQNAAGVDIGATEIVACVSGGDEIQLVKAFGNYTVDLLSICEWFRKHKVRTVAMESTGVYWIPLFEELERQGFECLLISSRSLRKVAGQKTDVEDAQWIQTLHSYGLLKGSFRPEGDLVALRTLLRHRAQLVEHRAPHIQHMQKALLQMNIQLSQAVTDVMGMTGQMIIRAILSGLREPKELASFRDSGCKHSEEEIAKALSGTWREEHLYVLKQSLELYDFYTEKIEACDQEINRQYGMVRPDWAGGELPVVPKKKLHAHSKNAPKEAKEIREHLYRINGVDLSLMDGFGVSLAQTVTMEVGSNVAEKFPTEKKFSRWLGLAPKHDITGGKVLSNRTLKTKNRAGQAFRMAAQSVKKADNPFGALYRRLRSRLGPAQATVATAHAMARVVYKMLKYKEEYNPLSVNEYQKKYEEQQVKYMKKRAAKLGYQLVPS

SEQ ID NO: 133872 - protein, 353 aa, unidentified
MKCDKYIGFDLHQATTVVAVLDAEGKVVLETIIATEAAAVIRFLKSLSGPLHITFEETTQARWMYDVVHGYVSEAIVCDPRRNKLLGEGSKADKPDARKLAELLRAGLLRPVYHGHEATRQLKELVRGYETLSTDTQRMMVRIKSIYRAHGIRTSGSAVYQQKQREQWLQLLSESGTRQRVSWLYEELDHLRPLRKQAKLAMVAEARKHQAFRLLRTIPQLGPIRCAMLVATVDTPYRFRTKRQLWAYSGLAIVTYMSSEYEIKSGRVVRSRKPVATRGLNRNCNRRLKDLFIGAAVAGSRSEPYRSYIEGLQQKGIRAEMARLTLARKIAAVALRVWKKGETFDPKKLNSTT

SEQ ID NO: 133873 - protein, 426 aa, unidentified
MNTTTDFAATLGWDWADQKHDLWLRPADGTKAEHLRLEQSPEALHEWAAQLGERFGHRRVAIGIETSRGPVISALLAYDFIVFFPVNPKALKDYRAAFSVSGAKDDRTDAMLLEELVRLHRDKLRALEPDTELTRKLGGLTENRRRLVDERTRQVNQLHSLLKTYYPLAETLLDGHLTTPLAANFLARWPDLPAVQKAEAKTLRAFFYQHNSRGAKKMEARLETVKKARSLTQDEAIIAPARHLVTALAGMLKVLHQAIAGLDQAIAETFDQHPDAALFRSLPGAGPALAPRLLVAFGTRRDRFAIASEVSQFYGIAPVVKQSGTTKTTHMRSRCPKFGRQTFHENAGCAFKAEPWAKRYYEDQKGKPEGEHHQAVRALGYKLIRIYYACWKQRTPYDRQRYLHALEKHGSPLHKKLQTPTPKNSE

SEQ ID NO: 133874 - protein, 397 aa, unidentified
MIAVGIDVSKSKSTVAILNGDGSIRAKPFDVHHVADELQALVDYIKRTSEPPTILMEPTSHYHYPLLKAFQEAGLPVCLINPYQMKKYGDTALRKAKTDKRDALRIAQYALEKSYSLVPYTPQDQKYEDLRFLSRQYSQRISTLTVAKVQLLSLLDETMPGITTILPLISRDPDNCVLLRFIKRFKSFDIIRKMGKTRFLDSYQVLVKKTKDRFAGSKGLAIYELVLNSITTRGENPLTAMTQDQCVDLVSTSQKAADEINLQMRIIAETIPEYKVLRSMAGVGDRLGPIILGEIGDIRRFHSGKALNAYAGNDAPPYQSGQFESRNRHISKRGNPALRKACFEVMQALKLTKPQDDPVYLFLLKKEQEGKPYNVAKMAAVNKFLRIYYARAMELYK

SEQ ID NO: 133875 - protein, 404 aa, unidentified
MFYAGIDWADQKHDALAIDEAGRKLGSIRVPHTPEGLEKLDVWLSSLLGNLDKEQMACILETNHGLLISFLLERGWPVYAVNPRTVDRKRSASGSKTDAIDAYLLAKTGRADFADLHRLTPDSEKIAELKGLTRDQDSLIQMQTRLVNQLTACLKAYYPVALDLFAKVQQHSALMFLHTYPTLEAAQTASLEQIRQVLTSAGHTTASKVAPKIFAQLHQPSLRADAVTTRTKSRLAVALIAQLLPLVEQIADYDKEIEQLFLSHEDNEVFSSLPRAGKRLAPRLLAEIGDDPVRYETAASLQALGGTSPVLFQSGNYSKPHRRLGCIKPLRNALHQFAWQSTLQEGWALTYYERKRAEGKSHSVAVRALSNIWARIIFAMLTSHKPYVSATFETAKQLHASKAA

SEQ ID NO: 133876 - protein, 389 aa, unidentified
MFYLGIDIGKNTHVASLVDDKKKVIFKAFSFSNSIDGAESLILKLEAFKNELEVGMEATGHYWLSLYSYLVEKNFTVRVINPIQTDGWRQGVEIRKRKTDIIDSLLIADLLRYGDFVETSLSNEDYLSLRNLSRFRSYLISSIGDLKRKTIALLDQVFPEYASSFSNIFGKISKEILSNFSTPSDFEDINSDDLNTFLESVSKKNYASKKIDELSKKASSSFGINLCLDSFSLQIKMLIEQISFIQNQVSNVENEIEVLLEKLNSPITTIPGIGSVNAATILGEIGDIKRFSNPSKLVAYAGLDARISQSGEYESTYNHMSKRGSPYLRRALFQSALRAEFCDPVFSDYYQKKISEGKHHLVATNAVARKLCHTIFAVLTKNEPYQVQS

SEQ ID NO: 133877 - protein, 407 aa, unidentified
MESVLELHVAIDIGSRVHRVAVGDADGHVLDQFDVHHTAPGIAAFFERIEKLPHDTVAVAMEGYNGWARPLDQRVLARGWTLFNVNNLKLARYKEIFPAPAKSDNIDSLRMLELFRMRGSVHVARDVLQLVIAAPPENDKLKQLTRRRRQLVNDKVRLTARMTAMLQALCPGLLALTGAVDNVWFLSLLTARADIRKLPGLRSTTVRGLPAVGKRYASIIKVWQKEALLADDAKWTGPMLISDAKRLLALRREIEDQERQIAAAAVESDLAQRIASIPGFGLICSAELAGEIGTLARFEGEAGLAVYLGMAPLTNSSGTYHGTKRPRQVNQHAKLAMMTGSAHHVREVAQSQRYYAKKRVQAKGHNQAVRCVGRQLVRVIWSMVTKGRAYQVEPELYTQPTEDSCQT

SEQ ID NO: 133878 - protein, 351 aa, unidentified
MTSLSCMNSIHYIGIDVSKDTLHINASDLRSSTCSNQAKALVPWLRQLPARAHLVLEASGGYEKLLATLAHRAGVPVSIVNPARVRAFAKARGQRAKTDRIDAYVLAELARRDLVPAIWLPAPGVRAERELARFRLHLVRHRAALKARIHASLIACGHPCPVSDLFGVRGRALLGAFDLPEAWRASTEASLRVIGHLDGEIDACEAELRRQGADHPYVPLLMSAPGIGWVLAYTIAAEIGEIERFSGPKKLTGYTGLCPRVYQSGERDRRGPLAKNGPTYLRWALIEAAVHAARHPAYATHYEATKQRLGRQRGAKVARVEVARKLAEAIWYMLTREQTFAPQGPTPPLAA

SEQ ID NO: 133879 - protein, 427 aa, unidentified
MPYKIAGIDVHKRMLHVVVSDVQVDGEYDFTRCIFGSLPEALRSLAAWLVEQQVEEVVMESTAQYWKPVWGALERYWKPISQTREGALATSGTLHLAQALSNRGRRGRKKDFRDAERLVKRLVAHELTLSFVPDVEQRLWRTVVRTKYQLTRNRVQLQNRLEALLEEAHIKLSSLVSDLLGASARRMLEAIAGGETNRETLAALADRGLRATQDQLQDALGVCQELNPVYRRLIKMMLDEVASIDKRIDQLNQEMASLLRPHEDQVKRLAEVPGLGVDSAQQIIAEVGATAATFPSEKHLSSWVGACPGDEESAEVNYSRRSPQGNRHMRRILNQAANAAAKHKGSIFQILYGRYVPRLGHNQTIGIIAHKLCRLVWKILHRGIRYEERGPEVSKASKQKRTRKMIRQLRRLGYRIEPSPSQSAITA

SEQ ID NO: 133880 - protein, 333 aa, unidentified
MHKGSYKMSFDIGIDVAKDKIDCLWLRDPVNLKVKTKVFANTAKGFKSLKLWIEKNVSTEFEHIFVSLEATGVYHEALSYALFDMGLQVSVVNPAFIRDFAKGLGVRGKTDKKDSMVLARYSNMVRPSLWSPEPKEIRTLKAMISRLTGLEKDLQRESNRLEKAEISKASIIVIDSIKSMISHLELEVKRIEKMIDDHIDKNPTLKKDRAILQSIPGVGDVLSREMLSVLHSRKFVRASQAAAFVGVVPKLWESGKMKGRTALCKNGPGRLRAKLYMAAVAAIQHNPDIKIQYKRLLQAGKTKMQALGAAMRKLVQICFGVLKHQCEYRPQTN

SEQ ID NO: 133881 - protein, 312 aa, unidentified
MTSGRNVGVDVCKGWLDVAVHESGQAWRVKNEAKGFASLITRLKEIEPSMVAFEATGGYERRCVKALGEAGLKVAVVNPTRVRRFAQAMGITAKTDTIDAKVIAHYASVAPLNAQSAQTPLEERLAACVERRRQLLSVVVAEKNRLTSSPECMLTDIEEHLAWLEERVAKLDEDIQACIEQKEEWRKRSQIIDSVPGVGPVTATTMVAELPELGQLNRQQIAALVGVAPFNKDSGPKKGKRKIYGGRAGVRGTLHMATLSAVRCNPVMRAFYQSLLKRGKEKMVALTACMRKLLVIINVMVRDGKPWRYLPA

SEQ ID NO: 133882 - protein, 395 aa, unidentified
MLYLSIDQHKHHLTINIRNEHGEVIQKGQVSTTHADIDDFFVTFAKKARKHRGYMAIVEVCGFNDWLLEKLKKTRCSEIVVVQPDNSAVNKTDKRDANALGELLWNNRKRLQGGQRPNGIRRVFPPDPADAQVRQLANFRQYLVKQRTKTINKIKGIINKHNMAQDAPTEDYSTKKFKKWIDHVPLPVVDRIEVNMNIQSWELHDKQILEVEAELVKRSEVRMADVVRLKTLPGISAMGAITLLSRIGDIKRFKNPDSLANYFGLTPGCHNTGGKHRVGGITKRGNAIARHVLNFAVIHIIRKDPLMKAWHKKIKSKKGTKTAKVAVMRKLATIIWHMLRWEKPYQFRYDPPAPAPKKGDLRSPKEVLGGIGDNHPSRRREKSPLKCQCKIRARR

SEQ ID NO: 133883 - protein, 396 aa, unidentified
MNQSNANSAANVKRAVAEATDVHGAYIGLDVHKDSLSVSVAEAGRQQPVFEGEIPNEPAAIDQLVRRLSQRFDGQALLFSYEAGPCGYGLYHQVRASGHDCEVVAPALIPTRSGDRIKTDRRDAQMLARLSRSGELTPVWVPTPEQEAIRDLTRAREDLKAIELKARQRLGAFLLRHGKRYTGKSKWTQAHWRWLEQVSFDSPVQQIVMEEYVEAVKHAQRRVAALEQQMEQALEQWSLAPVVTALMALRGVGLISAMTVLAELGDLSRFDSPRQLMAHLGLVPSEHSSGGSRRQGGITKTGNGHVRRVLVETAWSYRFPARRTRKIQRRAEQSSPRVQTMAWEAQKRLCSRYRRLAATGKAKQQVTTAVARELAGFIWAIACEVMGKAHSSRAVV

SEQ ID NO: 133884 - protein, 349 aa, unidentified
MERPLFFVGIDIASATFTAAVGVEPWRLIIKPEEFLNELDSFPKFLHWLQKNKLPPEQTVLCMEATGVYGEALAYFLNSQGYRLAVETPLKVKRAFKPFGPKSDPVDSQQIAEYACRYWDELHLWTPNQQVLEQIKTLLNTREQFVAQSVAHQNALKSLQRKVVRTPLAEQVHIEALKQIKKHLRTIEDEIRRLIDQDPTFGQMLGLLLSVPGVGLLLATHFLVSFYSAQRELNYKEMASYLGICPHEHSSGSSLHPHPTSRHFGPPDMRRLLYLASMSVRTHHPDFSHYFLRKAAQGKPKKVILNNIANKLLKIMFAVIRSQTPYIPGYRSVNPIFLKKALTVSSYSG

SEQ ID NO: 133885 - protein, 350 aa, unidentified
MDRYIGLDAHASSCTVATVGPSGRRLHSQVVETNAGALIRVLRGIPGTRHLCLEEGTHASWLYEVLSPHVEEIVVAGVRESRGPKSDKLDAFGLAEQLRIGAVKRKVYKKRGEFGPLKHRAKAYTLLVVDSVRVQNRIKSLFRSRGVAVAGKSVFRAAEREAWLRKLPDSARSLADLLMQEQDGLLELRRKAEKAMLVEARRHRAWRLVKSCPGLGEIRMAQLLPIVVTPYRFKNKRSFWAYCGLGIVMRSSSDWVRTQSGEWVKAPVKQTRGLNRNSNRTLKGIFKGAATTVIGQAKDEPLYRHYLQLLDGGTKPNLAKLTLARQVASIMLAVWRNEEVYDPARVGQAV

SEQ ID NO: 133886 - protein, 418 aa, unidentified
MAMKIVRFNCCGMDVHKDLIVATIGITDRKTNITEYFQRSFSTLNSDLHRLKDWLKSHHCFDVCMESTGKYWIPIFNILEDEINVHLTHPKYVKAIKGKKTDKKDSKWICDLFKHDLIKFSFIPPKVIRELREIARYRYKLVCMRSSERNRYQNCMTISHIALASVVSDPFGKTASNIMKEVMKSNVIDDDKILKLVHKNCKNKDKILDSLHGYRIESDQRFKMKKSLDHMEYLDQLINSCEAELIKRAYPLRESFQHITQIKGISALSAILIISEIGIDMSQFESDKQLVSWAGLSPANNESAGKKKSVRISKAGQYLKPLLVQCALSTIKDKTSYFGRKYSNIKKRRGHKKAIIAIARMMLVSVYHMILTGEEFNPCDYESFMNTKANGNQSLTVEKALEFLKQSGVDISSIQVNL

SEQ ID NO: 133887 - protein, 438 aa, unidentified
MSNKVFFNLDDLFISVGIDVGADFSWMSIALPNQQFVGKPYKILHNSIDSLTTAVSKIKEAEELYSLESRIFLESTGIYHYPLFCYLRDKGFNCSVINPIITKNSTNINIRKVHNDRFDSKKAALVGLKPDLKVSLMPSDLALNCRNLCREYYDLMDNRSAYVNKLQGELRMVFPQYLDIFSKVTINTSLTLLETYTSPSAFLKADKQEIIDIIKSTARFGLTYAQNKYNAIIQAATDANQFGYIIDSNIKRIRLYISFIRKYDEEINNILESLHELVDANEDADFVKQIHLIETFKGAGFLSAVSIMGEIGDFSAFSKPKQLFAYFGLDPAVKQSGKFEGTKVQMSKRGSAIARRVIHTLTLQSISISRNGEAKNPVLREYYLKKCDSKPKLVAMGAVSHKVCNMIFAILRDNKPFKIIAPQEHIKQYNAAKCDIAA

SEQ ID NO: 133888 - protein, 392 aa, unidentified
MVCVGIDVAKDKHDCFILGSEGKALTNVFTIANNRDGFELLLQTIRSCASPTDNIKVGLEATGHYSYNILGFLLDKGLATYVINPLHTNLYRKSLSLRQTKTDRIDARTIASMLMSDVDLKSYTDAAYHNEELKSLTRYRFDKVKERAQLKQSVSRLVNILFPELETLVPTLHLASVYAMLSEFPGAKQIASVHLTHFKAVLSDASKGRYDRNKAVEIREAARRSIGSTMPSKSLELQHTIRLIRELDKEIDEIEAAIKVIVDEMAPPILTIPGISYRMGAMILAEIGDFSRFDSPDKLLAYAGLSPSTYESGKLKANGAYAHMEKRGSRYLRYALFNAAKFVCVWEPSFAAYLAKKRAEGKHYNVAISHSVKKLVRLIFALQTSGKAFQPS

SEQ ID NO: 133889 - protein, 316 aa, unidentified
MERKGSYVGVDVSKARLDVALRPSGELFFEANDECAISRLVKRLKSLGCERIVVEATGGYETLLAAALYAAGLPVVVVNPRWVRDYARGIGQLAKTDAIDARVLAMYAEQPELKVRELPDAQTRELRALCTRRDELVEMIGAEHSRLEHAPQRLQRELRGHIGYLRKRLKKLDHDIDQAVRGSDLWRAKGELLESAPGIGAVSRAVLLARLPELGRLNRAEVGKLVGAAPFNRDSGKHRGMRMTGDGRHALRRTLYMCTLTAVRCDPMMKAYYRRLRDRGKPFKVALIACLRKLVIILNAMLKTATPWRSSCPVNA

SEQ ID NO: 133890 - protein, 357 aa, unidentified
MTSTASTVSQITGGVDTHRDTHHAAVIDQVGRRLADAEFPATPAGYRQLLQWLTQRGAVQQVGVEGTGAYGAGLARFLRSHGIVVVEVDRPNRKDRRTHGKSDPIDAYAAATAALNGTASGTPKTRDGRVEAIRALRVVRRGAVKARTQAMNQLKGLIVTAPAELRESLRGLPAALLITTCARLRPGVVDPAQASANSGSTKTALRHLARRYQQLSQEIAELDAELHPLVQAAAPTLLELPGVGPEVAGQLLASAGDNPDRLRSESAFAHLCGVAPLPASSGRTDRHRLSRGGDRAANNALHTVVLTRLRYDSRTRDYVSRRTGQGLSKKEIMRCLKRYVAREVYRILTAEAPPSTA

SEQ ID NO: 133891 - protein, 347 aa, unidentified
MTIVDTSRPVTGGVDTHLDLNVAACLDSIGGLLGVEQFRTSSAGNKALLGWLKSFGVVAKVGVEGTGSYGAPLARYLRRAGVAVVEVDRPNRQERRRKGKTDEVDAIEAARAAQAQRQLGAAKSRDGNVEAIRALVVAKRSAKSTKIKTLNQIRHLGFTAPEEIRLSLAGVSRRLIARQAAAIRPRAGTDPVIFATKTALRALGRRVLALDAETAEIDRLLTKLLKEGHEDLLSLYGVGIDSAAALLVTAGDNPERLRSEASFARLCGVAPIPASSGKVIRLRLNLGGDRQANAALWHIAITRMSGDLRTRLYVERRSKEGLSKKEIIRVLKRYIARELYHYLKPIT

SEQ ID NO: 133892 - protein, 449 aa, unidentified
MHNSEFKQINFNAAGIDIGAETHYVAVPEGRDPEGQDVRHFGTFTSDLYALADWLKQCQIDTIAMESTGVYWIPLFEILESKGFDVKLVNPRFIKNVPGRKTDVVDCQWIQQLHSYGLLTGSFRPEEQMSILRSYLRQRTLLVSYASHHIQHIQKALEQMNVKLKQVIRDITGTTGMRIIRAILAGERKPEKLAQLRDPRCKNDIKTIAKSLHGNWRPEHLFLLQQSIELFDFYQKQIADCDLKIEQHLANFEDRSNGQSLDKTRKLTGRNKLTFDARTHLFQMTGVDLTKVPGLDSLTALKIISEIGLDMNRWPTEKHFASWMGISPGSKISGGKILSSKTKKCANRAAHYLRLAAYSLHSSKTAIGAFFRRKKAHLGPAKAITATAHKLARIIYNMLKTGTEYKDMGQEYYEQRYKKRVITNLKRRAKQFGYELKYVKEQQEVMLDV

SEQ ID NO: 133893 - protein, 355 aa, unidentified
MKQQAIQYLALDVHQATSVATVREAGGTIRMRATVPTEAKAIVGLVKGLGRPVHVTFEEGTHAQWLHDLLQPHAERVVVCNVRGRSETSNKSDRIDADWLSEQLRLNALKSVHHGSTGVAALKELVRCYTNLVDDATRVMLRVKAIYRGRAVAASGKAIYRPSQRKAWLAKLENRGARARAASLLEQLDTLLVLRTKARATMIAEARRQSGWKILRSIPFLGPVRAAQLLAVIGTPHRFRTKRQLWPYAGLAVVTRSSADQEIVEGKLRRRKRAPLTRGLNPNHNRVLKNVFKGAANAAAAKPGPLKVWYDRCVAGGVREEMAKLTLARKIVSIMLRLWKKGELWDPTKVTMQTT

SEQ ID NO: 133894 - protein, 327 aa, unidentified
MKYCGIDLHSNNSVVIVSDEEDRILLSKRLPNDLGQIGAVLEPYRDELAGVVVESTYNWCWRVDGLMDAGHQLHLAHPSAIKKYEGLKYSGDFADARYLAQLLRLGLLAEGYIYPREERGSRDLARKRMQLVRLRVMQVLSIESIMTRQTGSTLKSHAVKRLTAQQVDDLGFAPDVALALESNRAVSQGLGEQIDAIEKRLEESVKLRSDYQLLKSMPGVGPILATTIMLETGSIGRFAQVGNFSSYCRCVNSLRESNGKKKGEGNSSNGNKYLAWAFAEAANFAIRYCPQAKSFYERKKRKTNRVLAIKALAHKLARACYHMLREQ

SEQ ID NO: 133895 - protein, 362 aa, unidentified
MDNATHVGLDVHRDTIAVAVLSPGDTSLDERTIPATNEAVTRLVRSLRARGPLVACYEAGPTGYDTQRLLERLGVPCEVIAPAMIPRRPGSRVKTDRLDARNLARLHRAGELVAVRVPAPSEEALRDLVRVREDLKAERRRARQRIRSFLLQHGRPWRGTAGWSRRLEDWAGAQQFDEPVAQVTFEILLASQSARAAEVDALERKIAEAASSSAAADQIARLRCLRGIDTLIAVTIASEVCDFGRFPTGPAFMAFTGLVPSEHSSGMSSRHGSITKTGNRHVRRVLVEAAWAYRHRPAIGVELRRRSQDQPADVRAFCWKAQLRLHARYRRLSPVKGSRKAVVAVARELSGFVWALMNDRID

SEQ ID NO: 133896 - protein, 352 aa, unidentified
MKIIGCDFHPSYQQFAMVDTETGELQEGRLEHEQGEARRFYQALAGQTVRVGIEAVGNSQWFEQMLAQMGHELWIGDAAEMRRLVVRKQKTDRRDAKHILNLLRDGRFPKLWVPSQQIRDVRQLLRHRQKLVEMRTQVKNQLQHLALNQGVRRKRRLWSVQGRAVLEQLPMQGWTARRRSDLLVMLDRLQEQVGELDDAVRAEAEQRPEVRLLMTHPGVGPVVGLAYVLTIGPTARFERGKKVASYLGLIPGEHSSGGRQSFGPISKQGNTMMRTLLVEAAQTAARFDEELRRAYGRLRAKKHSAPAKVMVARKLAVRMYWMLRENKSYAELYARRPVARMQGSSGHSVVAS

SEQ ID NO: 133897 - protein, 326 aa, unidentified
MMSRWQEKIVENPAGTFVGIDVSKNKLDICILPHGLHMQVPNAKADIRGLIRELKNHNALLVALEATGKYHRLVHRMIHDAGLDVTVVNPFRSRQFADSLGKLAKSDAIDAEALARFAQRMDPEPTAPADEQSVTLHDLHIARRQVCDEVADLKRRLQSTEHALARRQIKARIDMGQRHKAVLEDEIHALINATPDLKAKFEILTSIPNIGKITAAIMLADLSELGSANAREIAALAGVAPMNWDSGTKSGKRIIRGGRRTVRNALYMCAVSAISRPDPLGCTYRHLIRRGKNPKVALTAVMRKLVVIANTLIAENRKWQPDAPTA

SEQ ID NO: 133898 - protein, 351 aa, unidentified
MLIIGCDYHPDFQQIAWVDAKTGECGERQLRHSDGEAERFYRDLKLKGVPVRVGMEATGHARWFQRLLAELQQEIWVGDPGQIKATRVRKQKTDRRDAEHILKLMLENRFPRVWVPSPENHDLRQLLWHRHRLVQIRTRVMNQLQAVALNEGVRRKKGLWSGPGRAQLESFRLAPWATRRRQDLLELVDRLSPSISELSRAAEQEAERRPEMQRLMTHPGVGPLTALAYVLIIGSPERFRCGKQIGSYLGFIPCEDSSAGHQRLGHISKQGNALMRFLLVEAAQAALRSDPDWRRRFVHLAMRRDRRIAKVAMARKLAVRLYWMWRKGWNYQELMKFGSHAGQPGYVHGVK

SEQ ID NO: 133899 - protein, 381 aa, unidentified
MITVGMDVHVRNSYLHVTDDAGNMMRRGRCRNTLIDLAEFLGPIEREALRRGEPVRTVLESTTNSRAIQRMLTEYGGAAGLDLTAEVLDARKIRIIAESVCKCDRLDAKVLGELARSNLKLPVCYMPDDEEFALREHLRARSDLVRMRTMLKNRVHAVLHRRGVLAPSADLFSLTGRRFLAQCQLDEAGRAILDRYLQTIDQIEETIANSTASLRELMRGPRWAKAAALLMTMPGIGLITALTILAELGNLKRFRSRAAVANYAGLVPVVRDSNQKHYSGGISHRGSNHLRAVLAEAAWMAVPRVPVYRHLFERVEQKKNKATAIVAVARRMLEDAFTLLKRDQAFRYLAVSVTGTSQQVGTVSPAPASRSGRKVASSVAG

SEQ ID NO: 133900 - protein, 342 aa, unidentified
MNQYAGIDVLLECSSVCVVAANGKILREARVASEPEALIAWFRSCGFELERIGLEAGPLSQWLVAAMRKAGLAVELLETRHVRKAFEAMPVKSDRNDARGIAQLMRLGWFRPVHCKSMSAQETRTLLTARKLVQSKLRDVENSLRGILRGFGLKVGKTTEREFAGRIEELVVGHRHLQVIANALLAVRAVLRKEFAAFEKQARKMARSDTRARLLMSTPAVGPIVSLTYASAIDDPGRFKSSKQAAAHFGLTPKKYQSGETDYTGRISKIGDSSVRTALYEAAHVMLTKPLKGCSQLKSWAMRIARRAGMSKAKVALARRLAVIMHRMLADGTPFNAAAAAA

SEQ ID NO: 133901 - protein, 410 aa, unidentified
MEVIVERPAALDVHKAQVTACVRVPGQDGRVEAVQEFKTTVRGLLVLRDWLKAHRVTQVTMEATGVYWKPVWHVLEDDFELLLVNARHVKQVPGRKTDVADAQWLCRLAEAGLLRSSFVPPKPIRELRQLTRYRKAQISERQREANRLHKALEDTGIKLDCVASDILGVSGRAMLDALVSGTTDPVVLAELSKGRLRAKIHELTEALEGRFEDLHSLLIGSILAHLDFLDTQIEALSEAIEAKLAPFAAGAVELLCTIPGVGERTAQNVIAEIGVDMSQFPTAGHLASWAGQCPGNDQSAGKRRSGRTRKGSKWLNLALKEAAMGAIRTNDSYLQALYRRKKSQGGHNKAIGAVKHSMICAIWHMLQTGEIYTDLGPDHLARRNPQRQTKRLLAQLERLGHTVTIQEVAA

SEQ ID NO: 133902 - protein, 337 aa, unidentified
MMYSGIDLHSNNSVVAIIDDGDRVVAQKRLPNDVTKIVGFLARWQEQLAGVVVESTYNWYWLVDGLQDAGFHMHLANTAAIKQYEGLKHVGDETDAQHLAHLLRLGILPTGTILPREHRAVRDLARKRMQLVQSCTAHVLAVENIMARQLGGRMTSNQIKRLTNDAIDNLPVAADVGLAIKANVAVIATLQSQIELLEKCLQERVKPRPQYGLLTSVPGIGQTLATVILLETGPIDRFAEVGNFASYARCVDSVLTSNRKKKGEGNVKNGNKYLAWAFVEAANFARRFCPEAKRFHERKKAKTNNIVATKALAHKLARACYHILKEGKPFDVTRCFA

SEQ ID NO: 133903 - protein, 462 aa, unidentified
MNNFYLGCDASKGFADFVLINEDKQTAINNFQLDDTSDGHQQLCKILNQFAEKHPGCVIYSAVESTGGYENNWLNTLRKLQSRIDIPVARVNPIGTNHNSKASMDRITTDKQAAKNIAEYLINHKNKIIYNKDDRFYFLRRQWKFVRTLVKQRTQLYNQLESILYIANPELLTYCKDGYPNWLLKVILQYPTAKHLSKARIDALTSIPYLKEDKALSLINKARSSVASAVDDITANLVISMVKQISKLTKLINKQSHYIADNCKLPEIEILKSFQGIGDYSALGLLLNICPIEYFESTKKISSFSGLHPIWKQSGDGVWGMHMSKQGRKEIRNILYMVARSALVHNPYIKEIYARQLKKGKKRMAAIGICMHKILRIVFGMLKNNEKFNPEKDRANSEKMLNKQNQSKPVNLQVGIKLRRYQKLDLTAPISKRQTKKRKEQEMSQNPDKSGLNTGSIPHSSK

SEQ ID NO: 133904 - protein, 317 aa, unidentified
MKHYAGIDVSLNSSSVCVVDESGKIVREVKVASEPVALIHCIKSLGVRVERIGLEAGPLSQWLYGALRESGLPVELLETRHVKAALSAMPVKTDRNDARGLAQLMRLCWFRPVHCKSMAAQEVRALLTARKLVQSKLYDIEMSLRGILRGFGLKVGPTTSRSFAARINHLAAGHPSLEMVAEALLSTHAAALCAFKNLEKNVRQISRADARVRLLMSTPGVGPLVALTYVSAIDDPKRFTSSKRVGAHFGLTPKKYQSGETDISGRISKIGDSSVRAVLYEAAHIILTRPIHGGALKSWAMRLAKRAGMKKAKVASV

SEQ ID NO: 133905 - protein, 424 aa, unidentified
MNNTQNQKIAQVTDKTLIVGVDIGSENHFARAILARGFEVSKKPFPFTNTEEGFVSFVTWIYNLAAAHKLTKIMVAMEPTGHYWFAFVAFLKKYDVQVVLVAPQHVKHSKEMDDNTQEKDDRKDPIVIARLVPEGRYLIPYIPEDVFAELRVAFNRRCELVEEQVRIANRMIRWFDIYFPEYRKIYGRIDAKTGIMILKRAPLPADILDTGVDGICQIWKDAKVRGYGPKKAQQLYSAAEHSVGMKGGASVRWKLWQLLEEYELTERQLHDILQLIEGLLYQIPGADKLLKIPGAGLVTVAGFLSEVGDIKRFSDPKQIQKLAGLAVVENSSGKRKGLPGISKRGRSRLRWVLFQLARSMVMFNPEMKAYHQYYTTRKENPLKKLQSLVAISARIARIFYGILKNGTEYDPAMVMKDFNKAVAA

SEQ ID NO: 133906 - protein, 367 aa, unidentified
MKKLTTKMMQETLNKHDGRLTVGLDLGDRASFCCVLDETGDVLLEQKVSTTPKAINEIFGAMPRSRIAVETGTHSPWVSRLLSELGHETIVAHARSVRLIGESRRKDDRLDAMTLARLVRIDPQLLCPVKHRSAEAQADLTVIRARAALVRTRTMLVNAARGLTKSYGERLRGCNARGMNPKSAQDLSPELKYALEPMMHQIESASERICQYDQMLESMARNRYPEAERLKQIKGVGTLIALTYMLTLEDPYRFRKSRDAACYVGLQPGRRNSGQSEPQMHISKEGDPYLRALLVQAAHHVLGPWGVDSDLRRWGMKLAEHGGKRGKKRAVIAVARKLAVLLHRLWVSGDMYVPLRPDGPVTLPAVA

SEQ ID NO: 133907 - protein, 352 aa, unidentified
MERYVGLDSHARSCTLGVMSAGGQRLKSLVVETNGRALVEAVRGIGGRVHVCLEEGTQSAWLYELLKPHVAEVVVTMAPEKRGPKDDRRDAWARANELRTGSIETRVFKAPEHLAGLRNAVRAYGFAVTDVVRAKNRLKSVFLSRGIGTDASIYDLEKRTGWLKELPSPHRELAEWLGRQLDELEPLREEAGRLLLAEAKKHPIIRKLSTAPGMGPIRTAQVVAIVATPERFRTRRQFWSYSGLGIVTRSSADWVQDRTGKWVRAQHAQTRGLSRKRHPRLKAVFKGAATTVIAQLADDPLHADYERMLKSGIKPNLAKLTLARKIAGTVLSMWKHEEVYDPKRHRPTPEQK

SEQ ID NO: 133908 - protein, 328 aa, unidentified
MEEDGKVKMLEPIECTREAWLKRLAELPPQAEIALEVSTSGYFAMSVMEEAGWRKRAHWVHTAGVDSLRKQKSDRLDARKLARKLGANAADPLPEAWFPPAPIRQLRMLARQRCRIARLRTLTKNRLSSLLQMHGLRPPASIISGAGREWIRQQKLPEPVQQCFEQTFRLYDFLSRERETSEKNLQAFAVQFPEIRRLATIPGIGHILSAVIWGEIGTLQRFPSADALVNATGMVSRLYQSGDVSLRGPITRQGSAWLRWALITAANCVTRSRGPLGRRYWSLRRRKRPNVAKTAVACSIARCVYGVLKHGEPFQAERWGRRSGKLEP

SEQ ID NO: 133909 - protein, 424 aa, unidentified
MDALERRERARQSVALVGVDAGKFHHAMVARDATGRDSKPLLFTTNREGFEAALHLIRLASNDATPASVLAGIEFAGVYGATFAHFLDALGYPVVSVLGATTKAWGQAVHGSRLKTDAKDATTIVDLVSHGRYTGYPFLKPAYAQLRFLSAGMRRLTLLRAGTINRLRSVLQSVWPEYETVFASFTTKKTPLRFLREYAGPQAFLAAPRREVLHTLRTISVRQHGVETYSALEQAARTTVAVRGTEQALATEIRQLVDLAETLGAQATALEHEMAVAMRELPEATALCTIPYVQTRMAATFLGAVGDVHAYESVNQVMRLAGLNLITRESGILKGTHRISKRGRPEIRHHAYLAALGLVKRDGHFRRQFDRLVQRNGGKKKKALVAISREVLRLMFAVARDRRAFTPDMPTPPEGRTPDDYPRP

SEQ ID NO: 133910 - protein, 419 aa, unidentified
MTRRIAGIDVHKRVLMVVVLSVSEDGAAASTREKTKCGTLSTELEELRQWLREKGVTEVVMESTAQYWQPVWLALEGGFELGLAQAWSNRAPRGKKSDFRDAERLARRHVAGELTMSLVPGAEQRQMRELTRRTAQLNRELVRIQNHIESLLEPARIKLSSVLSDLFGATGRRILQALAQGESDPEKLAALADDRLRCSSARLAEALRGSRTPMQRRLLKQMLQDAELAEAHKKELEEMTGELMKQHSGAIRRLTGVPGIRLRTAEDVIAEIGPDARAFPSAARLASWVGACPGREESAEHNHSARCAKGNMSLRRALCEAAQAAVNTKNCRFQQKFRRLLPRLGYAKAIWAIVRLLCIVIWNILHQGADYIERGGQTTPGAIRRRAQRLNKELRAAGLSLIIVPLTSQTRTISAATPV

SEQ ID NO: 133911 - protein, 350 aa, unidentified
MIIIGCDYHPGFQQIAFVDTDTGEMQERRLQHREEAEKFYRDLATQGMKVRVGMEASGHARWFDRLLSELQFELWIGDAAEIRTKRVRKQKTDRQDAQLILKLMLEDRFPQIWVPSWENRDLRQLLWHRHRMVQARTRLMNQLQAVALNEGLRCKKRLWREAGRQQLESFRLAPWASQRRRDLLELLDRLNPTIAKLTQAIEQEVEKCPEARRLQTHPGVGPLTALAFVLILGRADRFQCGKQIASYLGLVPLEESSGNRRRLGHITKQGNSLLRFLLVEAAQVTVRSLPEWRSKYFHLAMRRGRKIAKVAMARRLAVQMYWMMRKGWDYEQLNKFGSYAGQPGHRDGVK

SEQ ID NO: 133912 - protein, 388 aa, unidentified
MLQPLDASKSLTAFEQDSTVIAVIEMSQSKWLVAAVVPGIERQPLKKIEANEETLLKVLHRWRAEAGQAGRVIKRVAIAYEAGRDGFWLARWLRARNIEAYVIHPASIAVSREHRRAKTDRLDTELLMRAFLGWLRGEKRHCSIVAIPTVAEEDARRPNRERENLVTERTRIVNRMKATLTRFGIRNFKPTLRKAAEKLDNLRTAEAMPLPENTRAELRRHLARLRVVREQIREIEHERLRMLKAAPVTEKGPHAMVRLLARVLSVGIETADMLVNEVLSRHLRDHRAVARYAGLTGSPDESGRRRREKGLARAGNARVRCGMIQLAWRFLRFQKDSALAKWFDARTADGRAGTRKTMIVALARKLLIALWRLVTTGEVPQGVVLRPA

SEQ ID NO: 133913 - protein, 354 aa, unidentified
MPKSASTQIAVIGIDVGKNSFHMVGHDSHGAIVLRQKWSRGQIEARLANLPPCLIGMEACVGAHHLARKLTAFGHDARLMPAKYVRPYAKGQKNDFNDAEAIAEAVQRPTMKFVAVKTTDQLDLQALHRVRERLVSQRTGIINQIRAFMLERGIAVRQGIRFLRTELPIILASRTDMLSPRMLHVIEDLAGDWRRLDERIETLSREIETIARQDAGCDRLMSVPGIGPIISSAVVAAIGSGDVFSKGRDFAAWLGLVPKQISTGDRTILGKISKRGNRYLRVLFVQAAWVVLVKPVSWERHGLKSWIEAAKKRLHHNVLAIALANKLARIAWAVLAKGRDFEATRTLDGSTKPA

SEQ ID NO: 133914 - protein, 358 aa, unidentified
MYKFMKKFFIGVDVSKDTVDVSFFDDDRMKSPEYLAQYSNSPKGFREMVKDLRMCCHGISSGQWLFCCETTGRYDHPLCHWLVDHGMVVWRESALQIKWSSGIQRGKNDRVDSLRIAEYAWRHQDKMQKFVKPSESLSNLKAAFTHRRRLVEKRTATRCQLKSMSSEKGLSASLARMIVRDLSREIERLSASIATMDESIQEIIRSDSELDRNYRHIISVKGVGPITAVALIVCSGNFKAITSAKKMACYCGVASFRSQSGTSINRKASVSNLSNRQIKSLLSMAARSASRSNPVFAEYFNRTLSRGKPVALVYNNLRNKIITVVYKLIERNCDFDVDYMRMHSTGQRANEPAIRETV

SEQ ID NO: 133915 - protein, 356 aa, unidentified
MNSLTDLREVVDVVIGVDTHVLTHSAAVIDAATGGVLGEITVEATAQGYVELVEFAGEHATLRAWAIEGTGGHGAGLSRHLTGRQEIVVELDRPKRAKRRNGAKSDPLDAIRAGREALARTRLGTPRSGGDRQALSVLLAARRSAVHAATEAQQQVFSLVIAAPEPIRARFRGQKLPGMLTTAAGLRVHPSWDVETTTTVIALRSLARRFRVLTKEAAEHQKAILAIVCSWRPELLEQLGVGPIVAATVLCAWSHPGRIHSEAAFAMLAGVAPIPANSGQVTNRYRLNRNGDRQLNRALHTVVQSRIRYHDPTRDYVARRTSEGKTGREIKRCLSRYIARDLYRLLEVAPTWLDGP

SEQ ID NO: 133916 - protein, 456 aa, unidentified
MHKFYLGADVSKGYADFVIIDAKKQPVEKNFQLDDTFEGHCLLYNKLYTFCKDHPDSVIYAAVESTGGYEKNWYHSLVKFQSTLSLNTAHLNPFGVSHNRKAGMKRNITDKISAQNIAEYMIAHPEKVSYQPQDYLASLRKQWGFVKMLTKQSTQLLNQLESVVYNANPEALIYCKDGMPDWILKLLKSYPTASRLAKAKIKSVAKIPYISSERARNLVAAAKKSVACTTDKVTEQLVIATVKQIIHLKKVIKRQSEIMANECSIHEVELLKTFKGISDYSAIGLILNMEAVERFASTKKLASYFGIHPVYKKSGDGTWGIHMSKKGRKEPRHILFMVAMSAIKCNPLIRSIYLKHTQKGMKKMAAIGVCMHKILRIVYGMLKHNRAFDPDIDRRNREKIVQCKADVCRDKNRRYQDYDPKAPISRRQKMQRKERELSHSDKHTKSGISAPVPKAA

SEQ ID NO: 133917 - protein, 337 aa, unidentified
MKRYLGVDLHRTQFTVCTRLENGRTYLRQWPVRELRLFAAQLRKDDELAVEATGNTRLFHDAVAGKVARVVVVNPSQFKVISQSIKKTDRNDAETLALYLSKDMLPEVRMKERNQREMGHLAQTRDLLVKQRSALKAKINNLLSAEGINLKKEALSSNKALDRVLALPLSPILAAEARVLVAQIRSLTASVAELEQLIEKEGPKLPGHENLASIKGIGPVSATVILSAIGKVEDFDDAGKLAAYLGLVPRVQNSNETERSGHITKQGNKLARTALVQCALIAKRYSSYLQNFYQRIQRRRGGGKANIALARKFLGVIYHTLKNNWVFTDFPNFVLAS

SEQ ID NO: 133918 - protein, 418 aa, unidentified
MTSPLFVGIDVSSKHNVVCCLTRDEVKRPLSRFTITNNRPGIQELKDRISKLVKKHGFEQVLFGLEHTGSYSTHTAIYLQQHLDFGVSDKLVYALNPSLIKEFKKANFLDAPKNDRVDAWYIAAKLRAGNLPHPYTWSEPQMALQRLTRARYHLMQDLTRESNFLLTNLYLKFSDYTIAGPFKQNTLGVTSMAVMEEFTSVEELVDISLDELITFLVHHGKNRFDDPEAVARSLKKAARSSYRLSDSMADSVNLAMASSIRVIRAIQQELKVLKKAIMDHLETIPQTLDTVPGIGPIFASGILAEVDIHQFQKQQQLAKFGGIAWNQSQSGDFTANRTRLIQSGNRYLKYYLFEAANSVRVHDPVFAQYYAKKREEPKEFANKRALALTARKLVRLIFYLLKNNQIYHPEGGMPQNHK

SEQ ID NO: 133919 - protein, 319 aa, unidentified
MHCIGVDVGKQELVTYDGEKERIFPNDPKLSQFRRFIKATTDPLIVFEPTSTYSRRLETFCRTEKIACCQLNPRVVPHYRQVGKGRSKTDKTDAELLHRYGIERGPAEAVQLTYDALAQAVATHLACYRVVQKARVAYQGLAEALMQDPATSKSLLRGLLREIRELKKKEALHLTHAQAVVATDEDAARRFEAVLTIPGIGPITALTLQTLFRKSPQADRRQIVALAGLDPIQYRSGTSVHRKTRISKRGNREVRKRLFEATLSAARFNPTIRVMYERLKEEGKPDKVARVAVARKLLLIAHAIYKTGEPFCSSTLKEA

SEQ ID NO: 133920 - protein, 496 aa, unidentified
MSAFLRRSGQNPHRWATKGMKSKKELLAIKKHIKRKSAKAKHNRLLGIHNPHAAGADIGATEIYIAVPPDRLEMNVRCFGTFTQDLRAIVQWLREYKVTSVAMESTGVYWIPLYELLEQEGFEVYLVNARHVKNVPGRKSDVQDCQWLQYLHSVGLLRGSYRPAQDICAMRAISRYRDNLLHFGAQHLQHMQAALDQMNLRLHHVIADVSGLTGMAIIEAILAGERDPRQLAKLRDPRIKASQETIAKALEGNWRVEHLFVLGQALQSWKQVQQQLGQCDQKLEELSSQLEGKIDLANSPLPPSAKYCGREPRSKNQPNGPWREELYRHFGVDLTEVPGLSLGVVQTLFVELGADLSAFPTPRHFAAWMALCPDNAITGGKVIRRGTRRNRQRIRLALRLAATSLHHNKTHLGECFRRLRARLGAPKAITAMAHKLARIIWHLITHRVGYDESIFAEREEQLLRRKQRQLRNLAHSLGFTLVPNPRPAATSNAEVS

SEQ ID NO: 133921 - protein, 406 aa, unidentified
MSEKVCGVDVHRDLLVATILSGETETKETRHFANDPDDIDHLKEWLKGHECKRAVMESTSIYWVPLYLALEESGFEAVLANAHQVKGIPGRKTDQSSSEWLAHLLRGGQIKPSYVPDKRLRELRELTRLRVKYVQNRTAFKNRCQKVLNRVNIRLRSKLSDVFGKAGMEILNGLMAGKSVEYILEHTESKRLKSRCDEIKSVAKGALSENDIFVLKHLTETIKHLDEQIHQLEARIEMVANKEDIEIVSSVPGVGSRSAAAIVAEVGDAKRFSSGKQIASWTGLVPSVYQSAGTFVLGSITKQGSKWLRWSMVEVAHAGVRVRDSRFRALFLRVMAKKGKKTAYVAVARKMLTVIWHLLVNGEKYVEDGFEKPVRGSKVAYGGHVPLEEMAEVLRSAGYIVSRPNG

SEQ ID NO: 133922 - protein, 341 aa, unidentified
MQTTKYFIGFDISADDFSASCITSPDNLVFSTQKFLNNFDGFSGFVSLLSKHNIQPPEVIICMEATGVYSESLSYFLASRGLTLCIEAPHKIKNKTKDSPRKNDFVDAQAIAEYAYRYIDKLSVWKPKDEILEQIQVFLTTREHLTVQMTANVNALKTLKYKYYQTPLANQIYEQTINKLKEHIKQIDQEIKNLIDKDDSFRNKISLAKSVPGVGLLLAANLLVLTKGFTEHVNYKHTAAYSGICPYEQTSGTSLHKSPRSKKCGPAKLRKLLYLAALSVRTHNQNFKKYFLRKSAEGKNKRLVLNNIENKLLKIIFAVVNSGVAYTDYYKSVNPALLKTA

SEQ ID NO: 133923 - protein, 417 aa, unidentified
MAMKIVRFNCCGMDVHKNLVVATIGITDSKTNITEYFQRSFSTLNSDLYRLKDWLKSHHCSDVCMESTGKYWIPIFNILEDEINVRLTHPKYVKAIKGKKTDKKDSKWICDLFKHDLIKFSFIPPREIRELREIARYRYKLVCMRSSERNRYQNCMTVSNIGLASVISDPFGKTASNIMKEVMKANVIDDDKILKLVHRNCKNKDKILDSLHGYHIESDQRFKMEKSLDHMEYLDQLIDSCEVELIKRAYPLRRSFQHITQIKGISALSAILIISEIGIDMSQFESDKQLVSWAGLSPANNESAGKKKSVRISKAGQYLKPLLVQCALSAIKDKASYFGRKYSNIKKRRGHKKAIIAIARMMLVSIYHMILTGEEFQPTDHESLMSPKSNTDQSLTVEKALNFLKRSGIDISSILVN

SEQ ID NO: 133924 - protein, 442 aa, unidentified
MENLFIGIDYSKKSFDVSAYISSEKSKEEKMKLHLLGHQNFSNDETGYIQMLSWLGTLTSLSPKHWLFCGEDSGLYSYSMSHYLYIKGFSIWLENPLHMKRSMGLVRGKSDKKDSGLIALYSYRFRDRRVDFVPKQDTIQRLQDLEAYRHRLIKAKKLLGDSSKELNLYEQTRDTAVLVYEKSMELVEQIESQLKEVEVQIQQVLKSDKEVYDNYERITSVKGISWKTAVVLLIYSHNFTRFETARQFACYAGVAPFEYSSGTSVKGGTHTSRLANMRVKSLLGMAAMSAKRFNKDIAEYYNSKKEKEIPTIITFKGFKQNNKNEQTEIKSDKSFEFYINIFKNNLSLDDIELWIKKIEESKHASQIKQALLLYLNNEKASIIKLKYQSIDPEDLEYLNAEIEQIDLKVSSLLSSISPVPLIVDLLDLLVASILILSKFELI

SEQ ID NO: 133925 - protein, 348 aa, unidentified
MTKPRYFIGIDLHKTVIQVCVLDHRGEVSEEFRLRLEKPEEGQEAIRRLTRWRATGHFVVEALGLNRWFVNACHAAELSITVADATKLGTRKLGKKTDRHDARELARRLFLGDVERYATTYYPSDAEYGVRKVLRVRHQFVGMRQQLCNQIRALLNAYFVPAPGSVLYTGRSLKALACLELPTAELTQCLQALASALQHTQGLIEQLTRQIRQQAQAEPVQTLTEQLPSVGPQTALTLRYELGELQRFDNAKQLCAYAGLVPRVANSGDTQHHGRLTKRGNPEVRWIVSEWAVRLLAGHPQAQAWARPRLRRMHQNKVRMALARRLLVGLYVSQARGEPFSLQRCLVA

SEQ ID NO: 133926 - protein, 320 aa, unidentified
MTYIGIDVSKDSFVAAYPTKSGYSTKSFPNTTSGVRKFMQSLPAESHCVMEATGNYSMLLLYLLQQASIPVSMENPQKIKYFARAMLSTTKTDEIDAKLIAIYGEKMNPAPFKIPSESIILLKQKRTVLRQLKKQLTAMINLQHSLSVLPKQDPTAKAATEQTIKFLRKQISKIEEEITNLSNKEFKRQMELLTSIKGIGENIASALIMATGGFTYFSSAKQISRFLGLCPTYQQSGTSVNIKGHINRNGDTHLRSLMYVVAFSSIRSNTACRETYERLRSNGKSGRVAIIAVANKLIRQAFAVVTNNRPYIDGYVPSLA

SEQ ID NO: 133927 - protein, 347 aa, unidentified
MEYVGIDVHKKDSQICLLTEAGEVIERRICTEPERFAAVLGGRPRARILVEASTESEWVARCLEALGHEVVVADPNFAPMYATRTRKVKTDRRDARALQEACLLGAYRPAHRLSDAQRHVRGRLAVRDALVRTRTGYIALARALLRQHGWRVPSGSAETFSQRVMALSLPGRLLSEVAPVLAAMRTLNQQLAYSDRVIETITRPDPRVQRLRTVPGVGPVTAAAFVATIDDAQRFHRAHEVEAYLGLVPRELSSGESQRRGRITNAGNTRMRWLLVQAAVSILRLRDPRTAALRRWATGVAARRGKKIALVALARRLAGLLSAMLRDGTTYTPRGVPRHAAEVAAPV

SEQ ID NO: 133928 - protein, 395 aa, unidentified
MSLIEPMEPPMQKLNDLSQSRIVLKQDSTLIAVIEMSQSSWLVAGIVPGVERQPLKKLAVDESALLKLLNRWREEAEKAGRRIERIAVAFETGRDGFWLARWLRARGTEAHVIHASSVAVSREHRRAKTDRLDTELLKRVFLGWLRGERDHCKMVAIPTIKDEDAKRPHRERESLVGEQTRIVNRMKAALVRLGIRGFNPKLKRAAGRLEDLRTPEGEPIPPNTLAELRRDMERRHLIGGQIRQIQDVRLERIERAPSDRPHAMVRLLARVIGIGIETADMLVQEVLSRTLRDRRAVARYAGLTGAPDESGAKRREKGLARSGNERVRRGMIQLAWRFLMFQKDSALAQWFRARTENSRGARKTMIVALARKLLIALWRLVTTGEVPAGVILRAA

SEQ ID NO: 133929 - protein, 391 aa, unidentified
MIYVGIDVAKDKHDCFITNSDGEVLFKSFTISNNRDGFETLFQKIESVSDDLTKVKVGLEATGHYSYNLLGFLLDKSLTTFVINPLHTNLYRKSLSLRKTKTDKVDAHTIASMIMSDVNLKSYSDTSYHNEELKSLTRYRFDKVKERAKLKSSVSRLVCILFPELEKLVPTLHMASVYALLSEFPSAHAVASVHLTRLTNLLSESSKNRYGKDTAVRFREAARNSIGSNMPAKSLELKHTIKLIQEFTSEIDEIETEIKSIMDTIHSPILTIPGISYRMGAMILAEIGDFSRFDSPDKILAYAGMSPSTYQSGQLDNCYSHMEKRGSRYLRYALYNATKYVCHWDKSFGTYLAKKRAEGKHYNVALSHATKKLVRTIYAMEKSGQAYNKAS

SEQ ID NO: 133930 - protein, 377 aa, unidentified
MKKVRFLGLDVHAETITVAIAEPDGEVRSLGTIPNREESVRKLVKKLSPAEQLQACYEAGPTGYVLYWQLTGLGVKCEVVAPTLVPVKAGDRVKTDRRDATKLARSYRAGDLTAVWVPDAAQEALRDVVRARESAKQDQLRARHRLSKFLLRHGRRAPFGVRAWTLRYMKWVREQVQFEQPAQDYTRLDYVHEVEHANDRVRRLEEAIGEAVKLVPVAMREVIQALQALRGIAQISAVTIVSELGQISRFAGARQLMAYSGAVPSEESTGQRIRRGAITKTGNAHLRRVVIEAAWAYRHRPAIGATLHKRQQGVCAEVKEIAWKAQHRLHKRYRSLAAAGKNQPKLVTALGRELLGFIWAIGAQVECHPSQAHRLAA

SEQ ID NO: 133931 - protein, 355 aa, unidentified
MSKIKHIGLDVHQASISVAVLDESGKLVMQSVIATRAAAVLEFLGGLRGTLHITFEEGTYSAWLYDLLVRRVGKVVVCNPRKNALLKKGNKSDRIDALKLAELLRGGILSPVYHGENSTRTLQELGRSYMTVTLDATRVMSRLKAIYRGQAITYGGKKLYTRRHRGEWLKQLKQPGLLRRAERLYEELDLLQQLRRQAKQELMAESQKHPVCERLRTIPYLGPIRAAVLAARVQTPHRFRSKRQFWAYCGLGLETRSSGDYQQIEGQLKRSRKKVLIRGLNVDHNHDLKNIFKGAAMSASIFSGPLQEFYRERLAAGIKPEMAQLTLARKIAAIALTIWKKGESFDPTKLKAQAA

SEQ ID NO: 133932 - protein, 347 aa, unidentified
MDKVTVIGMDLGDKNHKAVVLAADGTEIERAEVSNTPDEVQEFLTRHPGALLAVETGTHCRWISRLAVGMGHEVLVGNARKLRMIWNSSRKNDWNDAEMLAKLARADRSLLVPVKLRDDESQELLRLVKARDILVKHRAGIVNMIRGFCKAEGGRMDGCTTEAFVRQEFDVPKVLREVTKPLFAVLRELSKKVALFDKILVQSLEKKHREAAASVMAINGVGPVTAAAFIATVGNPATFGKPRDAGAYFGLVPRQDQSGQSDRQLRITKEGNTQVRALLVNCANYIMGPFGKDCDLRRHGLRIAARGGKNARKRAKVAVARKLAVVMLALLQSKKEYCPLMGDAYMA

SEQ ID NO: 133933 - protein, 448 aa, unidentified
MAHANRLSRGDLRRNARLDRLRAVIRRDHAVLAIDLADATQVVVLADHDSKVLTRRTVRCSAWKLDEVLGWGLAAARARGFAGVVVACEPTGHRWRVVAEHAAACGLELVCVQPLLVRHAREAEDFTHDKSDAKDALLIARLVGQLHCYLPERPTQAWARLRHLGVRRVEQITLASAAQQRLRDLLECAWPAVLAPAVAAWPLDSLTWRAALTVASCDPSRIRTLGWARLVRAVDRELPRWGTTRCCRRILRAIWTAAGDPQGVAVQRAGALERAALVLADFHHALGELAEVETRMTAILEELGLAGLVATIPGVSVTGAAAILAETGDPARYDSARAMVKHAGLCPRDNTSGAFAGKTTISGRGRPLLRLAAWRASWGALPHNPVFAAKYAHLTSRTSNPLTDGQARTAVAAALLRQLWVVCVTGQAWDAARAGHASSSKEVTDPAA

SEQ ID NO: 133934 - protein, 355 aa, unidentified
MSDEKYIGLDVHQATISVAVRDSQGNIIMESILETKASTILDFFAGLRGRLSVTFEEGTSAAWLYDLLKPRVAEVLVCNPRKNAALKQGNKNDKMDARKLSERLRLKDLQSVYHGENGVRMLRELARSYLTIVKDLTRVMSRVKALYRSWAIPCAGRDVYYTRHRKEWLDKIQEPGVRGRAERLYQQLDMLQHLRQQARRELLAESRKHAITAKLREIPSLGPIRCALAVALIQTPHRFRSKRQLWTYSGLGLETRDSGEYHIVQGQPRKRKKQAFVRSLNKDYNHDLKGLFKGAATRASVQPGPFQEFYQRSLAKGIKPTMVRLTLARKIAAITLTVWKKGENFDVEKLKSQAA

SEQ ID NO: 133935 - protein, 340 aa, unidentified
MNSTQVAVDLAKSVFQVAVSSTPGRIDEQHRLSRARFQRFFAAHAPVEVLMEACGTAHYWGRELESLGHTVSLLPPADVRRYRDGDKTDRADTKAILEAARNEAIDSVPVKTIDQQAITALHRLRSGYLATRTARINCVRGLLREFGVTIPVGASHLAPRAREAIEDGAVPAYLEPVLVDAITEVEELRRKAGDIERQLKGLAKHMPEATLLMSVPGIGVLTATALVAYVGDVRRFRSGRHFSAYLGLTPREHSSGLSRRLGRISKRGNSYLRMLLIHGARSVLRAAKLTEHPDGLRTWALGIECRSGHNVAAVALANKLARITWRVWRDQRSFEQHLAA

SEQ ID NO: 133936 - protein, 312 aa, unidentified
MNTIICGVDVSKGWLDAHVERSGAVSRFANDAAGVADLAAWCQGHDVELVVMEASGGYERLAFLLLWEMGQPCGMANARSVRYFAEAMGFLEKTDRIDAAMIARYGLVKQLKPMPPPCAAQQRLKALVARLSQVGGDLTIQKQRKSAAADTETIASLDEVIALLVRQSRRLEGEIASLIDDDPLWACLDRAFRSLKGVASRTVARLMAQLPEIGIVSNRAITKLAGLAPIANDSGKRSGRRPVRGGRAGPRGVLFLVASIVAKYDPHLAAFQQRLQVAGKEKMVIRIALARKLLVILNAKARDARSEFANAT

SEQ ID NO: 133937 - protein, 430 aa, unidentified
MKSNTQNAKIEAITENTLVLGIDIGSETHYARAFDYRGIEYSKKPFKFSNTEAGFMSFKAWIQDMKEMHEKDKVVPGMEPTGHYWFNLGKFLQDNKMKPVLVNPHHVKKSKELDDNNPTKNDRKDPKVIAGLIKEGRYMIPYLPDGIYADLRTASNMRFQIQSELTRVQNRISRWFNIYFPEYKTVYGKPDAISGMMILKKAPLPEDILTLGVEGVNQIWRDAKIRAVGKKRAQTLVEAARHSVGTKEGATAARIEIRMLLEDYESRNSRLQEVMLLIEELVKEIPMAEKLMEIKGVGIKTVSGFLAEVGDITRFSSPKELQKLAGLALVENSSGKHKGQTTISRRGRKRLRYLLFEVAMSLVGKNPEFGTLHHYYTTRKINPLKKMQSLMAVAAKLIRVFYAMLTKGVEYDPAKMLGDIKRPEAYMQAA

SEQ ID NO: 133938 - protein, 448 aa, unidentified
MSNTTNRARNVLTRGDRRRNAKLTRLRSIVRPDLAVVGIDLASTKQAAVVTDHDSITLGRRMFDGDPWVIDDIIDWALPIAAEAGFDGIVVGCEPTGHRWKPVLERCRARGIEVVCVNPMLVHRGREEEDFTRDRSDFKDSTIIARRVADRHCYIPYALEGNWCRLRHLGARRNDQLVEATAARQQLRDLLECVWPAVLATAAKPLEAMTWRAAMAVSCDPDEIRAMSWDSFAAAVTAELGRWGGKRRNLRILRAIWAAAHDPGGVERERPAALERAGDAIRDWRRALDELDDVQARMTGVLDDLGLTELVCTIDGLSPVGAAAILAETGDPARFDCARTWVKHAGLCPRANESGTFAGTTKVSGRGRPALRTAAWRAVWGALPHNAVYAARYHHLRTRADNPLRDGQARAAIAAALLRQLFVVVTRRVAWDPAIAAGTDQEVTATAA

SEQ ID NO: 133939 - protein, 312 aa, unidentified
MDAIVIGIDVSKDRLDIATHPSRDTFVVARNEEGLKDLIARLAPLSPQAVAVEATGGYETVVAATLSAAGLPVLVVNPAQVRAFARALGKRAKTDPIDAAVIAHFAAATKPDIRPLPDETTRLFAELLSRRAQIVQMIGAERQRQKRLTGRRQQNSIARLLLALQKELSSLEGDIDEAVRGSPAWREKEDLLASVPGIGPVIARTLIAEMPELGLLDRRQIAALAGLAPWTRQSGQWKGKSRIGGGRAVVRTALSMGALVAGRHNPVLKAFRDKLVAAGKPHKLAAIAVARKLLTILNAIIRDRTPWNPQIA

SEQ ID NO: 133940 - protein, 345 aa, unidentified
MELHTIGIDLGKTVFHLVGLNRHGDVVVRKKFSRIQLLRFTANVHVELMGMEACGGAHFLGRALREQGHEVRLIPAQYVKPYVKTNKSDYIDAEAIAEAVARPTMRFVPIKTDDQLDLQSLHRVRERWVMRRTAVINQIRGLLLERGITLRKGRCHVGAALPGILEDADAKLSGALRMLLAQLKLELDHLDLRIDEADALIKKTAHENEACQRLMAIPGIGPVTATALIAAIGNGAAFRKGREFAAWMGVVPREHSTGGKQKLLGISKRGNSYLRRLFVQGARAVMQQRTKQSPGLSRWLAQLTSRTHRNVAGVALANKLARIAWAVLAKNESYRPPVLADVAAA

SEQ ID NO: 133941 - protein, 392 aa, unidentified
MVQNNDGDKLEPEPAVQTTLNAIFFSMELSRSVWMITSILPGGGERMSRHVLKAGDVAGLLERLELLRKKAKKRTGSEFPFVAVQEAGLDGFWIHRMLEQHDIESHVVDSASIATSRRRRRIKTDRLDGEMLLRALLSFKRGDPRVCAMVVPPTPEEEDRRRNSRERKTLVVERVKIVNKIKGLLFCQGIVGFEPLGRYRRKRFEELRTGDGRSLPPHLKAEITRMLDRIELILLQMKAVEKTRDELVASAPVDENVPGCAAGLMQLKGIGPDFAEVLWSEGLYRHFDNRRQLASYAGLTPTPWQSGSISREQGVSMAGNPRLRTVMVQISWFWLLHQPTSALSKWFQERVKLDGGRRRKPAVIALARKLLIALWKFIRHGVIIEGAVMKAV

SEQ ID NO: 133942 - protein, 353 aa, unidentified
MATALMIDVVAGVDTHSETHHVAVLDSVGRLLGTREFRAQPAGYVELASWVGSFGRVVVIGVEGTGSYGAGLTRCLRDHQIRVIEVNRPDRRTRRVRGKSDPIDAESAARRALSGVEKVVPKDTSTVVESIRVLRVARTGAVKSRTAAYTQPKDLIITAPEPLRSSLRGKSLHRVSQEVARLRPDSTQLAAPLQATKSALRSIAVRVGALNSEIAELDKHLKTLVAAAAPRTLALRGVGIEHAAQLLITAGGNPERLRSEAAFAALCAACPIPASSGKTSRHRLNPAGDRDANRTLYMITISRLRYCARTRAYVERRQADGLSKREAIRCVKRYIARQTFHTIRADLAAKANP

SEQ ID NO: 133943 - protein, 322 aa, unidentified
MAQDDLVVVGIDVAKDKVDACIRAFALRQVFPSAAQGHRKLIAWLRKHKVTKAVMEASGGYERDWAKVLRQAGIEVRIVDPKRVRSFALSAGRLAKNDAIDAEMIAWFAETFSEAPSQRHDAAHEELLALVKARKGLLDLKTRLQSQNEHAAPGPVQKAHARVVKSLATEIAKLEAAISTKIKATPDFAERTEIIESVPGFAETTSANLIAGMPELGQVSNKIAAALLGAAPYDDDSGHRRGERHIKGGRRWVRNAIYMPCLGAATQNNPVLKAFYHRLIAKGKPPKVALVACMRKLIIILNSLIARRQKWDPSRYPHSERA

SEQ ID NO: 133944 - protein, 408 aa, unidentified
MKTLHKRCAGLDVHKVEVVACLRVISKRKVEREVRRFPTTTRGLLALAEWLESAGCTHVAMEATGVYWKPVWHILEGRFSLILANAAHVRNVPGRKSDVNDATWLADLLAHGLIRSSFVPPPAIQELRDLTRTRRQLTREIVQHVQRIQAVLEEANIKLCSVITDIMGASGRRMLKAIIAGETDAEKLAALGHERLGCTRAELVEVLTGRVREHHRFLLGQHLRTIEQLKDSVAAFDARIEAALSPFHDIVERLEEVPGLAATATETVIAEIGTDMSLFPTAGHLLSWAGFAPRLDESAGKHRSTRIRKGAPWLKPVLVQAAWGAARKKNSYFQAQFLRLKARHGAKKAAIAVAASILTTVYHMLRDGTCYQDLGPEYFTRRNPAQAAARLANRIRNLGYHVEIRAAA

SEQ ID NO: 133945 - protein, 403 aa, unidentified
MYNAVGIDVSKGKSTVAVLQPGGTIVKKTFEVEHSISGLKELRDYILSLDGDTKAVLECTGRYHEPILHSLSDAGIFVSAVNPHLIKNFGNNSIRKVKSDPADAKKIARYTLDNWAELQEYSSMDTTRTQLKTLNAQLDFFTKQKASAKTNLISLLDMTYPGVNELFSSPARSDGSEKWVDYAASFWHVDCVRKIGLKSFAERYKAFCKREGYNYSESRAKELFEGSKELVAVFPKERSYKDLIEMSIKQLRTITESTVCIKNEMNELAATLPEYSTVMAMCGVGKTLGPQLIAEIGDVSRFSHREAITAYAGVDPGVDASGKRVNRSNRASKCGSSRLRKTLFLVMSVLLKTKPDDAVYRFLAKKQSEGKPYNVYMTAGANKFLRIYYGKVKVALAAQAKSE

SEQ ID NO: 133946 - protein, 336 aa, unidentified
MRAIGVDLHKTMFVVCVLEGETKEFHQYKIKEIEKFAETLRSNDYVSLEATGNTNYFVSKIRDKVKKVVVVNPAQFKIISRSVKKTDKQDAELLAFYLQKDMLPEVRMTDDQSSQLKSMTSTRDKFVKARSVLKNKIHNILIYYGIQSKKEDFSSNKKLNQVLEYNISEGAKFELEIIVDEIKHLNENIKKLEEKINAIGSRMKGFENITSIKGIGSKSGAILLSIIGDVNDFKDDKKLAAYLGIVPKVSQSNESLRQGRITKHGSKLGRTTLVQCTLIAKKYSPYLRDFYEKIKRKRGSGKAIIATARRLLSIIYHTLKNNWVFEDFPNFVLKKV

SEQ ID NO: 133947 - protein, 392 aa, unidentified
MFYVGIDIAKQNHEASIIDLDGKFLCESISFTNTQKGCEKLIALMEKFSATPENAVVGMEATGHYWLSVYSYLLEKGYDLKVINLIQSDSFRKIYIRQTKNDSKDSFVIAQIMRFGQYSSTYLSAENILALRQLSRYRLALVDECSDWKRKIIALLDQVFPEYESFFSDTFGVTSKELLLKSSTPEDMLSVSTCKLSNMIDKCSHGRHGRAKAKEIKNAASNSFGIKIAKDAFSFQIKQMMSQICFIEEQPEELELEISKLLHETNSVITTINGIGDVLGAIIVGEIGDISRFDSAPKLVAFAGLDVKVSQSGQFNGTQMSISKRGSPYLRRAIWTAANRAAFSDPALSEHYQSLRARGKHHLIAVGAVARKMCNIIFAVMRDNKPYVPNCK

SEQ ID NO: 133948 - protein, 391 aa, unidentified
MLRLMTPPEPDTHYERAPLVEYGWFASANFHSEERPMNEIKYIGMDVHQSSTSIVVLNAAGRVVTSAVVETRGQPLVAFLQGQRGTLHLTFEEGTYSAWLHDLLWRHVSRLVVCDPRHNALLKSGSKNDPIDAHKLADLLRLNALRPVYHGQSSLGTLKELSRSYLALVQDSTRVMNRLKALYRSRAIACRGSKVYSPRQRASWVGQLKEAGVHKRAELLYQHLDVLSQLRREAKRALLAESRRYTVSRILRAVPGLGPVRIAVLLAMVQTPFRFRSKRLFWAYVGLGLVTRISAQFALVNGQLERSGKAPAPRGLNPNHQRELKEIFKSAASTALHRPGPWQQFYTQRVAAGRKPELVRLTVARKLAAVTLHLWKKGERYDVKHLKSTAI

SEQ ID NO: 133949 - protein, 422 aa, unidentified
MNINTDSKRRQVPDDYLVAGIDPHKKSHTMVLMTREEKVLTSLKFDNSKTGFEHAVKRVDDQISKSGSKGVVFAMEAGGHYWRNLAYFLNKRGMWFCLVNPFTAKRLREGKDINRAKSDMRDARVMAELVISNGVPQTNLPQGIYAELRAVYNAYQRLIKERSRIKSRMKSLLDQLFPEFCMVFSNVCSKTAMQVLGCCLAPTDIARMQEAQFIARIREGFTGRALKIHSLQKLYQLGKTSIGAEAGARGLALELNLMTQQLLLLSEQIEKTKHILQGLLLSIPESRCILSIQGVGHIAAAGILAETGPLQAYRNSGQLIKLAGANPISWESAGKRHSITHMSKKGRPKLRSCLWIAAIALLRSNPDFKEWARVRRERELHMHPLKPRETVGAVANRLLRIVYALVKNGSMYCLPKANEALV

SEQ ID NO: 133950 - protein, 374 aa, unidentified
MIKENYIYVGIDLHKETHIAVMIDCYNQKLGEITFPNRPADFPKLVAKVKKCNTDGKTIVFGLENAYGYGRALAVWLIDKGYLVKDVNTAISHRQAKHRGAMYRKSDSDDAEAIALATLNMLDKLPDAYPNDAYWSLGQLVHRRDNIMKQRTRLVNQLHEQLCIAYPSYKQFFNDISRPTALYFWEHYPSRKYLKGKSVEDLRAELVPVSHNKCSTRTCEKILDAIAGDKVKNNAYQDARDMVTLSIVSDLQHYDKQLAEVDKMLEQMYKMLGCTLTTIPGVNVITAVKILAEIGDIKRFSNANKLAQFAGIAPLHLSSSGKGKDLATKQGNRRLQATIYFLAIQMVQISSKGTPRNPVVRAYYEKRKAEGKTS

SEQ ID NO: 133951 - protein, 375 aa, unidentified
MKEFSKYVGMDVHKETIAIAVAVAEARGGEVRYLGEIANAPEAIQKLVKQLRKEDAQLSFCYEAGPCGYGIHRQLTDLGWDCQVVAPSLIPKKAGDRVKTDRRDSLSLARLHRAGELTAVWVPDEAQEALRDLTRAREDMKHLQRQAKQRLSAFLLRRGQSYGGKSAWTQAHYRWLEGLKFSQSVQQIVFQEYVDTVKLLSQRVAALDEQLSSAAAESILWPVIDALMALRGVSLLTATTIVVEIGDLRRFASAPQLMAYLGLVPSEHSSGGSKSRGGITKTGNGHVRRVLVEAAWTYRHPARKTACLQRRAERTPEAVQDIAWKAQKRLCARYRSLEGRGKLKVQACTAVARELAGFIWAIGQALPQPATQAER

SEQ ID NO: 133952 - protein, 410 aa, unidentified
METIVLRAGALDVHKAQVTACVRVPGRGRERRQEVAEFQTTVRGLLSLRDWLKAHGVGQVAMEATGVYWKPAWAILEDEFDCLLVNARHVKQVPGCKTDVSDAAWLCQLLEAGLLRRSFVPPKPIRALRNLTRYRKAQIGERQREANRLHKLLEDTGIKLDCVASDILGASGRAMLDALVAGTSDPEVLAELAKGKLRAKIPALREALVGRFDAQHALIVSAILAHLDFLDEQIQLLSDEIEVQLAPFAAAVELLCTIPGVQRRTAEVIVAEIGTDMSRFPSDRHLASWAGQCPGNDRSAGKRRSGKTRHGSKWLDTALTEAAMAATRTNDVYLAAQYKRLRPRRGHGRALGAVKHSIITGCWHMLSTGELYREAGGDYFTRRDPERATRRLVAQLERLGHTVTLQEAAA

SEQ ID NO: 133953 - protein, 365 aa, unidentified
MNKNSNPAKTNSQSKEVFAFYIGIDLGDKYSDVCVFDAGGEVSKQFRLAMKEADIRKHFSSIGRSRVAMEAGGQSRWVAEVIESCGHEVYVSNTRKVPYIHDSDDKDDAGDAHKLAELVHFKPRLLHPIQHRSKQAQADLSWIRARQALVDVRTQLINTVRGISKSFGERLGRCSTEAFTAKMAEKIPGAIGGAVAPLLELIDQINERIRYYDEMEEHIARERYPKYGLLEQVNGVGVHTALSYMLTIGDPERFEKSRAVGCFLGMRPRKRDSGSSQPQLGITKAGDEYLRKTLVNCAHYILGPHGKDSDLRRAGQRICKRGGKNAKKRAVIAVARKLAVLLHRLWVSGEVYEPLRNSKKVAAAA

SEQ ID NO: 133954 - protein, 393 aa, unidentified
MKQRKNAESEPGNDTERTSSIFISGLPACLNPDPDSRLTSIVKVVRLSSNSSFPKSVKNKSMENFYFIGVDVSKKKLDFCVMFEGKVVHEEETANHQSAIMSLLHHLEEDYGIDNTRMLVCAEHTGQYTFPLACACKAVECRLWLENAAEIKYSSGVQRGKNDKVDAKRIAIYASRFQDKVHYYERPTEDIERLKQLESERTLYVTDLAKYKGQMKDQKDYMPKALYERKMKRLQALMDDLEEAIQSITDEIDEVIASCPVLSRQRELLMSIDGVGHVVATNMIITTEAFTRFDDPRKFNCYAGVAPFSYSSGSSQHSKARVSHRANKVMKRLLHLAAVAVTHRIGGELKKYYERKVAEGKNKMSVINALRAKIVARMFAVIKRNEKYKPILS

SEQ ID NO: 133955 - protein, 349 aa, unidentified
MQSKSQIRSIGIDLGKTTFHLIALGTRSQVVIRKKFSRAQLLEYTANLPSSLIGMEAGVGSHFLGRALREQGHEVRLIPAQFVRPFVKSNKNDYRDAEAIAEAVERENMRFVPIKTEDQLDLQALHRVRDRLVARRTSVINQIRAFLLERGISFRKGPASLRRQMPEILENADAKLSTAMRRLLDFLWQEWKGLQMQIESLNTELEQIASSDPSCVRLQQIPGVGPLVSTAVVSAIGNGAAFKKGREFAAWLGLVPRQWSTGGKAKLLGISKRGNPYLRKMFIHGARAAVLRVKREGSSLGKWMSGLETRAARNVVIVATANKLARISWAVLAKGNDYQPLHKAAVFSN

SEQ ID NO: 133956 - protein, 412 aa, unidentified
MEVQRNKVCGVDVHKRFLVATILSRDGTKQTQRFRMNPDELSKFRTWVVENSCEQVAVESTGIYWIPVLNAVEGYVDLILANAYKIKNTSRPKTDLTDSEWMAELCLNGMIKPSRIFPRDDRDLRSLTRARERYVNDTTREKNRIHKLLDSCNIRLSSVLSNMFGKVGRYILDGLLEGKDIDEIIEGIPVKRLMKKADQIREAVKNGLDITKIQLIRGSLELIAALEKRVDELEAEIRRRVVHKKENMRILMSVPGIGFISAVTILAEIGDFRDFEKPEKLAAWCGLVPSVYQSADKLITGKITKHGSRHLRWILVEVAQTVARCGSPKLKRFFLRIMERKGFKVAIVALARKILCILHHLLMNQEMYEDEVTKKEARIELVAPETSMCIEEMIEYMIKAGYEVKKKSGVGG

SEQ ID NO: 133957 - protein, 347 aa, unidentified
MLYLGLDVHSKWFTVNGFEKTTGECFKLKRVNNEPVAIKEAFASLPSPRWGALEAGTNALALHRVLAPYFEKLIIVSPNKVWDRRRDTSAKTDSRDAIALAEALAEGKLRGIYRPDEVLQIGRSLVRGRLQATRDKTRLTNQIYALIRSYGFLVEKKALTKKGRAWLGEVTLPEKTATVLKLQLERLDALQAHERQLEAEITRWATADPICRRLQTIPNVGPFTALVLRVEIGDIRRFKSADALINYTGLIPQVYQSSERMRYGHLTKAGNALLRYVAVLFAANVKRNRKDTPFKRKFYRLYHTHDSKELNVILARDFLGVIHSMWSKETDWEYPRPAAVRKTASVA

SEQ ID NO: 133958 - protein, 448 aa, unidentified
MSQGSGLSRGDKNRNARLTRLRGLVPVENAVVGIDLADRVQSVVVVDHDSKVLARRRVSRRAWELGPLLEWAMKEARAAGFAGVTVACEPTGHRWRVVGELAAARGMPFVCVQPLLVARAREAEDYTRDKTDEKDAVLIARLTTVLSCYEAENAASEWARLRHLGARRIALIEQITAVGHQVRDLLECCWPAVLSAAAQPLESKNWQAAVVVATAGSRGELDSVAAGGLAAFVDAVRAELPRWGGSRVSNRILRAAFDALTDPTGVAAQRPGALERIALLLDDWADARRKLADAEARMVAVLDALELTQLLASIHGLSPICAAAILAETGDPARFRSSRALVKHAGINPQQNTSGTLIGRSRISKRGRPGLRTAAWRAVWAALQSNTVLAARYQHLTTREKNQLASLQAHIACAGALLRWIHVVVTHRVPWNPAIAAGTPTQRSARAA

SEQ ID NO: 133959 - protein, 408 aa, unidentified
MDHAITGTPAETILHGALELSKNSWLLVQMDHAITGTPAETILHGALELSKNSWLLALQFPDRAQPSLYPIRGGDTEGLMAKLTAAGDRWAKMSGKAPSIVLCYEAGYDAFWLARFLKARGIECLVVDPASMQVNRRARRAKTDRIDVGMLLRALIAWGQGDRHVWSVVRVPSVDEEDLRRSHRERDRLVRERTAHINRIKGLLFGQGIRGINVKSKYKTLQIDKLVTGDGCPLPPRLASEITREIVRLALIQEQIATLERERDQAPTPCKATEKKRVQLMCLTGIGPAIAAVLTREVYYRQFDNRRQVAGFLGLATSPHDSGDVERSQGISRAGRGQVRGTMIQAAWLWLKHQPKSAITRWFVQRTAGQSGRIRRIMIVAVARKLAIALWRFLEQGLVPQGAMLANR

SEQ ID NO: 133960 - protein, 395 aa, unidentified
MKTKVSLGLDVAQAGVAYHLQDSDGRVLAAGRADATTAGWRQLTATLKHAHVGWADCLVVIEATGQWHLPWAEAASAAGATVFVLNPLIAKRVNSVGNAIRDGKSDPIDAEGLAETVARYHEKLERFRYRSRPADIGLRRLLGVRGAVRSALTNLRKAAGDLQALCLPELAATGLSPQHQRALLLEAGHPAAVAALELHRLRELAGEHTAAVRASARSSFAPASVAAASAPALQALLRSDQALDQQLDALDEQITAQAALVLDAEQLRRARTLPGFGPRTTPAILACIPAELFQTHPSHRAQANALQALFGCEPRLRTSGQWTGKIKISKRGIREGRTALYQAAFCALASDSDLKAYYDALRARGKHHKTALVDVMRKLVRRLVAVLDPKLPCPA

SEQ ID NO: 133961 - protein, 399 aa, unidentified
MLAVGIDISKSKSVAVILNQDGSMHTSPFEFHHTQPELDAFIKYILNSNQSATILMENTGHYHYPVLKAFREAGLPVCMVNAYQIKKFGDMDLRKAKTDKKDAVRIARYALEKSYSLVPYTSMEQKYEDLKFLARQYNQRMLTLKTNKVFLLNLLDETMPGITNILPLTTRTPETSLSVLFINRFKSYDRIKKMGKSRFLDAFEKIARKSRNRQTKTYGLAIYEAALRNITTRGENEYTLAAQDQCLELVCESQKAADSIIPKMQTLAETLPEYAVLRSMAGVGDRLGPLILAEIGDIRRFHSGKALNAYAGNDPPPYQSGTFESYNRHISKRGNAALRKYCFEVMQALKLTRPQDDPVYLFLLKKEQEGNPYNVAKMAGVDKFLRIYYARAMETLKQQ

SEQ ID NO: 133962 - protein, 335 aa, unidentified
MKEITTVGIDLAKSVFTVHGVDVAGRTVLRKTVRRERLMELVAALPPCLIGMEACGGAHEWARKFQVHGHRVGIMMARFVAPYRKSSKNDGNDAEAICEAVARPNMRFVPVKSAEQQAILSLHRVRQGFIEQRTATINRIRGLLAEFGVVLPQRAEQVRRAAVVVAEGLPVLAREAIADLRAHLSYLDGRITCYERQLVELARQREAAVRIQRVPGVGPLTASAITACISDGHEFANGRQFAAWLGLVPRQYSTGGKARLGRITKRGDAYLRTLLMLGARAVLQSAAQKSDRLSRWAMALRTRRGYHRAIIAVAAKNARIIWALLARNRAFALSA

SEQ ID NO: 133963 - protein, 348 aa, unidentified
MNQRYEKSRQYVGIDLHRRRSVIVRLDGEGEVLECVQIENSVPALIEQVGKAGVGAPVAIEATYGWYWAVDALTEAGFEVTLAHPRGVASMQGRRAKTDKLDAKELADLLRLDRLATAWIAPPEIRELRELVRYRHRLVGERSATKASIHAVLGKCGVIPEIADIFGPVGTKMLDALVLPEPYGSRVASQRRIIAVLSAEIAGVEVETARRLKDNPEYRALLTIGGVGPVMAAIFVAEIGDVHRFATADQLACWAGLTTRVDSSDRHTRYGHVSKQGSRLLRWAAVEGCQRAREPYLAGKRREIIERRGRRAQHIATVATARHMMKVVYYTMRDGHARCLDAPEPVAS

SEQ ID NO: 133964 - protein, 323 aa, unidentified
MATAATDGEVFVGIDVAQDELVAAIRPGDGVTRWPNDEAGHEGLARHLRDRHPALVVLEATGGLEQAASAALAEAGLPVVIANPKQVRDFARGVGKLAKTDPIDAAILARFGEVVRPAPRPAAGEAGRALRALVARRRQVRDRRVADQQRRLRADPAVRPFLDRAIAAATEELAELDAAIAARLAADPSWRATRAVLESVPGVGPVVAATLVAELPELGTLGAKQVAALAGLAPRTRESGKSRGAASIGGGRRGVRCALYLAAVTGIRWNPTIRAFYEHLLASHKPKKLALVAAARKLLGILNAMVRDGTLWDPPARESAPTP

SEQ ID NO: 133965 - protein, 389 aa, unidentified
MIYAGIDVAKDKHDCYIISSDGEVLEDHFTFPNNQEGFDSFLSLLKSFSTSIKNIEVGLEATGHYSNNILEFLHSNGLLVFVLNPLSTNLYRKGQSLRKTKTDKSDARFITMMLMTEHLKPYSPVSYHIRELKSLSRHRFRLVKERSRFKVSYSRIIDIIFPELPSHVWSTSQNSMLHTLLKFPNTKALSDCHLTSLTTTLKKYSKGKYTKDKALELREAARRSIGSTSPSQAFELQQVIRTILFLKKEIALLDNQIKNLVLALNSPLLTIPGISYISAGMILSEIGDIDRFDSPSKLLAFAGLEPSTYQSGKFTATHAVMVKRGSKYLRWAIMNAARLVCMRDETFKTYNHKKLAEGKHYFVALSHTSKKLVRVIYYLLKSNQPYCPA

SEQ ID NO: 133966 - protein, 345 aa, unidentified
MNKISVIGLDLAKNVFQVHGINLNGEVVVRKQLKRSQIRQFFAKLEPCLIGMEACGGAHYWSRELTGLGHTVRMMAPIFVKPYLKSNKNDRNDAEAICEAVQRPSMRFVQPKTPEQQAVLHLHHGRRLLVRQRIALSNHMRGVLSEYGIVLPQGAKAILQRLPELLEDADNDLPMLARHLLAELKAEHNQLIERIERIEARIKDWHANNNVSQRLASIPGIGVLTASALAATVGEGQDFRNGRQLAAYLGLVPRQLSSGGKERLLGISKRGDSYLRGLLIHGARAVIYHIQRRLKASQPGGNPWVEQLLLRCHPNEVAVALANKMARIAWVLMARNETGCAAQPV

SEQ ID NO: 133967 - protein, 357 aa, unidentified
MLYTGIDLHRRSIVVCTVDESGTIIDRRSMKTQPELVKTYFRQWTIEHQAVVESTTGWYWLCDLLRSLGVTIVLAHAKYLKAISYAKVKTDAVDAETLAQLLRMGYIPEAHQLPAEYRAMRDLLRQRMVMEHKRTNIIQRISSIMAQFNIHVDVSPSVPAFATFLERCNLPTEYRITLLMYHRQCIQTTEDRKQLEKYFKGKLRPTQALQLLMSIPGLGEITGAIVAMESGDMHRFANHKHFESYCRLVPGAKDSGGKHAHRSGSKDGNKYLKYAFTEAAIKAMMYYPEIKQFAQRLEERSGKAIARTVVAKELAKITYYLLTRGQEFKTFKGITIEKLRDWPRARKPVRITEEETA

SEQ ID NO: 133968 - protein, 354 aa, unidentified
MGDGSTGRDGRQYVGIDLHRRRSVIVRQDRDGNRLGDPVRINNDSESWDRVIATFGPAPEVVVEATYGWYWLADQLTEAGAGVHLAHPLGVKGFKYRRVKNDELDAADLADLLRMGRLPEAWIAPPATRELRELVRYRHKLVGLRSSCKAQVHSVLAKAGVLIAGSDLFGVDGRARLDNVELGSAYRLRVDSLLGLIDTLDAEIDRIARLVTDSLTGHPGYTAIQALPGVGPVLAAVFVAEIGDIGRFHRPQQLASWAGLTPKHHESDTTVHRGRITKQGSRLVRWAAVEAVQRVSGHTRLGQHRDRVAARRGRNIGVVAAARELLTLVFYGLRDHHIRALDTPAAPVASTPAA

SEQ ID NO: 133969 - protein, 326 aa, unidentified
MNAPELVFVGIDVSKDTLELALDDHSPTRRMSNGVTGIAPLGEELTALGARVGAIVIEATGGYERQVAVALCISGLPVMVINPRQARDFAKAMGHLSKTDAIDARVLSHLAATLHASERRERLLMKVPEPQQEALQALMVRRLQLVGMRVAESNRLAVSHRAQHKSIKAVLRVLDRQIEVIDRNIDSHLDEHFAGKLALLQGLKGVGRGTQASLMAGLPELGRLSRAQISKLVGVAPLNCDSGRHRGKRVTWGGRAPVRAALYMAALTAVRHDPTLMAFYQRLLANGKPVKVALVACMHKLLTIINAILKSGQPWSANHQTLQKTA

SEQ ID NO: 133970 - protein, 408 aa, unidentified
MYNAVGIDASKLKSTITIIQPAGVVIRKPFDVLHTSDELNTLVTYLKSLEGETRAVIECTGRYHEPVVKSLSEAGIFISAVNPKLIKGQKQNTLRKVKSDPADARKIAKYALDNWAELREYSSMNTTREQLKTLNSQFTFLMKQKVAAKTNLISLLDNTYPGVNKLFDSPVRGDGSEKWVDYAYSFWHVDCVRKIGLKAFTERYEAFCKKHHYNYQKNKPALLFEESKQLVAVFPKEKSYKLLIQQSIQQLRLASEHIEIIRKEMNELASTLPEYETVMSMYGVGETYGPQLIAEIGDVSRFTHREAITAFAGVDPGVNESGQFKQRSNRASKNGSTRLRKTLFQVMSTYLQNKPVNEPIYQFLDRKRAEGKPYLVYMTAGANKFLRIYYGKVKECLRNLERSQIEES

SEQ ID NO: 133971 - protein, 315 aa, unidentified
MSSIAPTRQVTVTRIICGVDIASSSLAARVGQDGAEATFQNSTEGIAGLAAFCHNHDVELVAMEATGGYEQRAFAQLSESDLAVTIVNPRAVRQFAQSMGRLEKTDSIDAGMIAWYAETKKSQPLCLAPQTQLELRARVTRLRQLTELRTTQLNQQRLVTNRAVQAGFRKMLAFVAKQIQELEKSIAALIDADPLWRELDQAFRTIKGVADRTVARIMAEMPEIGTLSNKTISKLAGVAPLAQDSGKHQGKRAVRGGRAAVREILFIVASVVGRHEPDFVAFQKRLRDAGKPPKVIRIALAHKLLVRLNAKAREV

SEQ ID NO: 133972 - protein, 346 aa, unidentified
MPETEVETFAGIDVSARELSVALRRGKGEDKPAMAKFSNHLSGHKALIAHLLRGGRRVRVCVEASGNYSLDLALTLQAHRQVEISVINPRRARRFAESLGQRSKTDPVDARVLCEYAARMPWVAWQPPSSVALHLRALTRAIADLGVIHTQQNNRAHASAASQALPVLVVKEMQRHQKYLEQRITRLRREALRLIAGDSELDRRFRLMLTTTGIAETSALQILGELAVLPDMLDARQWVAFSGLDPRLFKSGKSVEKRPRISRGGSRHLRRALYMPALVALRRDPYLRCFYQNLLARGKARLQAVVAVMRKLLHALFAMFRTNQPYDGSKLCCAVETAGHAIAACA

SEQ ID NO: 133973 - protein, 330 aa, unidentified
MWITIAPFVTLLREGVKGRVKTRKLQNDINAVSAVIAWLSKQHCKPEDVHIIMEATGVYHESLAYGLHKAGGRISLANPHRAREFARGMGMLTKNDRVDAYMLACYGVLKAPEPWLPPPEEVRHLSALLRRRDALVADSTREKNRLEKYLATDTPSVIAESVEAMIGQLNAEIKRLDRLIRSHLNQHPELKKDFDLLTSIKSVGYQLGLNMLVILRSHDFATAEQVAAFLGVVPVEKYSGTSVRGCPKLSKIGPPEIRAKLYLASLCGLRFNPLMKAMYERLCLRGKAKMCAIGALMRKLVHWCYGVLKTQKPFDVGYLPSYARSACKAA

SEQ ID NO: 133974 - protein, 361 aa, unidentified
MSLSSWLVAGLIPGVSREPLKKIDPDPERLLRLLYRWRDEAVAAGSKINRIAVAYETGRDGFWLARWLRNRGIDAHVIHATSVAISREHRRAKTDRIDTAMLRRGFLGWLRGEPGHCSMAIVPSIAEEDAKRPHRERDTLIHERTSIVNRMKSILIQFGVRNFNPVLRKANEKLDAVRTPEGIPLPANAVAALRRLMDRLRVIKEQVKAIEQTRLQRMQRNPADRMNAMVFLLVRIIGMGVETAEQLVREMLFRNFHDRKAVARYAGLTGSPDESGSKRREKGLSRSGNGRVRNILIQLSWRMLQFQPDSGLVIWYKKRTESARGSRKPMIVALARKLIIALWRYVNTGVVPEGFELRSAA

SEQ ID NO: 133975 - protein, 490 aa, unidentified
MNDLKLHRVIGLDLGVASQHSAVVLDGTGRVAARRRVSSTAASLGELERVALTGAAEGTTLIVVIEPTGPMWLPIAVYFGRRGHTVVRVSSAKAADLRRFLSRHAKSNGIDAETLARMPMVAPSGLHPVELSGADRASLDRRVRTVARLTREIGQRKVRIRALAQTAIPTIGAALGDDLNRTDLAVLERYAHPRALLAAGPARLTRLVHTESRGKLGAAKVEALRTAARQALELWAGDTAIALSDLAEEIATEIRLLRLTETERARHEQARDAAHAQVDPAGLATSLPGLGPVGSTQLLAAMGRPGRFRSAAAFKAFTGLAPKASETGNTDRKSQPMSKAGNRALRTQLIQSANTARQLDPQLAAIYHAQMTERGANHLKALCVVAARLAERAWLTLSRGEPYTIRDLQDRPVTPAEARALIDEQFTVPAAVRRRRRSKKQAGRASQHCTRQEESQPTAGHEVTSPSTTITSTPAAVNPDPTEVLTALPT

SEQ ID NO: 133976 - protein, 338 aa, unidentified
MKTYAGIDLHSSNNYIGVIDAKDKRLYSQRHDNRIEDVLKVLGKFKATLQGIVVESTYNWYWLVDGLMDQGYTVHLANPNAIKTYDGLKHTDDKWDSFWLAHLLRLGILAEGYIYPKHQRPIRDLLRRRLMFVRQRTSQILSLQSMITRNRGLNFSGAQIKRFRDEFIEKLFSDRHLVFTAKRNIETIRFLDRIVSEIEIEVKSQIKLKKQFVSLLTTPGIGNILGLTIMLEVGDIHRFAKVGNYSSYCRCVESKRTSNGKKKGENNQKNGNRYLAWAYVEAANHAIRNCAKAQKFFQRKMAKSKRVLATKALANKLTKATYYIMRDQVAFDSQKLFG

SEQ ID NO: 133977 - protein, 407 aa, unidentified
MGITCGIDWSESHHDVALIDEHGTVVARTRIDTGAIGFHILLALIAEHGGSVDDTPIALETDKNLLVVALAKAGFTVYPINPRAVARYRERYGQAGGKSDPGDAAVLAHILRTDRHLHRPLPAVSEEGRAVKALARQHQEAIWALHQTVSRLRSVLLEFYPQALQAFPNLKHKAALTVLAAAPTPAAGQRLTRGRVVALLRRSGRGNHPALVEQILTDLHTPALGQPPRVEEAYGHTVRGLVAIVIAMGQAVDDLDTELAREFDQHPQAAILRSVPGVGPVLAARVLGEIGDDPARFDNPQGLRAYAGTAPVTIASGRLRYVKARKVRNKRFGDACHWWAYTMLTKSAGARAHYDRRRAAGDHHNAALRNLANKLLGRLWWCLVNNQPWDEHGAWPDHGHTENPTAA

SEQ ID NO: 133978 - protein, 307 aa, unidentified
MQTITTIGFDIAKSVFQVHGVDSAGEVVIRRQLKRRYVLAFFQKLSPCLVGIEACASSHYWSRELQALGHSVRLMPPAYVKPYVKRQKNDMADAEAICEAVTRANMRFVPTKTPEQQSCLMLHRTRHLFIRQQTAVINSIRAHLAEFGIVAPVGRKGVTELLHVVADPSDRRVPEVARACLAALGTQLLRLKQQILEFDRLIMAWHRSNQTSKRLHYIPGVGPMLATALVASVADPRTFRSGRNFSAWIGLVPKQHSSGGKDRLGSISKQGDRYLRSLFVAGALAVIRYAKIHGTKHRPWLTALSTN

SEQ ID NO: 133979 - protein, 372 aa, unidentified
MQQECAVFVGLDTSKMKISVALAEEGRQGEVRFLGEVDHTPEAVRRLVTKLAGKYGRLLFCYEAGPTGYGLQRQICALGHDCAVIAPSLIPKRPGERVKTNRRDALTLARLHRAGELTRIWVPDPGHEAVRELVRAREAALADLRTKRQHLQSFLLRHGRIYPGPRPWTQVHARWLSNLSFEHPAQYLVLREYRQAIDDAEARLERLTQHVAGVVSSWSMAPMVEAYQALRGVAFLTAVTFVAEIGDVRRFETPRQLMAYLGLVPSERSTGEQVWRGSITKAGNPRARRVLIEGAWTDRYPARLSRPLQVRQESLPTVVRAIAWKAQRRLCARYRRLMAAGKRQTVVTTAIAREMAAFLWAIGHAVEPRPAA

SEQ ID NO: 133980 - protein, 391 aa, unidentified
MYVIGIDVSKYKHDCIIMHEDTGEIVRDVFSFDNSRAGFVQFISVLKTLNPTLKKKIGFETTGHYQDNLKMFLADNGLDFMELNALLVHKFKSSLTLRGVKTDKTDARLIANYLCKVEFKPYPKIVYNILSLRSLCKRHFTLIKDRTKYLISITNFLDRTFPELKPFLNDNIKSKTAMFLFRKYGIPSKIANMNIQSYELLRKLSRGKFSVAKFYKLKDLAKHTIGFTYPTDTFEIKSLLNVYDSINEEILKVETKISTLMSKINSKIPTIKGIGLVSAATIIAEIEDINRFVSPDKLLAYAGLDPRIYESGTMSSKGKMNKKGSVNLRRVLMNCAESVIMFNPAFYAYYRKKRDEGKAHRVAISHLARKLVRIIFKLETTQVDFDPSLVK

SEQ ID NO: 133981 - protein, 357 aa, unidentified
MFHFTTLFIGMDVHKESFSLCYYDMMANQFKHSTKVGPNVSYIVNYVNELRRLYGQDAEVLCGYEAGCLGFTLYHQLQAHGIPCIVMAPTTVMKEGSKRVKTDKKDAAQLAKALAFRSYRPVHIPTVEDEQVKEYIRMRTDHKVALKKIKQQILAFCLRHDFRYTEGSSNWTQKHVRWLRSLNPDGLYAEILTEYLLTYEKLVDQIERYDARIEQLGQSDSYQEKVSRLSCFIGIKTLTALSIVTEIGDFNRFATAQHFASYLGLTPSENSSGDKERRGAITKAGNSHVRRLLIEAAQSLAKGTIGYKSKELKRRQSGNRVEVIAYADKANERLRRRYRTLVLGKNKKQNVAKTAIA

SEQ ID NO: 133982 - protein, 345 aa, unidentified
MKYYAGPDVSVKETSICIVDQTGKICREVKVTSHPDDLIVVLKDPAWNMERIGLEARPLSQWLFEGLARAGLPVICIETRHTKAFLKAQPNKSDRNDARGIAQMMRVHLYRAVHVKTLTSQKRRALLTARKLLQDKAIAIENDLRGLLRNFGLKVGVVGSAKFGARIRELIESTLDLVEIVEPLLDARRKLREHFATLHRKLLMIARDDEVCRLLMTIPGVGPVVAVAYTATIDIPQRFKNSKAVGPILGLTPVLNQSGESHRVGRVSLCGDGMMRTLLYDAAQVLLNRVAKWSWLKAWAMSVAKRRGLQKAMVALARRLAVIMHRMWSDGTEFCWSREKLPASA

SEQ ID NO: 133983 - protein, 438 aa, unidentified
MVAGIDIGGTEHWVCGPEGDDGERQVRVFGATTPKLKEMAEWLRQQGVASIAMESTYIYWIPVYEVLEDAGFEVLLVNARTLKNVPGRKTDMHDCQWLQLLHSCGLLRGSFRPKDEICRLRALQRQRANLVDERSRVVHWMQKSLDQMNVRVHRAVSDITGVTGMKIIRAIASGERDPKVLAGLGDKRCQKSEAVIAEHLTGTWRSEHLFNLVSALELYERLDESIRNYDAELLRIVVSLTPEERRSEPVPAHPNRAKEKAMQRRGESDLREALCRLAGNDLTTIDGISADSARVILTEIGPQITAFPSEKHFISWLHLCPRTPISGGKPLKGKKNSLGASRVGAALRLAAVSVQRSKTALGATYRRIARRKSAAVAVFAVARKLAQLIYRMLRFGKAYVDIGADAYESQFAERRLAALTANAREMGFEITPIVAVSG

SEQ ID NO: 133984 - protein, 349 aa, unidentified
MDRYIGLDVHAASTTIAVVGPSGKRVKEQVVETNGKALIEMLKLIPGQRHVCLEEGTQAEWLHEILKPHAEEIVVAKVESSRGAKSDRRDAFALAELLRTDGVTTRVFKDVGSFGALREACRVHTMVTNDVVRTKNRIKSMFRSRGIPTDSSVYSKRERSAWLKKLPTNKRVPAQALYDELDHQEELKDRCEEHLVREARRHAFCRKLETCPGFGPIRAAQLMAITITPQRFRTKRQFWSYCGLGIVMRSSSDWVRGVDNKWVRAKVATTRGLNFNHNHLAKHVLKAAATTVVAQKTSPLYADYQRLLDAGTKPNLAKLTIARRIAAIALAMWKRGEEYDPTKSSKLVS

SEQ ID NO: 133985 - protein, 405 aa, unidentified
MYNAVGIDVSKGKSTVAVLQPGGTVVRKPFDVTHSSCELKSLTDYILALDGETKAVMECTGRYHEPILRAFSDAGIFVSAVNPHLIKNFGNNTIRKVKSDPADSKKIARYTLDNWADLREYSSMDTTRAQLKTLNAQMAFFTKQKVAAKTNLISLLDMTYPGVNDLFDTPSRDDGSEKWVDYAASFWHVDCVRKIGLKAFTERYQAFCKRHGYNFQKSKPEELFNAARELVAVFPKEQEYKDMIQMSIRQLNVISANVEHTRQEMNRLASALPEYSTVMAMRGVGATFGPQLIAEIGDISRFNHREALTAFAGVDPGVDESGKFKSKSNNASKCGPSRLRKTLFLIMSSLLQTKPIDDPVYRFLDKKRSEGKPYHVYMTAGANKFLRIYYGKVKECLRTQSETAN

SEQ ID NO: 133986 - protein, 407 aa, unidentified
MEVLYPRCAGLDVHAGSVTACVRMATGAEVTYEHRTVATTSRGLLALADWLAAHGCTHVAMEATGVYWKPVWHVLEPGFALVLANAMHIRNVPGRKSDMNDATWIADLLAHGLIRSSFVPPAPIQELRDLTRTRKQLVGEIARHTLRIQKTLEDANVKLTQVMSDILGTSGRAILTALVAGETDPHRLADLTRGRLKATRAELVDALHGRVTEHHRFMIQLHLTQIDALTDAVDTIEARIGAALGPFRAAVSLLTTMPGLSDTTARVLIAEIGTDMTRFPTVGHLISWAGLCPRLDESAGKRRSTRTRRSAPWLKTTLVNAAWAATRKKDSYLRAQFLRIKSRRGAKKAILAVASSMLTAAYFMLRDGVEYHDLGSHHFEQRDKEQLTKRLLQRLRDLGVAVEVKAA

SEQ ID NO: 133987 - protein, 377 aa, unidentified
MATTRTVLRDQLTAKPGDLFMSFELGDKHWHISIGGERRSVSHYIVEAGHTEEVADCIAKAAARLHTARVHSCYEAGRDGWWLHRWLTELGVDNIVVDPASIEVNRRARRAKTDRLDADKLLAMLVRHHRGERVWSVLREPSPSDEDARRAHRELQRLTHERIAHTNRISSLLVLHNLRPRIVIGGRDWPVWWNAHREQVPPTLRAELEREAVRLKVVKEQVRAIEAARARELAEGKQPLVAQLVRLRAIGAKGAWVLVKEVFGWRHFANRRELAGSLGLVPTPYASGDSEIEQGISKAGNRRVRALLVELAWSWSRLQPGSALTQWFNRRFAGAGKRMRRVGIVALARRLAIALWRYLQTGEIPIGARLKPAGSGI

SEQ ID NO: 133988 - protein, 350 aa, unidentified
MIIIGCDYHPSFQQIAFVDTDTGEFQERKLQHREEAEKFYRDLAAQGMKVRVGMESSGQARWFERLLSELQFELWIGDAAEISAKRVRKQKTDRQDAQLILRLLLKDDFPRIWVPSWENRDLRQLLWHRHRMVQARTRMMNQLQAVALNEGVRAKKRLWGEAGREQLEAFKLAPWASQRRQDLLELLDRMNPTIAKLTKAIEGEVEKCPAARRLETHPGVGPLTALAFVLIIGKADRFQCGKQIAAYLGLVPLEKSSGNQRRLGHITKQGNSLLRFLLVEAAQVTVRSLPEWRSKYVHLTMRRGRKIAKVAMARKLAVRLYWMLRREWDYEQLRKFGSQAGKPGYRDGVK

SEQ ID NO: 133989 - protein, 402 aa, unidentified
MNCVGIDVSKGKSMIAVMRPFGEVVISPFEVQHTASELSELAKLLKSLDGETRVVMESTGNYHTPVAWLLHDAGLYVSVVNAMLVHDYGNNSLRRAKTDKKDAVKLANYGLDHWLTLPRYVPEEDTRLLLKNCYRQYQQYSKVQTMLKNNLISLLDAVFPEVNRLFNSSPRADGSEKWVDFVSTFWHCQRVSTLSLKSFSARYLKWCRKHGYYFSQEKAFEIHSKAQSCISVMPRNETTKLLVQQAIAQLKATSAALAALKQEMQSLAAALPEYPVVMEMFGVGSTLGPQLMAEIGDVRRFHSKKALVAFAGIDAPPCQSGQMDIHSRSISKRGSAALRRTLFLVMGIYLQSAPLDEPVYQFMDKKRSEGKPYKVYMMASANKFLRIYYASVTAYLNTLARI

SEQ ID NO: 133990 - protein, 351 aa, unidentified
MKKIVKQVAGIDVAQNELVICLGRMYEDWTPELHASKTFANTPKGFVSFVQWVKKLSDPTVPVRYAMEATGVYHESLAYYLDEQDLEVSIILPNKISNYARTLDVKTVTDKTASEAITLFGLERKLDTWSRPKGIFKKLKQLTRERGQLVDERTVLKNQLHAEQAGAEPSKKSIERIKKRIVLLNKQEEEIRGELKDLIKSDAEIQQLVMLICTLPGVSILTAVTVLGETNGFDLIRNKRQLTSYAGLDVREKQSGTSVKGKPRISKKGNRHLRKAMHMPALAAIRHDERFKAVFARLVARHGIKMKAAVAVQRKLLELIYILFKTRKPYDKDYFKRQNKQQERTEGIVNN

SEQ ID NO: 133991 - protein, 343 aa, unidentified
MDQYIGLDVSLKDTAISIREDGKRIWRGKCASDPKALAQIIRKHAPNAKRVVFETGPLSTWFFHALTAQGMPAICIEARHAQKILHETLNKTDANDADGLAQMAEAGFYRAVRVKSFDSMLTRTLVGARNQLLRISTQLGNQIRGLMKTFGLVIPIGTGRVFDGNVRELLTGNDDLARIVLPLLEAWRDIRKRTADLDRRLLAVTRQSPATRLLMTIPGIGAVTAVSYVAAIEEPDNFRTSRSVGAWVGLTTRRYQSGEVDYDGHISRRGDNHLRGLLYEAATVILTRTRPGNESSLRSWGLKLRERLGFKRAAVAVARKLAVIMHSMLKTGEVFNASAGATA

SEQ ID NO: 133992 - protein, 364 aa, unidentified
MGDYTTWVGIDDSADQLDIAVFYGNEDLPRHEFSVVNDTKGLGLLMKKLKTMPGEVRCVYEAGVNGYHLYRVFQKHGIACDVVAPSLTPRKPGDRVKTNRIDARKLATMHRSGDLTSIKVPKEEQEAVRDLMRGREDALEDLQMTRHRLGGFLLRRGLRYRDGKPWTQGHLKWLKGLTFENQYLQQVLEEYRLALDEATERLKRFEVRVEEAAEREPYKKLVALLMALRGVKVITAMTIIAESIDLKRYLSAPGYMDSIGLVPSEFSTGNKRRQGPITKTGNAHLRRVLVESAWHYRWAPGLSKAMKQRRKDLPADILAIVRKADQRLHKKYTRLITKGKSSKIAAVAVARELAGFIWAIGQAA

SEQ ID NO: 133993 - protein, 422 aa, unidentified
MNEDVYYERCAGIDVHKQFLVVCLRIGHKIEIRKIGTLTRELRDMVAWLKANGCQMAAMESSGSYWKPIYNIFEQEGLPVMVCNAYHIKNVPGRKTDVNDAQWIAKCLSQGMLNPSFVPDREQRELRDMTRFRKSQIEERARNINRLQKFLEGANIKLGSWLSDVEGKSATQLLELVIGKPDFTVDEVAACMHKNMKSTAGELFQSLEGYMTPTQREFFAHIMSVIREQTAQIEKTDAIIKRSLNENYKAAVAALDAIPGIGEISAEQIVAETGTDMSHFKNQHSLSKWAGVCPGNNESAGKRKSGKTPAGNKTLKATLTQCAKAAKKNKKSFFSAQYNRLVSHCGKNKATMAVAHSILIAVYFVLCGNQFKDLGADYYIQFNREKKINSHIKQLSKLGVTLPDDVMRDILLPPPKPQARSA

SEQ ID NO: 133994 - protein, 341 aa, unidentified
MSRVSVVGLDIAKHVFQVHGIDASGAVLVRHQVRRIELLSYFCKLEPCLIGIEACSTAHYWGRELRALGHDVRLIPPQYVKPYVKRNKTDAADAEAICEAVTRPSMRFVAIKSADQQAVLTLHRIRDQLVRQRTMITNALRWHMAEFGIIEKQGIAGAKRLAEVVSDEADHRLPDIARSALFVLVEQLRDVMEKIDTLKRELLAWHKQSEVSRRLAKIPGIGPVVATALAATVPDASVFTSARQFAAWLGLVPRQHSTGGKPRLGGISKRGDGYLRRLLVTGATAALFRSKDTRNRPWVKELLRRRPTKVVAVALANKMARTAWALMNSGGVYRAPKPAAA

SEQ ID NO: 133995 - protein, 408 aa, unidentified
MDNTLQFLRKECITMILVGIDIGKNKHTFSIVDKGTGEILSNPAIFDNNLAGFLYLIKKLRGYVKSELLIGMEDTGHYHLALLKYLLDNRYTVSLINPTTTDLTRKIQGGIAKNDTLDSITICDVISSNRRKKPYRITKVNRFELYEQKQLTRHHHDLKEELNIYKNRLQKCIDIVFPEFNSLFNSKYGIVYMRVLKTFSSANAIANADIRSIRKCFEFKGRGGRISLSAEQLKMSAKISVGIPSVAEEIQIRHLVCQIELLEEQLSEIDKRIEEFSIKNNSTILSIPGISHFSGTSIIAELGDICNFQKSSQIIKFAGVAPYHYESGQFTAQHTSITKKGSRYLRKTLYQIILPVINNNEVFRTYYNKKLAEGKGHRCAHGHCIRKLLRVIYHLLTTGQQFNPEFLA

SEQ ID NO: 133996 - protein, 459 aa, unidentified
MAKRGRKSKSKSLKSPAELGFKIVHQRAAGIDIGSRENWACIGEGRENIQKFGVFTEDHHSMAKWFKTNGVETIAMESTGIYWKSLFLILQSYGFEVILVNAGHVKNVPGKKTDMKDCHWIWQLHSVGLLHASFQPDEFTEELRTYNRHRRTLIEDSSKFVSRMQKALLLMNIHLPTVLSDITGQSGTAIIEHILKGETDAKTLAALANPRVKASKETIEKALTGQWHKQYLFTLQQNWTMYQFYYKQIRECDSKIDALLSAKVEQTGKRDLVYDPVKKKQRKKNCPKAKVELYAYQLTDGVDLMEIEGVSFTTILTLLAETGWDLKAKFPSNKHFTSWLSLAPNKRITGGKVLSSKTNKNKHPLAYAFRQAANAAGNTKDTALGQFFRRIAYKKGRKYAVTATARKIAVIVYNMITRNEPYRPMGTEDYQQKVREQKIKSIQKKIKSLGLKQEDLIFA

SEQ ID NO: 133997 - protein, 368 aa, unidentified
MFKQAHYKVGCDAHKHYSLFAVLDHRGKPVEQTRVNHVPGAIRAFVSRFPPGTPVALETVGNWYWIVDEIEQAGCVPLLAHAQMAKKMMGHVHKTDKLDAQGLAILQHLGSLPTVWIAPGEIRDERELPRTRMALSKVRTMLKNRMHSTLAKYALSLDTQSDIYAPKWRPQLLELICSLPDETRRCMRQELELLDQVQEQIHRLEARILERVQVTPTIQLIQSVPGPAKILSIVIDREVGSIDRFPSPHHFASYSGLVPKVKASGGKTHYGKMIKAANNYLKWAFIEAANVVVRKQHHPNWRQKYVVALFERTRQRKGHAVAVGTVARYLAEATYWVLKKGEPYREPVPQHPVGRKSAVSPKQGQVRT

SEQ ID NO: 133998 - protein, 392 aa, unidentified
MRKPKQRKPLNDLSRSLTTLDADHTLIAVIEMGQKSWLVAGIVPGVERQPLKKLDTDENALLKLLERWRMEAEKAGHKIKRITVAFEAGRDGFWLARWLRARGIEAHVIHASSVAVSREHRRAKTDRLDTELLKRAFLGWLRGERDHCKTVAIPTIKDEDAKRPNRERDSLVGEQSRIVNRMKAALARLGIRNFNPKLKKAAERLGGLRTPEDEPIPPNTLAELHRDMERRRLVIDQIRQIETARLQRLAQAPSHGPNAMVRLLARVIGISIETADMLVQEVLSRNLRDRRAVARYAGLTGSPDESGSKRREKGLARAGNARVRRGMIQLAWRFLLFQKESALAQWYRARTENARGSRKTMIVALARKLLIALWHFVRDGVVPEGVALRPAQ

SEQ ID NO: 133999 - protein, 346 aa, unidentified
MSYFVGLDASKATTHICILDRHGVVVAREQVETSPKAIVAALRGQRRRYARVGMESWGMATWLYEGLAKAGLPIICINAVHAHAYLKAQRNKTDRNDAAGIARLMQMGSYRVVHIKSRTSQEIRAALTARQAISERLIGLQNTIRGILAGFGRKLPTGGRRTFEAHVASVTRGDSYLEALVASLLAVRSSMCEQLDVLEGRLAAMAGDDPVCRRLMTAPGVGPIVSLEFRSAIDEPRRFPNSRLVGVHLGLTPRTRQSGPLSSSGGISRWGPSSVRRALYLAARSLCGVRKRPCWLTDWGNALAIRKGYKKAMIAVARKLAVVLHRMWISETDFAWSRPNALDPRH

SEQ ID NO: 134000 - protein, 444 aa, unidentified
MARKSKKQPLRIVHPRCAGIDIGSQEHWVAVDPDSDEQPVRSFTSFNDDLYAMAHWLKSLDIEVVAMEATGVYWIALYEVLDAEGFQVNLVNSRATRQVSGRKSDVLDCQWIWQLMTYGLLKGAFRPAGEVCALRAVVRQRDTKVKEQARCTLHMQKALTQMNIQLDSVVSNLTGKTGLSILRAIVAGERDPQKLAALRDRRLRATQETVARSLHGNWRPEHLFALSQALAHYDFLAKQITECDQSISDALGRLPTLNEQTSAPVKLMRSPHRSAAQQTRLHQALNEVLGVDLTTVPTLGIDTVLVLAGEIGPDLSRFPSSQHFCAWLGLAPSTHISGGKHLSGPKRKVFNRAGQALRQAAANARRSNTFIGASHRARLARMDSAKAIKATAHQLARLIYAMLTKGQDYVEQGMEAFEARSKDRQLRSLQRKARQFGLAIVEAA

SEQ ID NO: 134001 - protein, 425 aa, unidentified
MKQNQSSFAAFIGLDKSDKKINVSLQRCGKSKIERSVIKGGAEALHVWVAALCARFPGERIALCLEQPAAGLIHALMGYDFIVLFPINPVTLARYREAFIPSRAKDDPTDADFLCELVALHREQLKAWQPDDVCTRKLRHLVEARRRSVNMRTRLSNQLKALLKGYFPQALELCAEDRTTPMACALLQKWPSLQQLKKARPETIRRFYYAQNARRGDAIEKRLALIAQALPLTNDPALIESSLITVQALTLGLRAVRTAIARYDREIARTFAQHPDASLFAALPGSGTAYSARLLAAFGSRRELFESAESMLNFSGIAPVLKRSGQATTIHRRYARPLFLHQSFIEYANESIRHSLWARAFYQKQKAAQKSHWVIIRALAYKWIRILFRCWQERIPYDEIRYLKSLQKSGSPLLQYLAQPTIQLA

SEQ ID NO: 134002 - protein, 350 aa, unidentified
MKKICIGIDVSKETLDVTVIHIESYELMAKLGYSKFENRPSGFRSMTAWVRKVIKSRGQMDEALFCMETTGSYDLPLCHWLHKNGLNVWRESALQIHCSKGFQRGKSDKEDSEIIAQYAARHQNRYTAFVPDAEAIADLKELICYRDSLVERRKECKVRLANKKETLVNKNSKAWKCIERLSKAEIKRLDKVIGECDEEIRNLMKEDEEMEKNYQHLTSIVGIGLINGAALIAYTGNFKKITTPNKMSCYCGCFTFYEDSGTSVHRKSPYRNACCKMLKGYLRMAAKSAMLANTELKKYSERLREKGKPYAVILNNVANKLLHIMFSLVKHDYDYEYNHEVVRRMGREIA

SEQ ID NO: 134003 - protein, 313 aa, unidentified
MSNVGIDVSKARLDVAVRPSSEQFSVTNDDAGHKELRKRLLKLKPERVVLEPTGGYETAAVQVLVAAKLPVIVVNARQVRNFAQATGRLAKTDRIDADVLAHFGEAIRPEIRPLPDAQLLELEALVNRRRQLVDMQAAEVKRKQTSPASVHENIDEVIEFLANQLADIDEDINKLIKTTPAWREADDILQSAPGVGPVLSRTLLALVPELGKLTRKQIAALVGVAPFNNDSGKAVGKRTTWGGRAPVRAVLYMATLAARRFNPLITAMFDRLLSNGKAPIVALVACMRKLLTILNAMKRDGRVWSPAQLSTAG

SEQ ID NO: 134004 - protein, 403 aa, unidentified
MNAVGIDVSKGKSTVTIRRPGDQVILKPCDVKHTQSGINSLISFIKDLDGETKVCMEHTGRYYEPVATWLSDAGIFVSAVNPILIRSFGDDSLRTPKTDKADAKKIARYTLDRWTNLKQYSHMDETRNQLKTMNRQFGFYMDQKTTMKNNLIALLDQTYPGANTFFDSPARSDGSQKWVDFVYTYWHVDCVRCKSLEAFTEHYRNWCNRKGYNFSAAKAEEIYNYSVDLIAVFPKNANTKMLIHQAVEMLNLASKTVESLRTEMNQTASMLPEYPVVMAMNGVGSTLGPQLMAEIGDVTRFTKRGSLAAFAGVDPGKNDSGQYSQKSVPISKKGSPHLRKTLFQIMDGLIKRSPADDPVYAFMDKKRAQGKPYYVYMTAGANKFLRIYYGRVNEYLSTLSDNE

SEQ ID NO: 134005 - protein, 313 aa, unidentified
MDGSTTLPTAFIGCDVGKAEIVVFDSASGRTTKVPNKKAALARFAATLDPDALVVCEATGGYEAVLLDALVTAGRPAHRADARKVKAFIRSMGTLGKSDAIDARALARYGSERHDRLPRWQPRDHQRDTLLLLVTLRRELVRDRVAHRNRLQAPGMTGVAASLRRILKVLDTEIARLDTEIAAIIKTCQPLKRTVAVLRTISGIGPVIAAQLTALMPELGTLGRRQAAALAGLAPHPRQSGTNDAYRRTRGGRPEIKRALFMAALTAARYNPTLRAFYQRLRHNGKKPIVATVATMRKLIVIANARVRDAQLS

SEQ ID NO: 134006 - protein, 343 aa, unidentified
MKIHALGIDLGKTVFHLVGLDASGQVVVRERCSRTQRLTFTANLQVQVIGMEACSGAHFLGRALRQQGHEVRLMPAQYVKPYVQTNKSDYLDAEAIAEAVQRPRMRFVPIKTEEPLDLQALHRVRERWVMRRTAVVNQIRSLLLERGLTLPKGRSHLDEQLPRILEDAELNLSDSFRVLLAQLKLELGQLAARVEEMDRVIQKTARENEACQRLTEIPGVGPVTATALIAAIGNGSAFGKGRKLSAWMGIVPGEYSTGGKQKLLGISKRGNKYLRRLFIQGARSVLQQRHKQAPSLSEWLAQLLARTHQNVVVVALANKLVRMSWAVLCKNERYRAPVFALTT

SEQ ID NO: 134007 - protein, 352 aa, unidentified
MSSLFVGCDAHKHFSQLEVQDSSAHVIRRCRVDHARGSLHSFFSTLPNGTPVALESVGNWYWIADEIEAAGCRPLLTNPAKAKLLMGHVNKTDKLDASGLTTLLRLGSLPSVWLPPAELRDQRELPRTRMVLCAERTRLKNRIHSLLAKYNLSPSEGSLFSQQGRAWLDSTISQLPPETARCMTEQLQLLDFLSLQISELEDRIHQLIALTPAMQLLKSLPGVGDMLAIVIDREVGSIERFPSAQQFSSYCGTTPRVTSSGGKTHYGKMRTESNQYLKWAFIEAANAVSAHHAQRGWTDRHCSKLYLRIRSRKGASIAIGAVARHLAESAFWVLKKNEPYKDPEMKVSPRQG

SEQ ID NO: 134008 - protein, 410 aa, unidentified
MEQGRWWVGIDLGSQAHQVCVLNAQRKIVLERVFEHTGAALTALANELIESANGSTAAIKVAIETPQSAVVDVLLERGIEVFTINPKQLDRFRDRHTVSGAKDDRRDAFVLADSLSTDGALFKQVKLGTQQLVELRALSRIRDELLEETNILCNRIDAELLRFFPEVRSLGSTQTDPWLAELLELAPSPAQARKVRLPQLRLLLKKYKIRKHTAEQVQAALRGPSVHVAPGVAEACSRHIRMLIPRLRLVREQERQCRHDMQRLLEELSEPEPDSETQRDAAIVQSLPGAGSIVSATLLAEAWQVLAERDYDRLRILSGVAPVTKRSGKTTLIGMRRACNQRLRKGVYHWAFSSVRRDERAKAHYARLRARGHSHGRALRGVADRLLHLLTVLLRRGELFDPARRALQTA

SEQ ID NO: 134009 - protein, 342 aa, unidentified
MREKRYIGIDLHRRRLTCCVRLANGRNYLSEWALDRLPEFVKKLRPTDEVAVEVTGNTRLFYEAVAPHVERVVVVDPNQFHVISHSVKKTDPNDARALALYLSKGLLPEVRMKEKAQAEVASLTQTRDRLVKLRTALKNKVNNLLSARGIELGKEDLSGEKGLKRVLEQSLEGLAQVELEIIVEQIRSLNRGVSRLEQVIEGAAKKLPGFANLTSIKGIGSLGAGVLLSVIGDVKDFQEEGKLASYFGIVPRVQNSNATEHLGRITKRGSKLGRTTLVQCALIAKRYSPYLNRYYEGIRARRGTGKAIIALARKFLGIIYHTLKNNWVFEDFPNFALAEAKT

SEQ ID NO: 134010 - protein, 386 aa, unidentified
MGVDAGKEFHWAHALDASGRELLSRKVENDEADLSKLIDDVLLVAEELVWAVDQPGGGAALLLALLWERNQRVLYVPGLTVDRARDAYRGESKTDARDAHVIADQARMRPDLGKLEPGEKEIAELQLLLARRRDLITDQSRTITRLREALLSLFPALERALDLNSKGSLTLLTHYQSPAQLRRAGHKRVATYLRNRSVKGSNKVAHKALAAAQDQSVSLPAQELASRIVAELAKDVLSLKERIESIDEELEKRFFARPEARILISLPGMGAILGAEFLVAVGDIRTFESADRLAAYAGLVPAARDSGKRVGYHRRMRGGNKTLKRVFYQSAFSSLRGCAESRAFYDRKRAEGKRHTQALIALARRRVNVVWAMLRDETTFESRSVA

SEQ ID NO: 134011 - protein, 373 aa, unidentified
MKKVRFLGLDVHADTIAVAVAEPEGEVRWLGIIPNREESVRKLVKKLGPAEQLQACYEAGPTGYVLYWQLTALGVKCEVVAPSLVPVKAGDRVKTDRRDATKLARSYRAGDLTAVWVPNQEHEALRDLVRAREAAKQDQLRARHRLSKFLLRQGRRVPSGFKVWTQRYQDWVKEHVHFEQPAQEYTLMDYVHEVEHMDDRIRRLDVAIAEAVKLAPPGMQEVIQALQALRGIAQISAVTVVAELGKISRFDRARQLMGYSGAVSSEHSSGKRMRRGQITKTGNAHLRRIAIEAAWAYRHRPAIGPRLRKRQEGLSEEVKEIAWKAQHRLHKRYRTLSAAGKEKQKVITAVGRELLGFIWAIGVQAERNSKRVA

SEQ ID NO: 134012 - protein, 387 aa, unidentified
MPQPNDLGRSLVALDQDSTLVAVIEMGQASWLIAAIVPGLNRHPLKKIAADAEQLLQVLRRWKQEAETAGRTIKRVAVAYEAGRDGFWLARWLRAHGIEAYVIHPSSVPVSREHRRAKTDRLDTELLKRAFLGWLRGEPDHCSMAAIPTLTEEDAKRPGRERENLVGERTRIVNRIRGALARLGIRNFKPMLRNAPQYLETLRTPEGAVLPPNTLAELRRDMARLSFVKQQIKEVETARLERLQRAPGEGGNAMVQLLTRVVGVGVETADMLVQEVFTRNLRDRKAVARYAGLTGAPDESGKRRRERGLAKSGNARVRRGMLQVAWGFLVHQKDSVLAAWYRARTADARGATRKTMIVALARKLLIALWRLATTGEVPSGLALRAAA

SEQ ID NO: 134013 - protein, 355 aa, unidentified
MKQQAIQYVALDVHQATLVVSVRDEHGAVVMRATIATEAKAVIGLIRGLASRVHVVFEEGTQAQWLHDVLEPHAERVVVCNVRGRSETGNKSDRLDADRLSELLRCGSLKSVYHGASTLLTLKELVRSYVNLVEDGTRVMLRIKALFRARGIRTPGTSVYRQSTRKQWLSQLEQRGARMRAEALFAELDVLQELRPKTKAAMIAEARRQPSWKILRSVPFPGPVRVAEILAIMATPWRFRTKRQAWPYAGLAVVTRSSADQEFAEGRLRRRKRAPLTRGLNRNHHPLLKSVFKGAANAAAAQDGPFKEFYDACVGRGVREEMAKLTLARKIVAIVLRLWKTGEIFDATKLKMQAT

SEQ ID NO: 134014 - protein, 379 aa, unidentified
MTFFIGVDLHKTQFTVHVRTEEESESLDQIRQYPTTPDGYAEFLARISRYKATGADVKIGVESTGNTRFFKNQVEKTGAEVTVINTLKFKVINESAKKTDKHDASTISEFLSKDMLPESYLCGKETENIRRLLKSRERLVRSTVGQKNEIHALLVSLGLSDELRCLQSKKGRQRILDTLESNNDYVLEAQSVKLMFEIIERIEESVKIIEKQLFELTKDDEMVNRLLTIRGCGKITAWTIRAYTEDISRFASAKKYAAFCGLVPWVQDSNETIHHGKITKRGPQELRTCFVQLVLGIRRCKDTSDWRMMQRYEYMKTNKGSGKSIVAAARKMAEIVWAMLSDKKRFLCTKDDWKIQTNVSCRRSFDCHELSILESRLVR

SEQ ID NO: 134015 - protein, 362 aa, unidentified
MAHSVIFAGLDVHAAQTSAARLEAATGELATTRLAGGTGPAVAWLRRLGPGVSAVYEAGPTGFGLARAARDAGIDLRVVTPGLVPKRPTDRVKTDRRDAVRLARLLAAGELSFARVPTPAEEAFRDLVRAREDVRGDLMRARHRLSKLLLRRELGYPGPGGAWTQAHLAWLARLTFDDTASTVTLADYLAAVEALVQRRGTLDAAIAELVPTSPYAATVPVLRCFRGIDTLSAAGLCAEIGDFARFAHPRLLAGFLGIVPSEHTSDDKRRQGAITKAGPSHARRLLVEAAHHYRRRPHVGVTLQRRQAGADPRVCAVAWRAQQRLHRQWQRLHVGRRKPSGVVAVAVARELSAFLWEAATIT

SEQ ID NO: 134016 - protein, 343 aa, unidentified
MYFIGLDVHKKTISYCVKDAAGRVYQEGKIGSTRRELDEWIRTMPQPRTIAMEATIFTGWIYDHLLPHAEKVKVAHPLMLRAIAAAKKKNDRIDAGKIADCLRCDFLPECHMASTEIRDRRRTLRYRSLVIKQMVQMKNRVSGLLMETGVSYNKQRLHKVGYFAELMTANEDVQESIRPLLKLSRDMIRRAHKLDYALVSSLERDPLLKERLRRLRTVPGVGPITALTWALEIGDFTRFSSIKQAISYCGLCGDEKSSADKVMRMPISKQRNKHIQRVLIEAAKLAPRESPELAVIRARELERGNPNRATLAVARKMVSYMLAVERRNQDFVPAEEFSRTAAA

SEQ ID NO: 134017 - protein, 414 aa, unidentified
MLAPEIRCVVGIDIAKQAQVVCAVEVPSGRVRHKPSRIEASAEGYAQLRAWLESWGSQETILLGLEATGPLWEPLDDILIHAGYTVLLLNPRQTASWATSLGLRAKTDGLDAQTLARGLAAGLARASCLPSETVQALRALTRARRDLIESRTAARQRLHDELVVLFPEFVRFLPTLPGRTDLGEPAVLHLLGTYSSARALADVPLEELSRVLAQVSDGRWGQSQASAVQELARRSTASSRAVAARSVVARTLAQQLLELAAHIAELEVAIVELLHDDVEGQQLQALPGIGPHGAATIRAELGDVSRFARVDEVVAYAGLDPRTHQSGAFIGQKHLSKRGPGALRHALYLAAFVAARCAPEWRCRYQRLLDHGRAKKEAYTILARALLRVIYHLLRTGQAYDPALLNSQTTSSGC

SEQ ID NO: 134018 - protein, 373 aa, unidentified
MSKVEVGFAKGKPIYVGIDVHKKDWVVTVLCEGEELYHAVIGSSPEGLIKVLRRFEAKEVHTVYEAGPTGYWLHDALVEAGFDSMVTPPSLVPRIGGKVKTDRRDSKKLASMLAGGFLRRVHVLTAEERAHRQLLRTRNQIEHHRRQVQNQIKSMLLFHGKRGAETQKERWSEDHVKWIENIEWEYPVLKTAMESMVKMYRELTEEYKHLTSEIEQLALADRYRERVGLLTQIPGIGTFTAMAILVEIQNIERFRRADQFASYLGLTPSQHSSGESIRMGHITRCGNSEVRTRLVESSWTLIRYDMQTKLTYERIKHQTGSGRKAITAIARRLSSRVRRVLLDRKPYHLVGGGHLAEGRDKRREAKKYLLKRV

SEQ ID NO: 134019 - protein, 386 aa, unidentified
MVFVGIDVAKDKHDLYAVDSDGVVLCDNFTFANSAAGFASFLKQVSPWGKIKVGIEATGHYSSNLLSFLKAHDFEVVVFNPLSVSRLRSAASLRKTKTDKNDSRYIARLLLTGEANPYQSQSYNISVLKSMTRARFRLFQEIQPLKNRFRRLLHVLFPELQGFFSNLYGNTSLNLLSVLPSAKDIAECNILKLTKILSEFSRGMLKRGRAEQLKSLAQNSIAAYNYGDAFELKQAVKRIQFLSSQMSEIESEIDFVMAELNSPITSIPGIGNLLGATILSEIGDIKNFGNPDKLLAFAGCEPSTYQSGKYTATNTPMVKHGSRYLRRALYCAADMAYVNSPSFRSYIDRKRAQGKHYYVAMSHGMKKLVRIIFAVLSRNIPFSEPA

SEQ ID NO: 134020 - protein, 426 aa, unidentified
MKRTQNAKILQIKNETLVVGIDIGKESHFARAFDNRGIELARLLKFSNTAQGFEQLDRWMQDTCKQQKKTEAITGFEPTGHYWFTLGDHLKDIGHKLAIVNPFHVKRTKELDDNSPTKNDRKDPKTIAMLVKDGRYRDVYIPEDIYQELREAVEERERLQERMNAVHNRVIRWLDIRFPEFQQVFKKWTGKTALLTLKTFPTPAMVIEAGEDKILATWRTSIKRSVGKKRAQALVKAAVSSIGRTNGNIASQAGLQNLLAEYELYQMQYEQLEQLMWELLLQVPNAVKLLGIKGVGLVTATTFVGEIGDIHRFEDPRQIQKLAGCNLVENSSGKHKGKTTISRRGRKRLRHGLFMAMIAILGNNQEFRELHQRNLTREKNPLNKMQSIVALCGKLIRIFFAILSKGVDYNPEKMMGDIQYSVKAAA

SEQ ID NO: 134021 - protein, 347 aa, unidentified
MLRTITGGVDTHLDVHVAAALDQHGTLLGVESFETTSSGYRKLREWLQGFGEVSLVGVEGTGSYGAGLTRHLHAENISVVEVDRPNRQRRRRKGKSDPQDAISAARAAHSGDADGLAKTRDGNVESIRTLRIARISARKARTQALNQMRSIISTGPESIRDELRSLNVYRLLERAASYRPGTKRDVVSLTKFTLRTLARRAISLEEEVAEIDDIMKDLVRETAPKLVASQGVGIEVASALLIAAGDNPERLHHESAFAHLCGTAPIDASSGKHERHRLNRGGDRQANSALWHVVLTRMVCDPRTMEYINRRTKEGLTKKEAIRCLKRYVAREVYALLPRAQVALDSP

SEQ ID NO: 134022 - protein, 298 aa, unidentified
MDQQCHYVGLDVSLETTSICVIDDAGAIIWRGKCRSDPDTITAIVRQHAPGAVRVGLETGQLSNWLTLSLRRRGVPVVCMDARHAKAALSLQINKTDANDAFGLAQVVRTGWYREVAVKSMDAHTLRMLLVARSRLVSQRQATANTIRGLLKTFGLVVARGSKGLFPVRVREQIAGNPAVIAIIEPLLAVWHAIRDQVAMLDRQMLARARNDQVARRLMTIPGVGVVIALAYTAVIDDPARFRRSVSVGAYLGLTPRRYQSGEVDTTGHISKCGDSLLRGYLYEAAAVLLYRDGPPQS

SEQ ID NO: 134023 - protein, 323 aa, unidentified
MDDFHACIKVKNESGKVVIKGTKTFNNTGAGFNEFYRWTLSRKKVDCVLSFVMEATGIYYEDLAYFLHDKKECVSVVLANKMKGYGKSLNIKTKTDKVDSKIIADFGIERQVEEWKPMSPTYKELRDFCRELLSIKKEMNRAKNQLHAMVRSHDKSKEIIKIKKKQIAFYEKTIEAITKKLIQIVGKDPALKEKLAKLESIPGLGFETSIILASETNGFELFTSIRQLVSYAGLDIEFKESGRFKGKTRITKKGNSRIRQALFMPAMSAVRHNESIKKLHERVCERNPDIKRKGIVAGMRKLLIYAFVIWKKDTTYDREFVWN

SEQ ID NO: 134024 - protein, 379 aa, unidentified
MKKHGPVTHNVCVYVGFDVHKDSISACVYEREGDTVLHEQKLPNEPAAVRKLIRRVRERFGEPRCCYEASSCGFILFRLLRELGVTCEVIAPSSVPRRSGDRVKNDRIDAHKLATLYASNQLTGVDVPDEELESTRALLRCRAALVEELGRTKKRTTQLLQTRGLAYRNGSNWSQKFWEWLARIRLLPVDQVVLDAYVDLIHYLEAQIRSLETKIDTEAEKPRYVEPVRLLKAFRGIATITALTLACELGDIRRFDHPRRLMAYLGLVPSEYTSANKTHRGAITKAGNRHARRAIVSAAWKYAARPTRSHALKERQRQVSPHVVAISWKTQKRLYKRFHSLAVRKPRSVAATAIAREFAGFLWEAMNTLTPQPSPASAA

SEQ ID NO: 134025 - protein, 356 aa, unidentified
MKSTIKYIGMDVHQSTISVAVLDAEGKLVMQSILATHAAAILDFVHGVRGTLQVTFEEGTQSAWLYDLLVQHVAKVVVCNPRKNALLKAGNKSDQIDARKLAELLRADLLSPVYHGENSCRILQEFVRSYTTLTEDTTRIMARIKALYRSHAIACAGKKPYGKRHRQEWLQHIQQPGLSSRAQRLYDQLDAVQTLRRAAKREMLAESHKYGAYRLLGSIPYLGPVRASILMARAQVPNRFRTKRQFWAYCGLALETRTSAEYRIVQGQVQRSRKPVFIRGLNLNHNHDLKNVFKGAATAASIHDGPLREFYDRLLAKGMKPELARVTLARKIAAMALILWKKGESFDPKYLMLQAA

SEQ ID NO: 134026 - protein, 289 aa, unidentified
MVTSYQNFIGIDIGKFKNVVAIHKQKNAVEFDNNDSGWQQLFQEFSDILPNSLVTLENTGKYELGLSQFLTDKNIAVHRANTRKVKSFILSHGTLAKSDRSDARALAQYGFERHRTLSLFVPTSTEQSTLTALCQRRDDITQMRAQEKCRLEAPENDHIKESCQKTIEFFNSQINELNNTIQKIIDESCELQQRQKILKTVPGIGKKLSQDFLCLMPELGYLNRKEVASLAGVAPHPKESGKAVGYRRITGGRSNVRSKLFTAAMAAAKSKSVLGAFYSKLVESCKLKM

SEQ ID NO: 134027 - protein, 345 aa, unidentified
MVIIGIDVSKGKSTACFLKPYGEVVYKPFEIQHTDSDMYKLVCKIKSLNQEVKVVLEATGAYHFPVVKYLQKYGIFVSVINPYVMYRYASVAVRRSKTDKLDSIIIAKYGIDDWFSLIDYVPNSEIYDELKLLNNQYNNYITLRVKAKQTLTTLLDRTMHGIKTLLLNRSTEPDRDKLCDFVRKYWHFDNITNMSENAFIKSYNTWAKKRGYQASENKAKKIYALASDGIPTLASSLPSTKMLLEEAVESLYHIDTTLTNILSQMKQLASTLKEYNIVMAMPGVGEILDPRIISEIGDATRFHSAKALVAYAGLDAPPYQSGNFKLPLFFRQFFNRLYWKCNVRY

SEQ ID NO: 134028 - protein, 469 aa, unidentified
MGFEPGKIRWPPLRLARVSHELVSVVVVSPLLLREFNNKEEDEVRSAGRAIGLDVHRDFCEVAIAQDGEVRSTGRVQTMPEALELFGASLDPRDRVALEVSGGAWEVARILERYVARVLVVSPADTGIRQARAKTDRLDARTLARLLAVGELDGVWSPDERCRVMRRRLARREQLVRARSRAKNEIHAALVRRLVGRPPVSDLFGVKGRHWLEKLDLPLEETETIQACRRHVEFLDGEIAAVERQIAAEALRSAEIKRLMTVPGVNVICAATFMAAVGEIGRFRTQRQLVGYLGLDPRVYQSGSAPATGGHISKQGSASTRWALVEAAWSAVRQPGPQHAFYQRVRARRGHGIAIVARARKLACLFWFLLTREQDYAHQQPSLTAKKLRLLEIRAGARTLKGTPTGVWATREAMREGERRLAEQAEASYTRMVRDWQAATPKKAGASVTPGRASQKPSRGKVARQTTSP

SEQ ID NO: 134029 - protein, 320 aa, unidentified
MKSVTNNDKIFVGVDVSKATLDVYRPDTKEVFKIENSDEAIALFCSQLEKKKRSVMVVMEATGGYEYLLVKHLASHKLDAAVINPRRIRDFAKGIGLDAKTDPIDAKVISKYAEVVVPQPMATKSDHELKHGALVARRNQLLELVNQENNRLKQSWDDDAKQSIRDMLEVLKNQLKSIDSQLAKMLQVDTKNRRTIEILQSVKGVGPVMISTILAELSEIGKLNRGEVAKLAGVAPINRDSGNKSGKRFIGGGRGQVRRVLYMATIVAIRHNPAIKAFYVHLKSKGKESKVAIVACMRKFITLLNLLIKTDQLWENKMSV

SEQ ID NO: 134030 - protein, 348 aa, unidentified
MTHYAGLDVSMNTTFICIVNEKGKVVKELEAVSTPESIDSFLSGTGLEIEKIGLESGCLTHYLKKGLKKKGYNVVGMESHKMAAILATIINKTDKNDARGIAEALRVGHYKECVHRSDEAVEIRTILHGRRTAVEGRTHAITSIKGHLKVYGIKLGKGSGKSFREKVECATAILNPRVQKVIRSLLNILDTYEQEIKELDRVVKDIGKEDERVKLLQTVDGVGPITALAFVAEVDDPKRFEDSKDVAAYVGLTPTQYSSGEIQRQGGISKKGSKHTRCLLVEAATILLTRCQTWSKLKAWGLKLMRKIGKKKAIIAVARKLAVVMHRMLITGKPFERSSKKKEALQAA

SEQ ID NO: 134031 - protein, 345 aa, unidentified
MKKLIAGMDLHSNNVVIGLVDMDGKRVAHQKVECKLSQVLKFLAPYKKRLEQIGVESTYNWYWLVDGLQAEKYPVVLANPAGMVQYKGIKHADDTNDAFFVAELLRLKILPTGHIYDAQLRPVRDLLRRRLTLVHHRTALMLSFKSLYTRTTGGEMTLGELKDLNVKGAQDLYEHPANQLIAGMQIQHIDELTQTIEKIEKAVLASARELPYYPKLTTLPGVGRILGMTITLEVGEVKRFAGPGNFASYCRTVEAQRVSNSKKKGENNSKCGNKYLSWAFVEAANFARRFDERCRKWFDRKGAKTSNVIATKAVACKLAKAAWYLMAEGTDYDSKRMFGEPAKTK

SEQ ID NO: 134032 - protein, 407 aa, unidentified
MNAVGIDVLKGKSMMVALRPMGETALTPREYPHTEIGLERMARDILALGENTRVLMEVTGRYHEPVAAALHAYGIRVTVMNPLFIKQSGGGSIRKVKTDKADAMKIAKYALDNWVELREYIPMEAIREQLKLCSRQYNLYMKNVVALTNNLISLTDKTFPGVNELFSSPSRTDGSQKWVDFVMTFWHCECICLVSETAFTERYRKWCKRKGYHFRQQKAAELYRSSAGHITTLPKNNSAKLLITTAAKELASAKATLAIMRTEMNRLARQLPEYETVRAMYGVGETTAAQLMAEIGDVRRFPRRSSIVSYAGVDPAVNESGKHISGSNPTTKRGSPHLRKTLYQAVCTYLKHSPADEPVYQFMDKKRAEGKPYFVYMTAAQNKFLRIYYARVKECLAAADSQNTGEV

SEQ ID NO: 134033 - protein, 349 aa, unidentified
MRSFQPPADTRFYAGVDLHARALFVVILDHHGQVRFAKNLPANPDAFLRAVAPFRDGLLVACECMHCWYWLADTCRDHAIPFVLGHAWAMTAVHGCKTKCDRKDAEAIARLLKGGNFPPAYAYPRERRSLRDLLRARLRLVRQRAELYGHVHTARRQANLPPLSSDVKYQSKRAAITADIADPLLRRRVETHLALLEPLDTTIRQLEAELEDAAKGHYPTELAVLQSTPGVGLVLSLTILLEIDTIERFDTRQQFCSYARLCGAVQTSDNKRAGAGNRKAGNAWLKWAFSEAAVLSAQKHEQIGALLQRLASKLGKAKALSALAHKLGRAFYHMLHTKEVFDVPRFVRH

SEQ ID NO: 134034 - protein, 355 aa, unidentified
MTYYCGIDLGRSSSHVCVIDEEQRVLFDRKLPNRPEAITACLTPFRDQVRTVVESTATWYWLVDCLQDAQIPVTLAHTYGLHAITRAKIKTDKRDARTLARLLRSNMIPPAYIYPRDRRPLRDALRRRWKLVQMRADEYRGMRTILAQHGLIEITLADIKTMEEADIPSVLAHPALRLHARQELERIALYSTQIQALEEEISKSIEDTDPYRNLTSIPGVGIVIALTLICEIGDISRFPDARKFSSYCRVVPGCADSGDSRRRGRGSKQGNPYLKWALNQAAIRAVQHDPRFRAFFEKHAKRHVGRTQKIITYGIVAHRLALAVYHILKHHVPYQEDRLFTNPPTADDSSSYGLG

SEQ ID NO: 134035 - protein, 319 aa, unidentified
MTTNAVVVGVDVAKDRLDVAMRPSGETWSEANDEAGITALVARLRPLGPALIVCEATGGFECAAIAALAAAGLPVVVANPRQVRDFARATGQLAKTDQLDAGILALFAERVRPTPRPLPDAAAQLLDAVLTRRRQLLEMLVAEKNRLGFAPKPLHRGIQAHVRWLERQLDDVTKELAGLIEASPVWRAKDDLLQSVPGVGPIVSSTLLGELPELGTLSHKQIAALVGVAPLARDSGTLRGKRLVWGGRASVRTALFMAAMCGRRWNPALKRFYDRLKAAGKPTKVALIACARKLLTILNAMVRDNKRWAVPAPSVQYSC

SEQ ID NO: 134036 - protein, 428 aa, unidentified
MKKHSFSKLEAITPDTLIIGVDIAKNVHWARFTDYRGIPLCKALKVSNNKEGFENILTTIKGVGKQKGLDKVILGLEPTGHYWKPLAHYLTSHEIKVVLINPYHTKKAKELDDNSPTKNDKKDALTIARLLRDGRYSQLYLPRDVYAELRVLSNTRVSLMKRQNAIKNTIRAVLDEYFPELVTVFKYPLAGKACRQILKSCPFPSLILQLGTDKVLTQMKKAVKKTIGPKRVEQLFQAAKDSIGVSDGIPSTSLKLTLLIGELELMEKQLDQLAQAMEQALTLTGFKEIILSIPGVGITTAASFLGNTGDPLRFAHPRQISKLAGYNLTEDSSGEHQSKTIISKRGRKQLRNVLYQMARTSVSVNAEMKALYHYLKARPVNPLKKKQALVVISKKIITIIHSLVKKQTSYQAELVFNPFRLNQLKQVA

SEQ ID NO: 134037 - protein, 406 aa, unidentified
MISVGIDVSKGESTVCIMKPGGEMLAKPFDMLHTMEGINALVDKIKSYDDEVRVVLEATGHYHLPVLSLLVEKGIFVCCVNALLMKKYCAQSLRRAKNDKIDSIKIATYGITYWHELVAVMPVGDTYAELKTLSRQYYQFTSLVVKSKVNFSNLLDQAMPNIKTLLSDSQSNNKLTDFVSRYWHFENIVKMGSSRFAADYCKWAKKQGYRNNERKANDIFTLSQNSIPTLSNTLSTKIAVLETVRVLQEIEKSRDTILTHMKELAKTLPEYSVVFAMNGIGETLAPRIIAEIGDVRRFHSRKALIAYAGIDAPPYQSGSFNATERHISKRGNKYLRKAGYEVMQSLITHKPDGDSVYQFIQKKRFEGKVCNEAMIAGLNKFLRIYFARVSEVYKQIENQLIFGSRI

SEQ ID NO: 134038 - protein, 468 aa, unidentified
MEDNRARRRGQRRPSPSVLERINPNAAGIDCGSAEHYVAVPPDRDPQPVQSFKTFTSDLVRLADWLTRCGITSVAMEATGVYWIPLFEILDARGFAVRLVNAHHVKNVPGRKSDVSDCEWLRELQIVGLLRGSFRPSDSIVALRGYLRHRHTLVEQAGIHIQRMQKALVEMNLQLPIVVSDITGVTGLRILRDLVAGQRDPVRLAEHRDHRCRASKADIIAALTGNYRPEHLFVLQQNLELFDTCHAQLAACDRAIEAHVQTMTAAIAAPSTPLPTPRVVRTPRTRDNAPRFDIRTPLHHLTGGVDLTQIDGFTPYTALSLVAEIGTDMSRWPTEKHFTSWLTLAPKNKISGGRLLSSRTARSANRAAGLLRLVVMSLGRTQTALGAFYRRLAARIGKPQAITATARKLAILVYRALKGDLVYRNIGADGYDAQQRARLLNRLRRRAATLGFDLLDHQTGEVLDTARA

SEQ ID NO: 134039 - protein, 421 aa, unidentified
MPNIEIGVDFMVKENFIYVGIDLHKETHTAVMIDCYNQKLGEITFPNRPADFPKLVIKVKKCNTDAKEVVYGLENAYGYGRPLAVWLIDKGYFVKDVNTAISHRQAKHRGAMYRKSDSDDAEAIALATLNMLDKLPDACPNDAYWSLGQLVHRRDNIMKQRTRLVNQLHEQLCIAYPSYKSFFNDISRPTALYFWEHYPSRKYLRGKSVEDLREELVPVSHNRCSTKNCEKILDAVASDKVKNNAYQDARDMVTLSIVSDLQHYDSQLAEVDKMLEQMYKMLGCTLTTIPGVNVITAVKILAEIGDIKRFSNANKLAQFAGIAPLHLSSSGKGKDLATKQGNRRLQATIYFLAIQMVQLSSKGTPRNPVVRAYCEKRKAEGKTSQQALICISRRLISIIYGVLKNSTEYRMPVVENAGEKL

SEQ ID NO: 134040 - protein, 320 aa, unidentified
MSASSVVVGIDVAKAHVDVAVLGAQFDAQRFDNEAEAHSALVAALKPLDAALVVMEATGGYETALACALQAAGLPVAVVNPKQARDFAKSMGRLAKTDSIDARMLAELAAVLVRRDDLARFLRPVADEQQRWLAALVTRRRQLLTMLNAERQRLQITPRGLHPSLQAIIAAIQAQLDDIEGQMVGHVRQHFAELDRLLQSASGIGPVASATLIAELPELGRLNRREIAALVGVAPMANDSGSSRGRRRVQGGRFEIRRVLYMAALTASRRNPAIKAFYERLLAAGKLPKVALVACMRKLLTILNAMVRTRNPWNKSIHGA

SEQ ID NO: 134041 - protein, 330 aa, unidentified
MHMLSPSNLLWIGVDVSKATFDAALWGHQDFQKMATAAFPRTEEGVRTWILAHGGDAVGVVMEATGCYSQELARWLQRDLPGSRVAIVNPSLVKAFGRSLALRNKTDRLDACMLARYGQERAPEAWIPMSPERAELRDLVRTRTKLIRLQVTIRLRLDDALGRTGSPAGKAQQKVLKVLQGQVDALDKAIDRQLHQVAELGHAVELLTTIPGVGRVTAATLLGEAGDLRAFRRGRQLAAFVGVSPRRYDSGSSVRGRTRMCRIGGVHARTVLYMAAVSASRTATPLGDFYRHLVDQGKPKKSALGALMRKLVLVMRAVLIQDKPYSPLPA

SEQ ID NO: 134042 - protein, 398 aa, unidentified
MICVGIDIAKGKSTVCFLKPGGEILKTPYNIEHTAEGITKLIRDICSYDEEVRVVLEATGHYHLPVVTQLLEANIFVCVVNALRMKKFCAQDIRKAKTDRIDSMKIASFGLTYWQDLKAAKPTDEVYRELRLLSRQYFQLTSMLTKAKITMGNVLDNVMPGITKLLYDRAPNHKLTDFVLRYLHFDKISAMGERRFTTDYCKWAKKQGYILYERQAKEIFALVQNGIPALPMTSSTTIVVKEAIKVVRELENSRASILAQMQTFAKSLPEYSLIRSMACVGDTLTPLVIAEIGDVRNFHSKHALIAYAGIDAPPYQSGGFYGTERHISKRGNGYLRHVGFEIMQCKLRFKPEGDVVYEFVQKKRSEGKSGKEAMVAGINKFLRIYYGKVTELYRELEA

SEQ ID NO: 134043 - protein, 403 aa, unidentified
MNNVAGIDVSKGKSMVSVLRPFGEVVAKPFSVGHTGSELKELADYLKSLDGETRVVMEHTGRYYEPVARFLHEEGVFVSAVNPKLIKDYGNNTLRKVKTDKADSRKIARYGLDNWAELRQHTPMDTIRMQLKTLNRQQSLYAKTKTMMKNNLIALLDQTYPGVNALFDSPVREDGSQKWVDFATTFWHVDCVRNMSLTAFAERYRKWCKRHGYNFSQSKAVEVHAGAQDLIAMLPRDALTKTMVRQAIDALNAVSASLERLKAEMRTLAAQLPEYPVVMAMHGAGDSLGPQLMAELGDVTRFTHRNAITAFAGVDPGADQSGTHEAKSTRVSKSGPPELRRALFLVMDCLLKTQPQDDPVYRFMDKKRAEGKPYLVYMTAGANKFLRIYYGRVKEYLASLEGN

SEQ ID NO: 134044 - protein, 314 aa, unidentified
MSSLVFVGIDVSQAHLDIAVRPGASFSIAHHESAIATLVEQLRSLSPTLILLEATGGMEIPLTSALATAGLPVVVVNPRQVRDFAKASGRLAKTDALDAQMLAQFAEVMRPQPRPLPDAEARALTALVARRRQLVEMLTAEKNRLLSASSPIRKRVRAHIAWLERELAHTNTELSEAIRQSPVWREKDDLLQSVPGVGPVLTSTLLASLPELGTLTHKQIAALVGVAPLNRDSGTLRGRRTLWGGRAQVRAVLYMGAIVAARFNPVIRVFYQRLQRAGKAKKVTLTACMRKLLTILNAMLKHRIPWRVVEAHHA

SEQ ID NO: 134045 - protein, 341 aa, unidentified
MSNTMYFIGLDIACNDFAASVYQSPEQPIITKEAILNNQDGFNMLTSWLKEHNINNANSVICMEATGVYSKAITNYLTADGFNVCVEAPLKVKRAFDPVGHKTDAVDSKQIAEYAYRYRDELRSWKPKDEILEKVRQLLSARERFTKQSTAIQNASKAYEKEPIKVALIIKSHKQALAQLKKHIADIDKELEKHIHQNPTIFQNTNTLKGIPGYGMLLSANLMVITDNFENIKDHKRLSAFIGIVPYQYQSGTSIHKKSRIRHFGPQTTRKLLRLAAQSVATHNKDFRQYYLRKQAEGKAKALVLNNIANKLVKIACAMIRENKSYIKEHRSIHPMCLKTA

SEQ ID NO: 134046 - protein, 362 aa, unidentified
MLIIGCDYHPSGQQVFGIDKESGEVFADRWIGHTGNELDDFYRALPAGVEVGVESSGNMLWFERRLQQYGHRLRLGDAAKIRAKETRKQKHDRRDAELMARLLMEGTFPELQWVPSLAERDQRQLLMHRHKLVRMRAQVKNQLQHIAMNQGQQKKRQLWSKGGRELLEQLPLDRWTARRRDDLLRWLDLLNSDCESLEMAVQQAAEARAETRLLMSHPGVGPVISLGFVLTIGTIERFQRSRQLVSYLGLNPSEESSGERRRLGGISKQGSSFMRLLLIQGAQTAVRGDEALNRQYRRLAAKKHRAVAKVMVARKLAVRMFWMLKTNRTYPELVRMRGSSSHLVVSKTDRLSERPASLRVQP

SEQ ID NO: 134047 - protein, 411 aa, unidentified
MEAAVITAVGIDVSKSKSTVAVRRPGGEIALRPFEVHHTNSDLKKLTSTLKKLGGDIRIVMEHTSTYWRPIALTLKEAGFFVSVVNAMLIHDFSDNTIRKLKTDRADALKIANYALTFWDTLPPFNNEEETRLLLKMQSRANERITATATALRNGLIALADQIFPGVNIAFDPNTKNANGHEKWVDFFLRYWHKDCVCQYSMEAFTESYRGWCKRKNYKFRTDTAHQIYLLAQEGVATLPKCESTKMLITQACKSLNAVCEAKQSTQLEMQRLAAMLPEYEVVMQMEGAGPITGPALMAEIGDVRRFKNKKALVAFAGIDAPPFQSGTFESKSRHVSKRGSPHLRRTIFIVSNIILTRSNPENAVYCFMDKKRSEGKHYYVYTVAGSAKFLRVYYARVTEFLRSQPSPGAC

SEQ ID NO: 134048 - protein, 287 aa, unidentified
MAFTVARDSDGVEALAARLLEIAPKLVVLEATGGFETVVAAGLAAAGLPLAVVNPRQIRDFARAVGRLAKTDPLDAAIIAHFAEAVRPEPRPVPEAAARALGELVARRRQIIGMMVAERNRRRQMSQRKAIRTVECVLATLQAQLSEIESEIDDAIRDTPAWRAKEDLLTSVPGIGPKIARTLIAELPELGRLDRRKLAALAGLAPFNRDSGKLRGRRAIAGGRGPVRSALFMAVLVSIRRQLPLAETYHRLVQAGKPPKVAIVACMRKLLGILNAILRDKNPWQIA

SEQ ID NO: 134049 - protein, 390 aa, unidentified
MILVGIDVAKDKHDCCIINSDGEFPEEVFSTLNNREGYETLYKRICSLAVDLAKVKVGLESTGHYSSNLLAFLLDKHLTAYVINPLRVNLFHKGQSLRRTKTDKIDSRNIAHLLMADSSLKPYSLSSYHMEELKSLTRYRSSKVRERTKLKTSIARLVTILFPELEQLVSSIHIHSIYAMLEEFPGSAYIAATHLTRLTALLLKVSRGRFGRETAIRIRDTARRSIGAVSPAKSMELQHTIAHLRVYDQEIGEIESEIEKIMDDVNSPITSVPGIGMQMGAVILAEIGSFRRFDSPDKILAYAGMSPSTYQSGKLTGSYSRMEKRGSRYLRYALFNVTRYVCHYDPGFTAYLSKKRKEGKHYYVAISHAVKRLVRVLYAMEISGNRYQTA

SEQ ID NO: 134050 - protein, 357 aa, unidentified
MLALGDSAPRKGADAMTFVGCDLHTRMQQVAVLDTGTGEVSERRLDHDGMAVEEFYAALPRPVTVGIESTGYAVWFHTLRQRLGHTRLVGDAAKMRAMVVRKTKTDRRDALHSLDLLRHDRFPTIWVPDPATRDLRALLTHRMRLVRIRTMVKNGLQAIALNSRLTIGSKLLRRAGLAQLQALALPPHTARRRDQSLELLAGLNTQIRELDDAITTAALAHPDAPRLITHPGVGALTALTTIVVLGPISRFHDSKHVVSYVGLAPALNASADKYHLGHITKQGSPLLRFALGQAAAHAARMDPDLKRTYGALVHRRGRPKAKVAVARKLLVRLFIMLRDHIDYEEFCRRGRTAPASA

SEQ ID NO: 134051 - protein, 410 aa, unidentified
MEVLHAHCAGLDVHKDSVVACVRHMADSKVTTVVKTFKTTTQELTALSNWLSDEGATHIAMEATGVYWKPVWHILSDGEFELILANAAHVKNVPGRKTDVNDATWLADLMAHGLIRASFVPDEPTQQMRDLLRTRKQMVRERSSHVQRIQKTLEDANIKLDSVVTDILGLSGRRIIEALIAGQTMPQTLATLAHRRIHATTHELEAALRGRVTRHHRFLLKLHLDQIDAFDAALARIDEEVSANVEPFRAAIEMLSTIPGISTLSAEVIVAEIGIDMSRFQTAGHLISWAGLCPKNDESAGKRRSNRMKKGAPWLKTTLIQCAWAASRKKNSYLQAQYLRIRSRRGAKKAIGAVAASMLTAAYNMLRDGTLYQDLGPNHFDNRAKGKHVLRLVNRLQNLGFDVQITPLAA

SEQ ID NO: 134052 - protein, 431 aa, unidentified
MTTNTTATPAPAAEYAALVGLDWGDEEHALSLCATGSTEIERRILQQTPEALADWANGLRSRFPNGKIAVALEQARGALLAGLAQYEHIVPFPVNPKTSARFREALYPSRSKNDRIDANLLLELLSKHREHLRPWQPDTVLTRQLALLTEQRRQFVDQRTALTNQLQSHLKGIFPQALEFLGENLACRLATDFLARWPTLQALQAVKPATLRQFYYGHNSRSQELITQRLELLKKAVPLTTDPALLSAHSLAIQTLAAQLAALRPFIEKYDQNIAQVFASHPDAAIFDSLPGAGPALAPRLLASLGTDRQRFLQAVAVSCYTGIAPVTEQSGKNQYWVHLRWSCPKFLRQSWHEFANSSIRFCGWAACAYQRFRKKMDHHEAIRKLAFKWQRIVWRMWQEGRLYDEARYLASLEKRGNSSPRPPSPTSQIR

SEQ ID NO: 134053 - protein, 340 aa, unidentified
MKITTIGLDLAKSVFQAHGVDADGVTVLVKRLHRKQMVPFFTKLPPCLIGVEACATAHHWARTLSTMGHEVKLMPPSYVKGYVKRGKSDALDAEAICEAVQRPTMRFVPVKTVEQQGVLMVHRTRSLLVRQRTMAANALRAHLAEFGLVANQGIANLMKLAETAFAEEEELPAYARRALEILIRRLAELTEEIADLDRELRAWHVGNEVSRRLATIPGIGVITATAIAATVTDPDQFRSGRQFAAWLGLTPQQHSTGGKRRLGGISKQGDRYLRRLLVVGATAVMRHAKDKTTPMAAWVRGLLEKKPFRLVSVALANKLARIAWVVLTRGETYRPYGSAA

SEQ ID NO: 134054 - protein, 376 aa, unidentified
MRNDSTLYVGLDVHKESITVAYAIDAGEFESLGKIGTTKTEIDRLCKRLQSKAPHVRIAYEAGPCGYGLYRQLVERGFECMVCAPSLIPQKPGDRVKTDRRDAVKLARALRAGDLSAVHVPTVEDEAFRDLARAWATAREDLRQAKQRVKSFLLAHGVRYAGRGDWSGAHKRWLSGYSFGNAWQQLAFEELRRTIDDRLAQCERLEATLREAAVSWRFFPVVQALQAMRGVQFLTAVGMVSELGDLSRFMHPRQLMAWFGVTPSEHSSGGKRRQGSITKTGNSYARKLLVEAAWSYRHAAKVGREIQLRHEGLPKTIVDRAWDVQVRLCQRYRKLVARGKSANIAVVAIARELVGFIWDIARLAMLPTSSANAVRA

SEQ ID NO: 134055 - protein, 339 aa, unidentified
MKYTPVGVDIAKHLIQVHFINEHTGEVVDKQLRSRDFLTFFSNREPCLIGMEASGGSQHWARELTKLGHKVRLLQARFVKAFVMGNKNDVMDARAIWMAVQQPGKEIAVKTEEQQSVLVLHRTRRQLVKFRTAQINSLHGTLLEFGESIHKGRAAMEREFPEALERMKERLPPYLITVLEDQYNRLSELDSLIDDIEKQLTSVARQNETCKRLLDIPGIGPLIATAAVATMGEASAFKSGREFAAYVGLVPKQTGSGGKIRLLGISKRGDTYLRTLFIHGARAAALLTREPSPWITELKKRRPASVAIVAMANKLARTVWAIAAYGRKYDKNHVSIRPY

SEQ ID NO: 134056 - protein, 347 aa, unidentified
MDHIGMDVHKKESQICILAEGGELIERRVRTEPERFAAVLGDQPRARILIEASTDSEWVARCLEGLGHEVVVADPNFAPMYATRTRKIKTDRRDARALAEACLLGAYRRAHRLSDPQRHVRGRLLVRDALVRTRTCYISLIRALLRQHGYRVPSGSAEAFLRRVLALSLPGRLLSQIAPLLAVMRHVNRQLSYSDQVIEDVTAQDERVQRLRTVPSVGPMTAAAFVATIDDVRRFRRAHEVEAYLGLVPRELSSGESQRRGRITKAGHARMRWLLIQAAVSILRRRPPQAEALHAWALHIAARRGKHVAVVALARRLAGILYALLRDGSVFAPGRSRHPGAALALPA

SEQ ID NO: 134057 - protein, 354 aa, unidentified
MKRTTKYVALDVHQATTSASVREESGRVIARSVLPTDGAAITEFVRGMRGAVHVALEEGTQAQWLHDLLAPLVDRVVVCDRRGAPRQGNKADQVDADQLSEQLRRGGLRAVYHGSVDRTTLKELTRTYRNLVEDATRVMLRLKALFRARGIPASGKRVYHPRARAQWLAQLQNPGARLRAEALYAELDVLRTLRPRAKAAMVTEARRDPAWPVLRTIPFFGSVRVALLLATMQTPWRFRTKRNLWAYAGLAVVTRSSADYALVAGQAVRRRRPPLTRGLNRNHNRVLKDVFKGAATAATARPGPLQDFYHSVIARGTREELARLTLTRKLAALTLRLWKKGERYDPTKLTTPAR

SEQ ID NO: 134058 - protein, 315 aa, unidentified
MLIHYIDIAKRNFVIAVSSLSKTKTETNNPKGIAHTIEYLKKHKVALVVTESTGGLEIPAAKAIRRAGIAVIIANPRQTHQFAQSQPLTKTDAKDAKMPAFFAQMTAQKEDSQTMPYQPPTEAEEVLEALVNRRNQPADMRTAEKNRLHQVHETQVGSVKQLIAHFDRLIDELDKQIDNHTHTHFDGKDQVAEQIKGIGSITTATLMAMLPELGRLSHKRIAGLAGIAPHPREGGETKFKSRCFGGRSAVRKALYMATVAATRFEPLIRDFHQRPLSEGKPYKVAVTACMRKLLTISNARMRDYFAENDTAENGI

SEQ ID NO: 134059 - protein, 482 aa, unidentified
MKKRNIYQNQSQELLSLFESAGSSAKVMCIPVDYAKKDHLVMFCNGHGDILRKPFSVKNSPEGIKYLIDQMTLSCRRCGIKKEHVFLGGEDANSFAENFVSTLRVKGWLVAGVNAHDAKKQRVNLQASTDRIDLMGIATMLLNCRANCCPAASGIYRNLRTLVRHRRKLVVMLTEVKNRTHGIVDRLFPGFLNEKKSGIIPFTQSSLYLMGNRFSPKQIRRRRRQKLIEILKRFGTSKAQETALKLQQYAAKVLHTPDEYIDTLQISLAQHVKHIRCLKESIVVLEREIAVNLAQTQGAFLTTVRGIGIVLAAGVSAEIGDPYEQKSLNNVISYSGIIPRVKQTGGVDGKTYTGHVAKRCNRILKDYVVKSAYHLGLHGPQDLMTDYKRRDASGQHADFGMGRRYLRMAISLMRTSQAYLPPNLRKDDYTLEERAGYYLTSWPYLIEKWKKVGALEAAFAENRPLGLWRQIVQELYDITLKL

SEQ ID NO: 134060 - protein, 371 aa, unidentified
MNSIVYVGMDVHKEQYTLCCYSYETDKVEYKQTIPSDYKLVLKYMEQVRSRYDGEVTFVCGYEAGCLGYSLYHQLKEHAVDCKILAPSTMGITNTHHVKTDKRDAANIAKCLAFHTYSEVYVPDNDDNDIKEYIRMRDDQKLYLKKVKQQILAFVLRQGKRFEVGKTYWTIAHLKWLRTLELSALQRETLDEYLLTYEYLTEKINRFDERIEELASTERYEKKVKHMSCLLGIKTHTALSMIVEVGDFERFEKAPKFASFLGLVPSEDSSDTRVNRYSITKAGNSHLRRLLVEAAQSYTRGTIGHKSVALKQRQQGNPPEIVAYADKANERLRRRFYKMTLNKGVNRNVATTAIARELACFIWGMMTEHVS

SEQ ID NO: 134061 - protein, 364 aa, unidentified
MKRDKYMGIDLHQATSVVYVLDSEGKLVLETIVATEASAVVRLLQSINGPLHVTFEETTQAGWFYEVVRAHAAEVIVCDPRRNKLLGEGSKADKPDARKLAELLRAGMLRSVYHGHESTRTLKELVRVYETLSVDTLRTMVRIKALYRSRGMRTPGRGVYQATQRDQWLDRMTEPGLRQRAELLYDELDQLRPLRKRAKQAMLAESRKHRACALLRTIPELGPIRCAYIVATVDTPPRFRTKHQLWSYSGLAVITHMSSEYDIRDGHIVRSRKPVATRGLNRNCNRRLKEVFISAATGGSQSEPYRSYLEGLKRRGVRPEMARLTLARHIAAIALRIWKKGETFDPEETELGNIAVSSDWPAAR

SEQ ID NO: 134062 - protein, 375 aa, unidentified
MSKSTVFVGMDVHAETIAVAVAAGRDQVRSVGTIANRPEAVRRLVGKLGKPAKLKVCYEAGPTGYALYWELTRLGVQCEVIAPSLVPTKAGERIKTDRRDAEKLARSYRSGELTPVWVPDARHEALRDLVRAREAAKEDQLRAKHRLGKYLLRNGQRPAEGCRAWTAAWWQWVRALELPYADQNTTLLDYIMQVDHQAQRIELLEGAIDRAVAAAPAELRAIVDALQALRGVAKVTAVTLATEFGSFSRFERAAQVMSYTGVVPSEHSSGPKTRRSGITKTGNSHLRRVLVEAAWHYRHQPRICQRQHALQAALPPKVAAIAWRAQERLHRRYWALAQKSKPAGKIVTALARELVGFVWAIGIETEQQLHRSKTG

SEQ ID NO: 134063 - protein, 444 aa, unidentified
MVFFGMILIREVADAPVIMGISKPAGLKSPSGEVKTMNPLFVGIDVSSRNNVVYLMKPDGSKHSSFSVQNNLGGAKLLSEKIVSALHSMQLIDVVIGLEATSIYGDSLVYALREDGSLGRFRRKIHVLNPKQVKKFKEAYPDLPKNDFVDAFVIADHLRFGRIAKEVYMDDYRYQALRTLTRARFDVIQNLTREKQRFANYLFLKCSGMAQDKDIQNTSATTIALMEHFETVDDLANADLDELTAFIAETGRGRFANPNAVAKVIQTAARGSYRLPKTVNDTVNQAISVSIASMRALKEQVKVLDKAIEQQFEIIPNTLISIPGIGKVYSAGIIAEIGDIHRFDSQASVAKFAGLVWLKNQSGEFEAEHSQMIKSGNRYLRYYLLEAANSVRRCDSEFRRYYDLKFKEVNKYQHKRALALTARKLIRLVFRLLKDNRLYIPPEG

SEQ ID NO: 134064 - protein, 342 aa, unidentified
MTLYSGVDIHARQQTLSYLDSSDGTTGQVVLDHEVDDVREFYAQFQGEVIVGIEACGYTNSFEELIEALGHRLLVGDAAEIRRLARRRQKNDRRDADLLLDLLVHGEFPTLYRYPKASREVLRQLRYRHKLVKLRTIVANTLHALALNAGLSLRARLLTKSGRKQLSTLQLSASSQQQRAELLSLADELTLRINKVELWLAAQAKADERVRRLQTHPGVGLLTSLCVVHTLGEVSRFSGTRKVAAYVGFDPMEDSSAERKAYGGISKAGSCLLRYLLIEAGQTAARDDQHLKQFYRRLLPRRGKARAKVAVGRKLLIRCFIMWRAEIDYAEFLRRGSKQETE

SEQ ID NO: 134065 - protein, 427 aa, unidentified
MKRRAYRRTPINQFEVAKVAEKAADSRLILAIDVAKDDMVAALTTQTAEVLCTLTWKHLDQSPVLVDKLGRLRDLGYTVEAVMESTGTYGDVLRHQLQQAGFAVYQVSGKRVHDAQVVYDGVASLHDSKSAAIIAKLHADGRSALWTIKSPAERELKAAVASMDVYQVQHLRLIHMLESWLARYWPEVTCLLELKSATLLALLGRVGGPADVAANPDAARKLMTGISHRLMSAEKIERVLQSASATVGLVPLPEERSALMTIATEAHRCLRACKQAKQRLVELAAGGASEVMAPAVGQATAAVLLTEIGDPRSYPSARAYLKAYGLNLKEKSSGKYQGRLRITKMGSGRARQYLWLAVFRWRQKDPIVQAWYAAKVQRDGGSKARAAVALMRKLVKALFHVARGAPMNTQKLFDTTRLNIAPALSEG

SEQ ID NO: 134066 - protein, 423 aa, unidentified
MSYRIAGIDVHKKMLAVVVSDVEVDGEYQFERVRYSSSPEHLRFLAEWLMAQQVEEVVMESTAQYWKPVWGALERYWKPICQKREGAGPMSGTLHLAQAQSNRGRRGRKKDFPDAERLVKRLVADELVLSFVPDTEQRLWRTVTRRKYQLTRNHVRLQNQLEGLLEECHIKLSSLVSDLLGASARRMLKALAEGETNPVALAAMADKNLRATQAQLCDALGACTELEPIYRRLLKMFLEELQFIDQQISKLDQELASLLSRHHDAVVHLAEIPGLGVDSAQQIIAEVGAGAATFPSAKQLSSWVGACPGEEESVEVSKSHRSPKGNRHMRRILNQAANAAAKSKGTIFEIVYRRLVSRLGHNQTIGAIAHRLCRLIWIILHRGVRYEERGPSVNAKTRRHRTNRMIRELRNLGYRVEPLVNTV

SEQ ID NO: 134067 - protein, 336 aa, unidentified
MDTIKAFVGIDVSKKKLDIALLRNSQVKPKAIPNTAAGFEQLEKWLVFQKVDLALVWICLEATGPYSDSLATWLDDHGFRVSVVNPARIKGYAQSELVRNKTDKSDAATIARFCQSTKPEQWHAPSAQIRVLRALVDRLDELKQTRQQELNRIEAYQSQQQGRLIDGVQKHIDWLSAEIDKLQSEIDDHIDNNPELKKDADLIQTIPGMGSISTAKFMAYVGDISRFDNAKALAAFAGVTPRNRRSGTSVRGRAMISRMGNAQLRTALYMPGLVARRHNPTLKVFADRLSERGMKNKAVIGAVSRKLVHIIFGVIKSGVPFDPKLGQVPLASQDGI

SEQ ID NO: 134068 - protein, 340 aa, unidentified
MEKASMIGLDIAKNVFEVHGRSAAGEVVLRRSLKRSQVEKFFARQPKAVIGLEACGSAHHWARLLGKLGHEVRLMPPAYVKPYVKRNKSDAIDAAACWEAVGRPDMRFVPVKTVDQQAALSLHRSRDLLVSQRTQLGNALRALLAEFGIMAGKGKAGLAQLVDELRAGQLELPADAVMAAMALADQRAALDAAADALERRITAQAKADKKAVMLKTAPGVGPLSAHATLATMPDPSLFKSGRDFAAWLGLTPRIHGTGGKTHTGRITKQGNQPLRRLLVLGATAWVSYAKAHPEKASPWLRGMLARRPKKVVAVAQAARTARILWAMLTHNQPYRAPAVG

SEQ ID NO: 134069 - protein, 347 aa, unidentified
MIAIGADVHKQQCTLAVQRPDGKLSMLPSMENTRENWLNLLTQLPPEAQIALEVSTSGHFVMSVLEEAGWRDRAHWVHTAGIDSLRKQKTDRLDAKRLARKLSVREQDPLPEAWFPPRPIRELRLRARQRCWVAVLRTRVKNRVRSLLQMSGLRGTNPFTASGRTWLKQQKLSEATRESVEQLLRFHDFLTTEREKSETSLRGMEKDFPEIARLQTLPGLGHILSAVIWSEIGDLKRFDSPRALVNYTGLAPSLYESGERSVHGGITRQGPVWLRWALITAVNAATHGQNAFARRYRRLRRHKLPNVAKTAVARSIARCAYGVLKHGVDYQEQRWGRKAGIEMEQEA

SEQ ID NO: 134070 - protein, 309 aa, unidentified
MKEEVVYVGLDIAKGYLELAIAKQAQRFANTGSGRRELVKWLLQLCIPVQVIAEASGGYERAIVQALQSKGVAVSLIQPTRVRHFARAAGILAKTDVIDAKVLARFGAAIQPASTQRPEPAQEALRELESQRRHLSRLLVMEQNRSAGLNQSSVRALSKSLIAKIKKQIAQLDLLIKAAIEQSEPLRAKAQKLTAIAGVGPRTAALLLAQMPELGKLNRREAAALAGLAPFNRDTGTLRGTRHIFGGRRALRSGLYMAALVATRHNPILAAFYQRLRVAGKPPKLALTATMRKLLLALNSSLKPLPLPT

SEQ ID NO: 134071 - protein, 446 aa, unidentified
MKKSSRMSIVHPHAAGVDIGAEFHVVAVPPDADTEPVRTFQSFTGDLQRMSDWLKTCHITTIAMESTGVYWLPAFEILEAAGFKVILVNARDAKNVPGRKTDVNDAQWLQKLHSFGLLRASFRPEHDISVLRSYLRQRERLTEYRAAHIQHMQKALMQMNVQLHHAVSDITGVTGLSIVRAIVSGERDPSMLIQYRDVRCKKTPEVLRQALTGNWQPEHLFALEQSVAFFDFYQEKIRECDDQIETSLLQLSTGIEEPEGVLPSARHRTKQPNQLSFDVRPLLWKITGADLTQIHGFGPYLALKFIAECGTDMNRWPDASHFTSWLCLSPGNKISGGKVLSSKTRRSSSRIAAALRLAATTIGRSDTALGAFYRRLSSRIGKAKAVTATARKLAILFYNALKYGQKYVDPGADYYEERYRSRVLDGLKRRAKSLGYSLQQDPELCV

SEQ ID NO: 134072 - protein, 411 aa, unidentified
MDKIYDKCCGIDVHKKLIVACFRCGKKQEIREFGATTRELLQLADWLKDGDCEMVAMESTASYWKPLYNILESSDLNAIVVNARHMKAVPGRKTDVKDAEWIADLLQHGLLQPSYIPDKDQRELRELVRYRKSLVGERTRELNRLQKMLEGANIKLSGTVSDINGKSARSILEYLLTGKSIDGAKYDEMYEQKIIAHNLKATKEQIVDDLNGVMSPLQRRMMKELLVHLDELNIHIKNLDDEIDNFMKPEEKQASQAIQDVTGIGNTSAQAIISVIGSDMSRFPTDRHISSWAGLCPGDNESAKKRKSCKTRKGNALLRTTLITCAHAAVKNKKSYFYAQYMRISAHRGSKRAYVAIAHSMLISIYHILKDGVVFKDLGADYYNQFNKERKINAYLKKLKALGWEAPIVDA

SEQ ID NO: 134073 - protein, 402 aa, unidentified
MERPIDVFVGIDMAKADHYAQATMADGTELFDRAVLNDEAAINSLIDDVSVHGQVALVIDMTASSAQLLLSISDQRRVPVAYVSGLQMRRAADLYAGTAKTDPIDAWVLADYARRNADRLAWIEVSDELLVRLRVLNGRDTDLAADLTRIVNRCRDSLLAISPALERSIGHRLDKAGVRDLLARWATPTALKAAGKTRIRNAIKKRSPRVAAKYADEIWVALQSQTVTLSAEQTWGEVITDLVADLERVHQRRSKLTATIEETFLAHPLGKVLVTLCGFGPRTGARTLAEIGDPNRFDNGGRLAAYAGLAPTDRRSGRSINATSRNRSGNHRPKNAMFLAAFVATQHDANARAYYQRKRAEGKKHNAAVICVARRRCDLILAMLKTATPYDASRHEIIPIAA

SEQ ID NO: 134074 - protein, 387 aa, unidentified
MPQHHDLSRSLLTLDQASTLIAVIEMSQSSWLVAAIVPGIARHPLKKINPDETMLLGLLRRWQDEAAQAGRTITRIAVAYEAGRDGFWLARWLRARGIEAYVIHPTSIPVSREHRRAKTDRLDTALLKRAFLGWLRGEPGHCSMAAIPTLDEEDAKRPSRERETLVSERTRLVNRIKGTLVRLGIRGFHPTLRTAPERLEAMRTPEGAALPPNTLAELRRDMARLRFVRDQIKEIEQTRIERLEQAPAAGSQAMVRLLARVIGVGIETADMLVHEVLSRNLRDRRALARYAGLTGAPDESGAKRREKGLAKVGNARVRRGMLQLAWRFLLFQKESALAQWYRARTADARGGTRKTMIVALARKLLIALWRLVTTGEAAQGIALRPVT

SEQ ID NO: 134075 - protein, 344 aa, unidentified
MKDTNILAIDLAKNIFQVCKRDPKGKVLFNRELSRAKLKEMLVKQPRSLVAMEACGSAQYWARLARALGHEVKVISARTVKPFQTKQKTDRNDALAIAIAASQEHIHGARVQSAEEQALQSLERARHLAKTHQIAQSNQIRGLLGEFGIIVPPSLSQLRKHIPFILEDAENSLPQSFRETLNYLWQHLLQQIEHVAILERQLEGAVKYDTTCQKLMKLEGVGPIGALGLAVRLGQGENFTNGREASANIGLTPKQHSSGGKERIGHISKRHADKRLRSTLFQGALSVITQVSKRPARTSKERWLQALVERRGKKIAAVAFANKTVRTAYAILKNDTEYQPISLA

SEQ ID NO: 134076 - protein, 351 aa, unidentified
MGTAAATATAVIGIDVSKVTFDACLLTPDGKAREKAFPNTPAGFAALLTWADGHGAGGTARVGMEATGGYEDALATHLHAAGRVVSVVNPTRIKYAGVMRGRRNKTDKADARLIAAYTRDEAPPAWSPPAPEVRELQAFVRRRDDLRALAATEKARIESPLLTPAARKSVARVVKLLGKEADAMQTAADALIAATPALAADAELLATIPGVGTQTASTVLAELPALDRVPSAQSAAAYAGLSPREFQSGSSVRVRTRLSKSGNARLRKALYLPTLTAIRFNPLLKAFFDRLVAAGKPKMQAVGACMRKLVMICYGVLKGRKPFDAAHGVRPAAGGSAGGPAAAGRTPIFVP

SEQ ID NO: 134077 - protein, 368 aa, unidentified
MAKRSTFVGLDVHEESIAVALAEGGRCGEVRTYGTVGGDLDALDQVRRTLARPARTLHFVYEAGPCGFTIFRHLTAQGEDCAVVSPSMIPKRPGDRVKTDRRDAVTLARLHRAGELRPIYVPNDSDEALRDLVRAREDAVEIAREAKQRLKAFVLRHGLRYRGRAGWTIPYRRWLAGLTMPDPAPQVALQEYLATVEEAEHRVDRLTEQLRQLVPLWRWAPVVDALQALRGVSFITATGLVAEIGDIRRFTRARELMAYLGLVPSERSSGPLTRRGRITKAGNAHARRLLAEAAWAYRSVPRIGRQMQQRQEQLPATIRALAWKAQLRLCGRFRRLNARGKPRSVIATAIARELTGFVWAVAKEVPAP

SEQ ID NO: 134078 - protein, 342 aa, unidentified
MEQVSIIGIDLAKRVFQAHGAAADGSVVFRKKLSRSQFLAFLAAQPRCTVAMEACATAHGWGREIGELGHEVRLIPPIYVKPFVKRQKNDAADAEAIAEAASRPTMRFVAVKSEEQQARSMIFRTRDLLVRQRTQLINALRGHLAEHGVVAPQGTAHVKRLADVIGDETAALPATVRQIGRLYLEQIDVLNGRIDALGKKLRAEAGQGEATRRLQTMPGVGPITAVAIESFAPPMETFRRGRDFAAWVGLVPRQNSTGGKQRLGRTAKMGQRDIRRLLIVGAMAVVNSAARHGAPEGSWLERMLAKKPKMLVAIALANKMARAVWAMMTKQEDYRYPAAVAA

SEQ ID NO: 134079 - protein, 340 aa, unidentified
MTVLYAGIDVSKDKFDVSFTTDGKRIFNYSMFTNEKKGIKSFLKKALVLMKKENCEKIHFIMESTGIYHCGLCEYLQEHSDHIVSVVNPVQTKSFSKSLMLRTKNDKVDSTMLAQYGYYHNPKPTPKMPETLKHFRSLVRLRDALIEERTRKIAQLKSSLDKRVQNYFERSIKFTEKEIEKLENEIKELIKNDDYLSRQIALLKTVDAISDTTAWKLLSEVKVNAENINPKAQAANAGLTPREFSSGTSVRGRTHISRMGNRSIRKSLYMPALSCIKNQNYFYDFYNRLVENGKPKKSAVTAVMRKILVTAMGVLKNQQPFDPDWAEKTRKNYLENLKIA

SEQ ID NO: 134080 - protein, 358 aa, unidentified
MQIIGCDLHARQQTVAMLDTDSGELVEKTLEHDGEELREFYSGLSRPVVVGIEATGAMQWFLEWMEELGIECRVGDPAKIRAAEPRKQKNDRRDAQLLLKLLSENRFPTIWMPSTEQRDLRTLLRHRHQWVRMRARLQHTLQSMALNHGLRRGHSLWNQAGQQALRALPLAPHASERRKALMTLYPSLQESIDELDRQISQQAQNHPAARRLMTHPGVGPITALATEVFLGDPLRFTDGKAVASYIGMIPREHSSGGRQRLGAMSKQGNALLRYLWCEAAMHAVGRDPELKRFYRRKLVQKGLGKARVAAARKLGIRLWIMMRDQIDYQEFCRRGETRQESGSVCAGMPGITSDPKKS

SEQ ID NO: 134081 - protein, 326 aa, unidentified
MLQKAELSDKADSENNLGGSSETMYFIGLDVHKKTISYCVKDAAGCVYKEGKTGSTRRELDNWIRTLPQPRMIAMEATIFTGWINDHLLPHAEKVKVAHPLMLRAIAAAKKKNDRIDAGKIADCLRCDFLPECHMATAEIRDRRRTLRYRNLVLRQMVQMKNRVSGLLMESGVSYDKQRLHKVGYFTDLLSASEEINESIRPLLKLSREHILRAQRLDRALTSSLERDPLLSERLRRLRTIPGVGPITALTWALEIGDYTRFRSVKEAISYCGLCSAEKSSADKVMRMPISKQRNKHIQHVLVEAAKMAPRQDFVPAEQLAGKAVA

SEQ ID NO: 134082 - protein, 375 aa, unidentified
MEHHSEAFVALDTAKLRNAVAIADAGRAGEVRYLGEIDNTEAETRKLVAKLASKHARLTFCYEAGPTGYGLYRLIKSIGHDCIVVAPSLIPSKPGDRVKTNRRDAVNLVKLLRAGELTAVWVPDERHEAMRDLVRARDAAVKDYRIKRQNVSSLLLRLGRHYPGKKTWGRAHINWLTGLKLEHREQRIAFEEMLLAVRQVRERIERLEQAMREAVADWTLAPVIEAVQAMRGIDMVGAIAFLAELGDLSRFENPRQLMAYLGLNPSERSTGESVKRGGITKAGNTRARRLLIEAAWSYRFPPRVSKDMQARIGAAPRTAREIAWKAQMRLCGRFRALTRKGKRPTIVVTAIARELSAFIWAINREVVGSHAAANQ

SEQ ID NO: 134083 - protein, 394 aa, unidentified
MKLIGIDIGKNKHFFCIMDQQTGEIIFQPVSFSNDKEGFDFLIQKINSYPKDSVLIGMEDTGHYHFALLKYLLNLQYTVALINPKTTDFNRKMQGGITKNDKLDTINICDVLDTPERKKQYRISKVNSFDLYEQKQLTRHHHNLKEEENVYKNRLQKCIDIVFPEFNKLFNSKYGTVYMNILKTFGSAENIANTDIRTIRKCFEIEGRGNRISLTPERLKECARSSIGISSSAEVIQIKHLTAQIELIEEQLTEIDKKIEEFSIQNNSPILSIPGISHFSGTSILAELGDVSNYSKPSQIIKFAGVAPLHYESSQFNAQHTSITKKGSKYLRKTLYQIILPVIKHNPVFNKYYQLKISQGKGHRCAQGHCVRKLLRIIYHLLKTNQQFDHQLLS

SEQ ID NO: 134084 - protein, 391 aa, unidentified
MIYIGIDVAKDKHDCFITNSDSEVLFKAFTIFNNLDGFNDLYQKIESVMDDVTKVKVGLEATGHYSYNLLGYLIDKGLPTYVINPLHTNLYRKSLSLRQTKTDKVDARTIASMLMSDVNLKSYSDTSYHNEELKSLTRYRFDKVKERAKLKTSVSRLVCILFPELEKLVPTLHMASVYALLSEFPSAKHVATAHLTRLTNLLSKSSKGRYGKDTAITFRDSARASIGSNMPAKSLELKHPIKLIQELDSEIDEIENEIKIIMDEINSPILSIPGINYRMGAMIIAEIGDFNRFDSPDKILAYAGFSPSTYQSGQLDGAYAHMEKRGSRYLRYALYNATKYVCHWDPTFAAYLAKKRAEGKHYNVAISHAVKKLVRVIYHLEKTKQQYIKAA

SEQ ID NO: 134085 - protein, 316 aa, unidentified
MKTPVFIGLDVSKQHLDVAVRPHNRHFVTPNDDRGIKQLVKRLAALKPQLIVLEASGGYEFLVTAALAEAQLPVALVNPQAVRKFAGAVGKLAKTDKIDAQVLAHFAEALRPEPRPLPDQVHQVLKAALQRRQQVVKMIGQEENRLEKTFIPTVRRDIEAHLTWLRQRLKELDRDLDDQIRQSPLWQDRDRLYQSVPGIGPVVSLAVIAQLPELGTLPGKKAAALVGVAPYNRDSGRFRGKRMIRGGRSYLRRMLYMAAVVASRFNPVIRAFYQRLLATGKPKKLALTACMRKLVLILNAMVKHNQPWNQFINQVP

SEQ ID NO: 134086 - protein, 388 aa, unidentified
MYLVGIDIAKYNHQCFIATEAGEVINEFSFDNNLLGFNELLKALKSLDQSQEIKIGLEATGHYANTLKQFISAKGYTFVEFNPYLAKQFFKSTTIRKTKTDKVDARLLSSMLAAVNYKALHTKYYHINELKALTRARDSLITDRSNYLVQITNALDNVFPEFKSFFNNRLGDTALYILNKYNSLEKISKITRNQYDKISRVSMGKFTYNKLLLLKRLAKDSVGIKSGTYFSLIKRYISLINSLNNELKIIENDIYEIMNMVDTKLTTIPGLSLMSAAIIIGEISDIKRFSSPSKLTAYAGFDIAIYQSGEQKFYGRLVKRGSPLLRKTIWNLVFGSIRLIPQITEFYYKKRAEGKHHKVAYSAICRKLIRLIYFIESTNTTFDIKQYR

SEQ ID NO: 134087 - protein, 330 aa, unidentified
MIDEGWTPADEDGLATLVAHLGPDALACLEMMSGAAWVRDQLGSAGWTVQIADARKAKAVGSLAAKTDKLDARVLAELARRDLVPQVHVPTFPDRELKERLGRRMHMVRLRTAAMNRTHGVLSQFGVTLAFKRLREPDREELLIKRGIPEVWRRSIAEAVAVVAMLDQRLIPLEQELRPLARADPRVQLLITIPGVGDLLGLTIASEIGEISRFSSARKLIGYSGLTPRVYQSGQKARTGKLSKAGSTMLRWAAIEAAQQAWRPSNPWNQLYLDVKQRCGGKGNPAKAAVARKVLIATWHVLALQQPFNPSRPRGADAPVPASSSCVLAD

SEQ ID NO: 134088 - protein, 356 aa, unidentified
MKRTDYILRNEKVFVGLDDSKKTWSLCVRSGGVVVHETSMPAEYDVLRNYFNNKFPECAIQVIYEAGSRGFGLHDQLVADGWECVVTPPHTVTEEKVQRQKNDRTDCRRLAKNLENEDYGSCFVPDKGLREDRQISRTCGQVQADIIRVCNRIRRMLEFHGLDEGLPAGNWSPAGYARLREKLGQIQISDSLRFSFQVMFRELENLHQLKKELVQQLKKLAMSERYKNSVKLLMSAPGIGVLTAIRLALEWGDVSRFGRKEEFAGFLGLVPSEYSSGEKEHRGHITRQGNPSVRRWLTESSWVAIRHDPVLLDKFRRVSSHCGSKKKAIVAVARKLALRLRRVLLSGEPYVVGVLE

SEQ ID NO: 134089 - protein, 314 aa, unidentified
MNEHFIGIDISKDYLDIADSATQKTWRTSNDETGIADLTKRLSTPAPTLIVIEATGGLETPLASALAANQLPVVVVNPRQVRDFAKATGQLAKTDTLDAKTLARFAAAVRPELRQIKDQETRELAALVTRRRQLVEMLSTEKTRLKQVSKPILQNVEIHIAWLKNQIREIDQDLSKTLKRSSVWKENDQIIQSVPGAGPVLSVNLLANVPELGTLNRRQIAALIGLAPLNRDSGTFRGRRCIWGGRASVRSTLYMATVTAMQHNSVIRTFYQRLTAKGKPFKVAITACMRKLLNIINTMVKNRTQWNENLILGA

SEQ ID NO: 134090 - protein, 342 aa, unidentified
MQITTIGLDIAKNVFQVHGIDAAEKVVVRKQLRRSQVLAFFKALPPCLIGMEACATAHYWARELTKLGHQVRLMPPKDVKAYVKRNKNDAADAEAICEAVRRPTMRFVQIKSVEQQGRLMLHRVRDLLMRQRTQVINALRAHLAELGIVAAQGREGIKELLKIIASEEDAVLPVDAHASLVVLAAELQAMQTMIGSIDKRIMAQHRSNEASQRLESIPGIGVTGATAIAATVPDPKVFRSGRDFAAWIGLVPRQDSTGGKQKLGPISKRGDRYLRRILVVGACAVLRYARQQPQKYPWLTQLLARKPFKVVAVALANKMARMAWALLAKGGTYRAPMLVAAA

SEQ ID NO: 134091 - protein, 505 aa, unidentified
MATPTTRQPPAASSPPSGQQARAQAQRQAYHRRKARAKVKSEAGRQQEAGHVEALPVQHPHAAGIDIGSRSHWVCVGFTTDAASCLIREFPAHTAGLKAIAAFLREHQVNTIALESTGIYWIPLYELLQAEGFEVFLVDPSYSQQLRGRPKTDRRDCQWIYRLHSVGLLAAAFRPDEKTCQLRSYLRQRANLIRQASKHVQHLQKALEQMNLKLTEVLSDITGVTGRTIIRAILRGTRAPEKLAKYRDKQCKASEAEIAQALTGSYREEHLFALKLAYEAWQFTLGQVEKVDGQIALQLGRMKCDRALPPLKPKARPKRRVNSPGFDVRTALYYVVGLDLTDIEGVSELTALTVISEIGPGVSRFATVQKFCSWLGLCPNWKKTGGRVKSSRTRRGVNRAAQALRLAAQSLHHSQGALGGFLRRMKGRLGTQAALTATAHKLARTVYLALKHGIPYVRQSQQEYEAQMKEKQIKALRRKARLLGLEIVEKTSGSVPTAAEASAQG

SEQ ID NO: 134092 - protein, 411 aa, unidentified
MDRIYDNCCGIDVHKKLIVACFRKGNKQEIREFGATTRELLEMAGWLKDGSCEMAAMESTASYWKPLYNILESSGLNAMVVNARHMKAVPGRKTDVRDAEWIADLLQHGLLQPSYIPDKEQRELRELVRYRKSLVGERTRELNRLQKMLEGANIKLSGTVSDINGKSARNILEYLLTGASVDGPKYDEMYEQKIIAHNLKATKEQIIDDLNGVMSPLQRRMMKELLAHMDELNIHIKNLDDEIDSFMKPEEKQASHAIQDVTGIGNTSAQAIISVIGTDMGRFPTDKHISSWAGLCPGDNESAKKRKSGKTRKGNSLLRTTLITCAHAAVKNKKSYFHAQFMRISSHRGKKRAYVAIAHSMLIAIYHILKDGVVFKDLGADYYNQFNKERKINAYLKKLKALGWEAPVVAA

SEQ ID NO: 134093 - protein, 373 aa, unidentified
MSEFNKFVGLDVHKSTIAISIASDDGAEVRYFGEIKNTKEALINFANKISQGSLKLSFCYEAGGCGYEVYRHLRNIGHDCMVVAPSLIPKKAGQRVKTDRRDSLNLARLHRARELTGVWVPDAMNEALRDLTRAREDMKHLQRQAKQRLLAFLLRHGWTYSGKSNWTKDHFNWLETVKFQHAAQQIVFQEYVDTVKYCGKRVESVTQQIEICSRESACWPVIESLMALKGIDLISAATIMAEIGDLTRFDSAPQLMSYLGLVPSEHSSGSSVRRGGITKTGNSHVRRVLVEAAWTYRFPARKTAHTQKRAKVTTEAVQEISWNAQKRLCQRYKELNANGKIKVQTCTAVARELAGFVWAIGQTVPLKPTAYVQ

SEQ ID NO: 134094 - protein, 387 aa, unidentified
MSQTIAAPIPAAVDYDGTLVLAIEVSNKSWVLAAQVPGLPHTKAKRTINPEAEALLAAITGYRTRAAATGGSIERVIAVYEAGWSGFWLARWLMRHGVEVYVVQPSSVPVDRRMRRAKSDGIDSELLLRTLLAWLRGEPRVCSMVPVPDEADEDARRCIRERTELISERIGLTNRIGAVLATLGVSDYNPLLRNRCHRLAELRTGLGEPLPANAHAKIKRLLARLELVLTQIAELERERDAVVETQAPDKASKMIQQLTGLRGIGVQSATVLVREAFVRRFANGKALGSYAGLASSPYSSGGINREQGIGKAGNRRVRTVMVELAWLWTRYQPAAAQVCWFRERVGSTGPRVRKIMVVALARKLLIALWRFVIDGVVPEGAVFKTAA

SEQ ID NO: 134095 - protein, 438 aa, unidentified
MRISLVCWVQEIVYKKVELIRYCEDFYDWLKRRIYMKHVIALDVSKGKSMIVIYDSYRRCEFEDELHHTRVDFERLHERIKDITKLDGQAPEIVFEATGIYSKPVESFLKDYGYTYSRMNPLEANLQMAKMRRHKTDISDAHDLAKTHFKMEREATYIQDDYYEQMRALTRYYDEIDEEMILIKNRMHAILHMSFPELETLLTPGSALFLNVIQLYPHPVFVLAHSKTVIKNRLKANTRKNLSLARAEAKAIELLEAAKNSYPAIKATDVRCDQVRDYAARIADLKDKKEALVKQMIALSKERKEYIVLRSIPGIGDSTACRLIGEMGDIRRFKNAKQLNAYVGIDIMSYQSGNTQYRDRINKRGNKQLRKILYFMVCAMLMAKGQPNHFVDYYYKLKTQPQRKPHKVAIIACINKFLKVTFQLLTHGILYDYKTATN

SEQ ID NO: 134096 - protein, 397 aa, unidentified
MSTASTSPSSGPCRVVIGMDPHKRSVTIEVMASDETVLGRGRFDTTVDGYAAMKRSVASWPDRVWAIEGCNGIGKHIAARLLADGEQVIDVPPKLSARARVFTTGQGRKTDATDAHSVALVGTRMAGLHPVVDDQQLAVLQTLVDRRRSLGEDHTRMISQLHALLLLLVPGGAKKFLSAAQAKTILAGVRPRDPASKARRRVAAELITDLERIYQRSKAADKELRELVVATGTRLLELHGIGPSGAARLLVEVGNIQRFPSKAHFGSWTGTAPIDASSGDRVRHRLSRGGNRQINRVLHTMATVQLRNPTAGRAYYDRRKAEGKTSMEAMRALKRRLSDVVYRTMLRDTHDIPGTGPGGQPGTTPDSSAADSNPDIDASEKSLPGPATDHPTTPGLT

SEQ ID NO: 134097 - protein, 455 aa, unidentified
MARKKKTSRKKKKVVQMEALKQINFNAAGLDIGAAEIWVAIPEGRDKQTVRKFDTFTVELHTLVDWLIECNIDTVAMESTGVYWIPVFEILEERGLEVLLVNARHIKNVTGRKTDVLDCQWIQQLHTYGLLRGSFRPSAEIVVLRAYIRQRNNLLRYRAAHTQHMQKALHLMNIQLTNVLSDITGLTGMLIIRDIIAGIHNPVLLAQHRDPRCHSAKDEIAKALTGNYRQEHLFALQQAVELYDFYTKQIEHCDTEIEEMYSNFTPKADSIANPLPPVKKKKRKNNPDFDLRSKLYQTCGVDLTHVDGLDSILVQNIISEIGVDMSKWETSKHFASWLRLCPYNDISGGKVLKSRTGKTTNRANLAFRLAARSTGRSDSAIGAFYRRIKARHGAAKAITATAHKIARIVYHMLKYQEEYRDAGAEAYEIQYQARILKNLQRKAKKLGMVLTPLTA

SEQ ID NO: 134098 - protein, 436 aa, unidentified
MSKSQNPTKEVIPIMKKRIYRRMPVNDFQPDTVSHADLGGKLIFAIDVAKVDMVAALAAADGRVLHTICWKAPEQNPTVLSILRSFRAAGVTVEAVMEPSGTYGDVLRHQLEQEAFPVFMVSGKRTYDAKEIFDGVPSLHDAKSAAIIARLHADGLSTRLPDEVPERRQLKAALAIMDLHQERYVQLVHRLESWLARHWPELPTLIDLTSASLMALLARIGGPADVAAAPDQATKLLRGISHRLIADEDVAAVVASAKASVGVPLVGLERDALMAIADEAYHAHRAFSTAKTKVDKLADTTPAAMLAPVVGHTTAAAIFAEVGDARSFSCTRAFLKAMGLNLKEKSSGTVHGQIKITKRGPSRVRQLLWLAIFRWIQKDPIANAWYQRKKQRDGGRASRAAVALMRKLAKGLFHVGRGGTFDSSKLFDTRRLQVVA

SEQ ID NO: 134099 - protein, 453 aa, unidentified
MKASRVCSARKTKNNPTLKMNQTKLNRIASGQGDFAALIGLDWASQKHALCLYDCATAKRENSILEHTPEAIAHWARGLEQRFGGKKIALCLEQAKGPLIYALLEYSFFVLYPVNPATVARYRQAFKTSRAKDDPADAQVCLELLLHHREKLTPWLGNDGATRELSRLLEARRSLIDLRTLLTNMLRDALKSYYPQALELAGQDLFAALGCQFLLKWPSLEQLQKARTESVRKFYYAHNCRRMDVIEKRLQAIAQMKPLCRDRALIEPALIQVKMLVRQLLQLRTALKEYDSSIEHLFAQHQDATIWQSFPGAGPTLAPRLCCAFGSERSRYQSVLAIQQYSGIAPVQEKSGKNQHWVHRRWARPHFVHQSFFEYASQSALHCPWAKLFLKEQIARGKTHPTAVRALAFKWQRIMFVCWRDRVPYNETTYLQTLKHRGSHLARKLDQELLKVA

SEQ ID NO: 134100 - protein, 346 aa, unidentified
MSYSTTVGVDLAKNVIQISVVSGRGKELSNRSLTRTKFAEFLGKQKPSLVAFESCATSHYWARAAQRHGHEARIIPAKAVAPFRQGHKTDSNDALAVAEAARRPNIKEAPMKTIEQQGLQAIHRSRELLIQESTALSNHVRSLLMEFGIVIKRGFASLLRAVPEILEDGENELPDLYRPTLHRMYTRLLELREDIEAMTGEVERLAKAHPICSKLMALEGIGPIGALLLYATMGSGAAFSSGREFAAYLGLAPKQYSSGGKTNIVGLSKKIGNSRLRSVLILGARAYVYKLKEPKSSKDKWLKAIIERNGESRAAIALANKNVRTAWAMVTQGTEYQRREQLPMAA

SEQ ID NO: 134101 - protein, 420 aa, unidentified
MISKQNVEIAAFIGLDWADQKHAVTLQESGSDQRQRFTLDHTPEALQNWIPSLRDRFGGKPVAIAVEQKRGALIYALMHVEFLHLYPVNPVTVAKMREAFYPSGAKDDPRDADLLLDILISHRRHLRVWTPDDALTRSIQLLTEDRRRIVDERTALTNQLTAALKMYFPQSLDWFGDLHTARACAFLQRWPSLDQLKQESPSSIRKFYKAQGYRGDEKLEQLVGNIKKAQPLTPDSAVLLSCSMKVETLVQQIPLLTEAIERYDQKIAVLFNQHDDSTLFGSFPGAGAALAPRLLAAFGSNRDRFECASQVQELSGIAPVTEKSGEALWIHWRLACSTFLRQTFHEFAGCSILQSDWARACYDQLRDRGKSHHAALRALAFKWIRIMFRCWKNRKPYDEVLYCNSLKLRRSPLADELPAT

SEQ ID NO: 134102 - protein, 389 aa, unidentified
MLLDHPSDEPAAIRTQFGAIFVSLELCRSNWLVTSLSPGKGEKMSKHNVAAGDIAGLLQLFAELKRRAQARTGQDYPIITIQEAGLDGFWLHRVLQQEGIESHVVDPASIATPRRRRRAKTDRLDGETLLRALLAYKRGEPRVCAMVVAPSPEEEDRRRICRERATLIAERIAHVNRIKGLLSAQGISDYAPLRRDRRARLAALRTGDGRELPAHLRAQIGRELDRIELLLEQIKAVEADQDALVGAAEDKAGKGAVPAPVAMLLALKGMGANFAAVLWSEAFYRQFANRRQVGAYAGLAATPWQSGGIRHEQGVSKAGNPRLRTKMIQLAWLWIRHQPQSELTRWFKARSQQGRKSAIVALARKLLVALWKYVTAGVVIEGAVMKRAA

SEQ ID NO: 134103 - protein, 460 aa, unidentified
MNRKQSKSKMDRTMPTVHPNAAAIDVGATMHMAAVRADGASEPVRSFGTFTADLHRLVDWFTECGVETVVMESTSVYWIPIYELLDARGFTVFLVNARDAKHVPGRKTDVSDAQWLQRLHSFGLLRASFRPKGQIAELRAYVRQRERLLQYAASHIQHMQKALTEMNLQLHHVVADITGATGLRIIRAILAGERDPEALASLRHYSCHSSAETIAKALTGSYRAEHLFALEQALALFDAYHEKASACDIRIEAVLKELSTHRGCGHGAVPPASRRRNRADQANALAFDVRAALFALLGKDITTIDGLGPYLSLKLIAECGDDLTSWPSAKHFTSWLGLAPSNKISGGKVLSSRTRRSGGRAAALLRLAAVTVGRTDTALGAFYRRLSSRIGKAKAVTATARKVAVLFYNAVRHGMEYVDPGASSYEKRYRTRVINNLHRRAKTFGFVLQPLEPKVGAAVS

SEQ ID NO: 134104 - protein, 310 aa, unidentified
MEGKVDNNMKSIKTWLNQLKKDLRWNISEILFCIEHTGVYGSILLRELSQRSLLVCMENALNIKLSLGLQRGKNDKIDAQRIAEYALRFTDRLNRWQPKREVLVRLQILIRLRERLVKAKTDISRFNKDAIRFLTKQESQLILKGTKKPIETMTTQIKKVEQDILRLIQQDENLSRLTELITSVDGVGMVTCSAILVKTNEFKDIKSSKKFACTAGIAPFDHSSGKSVRGKTRVSHNAHKDVKKLLHLGAVSVISRKGVLQDYYLRKVAEGKNKMLVLNAVRNKLVSRIYAVVRDGVTYQKNYQYRLEKS

SEQ ID NO: 134105 - protein, 361 aa, unidentified
MAKSTTIVAFDQHAATTVAAVLLPGQRTAALHSLTSDSSTILRFVQRLRATSVQCCYEAGPCGFELQRTLTAHDIRCDVIAPALIPRRAGDRVKTDRRDASQLAVLYRAGALTAIHIPSEQEEAARDLLRCREDIRADLLRARHRLSKFLLRHGRRFTGTKTAWTKRYTAWLQAQRWPITALEQTHRAYVRTVDEAVGRLQAVDAELRDLLTLEPLRARVERLRCFRGIDDLTALTIATELGDARRFPSAPRVMAFTGLVPSEYSSGTKQVRGRITKTGNAHLRRVLVESAWQYRHHPFLGRALRLRQRGAPAAVIEQAWHAQHRLHRRYRRLAARGKAKQHIVTAVARELSGFLWAALTH

SEQ ID NO: 134106 - protein, 376 aa, unidentified
MNNVRFVGLDVHAETIAVAVAEPQGEVRAVGVIPNRLESIRRLVKKLGPAEQLRMCYEAGPTGYVLYWQLTALGVKCEVVAPTLVPTKAGDRVKTDRRDALKLARSYRAGDLTPVWVPDAAHEALRDLVRAREAAKKDQLRARHRLGKFLLRHGRRPSTAMRAWTQQHLTWVKTVLFEHAAQEATLLDCLHEVEHQADRIARLERAIDDAVKTAPERVRTVIEALQALRGIAQVSAVTIVTEVGELSRFPKPRQLMGYSGAVASEDSTGPRTRRGGITKTGNAHLRRVVIEAAWAYRYRPAVGDALRKRQACLTPEVKAIAWKAQHRLHGRYCWLTAKGKCKQEVVTAVGRELLGFIWAIGVHVEANRRQASSAAA

SEQ ID NO: 134107 - protein, 417 aa, unidentified
MDVLLPICCGLDVHKATVTGCVTVLLPDGTRKKEIDSFATTTDGLLRLANWLRDAGCKHVCMESTGVYWKPVYNALTLSGCFEAVMVVNAAQAKALPGRKTDCKDAEWIAELFQHGLLRASFIPDQPQRELRDLTRTRTILTDERSATVQRLQKVLEDANIKIASPKMVTDIMGVSGRLMIEAILEGHTNPETIANLAVGRLRKKRAELEKALVGLVREHHRLLLAMHLEQIDLLDDQIARLSQEIAERLRPFEDELARLDTIPGVGRLTAEVIAAEVGLDMSHWPTDGHLASWAGMCPGNHESGGKRTSGKTRKGNKWLRRALTESGVAAGRANGTYLQAHYRRLAYRRGPKKAAVAIGHSILTIVYHLLNRKTQYNDLGPDHFNERRRERAKRRAVAQLEQLGFEVTLTPKKAAA

SEQ ID NO: 134108 - protein, 408 aa, unidentified
MKRYYIGVDWGDRLHQVYVGDHEGKKIREMKVPETVEGLAEIGRWLDEQRADGFELWAAIEKPAGRIVDFLLDHGVEVYPVNPKAVDRVRDRYRMSGSKSDAFDAYVLAEFLRTDQAHLKALRPSSENAQELKMLCRDQHRVVRLKSRLLNQLTTTLKEYYARPLEVFQDIETEVALDFLTRYPTPAHLSALKRKEFSRFATKQHHLSKQRCEELWEKLEKPQLGVPEHVVRAKAQLVEVLIDQLRASIKAVKTYNHKVESFFASSPAAHLAKTLPGGKSGTLVAAIWAELGDAQGRWESSGHLQAEAGAVPVTKASGKSHVVHFRFACNKQLRYSMYWFSFVSLNNSEWAKLYYRGQRDKGHNHPQALRALGAKWLKIIFVMWRDHKPYDEQFHLANIALQKMRQAA

SEQ ID NO: 134109 - protein, 337 aa, unidentified
MNNNAVGLDISKNVFHLYSQTDDGKVVKKKLKRGELLAYIANMPVSLIGMEACGGAHYWAREFSKLGHEVVLLNARFVKGFVVGNKNDFNDAEAIFTAVTRPNKRVVAVKNETQQDIQMLHCLRQQRIDQRTALVNQVRGLLSERGITLPKGINQVRKQLPWILEDAENGLTSLSRELFAEQYEQLKALDGDIKAQDSRINRRCQQNALSRRFLEVPGIGPIFATIMASDIGDGKGYTKSRDYAASLGVVPRQHSSGDKQVLLGISKRGNAYLRTLLIHGARSVIKCCHDKSDPLSRWLQALVERRGFNKAAVALANKNVRILWAMARQDQPYQAAA

SEQ ID NO: 134110 - protein, 355 aa, unidentified
MNSEKYIGLDVHQAIISVAVLDSTGKLVMESILETKAATILEFFAGLRGTLSVTFEEGTWAAWLYDLLKPHVAKLVVCNPRKNALLKDGNKSDRIDAHKLAELLYLNKLSSVYHGETGVRMLRELARSYLTIVKDLTRVMCRLKAVYRSWAIPCAGRDVYSTRHRIEWLGKIKEAGVRRRAERLYQQLDMLQYLRQQARRELLAESRKHAITVKLRQIPSLGPIRSALAVALIQTPHRFRTKRQLWAYSGLALETRTSAEYCYVKGGLRHSKKQISIRGLNKDHNHDLKGLFKGAATRASVLPGPFQDFYQRSLAKGIKPTMARLTLARKIAAITLTLWKKGENFDADKLKSQAA

SEQ ID NO: 134111 - protein, 311 aa, unidentified
MPVSSLTPCRQPLISSLIAATTAPGSARNWKPGTSSRACTQVCIIDENGRKLSSEKVESTPDAIADALRQHGPIERAVIKTGRMSPAICLGLRELGVNVVCIDARQAHQSLKAMKANKTDPHDAAGLAQLARTGFYKEVHVKSPGAHGVRSMITARGHLVEARVRLDNMIRGLCATFGYRPGIGQGKAFIERIMEASHIPGLGEAITSLLTVRVQLVEQIKELDLKLRMLAAQSQACQILMSIPGVGIQTSAAFSAAIDEAGRFRQSRNAGAYFGLVPRRHQSGDLDWTGRITKQGDSMVRKLLYEAATQF

SEQ ID NO: 134112 - protein, 387 aa, unidentified
MARKRTLSTLDTSIAYEAVGLDLAKEDVALAAFDSDHKEPYLIDRIPYDKLYELLADMAPTLVAMEPCSGAHQIAEQIQELGHEVMMISGRHVQAWVKDHCNGQKTDLNDAFAILNLAYDRWLTPIRGKTREECRLLALQASYRQLKGQRTKTMVHVKATLHAWGFPIRAGSFNQKALHELIDTNREAFGDEVVETLHLMINRVRDLDHDIATVLKLLTEATKRDPRASLLRSIPGFEILTTSRWCAVIGDIARFDSPKQTMAFVGLVPNNRITGHHTETSSGREARGQGRMSKRGDKMLRSLCILGAASLCLMVRNDRLPDCPFVASIKERLASPRPWFKVLVYVAAKLVRIATALLKYGETFSYEKAGISKAVLKQWELEQAKAA

SEQ ID NO: 134113 - protein, 456 aa, unidentified
MGSSYAGVDWASDKHDVFVADTAGEKLLAATFAHDEKGLRSLCRQLLHLNVALVALERPDGLLVERLLDAGLRVLALHPNQVAATRDRFRVSGGKSDRFDAFVLCELARTDHHRFRVLEPDSDQTKALRALTRGREDLVGMRTALSNQLRAELERFWPGPLGLFSDLHSQISLAFLERYPSPADTRGLGEARLAGFLARERYSGRQSAGHLLTKLRRAPASRVGEQELATRRQLVLTLVSMIKLVGEQIKELERQIAAAIREHPDGAIFLSLFKGTVITAAELLAEIGDCRARYPTRDALAGDAGQAAVAKESGKRKTATFRWGCDKRLRQAFHTLADSTRHWHPWAQDLYAQARARGHDHPRALRTVGRAWSRVVWKCWQDRTPYDPARHRALQRHITVLIPTPSGPVPDLAATQRMAGAAVTPNGRPAGPSAKRLTASRHPLNPPTALPPANDA

SEQ ID NO: 134114 - protein, 414 aa, unidentified
MNTLVSNTSLSGTLIALDIAKKHHDAKIRYPDGRTSYLRFENTLEGFNRLLALTASPHDDIIAAFEPTADYHRNIAWWLHKQGVKCHLVSSVRCARAREMLFKTWDKNDRKDASVIMYLLEQGLSSPFYDPLANGIIDIQEISNTYHQVTLARTRCLNSLVNHYLTLYFPEAEQFLHMSRAEWFCQFLLQFPTPSCITSLNRDLFVKQSWDVVGRKQYKKQFLEHLYDVAADSIALPLSEDSLAVTTFRLQLHRYVGLSAQRLQLEKQAENYLQERSDYRHLRTIPGIGAIIALMIIAESGDLTRFAHYRQYLNFCGFNLSASQSGQKHSGYRLSKRGNARLRYAFWLAATVAVRTRENSFRYKYERYIRENGDKPDQKRKAMTAVATKVARVAHAIVKQDIDYKGYYEISHRT

SEQ ID NO: 134115 - protein, 438 aa, unidentified
MTNNFDQPELPAAQPTAALSQIVSTNNFAFFVGIDWGSEKHRICLMNRSGTVLGERWCEHSGAALADLAQWLREKSRDVPHALAAAIEIPRGAIVETLAEHGFHVFSLNPKQLDRFRDRHFPAGSKDDSRDAFVLADSLRTDPRCFHSVRLDSPAVIRLRELSRLEDELLNEFNRAANRLREQFYRFFPQLLQLSPAADEFWLWTLFETAPSPARAAKLTEAKIARLLQQQRIRRITAAQVRAVLKTKALTLAPGAAEAAAEHALLLLPRLRLLHQQRADLARRIQTVLDELTAPSEEDSKEHRDAAILLSLPGLGRKVAATMLSEAAQAIAERDYHALRSFSGAAPITRQSGKKKVVSMRYGCNMRLRNALYYWAQKSIPNDPRSRKHYTELRARGKSHGGALRVMADRWLKVLVAMLRSRTLFDPQLRPEITLSAA

SEQ ID NO: 134116 - protein, 344 aa, unidentified
MKSYVGLDVSQKSTSICVIDAYGECVWEGVCASEPAEIARTVCERAPDAETIGFETGPLAVWHWHALRDYGLPVVCLHARHAHAAIKMQINKTDRNDAYALAQIVRTGWYRAVEVKSMDTHRIRLMLTARARVVSMRTTLYSQIRGLLKTFGIVLRPAKGGSFEQLVRQAISSDAQLQGVIGSLLTIWCSLTDELRIYDREVERAARNHEVCRLLMTTPGVGSLTALAFVTAIDNPCRFRRSIDVGAYLGLTPRRYQSGEVDRAGRISKCGDRMARSLLFEAAHILLTRIKTRSALQTWGQALSRRVGPKKAKVAVARRLAVTLHRMWVDGAEFAPALGATARS

SEQ ID NO: 134117 - protein, 354 aa, unidentified
MSTAMQVTGGVDTHADTHHAAALDEVGRLLGDREFPATPAGYAELGSWLAGYGELAVVGVEGTGSYGAGLTRHLRAEGATVLEVNRPDRRQRVVRGKSDPLDAENAARRALARRDTAIPKDTATAVESVRALTVARAGAIKARTAALNQLKDLRLTAPEPLRSALRAGGLRQLAQAAARLRPDPTRLAEPTQATKAAMRSVGRRVQILTDEINDLDRQITALVAQIAPATLSLFAVSTHHAAQLVITAGANPDRLHSEAAFAALCGASPIPASSGKSHRHRLNRAGDRHANRTLHMITVLRMRWHPATRAYVQRRTAEGMTKLEIMRCLKRYIARETYHALISDLTTSQRLDAV

SEQ ID NO: 134118 - protein, 337 aa, unidentified
MKNSSQSVAFFIGIDVSKLTLDVTVINSQTKTRKYKQIENSTSGLNAMDTWLKNQALFNYANALFCFEHTGMYTRVLLGYLLSKNARVWMESSLQIKKSLGLNRGKNDKIDAHRIAEYAYRFSDKAKLVINNSDEIFILKDFLSARARLKKSLQQIAVTIKELKKVDLEQGKEIEMLNLHALRGMKKSIEQIEAKIQQIIESHKRLKEVYQLTTSIPGVGFILATKLLVYTKVFTSFDNVRQLACYCGVAPFEYRSGTSVKGRTGVSKFANMDLKATLHLAAISAIQHNAELKQYYERKVEEGKSKMAVINAVRNKLLARIVAVVNRNTPYVQLTHN

SEQ ID NO: 134119 - protein, 357 aa, unidentified
MTQVKKLDFSGATIFCGIDVHKKSWRVNIQDTEFELEDFSQNADAVLLHKHLNRKYPGATFKLCYEAGFSGFSTQRWLSDQGMDCRVVNAADVATSDKEKRQKNDKIDARKLCEHLQSKKVKGIYVPSLHWEHGRSLVRVRARIVSNQTRCKNRIWQLLHFSGLALPKDYEAGQYWSSRFVKELQAIDCSSEELKITLGLYIKDYQQTKTLLLEATRAIRKLCKQPGYEKDITLLRSIPGIGEINAAVMLFELQDVGRFKRFDHLCSYVGLVPNTSDSGETKRTQGITNRSNYYLRTALVESSWSVIRKDPALLMKYKIYCRKMEKNKAIIRVAKHLLSRINYVLKNKKEYVIGVVA

SEQ ID NO: 134120 - protein, 343 aa, unidentified
METVYYTGLDIHKKVISYCIKHSDGKIVRQGEIAAERKALLKWLSELPVPWLGAMEATMFTGWIYDYLKPHALELKVAHPEMLRAITAAKKKNDRADAEKLADLLRVNLLPECYMASEKIRELRRVLRYRNMIVRTSVKMKNKISGLLMEVGAQYNKKRLHGKKYFNELLEKVEDVPTSVNELLKLSRSGLEMFQDVQRKLVETLHDNTLIRERVRRLQTIDGIGEVTALTWVLEIGDPDRFSSVRQAISYCGLCSAQNESAGKEQRGPISKKRNKHLQTVLIEAAKLAPRWNQQLAKIHARELERGNRNKATLAVARKLVAYMLAVEKRKADFIQETTLEAA

SEQ ID NO: 134121 - protein, 354 aa, unidentified
MVTIVSDEPPRIVVGVDSHKEKHQAAVLDLQGALLGNRCFEASSAGYRELETWLATFGTVERIGIECTGSYAAGLTRFLRERDVQVLEVNSTHRATRARRGKDDAIDAEMAARKALSGEAKAQAKDTTGFIESIRLIKLARESAIKARTGAFLQIRDVLVTAPAELREHVESAGGLRHRVNRAGALRPDLEHIDEPLQAAKFSLRVLSRRVKTLDEEIAAMDAQLSRLVHQCAPNLLNCLGVGVQHAATLLITAGQNLDRLKNDGAFARLCGAAPIPISSGKTNRMRLHRGGDRQANRNLHLIAVSRLRLDPKTQVYMARRTLDGLSKRDVVRCLKRFIAREVFNALKLDLLEN

SEQ ID NO: 134122 - protein, 430 aa, unidentified
MYNKNYISVGIDVGSAFSFMTIVAPDGSVIQKPFKITHNKPDSLEKAVSAIKKAEELHSLESRTFLESTGIYHFPLFCYLVDCGFHVSIINPIITHSANNTSIRKVKNDKVDSIGIAKLGLSGDIPVSQFPAKLVLEIRSLTRKYYDLTDERSAHINKLKGDLHTVFPQYLDIFCDVTGKTSTMILRQYGTPDKILRGHKKTMIEKISKASRKGLSKAAERYEKLCAAATAAKTFGCQIDSIYFNISLTLDLIEKLDSALDSILQRIHQLVTFNKSEKFIQQIKWLDTIKGVGFLTVVTIMCEIGDFSAFRNPKQLFAYFGLDPEVNQSGKFVGTEMHMTKRGSRIARRAVFAVALASIRTKRNGEGINPYLREYYEKKSGQKPKMVALGAVMHKVCNIIFAVLRDEKEFELRSPEEHCRQYQRPALQAA

SEQ ID NO: 134123 - protein, 333 aa, unidentified
MAKPLVMNKEETSRRFSTQQHPFSCGIDLHARTMSLCILDQAGATLLHRHLAATPEALLKAIAPSRDPIVLAAACRFPWYWLADRCAAHGIPCVLGPALSMQAIHGGKATNDPIDAHTIAVLLRGGLLPQASVSPAERRATRDLLRRRMPLARQRGELLAHVHHTTSQSNLPTIRKHMADTTNRDGVAERCADPAVPKSLAVDLALITSDDALLRDVERPIVTTAKHPDAHTLSLRHTVPGIGTSLSLGLLDDIHPIDRFPRGQDCASSCRLVPCAKASAGKRAGTSGTTIGHAPLTWAFSEAAVFVLRDHPAGQKFLARLENKHRQGKALTL

SEQ ID NO: 134124 - protein, 377 aa, unidentified
MSKLRFVGLDVHADTIAVAVAEAGGEVRSLGIIPNRLESIRKMISRLAAIETLKCCYEAGPTGYVLYWQLAQMGVACEVIAPSLIPTKAGDRVKTDRRDAEKLARCYRAGELTPVWVPDADHEALRDLVRAREAAKKDQLRHRHRLGKFLLRHGKRPTDAGKAWTLKYLNWIRIHVHFEQPALEATLKHYREEVDHIAERIAKLEQAIDEAVKQASPEIRAVIEALQALRGVAQTTAATVVAELGSLSRFASPTQLMGYSGLVSSEHTSGNRVQRGAITKSGNAHLRRVLVEAAWTYQHRPNVQGRVLRRQKLLSLSEEAKRIAWKAQERLHKRFTALTARGKESNVAAIAIARELLGFMWAIAVHTESQSKPAKAA

SEQ ID NO: 134125 - protein, 421 aa, unidentified
MRGIGLDVHRDFCEVAIAENGRVRSAGRIPTRVPSLELFAASLVSSDVVAVEATTGTDKIVSVLQRHGIRVVVANTRKLRSITEAKAKTDRLDARTLARLLVSGLLDEVWTPDERTRALRRLTNRRERIVRARTRAKNEAHGVLSRNLCERAPVTDAFGKAGRRWLAGLALPVDERLTLDGCLRQVDFLDAEVAALDREIAKQALAWPEVLRLMTVPGVNVQTAATLMASVGDIRRFSSARKLVSYLGLDPRVRQSGNAPARHGRISKAGASEARHMLGEAAWKVTLTPAPLRAFFERVRARRGNQVAATATARKLVVLFWCLLTREQDYAFGRPAMTRNKIRKLELLAGAPPQKGRHGIAGGKSKAVFDAERELSRQAEAAYRRLVNDWHATGPSKVGASATPGRAPQGPSKDQAARQTQ

SEQ ID NO: 134126 - protein, 428 aa, unidentified
MNCNTQNAKIASITEKTLIVGIDVGSETHYARAFDWRNYEYSKKPLSFSNDEAGFATFKAWMEDLMEKHEKTAVIPGMEPTGHYWFNLGAYLREQGFKPVHVNPHHVKKSKEMDDNNPNKNDRKDPKTIAALVNEGRFSYPYIPTGIYAEIRNLSNLRLQTQEEITRNRIARWFSIYFPEYKTVYKQPDSVSGMMVIKQSPLPCDIKKLGVDGVNKIWRDAKLRGAGLKRAKTLISAAEHSIGSCEAPESARMEIRNLLKDHEVYQERMDELMAAIERKLAEIPYIDKLMGIKGIGIKTVSCFIAEVGDIGRFDNPKQVQKLAGYAIVSCDSGKHQGESHISYRGRKRLRYALYEAAISVIGKNREFKEVYDYYRTREKNPLKKMQSVIAVACKLIRIFHMILTKGVDYDGERMLRDIMRPETAVQAA

SEQ ID NO: 134127 - protein, 354 aa, unidentified
MSQTLKTAITVVGIDIGKNSFHIVGLDQRGAIALRQKWSRSQVEARFANMPPCLIGMEACVGAHHLSRRLKALGHDTRLMPARYVRPYSKGQKNDFRDAEAIAEAVQRPTMKFVATKTADQLDLQALHRVRERLVSQRTGIINQIRAFLLERGVAVRQGLRFLRAELPRILAAPPDVLSPRMVRVIEDLAGDWRRLDERIESLSGEIEAVARQDAGCERLMSVPGIGPIISSAMVAAIGTGDVFSKGRDFAAWLGLVPKQISTGDRTILGKISKRGNRYLRVLFVQAAWVVLIKPKSWERHGLKPWIEAAKKRLHRNVLAIALANKLARIAWSVLARGRDFEVRKIDEAAAQPA

SEQ ID NO: 134128 - protein, 342 aa, unidentified
MDEYDGRQFVGIDLHRRRSVIVRQSESGEQLSAARILNDPASLELQLEEAGADPEVVLEATYGWYWAVDVLHAAGARVHLAHPLGVKGFRYRRVKNDVRDAADLADLLRMGRLPEAWIAPPQTRELRELVRYRAKLVAIRSGLKAQIHAVLAKGGVLIAVSDLFGVTGRQRLAKVPLGPAYAQRIRSLLELIDILDSHEARFAAMIAERLDTHRGYQAIQQLPGVGPVLAAVFVAEIGDVHRFAGPAHLCSWAGLTPTHRESDTVVRRGHITKQGSKLVRWAAVEAIQHQPNSTKIARDRKRIEARRGKNIAKVAAARKLLTLVYYGLRDGHIRALDRTKAA

SEQ ID NO: 134129 - protein, 428 aa, unidentified
MIPAVIERCAGIDVHKKFVMVCVLIGPADSNPTPQIRRFSTFNAELERLRKWLLELQCNRVAMESTGPYWKPVFNVLEEAGIEMVLANPQQVKNLRGHKTDPKDAHWLAHLFRHGMIRPSYIPPKPIRELRDLTRRRKQLVRNGAMERNRVQKLLEEANVKLGSVLSDVFGASGQDMVEALMKGEATAEQIAQLAQRRARKKIPEIQKSIEGHRLNQTHRDLMQQCMTHLAFLEEQIEEIDQQIQNKIRSYGLSEAYELLQTVPGMQAAAAATVLAEVGADVQAFPSAAKLSSWAGVCPGNNESAGKRKSSHTTKGNPYLREVLLECAWASSRKKNSQMQHRYRRLLGRRGKKRAAVAVAHALVQAVYYVLSTRKPFVDTAEPRRSPGQVRRLVRHHTRRLRKLDCWTRRTKSDNKGNSMAQNQQTSG

SEQ ID NO: 134130 - protein, 340 aa, unidentified
MLHITRIGIDLAKQVFQVHGVDERGHTVLRRRLARSQVRAVLTQLPPCVVGLEACGSAHYWARELRALGHDVRLMAPQFVRPYRKNDKNDGNDAEAICEAVGRPQMRFVPVKDVGQQAVLTVHRARQLLIAERTALVNQSRGLLAEYGLIVPAGIGALRRAWPGLLEAPDLPVLACEVFTDLADRLRAVDARIASYDRRVDQVARQTEPAQRLMQAPGIGPVTATALVATVGTAHAFKNGRQFAAWLGLVPRQHSSGGTRRLGRITKRGDVYLRTLLIHGARAVMRQLVRRTDATSRWVTALQARRGFNKAVVALAAKHARIVWALLATGRIYQPTAACP

SEQ ID NO: 134131 - protein, 355 aa, unidentified
MESLKYVGLDVHRDTISVVVLEESGKMVMQTILATQSGALLDFVGGLRGIVHLTFEEGTHSAWLHDLLARRVARVVVCDPRQNALLKAGNKSDRIDARKLAELLRADLLSPVYHGETSTVTLKHLCRGYAALTEDTTRVKGRIKALYRSQAIASTGKKAYGKRHRGEWLAQLTQAGMHRRAELLYEELDALVSLRREARRELIVESHKHDAVKLLSTVPFLGPIRAATLIARAQTPHRFRSKRQFWAYCGLALETRTSADYRFEEGQLVRAKKPVFIRGLNLNHNHDLKNLFKSAATSAGSMPGPFAVFYENLLTKGIQPAMARLTLARKIAAIALCVWKKGEPFNAEYLKPQAA

SEQ ID NO: 134132 - protein, 375 aa, unidentified
MGKHRLAFVAFDSAKNKHAAAIADDGRDGEVRYLGEIDNSPDAVRKLVAKLSRQYERLHFCYEAGPTGYGLHRQLTELGHVCDVVAPTMIPKRSGDRVKTNRRDSVTLVKLLRAGELRAIWVPDSVHEAVRDLTRARETAMVDLKTKRQQLLSFLLRHGRSFPDGRNWTKMYERWLAKQTFGHPAQQIVFQDQLEAITTAQARLAALEQQLREIVPTWTMASVVAAYQALRGVSFLVAVTFVAEVGDVRRFATPQQLMAFLGLVPSERTTGDTIRRGSITKTGNYRARRVLIEGAWTYRFSARVSETLRTRLKDLPLSVRAIAWKAQVRLCARYRRLIARGKKPPVVTSAIARELAAFLWAIGQQVAPQTGVLRN

SEQ ID NO: 134133 - protein, 430 aa, unidentified
MEIVYPRSCGVDVHKSFIVAVICISESVKPKYIKKRFSTFNNQLIQFRDWLIENNCQNVCMESTGKYYIPVYNALEGHISNVVVANPKWVKAIKGEKDDNKDAKWIADLFKFGIVRSSYIPEKDIRILREFTRYQYKLVNMRSSEKNRFQNALTTGNCKLDIVFSDIFGKSASAIVDTILSNNPYTSEDILSKVHAGCKASHEDILSAVEGIQLNQFQKARIRIVQKHMEYLDSLLDEIQHHIDLMVANYEEYIQLLCTIPGINRKSAITIISEIGTDMSQWSSHRKLAAWAGLAPGCNESAGKKKSVKISKAGVYLKPCLVQVAHAAVKDKNCDYYADKFNKISKRRGKKRAIIAIARKILIAVYHLLKTGEVFNPTDMADVETTKKQRIEYVKNNLRNAFNQLSRTGLSEAEILQLIRKESTLSLIHI

SEQ ID NO: 134134 - protein, 348 aa, unidentified
MRFYTQQHQYTCGIDLHARSLYVCILDDTGQTCVHKNIKATPDALLKLIADYQDDLIIGVECMFSWYWIADFCADHDIEFVLGHALYMKAIHGGKAKNDRIDSEKIARLLKGGMFPYAYVYPREMRSTRDLMRRRIKLARDRGELMAHIHNTLSQYNLPAHPKNLRYDLHREPMRHAFPDPSAQRSVDLDLDRIAFYDEQLSKLEWYLKRSAKSFDANTIIRLKSVHGIGDILSLVLLYEIYDINRFPRVQEFVSYCRLVKCQRESAGKIHGTGGARIGNPYLRWAFGEAAALFLRGNPEAQRWLEKKTRKHNKAKALTILAHKLGRAVYYMLKRKTLFDQDRFLASS

SEQ ID NO: 134135 - protein, 404 aa, unidentified
MTAVMIGVDPHKGSHTAVVISPAEEPLGEIRVRASAAQAEKLAEWAAAWPERTWAVEGAGGLGRLLAQQLVAAGERVLDVQPKLASRVRLLQAGDTNKNDPNDALSVAVAALRSKTARPVMAEDYPAVLKVWSKRHRDLARLRNQAACRLHAVLCDLVPGGHPKEISAAQAARILEQASPSGAVDQARAELAAEFLEDMRHLDAQLRGTRKKLAAAVRASGTTLTEVFGVGPVIAGTIIGDIADVSRFPGRDHFASCNGTAPVEVSSGNRKIHRLSLRGNRRINHAIHMAAITQLRHKHSEGRAYYEKKLAEGKTHKEALRSLKRKISDAIFARLQADARQAAAATAKGPGGHPGNDSASSAAGSHPARQLFGQATPGPGTSLRPGTTTGTPPKPVSKKTQTTT

SEQ ID NO: 134136 - protein, 340 aa, unidentified
MNEVIRIGLDLAKTVFQVHGVNAAEEVTLRRQVRRSQMLAVFGKLPPCLIGIEACGSAHYWARELGKLGHTVRLMPPGYVKPYVRRNKNDAADAAALCEAVSRPTMRFVTAKTPQQQAAAGIHRVRQLLVKQRTAVMNAMRGLMAEFGLVARQGLGGIEQLLAIIDDPGDTTIPDPLQGGLVSLAATVRSLEREIEKADKTLRAWSRDDKTCRHLDTIPGFGPILSTAMVARVPDPDVFQDGRACAASIGVTPRQDSTGGKVKLGPISKRGDGYLRKLLVNAAMAVLRSKRAKQDPWLVKLLASKPLKVAAVALANKLARIAWAVMMRQEDYRPTPIQAA

SEQ ID NO: 134137 - protein, 445 aa, unidentified
MDVIFTHGAGLDVHQKTVMACRVTPDPTGRQADGIMELKECGTMTVDLLALSDWLVEAGITHVAMESTGEYWKPVYNILEGDFTVFLVNAAHAKQVPGRKTDQSDARWLAKLMRHGLVQASFIPPVAPRDWRDLTRDRTTLVQERSREVTRVQGVLERANLKLASVATDMMGLSGRAILSALIEGRADPATMAELAHGRRRSKLPRLEQALTGLVRAHHRQWLALQLAHIDFLDEPLDTLSGEITRCLTDLGAGKPPAAPVETAGPAERPADPGSSSAPMTFPQAVRVLDTIPGVNQRGAELLVAEWGIDMERFGPAARLAAWSGVAPGNDESAGKQRSGKTRTGNRALRTGLTPLAHAAARPTDTYVSALYQRLAARRGKKRAIMAVAHSIVVSAFYMLSRNAPSHELGATYFDERRREHLVDRLTPRIERLGYRVTLEPVGAA

SEQ ID NO: 134138 - protein, 353 aa, unidentified
MKAKTESDTALPSVVGIDIGKEVFHLVGLGADGKITFRRKIRRLALKDAFEKLPPCIVGMEACLSAHFVSRTLRTLGHEPRIIPAIYVKPFVKGQKNDYNDAEAIAEAALRPNLRFVQEKSQDQLDLQACHRVRSRLVSRRTATINQIRAFLIEQGIAVRSGLRALRNSLFTILENRKDEISPRMAKLILDLYKDWCHLDERIEAVTGEIEELSRVEPKCQRLMSVPGIGPVISTGLVAAIGTGEAFERGRDFGAWLGLVPRQYSTGGRSVLGRISKRGSKYLRTLLIQAAKVLLMRPHNWPRYSFGAWLKTASQRLHRNKLAVALANKRARIAWSVLRHDKAFDTHLETAAI

SEQ ID NO: 134139 - protein, 336 aa, unidentified
MAAVLSVSGAVLATDEFPATAAGYRDLLKRARRWGTVRRAGVEGTGSYGASLSRYLLAQGIDVFDVNRMDRADRRRRGKSDPLDAQNAARAVLSGRARARAKTGDGSVQIARMYKLTKVSAVKARTQAINQLKAVLVTADPVLREELAGLGNAELFRTCAQFTGVSSREDAGAESVVQATRITLGLLAHRIGQLSEQIRDVEARLTRLVERHAPQLLDVVGIGPDTAVALLITVGDNPERLDSEASFAALCGVSPVERSSGRRRYRRLNRVGDRQANAALHRIVFTRLRVDARTQDYYERRIKEGKTLREVVRCLKRYAAREVFHLVKQLQSAPRS

SEQ ID NO: 134140 - protein, 346 aa, unidentified
MEHYVGLDVSLKLTSICIVDRTGKVEREGVVASDPEAIATFIKLHAPHVVRIGLETGATSTWLWTELNKMGLPVICIDARHAKAALKMQINKSDRNDAVGIARIMQCGWYKEVCVKDLDSHATKALLVSRALLVKIKRDIENQIRGLLKNLGLVIGRAKMNMFAVRAAQLAKDRSELFAAVDPLLKAREAVEQQILDLDRKVLRLARNNAQVRRFMTAPGIGPVTALCFLATIDDPARFKRSRSVGAYAGLTTRRYASGEIDWTGRISKCGDKMLRSYLYEAANVLLTRVAKWSALKAWGVKLAKRSGLRKAKVAVARKLAVILHRMWIEGTEFKWSSKEAADQPA

SEQ ID NO: 134141 - protein, 341 aa, unidentified
MYYTGCDVHDKITQLQHMDADGTLGLFMEVATSKEGFSQFLDKLDAPTIITLEASGQYWWLSQFLESHPKVKQVNVVDPRRCRKLSEELSVVCGYGRAKNDRIDAEMQAELSRRGLAPTIHVPTPEQLRDRTLNRHRFSLVGQRTRIIRQIQGLLKMLGISISISKLINDPRSQKQVLEALPDYALLIVLNLLTQISVVEKQIEKTETMLDEVLPLSNPQIKILISHPGIATVLSRTIKTEILDIKYFAAYKYLVSYSGLAPIIQESAGKKSTIKLNRFCNYYLKYAFIAAAHGARYHPRYKRKYEQDEKKHRSIIAKLNLARRIAKTIYWMLTRQQPFTE

SEQ ID NO: 134142 - protein, 404 aa, unidentified
MYNAVGIDVSKGKSTVAVLQPGGTVIRKPFDVSHTSQNLNELADYLSSLDGTTKIVMECTGRYHEPMVKALSEAGLFVSIVNPHLIKNFGNNSLRKVKSDPADARKIARYTLDNWTELRQYSGMDNTRTQLKTLNSQFSFFMKQKVAAKANLIALLDNTYPGVNKLFDSPTREDGSEKWVDYAYSFWHADCVRKIGLKAFTERYKSFCKKHHYIFQQDKPEKLFNASKELVAVFPKEKTYKLLIQQSIQQSNLASEHVERLRREMNELASTLPEYSTVMGIYGVGKTYGPQLIAEIGDVSRFTHREALTAFAGVDPGVDESGQHKSKSNRASKVGSARLRKTLFQIMTTLLQNAPEADPVYRFLDKKRSQGKPYYVYMTAGANKFLRIYYGKVKECLRNLEQES

SEQ ID NO: 134143 - protein, 432 aa, unidentified
MSKFLNVPVIGIDVSADFSFVAIIAPNGAVYKKSFKINHDAEGFDYFLKEIQKVEEECSMKPVLFMESTGVYHLTLFHFLKINNLEAYVINPLVTNSNKNSGIRKVKNDKKDALSIANIGKYQDIKMSDFLDINIFAIRSLSRDYYNLVDNRSGYKKKLSCDLRTLFPGYHTVFADITGVTSLSILSEFSSPNAIIQAPKDELLTILKQSSRKSMVWCENTYNKLFKAAQNALKIGFNTDLFEITISINLDLIETFNKQIKRVLFQLENQIQSSDTSKSFRDNVALLISFSGIGFITAVTLISEIGDPKRFKHPKQLVAFFGIDPSVNESGKFKGDRNKMSKRGTRFGRRALYSVALASIRKTKNGKMLNSVLYGYYHENLKGKKKKVALGAIMHKLINYIFAVLREQKPYEIRDPRLHDQMYLKNASVNVA

SEQ ID NO: 134144 - protein, 385 aa, unidentified
MANQNDLSRSLVALEQNNTIIAVIEMSLNYWLIAGIVPGVDRHPLKKLNVDEKALLQLLRQWRDEAAKAGHVITRMAVAFEAGRDGFWLARWLRARGVDAHVIHPTSVAVPREHRRAKTDRLDTELLKRAFLGWLRGEPEHCRMAAIPSLQEEDAKRPTRERENLVGERTRIINRMKACLVRFGIRNFKPTLRKAPERLNQLCTPEGDPLPPNTLAELRRDMARLRFIIDQINEIEAARLLRLEQARVEGPTAMVRLLARVIGVGIETADMLVHEILSRDLRDRRAVARYAGLTGAPDESGSKRREKGLAKAGNARVRRGMIQLAWRFLIHQKDSALTQWYRARTASAGRKRKTMIVALARKLLIALWRLATTGEVPTRVVLRAA

SEQ ID NO: 134145 - protein, 388 aa, unidentified
MAGSVVIGMDPHKRSATIEVMGGDESVLGGGRYATGAQGYRAMLAYAKQWPQRSWAVEGSNGIGRHIAIRLVADGETVVDVPAKLSARARVFVSGQGRKTDAWDAHSVALVATRTSGLRLVVDDEQRSLLRVLVDRRRALGEDHTRMTSQLHVLVLELIPGGAKKDLSAAQAKALLATVRPRDVAGKARRRVAAELIGDLERIYARKKAANKELNELLALTGSTLSTLNGIGPSGAARLLVEVGDIVRFPTRAHFASWNGTAPLDASSGEQVRHRLSRKGNRQINRVLHIMAVVQLRNLTEGRAYFDRRVAEGKTPMEAMRALKRRLSDVIYRQMMLDSQAMTTSPGGQSGNDSDSSATGSHPNAGSSDKPHPGPAKTQPRAISLAAS

SEQ ID NO: 134146 - protein, 344 aa, unidentified
MPSNFYLGIDVSKASLSVVLMNSDSKVLWSSKKIANQPSGFKQMVEHASKIASKHADGDDYSIAAGMESTGVYGEQLSYYLADNNMSGRISLYVLNPFAVKSYRKATMQLNKNDAADARLIASYLLSMITTGQITPWQAPSLAERLLRELTRRRAELVTLREAEYNRLEKFRAGGSHPHPVIESVQELIAHLEQQIREIDEAIEKHIDDAGLRDTAELLRSIDGIGKVSSASFIGEAGDISRYRSVKQLVSRLGIAPCENQSGTSVHKKPVMSRVGSAVLRHALYMAALVATRKNKVISAFYNRLLARGKCKKLAVIASMRKLLHIIWGVLTHRVKFDPEYAPA

SEQ ID NO: 134147 - protein, 343 aa, unidentified
MDQYIGLDVSLKDTAISIREDGKRIWRGNCPSDPKVLAQVIRKRAPHAKRVVFETGPLSTWFFHALTSEGVPAICIEARHAQKILNETLNKTDANDADGLAQLAEAGFYKAVRVKSFDAMLARTLVAARNQLLSISTQLSNQIRGLMKTFGLIVPKGTGRVFDNNVRELLDENDGLARIISPLLEAWRDIRKRAADLGRQLLVAARKSQATQLLMTIPGVGAVTAVSYVAAIEDPDNFRTSRAVGAWIGLTTRRYQSGEIDYGGHISRKGDNRLRGLLYETATVILTRTSARNESSLRSWGLKLRERVGFKRAAVAVARKVAVIMHSMLKTGEVFNTSAGATV

SEQ ID NO: 134148 - protein, 343 aa, unidentified
MQTVTTIGLDIAKSVFQVHGVDAAGQVVIRRQLKRRQVLAFFQRLPACLVGIEACASSHHWGRELQVLGHTVRLMPPAYVKPYVKRHKNDATDAEAICEAVARANMRFVTIKTPEQQSCLILHRTRHLLIRQQTSVINAIRAHLAEFGIVAAVGRNGVEQLLGVVADANDKRLPEVARACLAALGVQLRVLKAQILEFDRMINAWHRSNETSRRLDKAPGIGPVLATALVATVADPKTFRSGRNFSAWIGLVPQQHSSGGKDRLGHISKQGDRYLRNLFVAGALAVIRYAKIHGTQHRPWLAALLARRPTKIAAIALANKIARMAWAMMVKGEHYKEPVALAR

SEQ ID NO: 134149 - protein, 421 aa, unidentified
MDKTFQYFVGIDWGTQTHRVAVLDGDGRAIEQYDAAHSGDGLVALVNKLKQRTACEPALVAIGIEVAWGALVETLVESGFTLFSINPKQVDRFRDRFTVAGAKDDARDALVLASSLRTDRQGYKRVDIDCPDLLRLRELSRFEDELKVELRRATNRLWQQLHRYYPQMLAISPAADDRLMWDLLTAAPKPAEGARISSLRVQRILKANRIRRLSADEVLSALKTTPLALAPGAAEAACEHVLLLLPQVKLLDEQLREVGNRIKRLLDAMTETMTGTDQPPCDAGLILSIPGIGPAVAAALLTEASRPIRERDYEALRCYAGTAPVTRQSGKRKTIGMRHACNPRLRNAVYHWATSSLSCDSKSRQQYDGLRVSGHHHARALRGLADRLLGVLIALLKARKAFDRARRDGATAKNLPVVASA

SEQ ID NO: 134150 - protein, 475 aa, unidentified
MNIKGSKKKNQVLSVNIFEQQEIIAKADAIKAELKASTWHELETKGKFDKNDKLSFVSDDMLILGCDIGSETHYVRAIDTRGRELSKSVFGFSNTAEGFESMLDWSTKLAAANDKKQIVLGLEPTGHYWFCLTTWLVAKGISVVQVNPYAVKQTKEVEDNSQLKDDKKDPKLIANLVKDGNFGMPYLPEKLYADIRRLSMFRDQLHEDRIRNLNRLHREMKIYFPEYKDAFGKIDGAFSLELLKEAPFPDGLAALGTEGMKQIWHEAKLRGRGYANASSILEYARKSVGIKDGADAGRQAVKWFVSRIIELDEQLSDIENQLNQRCNEIPYAKNILAISGIGENILSGILAEMGDISRFDDVKEIQKLSGLGLVACSSGKHTGETKISHRGRKRLRYWLFQAAKSAVAHSEEFKELHVYYTTRKQNPLKKMQSLIVIACKILRVIFTILTKGTTYDPKKLLGDIVRPDQSIPQAA

SEQ ID NO: 134151 - protein, 369 aa, unidentified
MEDRITYVGLDVHKEGIVVAVAEGGLRGEVREYGRIANTAAALDRLVRKLGGEGVRLRFCYEAGPCGYGIQRHLSARGHECVVVAPSLIPKRAGDRVKTDRRDAAGLARLHRAGELTAVWVPDAQHEAMRDLVRARLDAVHALRRARQQLSGFLLRQGCHYGRPAWTKLHRRWLAGLKFEQAVHHIVLEDYIAAIEAAEARRDRLTAQIEAMLPDWTLASVVAALQTMRGMALVNAATLIAELGDLSRFANARQLMAYLGLVPSEHSSGASVKRGGLTQVGNKAARRLLIEAAWCYRFPARVSRELRLRQEEQPRPIREIAWNAQLRLCARYRRLARSGKPANVVTGAIARELAGFIWAIARRVPPAAG

SEQ ID NO: 134152 - protein, 367 aa, unidentified
MIVNEVAKNVEKIISIDTAKNSFQVLVVNQKTGKKKNTKVQRSKFVEYILKQGPCLIFMESCSASQHWARLFESFGFTVKLIAAQHVKAFLRNRRVKNDERDAEAIYTCGIQPDTKFVRIKTVEEQTVALLHTLRKAAVSQRVELSNRIRGILAEFGIVVARGKGSFNSEIEALFNECEKIHDVYLRSAISSLFEDYHRLEQREKELSEKIESLNKDNELVKIALTCPGVGPLTASAIVAEVGDASQFRNGREMAAWNGVVPSQHSTGGRSTLGGITKTGNRCLRTLLAQCACAVIQKASRHLEQGKDTHLDRFALRLKLNGKPAKKIMIAVANKIIRILWAMLTQRKTFENKAEETSDISAELQLA

SEQ ID NO: 134153 - protein, 348 aa, unidentified
MALTIVEEARPVTGGVDTHAGTHVAAALDPVGGLPGVREFPATAAGYARLLGWLGGFGTVCLAGIEGTGSYGAGLARYVTAAGVRVVEAGRSDRQDRRRQGKSGPLDAVSAARAAQSGRARGAPKGRDGAVEAIRALMVARRSATGERTRTVNQARALLLTGPDDLRTRFSGHGPAALITALASLRARPGDVAGHATRIALRELGRRARFLDGQLARLDELIVPLVTARAPGLLALRGVGPHTAALLLIAAGDHPGRLRSEAAWAHLCAAAPVPASSGKVTRRRLNPGGDRQASHALWRIVFTRLGCDPATRAYAERRTAEGKSKAEIIRCLKRYVAREVYPHLRTTI

SEQ ID NO: 134154 - protein, 324 aa, unidentified
MLGIDVSKDTLSVSLLDPLTRKLKWEEVYPNTKAGVIKLLKRTSCDTTWVLEPTGRYGLSVARLAQDAQRQVLLAPPRKAKAFLSSIQSRAKTDRLDSYGLALYALSVPLRPYPIKSPVIDQVDQLLAARRGISQAMASLGQQRVDLPYAADVLLPALHALRAQQKAIDAEIKALTSQNEEFSMAAALDAVPGIGPVIAAAVASALRSKEFSHPDAFVAYIGLDVRVRDSGRRRGHRALTKQGDAELRRLLFLAARASMISKANPFGAQYKRELAKGLAPTAALNAIARKLARMCWSIARHGTTFDPDRVYRQPENSKNLRPPS

SEQ ID NO: 134155 - protein, 356 aa, unidentified
MARRSVSSVQQFVKGFEAHPFFIGLDVHKRSYHVALRRMDGKTVTLVCPADPSGLVGVIQRLCIRVGSVVYEAGPTGFGLARTLRAAGIETLMAAPSRIPRAVTAGAKTDRLDCIRLADYGAKGLIRSIAIPSPEQEAKRTLQRRRHDLIDSRRRCKQRIKSLLLYLGLPEPKPSIRWRRGTAEALRALPMDPHARLTLESLLRELAFYDEELRKVDEQLHQMGRQQERLMSCLQSVPGVGDVVATTFMVELFDPERFQRAEEVASYLGLAPMVRHSGEKTPSGRLRPAGQTRLRSLLIEAAWMWRQYDPYARDLYHRFLGRMGIAQKAIAAVARKLAIILWRLYVEARPYRPAVI

SEQ ID NO: 134156 - protein, 395 aa, unidentified
MYSLFVGIDVSKDSFSVAGLNDKTKLLFSLSPLMNAQGFSELLKALRSHQKDFSSVIVALESTGPYHLNLFSFLVSQGITTIVVNPLIIANFAKLSLRKTKTDKKDAVTIARFLFLNRDSINQLPSSQQTTDLRDLARERESILKMIASMKNDVRRILQSTFPELEHLVDILGDTMLCFLKVFPSARLIAQATPEAIAQGFNQGDWRRRISVHYTNIIDLAKTSVGATSPSKELILPGKIETLLYLKKRVDEITKMLVRLCKSMKKEDFALLTSIRGVNVKTAAPFLAELGDYQNFQSYKKILAFAGLDPTTHQSGKYEGMSMISRRGNRHLRKIIYNMTFCVVRYAGPLRDYFFRRKAEGLPFRKALLATSHKLVRTIFAMLNGRTFYKFAEVV

SEQ ID NO: 134157 - protein, 320 aa, unidentified
MMPQQTRLVGLDVSKHKIDACIHGVAERGMAASTPEGEAELVAWLRRHGVGEAVMEASGGYEQGWAAALRRAGLAVRIVDPRRVRYFAKSAGRLAKNDPIDAAMIAWFGVTFPASQASLPPEPERRKLDQLVTARSALLELDAALANREEHEQPTLVAKAQAAVRKTLHAQVKKLDKAIAAMIAEDPVIARRAEIITSVPGLGVQAAAGLIAWLPELGHVDDKAIAALVGVAPYDDDSGERRGERHIKGGRQKLRNLLYMPTLTASTQCNPVLKPCYQRWRAKGKEAKVALVACMHKLMRILNTMLARDETWNPPTRAAA

SEQ ID NO: 134158 - protein, 421 aa, unidentified
MYVLSDRSGRRRPTGQEGNTSMANEDRGVGGIDSHLDTIHVAVIDANGREVADREFPTTTDGYRRAVGWLEGLGPLQGVGVEGTSSYGLGICAALTDAGIRVVEVSRTRPAERRRQGKTDQLDAYRAARSVLSGEASTDPKAASVEPLRALQVARRSAVKAQQGAGRQLGALLVNAPARIRDRYRDLPVARLVTALANTRPSQVKDSDDADVLAALRSLARRHQALADEISSLQERMAARVAAANPALLSIKGVGPVLAAQLLITAGDNPDRLRSSSSFAALCGTAPIPVSSGRTDRHRLSRGGDRAANCALHQIVKVRMITDARTQAYRDERLAKGWTKKAVYRALKRAVVREVFRALIGRYEIPDHRDLRPARHAKNLTLAAAATGLNVWPSTLSDLELGKRRDDTLADTYRNWLSSAA

SEQ ID NO: 134159 - protein, 379 aa, unidentified
MVVVATASDEVKDTAGEALEFECRRFGAGSQERQHVVAWLKERGVTEVVMESTAQYWKPVWLDLEPHIAKLHLAQAHSNRAPKGRKDDFRDAKRLARRLLAGELMLSFVPEAEQRIWRMLSRSKEQLVKDRVRLQNQVEALLEEMRIKLSAVISDLLGASGRRILKALSEGESDAVKLASLGDQRLKCSQEELVDALQGSPSPTHIRILKLFLERVQVVDQQIETLDQLLAKELKKHEEAVIRVAETPGFGVDSGQRIIAEVGADAAAFPSAGEFASWVGYCPGSNVSAEQNHSSRCPKGNQYVRKLLTQAAQAAVKKKGCHFQKVFYRFLPKLGYNGAICVVAHRLARVLWKILHHGVRYVERASKPIPRRSNDAFRN

SEQ ID NO: 134160 - protein, 425 aa, unidentified
MAMRMIDEFAAVVGIDWADRKHDICLQPGREGKREHLVLEHRPEAIDDWANGLRLRFDNRPVAVCLEQRKGPLIHALSKYEHLVLFPINPQMLSRLRKAFAPSGAKDDPSDAALAVDLLLQHGERLRPWVPEDPRTRQLQALVQGRRRLVEQRVRVTNRLLANLKGYFPQATDCFDSLDTVVACDFLTRWPSLGHAKRARAETLREFFHHHGVRGAERIEGRIARLAEALPLTTDAGVLLPALVATRTQVAELRALISGIEAYDEAIKRTFRDHPDAFIFASLPGAGPTFAPRLLAAVGSDRARYDSVASMQKYLGIAPVTERSGQSQWVHWRYACPTFLRQSVIEWVGMSIRYSYWAAAYYRQQRAKGKRHHIAVRALAFKWLRVLYRCWQERRPYDEAKYLFALKQRKAPLLQYMSETLEGAA

SEQ ID NO: 134161 - protein, 408 aa, unidentified
MAVVMIGIDPHKGSHTAAAIGPGEEPLGQVQVLASASQAGQLIEWARPWPGRTWAVEGATGLGHLLAQQLLAAGEAVLDVQPKLAARVRLLEAGNTNKNDANDARSVAVAALRSATRREVTAEDQAAVLKVWSKRYRDLGRARTQVACRLHAVLAELVPGGFGKEITAGQGARVLQAITPASPAAAARCELAAEFLADLRRLDAQRRDTRTKLAAAVRESGTTLTQVFGVGPVIAAAILGATGHAGRFGNQDRFAAYNGTAPIEVSSGGRKIHRLSLRGNRRLNHAIHMAAVTQIRHSHSPGRAYFDRKIAEGKTGKEALRALKRQLSDVIYARLQADAARPGRGAPAEAEGPGGQSGNGSVSSAAGSHPRRQLFGQATPGPQLSLRPAAPARQAVPATPVKNSRRAP

SEQ ID NO: 134162 - protein, 344 aa, unidentified
MDHYAGIDVSLEYSSVCVVDASGKVVREAKVVSEPEALIGWFGSLGFELARIGLEAGPLSQWLYAAMKQAGLAVELLETRHVSDAFKAMPVKSDRNDARKIAQLMRLGWFRPVHCKSIAAQEIRAMLTARKLVQSKLLDLENSLRGILRGFGLKVGKTTRTNFARRIEELVKGHPNLQTIGQALLRARAVLLAEFNGFEKRVRAMSRLHDKARLLMSVPAVGPIVSLTFACAIDDPSRFTSSKQAGPHFGLTPKKYQSGETDYTGRISKHGDASVREALYEAAHIMLTKPIKGCSELKSWAMRIARRAGTNKAKVALARKLAVIMLRMLKDNVPFNPAAKPATA

SEQ ID NO: 134163 - protein, 354 aa, unidentified
MTTNQVTQTDPGARARVIKLGLDVHASLIVVVRQVDGQASQPPQRFSEEAFIGFVHRQLAAAESVHSCYEAGPFGYVLHRRLTALGVHNLVVRPRDWSTYGERVKTDARDAGALCSSLDRHLAGNRGALAVVRVPSEAEEAARGVSRQRQSLVRDRVRFTLRGKGIARLRGIALPPEWWRERTFVRLELPADLREQLSALRRVILSIDAEAVALTTQIEASAPAALPAYLGPLTWEILRREVGDWSRFANRRQVASYTGLCPSEHSSGASRLQGSINRHGNPRLRHILVEAAWRLLRHQPAYRPVAKWREAFMDQGRPGRRKKIVVAIARQLAVDLWRLDTGRATAAQLGLVVP

SEQ ID NO: 134164 - protein, 338 aa, unidentified
MSQVSMIGLDIAKHVFHVHGADERGVAVFSRRLSRAKVLEFFASQPRCVVALEACGGAHHWARQLIALGHEVRLIAPAYVKPFVKRSKNDALDAEAICEAAQRPTMRFVAVKSEEQQAAALVFRTRDLLVRQRTQTINAIRSHMAEYGWIAPKGPSHVAALAERLEELPEAAGAMIRVMLDALDQLDRQIAGLDREIARRAREDEISRRLMTIPGIGPLTATALTALAPPPEAFARGRDFAAWLGLVPLQNSTGGKQRLGRISKAGERTLRRLLILGSSAVVLHASRRGAPSGSWLEGMLARKPRMLVVVALANKMARIVWAVLMKQEDYRAPVAAAA

SEQ ID NO: 134165 - protein, 442 aa, unidentified
MTVNKKKQGKKSVDRLPVMNRNCAGIDIGATEMFVAVPPDRAGENVQCFPSFTQDLYRLARWLKECGVTTVAMESTGVYWIPLFQILEDAGFEVIVVNARHVKNVPGRKTDVQDCQWLQFLHSVGLLNGSFRPAQDVCAIRSLLRHRKSLIELCATHIHHMQKSLDQMNVQIHHVISDITGKTGLAIIEAILAGERNPQVLALLKDSRIKASAETIVKSLVGDYRQEHIFTLRQSVEAYHYYQKLVAACEQQISQLLKEFNEGLPMIDIPQKDDDESLLQAELKRAFGVDLAKIPSLAIDTVRTLFGEIGPDFTKFRSPAAFASWMALSPCNEISGGKVLKSKTKPMHSLTRIALRQAAQSLHNSNSYLGDYYRRLRAKLGAPKAITAAAHKLARIIYRLVTTGQEYDEQILRKQDKHSKIRDEAKLRRKAKSLGFDLVPAA

SEQ ID NO: 134166 - protein, 328 aa, unidentified
MAKHTMICAGIDTGKRKLDIALDRSPEQQLRIDNTPEGYKVLLDWLRRRRVKRIGIEASGGYEQAVVAELRRRQFVVVVFQPAQVRAYAKFHLQRAKNDKIDAVLIAACTAAVKTIHAPPDARLQPLAEHLTMIDQIGEDIARLKNRLETCRNPRFQQTWEEDIARLAKRKKIELKALVATIREHRDLAERLDLIESVDGIGQPTAVAILVRLPEIGRITREQAAALAGVAPYDDDSGEQVGIRHIDGGRQRLRRALYTAALPASLRWNPQLIALYRRLIAAGKEHKRALIACARKLLIFANTVAARGTPWDRERPAVASMSAVPQAA

SEQ ID NO: 134167 - protein, 331 aa, unidentified
MNYSHFVGLDVGKKTFDASLMSADEKELSHKSFDNTPEGIQSLLDWIAGYHLSLSKLLFCAENMGSYVTELSVSSVSMGFSLALVCPLTIKKSIGLQRGKNDRIDAKRIANYAVLHYRKLELYKLPDKDLVRLRGWIIIRDNLVKQKVSSIKLLETFSWMAKLADVTESISFLEEQLKSIKEKILEVEEDMEQLIAASTSLYTNYLLLRSIKGIGIINAIVLLCVTDNFQRFDNPRKFACYCGVAPFEHTSGISIRGKTQTSSLANKEVKVYLTRAAITAISWDPQMKAYYKRKIAEGKHKASVINAVRAKIIARSFAVIRRQTPFVTLAV

SEQ ID NO: 134168 - protein, 343 aa, unidentified
MNEVTTIGLDLAKNVFQVHGVDASGRAVVRRQLRRSQVLPFFERQAPCLVGIEACATSHHWAREIAKFGHEVRLMPARYVKPYVKRNKNDAADAAAICEAVTRPTMRFVEVKTEEQQSVLMLHRTRQLFVRQRTTLINAIRAHLAEFGIVAGVGRNGVERLLQLIANEKDERVPPAAGECLQALRGQLVLVKRQILEADRRILAWHRSNELSRRLEAIPGVGPLIATALVASIPDPHAFGSARDVSAWIGLVPKQNSTGGKERLGSISKAGNRYLRSLLVVGALSVIRRAKQVGYTRRPWLAELMARRPVKVAAIALANKIARIAWALMVRGTHYREPVPQAA

SEQ ID NO: 134169 - protein, 443 aa, unidentified
MSTYVGIDVGSEEHAVYAIKQEDDDPVYKTTVTNDRDGFRELEKFLSTFGENIHLGLEATGNYWKPVFDHLTELKEKLDITLSLINPNEIHQFKKMELSKVKTDSADAKAIARYVLRFEPKSTPRTNERLRSLRKLCRYRSSRVEEKTRLIQQLNEVLVGVFPEYSENFGKLSAVSSLALLKEYPGPKEIAKLEVDELASLRYGKVNHKLGKEKAKKLTNKASNTVGEGYGPEIEITIRHLVEQLMSVKREVEELEDEIEKSFQEIFPNKLTTIGGIGEVNAATMTTEIWDVNRFATATKLNGYVGAYPELSESGNYEDPHPDMTKKGNPRLKRAVFTSTMSAVNSNPVIREHYRKQLAKGKDRMVAIGSCMRKLVHIIYGILTSGEEFDPNYEDKRKEKEDEERTRKPQTGSYPEDEKSSELSPKPNNGKRVPNYQLAGGET

SEQ ID NO: 134170 - protein, 424 aa, unidentified
MRSIALDVHRDFCEVAIKDESGLWLAGRVRTSLEDLRLFAQSLAADDQVALEATGPAQAIARILEPHVGRVLIANTRKLRAIAESKVKTDKLDAKTLCELLAAGFLPAVFSPDEFTRALRRRLQRRSKLVRSRTRAKNECHAVLARNLKGRPPMTDVFGKAGRAWLAALELPADESETVEGCLREVDFLDSEVGLIESELARQGLCSGEIRRLMSVPGVSLVSAAAFVAAVGDIHRFHSPKRVVSYVGLDPRVRQSGEAPARHGRISKQGSPEARHMLCEAAWVAVRTPGPLRAFYERVRARRGAQIALVATARKLSVLFWHLLTREEDYAFGRPSLTRRKLRGLELKAKDGRRSWPSGHALSTKSERAREAEFAEQIETAYRRFVQDWQPKPKSGAGATRGRASSKPTSGKQRGRASVPNSAL

SEQ ID NO: 134171 - protein, 348 aa, unidentified
MVVIGVDSHKRTHTVVAVDEAGRKLGERTVAATAEGHLELLGWSRSWPDHVWALEDCRNLTRRLEADLLRAGEAVRRVPTKLMAGARRSAREPGKSDPIDALSVARAALREPDLPVARLDGSERELRLLVDYRDVLISDRTGHQSRLRWFLVEMGIPEPPSRKLAVPVVLAGVDLQLVARTEPCARIARNLVARILEMTTAIDDLGRQIGELTEALAPSLLALFGCGPLTAAKVVAETAGISRFRSRAAFAAHNGTAPIPVWSGNLVRHRLNRGGNRQLNAALHRIAITQLRCPGLGQAYVAKRQAAGDTKTEAIRALRRRLSDEVFRRLQADEAARVDLEGLARVAA

SEQ ID NO: 134172 - protein, 382 aa, unidentified
MQASTVDTPTAGHCGTIFVAIELSQKTWLVTLHSPDRDRISRRTLEGGDDAGLLALLEGVQTRVAGKLGTAPKVVTCYEAGYDGFWLHRLLTAAGITNLVFDPASIAVEQRSRRAKTDRIDGELLLRTLMAHLRGEPRVVRIVRVPSVEQEDVRRASRERDRLVKEQTGHTNRIKALLRLMGMAVSNPRRSDWLSWLAQQRDRQSRPVPPHLMSEVAREHARLMLVREQLAALEQAPTAAVAAAPAPMAERRNLLLRLKGLGAVFAATLTNEVFYKDFHNRREVASYCGLTPSPWRSGGIDREQGISKAGNPRARLKAVELAWLWLRHQPDSALSRWFAARTANAGKRARRIAIIALARKLIVALWRYLTTGLVPEQAVMKA

SEQ ID NO: 134173 - protein, 403 aa, unidentified
MNMNAVGIDVSKGKSMVAILRPYGEIVSTPFEVRHTVSGIRSLIEHIQAIDGESRIVMEHTGRYYEPLVRELSQADLFVSAVNPKLIKDFGDNSLRKVKSDKADAVKIARYTLDSWAELRQYSLMDEIRNQLKTMNRQFDFYMKHKTAMKNNLVGILDQTYPGANAYFDSPAREDGSQKWVDFATTYWHADCVRKPSLNAFIDHYQKWRKRRKYNFSQSKAVEIYEASKEIVSVLPKDDLTKLIIKQAVEQLNTASQTAEQLRTMMNEAASKLPEYPVVMAMKGVGKSLGPQLMAEIGDVSRFTHKGAITAFAGVDPGVNESGSYEQKSVHTSKRGSGTLRKTLFQVMDALIKTKPQDDPVYLFMDKKRSQGKPYYVYMTAGANKFLRIYYGRVKEYLSSLPK

SEQ ID NO: 134174 - protein, 334 aa, unidentified
MNNVSLIGIDLGKNSFHVHCQDATGKALSRKKFTRAKLFEFLANCPSATVVMEACAGAHYIAHKISDMGHKPKLISPQFVRPFVKSNKNDFVDAEAICEAASRPSMRFVAPRTESQQEILALHRIRESLVRDKVKTTNQMHAFLLEFGISMPKGLAVIRRLSVVLTENELPPYLAKLLVKLQSHYLYLVEQIRDIENELKLAANQDDTTQRLMSIPSVGPITASVLMANLGNGQQYKQSRDFAAATGLVPRQYSTGGRPTLLGISKRGNKNLRRLLVQCARVYILHLEHQSGYLAEWVRHQLSKKHSCVVACGLANKLARIAWAITTKQSVYMA

SEQ ID NO: 134175 - protein, 315 aa, unidentified
MCFVGIDVSKSRLDCATSPKVEAWSEPYSPEGLRRLSARLKRLQPQLVVFEATGGLETRLALALDEAAIRVSIVNPRQVRDFARASNRLAKTDRIDARQIALFAEKMSPVERKPLTSEQRELVSIMARRRQLTAELTSEKNRLFSSGSGAPRVVRDLREHVRWLDTHLKKMTEEAELLLEHSPETKRRVELLRSVPGIGPVVSLTLVAELPELGTLNRRQVAALAGIAPYNNDSGRRQGRRSIWGGRVEVRNALYMATLVASRRNPLIKAHYEALVARGKEKKVALVACMRQLLSRLNQMLKTETAWDGSLGQTR

SEQ ID NO: 134176 - protein, 338 aa, unidentified
MENLNYFIGIDVSKEHLDFYVSNDMRQGSSARVGNSKKEISAYIKGLITKKEIVIAASVFCMENTGIYNNQLLSVLLDYHAHIWVETPVHLKRSLGLVRGKNDKIDAERIALYAYKNRDDVKLWQPERAIIVRLKNILRTRERLMESIESLECPLREASRFDDKETVKLMKRSCKASINALRNDIKKIDVTIKEIIDSDEQIKSLFRIVSSVENVGPIIATAVIIYSNEFKKINDPKKFACYSGVAPFEHSSGKSIRGKTRVSFMANKYMKRLLHLAAIGAISRPGELKNYFDRKMAEGKNKMLVINAIRNKIILRIFTCVNQNKLFEKNIKNNLVLA

SEQ ID NO: 134177 - protein, 414 aa, unidentified
MPIATCGIDWAQDHHDIAIVDTDGQLLAKRRIPESIAGFTELTAMLAEAGDNPNDPIPVAIETPRGLLVAVLRASGRPVYPINPMSVARYRERTSMSGKKSDHGDAVTLANILRTDADQHRRLPADTELAQSITVLARAHQDATWRRTRASNELRSLLREYFPGFLHTFADRPGAISSPEARAVLAIAPTPAKAARLTKPQIVAALRRAGRHRGLTSLADTIQQHLRTPQLRHPTLVEDAFGVQALAVLATLDAEYDSVDRLGEATAAAFNEHPDHQIITSFVGLADLTGARLLAEIGDDRTRFADARALKAFAGSAPVTKASGRSIRITHRHVKNNRLAAVGFVWAFVASGCQGPTRAHYLARRDHGDRHAAALRHLYNRMLGQLYYCLQTSQTYDPIKAYGPPPTPPAQAAA

SEQ ID NO: 134178 - protein, 370 aa, unidentified
MMGWTPRRRHRCAKVEVLSTTLREASVSEVSIIGLDIAKHVFHAHGADERGRAILSKRISRGKLLDFFAAQPSCTVALEACGGAHHWARQLTQLGHNVRLIPPAYVKAFVKRQKNDAIDAEAICEAAQRPSMRFVAVKSEEQQAAGLVFRTRDLLVRQRTQLINAIRGHLTEYGWIAPKGPSHVAMLADLIEEDEMANALPEAAHAMFRLMLDLLAGLNGKIADLDKEIARRAREDEVSRRLMTVPGIGPISATAIAALAPPVETFAKGRDFAAWLGLTPLQRSTGGKQKLGATSKMGERTLRRLLIIGSSAVVQQASKRGAPKGSWLEQMLARKPRMLVTVALANKMARIVWALLVKQENYRAPVAAKA

SEQ ID NO: 134179 - protein, 494 aa, unidentified
MPELAKNTTLKLPLTLPPSESARRSSRPVRTKARRRSKDPTEGLQVANPHAAAIDVGCAEHWVCVPAGRVEKSVQRFGCCTAELNRLAELLVECRVQTVVMEATGNYWVVLYDILEERRLNPVVVNPRYAKNMSGRKGDIPDCQWMQKLHTYGLFANSFRPTQQVRILRAYLRQREELVGASSQQIQHMQKALTEMNVQLANVISDISGETGLAIIDAILAGERSAPVLAKLKGPRIAASTTTLKEALEGHWKDEELFRLEQARLSYAHFQEQILQCEERIAQQMQAIQGRLPIQSQGPAPVAHVPAQAGDPTPEAGGQSVAPPSYDLGAQLKRILGVDLTQINGIGPVAAQVVLSEVGFDMSRWPTEKHFASWLGLCPDHRISGGKILGRCTRHVVSRARNILRMCAYTLTHSKSWLGAKYRRLKAKLGAPKAIVAMAHHLARLIYRMIKTGQQYVDKGMEVYQARYREQRIKWLKKQAKELNLQIVQEQATA

SEQ ID NO: 134180 - protein, 314 aa, unidentified
MNECWVGVDVSKARLDVFLHPQAQALSFANTAEGIEQLTQCLRQAEPTLIVMEATGGLERTLVAQLMVARLPLAVVNPRQVRAFSKALGQLAKTDLLDARLLAIFAATMRPKPRPLADEAAQALADQLARRRQLVEMLVMEKNRLKQAADAPVRKDIQEHIQWLQQRLSASESGLRQAVESSEVWQAKHELLTAVQGVGEITALTLIGGLPELGQLNRKQIAGLVGVAPYNRDSGRQRGKRAIWGGRAEIRAALYMATLSAVRFNPTLRVFHQRLRAAGKAKKVALVACMRKLLTILNAMLRDGQPWVGEPKIA

SEQ ID NO: 134181 - protein, 370 aa, unidentified
MEKIVYVGLDVHADTIAVAIANDGRNGEIRFHGVIDNTADSVRRLTKRLVATNTHPTFCYEAGPCGYGLHRLLTKLGFDCAVVSPAMIPRRTGDRIKTDRRDAEMLARLWRAGELTPVWTPDEGQEAMRDLIRTRKQSLDALKIAKQQLQSFLLRHGLRYTRPTYWTKMHWRWINDLRKFRFPHQQLAFEELKRTIRQIEERISTLDKAIEDAVKDWRFGDLVDALRSLRGVNTTIAATLAAEIDDISRFENPRQLMAWLGLVPSEHSSGSTVRRGRITKTGNALARTMMVEASWSYRHPAREGQPYLKRCQHQPQEIKDIGWKAQTRLCKRYRDLSKTGKPQPRVLTAVARELAGFIWDIARHVPIQAR

SEQ ID NO: 134182 - protein, 339 aa, unidentified
MKSISTVGVDLAKNVFQVHAVDERGEVVVRKALRRSKLLAWFAGLEPCLVGMEACATAHHWARELMKLGHDVRLMPPAYAKAYVRRNKNDPADAAAICEAVSRPSMRFVAVKTEQQQALAGIHRIRELLKKHHTMVINQLRSLLAEFGIVAAKGVPRVAELLAVLADPEERRIPACLRDELRSTANLLSTIDRKLEAIDRRIVATGREDATYRHLITIPGYGPILSSAMSAMVVKPGAFRRASDFAASLGLVPRQDGTGGKVRLGAISKRGNGYLRRLLVNGAMAVIRGKRARQDPWLAKLLATKARKLAAVALANKMARIGWALMMRQEDFRRQPAAA

SEQ ID NO: 134183 - protein, 359 aa, unidentified
MKEYIAFDSHKHYTLMERENRETGRAVQLRVTHQPGAILSCLRNCEAGSEVAVEATGNWYWIVSEIEQAGLKPQLVHPRKAKLMMGLINKTDKLDVHGLNRLQRNGTLPTVWIPSAELRDQRELTRTRTRLVLVAQRTRLKNRLHATLAKYGLVVQGYSDAFGTLARSQWPELLGRLPEQTQWVSQQLLEQLDGLEQQIKQCEKRLADLLKVTPEMQRLQSLPGVGLILGASIALEIGTVSRFGSAERLASYAGTTPRVHSSGDKLRFGRLRPDINRYLRWAFVEAANVVALHHLRRPERHVSQLYCRLKQRKGHAKAIGAVARHLAEASFHILSRREEYVDPALPKGRSKAGVSASPS

SEQ ID NO: 134184 - protein, 342 aa, unidentified
MYYIGLDVHKKTISYCVKDAAGKIHSEGKIGSTRRELDAWIKTLPQPRMMAMEATIFTGWIYDHLLPHAEKVKVAHPLMLRAIAAAKRKNDKIDASKIADCLRCDFLPECYMTSTEIRDRRRTLRYRGLLVKQMVQMKNRISGLLMETGASFNKQRLHKVGYFTELMAGNEEIDCVRPLLKLSRETINRSQKLDYALVSSLERDPLLAERLKRLRTVPGVGPITALTWVLEIGDVVRFRSIKQAISYCGLCGAERSSADKVMRTPISKQRNKHIQQVLVEAAKLAPRYSHELALIYEKEMQRGNRNRATLAVARKMVAWMVAVERRKQDFVPAEKFGGTAAA

SEQ ID NO: 134185 - protein, 370 aa, unidentified
MLDTTTFVGLDVHARSIKAVSLDVMTGEVRCATFGYDAGAVAEWVRSVDPRARCVYESGVTGFDLQKRLSGLGVDCVVGAVSKMIKPSADRRRKNDRNDAEFLARMLSVGNVVEVWVPDDECEAARDLTRALEDARDDLSRAKQRLSKFLLRHGLAFDERTPTGRRKGNWTRAHWSWIESIRFAERADEEVLAYYVDAVRRAAEEKSRLEGLVEAEARKPRWRKRVDSLRCLKGVDTASAADLVFEAGEFSRFRNARSFAAWVGLTPSEHSSGESDRRGAITKAGNKHLRKTLVEAAWHYLTCSGRPKDLARGQAPDRGARRHAAKGVRRLAERREALLARGVHGNKANVATARELACWVWAVGLMAEEA

SEQ ID NO: 134186 - protein, 475 aa, unidentified
MGRDSGKQKKENMKALSPEQEAGLKQKAEEISKGLQSYTWRDLETGGKFTHNDKLTFIRDDMLIVGCDIGSERHYARAIDAKGRELSKGAYSFENSAEGFQSAKDWALCLAAQHGKNQIVLGVEPTGHYWFSLAAWMIAKGISVVQVNPYAVKQTKELADNSQAKNDAKDPKLIAELVKNGNYGVPYLPEDVYAELRVLCTLRDQLMEDRVRNMNRLHREMKIVFPEYREAFGKIDGIFTLSVLANAPLPSELVALGEDGVKDIWHAEKLRGGGYKRAKEIVRLAGVSAGLTQGAEARKIAIVSFVGKVMELAAELEEIEAQIALKCREIPRADSILEIHGLGAATVSGILAEMGDIDRFDAAKEIQKLSGLGLVACSSGKHQGQTKISHRGRKRLRYWLFQGALSVVSHNEAFRQIHAYYTTRAENPLKKMQSITVIACKLLRIIFTILKKGVRFDPDKMLSDITRPAPLDAAA

SEQ ID NO: 134187 - protein, 400 aa, unidentified
MDDSQRFRCFLGIAVSKETFDGCCINMKGEKHFSLSTSMNRKGFEELIKQLSGLSVSQGSVLVGMESTACYHVNLYSFLVSLGYTVTVINPLLISNFVKLHLRKTKTDKKDASVIAQFLLLNRESLCQTVLSSNISDLRDLSRQRESLVDQMSSIKSEMKRLLTMTFPELEHISGIFSKSMLRFLCQYPSAASIRQAKRSKIAKILIPGSYGKQTDVSVDRIVKAAQGSIGTSSSTKEIILRQKASLLIQLDQHLKELTDILIELCEGKIQGDRDILTSMKGIGEKSAVNFLIEIGGDMKQFETHKKVIAMAGLDPALYQSGKIDRKGKISKRGNRHLRRVIWIMATKVIQFNERFRQYYLKRIEDGLPYKMAVLATAHKLIRVIFAMLRNKTLFDPKMN

SEQ ID NO: 134188 - protein, 330 aa, unidentified
MADATEAVFVGIDVSKDWLEVALGEQARTTRWTNDEQGVTGLLEHLGQAGQQVALVVMEATGGMERLAAATLCARGLAVMVVNPRQAHDFAKALGLLAKSDAIDARALAQFARTLHASDKREQMLYRVPSQEQEELLAMITRRSQLVSMRVAEDNRLHSAHASQRKSIRLVIKVLDRQIGQLDDDIGGHLKGHFDAKLRLLRGLKGIGPNTQAVLMAALPELGTLNTRQIGKLVGVAPLARDSGRHRGRRTTWGGRATVRQALYMATLSAVRWDATLKRFYERLCAAGKPRKVALVACMRKLLTIINAVIKSGQPWQPSYSQAPAAHGTT

SEQ ID NO: 134189 - protein, 425 aa, unidentified
MKNNFLSTLFVGIDVSSKTNVLCALDFQGNKLLNLKALNNQPGAESILESILDCLNSNSLKFVVIALESTSFYSTHIANFLSSKEVLLAYSPMVYCLNPKTIANYRKSFVDMDKTDPLDAYIIADFARCGRIKSQPWRGAQFLALQRLTRHRLHLVEAIAREKTYMVSNIYLKFSQLAVLEKADRPFSNTYGATSEAVLTEFLSLEDIAYSSIEDLVDFIKDKGKNRFSNPVGTAALLQKAARDSYRLDKVLYEPLNIAIASSFNVIKALQIEIKEIDKAIDKNIKGINTTEYQSLISIPGIGPVFASGILAEIGSITSFSSNDALAKYAGLTWRIKESGDYSADDTNMTKTGNKYLRYYLIEAANSVRNNIPEFNVYYRKKFYEVPKHQHKRALALTSRKLVRLIFGLLTKNQIYSSSKVGEIQ

SEQ ID NO: 134190 - protein, 340 aa, unidentified
MSQVVTIGLDLAKSVFQVHGVDAAGGIVVRRQIRRPQLVAFFAKQPACLVGMEACASSHHWARELMALGHQVKLMPAQYVKPYVKRGKNDAADAEAICEAVTRPTMRFVAIKSPEQQSAMMLHRVRLVLCRQRTQLTNAMRAHLAEFGIVAPIGRLGMERLLGVIEDPTDRRIPADARTCLKMLAVQLKTLKEQILENDRRIIVDARRTEVGRRLMEVPGIGPVLASALVAAVADPAIFRSGRDLAAWIGLVPRQNSSGGKERLGSISKAGHRYLRQMLVVGAMAVIRHAGRSAEQRAWLMQLLARRKPKVAAVALANKTARMVWAMMTSGERYREPLAT

SEQ ID NO: 134191 - protein, 333 aa, unidentified
MSFYSQVCGIDVSKDTLDYCILPQEIHTSDIPTVHQISNESENIMMDFGRSMFDQTLFVVESTGTYSSKVVHALSKMSRPIFLVNPYKSKSYMAAMGVTNKNDAQAAYSLAHMGRSLDVRLYKPPTMQMQRRKQLLSSLNALEKQKRSLNNQIHALDQCAVKEENAKAALLNVLKSVEEQIAILKKQLSTRRLESDFKKKIKLGASVIGIGNKTAETLLLLTNNLETFEHPGQVAKFLGIVSWSHDSGTSIRKRGGITKFGNSYARGLLYMCTRSAIRHNKACKELYQRLRANNKPHKVAAVAVMNKLVKQFFFCVKRESMFDNDHYLKNKKN

SEQ ID NO: 134192 - protein, 326 aa, unidentified
MQPPWLAFASMSQNNLPNVYAGVDVAKDSLALQFQGRSYCPRNNAEGIARLVRILSKVPRVHVVLEATGGYEQPLVRSLHKAGIALSVMEPARVRAFARAKGLRAKTDPIDAAVLQAFGEAIHPAPTAAPSARQERLGELVLRRRQLLDHVVMEANRSAHYCDSLIRRQAAALLKALRNQIAQCDQAITALVTEDDTMAARAARLQEVPGVGAVTATTLLAEMPELGSLRDEGAAALAGLAPFNRDSGPYAGTRHIAGGRASVRCALHMAALAATRHDPILKAFYQRLLAAGKKKMVALVAVMRKLIVLLNRMLRDPNFRLQAIPA

SEQ ID NO: 134193 - protein, 386 aa, unidentified
MRGKTFIPQDYDVFAGLDVDKRSISVTFTTHQGFIRSLRMPYSVEHLLNHVRKHFGDQKVAFAYEAGPTGYGLYDGLVAQAYPCVIAAPSMIPKAPGQRVKTNRLDSVALAENLRGGQLRSIHVPSPVYRELRHLTQLRDTFVSEMVGMKLRIKSLLLLEGISFPPAPSGSQWSGMVKAKLRQLPCSGTVRFKLDQLLDSLEFCEKQVLKTTREIRRFCQTAAELSQCIKYMMTVSGIGWIVASQLLARIGDWREIHNVRQLAGFLGVVPTEHSTGDKIDRGSITHTGDGRLRSKLVQSAWSAIRQDGELREFYRSVCRSHPRDRASRVAIVAVARKLSVRMAVVLMQQRPYVVREKVHSARLTQAETVPQGTPRRQAEPGAANDS

SEQ ID NO: 134194 - protein, 337 aa, unidentified
MNPTKSNHKFCLGIDISKSDYHVALLHRESGESIARSKFANTPEGHAKLLDWLAKHTGADLPVHACMEATGSYGESLADYLYGKVAILSVVNPRAIKAHGDSDLRRCKSDPADARLIADYCRSKKPRAWQAPSPAQRKNKAISRCLANLKKDRTRESNRLDLCSDKTVVKALKAHIKWIEKQIAKLEDELLVAVKEDAASARALELIVSIKGIGEKSAAYIIAELPDLTLLKNARQLAAYAGVTPRIFQSGTSGKTRTPMSKAGNRHIRKALFFPAMSAMRFNPICKAFAERLKEKGKPSIVIIGAVMTKLLHLIYGVLKSEKPFNPDILKKAQITP

SEQ ID NO: 134195 - protein, 349 aa, unidentified
MIVIGIDPHKQTHTAVAVDGATGKVLADLTIKARTPGFERLLEWARALDDERLFAVEDGRHVSGHLERHLIGRGERSVRVPPRMMGEARRTDRISGKSDPVDATAVARAALRHSDLPEATLAGPERQIGLLVAHREMLINERTERICKLRWLLHDIDPDLAPALRTLGRFKTLDRLVRALEAVEPTVEIEICLDLLTRCREITVRTNELERRIGALVKTHALALLEIPGCASLTAAKIVAEAAQVARFPSEGHFARYAGTAPIPASSGARHRQRFNRRGNRQLNAAVHRIAVTQIRIHDPAKDYLAKKRAEGKTKTEAIRALKRHITRVVFKTMTSMNQPTDRLTAVAA

SEQ ID NO: 134196 - protein, 343 aa, unidentified
MPHYVGLDVSQKTTAICVVDAQGKRLWRGVCATDPGPISARISQHAGVDAKVGIETGSMTPWLVHGLRAAGLDVACLDARRVKAALQMQLNKTDENDAEGLAQIMRTGWYRAVHVKSLDAHRARALLGARAQLVGMTTRLSNMIRGVLKTFGLLPGAGRGLRFDRKVEALLEGAPEIALVVRPLLATWRQLREQIAVFDKAVLQQVRADPICRLLMTVPGIGALSSLMYVSTVENPSRFSRSRAVGAHLGLTPRRYQSGETDRSGHISRCGDGLARTLMYEAATVILHRVKRPLHLKDWAEAIERRSGSGKARVALARKLSVILHSVWRSGEPFRCAAPAMAV

SEQ ID NO: 134197 - protein, 339 aa, unidentified
MNPATVGLDLAKNVFHVHVVDASGRTIDSKRLTRRDLLPYFKALPLCLIGIEACASAHNWARQLQGLGHDVRLIPPSYVKPFVRRGAKNDATDAAAICEAVTRPNMRFVPIKSRDDQAFLMLHRARGLLVRQRTMAACALRAHLAEYGIIVAQGIHRVDALIAKLGEIRADLPYDASFALDALVGQLDTLNRQIDRIDVRLAEIHKTNAICRLLATIPGIGPITATAFAATVPDPSTFRSGREFAAWLGLTPRQNSSGGKHRLSGITKQGDRYLRHLLVLGARTVVRYPKARSRVDGPWIEALLERRRPMVVAVAVANKLARTIWAMLSTGEMFRTAHP

SEQ ID NO: 134198 - protein, 348 aa, unidentified
MLIIGCDYHPGFQQIAFVDTDTGEAAERRLTHREEAEQFYRALQARRVRIGMEASGHSRWFERLLNELQFELWIGDAAEIRTKRVRKQKTDREDARLLLKLLREDRFPRIWVPDAENRDLRQLLWHRHRLVQMRTRIMNQLHVVALNEGVRRKKALWRPAGRSELESLVLAPWALRRRRDLLDLFDQLIPKIHDLTRALEEEVEKRPIARRLMTHPGVGVLTALAFELVIGTPERFHCGKQIASYVGLVPSEESSGDRRRLGHISKQGNALLRFLLVEAAQVTVRSQPQWRSKFFHLAMRRGRKIAKVAMARKLAVHLYWMWRQGLDYGQFERLGSHAGEPGNRHGVQ

SEQ ID NO: 134199 - protein, 318 aa, unidentified
MNTNTLQNINVGVDTGKSQLDIYIRPLDIYFTVPNNDKGIKEAVRAIAKHQPQRVVIEATGRLEMPFILACDQAKLPYVIANPLRIKRFAGAIGQRAKNDRLDAALIAHYAEKVQPDLTELKAENIRLMSDLVSRRNQLLSIQTMERNRLQILPKNIASTITPILTALKNQIEKVEAKISKLIDISPEYQTKNEILQSMPGVGKILAASIISNVPERGYITNKQASSLIGVAPIVRESGRYKGKRIIQGGRTQVRTVMYMAMMSAIQCNPVFKTTYERLLAAGKPKKVAIVACMRKMVVILNSMLRDGVMWDNNSAKN

SEQ ID NO: 134200 - protein, 340 aa, unidentified
MPLYGGIDLHANNSVVVLLNEQDQVVYEKRLPNHLPTVLDLLDPYRAEIMGFVVASTYNWYWLVDGLMEAGYRVHLANPAAMQQYSGLKDTDDHSDARWLAHLLRLGVFPEGYIYPKAERAVRDLLRKRAHLVRQHTANVLSVQNIIVRNTGTRLSIKRIRELTKQELEGLLPEVAQVLAVTSSLAVLACLSHQIKTLEQTVHKRLKHTPSYEQLLTVDGIGTILAPTIALETGTIGRFPTVGHSASYCRCVDRSKIRNGKRKGQGNVKNGNRYLGWASMEAAQFALRFHPSAQRFYQRKLAKSNNNTTLARKAVAHKLSRACYDSMRDRVPFDALKAFG

SEQ ID NO: 134201 - protein, 349 aa, unidentified
MSQSLNSAIAVIGIDIGKNSFHVVGLDDRGAIVLRQKWSRGQIEVRLANMPPCLIGMEACVGAHHLSRKLQAFGHEARLMPAKYVRPYSKGQKNDFRDAEAIAEAVQRPTMKFVATKTAEQLDLQAMHRVRERLVSQRTGIINQIRAFLLERGMPVRQGLRFLRAELPRILATPPDVLSARMVQVISDLAEDWRRLDHRIDHLSNEITLLARQDTGCERLMSVPGIGSIISSAMVAAIGTGDAFTKGRDFAAWLGLVPKQISTGDRTILGKISKRGNRYLRVLFVQAAWVVLIKPMSWERHGLKHWIEAAKKRLHRNVLAIALANKLARIAWAVLAGSRTFEANKLQAA

SEQ ID NO: 134202 - protein, 320 aa, unidentified
MDAVLGIDIGKAKFHVTLLFPDGRRRRKVCANSPAGCTDLLAWIARQGVARVHACLEATGAYGELVATTLVDEGHQVSILNPAIIHHYAKSRLSRAKTDPLDADVIAAYAAKEHPPLWTPLPREVRELQALVRRLDALIGMQTDERNRAQAGALTPAVQHSIAAVLGHLEAQIDTVRAQIREHMDHHPGLRAQRDLLTSIPGIGEATAALLLAELFNKAFASARQAAAFAGVVPRLRDSGIHEGRRVMCKLGPGRLRKGLYFPAIAAIRFNPSLQPLAHRLRDAGKPPMLIIGAAMRKLIHLAFGVLKSGRAYDPDLAKA

SEQ ID NO: 134203 - protein, 361 aa, unidentified
MFTERTSVGLDVHARSVAAAAIDGVTGEVFKARLVPDQQVVLEWLGGLPGPVATAYEAGPTGYGLARALRAAGVRCEVVAPSKLARPSGDRVKTDARDAMHLARLLRLDEYTPVRVPTEAQESARDLVRAREAARGDLMRARHRVSKLLLRHGIVYSGGAAWTAKHDAWLLGQRFELPGTRTAFEDAYESAVLASGRRDRLDEQVAVLATEGEYVPVASRLACLRGISTLTSVALAVEIGDWDRFTGSSIGAYLGLVPTESSSGTRRSQGSITKTGNTHVRRLLVEAAWHHRKPYRPTAILRRRWERATPAAVARAQAGNHRLHRRWVGYAERRKRPVLANVAVARELAGWCWSLAVLPDQ

SEQ ID NO: 134204 - protein, 367 aa, unidentified
MSSWGGQDRIGWRFHIPGEDGMKTFIGIDVSLASSAVCVLDEHGQVVKRAQIDSEPGAFIAFLQELPWPIEAIGLEAGPLSQWLHRGLGEAGFELILMETRQVKAVLKAMPVKTDRRDAEGIARLLRMGWFRPVHCKSVSAQEMRALLSARKAVQKAVLDIEQSLRGVLRNVGMKIGPVGKGKGRYEARVRELVAGNSALEAAASAILDARMMLRGELSALDRRVLELARQDEACRLMMTMPGVGAVVALTVRAAIDDPARFRSSRDVGPWVGLTPRREQSGERDIVGRITKAGDAALRTALFNAATVLMHHGKPCWLRAWGMQVARRRGQKRATVAVARRIGVVLHRMWMDGTEFRMQRDPVTAAA

SEQ ID NO: 134205 - protein, 403 aa, unidentified
MIFVGDDWAEAHHDVYLMDESGRRLGSRRLPEGLSGIRQLHEVIGEHAEEPDQVVIGIETDRGLWVGALTGAGYEVFAVNPLAVARYRDRHHVSGAKSDASDAKLLADLVRTDRHNHRRIAGDSPDAEAIKVLARTHQSLIWTRTRHTNALRSALREYYPAALVAFEDLDHGDALGVLDRAPTPEQGAHLPLAALQSALKRGGRKRNIAARAREIQAALRTEQLTAAPAISAAFAATTRATVGIIGELNRQIGELETSLAAHFETHPDADIYRSLPGLGVVLGARVLGEFGDDPNSYTDAKSRRNYAGTSPLTVASGKKRAVLARHVRNRRLYDAIDQWAFCALSSSPGARALYDQHRDAKESHHQALRAVGNRLVGILHGCVRHHTPYNEHTAWAHRTQAAA

SEQ ID NO: 134206 - protein, 417 aa, unidentified
MKEVYRRCCGIDVHKESVEVCVLPAVGGSGEVRRKQFKTFRAELIRMRKWLKQLKVTEIAMESTGVYWRPLWNVLQDEGFERLVLANPAQVKALQGRKSDRRDAQRIAEFLQDGRLDGSFVPTAEMQRLRMLLRDRIALLEQRNEVHNHIRDLFETAGVKLACVLSDLLGVTGRNIIEAMINGETSADKLSWKVRGSLPKKEKQVKDSLQGCFDEFHRDVLRRFYRQYTFLTSEIEEFEKLISERMAPYAEQVARLDGIPGVDRMVAWHLIAELGVDMTVFPDADHCASWAGLVPGENESAGHSKSNRCRKGNRVLRRVMTQAAWAASRCKKGYLRAFFYRHRGHSGWAKAIVATAHKILTIAFCMLRDGTEYRELGDDYFDKLNPLRTVKRLTKRLQALGATVSVTMPPTPLNVRR

SEQ ID NO: 134207 - protein, 402 aa, unidentified
MNAVGIDVSKGKSMVAIMRPFGEIVSTPFEIKHTTSDINSLVELINSVEGESRIVMEHTGRYYEVLAHQLAEANLFVSAINPKLIKDFDNDSLRKVKSDKADAVKIARYALDKWQNLKQYSVMDELRNQLKTMNRQFGFYMKHKTAMKNNLIGILDQTYPGVNTYFDSPARSDGSQKWVDFASTYWHVDCVRKMSPNAFIDHYQNWCKRKKYNFSKSKAEEIYGKAKELVPVLPKDDITKFIIKQAVDQLNSSSTTVESLRTLMNETASKLPEYPVVMAMKGVGASLGPQLMAEIGDVSRFTHKGAITAFAGVDPGVNESGSYEQKSVPTSKRGSSDLRKTLFQVMDVLIKTHPQGDPVYQFLDKKRAQGKPYYVYMTAGANKFLRIYYGRVKEYLASLPES

SEQ ID NO: 134208 - protein, 342 aa, unidentified
MVEVSIIGLDLAKNVFQAHGSAADGSVVFRRKLSRLQVLKFLAEQPRCTVAMEACASAHLWARAIAELGHAVKLIPAAYVKPFVKRQKNDMADAEAIAEAAARPTMRFVAPKSAAQQAAAMAFRTRELLVRQRTQTINALRGHLAEYGVIAPTGPSHVGRLAAMIECEQSALPAPVVTLARILLAQIAGLSAQIDALEKEVRQRAAQDETTRRLMTIPGVGAIVATALTTFAPPPETFSKGRDFAAWAGLTPRQHSSGGKERLGKTSKMGQRDIRRLLIIGAVGCVRWAARKGAPEGTWLARMMARKPRMLVAVALANRMARIAWALMHKGEDYRNPATVAA

SEQ ID NO: 134209 - protein, 394 aa, unidentified
MKQDNPQARSRVIGLDLHPSCFSASAFTGTNIQNSEKLWTHDKVELPQLSRWVKRHLEPGDLVVMESGSGSFECCSRLIELGIQAVVLESFSVGKIGESHLKSDAVDSVKIAKVYLSGLAKEVWQPDEICKERREILAMYQRATRDCTRTQNRLTGWSTQHGLQRPQGMTWKSDKAHGWMLRQRAWTPSQSMLIESMFEDLGHAHGKKKRLESYMAEDLMNSPAWMKLLQICGIRHITAFALAAIIGDISRFRNPKKLVSYLGLNPRVKESGINRQSGRLVHHGRKDVRHFLVQGAQSILKLDPATNRWARWGQRLAYRKGKSPACIAVARKMLTAVWYLLRGFKPEVKEPNSHITIKLGKIAGVIGAKRLPEIGYPKRADFIEEKMNYVLGAT

SEQ ID NO: 134210 - protein, 383 aa, unidentified
MNAVGIDVSKGKSMVAIMRPFGEIVASPFEVKHTASDIKSLVKLINSIEGESRIVMEHTGRYYQVLAHQLSQTNLFVSAINPKLIKDFDNDSLRKVKSDKADAVKIARYALDKWQNLKQYSVMDELRNQLKTMNRQFGFYMKHKTAMKNNLIGILDQTYPGVNTYFDSPARSDGSQKWVDFASTYWHVDCVCKMSKNAFINHYQNWCKRKKYNFSQSKAEEIYGKAKELVPVLPKDDITKLIIKQAVDQLNSVSTTVESLRTLMNETASKLPEYPVVMAMKGVGTSLRPQLMAEIGDVSRFTHKGVITAFAGVDPGVNKSGSYEQKSVPTSKRGSSVLRKTLFQVMDVLIKTHPQDNPVYQFIDKKRAQGKPYYVYMLSLIHI

SEQ ID NO: 134211 - protein, 342 aa, unidentified
MSIVGGLDIHRKQLTFDYLDQASGEVTSGRIAPADREHLTVWLRRFDGGGQVAFAAEACTGWRYVVECLQAAGVGAELAEPADTAAARGRKKRAKTDRADSRLLRELVEADRVPQCWIPPRQVLEHRALLELYHDLRREHTAWIQRIHAVCFHQGTEALSLSTEADRAHLRQVAAAQLSPAGQLQVDTYLQMLQALETHLAGVRRRLVAAAGHLRGPKVLTERLYGVGPVTALALTCWLGGAGRFSSSRKAVRFAGLDVTVYSSDGKRSPGRLSRQGPPVLRWCLYEAGKAHSRRSASDHPYYTRVKDRLDGKRAALSEARKLLRQACHILTELGDDAFAAA

SEQ ID NO: 134212 - protein, 362 aa, unidentified
MRIIGCDLHARQQAVAMLDTNTGELMEITLTHEGNNVREFYSKLPRPVRVGIEATGSMQWFVNLMEELGIECLVGHPAQIRAAEPRKQKHDRRDADLILKVLVENRFPAIWLPSKELQDLRALLRHRHQWVRMRTRIQNALQSIALANGLRRGASLWSHDGQNTIASLPLAPHTAYRRNELQALYAKFEAEMEKLNQRVEEQACKRAGARLLMTHPGVGPVTALATDVFLGDPARFADSKALASYVGMIPREYSSGGRQRLGGLTKQGNPLLRFLWGEAGAHAVRRDPELQRFYRRKLAQKGFGKASVAAARKLGIRLWIMLRDQIEYNEFCRRGQKQQKSSDACAGMPEKRYGAKSHRHVD

SEQ ID NO: 134213 - protein, 350 aa, unidentified
MLIIGCDYHPAFEQIAYVDTASGDCGERRLEHRKEAEKFYRDLAAQGMKVRVGMEASGHARWFERLLAELNFELWIGDATEIARKRERKQKTDRQDAQHILRLLLKDDFPQIWVPSWENRDLRQLLWHRHRMVQARTRIMNQLQAVALNEGLRSKKRLWRESGREQLEAFRLAPWASRRREDLLKLLDGLNPMIAELTQAIQQEVEKYPAAQRLRTHPGVGPLTALAFVLIIGKADRFQCGKQIASYLGLVPLEDSSGNRRRLGHITKQGNSLLRFLLVEAAQVTTRSLPEWRSHYVHLTMRRGRKIAKVAMARKLAVRLYWMMRKEWDFETLTKFGSHAGKPGPRDGVK

SEQ ID NO: 134214 - protein, 356 aa, unidentified
MNNVSRLDFTGQQIYVGMDVHKKSWSISIFTDQFEHKTFSQPPEVGVLVNYLKRNFPGAAYKSVYEAGFSGFWIHDRLQEQGIQCLVVNPADVPTKDKERATKTDRVDCRKLARSLRNGEIDGIYVPSRPKAEDRSLLRTRGSMVKKQTRCKNQIKSVLCFYGIIIPDDFANGYWSNRFINWIESVRMERASGNLAFKAHLDELKHIRRIIADLNRGIRVLARSDEYRENVRILKTVPGVSILTAMTLLTELYDISRFKTLDKLCSYVGLIPNTDSSGETDYKTGMTGRRNAQLRVILIESAWTAVRKDPALMMAFNELCKNMTKTKAIVRIARKLLNRIRYVLKNQQEYVPAVIQ

SEQ ID NO: 134215 - protein, 403 aa, unidentified
MNNVVGIDVSKGKSMVSVLRPFGEVVAKPFSIGHTGSELKELADYLKSLDGETRVVMEHTGRYYEPVARFLHEEGVFVSAVNPKLIKDYGNNTLRKVKTDKADSRKIARYGLDNWAELRQHTPMDTIRMQLKTLNRQQSLYSKTKTMMKNNLIALLDQTYPGVNALFDSPVREDGSQKWVDFATTFWHVDCVRNMSLTAFAERYRKWCKRHGYNFSQSKAVEVHAGAQDLIAMLPRDALTKTMVRQAIDALNAVSASLERLKAEMQALAAQLPEYPVVMAMHGVGDSLGPQLMAELGDVTRFTHRNAITAFAGVDPGADQSGTHEAKSTRVSKSGPPELRRALFLVMDCLLKTQPQDDPVYRFMDKKRAEGKPYLVYMTAGANKFLRIYYGRVKEYLAQLENS

SEQ ID NO: 134216 - protein, 345 aa, unidentified
MDFVGIDLHKTSSQICTLTEGGELTERRIKSTRAAFDEVFASRPPARILVEASTESEWVAQHLEGLGHEVIVADPNFAPMYATRDKKIKTDKRDARALCEACRLGAYRPAHRTSDRQRRIRAQLLVRTTLVRTRSKYISLIGALARREGCRIATGGSVNFIARAEAANLPAHVKAAVAPIFESLRMLNRQIAEADAELEKIVREDEVVRRLCTTPGVGPVTATSFAATIDDATRFGAAKQVRAYLGLVPREYSSGERQHRGRISKAGSSRARTLLVEASWALLRWRHAKNAALYDWAMRIAARRGKAKACVALARKLAGILYAMWRDGTEFDPQSLSRDAIEAAA

SEQ ID NO: 134217 - protein, 342 aa, unidentified
MNLPIRIGMDTSKSVFQLHGVDENEAVVVRRQFRRAEMIRYFERLPPVLVAIESCGSSHHWARLLQSFGHEVKLIPPQYVKAFVKRGKNDAADAEALCEAVTRPSMRFVPVKSKERQAACMLMTVRERLVSVKSQLSNAFRSYAAEFGIVGPAGRQNVTALIKRVLEDDNLPEMARDLFRLQAEEYAAVEARLAKIEAKLMKWHREDDVSRRIATIPGVGPIGSSMLSMKAPPPETFRSGRDFAAWLGLTPKDHSTGGRQRYGGITKAGDSMLRSTLIVGATALLRHIRKGRHKPTPWLTSLLERKPPKLVAVALANKFARIAWRLMISGGVYNRPVAAMPI

SEQ ID NO: 134218 - protein, 371 aa, unidentified
MVWTAPYGIECARMRLLQSQTREPSVNQIIRIGMDTSKHIFQLHGVDAAERPVLRRKLRRSEVLAFFAKLPPTVIGMEACGAAHYWARELRKLGHEVKLMAPQHVKAYVKRNKNDGRDAEGLCEAMSRPTMQFVPVKTEEQQAALMLAGVRQQLIARRTQLSNAIRGYAAEFGLTAAKGLDKIEPLLARIAQDETVPALARELLAIQGQDYAQLQIELKAIEVKLMAWHRANACSRRLAQIPGVGPIGATALVMKTPDPRAFPSGRHFAAWLGLTPKDHSTAGKTRLGKITRAGDEVLRSLLVAGATAVIQQVRNGRGRPSAWLLALLKRKPPKLAAVALANKIARIAWKLMTTGESYDGARMPGTQAFAA

SEQ ID NO: 134219 - protein, 373 aa, unidentified
MPRYSTAFGMDVHLRSTTVCALDAETGEAVTRRFRGNPWGEVAEWMSGFPGPSLAAYESGYLGFAPQRELSGLGVDCVVAAVSKVPRSAADLSSKNDRNDAARMAKAILSHDVTPVWVPSPEIEGLRDLAAAHDAATARLAAAKQRLLAFLARRGYVYGGTTPAGNPRKYWTYGFLRWLDGIHPADDGGIRALAALRNEVEAADETRGALLAEYRAAVAAGPLSAEVEALQSIKGCGFALAAAFASEVGDFSRFRSGRQVTSYFGLAPKQRSSADSVRLGGISGAGNALVRKLAVEGSWCYAQAGHQPKLMPKGSGVPLEIRMHGRKGSERLLRRREEMIARGMLQAKANAATAAELVRWLWALGTMCREGAE

SEQ ID NO: 134220 - protein, 412 aa, unidentified
MQVVYPCCCGLDVHKKSITACVLWVEARGEKRNEKRVFGTFTRDLLKLSDWLRECGVRQVALESTGIYWKPVWNILEGQFEVLLVNAQHIKAVPGRKTDQKDSEWIADLLQHGLLKGSFVPPCAIRELRDLTRYRVNLAEECNRIANRIQKVLEDANIKLASVATDTLGASGRAMLKAMIAGEENAEVLAEMSKGLLRNKMPELRGALEGRTTVHHRFLLQELMDHLEFVEGKMLRLEEEIAKRMHPFDDAVRRLRQIPGVDRITAWGLIAEIGVNMDQFGDSRHLASWAGLCPGNHESAGKRKSGRTRKGSAWLRRCLCQAAWAVSTKKNNYLSAQFRRVAARRGVKKATIATAHTLLVIAFHILKAPVEYRDLGGDYFDRLHPETLKHKLVKRLEALGLKVTVEPMAQTA

SEQ ID NO: 134221 - protein, 364 aa, unidentified
MNSVITNTELSSHEGTRRQFNGGKADIKLGIDVHQDFYVVVMQEGGSNPKPPQRFQKEAFLYWAAKLARSGAQVHAVYEACGFGFGLQRNLTALSIHCYVVCPQKLDEQNRRVKTDGLDAKALCLKLDRFVQGNRDAMALVRVPTEQDEQQRAIHRQREQLVKARKQLEAQGRSLMVNHGLEPVKSWWKRGNFGALQVPEWMKELLGNSQPLLLALQEKIGALTLQLQVAAAAKQPRGLGAMTSVVIDREIGDWRRFNNRRQIASYTGLCPGEYSSGNTRLQSCVTKHGNPRLRAALVELAWRLVRFQPNYKPVVKWRQILAKAALATGAARKKAIVAVARQLAVDLWRVRTGRCKPEVLGLEI

SEQ ID NO: 134222 - protein, 358 aa, unidentified
MTTTATAADTILALDLGKYKSVACVSYSALDHRFTRLATSRDELARLIDKHRPAVVLIEACLLAGWVCDLCGQLGVVCRVANTASEAWKFKHLKRKTDRDDALRLAEIYRLGKFPAVTIPAKEVRERRALIETRQKLVGRRVALQNRIRAVFVSQGLPAPRGARAWTQAGLAGIAQHARPLADCAADQLWRGRLHLALTELEHIKGLLEQADNKLDELARHNDAMKILDTIPGVGPRTAEAVAAFLPKPELFRTSKQVSAYGGFVPRQYQSTDTDHRGRITKRGPRTLRQLLVECAWVMLRYNAWARAVYQRLTHGGKTRKKQAIVAVARKLLVRCWAMLRDGTVWRDEALAAAKAAT

SEQ ID NO: 134223 - protein, 461 aa, unidentified
MSKGSRRLSRGDRRRNDRLAALRAVVTRETAVLAFDLAADKQVCALTDQDSRVLARRTVRAKAWQLGEAVSWGLAQATAAGFSSVVVACEPTGHRWRVLDQIAAGLSVRLVCVQPLLVHRARESEDFTRNKSDETDAMIIARLVTELRCYLPERADPTWARLRHLGARRAALVTDATAAKQQIIDLLECAWPAALEASGKPMKSKSWLAAMTVALDRVGASGDLSLIRRWGWTRFAAAVRRELPRHGATRWYSKIVRAVFDAATDPAQVVAGVADQRAGGLERARFALADLAHARAETAVVEARMVQVLDELGLTELATSIPGLSAVGAAAILAETGDPTRFTSARAMVKHAGLCPRDNASGSYQGKTGISGRGRPQLRLAAWRAVWAALRNNPVLAARYAHLTGRADNKLTKTQARVAVAGSLLRQLHAVITTGTAWDPAIAGGLNPQTPATARGAAVAA

SEQ ID NO: 134224 - protein, 412 aa, unidentified
MEVMYPRCAGLDVHKETVVACVRVVEGGKVSHSVQTFATKTASLIALGEWLAANGCTHVAMEATGVYWKPVWQVLASESFELVLANAAHVKNVPGRKTDVNDATWLSELLAHGLVRASFVPKPEIQELRGLLRTRKQLVREKASHIQRLQKTLEEANIKLESVISDVMGHSGRAIMQALIAGETDPAKLAALAHRKVRASQATLREALHGRVKRQHRFLLRLHLQQIDALDASIAEIDQEVDASLACFRDAVKQLITIPGVSELSAHVIISEIGTDMSRFATDAHLRSWAGLCPRNDESAGKRRSRRLRHGSHWLKTMLVQCAWASTRSKGSYLQALFLRLRGRCGPKKAICAVAASILTAAYHMLKDGTFYQDLGADHFNRRRPDAQARRLLKRLAGLGFSVELKPLATAS

SEQ ID NO: 134225 - protein, 443 aa, unidentified
MARKKTQRHFQLIHPDCAGIDIGSREHWVGVDPRHGQAARGFSTFTDDLIKLADWLQELKIKVVAMEATGVYWIPLFELLDARGFEVYLVNSRATRQISGRKSDVLDCQWIWQLMSHGLLRGAFRPADGICSLRALVRQRATKVRDQAKALNRIQKALSQMNVQLANVISDISGVTGMKILRAILEGERNPARLARLRDGRIKADEDTIVRSLHGNWRMEHLHALEQEVECYDFLEKQIAACDVAISHSLALLPVLDEAPQANKKALRSPHRSAKEQAALHQALWRTMGVDLTAIPTIGVDTALVLASEIGPDFSKFPNMQHFCSWLGLAPPTRISGGRQLPGKGPRVINRAAQALKQAASNARNDQSFIGASHRARLARMDTSCAIKATAHQLARLIYAMLTKGQSYVERGIEEFEEQSKERQYRALLRKARRLGMELVKVA

SEQ ID NO: 134226 - protein, 460 aa, unidentified
MGILCRFYNEYSEVNFTKILYKDFEKPAKGIVLLILSFWRLMTTIKQKFAAYIGIDWADQKHDICLSTSIDGKAEYKKISSTPEALTEWLSQLRQRFPEGNIAVCLEQSRGALIYHLMIYDFLVLFPVNPMTLAKYRQAFNTSGAKDDRPDADLLRELVCVHRKHLRPWYPDDETSRSLALLAEARRKAVNDRTKHTNRLQAVLKNFFPQAIELTGTHLYDKVSLAFLEKWERLEDIQRAQDKTICKFYTSLGSRSTRRINERLQLIRSAVPLTKDNAIIKSSIITVRMLVRQLLSLQESISEYDLALAEMFDQHPDKDIFSSFPGAGDVLKPRLLAAFGTDRNRFEKAENIQEYSGIAPVTKRSGKTSIVHRRLACSKFLLQTFHEFASCSLKKSIWAKAFYDMQRNKGKGHHAAIRSLAFKWIRILHRCWRDRVCYDEIIYLKSLQRNQSPLLKYIAN

SEQ ID NO: 134227 - protein, 353 aa, unidentified
MKEVTTIGLDLAKTVFQVHGVDAAGAVVVRRAVRRRQVVEFFAKLPRCLVGIEACATAHYWGRELTRLGHEVRLIAPAYAKAYVRRNKNDAADAAAICEAVGRPSMRFVAIKSEAQQAAAGIHKSLPLARTGVREMLVKQRTMLINTLRGLMAEFGIIAADGPRHVGELIAVLTDPADARIPAPLHDGLMAIVESLRGLEPRIERIEKQIVGWGRSNPTCRHLITIPGYGPILSSAMAAMVVEPTAFTSARHFAASLGLVPRHDGTGGKLKLGRISKRGNGYLRRLLVNGAMSVLCGKRAKQDSWLVKLLASKPRKVAACALANKLARIGWALMLRQQDYRRPQQDQPCPDLA

SEQ ID NO: 134228 - protein, 459 aa, unidentified
MESFDFEPQTRPSYLSDTCKASQSAYGKFVPTRFKSSAHIRTASNMGQDLDKGGGLDIHKKSVKAAIVCSDESVLESEFGMTILQLCKLKAWLLDNGCKRVAVESTASYWYRVVQVLSDELLVIVVNPLLVKDRSGKKTDKIDARKLATKCLKNEVKPSREFTKEELELKRLTRAREQNVKIRSKLRNQIHSVLDAAGIGLSLFVSDIFGKSGMYLLRGLVDRKSLEELIPGIPTNRIRRRAQELPELIPVQLDDVQVLLIRRALSTMDNVQKSIDEIDAQLYKKADSRMDDLKILMSVPGVQFTAAITILAEIGNYRDFVDGDQLACWSGLTPFVYDSGGKHKQGTRITKHGSKHLRWILNQVANGASNTKNSRLRKVYSRLLHRKGKPKAITALARKILSIIHHLLIKREMWEEEGFRKRRSDLKLVRTSSSIQLTWLDLLFKSVVGIDKVKPGDAG

SEQ ID NO: 134229 - protein, 397 aa, unidentified
MSAVVGIDVGAYKHAAAVCRPGEREAERGVFRLSADRTGFDELDRWLKRQGPVERVVLESSGHYYWPLASHLYRRGYRVAVVNPLQAKYFAKSRLQRSKSDPADARTLAALGMSEEPRVKDPLLGAEAKEAARFWGGLVKEQAQIRNKLLRLVEIGFPELKECFEDPLCETALAVLREAPTARAASHKRVSTLAETSRPGGRRRLGAGKARRLHELAKQTIAPPELDAQMSFEVGMLIQQFDLLDKQIEIAEQRVAEVLDSELARRLQTIPGVGPALAATFIGEIGDIWRFEDFDQLASYAGVHPKELSSGTKGQNPETSWHMAKTGNAYLRSAAYKMAVVGTQHNTVIRAHYLRKRAQGKSAMNAIGHCMSKALAIVWGVWRSGLDFDPTLGGPRC

SEQ ID NO: 134230 - protein, 388 aa, unidentified
MRQFKGSAQAAVDYNSTIIGALELSEKKWVLAVQLPGVDRHSRHVLDACGDSLASFVERLKARCTSAGRKIARVILTHEAGRDGFWLARFLTRQGIEVHVMQPSSLPVDRRARRAKTDKIDVEMLLRTLMAWLRGEPRVCSMVPIPSEADEEARRANREREDLTKERRSIVNKIDGILATLGIKGYKALRRDRRGQLNCVRQPGGDPIPQMAKARIARLLDRLELVLKLIDHVESARDDVLKKGAPANESERMIRSLTALRSIGPDIATLLVREAFVRQFRNRRALAGYVGLGGTPFSSGGSEREQGIGKDGNRRVRAAMVELAWTWLRWQPDSALSVWFRARVGAMGGGRIRKIMIVALARKLLVALWRYLKDGVIPEGANVKVAVA

SEQ ID NO: 134231 - protein, 342 aa, unidentified
MTRAVTGGVDTHADVHVAAALDPIGGLLGVREFPATAAGYAGLLAWLGGFGTVCLVGIEGTGSYGAGLARHIAAAGVRVVEVDRSDRQDRRRQGKSDPLDAVSAARAAQSGRAAGAPKGRDGQVEAIRALMVAKRSARSERTQTINQARALIVTGPDDLRARFARHTPADLAAELASLRPRPGATVGYATRIALRELGRRARFLDGQLGRLDEFIVPLVTVRAPGLLALYGVGPDTAAMLLVAAGDHPGRLRSEAAWAHLCATAPLSASSGKVTRYRLNPGGDRQANHALYRIVITRLSSHPPTRAYASRRTKEGLSKKEIIRCLKRYVAREVYPHLRPPAG

SEQ ID NO: 134232 - protein, 429 aa, unidentified
MNGSSQVAAYVGLDWEEEAHSVCLLLADGGAAEEYELKNEPEAIAAWVADLRQRFGGQQVAVCLEQWRGALIYVLMQYEFLVLYPINPKQLSDYRTALYPSGAKNDPHDAELLARFLREQRDKLRAWHPEDAITRGLRLMSEQRRKWVQDRVAQTNALRQRLKDSYRLALDFCDGDLWSESFLGLLEKFPSQRELQRASPKQLEKWLPKKHRKADDPPAEELLRERIATVRKATPLTSDRAILEHARLAVVNLVVMIRVLNRAITETEAKIASLFAEHPDAPIFSSFPGAGEALAPRLAAAYGTDRDKYHGAEDLQRLSGIAPVTRASGKMRSVQMRWACPKFLRQTFHEFAQASVRYSHWAKAYVAMRKAKGHRHHEIIRGLAFKWQRILTRCWKNRQCYDELRYIERLRQTASKLIAFLPPQPDQTS

SEQ ID NO: 134233 - protein, 373 aa, unidentified
MKKRSKSQKSQKPTVKTKGMQERVTIGIDLGDKTSRYCMISHGGEILREGQVTTTKAEMVEAFGSLGRARIAIEVGTHSPWVSRLLGSLGHEIIVANPRQVKLITESSRKDDRLDAQTLARLARIDPQLLRPIRHRSETAQTALMVIRVRAALIAVRTSLVNTARGLAKAMGERLPKCDADQMGVLRAESVPPKLRQLLEPLLKEVESLTEKIKDSDREIEQIARKDYPETALLQQVGGVGPLIALTFVLTVDDKTRFQKSRDVGCYIGLRPRRSDSGQRQPQLRITKEGDPYLRTMLVQGAHYILSRRGPDTDLKRWGLRLAERGGKRAKKKAVVAVARKLSILLHRLWVTGEVYEPLRNQNLRDLQKKSAA

SEQ ID NO: 134234 - protein, 429 aa, unidentified
MNYNTQNAKIASITEKTLIIGIDVGSETHYARAFSWRNYEYSKKPFAFSNDEAGFAAFKEWMDDIAEKHEMEVIIPGMEPTGHYWLNLGAYLQEQGMKPVHVNPHHVKKSKELDDNNPSKNDRKDPKTIAGLVNEGRFSYPYIPTGIYAEIRNLSNLRIQTQEEITRIKNRMARWFSIYFPEIKDVYRNPDAVSGLMVIKQAPLPCDIRELGVEGVNKIWRDARLKGAGIKRATTLVTAAEHSIGNTEAPRSARKEIRNLLDDYEGYKKRMDELMEEIEETLSEIPYIDKLMKINGIGIKTVSCFIAEVGDIGRFDNPKQVQKLAGYAIVADSSGKHNGESRISHRGRKRLRYALYEAAISVIGKNKEFKEIHSYYRTREKNPLKKMQSVIAVACKLIRIFYTILTKGVDYDGQKMLNDIVRPEIQPAA

SEQ ID NO: 134235 - protein, 482 aa, unidentified
MSHNKKQGKTRLPRTQAQLGRRKKQKGMCLADRPCLEPNAAGIDIGAREIFVAVPPDRDECPVRVFDTFTEDLQAMAQWLKASGITTVAMESTGVYWIPLYDILEAHGIRPCLTNAHHMKNVPGRRTDWHECQWLQYLHSVGLLRAAFRPEAEVCAVRAVIRHRGELVQMAVQHVQHMQKALTQMNLQIQHVISDLTGTTGLAIVDAILAGERDPAVLAQRRDPRIQATAETIQKSLVGNWQPEHLFVLRQSRLLYKTYQQQIADCDQEIEKLVGAFAPRVDPAQKPLPADRKRNRNASKKRNKRGLPANGFDLRTEAYKLFGVDVTQVPGVETSVLPLFSEVGRDLASRWPTAPHFVSWLNLCPDNDISGGRVLWRGTRKGQNRAGQIFRMAAYSLHRSPTPLGNYLRRMKAKLGPKAATTATAHKIAVIFYTIVTKQVEYDESIWAARDAQRQKRLEHKIRRQARQLGYQLVPMQEKPAA

SEQ ID NO: 134236 - protein, 315 aa, unidentified
METTTPTPEATYVGLDIAKDRLDYTVDGTRCDHVPNTARGHERLLAALRPRRGVRVICEATGGYERAIVAVLLLAKLEVCVVNPGRVRAVAHAEGLLAKTDRLDAQLLRRFGQQVQPRLHAPMDPAAITLRELLDYRRQVSDQLVAVRNRLELAGPVLRVRLDAQVVFLAQELSETDRLIQAHIDHDETLRRKAARLRELQGAGPVLTATLLAYVPELGAIDSPQLSALVGVAPFARDSGRSQRARHVRGGRGVVRHVLYMAAVAATQHNPVLRAFYARLVAAGKPKLVALIAVMRKMLHVLNRLLADPHFVLVR

SEQ ID NO: 134237 - protein, 312 aa, unidentified
MTEHYYCGIDVAKDRLDVMVLPDRKSFSVDNNAAGYSELVKRLRGLAIAAIGIEPSGGYERAVIRALLAADLSVRRINPNKLRQFARARGVLAKNDRLDARLIAEYVAIMPTRVVQRDPATEQLAEVVTMRRQLCDEHVAVENQTAHLEDAILRRLNKRRLARLEADILLLDRRMAQIVASNANLTRRYELQTSMQGVGPTLAFTLIALLPELGQMSRKQIAALVGLAPYDFDSGRLKGHRCIYGGRLPVRNVLYMAALSACRYNPALKVFYRRLAATNKKPKVIIVAVMRKMITTLNAMLRDNVAWQPKSA

SEQ ID NO: 134238 - protein, 392 aa, unidentified
MQISVGIDIAKEIHWVTAIDAGGVVQVDRKLLNTPAGIATLVDELTALRGTVRIGLDVIGGIAGLAEAMLGDAGFALVHVPGIAVNRARQGTVGGENKSDPRDARTIAEQVRTRSDLRPIEPATELDLEIRLLVGRRSDIVQAQTQRLSRMRDLLVGIFPGLEACLDLKTKGPLHLLTKFVTPAELRDAGKKRLVRHLQAAGGVPKVEDLADRVLTVATEQRIAVTAERTTARLIRELAVEALASRTRLTELDRELEALLARHPDAALIRSLPGMGAVLTAELIAEAGNLARFRSADALASAAGMAPVLRQSGRSRFLRRPSGGNKGLKRVFYQSAFCSLAHDDSRAFYERKRREGKRHHQAVIALARRRVNVLWAVVHSRTPFQTAFKIAA

SEQ ID NO: 134239 - protein, 382 aa, unidentified
MQASTVGTPTAGHNGTIFVAIELSQKTWLVTLHSPDRDRMSRHKLEGGDHSGLLELIEKVRRRAAEKLGSVPRVVSCYEAGYDGFWLHRLLEAAGILNFVFDPASIAVEQRSRRTKTDRIDGELLLRTLMAYLRGEPRVVRIVRVPSLAQEDARRCSRERDRLVKEQTAHSNRIKALLRLAGMAVGSPRRGTWLHWLAQQRDWQGQPLSPHLLAEVTREHARLMLVRKQLAELEQAEAAQASAVPAAMAERRDLLQRLKALGPAFATTLTNELFYKDFRNRRQVGAYCGLAPSPWQSGGMDREQGISKAGNPRARLKAVELAWLWLRHQSDSELSRWFRTRTANAGKRARRIAIVALARKLIVALWRYLTTGLVPAGATMKA

SEQ ID NO: 134240 - protein, 379 aa, unidentified
MEVFIERCAGLDVHAETIVACVISGSREDDLLKVTETFPTLTKDLYRLLQWLEHHGVTHIAMESTGVYWKPVFNILEDYFDITLANAQRIKNVPGRKTDVSDAEWIAKLLRHGLIEKSFVPPVDIRELRDLTRLRKKWIGHLTSEKNRIQKVLVCSNVKLSSVISDVFGVSGRKLLKKLIEQGYVDESDVENSIHGKMAGKKQKITDSLFGTLNEHQIFLIRQSWQHIIYLESLISEIEERVDNLLKNYQEELSLLLTIPGIKKDTAAIIIAEIGVDMGQFPTSQHLASWAGVSPGNHESAGKRKSTRTTKGNPHIKSAMCEAAWAVSRCRNRWLAAKYWSIAARRGKKKALVAISHRMLRIIYSMLINKEPFKEKQIS

SEQ ID NO: 134241 - protein, 422 aa, unidentified
MNEQQANGYSVYVGIDWADSKHDVCIQSMFSDEREFAVIRHRAEAIDAWAKDLHQRHGGCFAVAVELTKGPIVSALQKYDFIDIFPVNPITLAKYREAFQPSRAKDDPTDAELAVDMLLRHPEHFKVLKPQSAEMRALATLVEQRRCLVNERIRITNRLRSALKQYYPQVLEWFDHIDTPLFCAFVKRWPTLMQAKRARSNTLKRFFHEHHLYRDGVVESRRQAINAASPLTSDEAVIVPYRMQALVLVEQLELMIEAINQFDDEIAKLASQHPDYALFQPLPGAGPSLTPRLMVAFGEQRERFSSAADIQKLSGIAPVTERSGQKHWVHWRLQCPTFMRQTFVEWAAQTINKSYWAGVYYRQQREKGATYQAAVRSLAFKWIRILYRCWQTGVAYDESRYLKALERRGSPLVRSQKIPESA

SEQ ID NO: 134242 - protein, 362 aa, unidentified
MAKVRSWAGLDVHAAKVVAVTVDGESGELRAHRLSGETGEVVAFCAALPGPVKAAYEAGPTGFGLARALEAAGVACVIAAPGKIERLAQDRVKTDRRDAERLVRPLMVGGLHAVRVPGTDEEALRDLVRAREDVRGDLMRARHRMGKLLLRHDVRYDGAGDNWTQRHRDWLGRVELAEPGAQVTLLDYLGAIDALVIRRDALERSIADLVPGSPWAQTVARLRCLRGIDTLSAVGLCAEIGDFDRFARAGQLSSYLGMVPSEDSSGQRRRLGSITKTGSRHARRLLVEAAWHYRRPPRRGKTLATRQAGQDAHVLAISWKAQQRLHHTWRRLDHQRGKRRTVVAVAVARELAGFCWAIARAD

SEQ ID NO: 134243 - protein, 375 aa, unidentified
MLRFRLMIKRGLNETATSIRKVKRNMKYYAGLDVSVKETSVCIVDESGNVCREKKVISHPDDLVAVLSDPAFNFERIGLEAGPLSQWLFEGLAKAGFAVLCIETRHTKAFLKAQQPNKSDRNDARGIAHMMRVGLFKDVHVKTLTSQKRRALLTARKLLQEKAIAMENDMRGLLRNFGLKVGTIRAFKFDQRIRELVEAAPDLTEIIEPLLAARQKLREEFAKLDRKVRGEARVDPVCRQLMTVPGVGPIVALAYTSTIDIPSRFRHSRAVGAVLGLTPVLNQSGESRRIGHVSLCGDAMLRGLLYEAAQVLLIRVKKWSWLKAWAMNVAKRHGAKKAIVALARRLAVVLHRMWVDGSEFRWTRETRPTTTGATA

SEQ ID NO: 134244 - protein, 401 aa, unidentified
MEGPIVSIDVSNGNSHYMCFIKNNKRFGKVKKIDHDIEGFKRLLEDIQKLEAETNEKVCAVFEATGVYTKPLERFLSKNSIKTYIINLLESARKRKEEIHNKKTDKLDPISISKVYYDKEEMVELKKKDETYNWLRKKNRLYEDQLNHLRKYKVTFQNQLSICFPGYLDLFKDGYSDIPMTILKKYPHPDLLKNKKAETVARYLEKNTCHTHKISLEYALKIIGFAKKTYPGCEKDDVEVEIFKILLDKVIETQRECEKTLNEMITVASTLEEYRYISSIDGIGPNLAARIIAEIGDIEEFKSREALVAYAGLDPHIYQSGDQDGKHLKISKKGNKYLRCLLFLAVGCSIRGAKDNPVNRFYQKKKQQSNPLNSKAAKTACTAKLLKIIYGICKNKTTYKR

SEQ ID NO: 134245 - protein, 410 aa, unidentified
MELLHRRCCGLDVHKNKVVACLRLVSDGKVTREVRTFQTTTADLLRLSEWLAVNGCTHVAMEATGVYWKPVWHILDDGEFELVLANAAHVKNVPGRKTDVNDAMWLAELLAHGLIRASFVPDAQTQEMRNLLRTRKQLVREQSSHVQRVQKTLEDANIKLDSVLTDVMGKSGRAMIEALIAGETNPAKLASLADRRVKASPEEFREALRGRVTKHHRFLLRLHLNQIDALDAAMATIDAQVETNLGPFRTAVELITSIPGIKNLSAHVIVSEIGIDMSRFPSAAHLISWACICPRNDESAGKRRSNRVRKGGNWLKTTLVQCALAAAKKKGSYLQAQFHRIKARRGPKKAIMAVVASILTAIYHMLKDGTMYHDLGCDHFKRQSVDQQKKRLVKRLSELGYAVELKPLAA

SEQ ID NO: 134246 - protein, 342 aa, unidentified
MTFVGCDLHTRMQQVAVLDTRTGEVSERQLAHDGSAIEEFYGALPGPVTVGIESTGYATWFHTLIQRLGHTLLVGDAAKIRAMVVRKTKTDRRDALHLLDLLRHDRFPTIWVPDPATRDLRALLAHRMRLVRIRTMVKNGLHAIALNYRLARGSKLLRQAGLAQLHALALPPHTAQRRDQSLELLAGLTTQIRELDEAITTAALAHPDGPRLITHPGVGALTALATLVVLGPVARFHDSKHVVSYVGLAPALNASADKHHLGHITKQGSPLLRFALGQAASHAARMDADLKRTYFTLVHRRGRPKAKVAVARKLLVRLFIMLRDQIDYDEFRRRGRTALASA

SEQ ID NO: 134247 - protein, 429 aa, unidentified
MSEEKPLELRVSVDVGYRRHSVAMGLSSGEVLEEFEIEHRPEGFQEFFSRIEKHHKKKNCSVAVAMEGYNGYARPLDSMVRQRGYRLYNLNNLKFARFKEIFPGAAKSDRIDARKGLELFQLSDHLPLAKEVLQEVSGTPPENEVLKRLTRRRRRLVNERVRVVNNLQADLQAVCPGLLEITGEASNQLFLNFLLSADTLPQLARLKRSTLLKIPAVGVKSAAIIEDWQKRAHFSQEVNWVGEMIQEDARRCVELDEKIKRLETKVAEVAKDSKIAKTLRSIPGFGAVCTSELAGEIGTIERFASEGSLSLYLGMSTLDNRSGKYQGTKTPKHVNTRAKAAMMIGVDRHRKYVPESQRYYEKKRSEGKKHNQAIRALGRHLSRIIYKMLTEERQYQIRPEKGNAKTKVSPRSLLKTQIRRPKILVKEKN

SEQ ID NO: 134248 - protein, 313 aa, unidentified
MTELCIDVGLDVSAARLDVHILPTGTAFSVGNDAAGWQSLVDRLAGLRVRAIGIEASGGCERGAIRFLLERGCSVRRLDPRRVRAFARAAGILAKNDRLDARIIALFVAGMPTREMRREPAAERLAELVTARRQLLDALVAAQNQTRLVEDALLKRLSGNRIARFKADLRLIDQRLAALVAADPSLAQRARLLRSVPGVGAVLTSTLLAFLPELGRLGRKQIAALVGVAPYDDDSAGRHGTRAIFGGRTIVRNATYMAALVGGRHNPILAAFRARLRAAGKAPKVALVALMRKLLTILNAMLRDDREWKHATA

SEQ ID NO: 134249 - protein, 416 aa, unidentified
MDVVVARIAGLDVHKDTVMACVRGPDDRGGRSQVIKEFRTFTEALVRLRDWLVAEGVTEVVMEATGVYWKAPWHVLEEVGSWELKLVNPYHVKNLPGRKTDVGDAAWLAQLGECGLLRASFVPPPVIAQLRDLTRYRKKLVEDRAKETQRIQKVLEDAGIKLDSVVTDVLGKASRRMLDALVAGERDPEVLAEMALTRMRPKIPELRQALLGRFNDHHAVMIRMHLAHVDHLSAGIDTLDAQVDTVIAPFVDEMRRLMTIPGVGKRTAEVVIAEIGVDMSRFPTAGHLASWAGLCPGNHESAGKHKSGRARKGNAALRSALCEAAWAGVRKNDSYLGAQFRRFQRRFGRRAEGKAIFACAHTLIVIIWHVLAEPDAEYEDLGADWFERRNDSAAHTRRLVHQLEKLGHHVTLEPAA

SEQ ID NO: 134250 - protein, 372 aa, unidentified
MEEVSKVHVGLDVHKDSITVGAAEAGRTPGRVIGKTTHDVNKLLKMVGKLGQPGQVHIVYEAGPTGYGLQRALQARGYVCEVIAPSQMPRRPGDRVKTDGRDCVQLAECSRAGQLRAVWVPDPADEAIRDLARAREDAVNSRTQARHQLKGFLLRHGVRYAGKSSWSKAYCRWLAALNFDPQAAQTAFTEYWLAVQAGDERVQRLTQALQASVSGWRFEPVVAALQALRGIDVISAIGLVAEIGDLSRFDHPRKLMGYLGLVPSEHSSGDRVSRGSITKTGNAHARRLLTEAAWNYRFKARIGRRAQQRQEALSEQVRAMGWKAQLRLTQRFTALQRRGVQTNKACVAVARELAGFVWAIGMAAASEQAAKH

SEQ ID NO: 134251 - protein, 404 aa, unidentified
MNNVAGVDVSKGKSMVTVLRPFGEVVAKPFSVGHTGSELKELADYLKSLDGETRVVMEHTGRYYEPVARFLHEEGIFVSAVNPKLIKDYGNNTLRKVKTDKADARKIARYGLDNWAELRQHTLMDTIRTQLKTLNRQQGLYTKTKTMMKNNLIALLDQTYPGVNDLFDSPVREDGSQKWVDFATAFWHVDCVRNMSFAAFTERYRKWCKRNGYNFSQSRAIKIHTEAQDLIAMLPKDALTKTMVRQAADALNAGSKSLERLKAEMRSLASQLPEYPVVMAMRGVGDSLGPQLMAEIGDVTRFAHRGSITAFAGVDPGSDQSGTHEAKSPRTSKSGPPELRKALFLVMDCLLKTMPADDPVYRFMDKKRSEGKPYLVYMTAGANKFLRIYYGRVKEYLASLENAD

SEQ ID NO: 134252 - protein, 449 aa, unidentified
MKEQQKAYATYLAFDWSDETHRFALRAADCDQPTEGDLKNRPEEMHDWFLELRKRFPEGKIAVILEQGRGSLLYFLRTLDYVVIFAVNPKAVARYREAFQVSGCKDDPTDTLLMLDLLYKHHQQLRPVEADEESVEALRMLVEARRGLVDERTKLVQKLNENLKAYYPQAIDWVGDLTSLQACDFLNRWPDLLILKRAKPHQIRTFYHQHRSRQKVEERIKQIVESRPLTTEKAIIISYGHVTKALANAIKQLTLSIKDIDKEIRQTYAQFPDRELYNSVPGAGEVLEPRLAAFIGTDRQRFNSAIEIQNASGISPVTKKSGATKVVLHRYACSKFDKQTFHEFAACSISWCDWAKAQYRYLTKERGKSHHAAVRALAYKWIRILFRCWKNHVLYDEEIYLKALRRRNSPVLKYITPNKMVFTNKVDAAPNKAHQPEVISEFLSSTKTF

SEQ ID NO: 134253 - protein, 358 aa, unidentified
MRIIGCDLHARQQTIAMLDSDTGELEEKTLEHQGETVREFYSALPGPILVGIEATGSMQWFLELMEELGIECRVGHPQKIRKAETRKQKHDRRDARLLLTLLTENRFPTIWMPSTEQRDLRTLLRHRHQWVRLRSRVQHTLQSMALNHGLRRGRSLWSQAGQHALRALPLAPHASERRKALMTLYPRLQESIEELDRQVSEQTQQRPDARRLMTHPGVGPITALATEVFLGDPLRFIDGKAVASYIGMIPSEHSSGDRQRLGAMSKQGNALLRYLWCEAAMHAVERDPELKRFYRRKLVQKGLGKARVAAARKLGIRLWIMMRDQIDYQEFCRRGKARQESGSVHAGMPDRDSGPAAQ

SEQ ID NO: 134254 - protein, 347 aa, unidentified
MAMTMVSVGSVTGGVDTHLDVHVAAALDHIGGLLGVEAFDTTGAGYEALLVWLLSFGPIERVGVEGTSSYGTGLARFLMDHDLEVIEVDRPNRQERSRRGKSDPIDAIEAARAALSGRATGLAKSKDGPVEAIRALLVARRSARNHRISSLVQMRHLVFTAPQPLRERFFGLSKTQLVKQAAAMRPRDTSDVVTYATKVALKTLAQRVQLLEVQIKEIRTMLAPLINAAAPDLLDVYGVGVDNAAILLVAAGDNAQRLKSEAAFAHLCGVAPLPASSGKVIRHRLNRGGNRQANHALYQIVISRLASDPETKRYVERRTKEGKSIGETVRMLKRYVAREVFKHLPAG

SEQ ID NO: 134255 - protein, 344 aa, unidentified
MANLNQFCDFTKLIGIDIAKSVFQIYSCNTQTGEITNVQIKRDKVLESLANCGKCLIGMEACGSSQYWARKLQALGHTVRLMDPKLVKPFVRHNKSDKADAEGVYHALVSGVRAVAVKTETERDIQTLLTMRALLVKQRTARINHVRGLLAEYGHVMPKSVDQFDKKVDACINSLEGDAVQLVIDMLRDTVKSIRDEHDRIKTLQREISRLANQTRNAKHFLTVPGIGETIMAYMCVLLADTTQFSSGRQFAAYLGLVPMHTGSGGKTVTTKIPGRCDKALRALLVQGAHAVARSKYRTDWVKNILAKEPKKVAMVAIANRMARQCWAVASKGQDWRRMPVTAA

SEQ ID NO: 134256 - protein, 487 aa, unidentified
MGRDRAGRCSLDPAHRGPRRSWREPAAGSIALNTGAVSPHAVGESCGLLGPRTADRMSSRRALSLGRGVSLHGSDSKSPWEERLSITCGIDWADNPHDVALVDADGRLIAKRRISDDVAGWQALLDLFTVHGDSAEDPIPVAIETNRGLLVACLRSTGRKVYAINPLAVARYRERHTVARSKSDHADAMTLANILRVDAAVHRSLPADSELVQAIAVLARAQQDAVWSRQQVANQLRSLLREFFPAALSLFHVKNIGLTSREARTVLLAAPTPEAAAKLSLRQLHCLLRRAGRQRNIESWATRLQTGFGQPQLRQLPQVEAAFGHQARALLTQLDAACRAADELAEAASHAFQQHPDAVIITSFPGLADMTGARVLAEIGDDRTRFRDAKSLKAYAGSAPITRASGRSLVVHHRKVKNQRLAAAGYIWAFASLRAQGPRNHYDRRRNRGDRHSSALRHTFNRMLGCLYHCLQNGTPYQDTAAFSASA

SEQ ID NO: 134257 - protein, 433 aa, unidentified
MKVKYEDRLKQKLIAITTDTLVVGVDIAKNYQWARFVDFRGIEHGRALKFKNSKGGFETILARIREICKKENFAKAVVGMEPTGHYWKAFANWLEKQEGITVVLVNPYATKQAKELDDNSQTKSDKKDALTIAKLVKDGRYFELYLPHDVYAQLRGLSTTRTGLNKRKNAIKNTITAVMDEYFPEYEEVFKCPLSGKASRHILKTCPFPKLILGLGEDGVTDEIKRAVKKTVGRKKAVQLVEAAKDSIGVDYGEEAARLKLRLMLEELELLEKQTEELERQMEDTLRQTDYADFLLSIKGIGIVTLATCLGELGDPTRFDDPRQMSRMAGYNLVEDSSGKNKSGTKISKRGRKNLRGVLYQMALTMVATNDEMKQLYHYLKTREKAPLRKMQALIVVSKKILTLIHTLAKKKESYDPEKVFGHVRREQLKAAA

SEQ ID NO: 134258 - protein, 315 aa, unidentified
MSTQGMVVGIDVSKDWLDAAMGRQSLRVSNDAEGIGELTARLCAAGVRLVVMEATGGYETQAATAVAGAGLKLAVVNPRQVRDFAKATGRLAKNDRIDAQVIAAFGEAVAPQIVSLPDEQMRELQGLIARRSQLVGMRVQESNRLALTEVALRKQIKAHIAWLDKAIDEVNIDLTARLRSSPAWREKDQLYRSMKGVGPITSGTLMAALPELGTLDRRSIAALVGVAPFNCDSGRFLGRRVIWGGRAPVRRVLYMAAITAIRTNPVIKDFYARLIARGKPHKVALVACMRKMITILNAMARTNTPWTPAFDPAGN

SEQ ID NO: 134259 - protein, 392 aa, unidentified
MYIVGIDIGKNHHEASIVSPKGKQIGRSLRFATTHKGADSLMSFIFKNIGNSPCVFGMEATGHYWYPIYSFLKAKGYTIYVINPIQSDSLRKMYIRQTKNDSIDSFLIAEVIRFGQFGTTSMADENILAMRQLCRYRDSVISSRTEIKLRIGTIMEQIFPEYEKQFSSLGVSTSMGILEKYLTPENIENAPIDELFEIIKDKSHNRLTRAKAISIKEAAADTFGIKIAQDAFSFQLKQLIDRMNFLDKQIEALDIEIMKYYEQFDCYLHTIPGIGIIGAATILAEIGDISRFKNSSALVAFAGIDPTVRQSGEFNSTHNHMSKRGSPYLRHAIFLAATTCSFHNSPLNAYYKKKRDQGKHHLTATGAVARKLTTIIYAVLRDSKPYEPKKFC

SEQ ID NO: 134260 - protein, 342 aa, unidentified
MLIIGCDYHPGMQQIAWWDNQSGESGEQRLEHSTGSAEKFYRELKQRGVQVRVGIEASGHTRWYERLLAELEMELWIGNPAKIAAQRVRKQKTDRGDAQLLLQLLREDRFPRVWVPSPENRDLRQLLWHRHRLVQMRTRIKNQLHAIALNEGVQRRSRLWSKSGRAQLESFALDRWTARRRHDLLELFDQLTPQIAELSQAVEREAERRPEVRRLMTHPGVGPITALAFVLVLGTPHRFRCGKQVGSYLGLIPCEDSSAGKQRLGHLSKQGNTLLRYLLVEAAQAAVRCEPQWRRRFVYLAMRRQRNLAIAAMARKLAVSLYWLWRKAEDPPAASQSGSHVG

SEQ ID NO: 134261 - protein, 336 aa, unidentified
MSYIGVDLHTTQITVCYLKAEADFEIRKYQLVEMEKFVNTLELSDEIAVEATGNTRWFAEQVAEKVRRVVLVNPRQFEVVKNSVKKTDKRDALNLARFLRADLLPEVRAKREEATTVQSLVNTRTKLVRLKTSLINKIHALYVANGRKLKKASLASDKGLEKVLLSEWSAIERIELEIIIEQIRSLKVSIKKLDKAIEAESEKLKGYESLVSMSGIGSLSAGILLSVIGNIKDFATADKLASYFGIVPRVSNSNETVNHGRITKRGNKTGRTTLVQCSLSAIKKSEYLKKYYDGVKARRGHGKAKIALARKYLGIIYNTLTNGWVFADFNNFELAE

SEQ ID NO: 134262 - protein, 409 aa, unidentified
MKLFAGLDVSSFDIKVCLLDGEGEKVKSFTVSNDLPGASELRDTVLECVNGQAVDTLRFGLESTSVYSFHPSMFLHHDEALKALGAEVFVMNPKQIANFKKSYSDMDKTDEIDAFVIADYLRFGRLPMSVVKESQYVALQQLTRSRYQLVHQVTKEKQHFLQHLSFKCNTFKEEVDSSVFGNAMMELFFEKFSLDELAQMPVEDLAAFLQEKGRNRFGNPECVAKSIQKAVRSSYRLDKVVEDSIDIILGTTIEVIRTLQKQVKEIDKAIERIMAGLTQTLVTIPGIGPVFTAGIIAEIGQIERFDDETKIAKYAGLYWRKHQSGRFTADDTSLSRNGNQYLRYYLVEAANSVRRHVPEYQAYYAKKYQEVPKHQHKRALVLTARKLVRLVDALLRNHQVYTPKRSVNI

SEQ ID NO: 134263 - protein, 402 aa, unidentified
MSSVFVGIDIGKKKHQSALMGEKGETLARTLSFTNSLAGFQSLLKQLDPWSKEDTLIGLEATGHYWLDLYTRLVDTGYSVVVINPLQTDGIRNMYVRKTKNDRCDAVIIADVLRFGRFRESSVPEEDIAQMKALSRLRTGMVQSMSNVKRQIVAILDRLFPEFEACFNDIFSRSSMAVLDEFADPEELARCPLEELAELLFEKSNGRLGAAKAEHLKETASRSFGTGYAKRSMKFELKLLLEQVRFTQEQILEIEVKLKELMKDHQLITTIPGISDILGSAILGEIGDISRFENPKQLVAFAGLDPSVHQSGNFNATSMHLSKRGSPHLRRALYIAAHVARIHDPVLKEHYEKLINRGKHHRQAQNAVAAKLARIVFSVLYSKEPYDIEKLRSKPKLEEMSA

SEQ ID NO: 134264 - protein, 337 aa, unidentified
MKYSGIDLHSNNSVVVVTDEQDRVLASKRLPNQLEAIIGLLSPHRGELAGVVVESTYNWYWLVDGLQGAGFVVHLANTAAMVRYDGLKHGDDESDAIQLARLLRLGILPVGHIMEKAARATRDLARKRMQLVQDRTRHVIAIENIMNRETGGRLSANAVKRLTAQAVDEMPFHEDVRLAIQANTAIVHSLNEEIERIETRLHLRLSPRPESALLKTAPGIGSILSGVILLETGPIQRFAEVGNYASYCRCVNSNRVSNGKKKGEGNTKNGNKYLAWAYVEAANFAVRFCPEAKRFYERKKAKTNRIVAIKALAHKLARACYHMLREGTAFDLKRCFA

SEQ ID NO: 134265 - protein, 324 aa, unidentified
MIDGILGIDVSKNTLDASLSSRNRVRARSVANSSDGWRDLLDWLTSEKIRRVHACMESTGRYSLGIACALYEAGHIVSIVNPAQIRDFARTKLGRNKTDGVDAAHIREYCELFKPKPWAPPSAAHRRLGELQTIRAGIVAGLTEWKNRKSSGMIDAVAQSLANVTISHFTSQLRAVDEAIAQTIDNDSGLRRKRDLLLSINGVGETLAGVVMAELPGPDELRSSAEVVAYAGLNPRQHQSGTSIDRATRISKIGNAVLRAALYLPAMSAMRYNPAVVALVARLKSRGRLKPKQIVVAAMRKLLVLCFGVLKTGKPFDPAIAMGC

SEQ ID NO: 134266 - protein, 388 aa, unidentified
MNHSIFVGIDVAKHYHDAHIFNQNTGEVIHPHFHFVNDSTGFEALLHLVSTFNKDEVLFGVESTGRYHIQLVKYLHHKGYSIGILNPLQTNRLREVELRQTKTDKIDARIIVQALLLNYHQEYTETNYDDLKYLSRARHSWVKERSKLKVDVINCLDTLFPEYAAYFKGAGVHSKTSYNILKKYPSAHYISQARIDGLSNKFVRVLKHATPEGLKELAQSSIGRHSKAIAYQLIATIDRIDFISKQICELDKQIDVHLQLLDSPILSIPGISNVLAAAILGEIGNIKRFSNASKIIAFAGLNPKVHQSGNFIAANMPISKRGSRLLRYALIKAASIIWLHDPTFKAYYLRKKATGKHHNVVLGHVAHKLVFVIYRLIDNGIMFEKGYN

SEQ ID NO: 134267 - protein, 403 aa, unidentified
MNAVGIDVSKGKSMVTILRPFGEIVSSPFEIKHTSSDIHSLIKLIHSIEGESRVVMEHTGRYYEALAHQLSAADLFVSAVNPKLVKDFNNDSLRKIKSDKADSVKIARYALDKWQSLEPYSITDELRAQLKVMNRQFHFYVKQKTAMKNNLIGLIDQTYPNANTYFNSPTRSDGSQKWVDFVSTYWHVDCIRKMSLNAFVEHYQNWCKRKKYAFNKSKAEEIYTKTKELVPVFPKNEITKHIIRQAVDQLNSTSVTVETIRTLMNETASKLPEYSIVMQFKGIGPSLGPQLMAEIGDATRFTHKGALTAFAGVDPGVNESGSYAQKSVPTSKRGSSNLRKTLFQVMDVLIKTMPQDDPVYQFMDRKRTQGKPYYVYMTAGANKFLRIYYGRVKEYLSVLPDPS

SEQ ID NO: 134268 - protein, 333 aa, unidentified
MQNFYFIGIDVSKKKLDICVMSNSKVLKEEQVSNHPQAIATVIAGIKEELSMSNDSLIICAEHTGQYTYPLICACKSVGSKLWLENASQIKYCSGVTRGKNDKVDARRIAVYAMRFFDKAKPYQRPTEELMRLKQLEAERSLYLTDLAKYKAQLSDQEGFMEDKIFKRKAKRLKEMIKSLEKTLKEIAQEMADVIYSSEELSRQMRLLKSVEGVGPVVAMNMIITTEAFTRFDNPRQFNCYVGVAPFAYTSGSSQHSRNRVSQRAVKYIKCLLHMAAVAIAHKKTGDLKTYFERKVAEGKNKMTVLNAVRAKLVARMFAVIRNNRVYQPILSV

SEQ ID NO: 134269 - protein, 346 aa, unidentified
MGTGKDIILVVDYHAENLEVRIFNCATGEERCANCKTSRANLLRLVEAAAAEAAEAGGRVRFIMESTTGWARVKELIGGRVDFVLANVLQMPLPPKAYRRKSDKIDTARMLREELNGSLPRSFQPDSWWRQVRRLVDLREDLVRRQTAVKNWISSFLHHETWADRDGLWTDKGVARVRALTLPSSDRFVLDIRLDRLAHLGQWISQVEAKMQELYDRWPEAKAADAIRGIGMVTAVSVLAHIGPIQRFRSAEEWISYAGLAPGHRSWDLTCRNGRIGGGGTDGHLRYLLIEAATWLQQIPRYRATHQRVAAKRGKDIARIVVARMCLRSLHKMLRSKVKFNQAPAA

SEQ ID NO: 134270 - protein, 355 aa, unidentified
MNGLRYIGLDVHQETISAAVLDREGKLIMQSVFATRAAAILDFLDGIKGTLHVTFEEGIHSAWLYDLLQRRVARVVVCDPRKNKLLKSGNKGDLIDARKLAELLRINSLSPVYHGEMSSLEVQHRTRSYTMLTGDTTRVMNRLKAVFRSQAIACPGRKLFRPDKRNSFVAQLATPGLRQRAESLYRELDALHPLRLRAKREMLAECRKHPAMKWLRSVPFLGKVRTAVLIGRVQTPHRFRTKRQFWSYCGLALQTHDSAEYRVVHGQLQRKSRPAQVRGLNWNHNHELKSLFKSAATMAAFRKGIFREFYSGLLAKGMRPEMARLTLARKIAAITLKIWKEGETFNAEHVKTQAA

SEQ ID NO: 134271 - protein, 430 aa, unidentified
MEVMHERVAGLDVHKETVVACVRVMVGGRRPKRECRTFATTTEGLLSLLAWLTANRCSHVAMEATGVYWTPVWKILSDGDFELIVANAAHIKQVPGRKTDMNDATWIADLLACGLIRASFVPEEEIQELRSLMRTRKQLVREQTRHVQRLQKTLEEANIKLDSVVSDIMGVSGRRMIEAMIGGERNPQRLAALADRGLKASPKQLYDALHGRLREHHRFLLKLHLTQWDALDATIRDIDRQVDGQIERMDETTEDQQPPFRQLILRLCSIPGVSHLSATSILAEIGRDMRRFATAGHLVAWAGLCPGQNQSAGKVKSARLRKGAPWLKTMLIQCAWAAKRRKDSYYMAQFQRLKARRGPQKAICAVALPSSPPSITCCEPMRRIATSVPTTSIGARQTPRRAVLSGNSPSSASPSIFSRSMPPHDPPTKP

SEQ ID NO: 134272 - protein, 457 aa, unidentified
MPKATTGDRPELKPVNVGAAAIDIGSKMHMAAVNPNCTDLPVRAFGTFTQDLHDLADWFKACGVTSVAMESTGVYWIPAYEILEQRGFEVILVNARYAKNVPGRKTDVSDAAWLRQLHSYGLLRGSFRPDAEIATLRAYLRQRERLVEYAAAHIQHMQKALMEMNLQLHHVVSDITGATGMRIIRAIVAGERSPDVLATYRDVRCHSSIETIRAALVGNDRDEHIFALTQSLELYDTYQAKMLDCDRKLESLIATLTEKGAKPVGKLSKPRVKTKQVNTPSFDVRAALYGVLGFDLTEIHGLGPSLALKLIGECGKDLKAWPTAKHFTSWLCLAPGNKISGGKVLSSRTRRSSSRAAALLRLAATTIGRSDTALGAFYRRLSSRAGKAKAVTATARKIAVLFYNTVRHGMTYRDPGADQYEEQYRSRVLANLKRRAKSLGFVLQAVPFSAEVAVLQR

SEQ ID NO: 134273 - protein, 302 aa, unidentified
MSKAFQIKERFCITNEVSALSTLILKLKKDYPHLTIGAESTGICHLPVLHACEELNLDCTILNPLLTKQILQSSIRKRKTDIDDSVRIAKLLMQNEGRVMTYQEATDKSKVLVRSALKLGEMNQALRLHIKHVEAILDQVPEPLLKEEASMKENLKTLKKEAIKSVPKESRKLLESIPGVGAWLASTMLAEIGDIKRFDSGDALIAYAGLDPQIKQSGANLNTHGKITKRGSKHLRRALTCAAGIAKMHDPELKKYYTDKRSEGRKYREVLCILGRKVGFRVFAVLKRCTPYEKRETKEEQK

SEQ ID NO: 134274 - protein, 367 aa, unidentified
MSDSTRYVGLDVHAKTIAIAVAEGGRDEAKFLSTTANDFTRLLKVLDRLGPREQLHCAYEAGPTGYGLQRELAKVGVRCDVIAPSKMPKASGDRVKTDRKDAMRLAHYLRSGDLVAIYVPDEACEAMRDLLRSREDAKRAQLRARHQLLKFLLRQGRRWPKSNWTIGHIEWIEQQSFEHPAQARVLQEYLHAVNECTARITRFDKLLAELVPETEQAELIGAPQAFRGIQLLTAASIALELGDVRRFRSPKKLMSYLGLTPSEDSSGERVRRGGITKAGNSGLRRLLVEASWAYRHAPREAYRLKKRAEGVAPGVRKIAFDAQVRLHGRYKHMLARGKSKQLTLTAVARELAGFIWAAAHEEILMAN

SEQ ID NO: 134275 - protein, 337 aa, unidentified
MQPTIIGLDIAKSVFQVHGVDAEGRTVIVRKLRRSQVEPFFAKLAPCTVALEACASAHHWARRIGGLGHDARLISPQHVKAYVRRNKTDAADAAGLCEAASRPHMRFVPVKPPERQAVLSMHKARALLVNQRVRLTNALRAHLAEYGLIAPQGRKGFAELRDRVEHGKLDMPAPLVRALKAQLQPLDALEIAVAAIEAEILTWHRQSQDSRRLAEVPGIGPLTASALTAALVDPAAFRCARDFAASLGLTPRIDATAGKARLGPISKRGDPYLRRLLVGGAHAVLHSDRAKADPWIARLLAEKPRAKVAAALANKIARTAWVILARGEPYRPGRLVA

SEQ ID NO: 134276 - protein, 355 aa, unidentified
MDNTKYIGMDVHQATISIAVLNSSGKLVMESVIETKAITIVQFVRGLRGDLHVTLEEGTWAAWLYDLLKPHVREVLVCDPRKNALLKTGNKSDRIDARKLAELLRGGQLSPVYHGEHGVRTLKELSRSYLAISGDLARVMTRLKAVYRSWAIACAGKQVYAPRYRAQWFGKISEAGVRRRAEFYYQQLDELSALRQQVRREMLAESAKHQASKLLCQIPSIGPIRAALLIAILQTPHRFRTKRQLWAYGGLAIETHSSADHRYVEGQLQPAKRQVSLRGLNRDHNHELKNIFKGAAIIAATKAGPFQEFYAALVAKGIRPEMARLTLARKIAAIALLVWKKGVSFDAQHLKSQTA

SEQ ID NO: 134277 - protein, 408 aa, unidentified
MDVVYSHVCGLDVHKKTVVACIITPDEKEIRTFSTMTDDLLQMVDWIKSKGCTHAAMESTGSYWKPVYNLLETEEIQTLVVNAQHIKHVPGRKTDVKDAEWIASLLRLGLLRGSFIPPRDQRELRELIRYRRSLIEERAREVNRIQKVLEGANIKLSSVASDILGKSARAMIEALIAGNVDPESLSELALRRLKNKKADLQRALKGLIGPHQRLMLQTQLRHVDELDALIQQLDEEIKRRMLPFEEDLERLDTIPGVARRTAEQIVAETGTDMSRFPSAAHLCSWAGVAPGNNESAGKRKSGRTTKGNPRLRSALIEAARAAVRTKHTYLSSLYHRIAARRGANRAAVAVAHRILTIVYHLLKENQVYNELGPHYYEERRREQMARQAIRKLEMLGYDVMVKEREQTA

SEQ ID NO: 134278 - protein, 415 aa, unidentified
MESVDRCIAGIDVHKKMLAVVIRKPAGQVVEYIKRKFGTTKNEIFHLVGWLQHHQVSEVVMESTANYWRPVWYGLEQHFKQLHLTHPLKTRAPRGRKRDYRDAQRLADRWHSGDLEESFVPGAEQRAWRWLTRSRVQLKRKLSVIRGQVEGILEEGGIKISAVITDIFGVSGWAMLEKLAQGEADIDELMGEARGRLKKKRAQLKEALVGWLQPVYRMLLTQHMEQVRLLWKQVEEINHWLSEAMKDHVPALVRLTKIPGVDLYAAQEQLAEIGVRALAFPSGDQFASWVGVCPGSQESAGINYSHRSAKGNRYLRRLLCQIAWAAVHTKNTFFGALFARFKPRLEAKRANWAVAHRISHVIWLVLHEEVEYQERGATPLDPKTLKKKLQRLLRTFAKQGLDAKSILEQEFAAVV

SEQ ID NO: 134279 - protein, 359 aa, unidentified
MMVLGIDPHKKSHTVVALEAATGEPVAELTVAADRRGHERLIAWARRLTPERRFAIEDCRHVSGHLERALIAAGERCVRVPPKLMAQTRRSARSRGKSDAIDAACVARAALREPGLPEARLAGPERALRLLVDHRSDLVGERTRIQNRLRWHLHDLGLGLEVPPKALGRACWLARLEEELAPLPGVQARIARELVARCRTLSAEISGLGREIAVLTEELAPELLALPGCGALSAASLVGETAGAERFASAARFAMHAGVAPLPVSSGQSNRHRLNRRGNRQLNAALHRIALTQLRMHEPAQAFVARKRAEGKSTREALRCLKRHLARIVWRELRNAEARRELLPVCGDPPARAALPLAS

SEQ ID NO: 134280 - protein, 409 aa, unidentified
MEKLIERCGGLDVHKATVAACVRIPGPKGKREQHVRIFGTTAAELLALRDWLLAYGVTHVAMESTGVYWKPVFYVLEEAFTCLVVNAAHIKQVPGRKTDVQDCAWIAQLLEHGLLRGSFVPPAPIRELRDLTRYRKVLVQERTRAANRLHKVLQDAGIKLASVATDILGVSGRAMLGALVEGTSDPEALADLARGSLRKKLPALREALVGRFRPHHAFLVAQLLAHVDYLEEAMATLSARIEQLMAPFAEEQARLETIHGIKRRTSEVVIAEIGVDMSVFPSARHLTSWAGICPGNNESAGKHKSGKTRKGNRWLRAALTEATLSGVQANNSAFGARYRRILRHRGHKKAVVAVAHAMLRTIYHVLANCRTYQNPGADYFDRRHAQRVTRRAIHTLERLGYRVTLEPAA

SEQ ID NO: 134281 - protein, 396 aa, unidentified
MSEFSGTGRGRELASAAALQGSLAKMDRYALYVGLDVHKATIAVAVSRPGRGEPEYRGEVAHTPKAVRKLVEQLSRETGGEQMLWCYEAGPCGYGLYRQLLSLGQDCEVVAPPSRERVKTDRRDALKLSRKLRAGELTRVWVPDVEQEAMRDFSRCRGDLKGQQQKARQQLNAFVLRHGHHWPRGKSRWTQAHWHWLEGLEFAHPWQHDVLREYLEAVRSASERLGALERQMLTEALPQWSLAPVVDSLIALRGVDRIAAVTLLAELGDISRFDSPRELMGYLGLVPCVHDSGQRRGRHGRITRAGNGHARRILVESAWSYRFPARQTAHLVRKARQASNEAKTIAWRAQRRLCGRYRALTAAGKNQKVVCVAVARELVGFIWDIVRHEIPKVSRA

SEQ ID NO: 134282 - protein, 449 aa, unidentified
MNNQTIQTNSSAADPTVQGAAPAPIVCWVGLDWADKKHCLVVRTAAGAAPKTHLVEHKPEALDAWLLQLRQEHPQGLIAMAIETSRGPILYALLKYDFLALYPVNPRCLADYRGAFHVSGAKDDPLDADLLCELVCLHADRLRPLTVEDRPTRELRLLVEARRGFVDDRTGFSNRLGAALKCYYPLAGDLVGEDLASPMALEFLRRWPNLTQLQAAKPGVLRAFFYKHNSRSEEKIAARLEAVRRAVPLTQDPALIKPLQLQMEGLVRQLRTLNQTVSQYDEEIKTVFARHGEAWLFDPLPGCGPVLAPRLAAAFGTIRANFESADDLLCFSGVAPVKQQSGSQRVVRFRYARPVFLHQSVVEFTKCSLAQCPWARLLYNHHLSKGKKKWVAIRAVAFKWLRILWRCWKEHQPYDETTYLRSLQRDGVQLYHSLYAGLSPIRTTEVNNS

SEQ ID NO: 134283 - protein, 356 aa, unidentified
MARRSVSSVQQFVKGFEAHPFFIGLDVHKRSYHVALRRMDGKTVTLVCPADPSGLVGVIQRLCIRVGSVVYEAGPTGFGLARTLRAAGIETLMAAPSRIPRAVTAGAKTDRLDCIRLADYGAKGLIRSIAIPSPEQEAKRTLQRRRHDLIDSRRRCKQRIKSLLLYLGLPEPKPSIRWRRGTAEALRALPMDPHARLTLESLLRELAFYDEELRKVDEQLHQRGRQQERLMSCLQSVPGVGDVVATTFMVELFDPERFQRAEEVASYLGLAPMVRHSGEKTPSGRLRPAGQTRLRSLLIEAAWMWRQYDPYARDLYHRFLGRMGIAQKAIAAVARKLAIILWRLYVEARPYRPAVI

SEQ ID NO: 134284 - protein, 349 aa, unidentified
MLHVGLDLSRRRVDVCLISSDGELIDHFPVPADRDGLYGLSRRIAVYDQRVRGVIESMNGARFVHDELVAQGWEVLVADAQRVKGLAPLACKTDKIDARVLATLSFHDLVPAIWLPTPELRKERERSRWRLHLVKHRSTLKNRVHSTLIAFGYQVPMADLFGHAGRLLLRELDIPHPWRGHVDASIGLIDELELRISGIEHELQRSGADHRYVPILMTAPGFGWITSFTVACELGDITRFSTPTKFVGYTGLCPRVSQSGDVNLRGPVSKRGPRYLRWGLMEAAIHAAPHPLYRERYQRLRRRHGRQRGAKVAQIDLSRQLATAIWYMLTRNQPFKPFAPAGATFRLAA

SEQ ID NO: 134285 - protein, 407 aa, unidentified
MIFAGVDWAEAHHDVCFQDEQGRRLAGGRLPEGVEGIARFHELAAAHAAEPGEVVIGIETDRGLFVSALVAAGYRVVAVNPMSASRYRDRHRSSGAKSDPGDAKVLADLVRTDRHNHRLVAGDSDLAQGIRALARAHQSMIWARRRQANQLRSALREFYPAALAAFDDLTGGDAVAVLKAAPQPSLGAALSRAQIAAALRRGGRTRRLAERTAAIQAALRSPQLQPAPALAAAMGAAVAATAAVIAEMNAQIAALEQQLAADFEQHPDALVVRSLPGLGTILGARVLGEFGDAPGRYATAKSRKNYASTSPITRASGTRRAVLARYARNKRLADAIYLWAFAALTASPGARAFYDHRRAAGDTHHQALRTLGNRLVGILHRCLASHTPYSEHTAWAHRANQEIGHAA

SEQ ID NO: 134286 - protein, 339 aa, unidentified
MQVTTIGLDLAKNVFQVHGITENDEVIFNRPLRRTQLLPFFSKPEPCLIGMEACSSAHHWARELMKFGHDVRLIPPMHVKPYVKRGKSDAIDAEAICEAVTRPTMRFVAVKTVEQQSLLSVHRARNLLVRQRTQLINGLRGMVAEFGVYIARGLARVIGFAEDILAGEVLDLPDIANEVIHNLCEQLMALHARVRWYEDRLKQIAKEDARVRLLRTIPGVGAVTASAIIASIGDGHQFRNGREFAAWLGLTPANNSSGGKEKLGRITKMGDQYIRSLLVVGMTSLVRQTRSHPERASTWLTSLLERKPARVATVAMANKTARIVWAVLTRNELYTPHTA

SEQ ID NO: 134287 - protein, 337 aa, unidentified
MTGISMLAIDLAKGSFQVCAIGPDGAVVYNRALSRSRLIALLADQPACVVAMEACATSHYWGRLAQTHGHEVRVVPAVYVKPFVKRQKNDRADAEAIAVAALRPSMRFVAVKSVETQGRAVAFRTHQFLVRQRTQLINALRGHLAEFGLVAPKGPASLKVLEEALEDEANDLPAIVQEMGTIYIDQIARITEVIARLAEELEATSKTDTDLRRLCTIPGTGPVTAGAVAAFAPDLDTFESGRNFAAWLGLVPRQRSTGGKSRLGSVSKMGQTDIRRLLIVGAMSVIRWVVRKGGSSNRWLANLVAHKPKMVAAVALANKLARMIWALSVKKEDYRMA

SEQ ID NO: 134288 - protein, 340 aa, unidentified
MDEYDGRQYVGIDLHRRRSVIVRMTPDGRRIGPTVRIDNDPSNLAEQVASWGESPEVVLEATYGWYWAAGVLVDAGATVHLAHPLGVKGFAYRRVKNDERDAADLADLLRMGRLPEAWIAPPQIRGLREAIRHRSKLVALRSGLKAQVHAVLAKQGVRVAVSDLFGVGGQKLLDDLQLDTPYNARVGSLRRLIDAFTFEIDILTKRTSAELKTHPGFQAVQAIRGVGPVLAAIFVAEIGDVTRFNRPEQLCSWAGMTPKHYESDTKVHRGRITKQGSTLVRWAAVEAVQTLREGPLGHARVRIGERRGANIGKVAAARKLLTLVFYGLRDGHIRCLTRAA

SEQ ID NO: 134289 - protein, 412 aa, unidentified
MTNGMRRWFAGVDWGSEKHQVCLLDEAGTVVGERVFQHDAAGLAALCDWLVSVAGDTSSVAVAIEVPHGPVVDVLLDRGFAVHAINPKQLDRLRDRFSPAGAKDDRRDARVAAAGLRTDPHLFRPLQVGDPAVIELREWSRLAEELQQERVRLANRIRQQLWRYYPQLLALSDDLTAEWILALWTMAPTPAKAMRLHEATIAKLLSRHRIRRLDAAGVAEMLRQPAITVAAGVTEAAILHLRSLVARLRLANTEFHQAERKLDELCAQLSQNATAAADGPCDAAILRSVPGVGTVILATLLTEAGDPLARRDHTALRTLSGVAPVTKRSGKTCIVVMRYAAQARLRQAVFHWARVAVMHDPTSRSRYEALRARGHSYGRALRSVADRLLGVTCVLLRRRTLFNPNHGTSAAA

SEQ ID NO: 134290 - protein, 355 aa, unidentified
MAIRKQSIGIDISRSTFTACLCQQAEDGKLTFSKVLDFGNDSKGFNQLLRWAKGLTVSDSELVFLMEATGVYYENLAHHLYKIKKKVHVVLPNTSKHYFSSLNVKTKTDAVDARILSQFGVERVHKLWSPPPVALLHLRNLTRYYVQLQEQKTALGNIKHSRDCAHDIQVFITKSNKKLINEIDREIERCLKEIKKAIEKENVLKEQVRKVLTIKGVGLITVATILAETMGFEQFHSSKQLVSYSGYDVVQRESGTSIKGRTRISKKGNRYIRNALYFPAMVACRYNEVLKETYIRINKNNKVSKMIGQVAIQRKLLVLIYTLCKNDTEFIENYQRGSLDPKTETTQDSSVAELL

SEQ ID NO: 134291 - protein, 430 aa, unidentified
MMEEVDDAELVVERIAALDLGKAGLEACVRVPSPHRPGRRMQELRGYGTTTAQLLEMVAWLRHWGVQRAVMESTSTYWKGVYYLLEAEGFECWLVNAREVKNVPGRAKTDRADAIWLAKVAERGMCRPSLVHPPEIRRLRDLTRYRRALVQDRTREQQRIEKLLEDAQIKISSVLSELHGVTARAMMDALIAGQRDPRALAQLAKGRARKKTAQLEEALRGFFTDHHAAILRMMLDNTDRISAQIAALDARIEKEIGPFSGQAARLAEIPGVDAVAAAELIAEIGVDMTRFPSDAHLVSWAKFCPQTHESAGKSKSKGRGRGNPWLAGTLGRIAFANSRADTFLGARYRRLARRRGKQKAIVATGNSVLTVVYYLLSDPMATFCDLGPGYYESRINVHRRARDLVTRLQALTGQHIVIRDGKAVITDAAA

SEQ ID NO: 134292 - protein, 421 aa, unidentified
MKQQTSEAFAAFIGLDWADAKHDVCLQAAGTAQREFLSIEHSPEEINAWVQTLRTRFNGQPVAVCLELTKGPIVSALRTYDFLVLFPVNPLTVAKYREAFTPSRAKDDPTDAELQVEILLKHRDKLTPLSPQSPTMRALAQLVEHRRRLVGDKVRLTNRLTSALKNYFPHVLQWFPEKDTAIFCDFLSRWPTLKAAQLARRTTLEGFFRAHHVRSADVMTTRIEAIKSARALTTDDGVIAPNVLLVHALVAQLRVTLQAIADFDKAIAQRAQDHPDFPLFDALPGAGAVFAPRLLVAFGEQRERFTSAAELQKYAGIAPVTERSGKKSWVHWRLQCPKFLRQTFIEWAAESTRHSFWAQVYYQQQREKGKAHQAAVRALAFKWIRILYRCWQERTPYDESIYLQALKRRNAPLLHNLAHLS

SEQ ID NO: 134293 - protein, 350 aa, unidentified
MKKFIIGIDFSKETVDASIVQKEQPETLIAYKKFRNNLKGVDGLIAWAKSKVAQDGEIIFCGENTGTYSTLFSDELTDRGFIIWIEHSMNIVRGMGDVRGKDDKTDSLRIASYAARFYDKMKPYVRPKDETRVLKTLLAKRDRLKSFLKAEITNTKENPLMLQDSNIASSINEFFKRLEESLRKELKELERMILDVVMSSSEYAKNFNILTSMKGIGLINAVALIVYTDNFTKFNFNHRKIATYWGGVPFKNESGTSVRRGTHVSPKCNSWLKALLTEATLCAIRYNSRIKAYHDRLMARGKAIGIVLNNCKNKMLKILVAMVRDSKIYSDMDVSKDPHTTTTTSSIVVC

SEQ ID NO: 134294 - protein, 408 aa, unidentified
MNLTLFVGIDVSKDSNHVYALNLNRDRLLSTHVPNTQDGAAIIESKLLELLDKHKLSKIIIILESTGVYSAHLATYLSNSKLLSLFNSKVYIINPKISKNYRKSFADMDKTDPKDAFILADIARVGRTSELTPFKGAQRLALERLTRHRLHIAELLSMEKVYALNNVFLKFSEFETLFSNNFGKTAVELLLEYKTIDDIINSSLEDLADFIAKSSKNRFDDSLDMASKIQAAARASYRLDKLAYDPINLSLASSVNLIKCYEAEMREIDSAIMRQVKGFNQDHYTVLTSIPGIGKVYAAGILAEIADINQFESDDSLAKYAGITWRKTQSGKFESDDTHLTKTGNKYLRYFIIQAANMARQFIPEYRDFYNKKFNEVTTHQHKRALALTSRKLIRLIYGLLSANRLFQ

SEQ ID NO: 134295 - protein, 343 aa, unidentified
MQTITTIGLDIAKSVFQVHGVDAGGRVIVRRQLKRRSVLAFFQKLPPCLVGIEACASSHHWSRELQALGHTVRLMPPAYVKPYVKRQKNDATDAEAICEAVTRANMRFVPTKTPEQQSGLVLHRTRHLFIRQQTAVINAIRAHLAEFGIVAPVGRHGVEELLNVVADPSDKRVPEMARACLLAFGAQLRRIKEQILEFDRLIRAWHRSNEMSMRLDEAPGVGPVLATAVVAAVADPKSFRSGRNFSAWIGLVPKQHSSGGKNRLGNISKQGDRYLRGLFVAGALAVIRYAKIHGTKHRPWLTALLARRPTKVAAIALANKIARMVWAMMARGERYKEPVALAR

SEQ ID NO: 134296 - protein, 309 aa, unidentified
MAIIDESGKRIFKEKLPNEIATITDRLSLYSGTLEGVVVESTYNWYWLVDGLMAEGFAVHLANPSAIQKYSGLKHADDKHDAFWLAEMLRLDILPTGYIYPKDERPLRDLLRKRSHLVSLRSSLLISLQNIISRNCGMKMKTNDIKRLREDRVHPLLADNEDLALAGQVSKDSIDFLSRQIRSIETFIEKKIELKDGYKNLVTICGIGKILGLIIMLESGPMERFEKVGNYASYCRVVSSQWTSNGKSKGKGNKKNGNKYLSWAFSEAAEFARRFDDRARTYYNRKLRKTNFMVAHAALIEQGVSGLHL

SEQ ID NO: 134297 - protein, 413 aa, unidentified
MATIGVGVDWGAQEHEVCAVDAQYKTIKRWRVKHDGESLAKLCTDLRALVGDAEVLVAIERPDGAIVETLMERGFAVHAINPMQLDRFRERYRPSGAKDDAVDAWVMARTVLSDTDCFRRVEIGDPRIAALREWSRMRSKWIGERTRLLNQLTDVLRRYYPQILELGGVQETWIHDLLRKAPAPAATRRLQARVVQTLLERHRVRKTTADEVVAVLRREALTLNAELVAVLSTHALQLVSQVAHNAAVVRQCDGEIDKLLNALTAIDVDDTPSDAAILSSIPGVGAVVLATMLSEAASVIASRDLPRMRAVTGCAPVSVLSGKRQNRYHARSAPNVQMRHACSERLRDAAYHMARIASVFSEPHKARYKAMRSRGHTHGRACRQLADQMLTTAFAMLRDRTLYDETKITQKAA

SEQ ID NO: 134298 - protein, 365 aa, unidentified
MRSNECKGLPRPDEDTEVSGLSCETDPSERGSPMTAVSTLGIDLAKNTFSVHGVDAQGVVTVRRTVSRAKLGELVARLPPCLIGMEACSGAHEWARRFSEAGHTAKLMAPKFVTPYRKSGKNDGNDAEAICEAVGRPNMRFVPIKSVQQQCDLSLHRVRLGFVEERTATLKRIRGLIAEFGYVVPLGTERLRREVRDLLERLPARAASCVRDLLEHAERLRSKALEYEREIRSSLQHNELALRAHTRPGIGPITASALVATVGNGHDFRNGRQFSAWLGLVPRQYSTGGKTRLGHITKRGDPYLRTLLVMGARSVLQRAYRETDPLSRWALALQQRRGYHRACVAIAAKNARVAWALLAKGAAAA

SEQ ID NO: 134299 - protein, 367 aa, unidentified
MQQITRGQAVRVGVDLAKRVIQVHAVDAAGHAVATRAVSRDKFIAWCAQLPVGCIVAMETSSSSHHWARKLIALGLDARIIAAQLVSPYRRQGASGKNDANDAAAVCEAASRPQMLFVPVKTIEQQSMLCVHRLREGLKAERTACINRIRGLLAEFGLVYAQGPAALQVVLADVLEDASNEMNTLARLVLQRAHSQWRELDEHLAWCDQRIAAHARDNPAVKKAAKLQGIGPIGASAAVATVGDFKQFRHGAQFGAWIGLVPRQDSSGGKTRLGGITKRGDVYLRSLLIQGAKSAVMTAHKRSDPISQWTAALKDRAGWQKAAVALANKNARILWAVMTKGEAFDARHVSVKPAAGGSTPTPPVTAA

SEQ ID NO: 134300 - protein, 392 aa, unidentified
MLFVGIDVSKSKHSCYIIDFEGTIYEDNLQISNNIKGFNTLSETINSICKTHGLSNVKIGLESTDHYSTNITNYLHFKGFEVILFNPMITNSKRKSNTLRKTKTDKTDAKVIAMMLLTDNSKSYSPISYQIIELKSLTRFRHRMVNQRSKLKQSFVRLVTIVFPELSDFVWSLHQKSIQKLLLELPTANNIANCHLTKLTNLLIKYSQGKYRKDKAIKLKQLAAKSIGSSNRATAFEIQTTINLIHVLDKEIKVIDQKIKTIVDEINTPLITIPGISYTLAAIIIAEIGDINRFANPSKLLAYSGLDPSVYQSGQYNATHTRMVKRGSKYLRWAILQAVKTVAMRDKTFKDYLNKKLKEGKHYFVALSHAGKKLIRVIFYLLKNNTTFVPQN

SEQ ID NO: 134301 - protein, 370 aa, unidentified
MSQSSTLFIGMDVHKETIAVAYIAQDHGAEVTYLGTIGTRQCDIDQLIRKMQSKAKHLIFIYEAGPCGYWLYRYLTKKGYDCWVVAPSLIPKKAGDRVKTDRRDAVQLARLARSGDLTAVDVPKVEDEAIRDLSRAREDTLSDLKDAKFRLKAFLLRHDIRYTGRANWSPAHLRWLSEVVCPTPAQQIVFQEYVRAVTEHTERLQRLEQELQEHVHAWRLHPVVEALQALRGVQFTVAVTMVAEIGDLTRFDTPRELMKFLGLIPSEYSSGERRQQGSITKAGNTHARRALVEGAWAYRYPAKVSRHLQLRLEKQPKMIQDISWKAQVRLCKRYRQLVARGKHANIVTVAIARELAGFMWAIAREVPVTP

SEQ ID NO: 134302 - protein, 424 aa, unidentified
MNFKMQDKQNQLIERISVKHLVVGVDIAQQLHVARAVNFRGIVVGDPLTFKNNEEGFASLLIWIKNLQRLNNLDAAIVGMEPTGHYWINLSKWLIKQKIEVVTVNPHLVKRNKENRDNTQSKSDKKDALVIADMVKNGYYSYVRNTSESFEKLRVLMSNRDVVVKRLVSSINQLNRWVDIVFPELRQVFKDIKAKGAIATLRLFPSPVELATLQPHEVITGWKSIMKRQPGLKKALLLLQVARKSVGTRQALDAYKFHLEQLLEEYDLAVTQLERVEKQVTDVLNKIPFAKKLLTIKGISEISLAGILGEAGDLSGFSHGNSLLRHAGLHLAEASSGKWKGQIVISKRGRSRLRRFLYLATMSLVMNNPESKDIHTYNVKVKKMKKMKSIMKLVGKLARIFVGIAKRNESYCPNKLQETIPLAA

SEQ ID NO: 134303 - protein, 427 aa, unidentified
MTDQLQHKAYDSWVAIDIAKDYNVVMVELTDGKTRRFRMANSGKDHDRLIEVIRELPQPCHIGFEATGNYHRPLAYRLLTEGFDVSLISSLASARYREAIFNSWDKNDPKDAGILLELLKRGIVQTYVEPMRSGYHDIQELSKTYSNITLARTRLQHSILTHYLPLYFPEMAKFWCSTRSAWWINYLLHFPTPASVTQHNEKAFCQIASPIIGRKMNKQAKLLELYEAAQHSIGLPIAPDSLACQTFQLQLKRYQELTNQRQQLEQQAEATLSTHPDYCLLKTVPGIGPIVAMTILAEGGDLRRFHHHRQFLKYCGLDLAKNQSGNFRGQDKLSKRGNARLRLALYMASLHAIRQTENSFRNKFHRYTQATPKDADCKRKAMTAVMAKMARVVHALIKSGTPYQGYFEVSPSGSIPLSRAVGATRTP

SEQ ID NO: 134304 - protein, 356 aa, unidentified
MKIIGVDLHTRQQSIAMLDDQTGELVEKELPHEGEQVREFYASLARPVLVGLEATGSMQWFLRLLEELQIEFRVGHPAKIRAAEPRRQKNDRRDARLLLTLLTENRFPAIWMPSREQRDLQILLRHRDQFVRIRTRVQLSLQALALSHGLRRGHTLWTREGQHTLRALPLAQHAGAQRDTLLALQPQLQSPIDDLDREVEKQARQRPQSQRLMTHPGVGPITALATEVFLGDPRRFADGKAVASYVGMIPREHSSGGRQRFGRLSKQGNSLLRFLWGEAAIHAVRRDSELLRFYRRKLVQKGMGKARVAAARKLGIRLWIMLRDEIDYVEFCHRSHQRQDSGAACAGMPGVGQWSN

SEQ ID NO: 134305 - protein, 344 aa, unidentified
MDAKRSLFYWVGLDVGKKEFSAAIELSTDERRFDIMALPCKKFNHTEKGVGEFLKWVGRTIHGLPFKIVMETTRHYSINLCKLLQARKKGLECCIANPYLTSNYLKSLNLPQKTDDIDARGIARFGMERRPEATTPPSREVEELRELSRHRDVLVKTKTAFGNRRESRSSESARSLNKAFIKTIEEHIARTEKLMKKLARQIPWVKEQMELMMSVPGVGEITAIGLSVEIGDFKQYTRKGISAASGLSPRLRESGTSVKSAKISKRSPGRIRQLLYLSSNNAINKIPYLSIMHDRLLAKGKTKLQVKCACMRTLIQIIRSVVVHERPYTEELAYQSLEKAVKWT

SEQ ID NO: 134306 - protein, 333 aa, unidentified
MMLIGIDPHKSTHTATAITPDTNHEAASIRIDATLREYRRMLTWARQWPQRRWAVENAEGLGRHLTSWLLARGEDVVDVPTTATARVRQLSRGGGRKNDRIDAGAAACVAALQGDARPLAAEGYVDAMAVLDERRVNLAQSRVRAVNQLHALLRALIAGGAPRDLSATTAAALLRTVRPNGVVEQARKAVAKDLVTEIRTLDTQLKANAQAIARLVAATGSTLTEVVGVGPIMAGRLISRTGRASRFLTASAFANYAGAAPVEIASAEKSRHRLSRHGDRQLNSALHTIAITQIRIPSSRGHRYYKSKIAEGKTPREAARCLKRASPTTSGGP

SEQ ID NO: 134307 - protein, 310 aa, unidentified
MTLPSTWIGIDVSKAWLDIAGPVQGRSERIANRPETLAAFADGLAGRGTAVVFEATGAYDRALRHALAAAGVGYARVNPQRARDFARATGQLAKTDAIDAAMLARMGQALHLSADQLPEQERERLALLGKRRDQLVAMRMQEKARRAETGDDALLAGLDDHLAWLDTAIADVEHAVRDLIGASPALAADEALIRSMPGIGPVAATTLIALMPELGRRSPKQIAMLAGLAPVNNDSGARRGQRRIRAGRRRVRQALYMAAVASLTTTSPMKAVYARLRNAGKPAKVAIIALARKMLVTLNAIVRTRKPFAP

SEQ ID NO: 134308 - protein, 342 aa, unidentified
MKTFVGLDVSQKKTSICVIDHNGNKIRMANVDTHPGVIANYLFSEGFDNSKVGLETGPLCVWLYHSLKSFGLDIDCIHARHVHAALSMQLNKTDQNDAFGIARLVLSGWYKPVHVKSLECHQQRLILTSREKLVQLRVAVTNQIRGLLKTFGVVLPPGKNSVFERSVLESSPSLETVKPAVIMLLNTWEHLSDQIKKFNSMLEKLARKDPVCQILRSIPGVGVLTALRFKTSIDDPSRFRRVSDVGAFLGLTPKKYQSGEVDRNGGISKQGNRMTRTLLYEAASCLLTRYGTDTSLAIWANGLRHRMGYKKVIVALARKLTTLMLSMWKSETTYNERLNAIN

SEQ ID NO: 134309 - protein, 442 aa, unidentified
MRFIGLDVHKDFCVVAISDGGKARTAGRVKTRRDELELFAQSLAPDDKVVLEATGNAFAIARVLEPHVAEVVVANPRRVRAISHAKVKSDQFDARTLAELLAADLLDRVWIPDEQTRTLRRLSKRRLAIVVAIGRRKAHVFATLQRNLYLEPNGIDLFGKRGRAWIASLALPSDERQTIAGDLRQFDFLAAELKLVDREIAQISLTRADIKRLMTIPGVDMITAATMVATIGDVSRFPTSRHLIGYLGLDARVRQSGLAAARTGRISKEGSAEARRVLVEAAWSAKRVPGPLRAFGQRIQARRGSQIATVAVARKIAVLCWHLLTRGEDYAHHRPTLHRRKLRKLELRAGAPSQQGSTTPTRSGKPAAKTSASAISSPRPRPATRGWSRTGRHPGPSTARAPHRGAHSMQRDRTKPQILLFSSRSPAPEHTLAKEPIRIHTT

SEQ ID NO: 134310 - protein, 405 aa, unidentified
MDIIVERGAGLDVHKKIVVACVMGTGIKKEIRTYSTMTNDLFRLKAWLKERCITQVAMESTGVYWKPVFNILEDAFEVTLVNARHVKNVPGRKTDVLDSEWLCKLLRSGLVRGSFIPPKEVRELRDLTRYKRKLIQTITSEKQRVEKILEDANIKLSSIASDTFGTSGVRIMQELLKGELEPEAMAELSKGRLRNRKEELKEALVGHVEEHHKRMIRTSLGHITAMQEILAAVEQKIQEQIELHFKEAYELLKTIPPVKDNASVLIAEMGVNMDLFPTEAHLSSWAGMSPGNHESAGKKKSGKTTHGNNYLKSILTEFAWIASKMKGTYLCAKYQSLVGRKGKKKTLVAVGHKILISCYYILKYRVPYKELGANYLDERKKDRIARSYVKRLTTLGYAVTLKEVA

SEQ ID NO: 134311 - protein, 402 aa, unidentified
MNCVGIDVSKGKSMIAVMRPFGEVVVSPFEVLHTDSELSKLAGLLKSLDGETRVVMESTGNYHAPVAWLLHDAGLYVSVINAMLVHDYGNNSLRRAKTDKKDAVKLANYGLDHWLTLPRYVPDEDTRLMLKTCYRQYQQYSKVQTMLKNNLISLLDTAFPDANRLFTSPPRADGSEKWVDFVATFWHCECVCGLSKKAFTAKYQKWCRKHGYNFSEDKALDIYASACGHFGVMPKTDTAKLLVEQAISQLRATSATLAALKQEMQSLAASLPEYPVVMGMFGVGPVLGPQLMAEIGDVRRFHSKKALVAFAGIDAPPYQSGQMDIRSRSISKRGSSSLRRTLFLVMSVILQRAPMNEPIYQFMNKKRSEGKPYRVYMMASANKFLRIYYASVKAYLDSLGHD

SEQ ID NO: 134312 - protein, 331 aa, unidentified
MNKIILGIDISKGKFDVTLLINNKLQTRKFDNGLKGFCALSQWLKMKDVYTAHVCMEATGGHEELLANYLYKNNFKVSVVNPARIKGFAMSRLSRVKTDKADCKLIAHFCQAMNPELWQPTPKHIQELQQLVRRLDILIANKNQETNRLEGLSDIVAANVQSHIKFLAQQIKEIEQLISNHIKKHKDLSDKGLLLASIPGIGEKTVAVVLAFLSNVESFTSAKQVVAFVGLNPKPRQSGSSINGVGRISKTGDADLRKAFYWPALTAIKFNPIIKVFSERLGREGKVKMVVIIAAMRKLLHIIYGVLKTKTYFNPDIEIITSKNEKLLKNS

SEQ ID NO: 134313 - protein, 369 aa, unidentified
MSEISIVAVDLAKSVFQLEGQTPRGEVVLGQRLSRDKLLPALARLPPTVVALEACATAHHWGRAIQGLGHEVRLLPPAYVKPFVQRNKTDARDAHAIAEAAQRPGMPRVPLKSLEQQSARSLHTVRDLLIGQRTQLINALRGHLAEVGIVAARGEAGARALIGLVEAGHAEIPPGLQPVLGLLVAQWQGLAHAIAELDRRIRAEARADAAARRLTTIPFVGPVIAHATRAAIGEGRQFGSGRDFAAWLGLTPRTAASGQTRRVGRITKAGDRRLRRLFVLGATAALARAKRARPGQAVDPWLAALLGRRPARVAAVAFAAKLARIVWAVLVSGQAYDATRSAKGAGTGNGAGAGQRTRLPAGRSEPAAA

SEQ ID NO: 134314 - protein, 350 aa, unidentified
MASTKISYFGKKVYIGTDVHKATYSVTCICEGVVAKKVASVPANPAEFAQSLLHWFKGAEIYSAYEAGFSGFNLHRELEKAGIKNIVVNAASIAVAANDKVKTDLRDSKKIAEQLSASRLKAIYVPSKDEEARRTLSRTRDQVVEARATASRQIKSKLHYHGLMAKDDTRAISNRYLKGIEKLELPDEVHYSFKIFIEQWRFLTSQLLGLRKALQKQADSDEKLESVYRSVPGIGLVTSRTLANELGDLSRFKNEKALYSYTGLTPSEYSSGEKIRRGHISRQGSARIRGLLVEAAWRAIGKDVALNEAFERIAKTSGKKRAIVAIARKLIGRIRACFRTGKTYAVGTYA

SEQ ID NO: 134315 - protein, 396 aa, unidentified
MKDLRFGLWVLWKSQSDFQDGMKRLATFWCGEMLPTLDALEAQVFQRRPAVDHCGIDLGMRESQVAILTEGGEIIDGRVRTDRQHLQEFFRPHPPMKVLLEAGTESEWVARCLEEMDHEVTVADPNFAPMYAQRSRKVKTDRRDAQALAVACRLGAFRPAHRASDERRHVRALLAARDALVRSRVKMAVLIRSLVRREGIRIAGGNTESLPKRMTDVVLPSHMQSEIAPLLAMIEPLNVQIATLEKEINRFVQNDGGARLLTSCPQVGPITAASFVASIDYPGRFRNAHQVEAYLGLVPREWSSSEIQRKGPITKAGNSRTRWLLVEVACGVLRYRSPETVALRNWADRIAQRRGKRIARVALARRLAGILWAMWRANAPYDPAKVGEVKRTQKVA

SEQ ID NO: 134316 - protein, 346 aa, unidentified
MNYCGIDLAGVSSYVYVTDSEGRKLAAGFVATEKAAFEGRLKRFVRGGLSIAIEAGNQTAWVYEALVAIGAKVTVVNPTKVKLIAESRRKTDKIDAKILCELLRVNALPTPVHMPGRDTRSLRGLLVARRQLVGARTKVCNVVRGMLRQEGIRLPAGALSSFAGWRRLLAQGYEQWHLSRILATFFDSFVSLTDAIRDLERDLRECERKDSRAARLQTMPKVGQIAALTFIAAVDDVHRFPSSRKLIGYSGLAPTVRSSGERTQYGSISREGRSDLRAVFVQIAHLVARDTSRDTQRLRTWFNKVARKRGKKTAVVALARRLLVIAYRLLKDGTDYDPVRLRRQAA

SEQ ID NO: 134317 - protein, 401 aa, unidentified
MGASDSLTQEVYMSGQTNFTAKVEPEDFKNTLFLAKELSRSAWLVATFAPRLGDKISVHAIPGGDTKRLLELIGRLQVKLRGKDVSRVRTVCCYEAGYDGFWLHGVLVNHGIENHVLDAASLPIDRRAKHIKTDNIDAKRPLRAIVGFVQGDPQSCRVVRAPTPEEEDARRLHRERQRLVRERTGHLNRIKALLITHGIRTLRITDAKWCERLDKMRTGDGRPIPARLRIEIEREWKRLKMVAEQVREVEAERDRLVKGRNPSGDACTEKMRQLVKLHGIGAEFATVLTREVFYRPFQNRRQVASYVGLTPAPYDSGDTKHDQGINKAGNTRARVIAVQMAWLWLRYQSKSELSLWYYRRVGDLKGRVRRIMIIALARKLVIALWRYVETGKVPTGAVITT

SEQ ID NO: 134318 - protein, 482 aa, unidentified
MKPKQQEKTKNATCRLTQDTWQQMNRKQRREMTRKIQSEDISLEVIHPNAAGIDIGNESHYVAVPPTRASDPVHRFGCTTAELKEMAVWLKQCAIRTVAMQSTGVYWIAVYDILEQAGLEVYLVNARDTKNLPGRKSDVQESQWLMKLHTYGLLRNSFRPSQEIRTMRTYWRQRNDLVQSAGRHIQRMQKVLTQMNIQLANVLSDISGVTGQAIIKAILGGQRDPHKLAEFRNPRVKASEEEIARSLEGNWQEDLLFVLQQEQDGYEFCQKQMAECDQRLEQYLQQREDRSGGAKLPEEKRKERLKKKKGNKPRFDLRTGLFCMTGTDLTRIDSIDVMTAMTIFSEAGWDMSKWETEDHFVSWLRLCPDNRISGDRIIGKGRLPTNNRVSTALKMAASALRTSKTYLGAQFRRLRSRLDTPVAIKAMAAKLARLVYRILRYGMNYVDRGAAFYEAQHRQQQIKHLKSKAAKLGFQIIQVPAA

SEQ ID NO: 134319 - protein, 386 aa, unidentified
MIYVGIDVASTKHDCFIVNSEGEVIEEVFTIANNKAGFEKLLSKIPKVNKSKIKIGLESTGHYSNNIRNYLYEKGFNLVVLNPLSTNLYRKAQTLRKTKTDKIDAKMIAKILHTEDHKPYTPISYHINEIKSLTRIRTRWVKICSSHKISITRILSCTFPELKQNFPSIHQKSMYEALKEYPSAESLKNAHLTKLTNILTKNSNGKYTKDTAIKIKKLAQNSIGVVCKSHEMDLVYSIEEVQACQKRIKNIEQEIKGMMTGLDSPILSIPGISIVYGSIILSEIGSIHNFSSPSKLLAYAGLDPSTKQSGKFKGNGKMVKRGSTYLRAALISAARSVAMYDSVFKDYLNKKLNEGKHYFVALSHVARKLIRVIYHLLRNNVIFKAS

SEQ ID NO: 134320 - protein, 344 aa, unidentified
MTRISLVGIDLGKRTFHIHAQDRHGNEVLRRQLNRMQLVRWLANLPPCTVAFESCCGAHWLGWKLREFGHTPRMMDPRRVRPFVTGNKHDFADAQAICEAARRPMTRSIEPKTPEELALASLHRIRDARVAERTACINQTHAFLLEFGMGMAGSKAMMGALPGIVEDAGNLLPSTSRQMLITLYEHYRYLCDRIKEADILIQARLKDDDLAVRLQEVPGIGPITASAICAEATQARQCASSRDFAASIGLTPRQHSTGGRSSMLGITKRGDGNLRRLLVQCARVLLMRKEQHQDAMIQWARRLSSRRHTNVVACALAAKLARILWAILVRGQRYQPHPVAATVG

SEQ ID NO: 134321 - protein, 342 aa, unidentified
MGEYDGRQFGGIDLHRRRSVIVRQSESGEQLSAVRIINDPVALGLEIERAGPNPEVVLEATYGWYWAVDTLQAAGARVHLAHPLGVKGFRYRRVKNDVRDAADLADLLRMNRLPEAWIAPPATRELRELVRYRAKIVAVRSGLKAQVHAVLAKAGVLIPVSDLFGVGGRQRLAKVPLGAAYVQRVISLLELIDALDAHETRFSIMVADKLGGHAGYQAIQQLPGVGPILGAVFVAEIGDVHRFADPAHLCSWAGLTPRHHESDTVVRRGHITKQGSKLVRWAAVEAIQRHPATSKIALDRTRIQSRRGTNIATIAAARKLLTLVYYGLRDGYLRALAPRRAA

SEQ ID NO: 134322 - protein, 346 aa, unidentified
MGMQMSKELYIGVDVSKNWLDLACYDGISVDWKQGHIRVDNKPSGYHQITRWLKKQGTDKDHVLFCMEHTGLYGQDFRVWLEKEGLVYGMVNPRKMHRFEPDLGENDRALDRIKTDEMDSFRIAMYCEKHSRKIKASPSRLPGEAYFKLKRLMAERRQYTKQSVIYKQQLHDISAHDTEESRKRKQSGLDLLKSQIRQTDADILRIIDKDPCLKRNYDLLYSVKGVGLVVAVDTIVLTENFTLITNPRKYACYIGIAPAKKESGISIRGGNHVSRKGFTLAKADLTIVCLSAIKNDPNIKSYWQRKKAEGKHGGVVLNAIKFKIVLRMFAVIKRQTPFVEMDAYKR

SEQ ID NO: 134323 - protein, 337 aa, unidentified
MDRRYVGIDLHRRRSVIFAMGAHGEKLFCERIDNDALRLLEVVSAAGEGAEVVIEATYGWYWAVDLLRDAGFSVHLAHPSGNDWGKRRVKNDERDARDLADLLRLGRLAEAWIAPPAVREARELVRYRARLVQLRSGLKAQVHAVMAKEGVLPCTTDMFGPKGRSLLDAMELGDAYQVRVESLRDLIDGYDREVVMLERKIHELLHGDRGYQAIQALDGVGRTIAAIFVTEIGDITRFRSPEALCSWAGLTPRHRESDTKVVRGKITKQGSKLVRWAALEAIVRYHGGPRLRDGFHRIAERRGTNKARIATARRLMTLVYYGLRDGEIRCLQQRAVA

SEQ ID NO: 134324 - protein, 310 aa, unidentified
MNTMTPVPLVVHTGLDIAKASLQLDLQGRAHALPNTPAGHAQLLTLLRAVPGAHLVCEATGGYERAVVAALQAAAVPVSVLNPAQVRHFALAQGQRAKNDPLDAGVLTAYGQALKPAATPLPDDALAELRALVQWRNQLIEQRNALRNHAEHAELAYVTKDQAKFAAQLDKRIAAAQAEMSAALLRAPQWQPAVAKLEALDGVGQLTAVSVLSQMPELGQLNRGEAAALAGLAPWTRQSGPWEGQRHIGGGRAAVRRALYMSAVGLARMKTTTLGKFYAHLRLAGKPAKVALTAVMRKLLLQMNQELKPA

SEQ ID NO: 134325 - protein, 375 aa, unidentified
MEVVRPAYPTVVGGPVFTERTSVGLDVHARSVAAAAIDGVTGELIQAKLPPGNDRIVEWVRGLPGPVAVAYEAGPTGFGLHRSLMSAGVRCVVAAPSKLQRPSGDRVKTDAKDAVHLARLLRLDEITAVSVPSADQEAARDLVRAREDCRGDLMRARHRLSKLLLRHGIVYDDGAAWTAKHDRWLLQQHLVGAASRAAFDAEYETVLQIKARRDRLDRAIEQLAADSEFTPVVRRLGCLRGVSTLTAFALAVEIGDWDRFTGNSIGSFVGLVPSEFSSGQSRVQGPITKTGNGHARRLLVESAWHHRPRYHVGAVMHGRWEQASAAARARGDLGNRRLHDRWVRFIERRKRPTIANVAVARELAGWCWSLAVMND

SEQ ID NO: 134326 - protein, 329 aa, unidentified
MINDSDLIFVGIDVSKDTLELAWDVKGETQPVSNDKAGIQSLLAILKAAQAGSRVIGAVVLEATGGFEREAAIALASAGLPVMVVNPRQARDFAKAMGYLAKTDAVDARVLSHFARTLYQSEKREQLLMRLPEASQTELQALVLRRTQLIQMRVAEENRLALSHPSQRKSIKAVCKMLNKQIASIDREIDTRLKGHFSAQLALLDNFKGIGTGTKAMLMAALPELGALSHPQISKLVGVAPLNCDSGKHTGKRFTWGGRTEVRCALYMAALSAVRYNPVIKLFYDRLLSKGKPKKVALVACMHKILRILNAIMKSAKPWNEHHSVAKTA

SEQ ID NO: 134327 - protein, 458 aa, unidentified
MTFDGNRIDSTTYSSVASLPAPHPHAAGIDIGARQILVSVPPASAPDPVRTFATFTEDLHALRDWLKECAITTVAMESTGVYWIPLFQILEAAGLEVCLVNARHAKNLPGRKTDVQDCQWLQYLHSVGLLRASFRPVDQVCAVRSILRHRDGLVRGAARCVSHLHKALTQMNVQLQHVISDLTGVTGLAILQAILDGERDPQKLAALKDRRIKATHDTLAKSLCGDWREEHLFTLRQSHELWLEHRRLIGQCDQEIARLLARFDTQAPAPLSTPNKSSHRRPQRNEPSFLAREESYRVLGVDLTAVPGFQTPTALLLLCELGPGFAEKFTTAKHFGSWLGLCPDNRITGGKVYSVRTRDVKSRVAEALRLAAQSLWQAKNYFGDLYRRWKARLGAPKAITAMAHKLARILWHLLKYKEPFNPEVFAREEEKMKRKRLARLNNSAAALGYSITPIPSYQ

SEQ ID NO: 134328 - protein, 401 aa, unidentified
MATMRDNATRVKRFRELKSTLRTNRKRLLVGLDIAQAEHVVHLRHAHTRVVVPQFAIPNSTRGFAQLWARIQQAQRATGCREVVCGLEPTGTYHEAVARFLETQGADVLLLSSSVAYWNRRTQDGTWDKNDRKDAANCADLLEQGKVLCSSRPEGPLAELRRLVKCLRRARGELAACKARWRTTLRPALGPMGEPLPNRLRAELPALLQAWEPAAPGRPAVAKGRLPLGLATACADLGAQVAAVQARITAIEGALTPLAERLPAYALLRTIPGVGPTVGAILLAEIGDIAWFTQCSQLRKLAGLDIIRVQTGNFAGQWRISKCGRGLLRWALYHAAMGLARTRGGRARLAALKAKRHGDRYAGFKAIVELAAKVLRIVWGVWRSGIPYDPLRTGGLRRQPR

SEQ ID NO: 134329 - protein, 453 aa, unidentified
MSKRGWRQGKKGTSELRRINPRAAGIDIGSASHWVAIDPSLTDQPVREFKAYTGDLHALADWLVEHKIQTVAMESTGVYWIPLFEVLRERGLEVCLVDARATKQVAGRKSDVSDCQWIQELHSYGLLKQAFVPEAQIATLRSYVRQRDRWVTEAGRSIQHMQQALELMNVKLTEVVSDITGTTGMAIIDSILAGERDAGRLSELRDSRCSHSQEEIARALLGSWREEHLFALGQARRYYTYLGEQIAACDTQIAAAMAACASPGGPSSEPPKAGKRDASPHPFGFDAHGHCYQMAGVDLTAIDGVGVNTVLKVLAETGIDMSPWRSERAFGSWLGIAPNPRKSGGRVLRSTTNPNSQRAAMAFRLAARSLSNSKSALGAFYRRLRARIGAPKAITATAYKIAKLFYLMLKNKRPYQDVGQAVYDERFRARRVRSLNRMAAELGFELVATGSAA

SEQ ID NO: 134330 - protein, 460 aa, unidentified
MTSRKKKQREFSGDETLCPIRQNTAGIDVGATEHWVSVPPDRDGEAVRCFKAFTGDLHALADWLEVCCIDHVAMESTGVYWIPLFEILEERGFEVALVNAKHLKNVAGRKADWTDCQWIRIVYSRGLVSASFRPPQQIAALRSYLRHRKMLVEYAACHVQHMQKALSQMNLHLHHVISDITGVTGTKIIEAILAGERDPARMAQLRDRRIKSSPEIIAKALEGNYRIEHIFALRQAFDLYKTYCQQIDACDQQIHQHLQQLEAKIDPDHKPLPASRRQRRLRKRRNEIRFDSRREAYRIAGVDLTTIDGIDESTALLILSEIGPDLSPWKSEKHFASWLNLSPNHQISGGKILNRKTRKQKNRVRDGLRIGAQSLLHSQSALGAYCRRICSRIGHPKGIIATAHKLACLIYRLLKFGGAYVDQGQQHFEQRFKERAIKNIASRAKEHGYQLIPLPQVQVP

SEQ ID NO: 134331 - protein, 341 aa, unidentified
MKHDLNVVGIDIAKRVFHLVGLDARGTIILRKRLMRGEVMTFMAKLPRVTVGMEACGGSHYWARRLREQGHEVKLMAPQYVKPYVKTNKNDLRDAEAIAEAVTRPSMRFVPIKEVEHQDLQALHRVRERLMGARTALVNEIRGLLAEYGIVLPQGVNAFRKAIREKLEAEQAKLTSLSQEIFSKLLDELVKLESELAYYDDKLEAIAHSHPECQRLLTIPGIGPITATALIAAVSDVGVFTHGRHFAAWLGLVPKQHSTGGQTRLLGISKRGDSYVRKLLIHGARATLRWARTKTDRRSQWIRGLLERRGWNRTAVAVANKNARIVWALLSRGGVYCASTS

SEQ ID NO: 134332 - protein, 334 aa, unidentified
MSKISNTAATADYFLGCDVSKRKLDVALINAQSQELWSDTIANERAAIATLLLTLTGAYPGESIVCVVESTGTYHQAFVEASYTVALPCLIYNPLITKSGIKGTVRGKKTDRTDAVIIARMGLRGEGRLYTPEPFMTTKHYARGCQKLSILNSSFRQYKNHITELLDGEMTDDAGELLKGIQQAIKEARAQLYKDLAESAQGPTFRRLQTIPGIGPYIAASLIGEIQTMERFTTAHALTAYAGLDPRIRQSGHTLNNTGRLTKRGSSYLRRSAFISANVARRYDPKFKALYDKKRAEGKPYTVATCVVARKLLAVVRAVWLSEKDYDVSQWPDD

SEQ ID NO: 134333 - protein, 391 aa, unidentified
MFLVGIDIAKLNHVASCIDSSTNEIVFSNFKFKNDFNGFSALLKKIGTFDTKNLMIGLESTSHYGENLIHFLFQYGFTVALMNPLQTSHLRKANIRDAKNDNLDSIHIAKSLLFTKLNFISEKNMDCFSLKKLTRFRSNLMKQRSKAKIQLTSLLDFIFPELQYLFSSKIHSKAIYALLKKYPSTEEIAALKEDEISSLLYASSKGHFKKEKSLELKSLAKTSVGMKDSSISFHVIQLIELIELYEKQIKDTESKIADIIHKLDSKLLSVPGISLVACAIILGETNNIDRFSTSKKLLAFAGLDPKIRQSGNFNASSCRMSKKGSPYLRYALIFTAWNCVRHSRKFNEYYLLKHSQGKSHYNALGHVAHKLVRVIFTLIKKDILYQEEKLD

SEQ ID NO: 134334 - protein, 353 aa, unidentified
MTRAMIAVLGIDLGKSSCSSVGLDAEGAVVLRKRMRRETVIAFATKLPTCVVAMEACCGAHHLGRLLAGLGHEVRLMSPEYVRPYVKAQKDDNRDAEAIAEAATRPTMRFVELKREEQLDLQTLHRVRDRLVGLRTMLTNQLRAILLERGLVFPKGRRKLELAIDALLLETHPALGVRMQKLIGDLREEWRGIDQRIGSLDTEFVARARADSVTRRLMTIPGVGTLTATALVAAVDDAAAFRRARDLPAWLGLVPRQHTTGGKPKLLGISRRGNSYLRRLFIHGARSALPTLSKTDTPTGAWLRALLSRARANVVVVALAAKMARIAWAMLRRSTEFTPEPGLAMTRLVAPPR

SEQ ID NO: 134335 - protein, 388 aa, unidentified
MPQQRKPNDLSRSLIALDMDTTLIAVVELSLSSWLVAGIVPGVERQPLKKLKTDENALLALFNRWRDEAVRSGHKVSRIAVAFEAGRDGFWLARWLRARDIEAHVIHASSIAVSREHRRAKTDRLDTELLKRAFVGWLRGERDHCKTASIPSLREEDAKRPSRERESLIGEQSRLVNRMKATLIRLGLRGFNPKLRHAEQRVETLRTPEGEPIPPNTLAELKRDMQRRRFICDQIRSIEQERLERLERTPDTKPHAMVRLLARVTGIGIETADLLVHELLLRNMRDRRAVARYGGLTSSPDRSGGTNREKGMARSGNARVRRGMIQLAWRFLLFQKNSALAQWYRRRTEHAPKARKTMIVALARKLLIALWRLVREGVVPEGVAMRPA

SEQ ID NO: 134336 - protein, 340 aa, unidentified
MQVIRFGIDLAKNVFQVHGVDASGQAVVQRQLRRAQVEKFFAAQPPALIGMEACGSAHHWARTLGALGHEVKLMPPAYVKPYVARNKNDARDAQGCCEAVSRPDMRFVPIKTLEQQWARALHRTRNLLVRQRTQLANAMRGLLYEMGLTSAQGAAGIETLLQRIEVADEAIPAALLICLVPLAGQWRALDGEIGKLDKQILAQVRQQKAGLRLMTIPSVGPIIAHATIAAIGDGRQFACARDFAAWLGLTRKCHDSGGKHSLTGHISRAGDRDLRRLLILGASSWLRQVRAKPDKGSPWIRGLLARRPVKVAVVAQAAKTARIIWAMLNSGQQYRAPTAA

SEQ ID NO: 134337 - protein, 371 aa, unidentified
MKASVIYVGMDVHKDSIVIALAREGREQAETWQTIPYDGAKLRKVLKSLSKNGEVLRVCYEAGPTGFGLCRRLCKAGIDCIVVAPSLVPSKSGDRVKTDRRDARKLAHFLRSGDLTEVHVPEESVEAIRDLERARDDAKCAERVARHQLSKFLLRNERRWEGKNWTKKHLDWIRKQTFAYPAQQRVLEDYVKTVEDLAERVERLTKAMGELVQETTLAPLARALQAFRGVAMVTAVTIAAEVGDLKRFQTPQQFMSYVGLVPSEDSTGKRRRQGSITRCGNGHLRRVVVEAAWHYRHVPVMSKELRRRNQGVAEGVRRIAWKAQKRLNERMYHLLQAGKCIHKTVTAMARELIGFIWAVGQEETLLEAKSK

SEQ ID NO: 134338 - protein, 355 aa, unidentified
MNSVKYVGLDVHQATISVAVLSAEGQLVMQSILATHAAAILDFIHGLRGSLEVTFEEGTHSAWLYDLLVRHVERVVVCNPRRNALLKAGSKSDSIDARKLAELLRAGLLSPVYHGESSTVTLKHLGRSYAALTEDTTRVKGRIKALYRSQAIASAGKKPLGRRHRGQWLGQLTQAGMRRRAERLYEELDALLSLRREARQELIVESHRHDAVKLLCTVPFLGPIRAALLLARVETPHRFRTKRQFWAYCGLALETRTSAEYRFEEGQLVRAKKPVFIRGLNVNHNHDLKNLFKSAATAASAMPGPFHSFYETLLLKGMQPAMARLTLARKIAAIALCVWKKGEPFDAEYLKPQAA

SEQ ID NO: 134339 - protein, 335 aa, unidentified
MTRYIGIDLHKSMFSVCFMTASRVHFSEYKMARLCDFIDTLDASDKVAFEATGNSRYFMNQLLPYVSEVFIVNPRQFRVISDSVKKTDKTDAEQIALFLSKGMLPTVRIQDEQSIQIKSLVHTRDRLVKLRTSLKNKIHNILNAHGIVSKRESFSSKKGLENVMSYDVPEIAKLELEVIISQIQHLNGGISKLDKEIEKQGKQLKGFTNITSIKGIGAKSGTILLSVIGNIDDFPSRKHLDSYFGMVPRVNISNERVHYGKITKHGNKLGRTALVQCTLIAIRYSDYLNSYYQRLKVKKGSGKAIIATSRKLLGIIYDTLKNDWVFTDFPNFVVA

SEQ ID NO: 134340 - protein, 441 aa, unidentified
MGVIIGMDPHKRSATIEVIDERAVVLAAGRYGTDIGRYAQMLAAAREFTGRIWAVEGCNGIGRHLAHRLVHDGEVVFDVPPKLSAQVRVFATGNGRKTDPVDAHSISLVAPRTPGLVQVQVEEDLVVMGMLADRRDELGRARTQVINRPHRLLLELVPGGAKKFLSARQARALIATVRPRDLAGKTRRRLAVELAVELEATGKKTRALDKELTELVTARGSTLMDLHGIGPSGAARLLADVGDIRRFASRDRFASWNGTAPLDASSGSQTRHRLSRAGNRRINRVLHIMGVVQLRNQTKGRAYYDARRAGGMPSIMAMRAHGRRLSNVVFACMLADHKRREAGPGGQSGTTRGLQRGRPRRLTLAESRALTQRGAYLCVSAALPAEIPMRDLPGLHKPGRSNREGMGRAGRCCQPPVSASGLRERLSRLGLQPPGKTARRR

SEQ ID NO: 134341 - protein, 392 aa, unidentified
MIYAGVDIAKTDHVIGAVDETGAEVAKPMGFKNAEAGFERCVAWLESVAESEDDVFVGMEATGHYWMACFAYLVAAGYRVCVVNPMQVHAMRRLKGLCGVKNDRIDSALIAETLRQGDYDQTRLATDEVQALKRLTRYHQGLKQELATVKTQAICVLDAYFPEYAGLFSDMFGTASLKVLAECPTPSEASRKRTSSIARLLSEGSHGRLGAERAAEIKSAAKSSVGIRLGEDAASFQIKTMVTQVEFLNRTIAKVEREVASLLEKVEPNITTVPGISTTTGAQIVAEIGDVKRFKGAASIVKYAGLNSGVDESGMFSAEGVPITKHGSPYLRRSLWLAANRARQYDPRLKAFYDKKRREGKPHRVAVTAVARKLCHVVYAVMRDGEPYDPSK

SEQ ID NO: 134342 - protein, 330 aa, unidentified
MSNTSNTSNTSFSPVVFAGLDVGKTSLQLALSLEEGKFLERSFPNSLPGRAELVSLCSQHRVQLVVMEATGGLELDAAVDLVHDQIPVSIITPGQSRAFAKALNQQAKTDAIDARLLATFARRLRPPTTAIPSETQRDMRELAARRRQLIQQLVQEKNRLQQARDRRVKTSVEKGIEFLQQQLADIDEHLGKLITANPELQLIIERLESVPGIGTNTATQLAVACPELGTLNRQQIASLAGLAPYNHDSGTSSGQRSIRGGRASVRTTLYMATLTAIRCNPIIREFYQRLRANGKKKMVALIAAMRKLLILLNSLLCQKKTWTEFVPQTV

SEQ ID NO: 134343 - protein, 337 aa, unidentified
MLQHTFDHATFIGIDAHIGEHTALAVNRFEEERGKLTFANTHEGIARFLSWIPSLDADQRKIHIGIEGGGTERHALLRCLIASYEQVYEINPLFTKQRRDYGTNGNKSDERDAKLIAEVLTKKIMELPKIAAHQVTPERLAFRKTIWFYEEITERGAAITHQLNQVQRELVLAQDKLERHALTMIYREKEKERSRIRKTQKKVVTELSQLLPERGKNLTSIPGISTVLAARIIAHTDGIERFRNLDKFIRYAGIAPLERSSGKTRRFIKANRGNRKLNAALYMAALSQRRFDPAGSAYFEKKVAEGKTKKHALRCLMKRVACIVYGMLKNGEPYRRN

SEQ ID NO: 134344 - protein, 315 aa, unidentified
MDMKAVGIDVSKDRLDVHVWPDGIAFAVARDGKGLAELIERLLPLTPDLVVVEATGGFETVVAAALAGAGLPLVVANPAQIRHFAQAAGTRAKTDPIDAAMIARFGHDMKPDVRPLPDEATQLLADLVARRRQIIEMIVAERNRERRATVRRIKKSIARLVRALEKELAEIDAEIDAGVRGSPAWRDKEDLLASVPGVGPVVARTLIAELPELGTLDKKKIASLAGLAPYTRQSGQWKGKSMIGGGRKSVRCALFLAALVASRHNPVLKAFRDRLRAAGKPKMVALIAVARKLVVLANTLIGHDRMWQPTPPKCA

SEQ ID NO: 134345 - protein, 398 aa, unidentified
MDLPVYYELKTNNGNRDYRIQIGGHYMNYNTVYVGMDVHKESFTLCSCRYEDEKASHYQRTPASYKNVLRYLAFLRTIYGEDTRFVCGYEAGCLGYSLYHQLENFNVECVILAPTTMLEQRSKRRIKTDKRDAEIIARSLAQHNYSPVHIPTETDNQTKEFIRMRDDHKAELKKIKQQILSFCLRQGYQYDGSGNWTAKHVKWLRSLKPAGLYKEILDEYLLTYTILTDKLNRLDQRIEELASKEEYKESVSKLTCFLGIKIHTALSVIVEVGDFQRFVSARKFAGYLGLVPGQHSSGDDRNGLGITKAGNTHVRRLLVESAQSYTRGKIGYKSRVLRSRQAGNSPQVINYADRANERLRRRYYKMVLKDGKKYNIAKTAVARELACFIWGMMTDNIY

SEQ ID NO: 134346 - protein, 317 aa, unidentified
MKTVPFEQVILRGCGIDVHKDMVVATISGEGLKTETRSYKTFSSSLTELKEWLLSSGITHVAMESTGVYWKPVYKILECPDMKVWIVNARHIKYVPGHKTDKKDSAWICKLLLAGLLKPSYIPEREQRELRDLTRYRNKLIQHVSSEKNRIVRILEDCNIKLSSVVCSLDGVVANKLIDMLIDKGHVTMDDITCIYHKKLEASPELLYQACEGFIEPHHIYMLQTIRKDMEQTKAIIADLTCRIKEVLSPYENVMELLQKIPGLSRKTVEDLIAEIGVDMEAFPTEKHLASWAGVCPGNNENAGKKKVVEPPMATNS

SEQ ID NO: 134347 - protein, 430 aa, unidentified
MKQYELLHSLFVGIDVSMKENVVHAMPFSPEDHPGHAHLRFSAPNTPAGSVGIVEKVSDFLKFYPDVIQVVIALEATSVYSFHLATFLSVAHFNGHIPAIVYSVNPKEIHAYKKTFTDVGKDDYVDAMVIADYARSNKIRSRPWKGPELLGLRVLTRLRFRIAKLMGIVKNSTGNSIYLECSGLMTGENPFCNVWTTTCQELLTTFQGPDEILSLSDEELLNFITEKGHGRFSHPLDVVEKVKKAARNSYRLDKRVYEPLTSGLSVSFFIIHSLEAAIKKLDKSIETMAKSFSSDSYQILLSIDGVGPVIAGGLLAEIGDIKRFKTDDALAKYIGLTWRGKQSGQSESPVKHLSKAGDVYLRYYVLLATGQIINYSAKYREAYERIRSRKTLCPYRAALNLVARKIVRLIFTLLDKHQLYSDNKVMVTLE

SEQ ID NO: 134348 - protein, 395 aa, unidentified
MKRVCGLDVHKDTIFACVRKGKYQTEVRTFSTFSCGLAELKHWLKGERVGRIAMESTGVYWMPVWRALEDDFDLLLVNPYFIKQAPGRKTDVKDAQWIAQLLDKGMLKGSVVPEKTIRILRAYLRRYVQLQGQMTRCLQQVERHFSQCNIKIASLTSTINSKTVIDILASIVEGKYSVEELVALVHPRIKNSKGEKVKQSLEGIIEAHDIFLLRQIYEDYLHINRQCFELLAQAEQLADEHYKEQIELLQTIPGIKKLSAVIIWAELGGNIGLFENANRLTGWCGLRPNNDESAGKIKSRKIGKGNKYLRRILVQTGWAASRTKDCYLKNKYEQLAIRKGNKKALIAIARKQLVIAFNVLSKKETYQEPRIVLSEKQIERKRKYYEEKLTKLKQQ

SEQ ID NO: 134349 - protein, 346 aa, unidentified
MIYIGMDISSKSFTVHAINERKEVVFKGEIEPTRAGLREMINRLKDQPKLIVFEAGNQLKWIALTLKKMKDVEVHVVHPNEIKWINQSSGKTDKIDARKLAYLARGDMLPRKVHIVEGKARELRELISARDRIQSKRIALINAIRGHLKQEGYKLPGKFFQNKKWREEMGKVRVGETLKLILKSYMSGIDSLKQAEEELTARILEVEGKDIDLLESIPGIGGLSSRVLVSAIDDVSRFEDKKAIGKYGALTPRIYQSGDVTHLGRINRDGRHEVRRVLLQCAHTVARMKTYAAKPLQLFYEKIRRRRGKKIAVVALARKLLTIAYGVLKTGTVYNPEVLGGASPTS

SEQ ID NO: 134350 - protein, 364 aa, unidentified
MLIIGCDYHPGFQQIAFVDTDTGELSERRLEHREQAEQFYRELKQQNPAVRVGMESSGHSRWFERLLHELEFELWIGDPAEIRTKRVRKQKTDRQDAQLILQLLLENRFPRIWVPDAENRDLRQLLWHRHRMVQMRTRVMNQLHVVPLNEGLRRKKALWRPAGRKELESIALAPWASRRRQDLLDLLDQLTPKIQELTRALEEEVEKRPVARLLMTHPGVGPLTALAFELVIGTPERFHCGKQLASYVGLVPTEESSGDRRRLGHISKQGNVLLRFLLVEAAQVTVRSQQEWRSKFFHLAMRRGRKIAKVAMARKLAVHLYWMWRQGSDYGQTQKLGSHAGEPGHPDGVQSITDVMIGHPAPSK

SEQ ID NO: 134351 - protein, 365 aa, unidentified
MQKISTVRTSGKNVFKGQLTIGLDLGDRSSSYCVLDEAGQVFLERKLSTTPEAMKQTFGRMPQSRIAMETGTHSPWVSRLLTALGHEVIVAHAQKVRLIVKSRRKDDRLDARTLARLARIDPELLSPVQHRSAQAQLHLTEIRARAGLVSARTALVNAARGLVKSYGERLRKCGTQQVLREATSGLSAGLREALEPLLREVESLNERIKEYDRRIEKMAKETYPETTLLKQVKGVGDLIATAYVLTIEDPHRFRKSRDAGCFVGLQPGRRNSGESEPQLRISKEGDEYLRTLLVQGAHYIWGPFGEDSDLRRWGKKLAARGGKNAKKRAVVAVARKLAVLLHRLWVSGEVYEPLRNSQKAMSAAA

SEQ ID NO: 134352 - protein, 394 aa, unidentified
MILVGIDIGKKQHIFSIIDKQTGEILSNPSVFHNNQDGFLLLIGKLSCYAKSKLLIGMEDTGHYHFALLKYLLDRHYTVALINPTTTDLTRKLQGGITKNDPLDSLTICDVIGSNQRKKPYRITKVNRFDLYEQKQLTRHHHNLKEELNIYKNRLQKCIDIVFPEFNSLFRSKYGIVYMNILKTFASAEKIANSDIRTIRKCFEYEGRGRRIQLSAEQLKTTANASVGISSVAEEIQIRHLVCQIEMIEEQLSEIDKKIEEFSLQNNSPILSIPGISHFSDTSILAELGDICNYTKASQIIKFAGVAPYHYESSQFLARHTAITKKGSRYLRKTLYQIILPVINHNRVFTAYYNKKLAAGKGHRCAQGHCIRKLLRVIYHLLSTGQSFDPALLI

SEQ ID NO: 134353 - protein, 342 aa, unidentified
MFHIGIDAHLNSSAVCILDENGRLFKRFVHRGDLRSLVKRLREELDQPFQVCFEASCGGGTLHDLLVPIADRVVVAHPGHLRLIFRSKKKNDRVDAAKLAKLLFLDEVPPVHVPDRNIRAWREMIGMRSQAVAKRTRAKNGLRALLRSHLIRSPRGLWTKQGRQWLTELKLPTAPARLRRDLLLAEVNHFDRQIQRLEQELDRIARRHPGVALLKTIPGVGPRTAEAFCAFVDDPKRFGTKQIGRYFGLTPSQDQSGSTNRLGHITREGPAVVRRLLAEAAWRASRLSPRVKAFFERVQRGDPDRRKIAVVATAHYLARVMLAMLQSGEVWQKEVAPATKAA

SEQ ID NO: 134354 - protein, 463 aa, unidentified
MNKVTGKGKRRSRRKPKQGLRVIRPNVAGIDLGSREHYVCCPPTAAGEPNVDHFGTTTPELNRLADWLKEQGVESVAMESTGVYWVPIYEILESRGFEVLLVNARALSSVPGRKTDMLDCQWIQMLHSCGLLKGSFRPGDDICALRSLVREKTTMESQRSDWLRRIQKSLDQMNVCVHHAVSDISGVTGMAIIRAIVDGERDPIKLAKLRDNRCRKSEKQIAEELTGNWRAEHLFSLKQALRMYDHICAGIAQYDAEIQRTLTALQPPENRTRKAPEVTNKNKRKNFRARGQEPMREALFRLTGHDLTTIDGIGVDTAETVLSEVGTDLSCFPSENHFVSYLKLAPKLAISGGKPVPTKRSGSTTTRLGATFRMAALTLRNSKTALGAEYRRIARRKGASVAVFALARKLAILVYRLLRYGQAYVDEGMQAYEERFKAARIRTCKQIAKEFGLTILEPEKAAS

SEQ ID NO: 134355 - protein, 343 aa, unidentified
MQTITTIGFDIAKSVFQVHGVDAGGQVVIRRQLKRRYVLAFFQKLSPCLVGIEACASAHHWSRELQALGHTVRLIPPAYVKPYVKRQKNDAADAEAICEAVTRANMRFVPTKTPEQQSGLVLHRARHLFIRQQTAVINAIRAHLAEFGIVAPVGRHGVEELLNVVADPNDKRVPEMARACLLAFGAQLRGIKEQILEFDRLIRAWHRSNEMSMRLDEAPGVGPVLATALVAAVADPKSFRSGRNFSAWIGIVPKQHSSGGKNRLGNISKQGDRYLRGLFVAGALSVIRYAKIHGTKHRPWLTALLARRPTKVAAIALANKIARMVWAMMVKGERYKEPVALAR

SEQ ID NO: 134356 - protein, 370 aa, unidentified
MKEPITSYVGLDIHKDSIAIAIAKAGRDAPQFIGTTVAQLAQVRKVLTRQRCAPDKTLVVYEAGPCGYGWARYLNTNGWRCEVISPAHVVRSAAGKAIKTDRRDALLLARESRAGNLTPIAVPDERDEAIRDLSRAREDAIAARLRARQQLKAMMLRHGRTYSGNAWTLAHERSLASVRFEHPAQQIAFDEYRQSVKDAHERCERLTQALREQCAGWRMGRVVEALMCLRGFDFIAAVTIIAELGDLNRFSHPRALMSYLGLVPSEHSSGNSRRQGAITRTGNRHARRILVESAWTYRYGAHVGREHQIRQQGQPKAIRDIAWKAQLRLTHRYRKLSLGRKMKATKVCVAVARELCGFIWDLARHVPAHQ

SEQ ID NO: 134357 - protein, 344 aa, unidentified
MNSTTIAVDVAKSVFEVAISEQPGQVRERQRLSRERFRRFLTERPAATVLMEACGSAHHWARHANAHGHRAVLVPPHVVRPYVLRNKTDRTDAKGLLEAFRNEDVHPVPVKSESQQALAALHRLRSTWLATRTARINTVRGVLREFGLILPVGAYHVVPQVRMLLADADAGVPGLLRPALAAAVEEIRESEARMQAVEQQLEAGAAQTLSVRQLRTIPGIGLLTATALVAAVGDVQRFPSARHFASYLGLTPREDSTGPRRRLGAISKRGDTYLRMLLIHGARSVLCHAKTKTAPPPDRLRAWARQVERLRGHNKAAVALANKLARIVWAVWRHGKDYVGTPAV

SEQ ID NO: 134358 - protein, 344 aa, unidentified
MSEVTTIGLDIAKTVFHAHGADGTGRMVFSRRLTRAKLLDFFAAQPACTIALEACGGAHHWARQLTHLGHDVRLIPPAYVKPFVKRQKNDAVDAEAICEAAQRPGMRFVAIKTEEQQAAGMVFRTRDLLVRQRTQLINALRGHLTEYGWAAPRGRAQVLMLADLLDEEEMASSLPEAARAMFKVMVNHLYRLDAQIADLDSEIERRAQADEAARRLMTIPGIGPIAATAILALAPPIETFAKGRDFAAWLGLTPRQHSTGGKQRLGSISKMGERTIRRLLIIGGSSVVRQASRRGAPAGSWLEGMLARKPRMLVSVALANKMARTVWALLTKEEDYRAPAPVAA

SEQ ID NO: 134359 - protein, 366 aa, unidentified
MKKNNTVATRRKQIFREKKLTIGMDLGDQSTYYCILDEAGEVIVEQKLPTTKQGMKQVFSRIPRSRVALETGAHSPWVSRQLTQLGHEVIVAHARNVRLIGESSRKDDRLDARMLARLARLDPRLLSPVQHRSAEAQAHLTVIRARAALVGARTALVNAARGLAKSYGERLRKCSTQQVSKDLAAGFSAELRGALEPLLEEVASLNQRIAEYDRRIEQIAKEVHPEVALLKQVKGVGTLIALTYVLTVGDPHRFRHSRDVGCYQGLRPGRRNSGSSQPQMHISKEGDRYLRTLMVQGAQYILGPFGQDSDLRRWGLKLSERGGSNAKKRAIIAVARKLSVLLHKLWISGEVYEPLRNHGAVVGAVA

SEQ ID NO: 134360 - protein, 345 aa, unidentified
MEYYAGIDVSLESASLCVVDATGQIVCEAKLASEPEVLIGWFRDLGLAVIRIGLEAGPLSQWLYAGMRDAGLAVELLETRHVRNAFKAMPVKTDRKDARGIAQLMRLGWFRPVHCKSLPAQEVRALLTARKLLQTKNHDVEMSLRGVLRGFGLKVGRTTPRTFAGRIRELVTGHATLSTVAEALLSARGTLFEQCQKLEKRLRSLAREDGRARLLMTAPGVGTIVALTYAAAIDDPSRFRSSKAVGAHFGLTPKKYQSGETDVTGRISKIGDGGVRTALYEAANVILTRPVKGSTLRSWAMRVATRAGMRKAKVAVARKLAVVLHRMLADGASFLADKAAVAAAR

SEQ ID NO: 134361 - protein, 348 aa, unidentified
MKNKSFVGIDISKNVIDVSIFREDTNIKMFPHEVFNNTRKGFGDMCSWLKKSRVVLSQALFGMEFTGCYSLDLEKFLTSKNYSFCMLSTRIVKHHPMGTIDKRDKNDSAKIADFLYRYDGTECAKPYKLPSKAMQQLKQLVNERKFLVEQRTNFMNRMQMSETKEDSAMYESYIKKLNHDIEKIDQEECELMSKEEDVFDTFQNLLTIPGIGFVNATNIIAITRNFTAFDTARQYARYVGVAPCSHTSGTSVKWRARPSAHCNGQVKADLSMAALRAVEYDVEMQMFYNRKLGGRKDSDTKRKALNAVKFKLIRRMFAIGKQKRKWEVLNTSDDRKNLHIEKSKASEL

SEQ ID NO: 134362 - protein, 338 aa, unidentified
MKAYAGIDLHSSNNYIGIIDQKDHRLFGKRLPNDLVRIEQVLDPFKKELKAVVVESTYNWYWLVDGLKERGYPMCLANPAAIKQYEGIKHTDDRWDSFWLAKMKRLNILPEGYIYPKEERPVRDLLRRRLLFVHQKTAHMLSLQSTIARNLGVNMSCNTIRKLRPEDAYDLFEDSNLALMAKNNIEAFLHLQKTTREIERAVISQVKIREEFELLQTITGIGNILSLTIMLEVGDIGRFAKVGNYSSYCRCVSSARISNGKKKGENNRKNGNKYLSWAYVEAANFAKRYSKRAQQYYQRKMAKTNKIVATKALSNKMCRASYFVMRDQIPYDEERVFK

SEQ ID NO: 134363 - protein, 403 aa, unidentified
MKDRPLVWVGVDVGKATHHACAMDPAGKVVFSQKFANDQAAIEHLVVRAGQAATEVRWAIDLTSNAAALLVAVLIAAGQQVVYVPGRVVNRMSGVFRGEAKSDAKDARVIAETARMRTDLSPVTATDELVVELTRLTAHREDLMADWVRGVNRLRDMLTGIFPALERAFDFSTRSALVLVTGFQTPQAIRDAGQSGLDSYLREHGAWAKGIPGMVSDALGAAEAQTLRLPGEATTATLIADLARRLLDLDRRIKETDKLITSRFRAHPQAEIIESLPGLGPILGTEFLVTTGGDLAAFATSGRLASYAGLVPVPQDSGRVTGNLRRPKRYNRRLRRVFYMAALSSLKVSGPSRVFYDRKRGERLIHTQAVLALARRLVDVLWALLRDGRKFTPTAPQPTATAA

SEQ ID NO: 134364 - protein, 411 aa, unidentified
METVVRRCAGLDVHKASVVACVRIVDGNGELLLQTQTFGATVGELMKLNDWLMSYEVTLVGMESTGVYWKPVYALLEGQFECWLLNAQHLRNVPGRKTDVADAAWIAQLVAHGLVRPSFVPPKQIRELREVTRYRKALILERGREAQRLHKALEGSGIKLSSVATDILGVSGRAMLEALLEGTHDPDVLADLARGRLRKKIPALRKALVGWFSPTHRILVTELLAHLEYLDESIERLSDDIATMAAPFSQAIDLLDTIPGINRRAAEVMLAEIGADMSKFGSSGRLASWAGLCPGSNESAGKHFSGKTRKGSKWLRMVLVEAAQAAARTKGTYLSAQYARIKGRHGHNKAIIAVAHSILVIAYHLLERGTPYDELGGDYFLERQHKEAYQRRLVKQLERMGYQVALTETAA

SEQ ID NO: 134365 - protein, 407 aa, unidentified
MNPLYVGIDVSSRNNVVFFMKPNGSKIKNFTVPNSKDGARKLVKEMLAALSVFSLTDLLIGMEATSVYGDNLVYFLNENASLVPYNRKIYVLNPKQVNKFKEAYNDLPKNDGVDSFVIADCLRFGRINKEAYLDDYHYKALQNLTRARFFTVQNLTREKQRLMNVLFKKYSSLAQEKVFANTFGATALAVYETFDSADTLAYMDLHELTAFLKEKGKNHFSDPEAVANAIQKAARSSYRLPKTVNDSVNQVLSISISSMKALESQIKEFDKAIAAQMQLIPNTLSSIKGIGPVYSAGIIAEIGNINRFPNQAKLAKYAGLAWRQHQSGNFESQNTRLIKTGNRFLKYYLGEAAMSLVRCDTEYSRFYHLKYNEVNKYQHKRALALTARKFVRLVFRLLKDHRLYIAP

SEQ ID NO: 134366 - protein, 413 aa, unidentified
MLLFIGDDWAEDHHDLEIEDETGRRLAKARVPEGLEGITKLHALVAEHAPADWSDLPSEEVAARVFVGIETDRGPWVTALQAAGYQVFAINPLSSARYRERYSTSGAKSDAGDAHVLAEIVRLDRDHHRQIAGDTDLVDAVKLVARAHQTAIWERTRQVLRLRSTLREYFPAAIEAFEDLAAKDTLLLLARAPSPARVAKLTRSQVVSALRAARRHHVEAKADAVLAVLRAPGLRQPATTEAAYAAVVVGQVGLIGALNEQITQLQEVVAEHFGRHPAADIYLSQPGFGVVLAARALGEFGDDKERFHDARARKNYSGQSPITRASGKKTVVLARYATNRRLGAALHAQAFSALVASPGARAYYDALRARKIGHHAALRQLANRLVGILHGCLKTGTKYDENTAWQHQIVVAA

SEQ ID NO: 134367 - protein, 426 aa, unidentified
MNCTQNYKIDQVTEQTLVVGIDIAKRTHYACFVDDRGRVLRKSFPIFQSKEGFQQLYKAIQGAMQAFGKSEVIVAVEPTGHYWLNLAYFLEEHGIPLVMVNPAHVCRSKELDDNLPTKHDAKDALVIARLAKDGRFLVPRLLHEIEADLRVGSTLKEKLRKEQTAVKNAIVRWTDRYFPEFWTVFRDLGKTALSVLEWTPLPADMAGRTVEELLEVYRQSEGMKCPQKAKIQALINTAKDSIGVTEGTAMARFEIAALVRRYRQLEAEIAALDAELKALVQTTMEYQWLKTVDGLGDATIIDLLAEIGSFAHYRDPRQLVKLAGLTLKENSSGQRKGQKHISKRGRKRLRSVLFRAMIPLIRHNEAFRELHEYYTTRSVNPLTGKQSIVALCRKLLNVLFAICTKKQAFDAERMKQDVLSQVQRAS

SEQ ID NO: 134368 - protein, 401 aa, unidentified
MPESITAGIDWGGSLHQVAIVDGRGRQLASFQVAHDVAGLAELGERLATYGADLPVAIERAEGLLVEHLQALGLQVYPVSPRIAARIRERYRVAPIKDDAFDAFTLADALRHEQPRWRPLAEPSPLLAERRALTRDRERIVAEHMRVQNQLHAILESYHPAAARLFSRLDRKVALSFARDYPTPARAAQVGERRMARFLARNGYTGRVAPAVLAERLHANLLAAAPGTVAGKSFAARHHADLLEQLTRTREAYDERIARLLAEHPDGELFRSFPGVGPVLAAILLAEIGEDRARFPEAALLLAEAGLAPVTRQSGKTRRVRFRRAASHRLRQAFTWWAFNSLTESPWARLVYEENRARGQRYYRALRGLSARWGRVLYRCWQDGSCYEVERHPGALELVET

SEQ ID NO: 134369 - protein, 374 aa, unidentified
MENTITYVAMDTHKKQHKIALHYPCQEEIVEFTVNNTTGDIKKMVRKIAKQAPGEVEFCYEAGVCGFTLKRRIEQFDCRCIVIAPSLVPRKPGERVKTDRRDARKLLMMHKAGLLTEVHAPNERQEAARELTRLRETAKENLKRIRHQLLKFLTRHGYVYSNGHHWTQKHITWLRTVEFTEPMLTSVFENYFNEMIYCIGRLEALDKEVELLAGSAEYKEIVGLLRCHHGIETLTAITIITEIFEFGRFESPRHLMSYLGLTPSEDSSGDKQKKGSITKTGNKRVRRLLNESAWHYRHRYVPSAVLKKRRKGQPQWAIDIADAAGRRLSKRHRHLVNNGKMPCKANIAVARELAGFIWFTVTQYHARKNTKDAA

SEQ ID NO: 134370 - protein, 463 aa, unidentified
MKQATGKGKKRKRRTSKHGFRVIQPNVAGIDLGSCEHYVCCPPGPDDEPNVRHFGTTTPELYTLSDWLAEQQVESVAMESTGVYWVPIYEILESRGFEVLLVNARMLSRVPGRKTDMIDCQWIQMLHSCGLLTGSFRPGNDICVLRSLVREKNTMESQRSDWIRRIQKSLDQMNVCVHHAVSDITGVTGMAIIRAIVHGERDPRKLAKLRDKRCRKSEEQIAGELTGNWRTEHLFTLKQALQMYDHICEIITEYETEISRTLTLLQPPEYRSLEVPEVTNKTKRYNVRARGQEPMREALFRLIGYDLTSITGIGVDTAEIILSELGTDLSCFPSEKHFVSYLKLSPKLDISGGKPIPGKRKGSTTTRIGAALRTAAVTLKHSHSALGAEYRRIARRKGASVAVFAIARKLAIIIFRLLRYGQQYVDEGMQAYEERFKAARIRTCKQIAEQFGLTLILPDQEAA

SEQ ID NO: 134371 - protein, 365 aa, unidentified
MKIIRQCVGIDCSKDTLDVAISFLDETFHQQVFSTQVFENNEKGFKRLTKWIKKNCHQDLLYQTVVEATGVYHERLAYALTEQGFPIAVVLPNKSRNYCRSTDVRTITDKISAMQIAEFGLVKKLNNWTPPDKVYAQLKGLCRERVQLLATKNSTGNQLHAYRHAATDSHGTAKRAAHRIKLIDAQIQQIENEIEKVVNEHSLLKEKIKKICTVKGLGLVTVATVIAETNGFNLIRNCRQLACYAGYDVVQKQSGISVNKKPHISHKGNKYIRRALYLPAFTAVKHDERMEKLYNRLFDRQKIKMKSYVAVQRKLLLLIYTLWKKNEVYNHLQQLHSINNLEQQKNAALTELVYDRSMDYAHMQI

SEQ ID NO: 134372 - protein, 397 aa, unidentified
MIAVGIDVSKSKSTVAILNGDGSIRAKPFDVHHVADELQALVNYIKGTSEPPTILMEPTSHYHYPLLKAFQEAHLSVCLINPYQMKKYGDTELRKAKTDKRDALRIAQYALEKSYTLVPYTPTDQKYEDLRFLSRQYTQRISTLTVAKVQLLNLLDETMPGITTILPLKSRDPDNCVLLRFIKRFKSFDVIRKMGKSRFLDSYQVLVKKTKDYYAGAKGLAIYELALNSITTRGENPLSSMAQDQCVDLVSTSQKAADEINLQMRIIAETIPEYKVLRSMAGVGDRLGPIILGEIGDVRRFHSGKALNAYAGNDAPPYQSGQFESRNRHISKRGNPALRKACFEVMQALKLTKPQDDPVYLFLLKKEQEGKPYNVAKMAAVNKFLRIYYARAMELYK

SEQ ID NO: 134373 - protein, 427 aa, unidentified
MVRCIGMDVHRDFCEVAVAENGGVRSGPRVLTTPEDLEVFAHSLSPTDHVALENTGLAASVAEILRPHVERVVVANPQAVRAIAWAKVKTDRVDARTLAKLLASGFLPEVWPGDKPIRALRRRISRRAQLVRSRTRAKNEVHAVLQRNLVPRPPVTDLFGTTGRAWLEEQALPPDEARTIQACLRQIDFFEAELGALDADIAAVAVASEDIRRLMTIPGVDVTTASTLMATIGHIGRFPTARHLVGYLGLDPRVRQSGVSPARHGSISKRGSAQARHVLVEAAWLLGRTPGPLRAFSQRVAARRGANVAAVAVARKLVVLCWHLLHRGQDYAFARPSLTRAKLRRLELRAGAEPHRGRRRGELISSTQEQRRQESEVIVQAEVAYRRFITDWQATGERVRVPPPGRASHGPRRARQRGRNKPPDPAL

SEQ ID NO: 134374 - protein, 355 aa, unidentified
MSQEKYIGMDVHQATISVAVLDSRGKLIMESILETKAATILEFLQGLHGSLSVTFEEGTSAAWLHDLLKPHVTRLVVCDPRRNALLKDGSKSDRIDARKLAELLRGNQLTSVYHGEHGMRTLKELGRSYVTITQDLVRVMSRIKALYRSWAIPCSGTSVYAPRHRAEWLGKIPEPGVRLRAERLYQQLDLLQPVRQQARRDLLTESRKHHAVKLLRQIPSIGPIRAALLVAQLQTPHRFRTKRQLWAYSGFALKTHDSGEYRYVRGKLQRNQERMTVRGLNNNHNPDVKNLFKGAAISASTHPGPLYDFYVALLEKGMRPTMARLTLARKIASITLTIWKKGADFDATQLHRQEA

SEQ ID NO: 134375 - protein, 348 aa, unidentified
MAMTMVETTRPVTGGVDTHLDVHVAAAVDASGGVLGVQPFATTTAGFVELHAWLETFGSLERVGVEGTGAYGAGLARYLRSRDLEVIEVDRPNRQLRRRAGKSDTIDAIEAARAALSGRASGIAKTADGNVEAIRVLLIAKRSARDTRIKCLNQVRHLGFTAPDELRERLRGVPRGRLAGTAAGLRPTAGSDPVVYATKLALQTLGRRVVDLETTTQRLDATLDQLVCATAPNLVAVAGVGIDTAAILLVAAGDNPERIRSEAAFAHLCGVAPIEASSGKTVRHRLNRGGNRQANHALWRIVFTRMSADARTRAYVARRLEQGRSKPEIMRILKRYVAREIYKHLPRD

SEQ ID NO: 134376 - protein, 355 aa, unidentified
MTGTKYIGMDVHKESISIAVMNSFGKVVMECVIETKASTILQFIHGLRGESYVTFEEGTWAAWLYDLLKPHVSKVVVCDPRRNALLKDGNKSDRIDARKLAELLYLDKLHPIYHGEHGLRTLKELVRSYLTLTKDLGRVMTRVKAIYRSWSIPCTGKQVYAPRHRSEWLEKISEPAVRRRAEFYFEQLDALRTLRQQARRELLAESKKQPAWRRLCQIPSLGPIRAAVLMGILQTPHRFRTKRPLWKYIGFGIETHSSADHRSVHGQLQRSRKKISVRGLNQNCNHDLKNLFKGAAIVASSKPGPFQEFYTALLAKGMRPEMARLTLARKIATIALIVWKKGVCFDANHLKPQTA

SEQ ID NO: 134377 - protein, 341 aa, unidentified
MMGNVTTIGLDIAKSVFQVHGVDAASEVVVRRKLTRGRVLAFFESLPRCLVGIEACSSSHYWARELNARGHDVRLLPAQYVKAYLKRQKNDAADAEAICEAVTRPTMRFVPVKTPEQQSVMMLHRVRLMLNRQRTQISNALRAHLSEFGVVAPIGRNGIEQLLVVINDENDARIPADARLCLRMLEAQLRVVKEQILENDRRVRASARETELGRRLMEIPGVGPLLASAFVATVADAHAFKSGRCLSAWIGLVPKQNSSGGKEKLGSISKAGNRYLRQLLVVGAMAVIRYAERNGTRRPWLVQLMARRTAKVAAVALANKTARMVWALMTSGERYREPVIA

SEQ ID NO: 134378 - protein, 412 aa, unidentified
MEVLYPHCAGLDVHKNTVVACVRHTVDGTIKREVRTFKTTTKELLALSEWLAAEGCTHIAMEATGVYWKPVWHILSDGDFALVLANAAHVKNVPGRKTDVNDATWLADLLAHGLIRGSFGPDQQTQEMRDLLRTRKQLVRERSRHVQRLQKTLEDANIKLDSVISDVMGLSGRKMIEALIAGESDPEQLAQLAHRRIKATPEELCEALRGRVTRHHRFLLNVHLQQIDAIDAAINTIDQEIDAHVEPFRDTVLLLTTIPGVDELGACVILAEIGRDMSRFPTAGHLISWAGLCPRNDESAGKRRSTRMRKAAAWLKTTLVQCAWAATRKKASYLQAQFHRLRARRGAKKAIGAVAASILTAAYEMLKTGTLYEDLGCNHFDKSGKGKQIHRLVSRLRNLGYAVQITPLPAAP

SEQ ID NO: 134379 - protein, 314 aa, unidentified
MSAPMFVGIDVSKAQLDVAVRPDGRFAVSNDDAGIAQVIARLRAGPPTRVVVEATGGLEMPLAGALAAAGFPVVVVNPRQVRDFAKATGRLAKTDALDAQTLAHFAEVMRPALRPLPDEQTQALAALLARRRQLVEMLTAEKNRLGSARKPVRKSLRTHITWLERELSHTDSDLAHAIRESPVWREKDDLLRSTPGVGPVLTTTLLADLPELGTLTGKQIAALVGVAPLNRDSGTLRGKRTVWGGRAPIRAALYMAALVASRFNPVIRAFYHRLCAAGKAKKVALTACMRKLLIILNAMLKHRTPWRTELVQYA

SEQ ID NO: 134380 - protein, 391 aa, unidentified
MRTDQTFATGCEQPVLAVSLELAAAKWKVALHDGRREQPAVHTVARPEAGARLQAVPDLVEAHRDKWLLPSGARIVVSYEAGQDAFWICRALQARHIECYVVDAASIPVERHRRRAKTDRLDAIKLVINLRAWLRGERERMHVVHVPSAQDEASRHLMRERGQLQKEVLQHLDRMRKLLATLGCWEDVAHRTFAERLARGEVRCHDGEPLPPELRERLLRECERRAFAAQQLAILEKTRQASVPAPARARSAALAHLKGIGEVGASRLALELYWRDFHNRRQVGACVGLVPQPYDSGESQTDQGISKQGNRRVRALLVEMAWTWLRYQPGRVLTQWFHRRTPGHGTEPTRPAYRNRRGGAAPWRYLKNGVIPEGAQLKSASVGQASCGAQN

SEQ ID NO: 134381 - protein, 360 aa, unidentified
MQGQVSKKTFEGQTIYSGIDYHKKSWKVTILGEEYEHKTFSQDPSPDVLASYLKRHFPGARYKAVYEAGFSGFGACRRLRNLGIECEVIHPADVPTSRKEKQQKTDKVDSRKLARTLRNHESEYIHIPDSELEADRALVRQRFRISKDVARTKNRLKSILMQFGVDIPEKFTVYASRHWSKPFLTWLQDLKVEQTSLKKTIDGYVAIGLLLRKELLVANRRIRALSQEDKYKSNYELMLSIPGVGLLTAMTYLVQFGDIKRFKSLDELCNYVGLVPSMHGSGDRMVTGKLIKRGRKDLKVMLIEASWVAIRKDPALMLKFNELTKKMQKNKAIIRIARKILSRIRYVLTNKVPYEIGIVQ

SEQ ID NO: 134382 - protein, 388 aa, unidentified
MGEVALLPQEFLHTEVGLEQMAYAIVALGEDTRVIMEATGRYHEPVAAALHEYGIYVCVLNPLFIKQSGGGSIRKVKTDKADAMKIAKYGLDNWVDLREYTPMDTVRQQLKLCSRQYNLYMKTVVSLQNNLISLTDKTFPGVNELFSSPERADGHQKWVDFVMTFYHCDCICRVSENAFAERYQKWCKRKGYHFSAEKAQDVYLGSCGHFTTLPKNDNTKLLITTAAQQLLAGKMTLAALRTEMTRLAKQLPEYDIVRAMYGVGETTAVQLMAEIGDVRRFPRRSSIVGFAGVDPAVDQSGKHSAKSVPTTKRGSPHLRKTLYQIVCTYLKKSPVDEPVYQFLDKKRSEGKPYFVYMTAAQNKFLRIYYARVKECLEAFDAQQDTSQR

SEQ ID NO: 134383 - protein, 321 aa, unidentified
MQKDLLYCAIDVSKDKLDLDAAALALPAQLGNDHASFRQLIKAAKKYPSAVQFVFEATGPYHLGLALALWEAQIPLSILNPARVRHFAKAQGKAKTDPLDTQVIGDFARSFRPPPTPAPDPVRRELTELLQRRDGLTGSRAAEQNRLGQCRHKIIKGQIRRMMAQLAEQIDQIDGLMKKLVSSSQELKAKVKALCQVKGVGHLTAVTLLITLPELGTLGRNRIVRLVGLAPLNDDSGTQKNKRYIQGGRARPRCALYMPALSASRHNPVLKEVYERLLKAGKLKKVALTALMRKLLICLNALLRKLADQHSSPQGLCLAKP

SEQ ID NO: 134384 - protein, 344 aa, unidentified
MDHFAGLDVSVKETSVCIVDDTGRIVKEMKAASEPQALLKVLGNPAYRFKRIGLEAGPLSQWLFSGLAEAGLPVVCVETRHMQAVLKAQINKTDRNDARGIAQMMRAGLYRPVHVKTLRSQKLRMLLTHRKLLQSKAIAIENDLRGTLRNFGLKVGMVGKVRFEARIQELVESLPDMAALVEPLLIVRRALREQIVILHRRLLTIVRNDEVCRRLMTTPGVGPVVALTYRATVDVPARFRKSKAVGAVFGLTCARYQSGEIDWSGKISRCGDEMMRTMLYEAAQSMLRSKKWSWLKAWAMQIARRRGMKKAIVALARRLAVIMHRIWVDGTEFRWTQEQAAAAA

SEQ ID NO: 134385 - protein, 348 aa, unidentified
MIMLGIDAHKRTHTVVAVDELGRRLAVKTTTATTTKDHLELIQWADQFGTDRTWAVEDCRHLSRRLERDMLAAGERLVRVPPKMMAHSRDSARTYGKSDPIDALAVARAALREPGLPTAYLDEPARELRLLVDHREDLIAERTRHINRLRWHLHDIDPAWAPKDRALSTVKHLRQTQDRLAELDTVVARIARDLVERIRALTIDINALEAELDERTTSLAPQLREVHGVAAVSAAKFIGEVAGIARFRSRHAFARHNGTAPTPVWSGNTERHRLSRAGNRQLNAAIHRVALTQARSWPDARAYLDRRQQAGATRKEAIRSLKRRISDTIYRAMLTDAHSHENHLLRAA

SEQ ID NO: 134386 - protein, 309 aa, unidentified
MKEELVYVGVDIAKAYLDAAIGNEKRRFANDALGHRQLINWIKQMPASVQVICEPSGGYERALVRALVAAQLKISLVPANRVRQFARAAGILAKTDRMDAKVLCAFGEAMQPGTISASQLEQEHLRELESQRRHLTHLLVMEQNRAARMSDLWVCKLNRRLITQIKKQIEQVDLLIQQQIKASRELSSRAEKLTAISGVGARTAALLLAQMPELGQLNRREVAALVGVAPFNRDSGRMRGKRAIYGGRRSVRHGLYMAALIAARHNPILRAFYLRLRAAGKPAKVALTATMRKLLIVLNSSLKPDLTYA

SEQ ID NO: 134387 - protein, 341 aa, unidentified
MDQFIGLDVSLKDTFISVRQGGQRIWRGKCPSDPKLIAEVIRKRAPNAQRVVFETRPLSIWFFHALALEGLPAICIDARHAKAALDMARNKTDANDADGLAHLAEVGFYRQVRVKSFESMLTRTLVTARNHMLKATTQLPNQIRGLMKTFGLVVPKSAGRVFEGHVRSLLASNAGLEQIILPVLEAWPGMRARAAELGKQIVVSARMCEQCQLLSSIPGVGAVTASSFVAAIEDPENFRNSRSVGAWVGLTTRRYQSGEVDYDGHISRRGDNHLRGLLYEAAVVILTRSMADSARRTWGLKLKEKIGFKRAAVAVARKLAVIMHTMLRTGELFNRSHAVEA

SEQ ID NO: 134388 - protein, 419 aa, unidentified
MSFKILKNNCCGLDVHKTWIYACIGITDSFKRTEYKQARFSSFTKGLQELCLWLAKYNCIDVCMESTDKYWIPVFNVLEKNNIFVTLSHPKYTKPQKGNKTDRKDAKWICDLYMCGMVKPSFIPPADIRQLRDLVRYRFKLTCMITGEKNRAHNCLTVSNLKLDDVFSDIFGKSSRSITEQILQHPGEVFDVAPFVDSRCKTPIEEIQAAVDGAISHEQAVKLRQCLKHIDELEMHKAEIEREIFRLSQKYESVLDLIRTIPGFDKNPLTAIQVLSEIGADMSVFPTAKNLVSWAGCCPRNDQSSRKIKSTRISRAGSYFKPVLVQIANALIKSKKHPEFTTRYRRIKARRGHKKAIIAICRMILTAIWHILTDLKPYTPEGFLESRPVNKEKVLTISQALNLIKQRGYIIKDDVGPVT

SEQ ID NO: 134389 - protein, 348 aa, unidentified
MRFYTQQHQFYCGIDLHARTMYLCILNQDGEILVHRNMPAGPEPFLKAVAPYREDLVVCVECIFTWYWLADLCAREGIPFVLGHALYMKAIHGGKAKNDKIDSQKIAVLLRGGMLPQAYVYPAAMRATRDLLRRRMHLMRKRAELLAHVQNTNSQYNLPGIGKNIAYKANRDGIAERFPDPAVQKSIEVDLALIGHYDHLLNDVELSIVHTAKQHDPQTLSRLQSVPGIGKILSLVLLYEIHTIDRFPRVQDFVSYCRLVKCAKESAGKRYGTSGAKIGNAYLKWAFSEAAVLFLRTNPAGQKYLARLEKKHGQAKALTVLAQKLARAVYYMLRRKTAFDMPMFLQSS

SEQ ID NO: 134390 - protein, 338 aa, unidentified
MELYTGIDLHSNNNYVGIIDGEGNRVYKRKLPNDLNQVLKAMEPFKQDIKGVVVESTFNWYWLVDGLMDNGYKMHLANPAATKQYEGVKYRDDQWDSFWLANLLRLGILPEGYIYPKQERPIRDLLRKRLHLVRHRTSHILSVENLISRNLGIKMGSNTVKRLDSDYLTHLFKDEHLLLAVHTSVEVMRFLTLRIKDIERIVKAKIKLRKEYEPLLLMPGIGDILGLTIMVEVGDIGRFERVGNYASYCRCVKSTRISNAKNKGRGNQKNGNKYLSWAYVEAANFAIRFCAQARRYYQRKAAKTHTVVAIRALSNKLARASYYVMRDQVSYDPKMLFG

SEQ ID NO: 134391 - protein, 338 aa, unidentified
MKTHIGVDLHQRFCYLTAVNASGKMCKQGQVVNEGAALRAWLRPLPGPRQLVVEASGFWPAFARAVAPESERLVMVHPQRVKAIAAAKLKNDRVDSETLAHLSRCDLLPTAWMADEATQQLRLLVRLRITLGRQRARAKNQLQAVLHQEGFKKPVTDVFGKRGRAWLKGLELSAAGRVVVDTWLREVDHLDVELAAQTRELERLARADARARFLQSVPGIGPYAAMVIVAELGDVKRFQNKRALASYAGLTPVVRESAGKRKRGGITHQGSNTLRWIMLQVAQVAARCSPGARSFYAGLRQRKPAQVARIALARKMLTVVWALLHHGVCFDEALFIRG

SEQ ID NO: 134392 - protein, 314 aa, unidentified
MTIACAAGVDVGRDFLDVAIAPLGSAFRQANAPAGIAALVRRLQRAGVQRVVLESIGSYGARLVRALADAGFQVGVVDPKRIRALRLAEGRRAKTDRLDAELIARFALLMSDAARAIPGAEALAIRALSTRRRQLVEMIAMEKTRLKQLAGLDEEIAESCRRTIAQLSAERGQLEARLRERLLAQADGQARGELLQSIPGIGPAVAMTLMADMPELGSLDRKAAASLAGLAPHPNHSGTRLDPGHIQGGRPCVRTALYMAALAAARADAGFRREYQALRASGKPAKVALIAIARKLVVTANSVLKRRQPWTPAP

SEQ ID NO: 134393 - protein, 400 aa, unidentified
MNDSDEIGVFLGLDVGKSAHHGHGLTPAGKKVFDKQLPNTEPKLRDVFDKLKTKFGTVLVIVDQPASIGALPLTVARDTGCKVAYLPGLAMRRIADLYPGEAKTDAKDAVVIADAARTMPHTLRSLELTDQITAELTVLVGFDQDLAAEATRTSNRIRGLLTQFHPSLERVLGPRLDHQAVTWLLERYGSPAALRKAGRRRLVEVIRPKAPRMAKRLIDDVFDALDEQTVVVPGTGTLDIVIPSLARSLGTVHEQRRATEAQITVLLEDHPLAKVLTSMPGVAVRTAATLLVTVGDGTNFPTAAHLASYAGLAPTTKSSGTSIHGEHAPRGGNRQLKRAMFLSAFAALHDPASRTYYNRCRARGKTHTQALLRLARQRINVLFAMLRDGTFYEPRTPRLT

SEQ ID NO: 134394 - protein, 342 aa, unidentified
MKSTTIAVDVAKEVLEVAVSVRPGQVIQQKRLSRTAFMKFCTDQPPATVLLEACGSAHYWGRQLQSLGHRVVLLPPHATRPYVLRNKTDRTDTRGLLEAYRNEDIHPVPVKSVPQQALTALHRLRSTWLAARTARLNTVRGLLREFGCVIPVGAHHVLPRAWDLLADADSGLPDALRPALAEACTEIRQLEDRVRLVEHQLEALADQTPAVARLRSIPGVGLITATALVAFVGDVQRFPSGRHFASYLGLTPREHSSGLIRRLGSISKRGDVYLRMLLTHGARAVIWKAKSRRDPDRLRAWALRVQRLRGHNKAAIALANKLARIVWAVWKHDVDFREVTAA

SEQ ID NO: 134395 - protein, 348 aa, unidentified
MYHCGLDGHLKTTQICVVNDAGKRVLEENLDTATTDLEALLGPLVRDGLRVGLETSSLSYHFNDRLMAIGVTPQVWPANKLRVISESRSKTDRNDARWMAELLRAGCHPRGVRIPTEPERELRDLLVARHLLIAKRTSIVQNAKSIALRQGVSMKKRNLCLERGWVQLLADPTLTPARKEVLAELHSAWKSLADSTARFTATLEARASADPSAVRLRTIPGVGLLSSLWLLSALGDAKRFNRSREVGRYLGVAPSVRSSAAVRMNGHITREGRPEVRWAWGQAAHAFVRSRASQGLLLRVWFEETAKRRGKKIAITALARKLMVIAWHMLKEETEFHGLRAQEVAEIR

SEQ ID NO: 134396 - protein, 349 aa, unidentified
MDFIAFDAHKHYTWARSETPEGELRREERIEHEKGSVKKFLSKCERGSPVAVETVGNYYWIVDEIEAAGFEPKLVHARKAKMMMACTNKTDKLDAKGLNRLQRVGTLPTVWIPPAEIRDKRELPRTRMMLVGLRTKLKNRVQSALAKYGLVVDGVSDVFGKKGRERLGRVLESLPRYTRQTTELLLTQIDSLDASILELEKEMQAVFEPTPEAAILQTLPGVGSILSVVIATEIGTVERFPSAENFASYSGTTPTEHSSGGKTRMGGLRKDVNQYLKWAFMEAANCVARYARARRDAHVSRLYLRIKSRQCHQKAVGAVARHLAEATFWMLKKKEDYRSPESPKSSKGR

SEQ ID NO: 134397 - protein, 408 aa, unidentified
METVIKRCCGLDVHKKTVVACVRVEETPGRVHRMVKTFETTTSSLLKLGDWLRLERVEVVAMEATGVLWKPVWNLLEGNFDLLLANAHHIKKLPGRKTDVKDSEWIAELLAHGLLPASFVPPAPLRELRDLTRMRVNHSDEAVRLYNRMEKTLETCNIKLGSVASDLLGKSGRDMIAAIVAGTTDPAVLAELACGRLRGKIPQLREALTGRVTEHHRFMLGMYLQQWDFLAKRIEEVEERIERLMLPFKDEIERLTSIPGVGRIVAWTLVAEMGDMTAFPTPPQAASWAGVCPGNHESAGKRQSGRTPKGDVWVRRALNQAAWAASRTKDTYLAAQFRRIASRRGGKRAAVAVGHTILVISWHLLHRKRTYHDLGGDFFDKLNSERTTKRLVKRLETLGHTVTLTDAA

SEQ ID NO: 134398 - protein, 337 aa, unidentified
MHYIGLDVHSKNFTVAVMDRNGQVLLEGHRPTSEHNLRDVVAGVSGAKVVALEETTVAAWVYRVLKPHAYRVIVCDPRHNELIAKSGHMTDAQAARQLADLARGKFVKAVYHPADEGRQAFRELVQSYHQLQRELVRVKNQLKAKFRQQGIPCAGSDVYQPHQRGFWLAQIKHDDVRFQVEMMMETVEHLMEQKVAYLQRLKQRAKAFPEIAAFQALAGIGLVHAATFYALVDEPQRFANKKRLWSYCGLGIAQRSSDGMSSPPHLNRNGNRLLKCVAKSAAQMAVRHGDNAFARQYQRLIANGVKSTNGQLTVARAIIATMFAMWRKGEAYIPREV

SEQ ID NO: 134399 - protein, 426 aa, unidentified
MSKNEDNGRQEQFAAFVGLDWADQKHDVWLRDAATQQTRHQVIEQSPEGLSAWVSGLRQQYPDKRIAVCLEQSRGALIYGLMEYPFLALYPVNPLTLAKYREAFRPSRAKDDRSDAEFLCELVTQHRDRLQLWRPDDEQTRLLGLLNEGRRAAVDLRTQMVQQLLATLKKYFPQALVLIGDDWEGPMVCDFLLQWPDLPSVQRSKPESVRAFYYGHNCRHPEVVEQRLALIQQAKPLTTDSAIITTCSMTVKMLATQIRHLNKAIADYQKQIAKVFAGHPDANIFRSFPGAGNALAPRLLCVFGSDRDRFASPTDVQNFTGISPVIERSGKSTWVHWRWAAPEFVRQSVHEFAKCSLPRCAWANAYYQMQRERGKGHHAAVRAVAFKWLRILFRCWKDRVPYDEAVYLQSLARGGSAILKYMATPA

SEQ ID NO: 134400 - protein, 349 aa, unidentified
MPRRVKKVVLLENGEGKRKNGAIMGIDVHRSILAVCILNEKSFLYEQNHTNNKAGLETILKLVKKFKVRGVAMEATSTYHLKICFALIDHSIPVLLACAKQTADTQGRKTDKLDARRIAVAHRDGRLKPSVISPREFTHLRRSTRKLVMLIQDQTKSKQRIQQLFQLYDCHLTAIQPNLLKTKWSLDLLLACLEITENIGNKNIKELVLEYYPEKKQKFASSSQINSLQDEIENLLNQLTLVEKINLQTELYQIRIFDKLIEQHRLIYRIFAKEHPQFKNNMELLLTIPGVGPDTAAIVLAEVVDVKLFSKPEKLVKWSGLAPRVLQSGHRKKKTEKSIKEVINISEGL

SEQ ID NO: 134401 - protein, 355 aa, unidentified
MKRTTKYVGLDVHQATIVAVVRDETGRVIARTILPTEAAARTAFVGPWRGRVEVAYEEGTQAQWLHDLLRPLVARVVVCDRRAVRRQGNKSDWRDAEELAAMLQRGAIRSVYHGGGPQQAELKELTRTYVTLVQDATRVMTRVKALYRARAIPTRGRGVYHAGERATWLAKLPAGGVGFRATTLYRQLEVLLALRTGAKAALLGAARRDPAWALLQTIPFLGPVRVALLLGIVQTPWRFRTKRHLWAYAGLAVVTRTTAEYTLEGRTPVHRRRAPLTRGLNRNHHRLVKALFKGAATAATARPGALQDWYQQRLARGMRDELARLTLARKLAALTLHVWKTGEAYDPAKLTRPAG

SEQ ID NO: 134402 - protein, 382 aa, unidentified
MAGTEPHAWGTGLMDDITYVGLDVHKATVCVTVAESGRGGEIRQVGVFENRPEILCKMAARLGKGGRRLSFCYEAGPCGYGLHRLLTGCGHSCIVVAPSLIPIKSGDRVKTDRRDAMMLAKLHRAGELTAIWIPDAAHEAIRDLVRARATAGQVLSKARQHLQGFLLRHDRIYRGVRAWTLAYRRWLTTVRFEHPAQQIVLQDYIHAVEDAEARRDRLTRQIEEMLPSWSMAPVVTALQAMRGVALVVAVTVVAEVGDFRRFANARQLMAYLGLVPSEHSSGSTIRRGGITKAGNALARRVLIEGAWTYRMTARVSRKLHDRLEPLSAAIRDIAWKAQVRLCARYRRLAAAGKPKVVVTTAIAREMVGFIWAIARIAQPALA

SEQ ID NO: 134403 - protein, 423 aa, unidentified
MKYALVTFLPDVPPGGVCAGIDWADAGHAVCVVDLGGRVRDRFAVAHDRAGIAALTARLRGNQAAEVAIERGDGVLVDALLAAGLTVVVIGSRQVRNLRSRYGSSGAKDDRFDAFVLADTLRTDRARLRPLVPDTAATLALRAAVRARKDLVTHRVAACNQLRAHLQVAFPGAVGLFHELDSRLSLEFLAAFGSCRAAAGLDEQAITAWLAGVPHRGRTAPPAVLAARLAAAPPGCGDDAAQAAVTAQLAGAVAGLAARIKALEEHIAAQLAAHPDAHVFTSLPRAGTVRAARLLAETGDCRARYPDPWSLAGIAGIAPVTRRSGSYLSHHFRWNVNRHLRDAICDFAADSRHASPWAAAIYTAARDRGKDHPHAVRITARAWSYVIWRCWQDHTPYDPAKHTALQAILTRQDTTPHTTATNP

SEQ ID NO: 134404 - protein, 343 aa, unidentified
MQAITTIGLDIAKSVFQVHGVDAEGNVVVRRQLKRRYVIAFFQKLLPCLVGIEACASSHHWSRELQALGHKVRLMPPAYVKPYVKRQKNDATDAEAICEAVSRPNMRFVETKTPEQQSCLTLHRTRHLLIRQQTSLVNAIRAHLAEFGIVAPVGRRGVDELLRIVDDPSDDRLPEVARACVAALGAQLRMLKTQILQFDRMILAWHRSHEMSKRLDKIPGVGPALATALVASVADPKAFRSGRDFSAWIGLVPKQNSSGGKDKLGSISKQGDRYLRSLFTAGALAVIRYAQIHGTGHRPWLTTLLARRPTKVAAIALANKLARMAWAMMAKGECYKEPAALAA

SEQ ID NO: 134405 - protein, 354 aa, unidentified
MPTVADVVDAVTAVDTHADTLAAALAAPSGAVIAEAEFPAGRDGIGALIGWALQAAPGPRLLFAVEGTRSYGIGLARALAALGLPVIELERPARAERRGRGKSDPIDAALGARKALGLDAAALPTPRADGDREALRILLVARADMTREKTAKTNQLIALLRGGEDTERDLVRDTLTPAALTRIARRRGSATDGREQAIRRGEARRLAVTISELERSLAANKKQLTELVNELVPGLLDRPGIGPVSAARAVVAFSHRGRCRNEAAYARLGGASPIQASSGKIVRHRLNRGGDRQLNRALHDIAKTRMIHCPRTRDYVARRRAEGLTNREIRRCLKRYIAREIYRTLNHAEALDNT

SEQ ID NO: 134406 - protein, 423 aa, unidentified
MGIPKPVDLKTCKQGGDTVNPLYVGIDVSSKTNVTYLMRPDGSKYSSFSVQNNVGGAKILSDKIVSAMNTLKLNDVVIGMEATSIYGDHLVHELREDGSLGQFQRKIHVLNPKQVRKFKDAYSDLPKNDFVDAFIIADHLRFGRIASEVYMDDYRYEALKTLTRARFYAVQNLAREKQRFANYLFQKYSELAQDSDLKNTSATMLNLVSDFESVDDLANVPLEDLAAYIEKSSRGRFTDPEAVAKQIQAAAKGSYRLPKTINDSVNQAMSASIATMRAMEAQIKALNKAIEQQFEIIPNTLTSIPGIGPVYSAGIIAEIGDIHRFESQASIAKYAGLVWTQHQSGNFEAERTHMIKSGNRFLRYYLLEAANSVRRCDSEFRRYYDLKFKEVNVGQHKRALALTARKLVRLVFRLLKDNRLYIP

SEQ ID NO: 134407 - protein, 407 aa, unidentified
MIFVGNDWAEDHHDVCVMNQSGKTLAIRQFDHGIGGVAMFHDLMAGFVSEPSDVVIGVETDRGMWVEALVAAGYLVYAVNPKSASRYREGVTVSGAKSDKADAKVLADMVRTSRHMHRLVAGDSDLGHEIKIVARTHQTLIWERQRTRNRLRAALLEYYPGALATFDDIADRDAVSVLVVAPTPAQGARLTTAQIARALRRGGRQRNIDATAKRIQAGLRTDQLAASEGVTAGFGELTTSYAAMIATLNTQISRLAGKLSERFLEHPDAEIYLSMPGIGVILGARILGEFGDEPGRYSDARAFRNYAATSPITRQSGNWRSVEARWIRNDRLTDATIQAAGKAIQNSPGAAAFFGKHRAKGDPYNKAIRAVANKMIGQLYGCLTSGTVYNEHIAWRSLQTTQIDKAA

SEQ ID NO: 134408 - protein, 394 aa, unidentified
MIYVGIDVASTKHDIVISSESGELFKKAFSIKNDLDGYKKLLSEISSAKEFFNDLNVRIGLESTGHYSRNILHFLILAGFEVMFINPLLTNMDRKAASVRKTKTDAIDAKAICMFLIRNQNDFKPYTLSSYHIDELKTLVRQRKSLKTQINKEMNLLHAYVIQAFPEYYKIFKKINSKASMEVLNRYASLSEFKRVRLETLKELIRKSSQGRHGIREAQMLKELNSSSIGIDSSALSFSIKQTIKRILMIKEQICDIEREITHHVDESHTTLLSVPGVGYTTGAIILAEIGDIHRFKTDDQLLAYAGLDPSVYQSGNFEGSYKISKRGSSILRFAIYHVAQAAVKFDPVFKAYYLKKKAEGKRHRVIIGHVTKKILRVIRSILKNNSTYSINTH

SEQ ID NO: 134409 - protein, 462 aa, unidentified
MPAREERETADKSRRQLEGLPVIRASVAGIDLGSEQHWVCAPTRDRSGREVASFGATTAELIRMAEWLQARQVESVAMESTGVYWIAPHEVLEGQGLQVLLVDTRQLARVPGRDKKSDPTDCEWIQRLHSCGLLRGSFRPEAAICILRTLVRDKANLVAESADWLRRMQKSLDQMNVRLHRAVSDIDGVTGMAILRAIAGGERDARKLAQLRHGRCSKSEQEIADQLSGHWREDHLFSLQQALKMYDAVQERIAAYEQEILRKLGEMEREEQRGQTAPPLNNTNKARAIKNRGQEPRRQALYRMSGVDITQIDALAVETVEVVLSEYGPDLSRFPTEKQFVSHVTLAPHVPKSGGKPVKKKKRNSASTRVAAALRMAALSLRHSQTALGAYYRRIAQRRGGDIAVFASARKLATLIYRLLRWGQPYVDEGEAAYENRYRQHRIGRLAATAKELGYQLTPVPA

SEQ ID NO: 134410 - protein, 378 aa, unidentified
MTRIMRYVGMDVHAETIAIVVVEADGSERDLGVIANRPEAIRKCLKRLGPAEELHCCYEAGPTGYGLYWQLTQMGIECTVAAPTLIPTKAGDRVKTDRRDARKLARYLRSGDLTAVWVPDTAHEALRDLVRARQAAKIDEKRARHRLQKFLLRHGQRPPQGVNAWTARHRAWLAVLQLEPPTLQVVLQEYLHEVLHSEQRVRRLDTAIEQAVEGAPEAIRAVVEALQGLRGVRTVTAVGVMAEIGRFSRFAHPRQLMGYSGAVPSEFSTGGPGKHQRGAITKAGNAHLRRLLGEAAWCYRYRPAVRYPLKKRQEPLSPKVIDISWKAQLRLCHRYRRMVARGKLKQKVVIAVARELLAFMWAIGVEIEKRHEPPRAAA

SEQ ID NO: 134411 - protein, 336 aa, unidentified
MSKKTTLKQCLGIDVSMKKIDCCLSFYTGELKIKVLATSGFDNNPGGFVKLREWLGRKQDNGLPLYVNMEATGTYHEEAAYFLAGVGYRLSIIQPTKGKQYAKSLDEKNKTDKIDAGMLARMGLERELTLWNRPDEQLRLLKRMSRERIGLIRDRNALTNQLHALNHSFEAFGDSVERLKERIALATKQLGEIELQMREMAESDPKLWKRISHAITIPAVNFVTAITVIDETDGFANIGNRRQLVSYVGLDVVMKESGTLTWRPHISKRGNAYIRAGLYMAAVSSIIHNKTLKTYFNRLKDNGKPGKTGIVALERKLLVLIYTLYKNGQDYIPDHR

SEQ ID NO: 134412 - protein, 462 aa, unidentified
MSKTKRPATLENLAVVHPNAAGLDIGAREIWACVPPGRDVETVKRFNTFTPDLQALADWLVACGVDTGAMESTGVYWIPVFELLEARGLKVYLVNSWHLKHVPGRKSDYLDCQWIQKLHSLGLWNGSFRPDGEMVTLRGYLRHRAQLLEHRAPHVLHMQKALQQMNLQLHHVLSDITGETGLKILRAIVAGERNPVKLAQFRNPACKSSEETIAQALTGSWKAEHLFTLRQSLELYDFYTQQVTACDAEIEKQFAAMKPRWAGPEEPPDVPRVKPGSKSKNQPKLNVRREIIRLTGVDLVAVEGISASLAQTILSETGTDMSKWPSDKHFGSWLGLAPHNDISGGKVLRSRTLKTHNRAGQAFRQAAASVIRSGSAFGAYYRRKRGQLGPMQALVATAHKIARTVYYMLKNRVQYHDIGAEAYEQKQKEREVAYLKKKAAKLGFDLLSHDSTAAIARAVAMV

SEQ ID NO: 134413 - protein, 349 aa, unidentified
MSRNLNSTVAVIGIDIGKNSFHVVGLDERGAIVLRQKWSRGQIEARLANMLPCLIGMEACVGAHHLSRKLKAFGHDARLMPAKYVRPYSKGQKNDFRDAEAIAEAVQRPTMKFVATKTAEQLDLQALHRVRERLVSQRTGIINQIRAFLLERGVAVRQGLRFLRAELPRILATPPEVLSARMVRVIRDLAEDWRRLDERIDNLSNEIAVLARQDAGCERLMSVPGIGPIISSAMVAAIGTGEAFAKGRDFAAWLGLVPKQMSTGDRTILGKISKRGNRYLRVLFVQAAWVVLIKPMSWERHGLKHWIEAARKRLHRNVLAIALANKLARIAWGVLAGSRAFEASKLQAA

SEQ ID NO: 134414 - protein, 346 aa, unidentified
MLYAGLDLSRQRLDVLVLDEDGRTVEVTAVRPDVDALRTLAAHVLRHGQEVSAAIESMTGARFVHDTLEFAGWDVAIADAAKVKGIAPLAAKTDKIDARVLAELARRDLVPEIWLPTPEVRAERERARFRLHLVHHRTALKNRIHATLMTFGHPVSVADLFGVAGRELLAGLALPEPWATTLSTSLRMVDRLGAEIDACERDLRRLGADHPSIPLLLTVPGVGWVLAYTIASEIGDIGRFSSPKKLTGYTGLCPLVRQSGNRDVRGPLAKNGPKYLRWALIEAATHAARDVHYRERYERTKQRLGRQRGAKVARVDIARKLAEAIWHVLTKNEPFAPAGPTMLLVA

SEQ ID NO: 134415 - protein, 355 aa, unidentified
MKYYTSSTQFNCGIDLHARAMYVCLMDRDGKKLVHTNIKNNDFDYFLKLVAPYRHDLTVCAECMFGWYWLADACQAASLHFVLAHALYLRAIHGGKNKNDRVDSEKIAHLLRSNLIPPAYVYPADKRPLRALLRQRLFYVWRRAELLARISSHQLAHNRAPIRQTRRVRDDWAAQLLAAESHPLRQMALQNDVAMIAHFDRQLTQLEAELQRQAKATAARDYALLQTVPGIGQHLGLTILCEMGDIQRFPTVKDFLSYSRLVKGTVASAGKIKGLRGAKLGNPYLRWAFGEAAVIAKRDSALIGPLAQRLEARMNGNKFKANTVLAIKLARAVYYMLKSKTVFEPDRLVAALARN

SEQ ID NO: 134416 - protein, 321 aa, unidentified
MTSQTESPRFGIDVSKRWLDIAEYGRSPVLHIDNTAQAIRGWLRTLPPGACHIACESTGTYHRALVKLLIGAGHRVYLIDGYTLSRYRDTLGQRAKTDRHDAGLIARYLAHEGARLRPFSLPPRAVTDLRALLRRRATLVRCLGRMRQSMEELPGFTRQVRAVTERIQALIKRLEQRIAALIGTSGWGDPYRRILKVEGIGALTAAGLCATFHRAPFGRADAFIAFLGLDVTVRQSGTQRARGVLSKKGDAEMRRLLYNAAMAASRSSTWQPFYQRMLQRGFSRTQALVALARKLARVAFSLMKNASDYAPKQHENACART

SEQ ID NO: 134417 - protein, 411 aa, unidentified
MENIFVRCAGLDVHKESVEACVRRIEPNGCVHSETRHWGTMTRDLLEMADWLAAKGVTNVAMESTGVFWKPIFNILEIRFTVLLVNARHLKQVPGRKCDIRDCQWIAQLLQCGLLKGSFIPPRAQRELRDLTRHRTQLVEEKTRTINRIQKVLEDANIKLASVASDVMGVSGRAMIQRLIEGETNPFKLADLAQRQLRGKIPELQKALEGKLTDHHRFLLKLLWKELSQQEELIVDLDSKIEEHTRPFAAEIEHLDTIPGVDHRVAEVLLAEVGPDMKPFPSDEHLSSWAGMCPGNEESAGKRRRRRITPGNRWLKQTLAQAAWAASHAKNTYLAAQYRRLASHRGKKRALIAVGHSILVIFYHMIRSGASYADLGADFFDRLEPERLTHYYVKRLERLGYTVTLESSAAA

SEQ ID NO: 134418 - protein, 344 aa, unidentified
MTYYAGIDVSLRTVNICVVDDDGELVAETKLASDVQEIIAYLDELEHNVDIVGLEAGTLTQYLTYGLQSAGFDVVCMEARQVKAALSAMRNKTDKHDARGIAQLLRSGWYSRVHVKSMQSHHTRMLLSSRKAVLDKCIDLEQEVRGLFKIFGIKLPPKLGHGSFDRAVRAIIEADEALSHALLPLLEARLVLYKTFRVLDNRTRHRAQGDPVCQRLMTTPGVGFVTALTFKAGVDDPSRFKRSRTVAAHFGLTPRRRQSGEIDIEGRISKSGDAEVRRTLYNAANSMLTRSSQWTPLKAWGMKLTKTRGHKKAVVAVARKLAVILHRMWIDDAQFRWGTEGVRS

SEQ ID NO: 134419 - protein, 435 aa, unidentified
MTSRLQLGIDFSTKSADVCLLDAAGQRLVSHQRFANSLPGYQDLKQLLLETLSAQAGPGLDISGEATGMYWLPFFLQLARDPELAAHQTRLYLLNPRWVAWYKKCFAPQDKSDSQDAYYIADHQRLHPATQPWEADLATLGLRFYTRFRFHLVQDLAREKSFYCAYLFLKANAYRRLQPFSDVFGATSRLVLGQAVSLDELAALPVRALSAELTAMSHQRLRDPLRNATRLQRVVRESFSLPAELALPVQRILDTTLELIAALEARIAQVEDWIAADLEAFPAIRHLATVPGIGPVCSAGIGAEILPLDRFLAPPKWDTRRRRYRPRNLRDVEDAVAKQAGLWWPRAQSGDFEAEERHMSKAGNAYLRYYFIQAAEQLRRYEPEYRRFYQRKYRESTRFKHKRALVLTARKSVGLCVGLLHRNEPYRSPEVHRTT

SEQ ID NO: 134420 - protein, 379 aa, unidentified
MLNEETRRELNANPNTLYIGADVGASEMKLAAADRQRNKPLEKTLEPFDDVGLMDWLKAVRKGLGLEAGPVVFVHEAGRDGFSLHWWLEMLGVHSVVVDPASIETSSRRRRVKTDRLDARLLLTKARGYFGGDGGVFSVVRVPSEEVEDARRVSRELKALKEEATRGKTRINGLLAQKGVKLALSKDFVARLKEVMTPWGTSLPPHLKAEILRQVERLELVESQIAQLEQAHQVAMAEGATDADRQGAKLVQLVSIGMATAVTLPKEFFWRDFKNGKEVGAAAGLTGTPRVTGTSTDIEQGISKAGNSRVRTLMIEIAWMWVRLQPNSPITQWFYARVDGTKRSKRKNIVAVARKLLIALWRYATMDVVPEGARLKTAN

SEQ ID NO: 134421 - protein, 448 aa, unidentified
MKAKSKENSKELRKTNKTTQPTTQQPQWHRMNRKQRRELARSIQSEEISLEMVHPDAAGIGIGNEVHYASVPPNRDSEPVRHFGCTTAELKAMADWLKQCKIRTVAMQSTGVYWIAVFDILEEAGFEVYLVNARDTKNLPGRKSDVQESQWLMKLHTYGLLRNSFRPAQEIRRLRTYWRQRNDLVRSASRHIQRMPKVLTQMNVQLANVLSDISGMTGQAIIKAILAGERDPRELAAYRDWRIKASEEEIAAHLQGNWQEDLLFVLKQEQDGYEFCQKQMSECDRQIEHYLAQMEDRSQGADLPEEKRKTRLRKKKGNTPGFDLRQELFRITGKDLTQIDGVDVMTATTILSEVGWDMSKWKTENHFVSWLRLCPDNKISGAKIIGKGRLPTNNRATNALKMAASGLRTSNTYLGAQFRRLRTKLGAPVAIKAMAAKLGFQVSEIPAA

SEQ ID NO: 134422 - protein, 332 aa, unidentified
MYLGIDVHKRYAQVAVMDEAGKIVEEVRVENENLDDLAQRYAGAQAALEATSNYYHIHDTLSEHLDVAVAHPQELTQIADTDKKTDRVDAKELARMVRLNAVPESYVPTDEIREARALVRGRQTLVEDRSKYANKIHGLLSDQGITEEVKPLNVKGREFLQELSLPMPWDTLLESYLDVIERLTEEIQELDETIEERAGSLKETQLLMTIPGVSYYTALTIYAELGEIDRFDGHKEVVSYVGLNPVIRESGDSRIEGNISKRGSSRVRWLLVQAANTAVHTCNDKYLSRFYDRLASRKNSQKAIVATARKMLVSIYHMLDRGEVYDPPGVSS

SEQ ID NO: 134423 - protein, 348 aa, unidentified
MKVLIGVDPHKASVAVAAVDEAKGELLERASFLQNRAGLRALERWAKRFPERRWAVENAGGLGRHLAGRLAAAGESVVDVPPKLSARVRLLSSGNARKNDGLDALATALAASRNGRLAAVDPEVGSEVLRLLSERREDLVAERTRALNRLHGLLRDLVPGGVAGTLSAPRAARILRGLLRPQEGASARLRRRLASEVLHDVRTLDRKIADLNGRIEAEVGASGTTLTEIFGIGPILAARIIGTVGNVARFPTKAHFASYAGTAPVEASSGEVVRHRLSLAGNRKLNYAMHMVAVCQARSDARGGRYYRKKIAEGKSRKEALRCLKRRVSDAVFKSLVADSQAPSRSAA

SEQ ID NO: 134424 - protein, 330 aa, unidentified
MNIGQEVYIGLDTHRQTINGTALDTAGNIICNSDFPNTKEALMEFMKGFYPWYSYIAIEACNFWRGPYKILNELGYKVKLANPVKISQIAKDKKTDEIDSKILADLLRVNYLPEVYIPSDEILALRDLTRHKINLMRLKIRLQNKIKAQLSRNGISYEKKLWNKEGIAWLKKLKSYEIDSLLGIWKSLAKEENSVKRKIVGMARVKEETILLETIHGIGFYGAMIIYAEIGNVDRFPTPKHLQAFSGFSPGIRQSGTKTKMPKRANVNYWLKFIISQCSGRVTLKKCKLQRHYFRMKKKKGWKIARKSTGRVMLSIIWHVLKEKIPYQES

SEQ ID NO: 134425 - protein, 345 aa, unidentified
MNKLSVVGLDLAKNVFQVHGINTDGEVVVRKQLRRSEMRKYFAKLEPCLIGMEACGGAHYWSRELTGLGHTVRMMAPVFVKPYLKSNKNDRNDAEAICEAVQRPSMRFVQPKAPEQQAVLHLHHGRQLLVRQRVALSNHMRGVLSEYGIIVPPGVKVLSRQLPEILEDAENALPMLARHLLAELKAEHDQLIERVDRFEKQLKAWHANSTVSQRLASIPGVGVLTATALAATVGEGQDFKNGRQLAAYLGLVPRQASSGGKDRLLGISKRGDGYLRCLLIHGARAVIHHIRRRLKAGRPGGNPWVEQLLLRCHVNEAAVALANKMARTAWVLLARNETWCPARPV

SEQ ID NO: 134426 - protein, 403 aa, unidentified
MNAVGIDVSKGKSMVTILRPFGEIVSSPFEIKHTSSDILSLIKLIHSIEGESRIVMEHTGHYYEVLAQQFSAAGLFVSAVNPKLVKNFNNDSLRKVKSDKADSIKIARYALDKWQNLKPYSIVDELRTQLKAMNRQFHFYVKQKTAMKNNLINLIDQTYPNANTYFNSPPRSDGSQKWVDFVYTYWHVDCVRKMSLNSFVKHYQNWCKQKKYIFNKSKAEEIYTKATELVPVFPKNEITKRIIRQAIAQLNSTSATVETIRILMNETASKLPEYPIVMQFKGIGPSFGPQLMAESGDITRFTHKGALTAFAGVDPGVNESGSYAQKSVPTSKRGSSNLRKTLFQVMDVLIKTMPQDDPVYQFMDRKRAQGKPYYVYMTAGANKFLRIYYGRVKEYLCILSESS

SEQ ID NO: 134427 - protein, 311 aa, unidentified
MSEQITVGIDVSKDRLDVHIRPSAEAFVVPRDGPGLAALVDRLRPIAPHLVALEATGGLEGVVVAALVGADLPVVVVNPAQVRSFARALGKRAKTDPIDAAVIAHFGEATAPEIRPMPDAATRLLADLVARRRQIVEMIGSERQRLRHAPPIRVKRSIERLLRALEKELADIDRDIDGAVRGSPAWREAEDLLSSVPGVGPVTSRSLIAELPELGTLDRKKIAALAGLAPFTRQSGTWKGKSFIGGGRTVVRTTLFMAAFVATRFNPVLKAFYQRLLDAGKPKILAIVAVARRLLTILNAILRDRRPWQNA

SEQ ID NO: 134428 - protein, 403 aa, unidentified
MTYNVVFGIDVSSKSSTVSVLIKRNEFKHFTIANDLVGFNELLEQLQCYKHPVVIFEATGVYSLPLQSFLDHHNYDYTRINPLSAKKLMDNNLRHLKTDRTDAHNLAKIQFDVPQPLTPKQDYRYHEMQNASRFYEELTRDLVKYKNRLHRALQSTFPQIEQISSSRSGEVYWHIVDLFPHAKFVLDSSYDQIASQLVRIKGIGASKANQVACSLQSLAQRTWYYDDCDSITVELIKYCIEHLLQIEQRRKHILAYIKQIAPNPKDVQIYLSVPGIGKKTALRIYAELGDLRRFNNANQVDAFIGIDPGESQSGNTDKHLPITKHGNAIARKIMYRIITQMESAKKTKPCHITDYYEHKKQLSQTKGHKKAAIASMHKLIRTIYALIINDQSYDYHKALRNQR

SEQ ID NO: 134429 - protein, 408 aa, unidentified
MNPLFVGIDVSSKNNVAYLMKPDGSKHSSFSVQNNLGGAKLLSERIVSALGSMQLSDVVIGLEATSIYGDSLVYALREDGSLGRFQRKIHVLNPKQVRKFKEAYSDLPKNDWVDAFVIADHLRFGRINREVYMDDYRYKALQTLTRARFDVIQNLTREKQRFANYLFLKCSGMAQGKDIQNTSATTIALMERFETVDDLANADPNELTDFIAETGRGRFADPDGTAKAIQAAARASYRLPKTVNDTVNQAMAVSIASMRALEKQVKVLDKAIEQQFEIIPNTLISIPGIGKVYSAGIIAEIGDIHRFDSQASVAKYAGLIWNRNQSGDFEAEHSRMIKSGNRYLRYYMLEAANSVRRCDSEFRRYYDLKFKEVNKYQHKRALALTARKLVRLVFRLLKDNRLYIPPEG

SEQ ID NO: 134430 - protein, 367 aa, unidentified
MKQSSKVFVGMDVHKESIDITLAEQDGEVGRFGTVGGDRVSLLKAVRKLTSRGRALVFVYEAGPCGFWIYRELTALGHACLVVSPSLIPRRSGDHVKTDRRDSENLARLARADELTGIHVPDVRDEAIRDLVRARDDALITQRRARQQLKALLLRNEIRYLNKSSWTAAHLRWLGELKLAQPAQQIAFQEYVDAITAATGRIERLVQAIGNEAATWRFAPVVAALQAMRGIQFLHAVTLVSELGDLTRFGSARQLMAYLGLVPRENSTGEHRHQGAITRAGNAYARRALVEAAWAYRFPARVSRLIATRQSGLPKVACDIAWKAQLRLCTKYRRLSARRVNPNKIVVALARELSGFVWAIGQCVKPH

SEQ ID NO: 134431 - protein, 356 aa, unidentified
MTNVKTNFAEQTIFVGLDVHKRSWNAALYLNDQYLRNVHQPPSPQALSKFLQTNYPGADYVCAYEGGKFGYWIQRQLSGKGIHCIVVNPADIPSTHKDEVSKTDVRDARAIAMALQCGQLRGIYIPSRQQESDRSLVRHRKKIWRDLVRCKNRIKGFLDYTGVALPDKFSNSNWSRNFLQWLSTIKFDYASSRTTLDYMIREAELLRKELLSISNDIRKLMRSKAYNKLYYLLRSVTGIGPLTAALLITEIGDMKRFPTFYQLNSFIGLLPSEHSSGEKELKGRLTIRRHRQLRSDLVECAWTAKRTDPALSLFYHDQLKRGKEPKLIIVKIARKLLSRIRYVWLTEKAYEKGIVK

SEQ ID NO: 134432 - protein, 316 aa, unidentified
MSEFTSFVGIDVSKDALDVWVLPKAQQWQVANDQAGCAQLVERLKPLGETVLVVMEATNVFWRMAAAALAGAGLACAVVNPRQVRDFAKSMGKLAKTDALDAQVLALFAQRVKPPVRALPSAQCQLAAELLGRRAQLMGMQVAEKNRLASASAKRVRKDIEATIAFLEKRLGALDQEIDSWLQSTPIDQSRADLLQSFTGIGHNTARSLLITLPELGSLSGKQIGALAGLAPFAKDSGKKRGQRHIAGGRSIVRAALYMPAISAIQHNPVIRALYQRLVQAGKHHYVAITACMRKMLVILNAMLKSNQPWKAPQNP

SEQ ID NO: 134433 - protein, 363 aa, unidentified
MKKVSKQQLAMETTKDKPGMTIGLDLGDRYSHYCLLNGECEVVEEGRIQSTESAFRRHFEGEARLRIALECGTHSPWISRLLKKLGHQVIVANARKIPAITSSQSKNDRNDAELLARFAAHDPQLLSPVQHRSLERQQDLNLIQVRSTLVRARTMMANALRGLVKSAGGRLPACSTESLPTRAKMAIPPALTTVALPLLQQIATLSRQIDAMDGQIEKLAKKYPEIAVLRTAPGVGPVVAAAYVLTLDRPDAASNRSAGAYLGLRPGQSQSGESDPQRRISKTGDSYLRSLLVQSAQYILGRFGPDSALRRWGLKLASTGGKRGKKRAIVAVARKLAVLLHSMWRSGQGFQPFPQTATAATLA

SEQ ID NO: 134434 - protein, 343 aa, unidentified
MQAVTTIGLDIAKSVFQVHGVDAIGNVVIRRQLKRRYVLAFFQKLAPCVVGIEACATSQHWSRELKAFGHTVRLMPPAYVKPYVKRQKNDAADAEAICEAVTRANMRFVATKTPGQQSCLMLHRTRHLFVRQQTAVINAIRAHLAEFGVVAPVGRRGVAELLDVVVDSSDERVPEVARARVAALGAQLRMLKAQILEFDRQIMAWHRSNETSKRLDEIPGVGPALATALVASVADPKAFRSGRNFSAWIGLVPKQHSSGGKDRLGSISKQGDRYLRSLFTAGALAVIRYARIHGTKHRPWLAALLARRPTKVAAIALANKIARIAWAMMTKGERYKEPAALAA

SEQ ID NO: 134435 - protein, 371 aa, unidentified
MKKSSMFVGLDIHKTSIEIAIAEAGRDGEVRSYGGIDGTLDALDKVVRKLVSKGCNLHFVYEAGPCGYDVYRHLTAQGFDCVVVAPSKIPRQSGNRIKNDRRDAQMLARLHRAGELTAVYVSCVEDEAMRDLTRAREDAKAMERKAKQRILAFLLRHGHCYSGKSPWSRAHFRWISILKMPHPAQQIVLQESLDTLAECTRRVDRLTEQIQILSPQWRLFPITQALQTMRGVSLIVATTTIAEIGDLTRFKKPTELMSYLGLVPSEHSSGRTTRRGSITKTGNGHVRRVLVEAAWAYRLPARVSRKLLIRQEGVSQEVCAISWKAQLRLCSRYKRFITKGKSHQLVVTAVARELCAFMWAIANEVQGPIKG

SEQ ID NO: 134436 - protein, 314 aa, unidentified
MKMAMLSFCGIDVSKDRLDVVVLPEGWFFSVSNDTAGWAELVVRLRPLTVSAIGLEPSGGYERGIIRALLAAGLSVRRINPNKLRQFARARGVLAKNDRLDARLIAEYVAIMPTRVVQRDAAVERLAEIVTMRRQLCDEHVAAENQAAHLEDAMLRRLSKRRQMRLEADIRLLDKRLAEMVAANVALAQRYELLTSMPGVGPVLAFTLIALLPELGKMTRKHIAALVGLAPYDFDSGKLKGHRSIYGGRMPVRNVLYMAALSASRYSPALKTFHKRLAAADKKSKVIIVAVMRKMITTLNAMLRDSAAWQPRSA

SEQ ID NO: 134437 - protein, 364 aa, unidentified
MKIVGCDLHARQQSIAMVDTETGELSEKRLMHEGNAVRDFYASLEGPVVVGIEATGAMQWFLELLEELGIECRVGHPAKIRAAETRKQKHDRRDAEVILDLLVRKDRFPDIWMPSTEQRDLRTLLRDRHQWVKMRARLQHTLQAIALNHALREGRALWTAAGRRALQDLALPPYSAQRRGELLSLYTQLEKRIQQLDKQVETEARQRPRARRLLTHPGVGPVTALATEVFLGDPTRFATANQVASYIGMIPCEHSSGKKQRLGKLTKEGNSLLRYLWVEATLHAVIKDADLKRFYRRKLIQKGMGKARVAAARKLGIRLWIMLRDEIDYEEFCRRGKLRQKGEAHAGMPDFNSGPARAVTGSTE

SEQ ID NO: 134438 - protein, 459 aa, unidentified
MARVQEHRKTRTSKSVEGLPAIRRGVAGIDLGSERHWVCAPTADRTNREVADFGATTPELIRLAEWLTERNVESVALESTGVYWIAPHEVLESAGFEILLVDTRRMAQVPGRDKKSDPSDCEWIQRLHSCGLLTGSFRPPEDVCMLRTLARDKANLVAESGDWVRRMQKSLDQMNVRVHRAVSDIDGVTGMAILRAIAEGERDPRKLAQLRDPRCRKSEEEIAEQLTGHWREDHLFSLRQSLQMYDSIQQRIADYDQEILRKLASMKSDKLRNQPPPKVKNPEKERAIKKRGEEPMREALYRMSGVDLTSIDAIGVQTVQVVLSEYGPNLSRFPTEKHFVSHLKLAPRKPTSGGKPLNKKRSMASTRVAGALRMAAMCLRHSPSALGAYYRKYAQRIAKDVAVFVTARKLATLIYRMLRWGQPYVDEGAEAFERRYQQTRLNALKTKAKELGFQLVANA

SEQ ID NO: 134439 - protein, 481 aa, unidentified
MKPKQREKRQPAIASKRCKWHEMNRKQRRETIRKLQSEDLSLEVIHPDAAGIDIGNESHYVAVPQKRDSQPVRRFGCTTAELRAMADWLKQREIRTVAMQSTGVYWIAVFDILEEAGFEVYLVNARETKNLPGRKSDVQESQWLMKLHTYGLLRNSFRPAQEIRTMRTYWRQRNDLVRSACRHIQRIQKTLTQMNIQLANVLSDLSGVTGQAIIKAIVGGERDPHELAAYRDPRVKASEEQIAQSLEGHWQPDLLFVLQQEQDGYEFCQKQISQCDRQLEKYLLQREDRSHGAPLPEEKRKVRLKKKHGNQPQFDLRSELFRMSGTDLTRIDGIDVLTAATIFSEAGYDMSRWETENHFVSWLRLCPDNRISGEKIIGQGRLPTNNRATIALKMAASGLRKSHTYLGAQFRRLRTKLGAPVAIKAMAAKLARLVYRMLRYGMKYVDQGMEFYETQHRKLQINSLKRKAAQLGLQIIEAAAA

SEQ ID NO: 134440 - protein, 345 aa, unidentified
MSQQYVGIDLHRQYVGIDLHRRRSVIVRTDAVGTVLGEARIENDPLALAAEIAKAGPAPEVALEATYGWYWAADLLAECGARVHLAHPLAIKAFENRRVKNDRIDATLLAELLRMGRLPEAWIAPVPVRELRELVRYRHKLVDIRSGLKSQVHAVLAKEGVRVPMSDVFGVAGTQLLDDLELGDAYLVRVESLRDLIINIDHEVLMLDRRIHERLATNPSYRAVQQIPGVGPVIGAVFVAELGDVTRFRHANQVASWAGLTPRHRESDTKIRRGQITKQGSRLVRWAAIEAARAPRSHSWLKTHYHHLAQRRGKNIAAVAVARKIVTLAFYALRDGEVRCLTRAA

SEQ ID NO: 134441 - protein, 322 aa, unidentified
MHAFHLGIDVAKAKLDCALRLPDGKLRHKSLSNTPSGFAELMLFLSKHQALDVHVCMEATGIYWEAVAEFLSEQPGILVSVLNPFQIKAFAASRLTRTKTDKVDAALIALFCLERSPEPWLAPSPSERALRALVLRLDALQRMRTQESNRLLVARGTVQDGIAEHIQWLDTHSKQLMEQIRKLFDNDNDLDEKRRLLQSIPGLGERTVSVLLAFYAHPERFGNARQAAAFAGLDPRRHESGSSVCAKPRLSKIGHSFLRKALYMPAMVALYHTTWGRLFRERLAAAGKPPKLIIGAMMRKLVHVAFGVLRSAKPFDPAAHGA

SEQ ID NO: 134442 - protein, 312 aa, unidentified
MTSEGFIGIDVSKRWLEVSVYGQAENHKIGNDADGLARLVEEMKALQPQLIVFEATGGYESRAVKALSEAGFAVAVANPTRVRRFAEALGILAKTDKIDAQVIAHFASVTQPAANGRLTDLEEQLAAFVERRRQLLVELVAEKNRLSTCPACVRDGIEEHIAWMEAGVDELEAKIQACILQNPDWRARAEIIDSVPGVGPVTASTLVAELPELGQLCHKKVSALVGVAPFNKDSGPKRGKRRIAGGRSGVRRTLFMAALSATKHNPVIRAFYESLLKRGKEKKVALIACMRKLLVFINAMVKKGEPWRFSPA

SEQ ID NO: 134443 - protein, 337 aa, unidentified
MRQIKFFIGTDVSKEWLDMCIILEGEVIHRQQIKNKETAIRKWLKQTQKQYGYSMQDSLFTMEFTGIYNHHLLELLHQAGANIWLIPGLEINASRGLQRSKNDKDDARLIAEYAIKNLKKVRLWKKPRTVLKQLAALLMMREKLMTSKHQYQTTLKEYKSFSTKDEYLIIKDYSSAILKTICQDLKTIEHQIKDIIEGDEQLKELHEYITSVDGVGIITSANTLVETNEFLDISEAKKFSNHSGVVPHKDESGKKIKKPKVSHKANKKMKKLLHLAAMSVIRKKGELRDYYERKIAEGKNKMSVLNAIRNKLVLRIFACVNNKRKYEKNYVYSLVNP

SEQ ID NO: 134444 - protein, 402 aa, unidentified
MNAVGIDVSKGKSMVAIMRPFGEIVSAPFEIKHTASGINSLVELINSVEGESRIVMEHTGRYYEVLAHQLSEANLFVSAINPKLIKDFDNDSLRKVKSDKADAVKIARYTLDKWQNLKQYNVMDELRNQLKTMNRQFGFYMKHKTAMKNNLIGILDQTYPSVNTYFDSPARSDGSQKWVDFASTYWHVDCVRKMSLNAFIVHYQNWCKRKKYNFSQSKAEEIYGKAKELVPVLPKDDITKLIIKQAVNQLNSASTTVESLRTLMNETASKLPEYPIVMAMKGVGASLGPQLMAEIGDVSRFTHKGAITAFAGVDPGVNESGSYEQKSVPTSKRGSSDLRKTLFQVMDVLIKTHPQDDPVYQFLDKKRAQGKPYYVYMTAGANKFLRIYYGRVKEYLSSLPES

SEQ ID NO: 134445 - protein, 339 aa, unidentified
MKLYVGDDLHANNNFLAIVDLEGKRVDQKKLPNDLFVILDFLKPYQKDIVGIAVESTFNWYWLVDGLMDSDYKVHLANPSAIQQYSGLKHSDDKHDAFWLGQMLRLGILPEGYIYPKEDRPIRDLLRKRRHLVKLRTSLLVSLQNIISRNCGVSFRANEIKRLKEDRVSPLLESNQDLALAGQTSKEMIDQLTRQIQKIEGTVVQRVQLKEAYRYLLALPGVGKILSLTIMLETGPIGRFADVGHYASYCRKVPSRWTSNEKTKGKGNQKNGNKYLAWAFSEAAEFARRFDGQARAYYTRKMRQTSSPVAHSALAHKLARAAYYLMKDQVPFMPEKLFS

SEQ ID NO: 134446 - protein, 318 aa, unidentified
MANQVAVGIDISKKTMDVAIGHEQSTAIFSNDGAGHQALIAALKNHPVSLIVMEATGQYQLACACALQAAGFAVVVINPRQARDFAKAMGRLVKTDSVDARMLAELAQVLNQRPDRDRFIKPMPDQVQQHLHALVLRRRQLVRLLVSERQRKHMAHPEVVQDIAELMDMLATQLEALDRRIAEHLAQYQSDLATLLKSVKGVGPATAATLISELPELGQLKAKQICALVGVAPMNRDSGQARGKRIICGGRATVRSALYMTAIVAMRHNAVIRRCYERLLAAGKPKKVAIVACMRKLLIIMNAMVKTGRPWNDQPAPA

SEQ ID NO: 134447 - protein, 414 aa, unidentified
MTEQIQVSAGLDLYKSFIMATILTVTGEKLLECFDRTQTGVFALKDWILYNKVQVVGCESTSDYWVKIFDLLNPFVRVIVGNARDMKALSHKKTDKIDSEFIALLALKDMIRPSRTFPKEHREFRATVRLRHGIVQKRTSIKNEIHHILDSELFRLSAVLTDIFGKSGYLIMKGILNDMPVNDILALLPASIKKKEEVLREVMQSTLSEGALVRLASCLRIMKTLNEEIAELTNISTNYALVNFPKEFEILRSVPDVGDIVAVTLLAEIGDVRDFSTPDKLASWLGIVPRVYQSTDKLHTGSITKRGSKTARWILIQAAHAAVRARDNDLKTFYLGKKEVIGAGQAIVGVARKMITIIWHLLTNDETYKNNQYLAVKQPKKVYVKVPRETSLEEVLQLLRDAAVVLKEPDPEIC

SEQ ID NO: 134448 - protein, 431 aa, unidentified
MCRELLEVVEVDEIEDWVETVDRVAGLDLGKASLTACIRVPSEQRPGGRSQEVRDYATTTGSLLELADHLRAQSVRLVAMEATGEYWKPVFYLLEAEGFTCWLLNAHHVKNVPGRPKTDKLDAVWLAKVVERGMCRPSFVPPKPIRQLRDLTRYRRVLIRERTREKPRLHNVLEDAQIKLSSVITDLFGVSGRAMIEAMIDGQRDPKALAQMAHGVMRSKIGALTEALRGHFEDHHAFICRVMLQRIDTLDAQIGQLDDKIGQMIAPFAGQVTRLDEVAGIGRTNAQELIAEIGVDMSVFATSAHLVSWAKYCPQPRQSAGHDKQRSTGKGNPYLAGALGEIGIGASRTNTFLGERYRRIARRRGKKRALVATGHSVLTIAWHLLADPDTHYLDLGPDHYQSKINKDRQARALIRQLQHITGQQVLLEPAA

SEQ ID NO: 134449 - protein, 355 aa, unidentified
MSQEKYIGMDVHQATISVAVTDAGGKLIMECLLETKASTIVEFIRGLQGTLSLTFEEGTSAAWLHDLLKPHVSQLVVCDPRKNALLKDGNKSDRIDARKLAELLRGNQLHPVYHGEHGVRTLKELGRSYLTITQDVTRVMNRIKALYRSWAIPCAGTTVYAPRHRAEWLAKIAEPGVRLRAERLYQQLDLLQPVRLEARRELLAESHKHSGVKLLRQIPSIGPIRSALLVALLQTPHRFRTKRQLWAYSGFAVETHDSGEYRSVRGKLQRNRERMTVRGLNDNHNRDLKNLFKSAAISASTSPGPLRDFYVARVEKGIRPTMARLTLARKIAAISLTIWKKGVDFDARQLQRPTA

SEQ ID NO: 134450 - protein, 357 aa, unidentified
MRWDSPRRSATIYSETIAAFLVLNRTVARTLGAKTRRIIAMKNNFVSIGIDISKDFLDICGLGKNFPERISNNINDITKLVDHLLKTRPDLILCEASGGYERLLHMIIEQSGLSLAIVNARQIRDFAKAKGVLAKTDKLDAKIIAQYGELFKPQAKQISRSQELTGYVNRRKQLVEMLKLEKQHLSKICDFRIKDECEQHIDIIKQRIEMLEAKIIAYIEDNQELSEKYQIITSCKGVGIVTASELIVNMPELGTANHSEIAALAGLAPFNCDSGNMRGMRRIKGGRGEVRKALYMATISAISNNNQDIKRFYDKLKQKGKASKVAIVACMRKLLIMLNSMLRDNRKWTQEYQVKSV

SEQ ID NO: 134451 - protein, 414 aa, unidentified
MTEQIHVSAGLDLHKKFILATLLSDTGLKKQLRFERTELGLLALKEWTIENKCEIVACESTSDYWVPVYEMLEGHVTVIVGNARDIKMFSHKKTDKVDSELIAQLALKGMIRPSRVFPREHREFRSLVRLRHKLVQKRTDIKNEIHHILDSELFRLSSVLTDLFGKSGTLILRGLVNGMPMDEVIAMLPPRVRKKTDQLNEIVQTTVSPGAIFRLNHCLNLIKCMNEEIDVLTKGILQLANENFRHEMKILKSVPGIGNIAAFTLIAEIGDFSDFPSGDKLASWLGIVPNVYQSADKLRTGSITKRGSDHARWILTQVAHAATRSHNNVFRRFYDRKKPIIGTGKAIIALARKIATLIWHLITNDEFFNHEDEGAFNTSKLVKVRIPSIVTLEEILKIFKEAAIVLKEPDPGNG

SEQ ID NO: 134452 - protein, 358 aa, unidentified
MRIIGCDLHARQQTIAMLDTETGELVEKILEHEGEKVREFYAHLPRPVLVGIEATGSMPWFLKLLEELKMDCQVGHPAKIRKAETRKQKHDRRDARLLLKLLAENRFPSIWMPSTEQRDLRTLLRHRHQWVRMRTRVQNTLQAMALSNGLRRGHSLWSPAGRQALEALPLAPYAHQRRAALLTLYPRLQESIDHLDQQVGEQAWQRPQARRLMTHPGVGPVTALATEVFLGDPLRFVDGKAVASYIGIIPSEHSSGERQRLGALSKQGNALVRYLWCEAAMHAVRHDPELKRFYKRKLVQKGVGKARIAAARKLGIRLWIMLRDRIDYEEFCRRGQSRQKSGEARTGMSGYDTGPAAP

SEQ ID NO: 134453 - protein, 361 aa, unidentified
MHYVNNTELSSLEGTRRQFKGGRCAIKLGVDVHQDFCVVVLQEDGASPKPPQRFQKEAFLHWAARLKRKSGAEVHAVYEACGFGFALQRQLSALSIQCYVVCPQKLDEHNRRVKTDGLDAKALCLKLDRFVQGNRAALARVRVPSEAEEQLRAIHRQREQLLKARKQLEAQGRSLMVNHGLEPVQNWWKPRTFAALQVSDWMKQLLQNSQPILIGLQEKIAALTGQLQRAASPDQPRGLGKMTSVIIDREIGDWHRFRNRRQIASYTGLCPGEYSSGNTRLQSCVTKHGNPRLRAALVELAWRLVRFQPDYHPVRKWRQVLGKGALATGAARKKAIVAVARQLAVDLWRIKPAGSAQKNWD

SEQ ID NO: 134454 - protein, 406 aa, unidentified
MTVYIGIDWSEKKHDLCFLNQVGQVLQTLTIARTPSGFLQLEQARQRVGVQAQECVVGIETHHNLLIDFLIERGYTQLYVLPPNAVKSARGRYWQSGSKSDPQEAHLIADMLRTDLARYHAWVRDQPLTVQIRARISLIGYLNKEIWQLGNRLRAALIRYYPAALEIFSSLDSLIPLAWIQEYPTPEAAQATRYAEFQDFLHRHHHTQPRKWAACYARLQQAQVTASTELAQVYAQEAALLAQLMSQLVQAKTRLLTETDRLFQQHPDGYIYHSLPGTAPYLQPALLAMLGDDRQRFPIPAILQALAGTCPVTKQSGKTRYVSFRYSCNHDLRQIVQQWAKLSIDRSPWAAAYYQNTRPHCRSENEAYRKLANRWLEILWRLWQDRQPYDEQKHLSAHARRSLPKP

SEQ ID NO: 134455 - protein, 418 aa, unidentified
MGKINEYCAGIDVGKRFLLCCALTGAAQEEPQSQTRRFDATVPDLVHLRDWLSSKSITHVVMESTGSYWVPIFNILEGHFTILLANPEEVKNRKGHKTDRKDAEHLADLLRHDHIRASYIPPKPVRDLRDLTRRRLQLTQDASRERNRIEKLLEHVNVKIGNVLSDVFGVSGNSMLLALLDGDMAVERIAQLARGQAKQKITQLTEALEGHCMRDHERFLIWSSLRHLACLEEETEEMDGEILRRMQTLPFQEAFLLLQTIPGIGQLAAASILAETGTDLSPFPTAEKMASWAGLCPGNRESAGIRKGSQTTKGNPYLRSTLVQSAWAATRKRGSIFQLRFRELAPRRGQKRAIVAIAHQMLTVLYFMLSNNAPFRGADTVPQKHRRLRRAHHHLKCLRRLGLTVEVSGSLEDAPTTG

SEQ ID NO: 134456 - protein, 335 aa, unidentified
MRRPKDKLIAGLDLHSNNVMIGVINQDGKRVAHRKLDCDLDQVVGFLKPLKPQLQSMAVESTFNWYWLVDGLRAQGYSIDLANPAKIEQYSGMKHVDDKDDAFHLADLQRLNILPKAHVYDPELRPVRDLLRRRTNLVHQHTALLLSFSSIYTRTTGQKLDPGEAKKMEPKQAPKLYEHPANQLIAQVQAEHIQALAKSIRRVEKAVLACAREIPLYEKLLTIPGIGRILGMTITMEVGDVKRFKTDGDFASYCRMVDAKRLSNGKCKGANNQKCGNKYLAWAFVEAANFARRYDESCRRWYDRKAAKAGKIIATKALGCKLAKAAWHVMAQQCN

SEQ ID NO: 134457 - protein, 346 aa, unidentified
MDQIIRIGMDTSKHFFQLHGVDAAERPVLRRKLRRHEVLAFFAKQRPTIVGLEACGAGHYWARELRKLGHQVKLIAPQHVKAYVKRNKNDGRDAEGLCEAMSRPTMQFVPVKTEEQQAALMLMGVRQQLITRRTQLSNAIRGYAAEFGLIAAKGLVKVEPLLAQIAQDESLPMLAREMFRLQGRDYARLQVELKAVEARLMAWHRANADSWRLAKIPGIGPIGATALVMKAPDPRLFPSGRHFAAWIGLTPKDHSTAGKTRLGKITRAGDEMLRSVLVAGATSVIQQAKKDRGRPSPWLVALLARKPPKLAAVALANKTARIAWKLLMTGENYDGARMPVASALAA

SEQ ID NO: 134458 - protein, 315 aa, unidentified
MTQTITTTAGIDTSKAKLDIAVHARTERWQVANALPGWRTLAANLAKAGVTRVGIEATGGYERGVVEHLLAAGFIVLVLQPIQVKAFGRVHRRRAKNDALDAELIAACTAAIDDPRIAPDPRLAEMAQNLTFLEQLEEDIARFKTRLEHIDEPGLRRIVNSDIARLKARKAAQIGSLAKRLRTHSDLAKRFDLVLSIPGIGERTALALIIRMPELGLISREEAAALAGLAPFDDDSGKHKGQRHIAGGRGRLRRSLFAAALPAAFRWNKALMALYARLVGGGKAHKSALIACARKLLIYANTVVQRGTPWTEKAA

SEQ ID NO: 134459 - protein, 422 aa, unidentified
MKLTYPVCCGVDVHKTFLVATIIKTDGLVPKYYKKRFSTFSRDLLAFRQWLLDNDCKDVCMESTGKYWVPVWNILEDAIRVVIANPKWVSAVKGNKDDTKDSRWIGDLFRMGLVPGSFVPSRKIRVLREFTRYRYKLISMRSSERNRFQNAFTVCNSTLDAVLSDMFGKSAAAIQNYLLDTDVVNPAYCASLLQRAAKKKSADVMAAVEGFKMSAEQKERVRIIQEHFSDINARVARLDAEINKLVSEYESQIALLCTIPGVDRNLAITIISEIGTDMSEFGSSKRLCRWAGLTPGNNESAGKKKSVRITRAGVYLKPALVQAAHAAVKSTKSVYFKSKYEHISKRRGKKRAIIAIARMILTAVFAMLKTGEVFHPCDLQKYDMPEQLRRRQVVSSAKNAVKLLVSLGVLQEDSVSLAALAG

SEQ ID NO: 134460 - protein, 412 aa, unidentified
MEVVYPCCCGLDVHKKSVTACVLWAEAKGKSRKQKKRFGTFTHDLLQLADWLAECGVTHVAMESTGVYWKPVWNILAERFEALLVNAQHIKAVPDRKTDQKDSEWIADLLQHGLLRGSFVPPQPTRELRDLTRYRVSLVQEINRIANRIQKVLEDANIKLASVATDALGASGRAILEAMLAGEQDAARLAEMAQGKLRNKIPELKLALEGRMTEHHRFLLRQLFEHLRFTESKLREMEQEIDKRMLPFEDKVTRLCTIPGVDQVTAWGMLAEIGLNMDQFPSAAHLASWACLCPGSFESAGKRLSGKMRKGNVSLRRCLSQAAWAISMMKNNYLSALYRRIAARRGAKRAVMAVAHALLVIAYHMLKRKEDYRELGADHFDRIDVNRIRRSLVNRLERLGHKVTLEPLAQTA

SEQ ID NO: 134461 - protein, 342 aa, unidentified
MKQYVGLDVSQKETSVCVVDDAGRTVYEGRVKSDPGALTELLRKRAPHAERIGFETGAMASWLWHELRRVELPVVCIDARHAHAALSVRVNKSDRNDAKGLAELVRVGWYREVKVKSEESQRVGAILVARSRLVSIRRDIENQVRSIIKEYGFLFRRAIGLQFRNQVIELLGEDHHLRAIIDPLLSIHEQVCRQQDKFDDEVRHLAKSDETTRRLMTVPGVGVVTALTFRHTIDEPSRFRSASAVGAYLGLTPRRNQSGEADTNGRISRWGDRLLRTYLFEAATVLLYRTKKWSTLKAWGMKLARRIGMKKAKVAIARKIAVILHCIWVDGTSFEWGQSKAA

SEQ ID NO: 134462 - protein, 348 aa, unidentified
MRFYSKQHKHYCGVDLHAQTMYVCIIDQEARIVKQKNIKSNPAAFLKAIDKYRDDIVVSAECMFTWYWLADLCSQENITFILGHALYMKAIHGGKAKNDRIDAYKIANLLRGGNIPMAYVYPPEMRATRDLLRRRNHLMRKRAELLAHIQNTNHQYNLPPFLKNICYKGNREGVVEHFPDECVQKSMEVNLSLIDHYDKLMGKLEYYITKKAKGHDGNSLLRIKSVPGIGETLSLIILYEIHDIKRFPKVQDFVSYSRLVKPAKESAGKRYGTIGGKIGNAHLKWAFSEAAVLMLREIPDVKKYKEKLQRKHGKAKALSIVAHKIGRAIYYMLKRKEVFNIDKFLQKK

SEQ ID NO: 134463 - protein, 430 aa, unidentified
MKSNTQNAKIEAITEKTLVLGIDVGSEMHYARAFDYRVIEYSKKPFKFSNTEAGFATFKEWVLDLKERHEKDKVVPGMEPTGHYWFNLGKFLQDNEMKPVLVNPHHVKKSKELDDNNPTKNDRKDPKVIAGLVREGRYMIPYLPEGVYADLRTASNIRFQLQAELTRIQNRISRWFNIYFPEYKTVYGKPDAKSGMLILKAAPLPEDILTLGIDGVNQIWRDAKLRAVGKARAKTLIEAAEHSVGSKEGAVSARMEIRMLLEDYESRNTRLQEVMVLIEELVRKIPMAEKLLEIKGVGIRTVSGFLAEVGDISRFNNPKELQKLAGLALVENSSGKHKGETTISRRGRKRLRYLLFEVAMSLVAKNPEFRELHNYYTTRRLNPLKKMQSLMAIAAKLIRVFYAMLTKGVDYDPKKMVSDIKRPAVYLQAA

SEQ ID NO: 134464 - protein, 468 aa, unidentified
MKRRPKAVSKKKSRRIRRKREAKFLERVHLNAAGVDIGSASHWVAVPEDRDDQPVREFKSFTPDLHALVDWLDVCGVETVAMESTGVYWVPLFEILQERGFEVLLVNARHVKGVPGRKTDVVDCQWLQQLHTFGLLRASFRPDPEITAIRTLVRHRSILVEECAAHIQRMQKSMTLMNLQLHNVITDVTGITGMAILRDIVAGQTDPTVLARHRDHRCKAPEQDFIASLTGHYRPELVFALRQSIELFDFYQDKLRACDEQIEVLILALEAQCPTPDREPAARPRTKSRSKNEPHFDIRSPLFTIAGGVDITEVPGIGPYGALQLVSEIGLDMSRWPSPGHFTSWLTLSPHNKISGGKLLGSATQPSANRAAKTLRIAAMSCVRSDHALGAFYRRLAGRIGKAKAITATARKLAIIIYFMLRDATPYREQPAAVYDARHRKRALNSLRKRAQSLGFDLVQIDTGLVLA

SEQ ID NO: 134465 - protein, 342 aa, unidentified
MQISTIGIDIGKNSFHFVGFDARGGIVARRQCSRTQLIRALANLPPCLVGMEACCGAHHLGRCLVAQGHDVRLIPPQYVKPFVKSHKNDLLDAEAIGEAVQRPTMRFVPLKTMEQLDLQAIHRLRTRLVGRRTAVINQMRGFLLERGVTCPIGREALVKRFPEVLDNPALGLSVRFCRLLKQLRDEWRLLDDDIEDVDQEILSLARGDEACDRLMQVPGIGPLTATALVAAVGNGAAFAKGRDLAAWLGLVPRQHSTGGKTVLRGISKRGNAYLRCLFIHGARSVCRHHHQKPHCLGRWLTSLEARAHPNVVAVALANKLVRTAWAVLQRNTHYDGRLLANA

SEQ ID NO: 134466 - protein, 336 aa, unidentified
MLIIGCDFHTRFQQIAMLDPATGEVVERRLEHGNGEAGAFYAALPGRARGGMEATGYAHWFEEMLAGQGHELWVGNAAAIRAAMVRKQKTDARDASHLLDLLLRGKFPRIWIPSPNDRDTRQLLRHRHKLVCLRTSVMNQLHALAMGQGVCRKAKMWTAAGRKELEALALGPWASRRRQELLEMLGRLDGSIEELDKAVIQEAKSHPCAVRLMEHPGVGPVTSLAFAVTIGPVARFRKSKQLVSYLGLNPREHSSGGKQRLGSISKQGNSMMRFLLVEAGQTASRMDPELRRDYQRLKFRRGSAVAKVAMARKLAVRLYWKLREAAPLSAAGSHAG

SEQ ID NO: 134467 - protein, 316 aa, unidentified
MPVEHVGCDADKAFLTVACHERPGHLQRIGNDVGPIDEWLSGLAPDSVLAVEATGTCHQVLLERAVRHSLTIYLLNPRDVRHYAESLRRRAKTDRVDAQVIARYVAREKDNLRPYVPPSAASARLQVLLRRRASVVQNFTGLKLSLSDLEMPEKDHLYTGYAALLKALDEQVDAVIAQEERGVRQREQLRTIPGVGPLSSAALVSLFWRLPGITADGLIAFVGLDPRPRESGSFRGQRKLSKRGDPELRRLTYMAAKTFGRHELGRALYERYRQRGLSAIATYVILARKILRLAHALITKDTFFDPERFAAACVRT

SEQ ID NO: 134468 - protein, 417 aa, unidentified
MFKIFRKNCCGLDVHKTWIYACIGFTDTNGRTEYKQARFSSFSKGLKELAEWLSKYSCTEVCMESSGKYWIPVFNILEKTCFVTLAHPKYTKPQKGNKTDVKDAKWICDLFMCDMIKPSFIPSPEIRQLRDLIRYRFKLTNMLSGEKNRALNCLTVSNLKLDDVFSDVFGKSSRSITNYLLDHPGECFNVAPFVDGRCKTPVEEIQAAVDGAISPEQAVKLRQCLKHIDELDAHRQEIEQEILLIAEPFSAVLDFLYTIPGLDKNPMTAIAILSEIGPDMSVFPSSKNLVSWAGCCPRNDQSASKVKSTRISRAGCYLKPLLVQIANALLKSKKHPEFKERYHRIKTRRGHKKAIIAVCKMLLTAIWNVLSKLEAYNPEGFLEHRPVNEAKILTKTQALELFRKRGYTIIDDSAVNS

SEQ ID NO: 134469 - protein, 324 aa, unidentified
MSKSIAEKTQATNIGIDISKANLDVAAYPGGQFCQFTNNIKGFRCLAKWLGTMNLSCITFEATGTYHRRLERFLGERRLPFSRINPRQARCFAEARGKLAKTDRVDALMLARFGELLKPRLTTAKSQPLETLCELVAARRALVKDRTAIKNRLHNLQTPLLKRQARQRLRQVERQMAAIDAECRIMRDADPELARRLDILLSIPGLGEVTAFTLLAEMPELGSMDKRQTAALAGLAPITRASGTWKGKSFIRGGRANLRHALYMPALVAIRFNEEFKQKYEAMTTARGKLAKPAKVAITAIMRRMIVMANALLRDDRKWTKISA

SEQ ID NO: 134470 - protein, 432 aa, unidentified
MNEEDRTRLEGFRQFRKEIRGSAEYLLVGIDVAKDKHYAFFGTATGKTLFRRLVFENNLEGFGKLLAQAEAMKVQGGLKKVVFGMEPTANYHKPLGEHLIRCGRQVVLVSGVAAHENRKTLDGRWDSNDSRDAANVADLLSQGKCLFYDFPVGALQDLRNLLSLKRRFKRVEHGYRVRIRNHLVAKYFPELDRYYKQSESVSLAIVRWCLDPSEIAGLEYKRFVEMVAPGKGGGSRENRLQTIWKMAVESVGCEAGPAVEFEAQVMVEGLKQIQKAIEDIEEKIHEACAQVPEYEFLLTIPGFGPDISSKVLGAIGNPFRFQNGKQVLKMAGLDLNAERSGKTSASAIPVISKKGKADLRYALYQAAMIASIKNNVFIAYYTNKLRGREREPGIKTKMRVKLAAKLLLIAWALMKKKEPFNPGYLAVASWDL

SEQ ID NO: 134471 - protein, 371 aa, unidentified
MEKYVLKLDAKDQSGPRPGEVVHIGLDQGLNKWVYAVRWGGEQRSTFAGPSELSHLQTLVKRFSGNEVRIAHEACGFGYQISRWAQEYTEQVVRVTVVPPSTIEQEPGRRVKTDRIDARKLARKLELGELKGVWVPSVEQEQARQISRTQQQMAKERRRVQIQVRSLLQAHGYKAPQSTKSWGAYARWLDQLELPETLRQCVGHQLALRKHAAHSEQELLRTLHKMSQAEPYAKVVKAWTKNAVGIGWLSAIRIALELGDVERFPKRGSLPHYLGLTPSEYSTGDNVQRGPVLRCGPARVRSWLVESAWVAVRRDPQLRELFSRIAGPVASATQRKVAIVAVAHRLAIKLRVLWKQVQTPAPEAVKSAAAA

SEQ ID NO: 134472 - protein, 358 aa, unidentified
MAGKVTETAVVGGVDTHKDLHVAAVVDQNNKVLGTQFFSTTRQGYRQMLAWMTSFGALKRIGVECTGTCGSGLLRYLQNAGLDVLEVTAPDRMERRKRGKSDTIDAECAAHAAFSGIRTVTPKTRNGMIESLRVLKTCRKTAISARRVALQIIHSNIISAPDELREQLRNMTRMQLIRTLGSWRPDASEYRNVTNVYRISLKSLARRYLELHDEIADLDVMIAAIVDELAPELIKRNAIGYESASQLLITAGDNPQRLRSESGFAALCGVSPVPVSSGKTNRYRLNRGGDRAANSALHIIAIGRLRTDDKTKEYVARRVAEGHTKMEAIRCLKRYISREVYTLLRNQNRQINSIPITA

SEQ ID NO: 134473 - protein, 339 aa, unidentified
MKVSTLGIDLAKNVFQLHGVGCNGQTVLKKKLTRDKFLPFLMQLEPCLIGMEACASSHHFARVLRQYGHEVKLIPPQYVKPYVKTNKTDAADAEATCEAVARPNMRFVQIKTAEQQAILVLHTERNILIRERTACANSMRAILAEFGITMPRTLSQLYKKIPEILEEYDNELSPFVRCSVARQLEHLQGVEDQITLIEQELSRWAKTQPACQRVMKVPGVGLMTATYLVASVGNGQQFHSAKQFAAWLGLVPREFSSGGKQRLGRISKRGDRYFRYLLVHGARAVAAVIERHKDNMPWPYRLLNKKAYNVAVVAQANKTARILWSMLVHHTEYRTLSAV

SEQ ID NO: 134474 - protein, 346 aa, unidentified
MEDNASASPCRYIALDIHKYYSVVAGVDREGKEILSACRVEHVDLENWAIKHLLPMDRVVIESTTNAWHVYDLLEPLVGEVLVANPIKVKQIACARVKTDKKDTFILARLLAANLVPTVWVPPKHVRELRQLISHRRRMAGMHTQVVNRMHSVAHRHHLNHPKGKDFQPKNTLWQRDASLSRLEKMQLELDMETREHLEKQIGRMTRELGKMSHEEPWASDMLYLMQIPGCGVVTGMTILAAIGDITRFEAPKALASYSGLVPGLEQSGVKLRGKGITKEGRRELRWVMVEVAWRAVKADPHWKKYFETLQKRMHKNQAIVAIARHLLTMVWYVLTRHEPYSHYSP

SEQ ID NO: 134475 - protein, 410 aa, unidentified
MEVLYPHCAGLDVHKDTVVACVRHMVNGSVRREVRSFKTTTKELLALSDWLAGEGCTHVAMEATGVYWKPVWHVLSDGDFTLVLANAAHVKNVPGRKTDVNDATWLADLLAHGLIRSSFVPDGQTQEMRTLLRTRKQLVRECSRHVQRLQKTLEDANIKLDSVISDIVGLSGRRMIEALIAGETEPGALAAMAHRRIKATPDELEAALRGRVTRHHRFLLQLHLQQIDAVNAAIDQIDQEVDAYIEPFRATVRLLTTIPGIDELSACVILAEIGRDMSRFPTAGHLISWAGLCPKNDESAGKRRSTRMRKGAPWLKTTLVQCAAAAARKKASYLQAQFHRLRARRGAKKALGALAASILTSVYHMLISGELYRDLGPHHFDQRAKAVNTRRLVTRLQNLGYAVQITPLAA

SEQ ID NO: 134476 - protein, 384 aa, unidentified
MFKIILNNCCGLDVHKTWIYACVGITDSHNRTYYHEARFTAFSKGLRDLCGWLAKLNCTQVCMESAGKYWIPVFNILEKTCKVTLAHPKYTKPMKGNKTDRKDARWICDLFMCGMVKPSFIPPPVIRQLRDLVRYRGKLTNMITGEKNRAQNCLTVSNLKLDDVFSDVFGKSARSITEYILAHPGETFDVAPFVDRRCKTPISEIQAAVDGAVSHEQAVKLRQCLDHIDELEKHRSKIEGEISRLVSPFTTTLDLIHTVPGFDKNPLTAITVVSEIGVDMSVFPSSKNLVSWAGCCPRNDKSNKTVKSTRISTAGSCLKPTLVQVANAVIKSKNHPEFGIRYRRIKAHRGHKKAIIAICRMLLTAIWNVLTKREPYSPDGFAVP

SEQ ID NO: 134477 - protein, 325 aa, unidentified
MKMAKRTTICAGIDTGKRKLDVALDGSSEQLQIDNTAEGYEVLLDWLRRHRIKRIGIEASGGYEQAVVAELRRKGIVVVVFQPAQVRAYAKFHLQRAKNDRIDAALIAACTAAVRKIHTPPDARLLPFAEHLTMIDQIGEDIALLKNRLETCRNARIQQVWKKDISRLARRERIEFKALVAAIREHRDLAERLDLIYSVSGAGLPTAVAILVRMPEIGQLTREQAAALAGLAPYDDDSGKHVGVRRINGGRERLRRALYTAALPASFRWNPQLITLYKRLIAAGKGHKRALIACARKLLIFVNAVVARGIPWDHERPATALLQAG

SEQ ID NO: 134478 - protein, 309 aa, unidentified
MVSIGIDVSKDQLDWAEGPEGPVRRTANDRRSIAALVRRLARLAPDRIVLESTGGYERALLHALADAGLPVVLVNPWRVRRFGEGLGVLAKTDAIDARLLARFGATADLAPTSVPRGGHRILVGLIARRRQILTMVVAEKNRLGLAPRAVRREIMGLIEIFQRRVVRLDTQIDALLDTDQERSDLGTILRTVPSVGPGLTRTLLIDLPELGALSRREIASLVGIAPYARDSGKKHGHRRVRGGRASVRTALYLSAMTGARCNPVLQALYERLRAAGKPAKLAFVALARKLLTILNSMARERSVWRQVHA

SEQ ID NO: 134479 - protein, 366 aa, unidentified
MKKISTMEVFGNEIFKEQKLTIGLDLGDRWSFYCILDEAGKIILEQKLPTTPEAMKQTFGKIPRSLIAMETGTHSPWVSRLLTELGHEVLVAHAQKVELITKSNRKDDRHDARTLARLARIDPELLGPVRHRSAKAQIHLTVIRARAELVSARTALVNAARGLAKSFGQRLPKCGTQQVSGKLAEGLSAELREVLEPLLREVESLNERIQEYDERMEKIAKEVYPEASLLKQVKGVGTQIALTYVLTIEDPYRFPKSRAVGCFLGLRPGRRNSGESEPQKKISKEGDRYLRTMMVQGAHYILGPFGEDSDLRRWGRKLAERGGKNAKKRAVVAVARKLAVLLHRLWVSGEVYEPLRNSQKAMRAVA

SEQ ID NO: 134480 - protein, 365 aa, unidentified
MEAYAGVDVHSKRSVFVIQDEAGKVTARGEVPTTPEGLATLRTAHRLAPGTRVALETGTVAFYVARQLQALELAPVVIDAHEVRLKAQRPTQKSDRRDAFELCDGLRRGIYRSLVHVPPLAISQLRETLSRRRHFVRMQTAQVNAVKRLLRSVGAGHLSRSLGTDTGWTRLFAALPTDPLLRVYVQHHHTLWRSARAQVIQLERLLATQQQPLTAEVARLETVPGVGPIIALTTLAAFSDVRRFPDAKHAASYAGLVPTTYQSGDRDRHGRITKRGSAELRTMLCEAAHQIRRSTHPLHPYFATLCAQHGYQRAIVALAHRLCRILFAMLRDGTDFDVRKLGIEEGPFRRTVTRRYRLKRFAHTL

SEQ ID NO: 134481 - protein, 421 aa, unidentified
MQVLYERCAGIDVHKDQVTVAVREPGAGPGGRQTRVRKFGAFYGVLRDMTRWLVSQGVTHVAMEATGIYTMPVYHALLEPGCFERVLVCNAAHVKNVPGRKTDAVDASWLGELLECGLLAGSFIPPEDIKAVRDVIRYRRKIVRQRAAETQRLGGVLQDAGIKLDSVASSIDTVSGLAMIRGLIDGERRGEVLAELARGRMRSKINDLSLALEGRFGEHHALMCQLHLDHIAQLNEMIARLDAQAEVMMVPFARERDLLATIPGIGPKAAAAIISEIGTTPGEFFRTDAHLASWAGLCPGNHESAGKRKHGKPRKGSQHLQPLLVECAWAAVRTSGRLRARYHRLVLRFGGYRNPAAKKRAIVAIAHTLIVIVWNMLVTGKTYADLGPDFYASRTNPEKETQRLLARLEALGHKVTLAPAA

SEQ ID NO: 134482 - protein, 352 aa, unidentified
MRTSQKTAGIITTIGIDLGKDTFHLIGFDQRGAIILQQKVSRGQLERRLANIPRCLIGMEACSGSHHIGRQLQAAGHDVRLIPAQYVKPFLKGHKNDYRDAEAIAEAVQRPTMHFVAIKTPEQMDLLALHRVRSRLVSQRTGVINQIRGFLIERGIIVRQGVVPLRKALPEILSSQTGPLSPRMIGVIADLTQDWRRLDERIGGVSAEIEALAEQDDGCQRLMTVPGVGPIISSAVVAAIGNGAGFKQGRDFGAWLGLVPKQESTGDRTILGKISKHGNKYLRTLFVQAAHVVLVRRPRAAMRGLWPWIEQASKRLHRNMLAIALANKLARIAWAVLARGRAYQPRTAADAA

SEQ ID NO: 134483 - protein, 376 aa, unidentified
MTKIIRIGVDTSKSVFVLHGVDAAERPVLRKRLRRKQVLEFFAGLEPTKVGLEACGAAHYWARELRALGHEVVLLPPQYVKPYVKRNKNDAADAEAICEAMSRPTMRFVPVKTAEQQAALMLAGTRDALIRRRTQLTNAIRGYAAEFGLIAARGLDKIEPLLARIAAHGSLPRLAQELFETHAREYARLKAEIRTIEAELTGWHKRNELSRRLAEVPGIGPIGATLAVMKVPNPEAFRCGRDFSAWIGLTPKDHSTAGKMRLGVITRAGDEALRSALVAGATAVIRHVKQGKGHPSPWLIELVRRKPAKLAAVALASKNARVAWKLMVSGERYNPTRSLAVPASGGRGAALRGAPRRAPRSHPHDKPCETTAMILP

SEQ ID NO: 134484 - protein, 347 aa, unidentified
MVTLGSDSHKRSHTLLAVDGNGCPLEERKVPATPAGHMEALAWARRWPERRWALENCRHLSRLLERDLLTAGEAVVQVSPKLMGKARRSGRELGKSDPIDALAVARAALREAHLPVAQLEGKSRELKLLVDHREDLVGERTRIQNRLLWHLHELEPGFEVAASGLLRAVVLAEVRRRLERHTGVVAEIAVDLVGRLTELTTSAKRLQSRIESLAGELAPSLLSLPGCAGLSAAKLVAETADVNRFHSSAAFAMHNGTAPIPVWSGNHERHRLNRGGNRQLNVALHRIAVTQIRLGGEARVYVNRRMSLGNTKTEAIRALRRQISDEVYRRLRRDSSERLTAPNAVAG

SEQ ID NO: 134485 - protein, 429 aa, unidentified
MQNESTPGARGPVFCGVDTHADSHWLCVLDWRGRKVLSRQFPADAAGYEALAGAIAAAGEPACVAMEGTSSYGAGLTRHLASLGMPVREALSPARMQRRRPGQGKCDESDAERAARAAMSGSKLGTPKSQDGWVDGVRCMLAARSGAVKARTSAINTARSLLTTAPEGLRSRFRGMAGPRLMEELPSVRAEGALGAALGALADLWAAARDAALDMERAIEASLEENRPALLAMYGCGPVSAAKLAVAAGDNPGRLRSEASFAAICGACPIPASSGKTVRHRLNRGGDRQANSALHEIARQRVMRDPETAEYAERARARGKSDREVMRCLKRYVAREAYRALMRPHEVRRPEDASGLVAARRAARVSQVRAASILGTSEKYISMLERGQRELKPIRRAYEAWVEAGLPLDWDRQAFEAERKMDSKKHLAK

SEQ ID NO: 134486 - protein, 355 aa, unidentified
MIIIGADYHPGFQQIAFVDTDTGEFQERPLQHREEAEKFYRELAAQGRKVRVGMEASGHARWFERLLAELNFELWIGDAAEIQSKRVRKAKTDREDARLLLRLLLEDRFPRIWVPSWENRDLRQLLWHRHRMVQARTRIMNQLQAVALNEGLRAKKKLWGESGRQQLESFRLAPWASRRRQDLLALLDRLNPTIAELNQAVEQEVERCPAAQRLMTHPGVGPLTALAFVLIIGEAERFGCGKQIASYVGLVPLEKSSGNRRRLGHITKQGNSLLRFLLVEAAQVTARSIPEWRNKYFHLVMRRGRKIAKVAMARRLAVGLYWMMRKQWDYEQLKKFGSHAGQPGPGDGVYQTPRN

SEQ ID NO: 134487 - protein, 373 aa, unidentified
MVEHTTTYVAFDNSKETLAVAIADGDARGEVRFWGTIANRAEAVRKLVARLAAKHPALSFCYEAGPCGYGLYRQILSLGHPCTVVAPSLVPTKPGGHIKTDRRDAITLASLFRAGELQAVWVPDADHEAMRELIRARLTAMQEVRRSRQLLLSFLLRHDRATPTRHHWTRAHRSWLARQSFAHPAEQIVFEELIQRIEVACARQDRHEDAIRSLLSAWSMAPVVTAIQALRGVALMSAVTLVAEVGDFGRFATPRQLMAWLGLVPKEHSSGSKVARGNITKAGNARARRVLVEGAWTYRLPARMGEDITRRNDGLPEAIRAAAWKAQVRLCTRYRRMQNTGKPQKIIVVAIARELAAFVWAISRMVQPAATQA

SEQ ID NO: 134488 - protein, 461 aa, unidentified
MAKKAKKVKTAKGAELRIVNPDAAGIDIADGIMQVCVPADRSKDNNRAFGAYTSDLHAISAWLRECGIKTVAMESTGVYWIPLFCRLQEDGLDVVLTNARDVKNITERKTDESDAEWLMLLHQYGLLKASFQPHNDAKRMRTPTRHRDTLSREASSIVLRMQKAMQQMNIKLTLVLSDITGKSGIRIIEAILAGERDPKRLADLADIQCKTPKEEIAKALEGNWEEDLMFVLRQNYDTFKHYCTQLGECDAELEKLMENYRAEVAKVEDTSYSPAKKRRDYKKTRHTVGFDVERKAYEMWEVNVFEIPGISHLTALELMSELGHDFTRKFPSSKQFCCWCNISPNTKISGGKRISSHVPHRRNNVGLIFRSIASSLANAKNQLGNFYRRIRSRAGGKAAVIATAHKVAEIFFAMVANQTTYNPERVGIDEKVLLEKRITRYKRELERITGTHIEIGNACVP

SEQ ID NO: 134489 - protein, 341 aa, unidentified
MNIKRIGIDLAKQVFQIHGVDGQEKVVLRKQLRRAQLLDYFKKLPPCLIGMEACGSAHYWARELQKLGHTVKLMAPQFVKLYVKSNKNDANDAEAICEAVARPTMRFVSIKSIAQQDIQAVHRIRSELVQQRTAKVNQIRGLLAEYGTVVGRRIDVLEHALPLILEDAENGLTADFRVLLEGLQQDLATLNGRVDDLDKTIKSLATSNTDAKRLQQIPGIGPIIATALICAIGDGKQFKRGRDMAAWLGLTPRQHSSGGKDRLLGISKHGDAYLRTLLIHGARSVLKVASQKDDPRSRWLQNLCSRRNKNIAAVALANKNARIAWALLSKKTDFLPEGEPV

SEQ ID NO: 134490 - protein, 351 aa, unidentified
MIIIGCDFHTRYQEIAWLDTDTGEIHERRLEHTGDETRKFYAAFSGPVRVGIEATGYSQWFERMLRELGHEYWIGDAGAIRASVVRKQKTDRRDAAHILDLLMTNRFPRIWAPTPAERDLRQLVLHRVKLVQLRTKVQNQLQALALGQGVCRKKKLWSVRGRAELESLPLDRWAQRRRQELLQLLDQLEGSIRELHAAVEQQARQHPEAVLWMTHPGVGPVTSLAFVLTIGPVSRFARSKKVSSYLGLNPGEHSSGGHQQMGPISKQGNSMMRWLLVEAGQTAARRDPVLGRMYQRLKFRRGSAIAKVAVARKLAVRLYWMLRSQCDYAALVRMSGSSSSAVVPEVSGSGR

SEQ ID NO: 134491 - protein, 419 aa, unidentified
MEEDCLKVIYTICCGIDVHKTFLVGTIISTTDGVQPHYQKKRFSTYNSDLNRFADWLHSNNCLDVCMESTGKYWVPVYNILEERKIRVTIANPKWVKAVKGNKDDTKDFKWIGDLFRLGLVPGSFIPTKDIRILREFTRYSYKLTSMKSSEKNRFQNAFTVCNVALDSVVSDMFGKSATAITDYLISEDTFNPEYCVSLLKHSLKKKSESVLESIEGYSITQEQKLRIRIVRSHLNYIESLISQIDSAIDVMVAKHESLISLLCTIPGVDRNSAITIISEIGNDMSQFGSSKRLCCWAGLTPGNNESAGKKKSVRITRAGVYLKPALVQVAHAAVKAKDNSYYRLKYEQISKRRGKKRAIIAIARMILTAIYQMMSTGEVWNHTDLFKVDMPETLKEKQLSKAVKQATKFLEKQGLTVA

SEQ ID NO: 134492 - protein, 400 aa, unidentified
MKVSGLDVHKDSIFCAIYDGKKMGKVKEYPTFTHSIREMGEHLRKEGVQKIAMESTGIYWIPVWNILENMGFILTLVNPYIIKQMPGRKSDVKDAQWIATLLHKGLLRGSLIPNKRIRELRSYSRKYVRLQSQINRVLQEMERILEMSNIRITSLVSNNNSVSVKNIIEQIIQGNSLPEELARYVHGRIVKAKGKLVQLSLDGFIQEHHRFLLELAYQQYQLYQKQLLLVESKMEEICNTYYQKEMELLESIPGIKKQAAMQIIAETGADMTAFENSGKLTGWAGLRPKNDESAGKMKSTSVTKGNKYLRRIMVQCAWAASRTKGSFYKSKFEQLCIRKSRKKALIAIARKLLTVIWHVLSEKKGYNENFLPAYNPEKIKHKIFYHQRELHKLQALGFSL

SEQ ID NO: 134493 - protein, 465 aa, unidentified
MSKSKSGPVAKQKGKSVDWKAVEIVHPDAAGIDVGGSEHWVAVSPDRDPEPVRRFGCFTADIREMAKWLVEKGVRSVVLQSTGVYWMPVFEVLEQHGLEVYLVNAQHTKNVPGRKTDVQECQWLMKLHSFGLLNNSFQPTNEIRIARSLWRHRGNLTTEAGTAVQRMQKALTEMNVQLSNVLSDISGVSGMRIIAAILEGERDPWQLASLVQPEVKASAEDIAKSLEGTWREELLFVLSQHVELYRIYQKKIGDCDLQLQAHLKTFAPKADLQTQPIGHKPKGKKGSRNAPAFDLRTELYRITGIDWTQINGVDVLTAQTVIAEAGADLSAFGSEKQFSSWLGLCPTNEQSGGRVLNRRTRKVVNRASVAFRNAASTLIRSQSYLGAQYRRLRTRLGAPKAITAMARKLACLFYRLIKHGQQYVDKGIEHYEAKYRQQQIQSLAKRAKKLGLQLLLADNPSPTGA

SEQ ID NO: 134494 - protein, 334 aa, unidentified
MEQITTVGIDLAKSVFSLHGVDGAGHVVFRRTVRRDQLVGVVAGLSPCLIGMEACSGAHEWGRRFQEFGHTVRLMAPKFVAPYRKSGKNDGNDAEAICEAVTRPSMRFVPVKSVEQQALLAMHRVRQGFVVERTATINRLRGLLTEFGVVLPLRSITVRRQAAVAAEGLPDLARRAIGDLLEQLRMLDERIGGYDQEIEAQAKLCEPAQRLMKIRGIGPTTALAIVATVGNAREFKNGRQFAAWIGLTPSQYSTGGKARLGHISKRGDAYLRNLLVQGARSVLNSAGMHQDRMSRWILELQPRRGYYRTLVAIANKNARIAWALLAKNETLRPA

SEQ ID NO: 134495 - protein, 350 aa, unidentified
MIIIGVDFHPEFQQIASMDTSTGEFQEKRLAHREEAEKFYRSLAAANQKVRVGMEASGHARWLERLLAELQFELWIGDAAEIRTQRVRKQKTDRQDAQLILRLLLEDRFPQIWVPSWENRDLRQLLWHRHRMVQARTRIMNQLQAVALNEGLRCKKRLWHEHGRQQLESFRLAPWASRRRHDLLEWVDRLNPTITELTQAIGQEVDKCPEAKRLMTHPGVGALTALAFVLIIGQAERFGCGKQVASYLGLVPLEDSSGNRRRLGHITKQGNSLLRFLLVEAAQVTVRSIPEWRSKYFHLAMRRGRKIAKVAMARRLAIALYWMWRRGWDYEQAKKFGSHAGQSGNRHGVQ

SEQ ID NO: 134496 - protein, 367 aa, unidentified
MTKTIVHHERATSLEVTVNAIELSNSVIKLGLDIHSKLYVVVAQYDHALPKPARRLSPPEFVPWVERLLRSGHSVHVVYEACGFGFGLYRQLLALGAHCYVIAPRKLDEQRSGVKTDPRDAATLCQRLSRYVDGNTRELAVIRVPSEEEEQARHTSRQRQQLVHHRQKIEAQGRGLLVSHGLPAPAHWWKTQTWNRLIKLLPEWIVPHLELYRPILFALDQQITTLTIQLEAAAPSNIPAGLGKLTTVTLSREICHWNRFSNRRTISSYTGLCPGEYSSGCKRIPGSVTKRGNPRLRAALVECAWRMVRFQPQYPPVKKRLPLLAKGSRATGAQRKKAIVAVARQLAVDLWRLHTGRCTAMQLGFKI

SEQ ID NO: 134497 - protein, 354 aa, unidentified
MSQHHDVTAGIDIGDRYSHLCLLDTESGEVIEEGRIPTNTKAFERRFSDAEPMRIAIETGTHSPWISRMLEECGHEILVANARKVRLIYGEEHKNDKIDAEKLARLARVDPKLLAPVKHRGETSQAHLALIRSRDALVSTRTKLVNHVRGAVKSFGARLPKCSAQSFHNRVAEHLPQELVPALGPILKTIASLSERIRDYDRKLEAVAEEIYPETKLLRQVHGVGVLTALTFVLTLEDPSRFAKSREVGAYLGLVPASDQSGGSDPEKHISKHGNKMMRKLLVSSAHYILGPFGEDSDLRRHGEKIASRGGKNAKKRAVIAVARKLSVVLHRLWVTAEVYEPLYNASRCGGQAA

SEQ ID NO: 134498 - protein, 458 aa, unidentified
MNRKQRRELGRKIQADDINLEVIHPDAAGIDIGNETHYVAVPPKRGSEPVRRFGCTTAELNVMAAWLKKCGIRTVAMQSTGVYWIPVYDILEEAGFEVYLVNARDTKNLPGKKTDVQESQWLMKLHTYGLLRNSFRPSQEIRRMRNYWRQRNDLVRSAARYIQRMQKVLTQMNVQLANVISDLSGVTGQEIIKAILAGERDPRKLAAYRNPRVKASEEEIAQSLEGNWQDDLLFVLQQEQDGYEFCQRQIAECDARLEQYLKQREDRSGGQNLPEEKRKGRRKKKKGNAPRFELREELFRMTGTDLTQIDAIDVITATTIVSEAGWDMSKWATEDHFVSWLRLSPDNRISGGKVIGKGRLPTNNRLTLAFKMAASTLRESKTYLGAQFRRLRTKLGAPIAIKAMAAKLARLVYRMLRYGMQYVDKGAEIYEAQHRERQINSLKRKAAQLGFRIHQVAA

SEQ ID NO: 134499 - protein, 425 aa, unidentified
MGIAKPIDSKSNTKEGDNVNQLFVGIDVGSRDNAVYIMMPDGSKHSSFPVQNNLGGAQTISKRVVSALEGIKLSAVTLGIEATSVYGDNLMCFLREDGALGRFERKLFVLNPKQVNKFKASYSDLPKNDPVDAFVIADSLRFGRIGSPVYMDDYRYKALQNLTRARFYAVQNLTREKQRFMNYIFMKCSGLAQDKTFSDNYGTAALALFEGFETPDDIAEMDVEELASFIAEKGKNRSPRPDEIAKAVQAAARGSYRLPKTVNDSVNQVLSISISSIRAMQAQIKVLNKEIERQLENIPNTLTSVPGIGPVFSAGIIAEVGDINRFEGQACFAKYAGLAWTENKSGMFEGQNTRLIKSGNRFLKYYLCETANSLVRCDTEYRRYYDHKFKEVNKYQHKRALALTARKLVRLVFRLLKDNRLYRPV

SEQ ID NO: 134500 - protein, 301 aa, unidentified
MGRFIGLDIHRDFAQIAAVEDRLVTAWGRVDCRPQALREFAAGLRPDDQVALEATGNASTVAVLLEPYVVRVAICNPVKTRAIAGAKVKTDKVDARNPAQVLSADFLPGTWPPGERIRMLRRLSAHRAELVRGRMGVKNQVQAVLHRNMLPRPPVTDLFGTRSRAWLEHQTLPADERQTVGALLRQLDFYGAEIPEVERRPAAGALDDPVVRRLMTIPRVDAMTAVTVPAAVGDLHRFTNADELVSYSGVNPRVRQSGGTPAHHGRITKARLNNPVIRRRGGAPRPRRPDPVLPHHQASPS

SEQ ID NO: 134501 - protein, 429 aa, unidentified
MQYALIQVLPDVPAGGVCAGIDWATADHVACVVDMAGRVRDRFSAAHDKAGLGGMITRLRRAGAREVAIERGDGVLVDALLAAGLTVVVITSRQVKNLRSRYGSSGAKDDRFDSFVLADTLRTDRARLRPLVPDTAATIALRAAVRARRDLVAHRVAACNQLRAHLAVAFPAAAGLFYELDSPISLAFLARFGCHDAAAGVGEQQLSAWLHTVPARGNTAPASVLCARLQAAAPGATGADGAAQAAVTAALAATLTALAAQVKTLETRIAAQLAGHPDAQIFTSLPRAGTLRAARLLAEIGDCRPKFPDPESLAGLAGIAPVTRQSGKHASIEFRWAVNRQLRDAFCDFAADSRHASPWAAGIYAGARARGKDHPHAVRILARAWSYIIWRCWQDGTAYDPAKHTALQRVLDQQASPPADPVPEPGHAR

SEQ ID NO: 134502 - protein, 448 aa, unidentified
MVVRDPALGFSSIKSKGGDTVKNRMKFDHLSTLCVGLDIGSRINFITALNFDSDRLINMRPVPNASNGVEAMESMILAVLEANPQFRYLLIAMESTSFYGVHVANYLSTTDKLKPYGVKVFCLNPKTIANYRKSFTGLGKNDGIDSFIVADYVRAGRINIEPWRGAQYLALQRLTRQRRHINEAIAREKNYVLNNVFLKFSEFALLSGEESPVSDKFSATAEAILTEYKTTEDIANAPLKELIDFISASGHGRFSDPDQVASLLQKAARNSYRLDKALYEPITTSIACSFNCIRAFEKEQKALDKAIAAKVAGLNPTEYQILKSIPGIGPVYAAGILAEIGSVRCFNSNNALAKYSGIIWRDNQSGEFDSEDTPMMKAGNRYLRYYLIQAAGSVVRYCPEYTDYYNKKFAEVPKHQHKRALALTARKLIRLIFGLLDKNQLYSPAKSR

SEQ ID NO: 134503 - protein, 400 aa, unidentified
MKSTPRNPVQGNPIGLGAVTPPNPRSVGDLPILSGKKSSRGTSSLTLSEGEELYVGVDCHKSSYSVSIFSVDRKAAIKQWKQDSEDDALVAALAPIRDHVRLIVYEAGPTGFHLARRLTSSGLATQVIAPSLTPRPSGRREKSDRLDAAKLAEFASKGLLSPVAVPKVEEEGARDVLRLRQTSAKNLRRQMVQIHALLLKHGVTPPENLERWSIAAIRELQTLQMPSAGATRALQLMVGELLHLRSRTGDMTRSLSQVVKSPEYAERIERLRGIGGIGRLTAAAVVLELFQPERFERGEQVAKYVGLSPCICASGETVKQEGRIPGGTPRLRELLIEGAWRWTRLDEGAGRRMAELTAKTGSKKKAIVAMARRLLVVMWRMLVTGEPYLGFQRCNAKEAA

SEQ ID NO: 134504 - protein, 341 aa, unidentified
MHESPFYAAIDLHSNNSFLTILDGSDCVVYERRLKNRLPEIVAALEPHRERIVAVAVESTFNWYWLVDGLEEAGHEVRLVNTSAVQQYSGLKYADDRHDARWLAQLMRLGILPVGYVMPKEHRALRDLLRKRLRLVQQRTANILSLQNLKQRNEGVHLTVNDLRSLDVEALTRNERNPHRAMALSTTLEVIMALGEQIAKLERAILDEVKTSEGWEPLKTMWGVGKILAMTIHLETGPIDRFASPGDYASYCRCVRTQRISNGKSKGKGNAKCGNRYLAWAWVEAANFAIRSYPQAKRFYERKAAKTNTILARKALAHKLARAGWHVMHAGARFDPARVFG

SEQ ID NO: 134505 - protein, 340 aa, unidentified
MSTINILGIDIGKFTFHLVGHDLSGREVYRKKFSRPKLIQVLSTLEITTIAMEACSGCHWLARKCQEFGHKVKLIPPQYVKPYIKTNKNDFIDADAIAEAAARPTMRFVSIKTETSQVISVIQRIRSSYVKDRTACMSRIGATLLEFGMSFPKSHAKMKVLFQWLAEHGEPIPPMLLLELRDHHDYYLKLNKLILAQEKKLKEIVDNDEQAQLLKTIPGVGILTASRCLSDISSATDFKNGRNFAAWLGLVPRQYSTGGKPTLLGISKRGNKGLRELFIHGARAVLVRPEKAVAVFGNWILALLSRKHFNVVVIALANKLARIAWSVLSTKQAFEVRIQA

SEQ ID NO: 134506 - protein, 428 aa, unidentified
MNSLNERITRITATTIIVGIDVAKEQHWARITDYRGVDLMKPVKVNNNIYGFESLVAKTEKMRIKHSCDQVIIGMEPSGHYWRALGWYLKLHESQPMLVGVNPYHTKQAKELDDNSQTKSDPKDALVIAHLIRNGNYFDTYLPEGEYAELRLLNTERQRLMKQLSRSNNVLIALLDEYFPEYSTVWGNATCPTSLEILKTYAFPTDVMSASKGRLLEDIKRASRGTQGDKLMGTLIRAAERSVGVKEGLEVTRLRILSLIDELSYFEGKKAVVEAELESVMDKLQLGEILQSMLGVGPIIAAAFLGEVGDISRFSNWKQVRSLAGLNLVEDSSGKHKGKTKVSKRGRPYLRHMLYMAGECGCRCNPEMHGLYRYFLDRKKNPLNSHQAFVAVGLKVMRILFHLAKTGERYDPDKALGTVRLEQIASLA

SEQ ID NO: 134507 - protein, 420 aa, unidentified
MKAKKKAKLDLIDSDTLIVGIDIGKRKHHARFINLRGYELGKVFSFTNNRDGMEKAIAEIEKAKKQNNLAKAVIGLEPSGHYWKASAHYLSSQGYKLALVNPYHIKKTKEIDDNCQTKNDRKDPILIAKLVRDGDFFNPNLSSGIYAEIRRMYRLRLKLKKSLVRQKTALKILLDEYFPEYEDFFCDILGVTSEYILRNYFLPRQIAKENILALAGKIKKVSRDKIKIDRILKLVEASKCSIGITTGLEAAILEKTYTLDEIKDLKQKLAYMDRRLKYYLDQIEYSKYLLSIPGVGIVTAAGFLGEVGDISKYSSAKEIIKLAGLNLVEISSGQKKGSKKLSKRGNSILRCLLYQCAVVAIAKNSQIKRYFSYQTKTKNKMKMLVAVQCKLARIMFALLKYKKYYDPEVVAKNIFEQAVA

SEQ ID NO: 134508 - protein, 372 aa, unidentified
MKRTTFVGLDVHKRWINVAVVLPGQDIPLEWRILNEPQAIRRMLKRVAELSPGDVRYCYEAGPCGYALQRQIISWSDASCMLVAPSLIPRKPGERIKTDRRDAKKLALLFRAGLLTEVHPLTEEDEAARDLSRARDDLREDLTRARHRLSKFLLRRAITFTPGKKAWTVAHRRWLESLRFDNPADSAVVADYLLAIEHIEQRLKSLLVHVERLGHDPRYAKAVATLRCFRSIDTLSAVGYAVELHNFERFTSARRLMSFVGLIPGEHSSGERRRQGSITKTGNSHVRRLLIEAAWNYRHRPHVGASLRERRKGQPPRVIALADRAMLRLHRRYERLTHRGVLPQKAVVAMARELAGFIWAALSPLASQTTAH

SEQ ID NO: 134509 - protein, 419 aa, unidentified
MQSQAPAAFAAFVGLDWADAKHEVCLQAAGTAQREFLSLEYSPEEINAWVQTLRTRFNGQPVAVCLELTKGPIVSALRTYDFLVLFPVNPLTVAKYREAFTPSRAKDDPTDAELQVEILLKHRDKLTPLRPQSPTMRALAQLVEHRRRLVGDKVRLTNRLTSALKNYFPQVLHWFPEKDTAIFCDFLSRWPTLKAAQLARRTTLEGFFRAHHVRSTDLIATRIEAIKSARALTTDDGVIAPNVLLVHALVAQLRVTVQAIADFDQAIAQRAQDHPDFPLFDALPGAGAVFAPRLLVAFGEQRERFTSADALQKYAGIAPVTERSGKKSWVHWRLQCPKFLRQTFVEWAAESTRHSFWAQVYYQQQREKGKAHQAAVRALAFKWIRILYRCWQNRTPYDESIYLQALNRRSAPLLHNLAK

SEQ ID NO: 134510 - protein, 334 aa, unidentified
MDQEKNTRSATEDDRQAIVGIDVAKEKLDVALRLVSGKVKSKVVPNKAAGFEALRAWLAKHGVHRAHVCMEATGVYWEAVAEDLAVHGFAVSVVNPKQIKSCGETLGVRSKTDEVDAKLIAEFCAKLNPPLWQPPSASVRRLRALVARRDALIELRTQESNRLEVTSVEDVRQSIEQTIAHVERQIAQIEAQIRQDIDDDPTLKAQKELLASIPAVGDATIPRLLSHFGGELRFASARQAVAYAGLDVRKHESGSSVRGKPRMSKKGHSDIRAGLYMPAIVAKNHTQWGKAFANRLLAAGKAPKLVVGALMRKILAIAYGVLKSGVPFNPALHA

SEQ ID NO: 134511 - protein, 395 aa, unidentified
MKPAKSSPSALTLPAHGGQLSRKERRELARQIQSDNVTLEIVHANAAGIDVGKDMHYVAVPPNRDAKPVQCFASCTEGLQQMVAWLKKCGITSVALQSTGVYWIALYDHLQEADFEVYLVNARYTKSLPGRKSDVQESQWLMKLHTYGLLPNSFRPPQAIRWLRSYWRQRQNHVRSTASCIHRMDKVLIEMNVRLSSAVTDLSGATGLAIVQAIVKGEGDPQKLAAYRDPRVKATKAEIARQLQGNWQEDLLFRLGQELEAYRFYQTLIKQCDQELAKLLRAFPDRSAGVALPAEARKGRRKKKRGNAPQFDLRQLLYLMSGVDLARIDGIDVITAMTVVAEAGYDMSPWPTADHFVSWLRLAPDNRISGEKIIGKGRTQRKIVSLRPSKWPPVP

SEQ ID NO: 134512 - protein, 361 aa, unidentified
MKKPAQHLIPEVPRRQAKVEMTIGIDLGDVWSHYCTLNQDGEVVDRGRFRTTPKSIEKWFTDVPSARVVMEAGTHSIWISAQLQELGHEVIVANVRELRAISHSDRKSDQVDAEKLARYARLDPNILRPIAHRTVAQQEALTLIRARALLVRLRTAAVNAVRGLTKSCGYRMPASATTCFAQRSLAVMPHGLAQALGPVLQQIAEMTVKIKQYDRQIQQLGQTEYPETQALLKVHGVGHLTALTFVLTLGSKERFERSRDVGCYLGLRPRRSQSGDHDPQLGITHAGNAYLRSLLIECSNHILRPHGRDSALRQWGLHLAGRGGKQAKSKAVVAVARKLAVLLHHLWSTQEPYMPFYEQAA

SEQ ID NO: 134513 - protein, 468 aa, unidentified
MALTLGIDVACRAAHQATLAVDGKTVWRGRKFWTRPADLERLWDDLDLAEPGELTVVVEPTRNAWIVVAEWFRRRGATVVMVPTTQSSDLRKYYSKHTKNDRIDSELLARLPLLHPEGLRPYSGQGPADPLRRLTRQRSTMVKRRTAVYARLDALTELLGPAWYEALNARYGIAALEFLARYADPHAVIRLGQARLARFLIARSRGAWREDRAAALIVAAKETLSLWTLDDGSDGMDFAELAADIAHEAEQALFLTGQIKEIDERIANLYADADPDGIVASAPGVGPVISAVIAGRIGDPHRFTSLAAIRAYSGLVPKVSQSGVSKVESSITKAGDPLLREMLFAAADQARKVDPQIAAKYQRLMAGDRHHSSAVCHLATTMLTRIATCMRTGQHYVLRDVDGTPITEAEGRAIVKDRYQLQPRRRDNVRHQRMRERRKHAAGQESQESQSAPTSQPASTKPTSRQVA

SEQ ID NO: 134514 - protein, 352 aa, unidentified
MQHFIGCDMHTRDQVVAWIEEETGEIKKRRLEHEGKEVKEFYAQFPRGTVVGIEATFPAYWFERLMGELGHELWVGDAARIRASEVRYQKTDSRDAEHILDLLRTGRFPRIWVPSLEERDLRQLLVHRMKLVRARTQVKNQLHALAISQGVCRKRKLWSAKGRTELEGLALLPWAARRRKELLESLDRLDEQVRELDRAVEEAGREREEVALLRTHPGVGMVVGLAFVLTVGPIERFRNSRKLVSYWGLNPRENSSGGRQRLGSISKQGNTMMRWLLVEAAQTAARLDPQLRRIYLRLKKQKTSGVAKVAVARRLAVRLFWMLRTRNNYAQLVHMSGSPSSAVVPPTAEPKL

SEQ ID NO: 134515 - protein, 343 aa, unidentified
MQSITTVGLDIAKAVFQVHGVDAEGHTVIRRQLKRRFVVAFFEKMPPCLVGIEACASSHHWSRELQSLGHKVRLMPPAYVKPYVKRQKNDATDAEAICEAVSRPNMRFVETKTPEQQSCLALHRTRHLFIRQQTAVINAIRAHLAEFGIVAPVGRNGVEQLLGVVADAGDKRLPEIARACVAALGAQLRGLKVQVLEFDRMIRAWHRSSEASKRLDAIPGVGPALATALVASVANPKAFRSGRDFSAWIGLVPKQNSSGGKDRLGNISKRGDRYLRCLFTAGALAVIRYAKIHGTKHRPWLTALLARRPTKVAAIALANKIARMAWAMMAKGERYKEPVALAA

SEQ ID NO: 134516 - protein, 355 aa, unidentified
MKTLQITEKIDYQGEGVYVGIDVHKKNWGICILTEHLEHKVFSQPPRPGTLAKYLFRHFPNANYYSAYEAGFSGFWIDRELRSLGISNLVANPVDIPTTDKERKRKNDMRDARKIAKELRNGNLQGIYVPGPDILQDRLLLRTRQKLLSDIRRCKCRIKSQLNFLGTAIPEELDKPYWCKSFRSWLRTALSESSGNFLINLQLESLEEIERQKKRIEKQIVLLAKEKYRANVDLLRSIPGIGILAAMTLITELVDIGRFKTADQFHAFLGLIPNVYASGDTEKVGRITKRNNGFLRPILIQSAWKAAKLDPSLSLAYTKLCKTMKPNRAIIRIAKKLSNRVRFVWKNQVKYEIYL

SEQ ID NO: 134517 - protein, 410 aa, unidentified
MQVLYPRCCALDVHKLTVVACLRIVEDNKVTTEVRTFGTTTASLIGLRDWLAANKCTHVAMEATGVYWKPVWHILSDGEFKLVLANAAHVKNVPGRKTDVSDAEWTSDLLAHGLIRASFVPDTQTQELRALMRTRKQLVREAASHIQRIQKTLEDANIKLDSVISDVMGKSGRAMIEAMIAGETNPAKLASFADRRLKASPSQLCAALRGRVTTQHRFLLRLHLKQIDALEAAIAEIDQQVEGDIAPFRAAVKQLSSAPGVKALAAKVIVSEIGIDMSRFPSDGHLVSWAGICPRNDESAGKRRSNRLRKGAPWLKTTLVQCAWSAVRQKDTYLRAQFYHLKARRGPKKAIIAVAASILTAVYHMLKDGKAYQDLGPNHFQRRNKDQQKHLLVKRLANLGYAVALCPLPG

SEQ ID NO: 134518 - protein, 415 aa, unidentified
MALKIVYPVCCGIDVHKTFVVACIASTNSQGVTTYKRHRFSTFTKGLNELLQWLCEHDCKDVCMESTGKYWIPVFNILEHSCNITLAHPKYVKAIRGKKTDKKDAQWIADLFKHDLVAGSFMPPLPIRQLRDLMRYRFKLTNFSSSEKNRLQNSLTVSNIQLGNVVSDTFGKSSMNILDKLLDDPTDTSFDLEPLVHGSLKGKLPELELAIDGFITPEQAGKIKVIKQHYEDLESRKAELESIILSLAESYLEEINLILTVPSFKNLFSAIAVVSEIGVNMDVFPTAKHLCSWAGLTPSNDGSAGKKKSVRISRAGIYIKPLLVQCATAVVKSEKHPEIRNRYLQLKKRRGHKRAIIAIARMLLTAIYHILKNKEPYNPDLYKKSDVRLVTREITVEQAIKLAQAQGYRIMETAT

SEQ ID NO: 134519 - protein, 395 aa, unidentified
MSAEGEAIRSNDYRKDTTVKAPSTRPAAVLGLDVGKSSHWACLIDRDGEVLSSAPVRNREAELDALFASVPAGTLVVVDQFRNIGSLAVRRARAAGLGVAHLPGLAASRAAGLFAGEAKTDERDAAVIARTALGVPDSLSGVPGRGEALEAARALSSQRDHVVACATRDKNRLRAVLLESCPALEAAVDLSDRRWLELLAGFGGAWGIARSGAEGPQAEAAGEAAAASTAPPPALIEAENRQVRFLATRISEALDEAGALEAETAALLEGDETYACLLTVPGIGPRTAAQLAVSVDIGRFPDHDHLASYCGIAPRVRSSGTSVRSVRASRRGDARLKSLLIFSCNSLVRSSGRYGEYYRACRARGMGHGRALKAVARKRLRAIYAVMRDRVPYRE

SEQ ID NO: 134520 - protein, 421 aa, unidentified
MNKIKPKRTKVVNGNVLIATIDGGKDKHYGYYRCPDGTEGESLPFWNNGRGFQEFWERISSAATAHGFEEIIVGFESTGPYLEPLVQFLRSKKGVRLVQVNPMHTKRLKELSGNSPLKTDRKDPKVIADIIALGHALTVVIPEGAAAELRRLTQARERTTASRTRLLNQMQSLLVLSFPEFLQVMKDISTASARYLLQHYPTAQDIVGLGESALAAVLRKVSRGKLREDRARALFEAANESVGIQEGRHSMLLEIRMLLDTIASYDRFIDQVETEMERQLKLIPYSHIILSIKGIGAVTAAGLIGEVGDFTKFKTISEVMKLAGLDLYEVSSGKHRGKLRISKRGRSHIRKLLYLASLSAVKKGGVMHAWYRRALDRGMQKTKALVAVSRKLLGLIYALVRDHSVYVDNYEQQKPIYQEAA

SEQ ID NO: 134521 - protein, 344 aa, unidentified
MKKSNVIGIDLAKNVLQVCKVSKHGELVTNKAVSPSKLKQFLAKSTPSIVVMEGCGTCHYWGRLAESFGHEVRIINPKKVKGFLQGQKTDANDALAIATAAMQASVKFSQVKSEEQQTLQTLETSRKFLDKELTALNNHIRAYLYEYGITMRRGRKSLRKTIALVLDHLDTRLPQCLKNTLSLLWERYQSTLVQLKEAKAYKAALVKQIEPCKRLLALESVGEVGAAMLYANIGDGKEFKNGRGASACIGLTPKQHSSGGKTIMLGINKKGGNKELRAVLYQGALSVISRLPAEPQTIKQAWLIELVKRVGIKRACIALANKTVRTAWALLATGESYKPVLLSK

SEQ ID NO: 134522 - protein, 362 aa, unidentified
MLNDRTVVGLDVHAHATQAAVLEMASGELSFRSVSGPPSNVVGYLQGLGGSVLATYEAGPMGYGLARAAAEQGLDVRVCAPGSILRRPHERIKTDRRDAERLARLLIAGELAFVRIPSVKEESFRDLARCREAVRGDLMRARHRLGKFLLRRDIRFPGPASNWTLSHWKWLNRLEFDDAPSRAVLADYLTAVRALEQRRGALNDIIEGAWSESPWATTIARLRCMRGINSTTAFGLCAEIGDFHRFKHPATLASYLGIVPSEHSSGEQTRRGPITKAGSPHARRLLVEAAHHYRHTPAIGAALARRQDGQDPRACEIAWRAQRRLHHQYRRLRLERGKPANIVTIALARELAAFAWEVGQLT

SEQ ID NO: 134523 - protein, 336 aa, unidentified
MTIIRVGLDTSKHVFQVHGVDENEQAVLRRQLRRSAVEKFFAKLAPTRIGIEACGASHHWARRLRGLGHEVLLMPPQYIKPYVKRGKNDAIDAEAICEATSRPTMRFVPVKTVEQQAALTMLGVRDLLIKQRTMLINAIRGHAAEFGITVAKGPQQITELLGRLASDEGVPALAREMLGLLASQLEAVNGKLKAIEARLMAWHRHDQTSQCLATIPGVGPIGGVSFALKVPDAKAFRSGRRFAAWIGITPRENSTAGKHRPGKISRQGDEDLRRLLVLGATAVIQQAKRGHAAPWLLELLARKPKKLAAVALANKMARIVWAMMVSGETYRRPAQA

SEQ ID NO: 134524 - protein, 336 aa, unidentified
MIAVGVDTHKHEHLARAVDGLGQILGGLTIRADLSGYLELTQWLRTLGEDVVVGIEGAGSYGAGLCEFLLAEGIAVVEVERPRRQDRRRGKSDEIDALMAAKKVLAKDGLSTPRAGGTRQALAALLIAQRSCVSERTRLLNQLQALHTTAPVALRERIGPGNGRKLAARLVKMRARSDASGSEQLIFTVLRDLARRGEELAAQANAYKHELAELIGSLDPTLLQEYGVGPISAAKLLVCDPGRLKGEAAFARCNGTAPKPASSGQTIRYRLSRGGDRQANNALHTIARIRARHDEPTRTYLERRISEGKTPREAMRALKRHLSRSLYKRLITVPLT

SEQ ID NO: 134525 - protein, 422 aa, unidentified
METTDDRWAGVDWGSERHALCVLDEQGKEVDAFTAAHSPEGLAEVVARLQRSGVIAGVAVETTRNLVVQALLDAGVTVYPINPKLSHAWREGWKVAAPKSDPTDAWVLAEGLRQNAARLRPFRTDDARTRELRMLCADECTLIGQRTALVCQLRAALKEYYPQALAWFDDWTAPTAWDFVLTFSTPEALQQASRKRLFGFLKSHCLGIRPHWQALADNRLKGPAWPSDQATTAAKSVLAATLAKSLRALQASLDEYRRRIEALYGDHPDASIFNSLPGAGPKTAPRLLCQFGTDRARFDDAQAVAQLSGAAPVTSRSGRSMTVRMRRQCRKDFRNVLHQWAFLTLSDCIWARAFYDRARRAGQGHALALRNLARKWLAILYRMWQNGERYDEGRYLASLIRRGSPLVQEIQNLQPLITGGKL

SEQ ID NO: 134526 - protein, 359 aa, unidentified
MQTQVKELDFTGQNIFAGIDVHKKNWQVSVFSERLFHKTFNQPPKPEILHGYLTKHFPNGTYYSVYEAGFSGFWIHEKLQSLGINNIVVNPADVPTTNKEKKRKTDKVDSNKLARQLRNRDLEAIYTHNRKVLEDRNLLRMRRTLVKDLTRNKNRVKADLYFFGIEIPEQFTKNPSYWSKRFIGWLEEHKEHQQWTGAASFRILIDQVKSLRSQLLEVNKKVRALSKEDYYQKRVDLLGSIYGVGIVSSMTILTEIDDIHRFANLEKLRSYVGLTPTSHSSGDKDFHGEMINRGNKFLKSVIFESAWIAARQDPVLHMNYINYCKRMKPNKAIVRIACKLLDRVRYVLKNEVPYKNGIR

SEQ ID NO: 134527 - protein, 400 aa, unidentified
MFFLGIDWATEKHDLCLLDRTGAILHQLTISQSHDGFQQLQALVQRYGQEHVLVNIERSDGLLVDWMLEQGWAVYVTPAVVAAHRRPRRSKSDPSDAYLLAYLLYVNDPDCRLVTRSSPSVLYLRELARALDNTLLDQRRLANRLRYLLNQYFPAATRLFAHVETLICLAFLEAFPTPQAARKLSCRLLHQFLKRQKYTFLSRTEAIYAQLQQPMPTAMYAEGYVAQVQFLIPQLRQLHHTRVALERQLPTAFASHPEAAWWRSFPGTRGPLTPARLLAWIGDDRNRFPTAAVLQAVAGTAPVTRRSGKSMRVEFRRACSHPLRKAMDDFARQSVRYSAWAQEYRTAQLARGHSISRANRALANRWASIIWTLWQRCEMYDEAIHAANRAQLGMPRLKVS

SEQ ID NO: 134528 - protein, 346 aa, unidentified
MKITTIGIDLAKNVFQLHGVDERGKVAVRKPLKRKEMSSYFANLEPCLIGMEACGSAHHWARKLEGFGHTVKLMAPQFVKPYVKTNKNDMADAEAICEAVGRPNMRFVAMKNVEQQAILSVHRARQGFVKARTAQGNQIRGLLSEFGIVIPQGIGSVMKQVPEILEDGENGLPGTMRHLIARLADNLKEMDGQAKELEAQIQLWHRENAASRKLAEIPGLGPITASAIVATVGDAREFKNGRQLAAWLGLVPRQNSSGGKQNLLGISKRGDTYLRTLMIHGARSVVRVAEKKAEPGSWMKNLMGRRNKNVAAVALANKNARIVWALLAHDRMFRPDYTSAAVVAAM

SEQ ID NO: 134529 - protein, 379 aa, unidentified
MLNKSSIRTIGVDVHKESYSLCTYCPESDSFVGEITMTSSSKMVANYVKRLEKDMEPNVSIIIGYEAGPTGFGLQRDLLKAGIDCKIMAPTTIYEKKGGNRVKTDRGDARKLAKALNWGAFKEVIPLSPEDEAIRDYIRMRDDRQNALKKAKQQLKSFLLRKDKHYPEKGKRWTLKYRGWLKSLEFELSADQLTFNEYYVEVCRLEEMVERFDQQIEEYSQDDRYRENVSNLRSFGGIDTHIAMATVCEVGDFSRFPTAKDFSSYMGLCPGQQSSGGKTQMTGITKAGNSNLRRLFMESANSMARTTIFNKSKRLKARQSGNSATVIAYADQGTARIRYKYNKMVREGKNANLAKAACAREIACFVWGMMTGNINGEVA

SEQ ID NO: 134530 - protein, 345 aa, unidentified
MELHTIGIDLGKTVFHLVGLNLCGEVVVRKKFSRKQLLHFTANLKVGLIGMEACGGSHFLGRALREQGHEIRLMPAQYVKPYVKTNKSDYIDAEAIAEAVGRPKMRFVPIKSDDQLDLQSLHRVRERWVMRRTAVINQIRGLLLERGITLRQGRGHVDAALPGILEDASAMLSGALRMLLAQLKLELDHLQVRIDEADAMIQKVAGENEACRRLVAIPGIGPVTATAIIAAIGNGAAFKKGRGFSAWLGIVPGEYTTGGKQKLLGISKRGNPYLRRLFVQGARAVLQQRAKQSSGLSAWLAQLTTRTHSNVAAVALANKLARMAWAVLAKNEPYRPPMLVGAATA

SEQ ID NO: 134531 - protein, 389 aa, unidentified
MKIYVGIDIAKLNHFAAAISSDGEIIIEPFKFTNDADGFQLLVSKLESFDKNSLIIGLESTAHYGDNLVRFLVTELYQVCVLNPIKTCQMRKNNVRKTKTDKVDTYVIAKTLMMQDNLRFVSFFDLDMMDLKALGRFRQKTIKQRTRLKIQLTTYVDQVFPEIQYFFKSGLHQHAVYALLKEAPSPKEIASMHMTHLANLLKVNSHGHFTKEQAKELRVLAQKSVGANDSAISIQITQTIQQIELLDSQLEKIEAEMTDIMKFNDSVIMTIPGIGYINGGMILGEIGDIHRFSNPNKLLAFAGLDPSVYQSGNFQAKTTRMSKRGSRVLRYALVNAAWNVVRNNATFKAYYDAKRAEGRSHYNALGHCSGKLVRVIWKMLTDNVEFNLK

SEQ ID NO: 134532 - protein, 372 aa, unidentified
MREPTTFVGMDVHKKDIAVTMLVAGRADAVEWRLANEPTAVRRLARRLVRDGEGLVHCVYEAGPCGYALQRQLEAEGLECDVVAPSMIPIRPGERVKTDRRDARKLAEMARARLLTVVRPPSEDEEAVRDLCRGRDDARVDLMRARHRLSKFLLRRGRVFGAGQQRAWSQAHRWWLGAQSFERVAEQVMFQDYLLAVEQIEARKRSIDVHLQDIAREPRYAEAVGWLRCFRGIDTVTAITLVAELHDFRRFRSPSQLMAYLGLVPSEYSSGPRQQRGGITRTGNRHVRRLLIEAAWHYRHKPRVGEALAERRHGQPAVMIALADKAQLRLCRRYRRMERRGKHTTKIVVAVARELVGYLWAALTPATAVSAK

SEQ ID NO: 134533 - protein, 358 aa, unidentified
MPDDLNHDHPLRVIGGVDTHKEIHVAAVIDELGRLLATATFPATPTGYQRLTRWLTAQGEILAVGVEGTSSWGAGLSRHLRHRGINVIEVNRTNRQIRRRKGKSDTVDAEAAARAVLSGDATVTPKAGTGPIEALRQLRVARCGAMKARTAASNQMNSLTDTAPDAIRESLRGLTPLKRAQRCARLRAGDPLTTAGAARRALASLGHRWLALNTEIRELDKAIRTILDTIAGPLLERHGVGYETAAALLTAAGDNADRIVNEAGYAALCGVSPVAISTGGSNRRRLNRAGDRQANSALWTIVMVRIASGHEPTRAYIERRTSQGHSKRDAIRCLKRYVARQVFNDIRTITTSTLQTAA

SEQ ID NO: 134534 - protein, 452 aa, unidentified
MAKFTESSSSMPVTHPNAAGIDIGSQFHVVSVPPDRTDKSVQTFKSFTGELHAMAKWLKECRVDTIAMESTSVYWIPAFEILESYGFEVFLVNAREAKTVPGRKTDVNDAQWLQKLHQFGLLRASFQPSKEIAGLRAYIRQREKLIEYRAAHVQHLQKAFMQMNIQLQHVVTDITGKTGIAIIRAIVNGQHNPDELVKLRDSRCKNSVEVMKAALTGNYKAEHLFALTQALELIDIYTEKIEACDQVIESTLEGLHQEADSLHTTLPKPRSKENSKNAPSFDVRQSLFKMIGTDLTQIHGIGSSIALKLVAECGTDMTKWPTAKHFASWLCLAPGNKISGGKVLSSKTRRSASKSATDLRLAAMVVGKTNTALGATYRRYAARIGKAKAITAIARKLATLFYNALRYGMEYVDQGADYYEEQYQKKVFKNLKRTAESFGYTLLKNEQTISAA

SEQ ID NO: 134535 - protein, 338 aa, unidentified
MALYCGIDLHSNNCWIAIIDEDQKVVRESKFGNDLAAILGFFEPYRAELEGIAVESTFNWYWLVDGLMDAGYRLHLTNTCAIKQYDGLKYTDDRHDARWLAHLLSLGILPEGYIYPKQERAVRDLLRRRAFLVHKRTAFLLSMRGAFECRTGMRITSNDIKKWKPTDVEQHIADPLEALGVTCLLEPMATLSEQIKILEKEALKRGNLRAEFSSLKTVWGIGKVLGLTITYEVGDIGRFAKVGNFASYCRLVKSNRLSNGKPKGSGNSKNGNPYLSWAFSEAAHFAVRYHEPAKKFVQRKRAKTNGIVAIRALAHKLARASYYVMKDNVDFDSDKMLQ

SEQ ID NO: 134536 - protein, 523 aa, unidentified
MAHSSTRKRTRARRVDVVQKPSGTFHPRVQQVGPEHFGIVTIDCAKLRSKWMLADFYGNVLIPPSPLAHNRPALSAAIDQLRQAIRDHDLKDVLVAIERTGRYHRAAQQAFTAAGFDTRIVHPFATKQFRQPADPGNKTDDTDLAALHRATVTGFALVEVGRDEAWTTFQLLIRHRRELVRKSAMLRCQIREHLDAAFPGFAANFADLWARGCAWHLIRHFATPADIHAAGLDGLCRSLDAADVRYQRRTLGTILTWAEQADTPDLAASARRRFALALDDDLVQKAREIQAIERDIAAALCRTPYILLLSFPGVNVVSAADFADEMGPIEHYANSRAITGRAGLRPSRYQSDEVDRPNGPLVRCCNRKLRAAILRVADNLIKCNHHFNVLAHKWRTEKKDPRHTHVKVALRFCRIAYQIVAGRQVFRHPCLQERHYVLAKLMAFQREHDTGSTESLRDLQAALDQVPQQEHRAEAKPLHEELERIQRGGRHGPQVLGDILPIVLARLGIGDVQSTESGEEDPA

SEQ ID NO: 134537 - protein, 350 aa, unidentified
MNILALDIGKYKTVFCDYVCESGEHEFGRVKTTPQAIHDLIVSKQPEKVVMEVCSIAGWIVDIARVLGKETEVANTSHDAWRWKNVKKKTDKEDALKLAKLSAMNQIPTVHMPAKKVREHRSLIKYRQRLVKNKTSIQNSIRAIFSGQGISGVPKGKSAWTKEGLAWFRSYAKPLGKIKDIEQLWRGRLYIELQTFEAISKALKKVEDKLDKLGSSDSRIVRLQTIPGVGPRLSETVVAFLDDPNRFQNGKHVGSYAGLTPKQYQSGQMERQGRISGQGNRVLRNLLIEISWSSVRHNRWARDTYKRLLRGSKSRKKIAITALARKLLVKCWAMLRDERDWKYDIKENAA

SEQ ID NO: 134538 - protein, 428 aa, unidentified
MKFKQSDVQNQRIERITTSHLVVGIDMAKETHVAQATNFRGIVVSKRHLSFSNSLEGFEKLNRWMTELQQKHRLKKLIIGMEPTGHYWFNLANWLADRKLHVVMVNPATTKRNKENRDNSPSKNDPKDALIIADAVSRGFYYEYTRQPLEFQRLRTMMSDREFWVTNSIRLQNRIVRWLDIRFPEYSTVFKDWTCKRSLATLKTFPCPRDLETYTVPDIIDAWRVHMQRAGGSTGIEKAAQLIAQAKRSVGERTAEEEAKADLQRLIEEFERVTSMLEQIEKNIEALLSEIPMAQQLRTIKGLGKIFTAAILAGTGDLRQYAHGRQVLRKAGLNLAESTSGKRKGRIVLSKRGDSALRKYLYLATVQLVWNNPVFRHLHENNVQEKKMKKQQSIFKLIGKLARILVGIVQRGEKFTPEKTVRAWTEAA

SEQ ID NO: 134539 - protein, 374 aa, unidentified
MADYSEVFVGIDTSKLRNAVALAEGGRNGEVRYLGEIDNTEAATSKLVKKLAAQHRRLTFCYEAGPTGYGLHRLIKTLGHECVVVAPSLIPKKPGDRVKTNRRDALNLAKLLRAGELTAVWVPDARHEAMRDLVRAREAAVDDLKSKRQQVLSLLLRLGRHFTGKRTWTRAHMNWLVSQKLAHREQRIAFEEMLLAVRQANERVIRLERAIAAAVPDWSLAEVVAALMAVRGLDLISATIFLAEIGDLSRFASPRQLMAYLGLVPGEESTGDRVWRGGITKAGNHRARRILVECSWSYRHPPRVGKKKLAKVEAAPPAVQEIAWKAQARLTARYRALARRGKRPTLVVTAIARELAGFIWAVSRAVGAPATPAR

SEQ ID NO: 134540 - protein, 359 aa, unidentified
MQNKSTTLNFKGENIYVGIDTHKRNWGISLYTKDIALKTFTQNPDPDLLVNFLHKNYPLAQYYCAYEAGFCGFWIQKHLESKGVHCIVVNPADIPTTNKEKEFKTDPRDCRKIAKSLRSDLLTPIHIHSNYNIACRGIVRTYNDVVKNQTRFKNKIKSLINFYGVKYPQEFNSEIPIWSKAFTSWLIQLRLDCEENTWTFQYYVNEYLKAKEQVKLLTGRVKTLAKTKLFSKSIHLLCSIPGIGIITAMKILTELEDIKRFKNLDQLCGYIGLVPTTKSSGDKDKVGEMTNRGNKHLKTAIIESAWSCTRYDPAMSQKYIELRKRMEKNKAIVRIAKKLLARIMYVLINEKEYKIRVVN

SEQ ID NO: 134541 - protein, 416 aa, unidentified
MNRTPPASSEEGANIQYVCGIDIGSQSCAGCICRPDKSVVVKSITFANAREGWQIWEEKLNQLDAPPSQILIGMEATSRYGENLYHELEQRGYVLRLLHPGQTHHFHQQQGLRAKTDRLDAMTIARALLSGEARMGYVPDERVATYRELVRLHTQLSDTAASYQNEIQALIVVLFPEFTQVFADPCLPTALSVLKAFPSAQALVEAGVEPLFQLVRAQPVAHYGRPTAKKLVALANQSVSSGRAIAGRSVSLRILCDQLEHTQANLARLNAEIEQLLNTDPGVKGLQQVPEFGPKTLAVLRAELGDVQRFSRTDEVIAYGGMDIEIKESGLWKGKAKLSKRGSGLLRRMLYMTALRSIHREDSAFGVYYQRLVERGLKTGSALMAVMRKMLAVAAHLLRHEGEEYDRSPVCGSRAG

SEQ ID NO: 134542 - protein, 317 aa, unidentified
MEAPVAGIDVSKDKLIVYFQGKLYEFTNDKRGYEEIRKILPKGCKVGIESTGVYHVNLAKYLMGEYDVRIINPFILKKFKDFRGKKSDKNDAKKLAELVVSMGSGFTTSDARELTSQWDFVTRSIARVKNRLRRDLVLLGYRDSLSKKNLEEVLRGGGDSVVLSEVRFLLEELERLKTRKREIEKELEDFVPKDSLIFTIPGIGKTLGCIILARVGDVRRFSDKKRFVAYCGLDPVVESSGKSVVSRGISKRGDAVLRRAFYLAALTAIKVNPVIKRFYEEHKGRLKGKKLITACARKLAVITWAVLYYNKPFDASE

SEQ ID NO: 134543 - protein, 342 aa, unidentified
MGEVTTIGLDIAKSVFQVHGVDAAGGTVLKRQLTRARVVPFFEKLGRCLIGIEACATSHYWARELRKLGHDVRLMPPSYVKPYVKRQKNDSADAEAICEAVTRPTMRYVEVKTPEQQSVMVLHRTRVMLMRQRIQLSNAIRAHMAEFGLIAAVGRDGLQRLITIVEDEHDNRVPAEARICLQMMAAQLRLVNEQVLENDRRIRTSARATDTGRRLMAIPGVGPLLASAFVATIPDPTTFKSGRNLAAWIGLVPRQNSSGGKERLGGITKQGNRYLRQLLVVGAMAVIRYAERHRTRRPWLVQLMARRTTKIAAVALANKTARMVWAIMTSGEPYREPALRVA

SEQ ID NO: 134544 - protein, 400 aa, unidentified
MNNISFSGFLGIDVSKDKFDAYCIDIDGEKQFYLSCSMDRAGFEKLVDHMDNLSIPRENFLIGMESTACYHINIFSYLLAGGYTAVLINPLLISNFVKMQLRKTKTDKKDALVIAQFLLMYADRLAQTSISPHVSDLRDLSRQRESLLSQMTALKCDMKRLLTMTFPELEKLTGVFTKSILKLLSRFPSADTIAKADPAEVTQLLIDHSMGKNTAKTTQAIIQAARSSVGMTSPSRELILKQKADVLIHLESHLKELTAMMIELCRSDMGDDIDIMTSLRGIGEKTATNFLVEMGGDIRKFKDHRKLIAMAGLDPAIYQSGNHDGQGRITKRGNRHLRRVIWLMTIRVIQFNDCFKQHYQRRRQDGLPFKKAVLATAHKLLRVIFAMLTQRKTFCYETNS

SEQ ID NO: 134545 - protein, 354 aa, unidentified
MKRTGKYAALDVHQTTTTASVREEGGRVIARAVLSTEEGAIVEFFGGMRGRIQVAFEEGTQAQWLHDLLEPLVDRVVVCDRRGKSRGGNKGDQVDADELSELLRRGALRTVYHGSPDRATLKELARTYQNVVEDATRVMLRLKALFRARAIKAPGKRVYHPKNRAEWVAKLRDRGVRYRAEALYAELDVLRELRPKVKAAMVAEARRDPAWPVLLSIPYLGPVRVALLLATMRTPWRFRTKRNLWAYSGLAVVTASSSDYVLVDGRPVRRRRAPMTRGLNRNHNRVVKDVFKGAATAATGRPGPLQDLYKGMIARGMREELARVTLTRKLASLTLRLWKTGERYDPTKLTMQAR

SEQ ID NO: 134546 - protein, 328 aa, unidentified
MQKISTMQASGKNIFEGQLTIGLDLGDRSSAYCVLNEAGEIVLEHKLATTPEAIKQVFGSLPRCRIAMETGTHSPWVSRLLTALGHEVIVGHAQKVRLITKSRRKDDRLDARTLARLARIDPELLSPVKHRSAQSQLHLTEIRARAVLVSARTALVNAARGLVKSYGERLRKCGTQQFCRETTSGLSTGLREALEPLLREVESLNERIQEYDRRIEKMAKQTYPETALLKQVKGVGDLIATAYVLTIEDPHRFRKSRDAGCFVGLQPARRNSGESEPQMRISKEGDEYLRTLLVQGAHYILGPFGKDSDLRRWGQKLSARGRNERWWR

SEQ ID NO: 134547 - protein, 353 aa, unidentified
MYVGIDFHKKNTYVTRMDQQGVITESINLKNELGNLEKFVNTIEPEDHVVLEATGNWQHFYELVEDKALDITLSHPAKTRAIASAKIKTDKIDSEMLAHLLRADLIPVAYIPSRETRDLKEVLRYRASLVSVRTSIKNKVHAILSKNGIICPYSDVFGKKSLLWLATLPVRACYRTSLDGYLAVAGTLSFEITKIDEDIHEMAKASDDARLLMTMPGISFYSALLILSEIGDINRFPSSGHLASYAGLVPSVYSSGGKTRMGRITKTGSKYLRWVLVENSHHAIRGTRRFEDLYGRVVVRSGKNAAKTAVARKMLVSIFNMLTKHEVFQDIQEVNHGQGAGERAEVIASPRSS

SEQ ID NO: 134548 - protein, 446 aa, unidentified
MKKRIYRRMPVNDFQPQTISHADLGGKLVFAIDVAKVDMVAAVAAADGRVLHTICWKAPEQNPAVLSILRGFRTAGVTVEAVMEPSGTYGDVLRHQLELDAFPVFMVSGKRTHDAKEIFDGVPSLHDAKAAAIIARLHADGLSTRLRDEGPDRRQLRAALAIMDLYQERYLQLVHRLESWLARHWPELPTLLELTSSSLMALLARIGGPADVAAAPEQATKLLLGISHRLIADDKIAAVIASASTSVGVPLVGLERNALMAIAEDAYRAHRAFTTAKTKVDQLAAATPAATLAPVVGHTTAAAVFAEVGDARSFPCTRAFLKAMGLNLKEKSSGTVQGQIKITKRGPSRVRQYLWLAVFRWIQDDPIANAWYQRKKQRDGGRASRAAVALMRKLAKGLYHVGRGGSFDSSKLFDTRRLQVGDVARSFVGKGSKPSPLMLNAQISEG

SEQ ID NO: 134549 - protein, 409 aa, unidentified
MKSQLETLHKRVAGIDVHRMKHVVTVLSEDAAGNLTRETREFGGFKRDLKALAAWLREMGVELVILESTGIYWKSVYARLEEAGLVTWVVNAHHVKNVPGRKTDVADSEWLAQLGRYGLVRPSFIPPKDLRELRLVSRYRRKVEANLAAETNRLHKMLDDAGIKLGGLVADINGQAARAMVDGLIDGLAPSELIKLSGRLKAPKETLLASLDGDLSARHRLVLEEIREHMRQLERHLERLDAYLRDAMVPYAWAWTVLQTIPGIGEIAAALILIEIGDDLTHFGNADRFASWAALCPGNNESAGKRKSGKTRKGNSMVRYLLCEAANGAIRTLSVFREKYRGLVIRRGHKKAIVAIAHKMIRTIYFMLTRRETYHDTGFDYAAANVKKNAPRWIKALETHGYVVKLAAA

SEQ ID NO: 134550 - protein, 343 aa, unidentified
MAEYAALDVSLQSTSVHIVDQQGRCIWRGKCPTDIAALSSTIRKHAPEVERVGLETGMLATWLYHGLAEAGLPVVCMDARQAKAALSCRVNKTDANDAEGLAQLLRTGFFRQVRVKARGTMLVRTLLSARRQLVRTELDLANQIRGLLKIFGLLLPRGGGRLFEMAVRERLADHQQLAAVIMPLLQAWRAVREQVLALDRIAYAVAKRDARCRLLLTAPGVGTITALAYVAAVEQPEEFKNGRAVSAWVGLTPARYQSGQIDYSGRISRQGDVHLRTYLYEAANTVLTRSRADSALKRWGLGLKARLGHKRAVVAIARKLAVVLHAMWAKGEPFETDAVAAAA

SEQ ID NO: 134551 - protein, 328 aa, unidentified
MQGKVSSERTAMATVYVGIDVCKEWLDIHLHPLGRSFRVTNDTAGLRRLKRELDALDQMPRSALHIVMEATGKWHRAVQRSLHADGFYVSVVDPLRARLFAKACGFLAKTDRLDARLLAIMGEALKPAQTPPQDQALEALQELVNARSAANGERTALSNRMKTAVTAFLRKELTRRLAALDTHIARLDAEIERSIGAEPEMRRRLDILISIPGIGAVTAASLIAGLCELGACSGKQAAMLAGLAPLACESGERAGHRAIRGGRPAPRNAIYMAALSASRHNPDLAHFAERLKKAGKPNKVVLVAVMRKLIVLANTLITKNRIWTPNQP

SEQ ID NO: 134552 - protein, 354 aa, unidentified
MPSKVTKPYTSAQPKLRSIGIDIGKDVFHIVGFDHNGKVVLRRKFRRLELDAVFEKLPRCVVGMEACLSAHFVSRRLRALGFEPRIIPAIYVKPFLKGQKNDYNDAEAIAEAALRPNLKLVKEKTQEQLDLQACHRVRSRLVSRRTATINQIRAFLIEHGIAIRTGANSLRRSLPEILLQRADELSPRMRVLIEELHGDWLRLDARIEALNEEIEEISRQEKSCQNLMTIPGVGPLISTATVAAIGNGEAFERGRDFGAWLGLVPRQYSTGGKPILGRISKRGSKYLRTLFIQAANVILMRPQNWPRYSFGGWLVTAATRLHRNKLATALANKLARIAWSVLRYNERFDDAQTI

SEQ ID NO: 134553 - protein, 386 aa, unidentified
MQASNRSTPIANDLSTIFVAIELSRKSWLVTMHSPDKDRMSRHKVESGDHAGLLALIERIRERAARALGAAPAVVSCYEAGYDGFWLHRLLLAAGITNHVFDPASIMVDQRARRAKTDRIDGEQMLRTLMAYCRGEPRVVRVVRVPSPEQEDARRTSRERDRLVKEQTAHTTRIKALLRLLGMAVGNPHRRDWLSWLSAQRDWQGQAVPPRIKAELEREHARLMLVRQQLDALAQAAAEAELTPAAAEMAQRSDLLLRLKSLGPVFATTLTNEAFYKDFRNRREVASYFGLTPSPWQSGATDREQGISKAGNRRAREKTIELAWLWLRHQPDSALTQWFRQRTLNASKRIKRIAIVALARKLIVALWRFLTTGLVPAGAVLKAAKA

SEQ ID NO: 134554 - protein, 342 aa, unidentified
MDQVSIIGIDLAKRVFQAHGSAPDGSVVFRKKLLRAQLLLFLAAQPRCTVAMEACATAHGWGREIGELGHEVRLIPPIYVKPFVKRQKNDAADAEAIAEAASRPTMRFVAVKSEDQQARSMIFRTRDLLVRQRTQLINALRGHLAEHGVVAPQGTAHVKRLAEVIGDETAVLPATVREIGRLYLEQIGLLTGRIEELEKKLRTEAGQAEATRRLQTMPGVGPITAVAIESFAPPMETFRRGRDFAAWVGLVPRQNSTGGKQRLGRTAKMGQRDIRRLLIIGAMAVVNSAARHGAPEGSWLERMLAKKPKMLVAIALANKMARGVWAMMTKQEDYRYPAAVAA

SEQ ID NO: 134555 - protein, 364 aa, unidentified
MNKCLHTELSSHEETRCQFNGGRCAIKLGIDVHQDFYVVVEQVGGSNPKPPQRFQKEAFLHWAARLKEKSGAQVHAVYEACGFGFSLQRKLSALSINCYVVCPQKLDEQNKRVKTDGLDAKALCLKLDRFVQGNRAALAIVRVPTEEEEQLRAIHRQREQLVKARKQLEAQGRSLLVNHGLEPVQNWWKRRTFAALQVSDWMKALLQNSQPILIGLEEKIAALTVQLQRAASPDQPRGLGKMTSVIIDREIGDWHRFRNRRQIASYTGLCPGEYSSGNTRLQSCVTKHGNPRLRAALVELAWRLVRFQPNYHPVRKWRQILAKGALATGAARKKAIVAVARQLAVDLWRIKTGRLRAEELGLIN

SEQ ID NO: 134556 - protein, 324 aa, unidentified
MTDAVLGIDVSKNTFDTNLGAGTKARSKSFANSPAGWHHLIAWLGEHKIGQVHACLEATGRHGLGIALALHEAGHVVSIVNPAQIRDFARTKLGRNKTDQVDAVHIREYAELFKPRPWTPPSPAMRRLCELQTIRAGTVAGLTEWKNRRHSGIMDDLALSLAKTTIQHFTSQLEEVDQAIAETIDNDVELSAKRDLLVSVNGVGEALAGIVLAELPGPDILGSSAAVTAYAGLNPQQHQSGISVNRPVRISKIGNAVLRTALYMPALSAMRYNPAVAALVDRLKAQGRLKGKQIVIAAMRKLLVLCFGVLKTGKEFDPAMAMGK

SEQ ID NO: 134557 - protein, 443 aa, unidentified
MSRKDKTHLRGERGQAFADQIRGLNLEQILCVSLDISKYFHLVMIHNALGEIVTPTFEIDIFKTGFEQLCQAVDEAIDQTQAQLVLLGMEPTGHYFENLARHLHQRPQPVTLLNTYAVSQNRQQQMMRREKTDPIDVAAIGDLLRRGEGSPYQPLQGIYLELQHLDRVRLSKVKMRTMLKNQIIGHLDRIFPGLVLIGEQARSRYRPLFVTDFWECQTMQQLIRVCPDPRQLATMSTTDLIAVFHAHNFKMGPKKATKIIAYAQKVLLPDPEIIAIRSELLHTDLLLLEAVEERLVLLETRLVDLVAHTPYHIWTKLKGFSDLQVARLAAAIGDPDHYTHAKQVFRRSGLVSGRNDSGVRQNQGKGSPVIKTGDVHLRRALMDTLSTLLLHQPVLFSYYAKLKLSKPDLVARVATARRTTGILWATLRDQYSTTLVYKRGEPM

SEQ ID NO: 134558 - protein, 454 aa, unidentified
MAKGQEQKKSDEVQSLHELQPNAAGVDIGAREIYVAVPAGRSTKSVRRFLTFTDDLHEAARWLKDCGIESIAMESTGVYWIPVFQILDDYGFEVILVNARHVKNVPGRKTDVKDCQWLQHLHSVGLLRGSFRPDQDVCVVRSLLRHRDNLVKAAASHVQHIHKSLTQMNLQIHNVISDITGVTGMAIMDAIIAGERNPEKLAECRDPRIKADKQTIVKSLTGDYRLEHLFTLKQALQTWRHYQQMLRECDVEIENHLKEFDSRIDPNEPPLPPPKKNQRKHKGNGPDFDIRAHMYRILGTDLTQIDGVSSLTANVIFTEIGPDLSDFQNAGRFCSWLGLCPNNNISGGKILSSHTRPGSNRAAAALRLCANSLWNSKSYLGDYFRRMRARQGAPKAITATAHKLARIIYHLIKNKTAFNASVFVEEENKHQQRLKKCLINQAKSLGIQLIPAWS

SEQ ID NO: 134559 - protein, 444 aa, unidentified
MKALPVLDPKAAAIDVGSEKLHVSIAGDAPKVFGTFTGDLEALRDWFQQEAVRTVAMEATGVYWLYLYEVLEAAALEVVVVNGRHVQNVPGRKTDMADCQWLATLHAHGLLRGGFVPPADIRQLQDYQRLRADHLLGAASQVQKMQQALERMNIKFHDVISDLSGVSGLKVVRAILKGERRPGELLALCDQQIQKKKSAAVKESLRGCWKKEQLFALRQALELWETYQQKIADCDREMQALLQQLGQPQGPEGGSGILGPVKLAPVKAPGKNAPAIERCQELLARLCGGRDATQIPGLSVYLVLQLISEVGTDMTCWATEKHFTSWLGLAGGRKQSGKRKGSIKAHRNRAGRMFCAAARALAQSVDKALGGFYRRLRGRVGGLAANVALARKLAQLFYRLLRYGMEYVEKGLKLYEAKVLETEARLLRKLAKKQGFTLIPAFAN

SEQ ID NO: 134560 - protein, 338 aa, unidentified
MKHYAGLDLSMESTQVCIVDETGRKLVSEKVESTPEAIATLLKRYGPIERAVIETGRMSPAICLGLRDLAIPVMCIDARQAHQSLKAMKANKTDPHDAAGLAQLARTGFYKEVHVKSPAAHGVRSVITARGHLVEARVRLDNMIRGLCATFGYCPGAGQGKAFLERIMQAAHIPGLGEAITSLLSVRAELMEQIKEMDRRLRIIASQSQACEILMTIPGVGVQTSAAFAVAVDEAGRFRQSRNAGAYFGLVPGRHQSGELDWTGRITKQGDGTVRKLLYEAANSILTRSRETFALKTWAMKIAKRRGLKKARVALARRLAVIMHAMLRDGTLSRHKVR

SEQ ID NO: 134561 - protein, 367 aa, unidentified
MFQLLTRQEESEMNATTVAVDLAKNVFELALADGNGRVIERHRLTRTQFERWFDNRKVDRVVMEACGSAHHWGRWLEARGIAVKLLPAQYVRAYVKRNKTDAADAAALLEAARAADIKPVAVKSIEQQALQGLHRLRSGWMATRTRRINTLRGFCREFGLEIRVGAVQGLAAIARLIADDRSAIPALLRTPMRLALEEIRLMEARIEHLERELAQLARQSPACEALTSVPGIGLLTSTAMVAAVRDPRSFDSGRRYASFFGLTPREYSSGQHRYLGRISKRGDRYIRMLLTHGARSVLRAATAAQRQGRKLDRLRTWALQVQARTNHNKATCALANKLARIAWAVWVKHEKFQSTPAHPSMAAEVAT

SEQ ID NO: 134562 - protein, 340 aa, unidentified
MNKITTAGLDLAKNNFHVVCTNGSGKIVRKRMLKRAQVLPYFAQLPSCLVGIEACSGAHYWHRELAQLGHQVKQLPAQYVKAFVRGNKNDYNDALAIAEAVRQPELRPVSPKTIPQQDIQALIRLRQKAIASRTLLSNQLRGLLAEYGIVLHPGMAVIRRRIPELLEDADNGLSPLFRECLAEGYRQLQDLDGVIERYTRKLTHWSQQHEACQRLQSIPGYGSIVASVYFSQVGNGQDYRRGRDVSASLGLVPAQHSSGGKPRLLGISKRGNGYLRSLLVHGARAVLRQAERQGKTDRLSLWALRLKEKKGHNKAVVALANKMARMGWVILNQHTVYQAR

SEQ ID NO: 134563 - protein, 326 aa, unidentified
MEHELHYIGIDTAKEKLDVDVLRPDGRHRTKKFANTTKGHDELVSWLKGHKIDHAHICIEATGTYMEPVAECLYDAGYIVSVINPALGKAFAQSEGLRNKTDTVDARMLAEFCRQKRSAAWEAPHPLERALRALVVRHQALTDMHTQELNRTETAREVQRPSIDAHLLWLEAELKRLEKQIKDLTDDDPDMKHRRKLLESIPGIGEKTSAVLLAYIGLKDRFAHARQFAAFAGLTPRRYESGSSVRGASRMSKAGHVSLRRALYMPAMVATSKTEWGRAFRDRLAANGKKGKVILGAMMRKLAQVAYGVLKSGVPFDASRHNPVAA

SEQ ID NO: 134564 - protein, 392 aa, unidentified
MDLQPLFKRVIGLDVHQAQITACAIVEQPSGEVLIERCQFRSMQRDLRAMAAWCAQRQPDEVVMESTSIYWKSPYAALEAMGIIAKVVNARHVKQVPGRKTDMGDAEWLATLARAGLLRGSFVPPPKLRGLRLVARHHRLHKILNDAGIRLSVVVGDINGQSSRAMIAALLEGQSPHEVSRRLKADRKDLLEALQGELSPQHRFILKALLVHIDALQEQIAQHDAYLLDSLAGEEQDMLALLQSMPGIDRVGAALLLVEIGCDMQVFGRAERLASRAGLCPGNHESAGKRRNGRMRKGNRYVRRLFCEFANSASRTRCALQAKYQALVVRRGRQRSIIALAHKMLRIVYCMLSRSTPYQDTHIDYRALVVQRNAPRWIKALAQFGYLPAAAH

SEQ ID NO: 134565 - protein, 444 aa, unidentified
MRIIFERVAGLDVHKRTVTATRMRVSEASQLEWETKTFGTTTPELLMLHDWLQAWGCSHVAMESTGDYWKPVFNLLEGSFEVWLVNARHVAQVPGRKTDAKDSEWLAELMLHGMLKASFIPPKPQRALRDLTRYRTTLVQERVRLINRVQKLLEGANIKLASVVTDITGVSARAMLEALGAGQDDARLMAELARGRLRHKLPELEKALTGLVEPHHRFLLSQQLAHIDFLDEQVSTISAEIARRMEEMSQPPARPTSEPPRQEVTVELNSDQAEPGLTWSEAAVLLDTIPGIDRKTAEVMLAEMGLDMRQFPTDKHLAAWAGLAPGNYQSGGRRYSGRIRQGNRALKSIMVQAAWAASRTKDTFLKARFHRLAARRGKKRALVALAHSMLVSAWHMLTQRQPYQELGGDFFDQRKKEVKVSYLIRRLEKLTGASVTLEMQSASA

SEQ ID NO: 134566 - protein, 410 aa, unidentified
MPLYCGIDWATDHHDVAVVDDDGRVVARGRVGNNAAGFAQLLTLLADAGDTATHPIPVAIETDRGLWVAALRETGRTIYPINPLAASRYRPRYAVSGAKSDATDAVLLANIVRTDADAHRPLPADTELAQVIRVLARAQQDAVWARQQIGNQIRDLLKDFYPAALVAFDQLPNGGLARADARTILAVAPTPEAAARLTPARLRRLLAKAGRQRRLDRDIERLCAIFTDTYLHQPPQVENAMGIQLSALLRQFDAACAAAEELAEAAIAHFERHPDAEIITSFPGLGNLAGARVLAEIGDDRTRFADARGLKAFAGSAPITRASGKKTVVLHRHIKNRRLAVVGAIWALGSLRASPGARRHFDARRATGDWNRQAQRHLFNKFLGQLHHCLQTGQLYDEHRAFPPPLPLAS

SEQ ID NO: 134567 - protein, 418 aa, unidentified
MKKHNNSGKKSEPTSKQAKPRGPIRRDTKDVLAELVGKLKEKLDPKKLAATSAGEKHKRGELRPNLDRLTVGVDLGDQWSHYCILGLEGETLAEGQLRTTQEDLAEFFQALNAARVVFEVGTHSPWEQEVIGGCGHEVLVANPRMMDGSKRRKRKNDRIDANKLARLGRVDPQSLHPIRHRSREVRQDLAVLRARDALVAARTELINATRGLVKSMGTRLPKCSSPSFAGKVEGTVPAELRDALLPLVRMTAALSDCIQEYDEKIEKLGSEKYGHTAVLRQVKGVGPITSLAYVLTLENPDRFEKSRDVGPYLGLVPKQEDSGEIQPQLGISKTGDTMVRRLLVGSAHYILGPFGPDTDLRRYGLRLCERGGKNAKKRAAVAVARKLAVLLHCLWVSGEVYEPLRQGKSATIAPAVAA

SEQ ID NO: 134568 - protein, 406 aa, unidentified
MAAVMIGVDPHKASHTAVAINAAEERQGELRVRACAGQAQRLLAWAAAWPERTWAIEGADGLGHLLAQQLLAAGERVLDVQPKLGARVRLLAAGAVNKNDPNDARSVAVAALRSPSRRQVTADDHAAVLKVWSKRHRDLGRTRTQVACRLHAVLCELIPGGVSKRITAGQAARILTSITPRNAVEAARCELAADFTEDLRGIDAAMRDTRHKLTAAVQAAGTTVTEVFGVGPVIAATVIAGVRDISRFPGRDHFAAYNGTAPVEVSSGQRKIYRLSRRGNRRLNHAIHMAAVSQVSHRRSAGRAYFDKKLAEGKTPKEALRSLKRQVSDAIFTRLQADASQAATVRVTGPGGHPGNGSVASAAGSHPENRLFGQATPGPATTLRPRPAASRRKPTSRSTKTTTRTT

SEQ ID NO: 134569 - protein, 384 aa, unidentified
MAKIITKLPLFHLKANKSALLFALQLHTNADSLMSFIFKNIGNSPCVFGMEATGHYWYPIYSFLKAKGYTIYVINPIQSDTLRKMYIRQTKNDSIDSFLIAEVIRFGQFTTTSMTDENILAMRQLCRYRDSVISSRTEIKLRISTIMEQIFPEYEKQFSSLWLSTSMGILEKYLTPENIENAPIDELFEIIKDKSHNKLTMKKAISIREAAADTFGIKIAQDAFSFQLKQLIDRMNFLDKQIEALDCQILEYYEKFDCYLHTIPGIGMIAAATILAEIGDINRFKSSSALVAFAGIDPTVRQSGEFSSTHNHMSKRGSPYLRHAIFLAATTCSFHNGPLNAYYKKKREQGKHHLTATGAVARKLTTIIYAVFRDGKPYEPKKFC

SEQ ID NO: 134570 - protein, 314 aa, unidentified
MNTNWVGVDTHKETLACYVNGRFKEFKTTQKDFEEAVKWAGKNSLWAIEGAYCFGKPFTAHLIRNGCEVYEVNPLLTKTWRRSLAISNPKNDYGDAKVISLNAENARLQKISFETILLKEKLTARAHFIKNRTRAINAIKMLFSTKGLDLPFKDLTTLKAGKWLSDQDDLIIKHYGKALSDFTQAINEIDKEIKKSLPEKAQKLKQLKGVADLTAAIIYTETKGKIISVEALASYAGVAPVENSSGKSKKHKNNKTGNRKLNSAFYRISLHQSIWDEKGKAYYEKKLKEGKTKRHARKCLARQLVKLVFNILND

SEQ ID NO: 134571 - protein, 355 aa, unidentified
MTPSLSALAGLPTGTRETCRGAPVSDHPGVGLAGGPALPLHGVTGALALNETLHFVGIDWAAVEHAVCIMDVTGKIVSQIMIKPSADGIAVLVRRLAELGDPADIPIAIERPNGRLVDLLLEPGHPVVPVNPNAIKTWRDGEVFSGAKSDAGNAAMIAEYLHLRQHRLRTVTGTTDEALTEALRDAVLAVASVLTALGTAIKDLDRSTVAHLGERPDGKILTSLPRSSQINAAQMLAGWDDCRQAYECPDSVAALAGCTAVPNQSGKHRAVHFRWACNKHFRRAMTSFADNSRHANPWAAKIYRDAIADGKDHPHAVRVLVRAWIRVIWRCWLDSTSYAPTKHGALRRQITPTAA

SEQ ID NO: 134572 - protein, 351 aa, unidentified
MSQKTDAVVASTIGIDTGKNTLHLIGLDDQGTIVLREKLSRSRIVSRLANVPRCLIGIEAGMGTHYVARELIALGHDVRQVPPVYARPFRQTHKNDFRDAYAIAEAVRRTSTRCVPVKTDDQLDLQALHRVRSRLISERTAVINQIRGFLLERGIPVRQGLRFLRQQLPEILAKRIDVLSPRMIRIIEDLSGDWRHLDQRIEHVTEEIEVLAHGTESCRQLMTVPGIGPIIASAMVAAIGNGVAFAKGRDFAAWLGLVPKQMSTGDRTILGRISKRGNRYLRMLFMQGARVILLRPANWAKHSFGSWLTAAAKRLHHNVLATALANKLARIAWTILTERRSYETRVIADAA

SEQ ID NO: 134573 - protein, 341 aa, unidentified
MGEVTTIGLDIAKQVFHVHGADGSGAALFSRKLTRGKLLGYFATQPRCLVAMEACGSSHHWGRELQRMGHEVRLIPPAYVKPFVKRQKNDARDAEAICEAAQRPTMRFVTVKSEAQQASAAVFRARDLLVRQRTQLINALRGLLAEYGLVAPQGRARVAQLIADLEDPACTLPEAARGTFLVLVDTIRSLDTRIDGFEREIAQRAKQDDDARRLVTIPSVGPVIATAVLALAPPAQSFGRGRDFAAWMGLTPRQRSTGGKEQLGKITKAGERTLRRLLIIGAAAVVRHASKNGAPEGSWLARMLERKPRMLVTVALANKTARIIWALLAKGGVYKAPAVAA

SEQ ID NO: 134574 - protein, 344 aa, unidentified
MTIVEQRTAITGGVDTHSEVHVAAALDPLGGLLGTREFPATAAGYAGLLGWLGQFGDVALVGVEGTGSYGAGLARYLASRGVRVVEVDRADRQDRRRQGKSDPLDAVSAARAAQSGRAAGAPKGRDGAVEAIRTLMVAKRSARHERTQAINQARALILTGPDELRARFAGKRAAALAEAVAALRPRPGDAADYSLRVALRELGRRVQFLDAQVERLDDLIVPLVTIRAPGLLSLYGVGPDTAALLLIAAGDRPERLRSEAAWAHLCAVAPIPASSGKTRRHRLNRGGNREANHALWRIVITRMSAHPETRAYVARRTAEGLSKKDVIRCLKRYVAREVYPYLRG

SEQ ID NO: 134575 - protein, 401 aa, unidentified
MNAVGIDVSKGKSMVCVMRPFGEVVLEPFEVLHTAQSLNDLAGKLKALDGETRVVMEATGNYHKPVAFVLHDAGLFVSVVNPVLIHDYDNNSLRRVKTDRKDAVKIANYTLDKWTRLRQYLPEDDTRLALKNCYRQYQQAVAVRTMLKNNLISSLDLTFPDANKLFSSPAKSNGCEKWVDFIGDFWHSACVSSLYSDAFAKKYLKWCQKHGYNFTRSKSDTIYACAVNAASLPKSPTSKLLIQQQVAQLKAVSQSVAAFQQEMLRLSQQLPEFDTVMEMYGVGPSLGPQLMAEIGDIRRFSSKKLLIAFAGIEPQPNDSGKIVGNDSGISKVGSAVLRRTLFLIMTVILKTQPQDEPVFQFMNKKRSEGKPYKVYMMASANKFLRIYYARVKAVMDSKHSQ

SEQ ID NO: 134576 - protein, 351 aa, unidentified
MMIIGVDYHPSFQQIAFMDQATGECGERRLNHSDGEAEKFYRELKQPGVRVRVGIEATGYSRWFERLLVGLGIEAWIGNAAEIKTKRVRKQKTDREDARLLLKLLLEDRFPRIWVPSPENRDLRQLLWHRHRLVQMRTRIMNQLQAIAMNEGQRWKKKLFSEAGRAQLEKFPLAVWANRRRQDLLELLDRMDPTIEELTAAVEQEARKRPEVLRLMTHPGVGALTALAFVLIIGTPERFPGGKQIGSYLGVIPSEDSSGGRQRLGHISKQGHALLRFLLVEAAQAAARSNPHWRRRYVHLAMRREKSIAKVAMGRRLGVRLYWMWRNGLEYSQSLEFGSYAGELVTGHGVN

SEQ ID NO: 134577 - protein, 339 aa, unidentified
MDCMAVGVDIAKNVFQVHYVDQESGEIVNRPIKRAKFLEHFANRAACLIGMEACGGAHHWARELRKMGHEVRLMPAEFVKAFNIRNKNDAADARAIWLAVQQPGKPIAVKTEMQQAMLALHRMREQLVKFRTMQSNGLRGLLTEYGEVMSKGRVALDKEIPAALGRIAERLPVALIDTLREQWNGLTRLDEQIAEIERRMREWKKEDKAVKAISEIPGVGLLTATAAVAMMGDPKAFSSGREFAAWAGLVPKQTGSGGKVNLHGISRRGDTYLRTLLIHGARAVLTHGKDPGPWVEQMKKRRPTNVVIVALANKMARTIWAVLAHDQTYRKDYVSVKPT

SEQ ID NO: 134578 - protein, 317 aa, unidentified
MDGIAFDQVVKRGCGIDIHRDEAVATIGGEGITTETRSFKTFTSSLTELKEWLIENGVTDVAMESTGVYWKPVMNVLEGPELRVWIVNARHIKYVPGHKTDKKDSAWICQLLLAGLLKKSYVPPREQRELRDLTRYRKKLIQNIASEKNRIIRILEDCNVKLDSVISSLEGVTGTALIDLLISNGEVTMDDIDAVYHKKLKASKELLFEACNGKIGEHHKYMLQMIRKDIEQTQRLIDELTFRIAVVLAPYNSALEALSEIPGIDRKTAEDIVAEIGLDMEQFPTEKNLASWAGICPGNNESAGKKKAQRPTTGTNK

SEQ ID NO: 134579 - protein, 354 aa, unidentified
MRSSATAGLVVGVDTHRDTHTAALCDRAGQAMAVRQFRAGPDGYAAALAWARQEAGEAGLAWAIEGTRHYGLGLARYLTAAGEHVEEIDASKHAGKRRNGKSDAIDAVRAAREMLARPAAAQMRADGDREALRLLMCDRDNAVASAKTARTLLTSVIVTAPAAVREQLRNIPRDRRATVCASLTSPPGADRQTRVLYQTLARLGQRITTLARTAADLEKQIRALVEDMIPGLVAAEAGLGALTAAQLLLSYSHHGRIRSEAAFGMLSGTAPVPVSSGRTDRHRLNRLGDRQLNRALQVIAVARMRSHPPTQAYVQRRLAEGKTSREIRRCIKRYLARHLYRALRNQPGLELQRT

SEQ ID NO: 134580 - protein, 406 aa, unidentified
MSVVAAPVSSSTVVVAVDVGKNCVALSVTDANRHRLFGPVEFAMTRPALERVVARIGAVLPADGAIKVGVESAGHYHLPMITGSAWPAGWEVLELNPAHVGEQRRVAGRRRVKTDAIDLEAITDLVLSGRGIPVTAREEVLSALTAWSAHRSRRVGTRTATKNQLLGQLDRSFPGLTLALPDVLGTKVGRLVAAEFADPARLSAMGVTRFIRFAAHRELRVSRPVAGRLVTAARDALPTRDAVIARRVLAADLALLADLDQQITLAEEELAKLVPASPFRTLTSVPGWGVVRAAAYGAAVGDPTRWPGPSQLYRTAGLSPMQYESAGRRRDGGISREGSVELRRALIDLGIGLWHSDHPARAYAAGLKARGKHGGIIACALAHRANRIAYALTRDQAAYDPTCWVR

SEQ ID NO: 134581 - protein, 402 aa, unidentified
MNPVVGLDISKEESHGQAFLARGKPFRGTFHFEHTRDGLANLHQVLKDVETASKLRPLLILEATGHYQSPVVQFLEEHQYIYIIINPLISNRLRKSQLRKVKTDAADAYLLGELYYKEEFEPFKKRGVQLLNLRYLTRQYESLSKMCVQTKLQFQAVLDQVFPAYKGVFGAMYSRISLRFLSKFPTSYSVLQTDEITLKAKMKELLSSKRGRSEGWINQRVQRLLDAAKQNPFQQTMYASHLINLKVLITLILQYQEHLAELEQNIDALAEEIEEYELIQSIPGIGHKIAATILSEIGEVDRFDHPKKLVAFAGIDPSVFASGKFTATRNRITKRGSRQLRYALVMAVQCGLIRSRNMRLKAFYDRKRAEGKPHKVALIACANKLIHWLYAILKNKKEFRPI

SEQ ID NO: 134582 - protein, 412 aa, unidentified
MQAIVERCCGLDVHQETVVACLLIGAPGARPTKEVRTFRTVTRELEALRDWLREAGVTHVGMESTGVYWRPVYAVLEGHFKLIVGNAQHMRNVPGRKTDVKDAEWIADLVRHGLIAKSYVPPRPLRELRELLRYRRKLVESQAAERNRLLRLLETANIKLASVASDVFGVSGRAMLRALIAGEASPEAMADLARGLLRRKRADLILALDGRVEEHHRFLLAMQLRRLEAIEADIAALDQRIGERLEPYAAPHALLMQIPGVDWVVAAVLIAEIGVDMSVFVSVYHLAAWAGVCPGNHESAGRQKSGRARKGNIHLRAILVGAAISASRAKGTYLKDKFHRLKARRGGLRAALAIAHKILVSAYHMLAKNLPYRDLGEAYLDQIGQTRTVANLKRRLERLGYRVTLEPNAQPT

SEQ ID NO: 134583 - protein, 387 aa, unidentified
MAQVNDLSRSVSAFDPISTLVVVVEMSKASWLVSSVVPGVERQPLKKLEPDATALLRLIERWRNEAVRAGRPIGRIALAYEAGRDGFWLARWLIARGIEAHVIHSASVAVSRERKRAKTDRLDAAMLMRVFLGWLRGERGHCGMVAIPTMEEEDARRPSRERESLVNERSRITNRMKSALARLGVRGFKPHLRKAPERLAGLRTAEGTGLPTNIIEEFRRDMARLALVREQIGSIEKTRAERLERAPDTGPHAMVRLLARVIGIGIETADMLVREILSRKLRDRRAVARYAGLTGSPDESGLKRREKGLAKAGNARVRRGLIQLAWRFLMFQKDSALARWYRMRTEGPSGARKTTMIVALARKLLIALWRLVTTGEVPDGVELRPAA

SEQ ID NO: 134584 - protein, 320 aa, unidentified
MQIPFALLNIGADVAKDTIVVACSEGGFPVREIANQRAAVLTFLKSLPAGCRIGVESTGTYHELFAEAAHQLGFLVFVLNPKDTRHYAQAVGLRGKTDRVDAALIARMIAHEHTKLHPWTPPTAQQREIARLIKRRATLIGLREAVEMSLHELGGFADELKALRRRFNQLIARLDLRVQALVEANPERKQNFARMCTISGVGPVVGTALVNTLERVPVKSADAFVAFTGLDPRPDDSGQHRGKRRLSKRGPAELRRLLYLAALSAVKTKPWRSLYEHYRAKGLSSTAALVILARRIARTAWSIYTYKTEFDPARLTSSLT

SEQ ID NO: 134585 - protein, 317 aa, unidentified
MSNQPLFVGIDVAKDHLDVAYRPGEQLAQYRNAEAEIAQLVHHLHAAAPHLIVLEATGGLEVPVATALALAGLPVAVINPRQVRRFAEAVGQLAKTDRIDARLLAYFADAIKPEPRALPDEQAQRLAALMARRRQLIDRLVAEKNRLHTAIAAVRPRIQAHIAWLEHELADLDDDLSAAIKASPLWRETEQLLRSTPGIGPVAARTLLFDLPELGGLNAKQIAKLVGVAPLNRDSGRQHGPRMIWGGRATVRTALYMATLSALRCNPVIKAFYGQLVQAGKPKKSALVACMRKLLVILNAMVRDRTPWQPSRSAAAP

SEQ ID NO: 134586 - protein, 343 aa, unidentified
MDYFAGLDVSVKETSVCVVDDAGKIVRETRVASEPEALLQVLTSTIYRFKRVGLEAGPLSQWLYSVLAEAGLPVICVETRHMRAVLKAQINKTDRNDGRGIAQMMRVGLYRPVHVKTLGSQKLRVLLTHRKLLQSKAIAIENDLRATLRNFGLKVGVIGTVKFETRIRELVANLPDLAALVEPLLIVRQVVREQLGILHRRVLAIVRDDDVCRRLMTIPGVGPVVALTYRVTVDVPARFRNSKAVGAVFGLTPAKYQSGENERTGAISRCGDEMMRMMLYEAAQSMLVRSTKWSWLKAWAMKIARHRGMKKAIVALARRLAVIMHRMWVDGTEFRWSREVAAA

SEQ ID NO: 134587 - protein, 313 aa, unidentified
MGIAQGEVFVGIDVSKARLDAHRLPDGVAAGFDYDTEGLTQLRAWLGSAPPSLVVLEATGGLQLRLAAELGAAALPVAVVNPRQVRDFARATGRLAKTDRLDAEAIARFAAAIRPQPRPLPDAQRQALIDLITRRRQLVDMRTAEKLRLGSVHKALRPSVLAHIDWLTKAIDTLDTDIDGAVRHSPLWRDDLRLLTSVPGVGPGTANTLIALLPELGAIPISKLTALVGLAPMNHDSGTLRGQRHIRGGRSTVRSALYMATISAIRCNGAIRDFNLRLRAAGKPAKVAITACMRKLLRILNAIAHTKTPWRVA

SEQ ID NO: 134588 - protein, 405 aa, unidentified
MEYFVGIDWAQEEHAVCVLDGRGKVEARFVAKHTDAGLSGLCARLGAVAEPKTLRIAVERPSGLLVATLVDAGFIVVPIHPNVVKASRPRYTAAGGKDDRRDAYILADLLRTDGHRFRELRGSSDALRALQALVRTRDDLVATRVGLANQLRSLLETYWTGAAALFANLDSRIALAFLERFPTPESARRLGPKRLERFLAQYEYSGRRTAAELLERLEAAAKGVAGPRESEAKGVAVRALVAALRPLVAQITELTSLIEHQLDDHPDGPIIASFPRAGKINAAQILAELGDDRGRFTSEEHLAAEAGVSPVTHASGKRSGAKAGISFRRACNHRLRAAVTCFAGNSRHGSSWAAEVYRRARANGHDHPHAVRILARAWVRVLWRCWQAKTPYDAAKHNAAKRFAA

SEQ ID NO: 134589 - protein, 403 aa, unidentified
MGAISGIDWASDWHDVHIADEQGGMLAAEQFAHDERGISALIALLEAHAVQCCAIERPDGLLVGRLLGAGIPVLAIHPNQVKAARDRFRAGAGKNDRFDAFVLCELARTDRHRFPALAPCGDETLALKALVRTREDLVEARVALANQLRAQLQAFWAGAERVFAEIDSPIGLAFLQRYPSPADTRGLGEKRLEGFLARHRYCGRRTPAELLQRLRSAPNAIVGELEADARRSAVIGLVAALAPIVEQIGQLTSQIAGATRAHPDGAIFLAFFRDPKSVVTAAGLLAEIGDNRARYPTNDSLAADAGQAPVTIQSGKRSNATFRWACDKRLRKHMCVLADSTRHWHPWAHEVYRRARERGCDHPHAIRVLGRAWTRVLWRCWQERTPYDPALHGNLRRVLAQGG

SEQ ID NO: 134590 - protein, 446 aa, unidentified
MRKKSKSKDMNLPQHLQHIHAHAAGIDIGSKSHFVSVPEGSSEQAVREFASFTDDLQQMADWLIACSVTTVAVESTGIHWIPVFEILESKGLEVKLVNARHVKNVPGRKSDILDCQWLQRLHTYGLLEGAFRPPEQICTLRGYVRQRMNLVRYAASHVQHMQKALAQMNLQLANVVSNITGKTGMQIIKAILAGERDPLILAGLRDQRCKNSEETIARSLHGNYRPEHLFSLKQAVDLYDFYQGQIVECDREILAQLATFDSTSDTDKRPPGSLEEALQQMTCVDLTEIDGIDTNSALKIIAEIGLDMSRWKSAKHFASWLGLCPGTKVSGGKILSGRSKQVANRAAATLRMAAFSLFNSKSALGAYLRRQRSRLGAPKAITATAHKLARLVYSMLKHGTAYVDIGQDYYEERYRSRVVQKLKRKAQEFGYQLIDIAKTQPETATT

SEQ ID NO: 134591 - protein, 342 aa, unidentified
MSISYVGVDLGSSNFHQVAVNHSGRPTRNREFTTSEANLIKAFADLHGEIHVHLEAGELAPWASEIIRPLVTRVVCSHPQTNAWIARDRDKCDRIDAYKLASLLRLNEFKEVHYPREPLRRDFKTLVQHYDELTQQQARWKTKLKARLRMQGIIVRGEEVFSARGRQAVLEQVKSPVVRTAIKQLYAVLDQSVASQTEAQMLMLRAAQALPEIRIMRTAPGVGPIGACRFSAYIHTPQRFSSTRKLWKYCRLSVSHRSSNGKPLRRPRLDRMGCGRLKDVSRKAFEAALRRRDNNGFKRAYQRALETTHDATHARLTVQRKIVSTLRAMWINQTPYCDELMR

SEQ ID NO: 134592 - protein, 372 aa, unidentified
MFFSRSAAVTVISLEEAAVEIVHARCCGLDVHKKNVVACVLVSQPDGLIERQVRTFKTMTGDLLALADWLSCLGVTHVALESTGVYWRPVFNVLEDDSRTLLLVNPQHMRAVPGKKTDVRDSEWLADLLRHGLLQGSFIPPAPIRAVRELTRYRKTLVQERTDEINRLQKTLEGANIKLASVASDVLGMSSRAMLTALLDGERDPDVMADLAQGRLRNKLPELRQALAGRIQPHHMILVGQILAHIDFLEQAIGQMQTEIERCLPPFEVALELLQSIPAIKAIAGAAILAEIGTDMSRFPSAGHLASWAGLCPGNKQSAGKRMKAPVNAAMCGYERSWVKSPGTPSRCATRTSTRSSSVWRGDAGAKRPSSP

SEQ ID NO: 134593 - protein, 354 aa, unidentified
MKRTTKYVALDVHQAMTVASVREENGRITARSIIPTEEQAILEFFRGMRGTIHVTFEEGTQAQWLYDLLIDRVDRVLVCDRRGEKRHGSKGDQADADHLSELLRLGSLRAVYHGSPHLSTLKELTRTYQNVVEDSTRVMLRLKALFRARGIKAPGQRVYHPRNRNEWMAKLTEDGVRFRAQVLYAQLDALRDLRPKAKAAMVAEVRRDPAWEVLRTIPHLGPVRVALILAIMRTPWRFRTKRNLWAYCGLAVVTHSSSDFVQVGGQTVRQKRAPMTRGLNRNHNRELKDVFKAAATAATGRPGPLRDYYQARIDGGMREELARLTLTRKLTAVTLRLWKRGEPYDPQKLTVQAR

SEQ ID NO: 134594 - protein, 414 aa, unidentified
MELLHERCAALDIGKKDLKACVRTSSPKGRRVRRQEIRTFATTTNALLELRDWLLGERVSLVVLEATGDYWRGAFYLLEDDLNVILVNAAHVKGLPGRKTDVCDAAWLCQLGECGLLRASFVPPEPIRQLRDLTRYRTTLTAERSREAQRLEKELEDAGIKLSAVATDILGVSGRAMLAALIGGEDNAVALAELAKGRMRTKIPQLVAALTGNFSAHHAFLCRLHLQRIDQLSATIEELSTRIEEQMRPFSHKLDRLQTIPGVARAVAEVIVAETGGDMSRFPSPGHLASWAGVCPGHHESAGKRKSGKTRHGDRWLCGALGTAAMAAARTRDTTYLGARYRRLAPRLGKTKAIVAVEHSILTAAWHMLTNDVDYADLGGDYFARLDPERAMRRILRQANALGFTVRFDPIQAA

SEQ ID NO: 134595 - protein, 350 aa, unidentified
MIIIGCDFHTRYQQIAMMDTETGELVERRLEHENGEARAFYASLPKPVVVGMEATGYAQWFERMLAEFGHELWIGHASEIRAGVVRKQKTDARDALHLLHLLLEKRFPRIWIPSPAERDTRQLLRHRHKLVCFRVSVKNQLHALAMSQGVCRKKRLFTARGREVLEKLSLGPWARRRCQELLGMLDQLNTVIDELDRAVQQQAESHAEAARLMRHPGVGPVTALAFVLTLGPVTRFRRSKHVVSYLGLNPKERSSGGKQRTSTISKQGNTMMRWLLVEAAQTAARYDPELLRLYQRLKFRRGANVAKVAIARKLAVKLYWMLRATASCAQRAPMQGSSRGTLVPQAGSSF

SEQ ID NO: 134596 - protein, 402 aa, unidentified
MKTSKQYLRFCGIDMAKQKHVACIIDRDGKTLLKPKSIRNNTEGFQQILNCLKHTGRAKSVLVGMEATGHYWYSLHDFLTRNGYNVVVLNPIQTALQAKQAIRKCKTDKYDAFHIANLLRTNQYKAAVVPDELAMTCRQLTRIRYRIVRQISMTKQLIHSRLHPVWPEYDDFFSNTFGTTSMKLLKTVSTPREFMDSDFDDISKIIRKASRGRFGPVHTQRILQSAKNSIGMQRGHYGISTTIKLLLEQIEALEPVRKNLDAEIEKLAAQIPQYMFTLPGATDLTIVSLYGEIASIDVFEKPSQLVAFAGLDPKVFQTGQYDAPKRQVSKRGSPYLRRTIWLMAHRAVSMEGDLRDFWHRKRRQNKHYLVAVTAAANKLCHIIWRIMTDRRDYIPKGCYQKS

SEQ ID NO: 134597 - protein, 367 aa, unidentified
MRMSVGVDLHKGQFTVYWRTEGVAGGRNDRYGTNDQGYRRFERELTETIDGGIEVTVAVESTGNTRYFKNRVERLGITVVVVNTLKFKIVNESVKKTDRHDASTIAEFLEKEMLPEARLCSQKSEELRRLLKTRTTLVRTIVVVKNQIHGLLLSLGIESARGSLQSKKERRRVQDVLAAQQPTGAAVDPLFETIDRLHAEVKKLEKIIEEMTKDDPVVQLIRTIPGAGLITATTIRAYLDDINRFATAKQLAAYAGVVPWVQNSGDRERYGRITKRGPNELRTALVQVVLGMVRNKRRTGGYRIMERYDRLKRAKGSGRSIIATARTLSEIIWNMLDRNEPFDVARMTNPELRRKALEMQAAVFDAA

SEQ ID NO: 134598 - protein, 354 aa, unidentified
MNTIKYIGIDVHQATSVFAVMNQQGKLEGEAILETQPAPIIDFLKGQRGTLWVTFEEGTYANWLYDVLQPQVAKVVVCDPRKNRLDGNKTDKIDARKLAELLRLNALKAVYHGQNNTRGLKELARSYVSLQQDSTRVMNRLKAIFRSRGIPCRGQSIYQPKKRKEWLEKLDSKEPRHRAERLLKQLESLAPLCLEAQRDLVRESHKHPSYKILREIPGLGPIRVALILAFVITPHRFRNKRQFWTYTGFSVIRRASAEYEMVQGELKRTKKRPLPRGLNHNYHRVLKNVFKGAALTAAYRGPFKKLFDQRVAQGTASNLALLTLARKIASITLALWKKGERFDIERHRLSEQTT

SEQ ID NO: 134599 - protein, 452 aa, unidentified
MSKRREKRDRRSAVLEPDAAGIDIGAEEIYVAVPPERDAEPVRRFSSFTFDLLALAEWLEHCQIRTVAMESTGVYWIPLFQLLEKRGIEVYLVNAHYLKSVPGRKSDVTDCQWIQYLHSVGLLKASFRPPEEICAVRTLWRHRGSLLQMASEHILHIQKSLSQMNLQVHHVLSDITGASGLAILDSILRGERDPVALAQLCNPRVKSPRETVAKALEGDYRCEHLFTLQQSLDGYRFYQKMIAQLDREIARLMQTLPSATDTPGSIPTRTKHSAYQRQGNDPMFDLRAELYRIAGVDLTDIPGISAVTAQVVLTEIGPSVHRFRNASAFASWLGLCPEQRISGGKVLSCKTRKVKNRAAIALRLGANSLCRAKGYFGEFFRRMRAKLGTAQAITATAHKIARVLYHVLLTREPYTETVFQHYDEQARQRAEVRLRKQAAHLGFQIVPTQPAL

SEQ ID NO: 134600 - protein, 420 aa, unidentified
MAKKSKRRCDTLPILHPDAAGIDVGASELFVAVSADRDPHPVRSFPTFTRDLQALADWLEQCGIHSVAMESTSVYWIPIYQILEARGLEVYLVNAQHVKNVPGRKTDVSDCQWLQYLHSAGLLRASFRPPGFICAMRSLWRHRASLIQMAAEHVLHMQKALDQMNLQIHRVLNDITGVSGLRILDAILAGERNPLILARLCHGGVKSSEDVIAKSLEGDYRPEHLFALRQSLAAFRYYQQLVLEADQEIQLQLAELETAATAQPTTPPPTKATAHYARHYEPRTFDLRGELYRVFGVDLTNVPSISALTAQTILCEIGTDVSRFRNASAFASWLGLCPEKKISDGKVLFTKSRRVRSRVATALRMGAQSLHHAKDYLGEFFRRITRKLGRPQAITATAHKLARIVFHLLSTKEAYTECPI

SEQ ID NO: 134601 - protein, 349 aa, unidentified
MKATTIGFDLAKNEFQVHGVDAAGKAVVRKQLRRAQVLPFFARLSACTIGIEACGSAHHWARKLTELGHTAKLMAPHFVKPYVKANKTDAADAEAICEAVARPNMRFVPVKSVEQQAILAVHRVRSGLVAERTAQLNRLRALLAEFGLIAPRGRRALMERLPVLLADETLPGVARNLFERQSTRIRQLEAEITAEEAVILDWHRNNELSKRLDAVAGVGPITATALVASFGEGREFDNGRQMAACLGLVPRQHSSGGKTRLLGISKRGDGYLRMLLIHGARAVIRTLERRAKGASNPTDQWLAKLLARRNPNVAAVALANKTVRVIWALLAHGRTYDRNWSGQRAAAAA

SEQ ID NO: 134602 - protein, 433 aa, unidentified
MHEVEDEPLFAERAAGIDIAKAGIEVTVRVPSDTRVGRRQQETRSFTTLRRDLESLADWLRSWGVAKVGMEATGDYWKPVYFVLESRDFDCQLYHAAAVKALPGRPKTDRADSVWPARITERGSLPSSFVPPAPIRALRTHTRYRRHLTQARTAEKQRAEKLLEDGHLKLSSVISDIHGVSGRAMLEAIIAGERNPKTLAQLARGTMRGKIAQLEEALDCSFFTGEHAAILKMMLAAIDSFTAQIDELTARIEVLAQPYLSQIERLDAVHGVGTISAQDVIAEIGVDMTVFPTAAHLVSWAKWCPQVRQSGGKRKGANAAGRGNPYLSAALGEIAISASRTQSFLGAKYRRLVKRMPKKKALVATGNSVLTIFHALLSDSAASYHDLGPGYYEQRTNIRRQARNHLRNLERLGYHVTIQTINPDTGELLTATA

SEQ ID NO: 134603 - protein, 282 aa, unidentified
MIDGILGIDVSKNTLDASVSSRSKGRARSFANSPDGWRHLLDWLITQRVGRVHACLESTGRYSLGIACALNEAGHVVSIVNPAQIRDLARTKLGRNKTDGVDAAHIREYCELFKPQPWAPPSDAHRRLGELQTIRAGIIAGLTEWKNRRNSGMVDAVAQSLADVTISHFTCQLGAVDEAIAQTIDNDSVLRRKRDLLLSISGVGETLAGVVLAELPGPDILRSSAEVVAYAGLNPRQHQSGTSIDRVTRISKIGNAVLRAAFYMPAMSAMRYNPAIVALVTG

SEQ ID NO: 134604 - protein, 377 aa, unidentified
MFQNTYIGLDVHAQTVVACALNPATGEIERTKMAMDSGVVLSWIQRFPSDAKAVYEAGPTGYALARHLLDHGVDCVIAAPSKLLRAPGDHVKTDQRDALGLARMLSLGEVTEVHIPTVEQEALRDLSRTRLQAQKTLKLAKQRLTALLLRHGMRYPEPTKWNRPHLQWLHRQHFEHAGTEYSYQADLELVELLDAHLQRLDAHIAEVAATCEYAEVVNALMCLRGVALTTAFGLAVEIGDWTRFTGSTIGSYLGLVPSEHSSGQKRSQGSITKAGNTYARRLLVEAAWHQKPTFTRPGITLQRRLDLVGSQTRVTALKANHRLSDRWEGFEQRGKLRVKANTAIAREMAGWCWALAAPLQQARKQSPVFSSKNVRAA

SEQ ID NO: 134605 - protein, 488 aa, unidentified
MNRNAHASKKQTSKKSAPNERRRGKEEQAEFVKKCEEIIKGLQAHSWKDLEVGRKFRRNEKLDLITADSVIVGCDIGSVKHFIRAIDAQGRALTSKPFSFDNDEEGFKAAYDWMVGIAAQNDKTQIVLAMEPTGHYWFCFAAWCTSHGITVVQVNPYAVKATKEIQDNSQLKSDRKDPGVIAELAKNGNYSVPYIAEGTYASLRELELFRERVMEDRVRDNNRLCQEMDKYFPEYRRIYKDVDMVFSLAVLAKAPLPEDIVRIGEDGIRALWHSEKLRGRGYSKAAELLEKAQQSVGLRVGQVQARMSIQYLVRSIRDKDTCLAEIDDEITKLAKSIQYVDKLQAIPGLGERIISGILSEIGDLTRFDDVKGIQKYSGLGLVSESSGKHNGETHISHRGRKRLRYWLYMGARSVVAHSREFAELHAYYTTRDENPLKKMQSLMVIACKLLRIIYVVLTKGVDYDPHKMLGDIVRPENTKNKAKGAAVA

SEQ ID NO: 134606 - protein, 361 aa, unidentified
MQQFIGCDAHKRFSVFVAVDERGNATKPVRIEHVREDYAYFLSQLPERSEIAVESTGHWYWLVAEMERAGHHVHLANPMEAKKHMGKTNKTDALGAKGLAILLRDGTLPESWIPPGSLRDQRELLRTRMALRDLRSSLKHRIHAAVDRYGLHTDAITDLFGIKGREYLVSRLPEFPPETARMVKVQLCALDELAAHIETIEQRIHAEIAPTTEVQLLRSVPGVGEILAPVIGLEIGDVNRFPRAENLASYSGLVPRVFSSGGHTRLGGISRFVNQYLKWAFVEAANCAVRLKAHRQSHVGCLYQRLLAKRGHGRAIVAVARHLAEASYWILRKREFYRAPHQNKNFVQEWVSARHVWPFFS

SEQ ID NO: 134607 - protein, 385 aa, unidentified
MSQSSNTLGPVHYDGTLVLAIELSSKSWVLAAQIPGLPQTRAKRTIDPDKLALQSAIDGYRARAAAAGHSVDRVIATYEAGWSGFWLARWLIAMGVEVHVIQPSSVPVDRRMRRAKSDGIDAELLLRTLLAWLRGEPRVCSMVPIPDEVDEDARRCVRERTELVSERVGLVNRIGAVLATLGAGDYNPLLQNRRRRLAELRTGLGKPLPPNALAKIERLLTRLELVIAQMAELERDRDAVAEAVAPDEGGKMIQQLCSLRGIGVQSATVLVREAFVRRFANGKALGSYAGLAATPYSSGGIEREQGIGKAGNRRLRTVMVELAWLWQRYQPGTAQVAWFRDRVGSTGRRVRKVMVVALARKLLIALWRFVIDGIVPEGAIMKPSA

SEQ ID NO: 134608 - protein, 346 aa, unidentified
MEKLIRIGVDTSKSVFQLHGVNVLEQPVLRRKLRRREVVPYFSKLEPTVIGIEACGCSHYWARTLRELGHEVRLIAPQHAKAYVRRNKNDAADAEALCEAMSRPRMNFVAAKSAEEQAALMLAGMRRRLIKMRTQLANAIRSYAAEFGLFAAKGLGRIEPLLEQAAVDQTLPELARQLFALQAGEYAKLDAELREVEAKLRAWHRDSEVSRRIAEVPGIGPIGGTRIAMKKPDAMACRSARHYSAWIGLTAKDHSTAGKLRLGGITRAGDPELRSLLVAGAMAVIRHAENHPERASPWLLDLLKRKPRKLAAVALANKNARIAWKLMKTGGRYNPNHPRPEAAKAA

SEQ ID NO: 134609 - protein, 352 aa, unidentified
MTVTTLPRSITGGVDTHLDVHVAAALDDRGALLGVESFTTTTDGYKLLLGWLSDFGPVELVGVEGTGSYGAGLTRHLQAERVRVVEVDRPNRQRRRRKGKSDPQDAITAARAALSGDAAGEAKTRDGNVESMRVLRVARASARKGRTQALNQMRGLISTAPEPIRAELRGLNVFRLLERASTYRPGSKRDILSLTKFSLRMLARRALTLEEEISEIDAILEPLVNETAPRLVGALGVGPDTASTLLVTAGDNPERLRSEAAFAHLCGASPIEASSGKQQRHRLNRSGDRQANSALWHIVITRMVYDPRTTEYIDRRIAEGLTKKEAVRCLKRYVAREVFSLLPHGKLGLDSP

SEQ ID NO: 134610 - protein, 408 aa, unidentified
MNAVGIDVSKGKSMVAALRPMGEVALLPQEFLHTEVGLEQMAYAIIALGEDTRVVMEATGRYHEPVAAALHEYGIYVCVLNPLYIKQSGGGSIRKVKTDKADAMKIAKYGLDNWVDLREYTPMDTVRQQLKLCSRQYNLYMKTVVSLQNNLISLTDKTFPGVNELFSSPERADGHQKWVDFVMTFWHCDCICRVSEKAFTERYQKWCKRKGYHFSTEKALDLYAGSCGHFTTLPKNDNIKLLITTAAQQLLAGKMTLAALRAEMTRLAMQLPEYDTVRAMYGVGQTTAAQLMAEIGDVRRFPRRSSIVGFAGVDPGVDDSGKHSAKSVPTTKRGSPHLRKTLYQIVCTYLRKAPADEPVYQFLDKKRAEGKPYFVYMTAAQNKFLRIYYARMKECLEAFDAQQDIAQS

SEQ ID NO: 134611 - protein, 338 aa, unidentified
MKKYSGIDLHSNNSVVVVIDETDRVLHARRLPNELGGVLAALEPHREELVGVVVESTYNWYWLVDGLQAAGYRVHLANPAAMKRYEGLKHSGDETDAVHLAHLLRLGILPTGYICPPAERALRDLARRRLQLVRQRTMNVLAVENVQARETGARLSSNAIKRLEPQAVERLGLREEVALGVQANVAVLGALNQEIAKLEKHLAQRVRLRPEYKLLNTVPGIAQILATTIMLETGSIGRFAQVGNFASYSRCVDSVRISNGKKKGEGNVRNGNKYLAWAFVEAANFARRYCAEAQRFYERKRAASNAIVASKALAHKLARACYWILKTGQPFDVKRCFG

SEQ ID NO: 134612 - protein, 370 aa, unidentified
MNKIITVFVGLDVHKDSIEIATADGTSGGEVRHVGRVGGDLASVDRAVRSLNQPTRSLVFVYEAGPCGYAIYRHLTSRGFTCQVVAPSMTPHRPGERIKTDRRDCIKLARLARAGELTIVHVPDAEDEAIRDLSRARGDAVRNQRDARHRLKALLLRQEIRYVGKSSWTQAHERWLATVKLPHPAQQIVFQEYLDSVRESTQRIERLTQALTDAVVHWRWQPVVTALQTLRGIAVVNAVTLVAEIGDIQRFTHPQQLMAYLGLVPGEHSSRSRRRQGAITKAGNSHARRALVEAAWQYRLPARVSPIIATRQAGVPEPIRALAWKAQLRLCARYRRLAARQMHKNKIVVALARELTGFVWAIVRETRAQE

SEQ ID NO: 134613 - protein, 518 aa, unidentified
MTNAMTDQSSAIPEPEWGAFLAIDWADKKHAWSLCVPGAPRREHGEIEHSPEAIHIWITELTTRFAGRPIAVCIEQSRGALLFALSKYGNLFLYPIHPAAANDFRKAVYPSGSKSDSVDAEVLLDFLLTHRNRLRLWRPDTEQTRELQFLVEDRRRMVDEKTRCLNRLTQRLKMYFPQVLCWFGSVDSVLVWRFLEQWPHLEALRKARRSTLKTLLQRDGRYSPPEIEGFWPTIRDAIPATHDAAVIASSILFVKTIVQQLQLLHETIREYDKRIGRLTETHPDFAIVSSFPGVGKALAPRLIAALGTQRERFRNANELQSYSGIAPVQESSGKQHWTHVRRACPKFVRQTFQEWAQHSVARCEWPMPITTNIVRVANSIRPSFGAWRSNGFASCIAAGRITLHIRKLLTQPGSLVDHRLRSRMSKSCGKRLPVFPNSRHLILDLATQMSPAYFTSRVMGPDRVGRLQNQTLNTRRGTPRRGPACHTSTPCSTASTQSLDAGTLWPDGAVSSSPSSFE

SEQ ID NO: 134614 - protein, 369 aa, unidentified
MKKSTSRTTVAKRRERTEWQRVMTIGIDLSDRLSHCCAIDDEGSIVFEFRVATDAEAFAKAFGRIKSKTIAIETGTHSPWVSRLLESFGHRVIVANSRKLRFIFKNRRKDDAVDARSLARVARLDPQLLDGIRHRGEKAQSDLELLRARDLIVGARTRLINHVRGAVKSFGKRLPQCSPEALPTRAKATIPAALSRSLEPLLKLIDELSKQIRRYDRAVEELARSEYPETKLLQEVGGVGALTALAFVLTIDDGVRFRRSRSVGAWLGLVPAKDDSGERRPQMPISKEGDHYVRRLLVGSAQYILGHFGRDSDLRRHGLRIAARGGKNAKKRAVVAVARKLSVLLHHLWMTKSAYEPLFNSKQESAVAA

SEQ ID NO: 134615 - protein, 449 aa, unidentified
MAAVMIGVDPHKASHTAVVIGAAEEPLGELRVRACAAQAERLLAWAAAWPERTWSVEGAGGTGHLLAQQLLAAGERVLDVQPKLGARVRLLDAGDTNKNDPNDARSAAVAALRSAGVREVRPDDHAVVLKTWSKRYRDLGRTRTQVVCRLHAVLCDLVPGGLGRPIYASHAARILEQITPPDAVAAARCELAADFLEDLRRIDAQLRETRKKLATAVQAAGTCLTGLFGVGPVIAAAVIGDVRDVSRFPGRDHFAAYNGTAPIEVSSGPHKIYRLSRRGNRRLNHAIHMAAITQIHHRHRRGRAYYDKKLAEGKTPKEALRALKRQISNAIFACLQADARRAAARAQGPGGQQGNDSVASAAGLHPRHRLFGQATPGPGHHPTTAAGGPAPGPAHARGRAGHSPVVATLPPAPPQVQVERPQRSEDERPGGAARRRPHSAARKDRAKDP

SEQ ID NO: 134616 - protein, 359 aa, unidentified
MSLALEKVVRVGVDLAKQVIHVHAVAADGQVVTNRPLARDRFLGWCEKLPKGSIVAMEACSGAHHWARCLRAMGLDARLIAAKFTAMYRLQGLAGKNDANDAAAICEAASRPSMRFVPVKTTEQQGLMTLHRLREGIKKDRTACINRIRGLLAEFGLVFPKGTQALRSGLSGVIALSPDAVDRNGLLGLKNASLHLSQLDSHLIECDRSIGSHCRADQRVKAVAQLQGIGPIGASALIAGVGDFSVFKNGPQFAAWLGLTPRQYSTGGVSRLGRITKRGDAYLRTLLIQGAKGAVMTAHKRHDAISRWAVQLKERVGWQKAAVAMANKNARIVWALLLRGGSFDAERLPTAHQVQPSLF

SEQ ID NO: 134617 - protein, 376 aa, unidentified
MDTSTAAGSILHCALELSKNTWLLGIQFPDRPQPSLYPIKGGNTEDLMAKLTAARDRCAKLNGRAPSIVLCYEAGYDAFWLARFLKARGIECLVVDSASMQVNRRARRPKTDRIDVGKLLRGLIAWLQGDRHVWSVVRIPSVDEEDLRRSHRERDYLVHERTAHINRIKGLLFAQGIRGINVKRQYKTLNVDKLVTGDGHPIPPRLASEIVREIARLALVQEQIATLERERDERPTPCTATEKKRAQLMYLNGIGPAISAVMTREVYYRQFDNRRQVAGFLGLAASPYDSGEVERSQGISRAGRGQVRGTMIQAAWLWIKHQPKSTLTRWFLERTMGQGGRIKRIMIVAVARKLAIALWRFLEHGLVPQGAILSSK

SEQ ID NO: 134618 - protein, 349 aa, unidentified
MTIVGCDLHTRKQQVAVLHPDTGEVVEQELLHAGDAVEQFYRTLPRPVTVGIESTGYALWFHELMQRLGHTLLVGEAAKIRAMVVRKTKTDRRDALHLLDLLKHERFPLVWIPDPATRDLRALVTHRMRLVRMRTMVKNGLHAIAMNRRLTLGPSLWSQRGLAQLQGLALAPHTTQRRDESLQLLTWLTARIEALDDRVAAAAQADPGARLLLSHPGVGPLTALTTVVVLGPVARFPDSKHVVSYTGLAPAVHASADTCRLGQITKQGSPLLRFVLGQAGLIAAHAEVDLKRHYRTLLRRRGRPKAIVAIARKLLVRLYIMLRDQIDYEEFRRRGRTPRGQEVPPPALA

SEQ ID NO: 134619 - protein, 391 aa, unidentified
MPEDAPRPAQAAIRTDLGAIFVSLELSRRAWLITSLSPGGGAKMSKHTVAAGDVCGLLRRFAELRRKAAARTGRDFPIIVIQEAGLDGFWIHRVLQSEGIESHVVDAASILISRRRRRAKTDRIDGETLVRTLMAYKRGEPRVCSMARAPTPQEEDRRRVCRERRTLVGERVRHVNRIKGLLFAQGVFGYEPLRKGRRERLEDLRTGDGRPLPVHLKAQIIRELDRLEVLLEQLKSVEAERDALLKPATEEAASPAAMLARLKGIGPETAVVLWSEGLFRQFDNRRQVAAYAGLAPTPWQSGSIDHEQGVSKAGNPRLRTTMVELAWLWLQNQPASALSLWFHERVRRLGGRMRKTTIVALARKLLVALWRYTTAGVVIEGAVMKPTSATI

SEQ ID NO: 134620 - protein, 335 aa, unidentified
MNKNWFIGIDVSKKTLDASIFVAGEVINRFPHIQVRNEKQGFKELLRWAKTQGVNTKDTLFGLEFTGYYSDALEQFLTGKKLCYAMLPTTVVKHYQRGTRDKNDKTDSAKIADYLFRFNGTECIKQRVLPSKAMQELKALKSERKFYVQQRVACENRQNVAKSKQEQKHLQKAIDLFNEQIEQIEQQMAEVVTSDEEIYLTYTRLLTIPGIGPVNAINTIANTQNFTAFETARQYAKYVGVAPSEHSSGTSVRWRGRPSPHADLQAKADLSMAAMRAVEFSCDMSIYYERKLGNRPNDKDVKKKALNAVKFQLIKMMFAVVRQDRVFEQRGLDKA

SEQ ID NO: 134621 - protein, 348 aa, unidentified
MDVLYHRCAGLDVHAETIVVCALLGEEDHIQKEIETFPTFTKDLFRLLKWLEDRGITHIAMESTGVYWKPVFNILEDYFDITLANAQRIKNVPGRKTDVSDAEWIAKLLRYGLIEKSFVPPADIRELRDLTRLRKKWIGQLTAEKNRIQKVLECSNIKLSSVISDIFGVSGRKLLERLMKQGYIEEPEIDACIHGRMKGKRQQIQDSLFGTLTEHQLFMIRQSWKHIESLESLLREIEERIDQLLQAYKQEMELLVTIPGVKKETAAVIIAEIGVDMGQFPTSQHLASWAGVAPGNHESAGKRKSTRTTKGNPHIKSALCEAAWALSRCRNQRLAAKYWSLAARRGIE

SEQ ID NO: 134622 - protein, 381 aa, unidentified
MLAELVHHVIGVDPDRDWITLAVVDAHTTGVTAHDRFPATAVGYAEAVEFVDGHSVDTERAWAIEGTASYGRGLSVALSRLGEWVIEFDRPTRKTKDGAKSDHLDAVRAARETLGRDRLSEPRAHQGAREAIRVHAVTRAGAVRARTAAINELKAMIVSADEELRGSLRGLRTSQQVARCARFRERASMSIEGRGTRLSMRALARRIEHLNDEIDDHDRALKTLLDDTAPQLLTERGIGYITAAAFYLAWSHPGRCRSEAAFARLGGTSPVEATSGQSRPATDSTAAATANPTGLSTSSPSPVAAATQQPGPTSPGAPPTESPNALPSAASSASSPDASGDSSSTPNQHLTRHRSITLEQATCPALSARPWPAHGRRAGTA

SEQ ID NO: 134623 - protein, 343 aa, unidentified
MDHYAGIDVSLEQSSVCVVDAAGGIVREAKVASEPEALIGFLGGLPRPVARVGLEAGPLSQWLQAALVKAGYDAVLLETRHVKAALSAMIVKTDRKDARGIAQLLRMGWFRPVHGKSAPAQEVRALLVARKQLQAKMRDVELSLRGLLRGFGLKVGEISKGQFATRVRFLVAGHSMLERIAEAMLQAREALRTEFTKLHRAMLAIVREDAVCRRLMTVPGVGALIAVTFTSGVDDPGRFTRSKGVGAHFGLTPRKYQSGETDVTGAVSRVGDAMVRTALYEGAHILLTRAVRFSALKRWALEVARRRGMQRAKVALARKLAVILHRMWVNGTTFRWGREAAAA

SEQ ID NO: 134624 - protein, 361 aa, unidentified
MAEYVVGLDVHKHRTTFVQQDGTGAVTARGEFATTRAGLEEWAGRSSLPAGTRVALETGTLAFFVADELHRLGLLPVVIDAHEVRAKSSRPRQKSDRRDAFELCDGLRRAIYRTVVHVPDAAIRRLRVLLARRRHFVRVQTAQTNALKRTLRATGRGALGRSLRTGTAWERLQHATSGLPDVADAVTGHYAIWDAARRQRDAVEAALATEAVAYAPTVARLVTVPGVGPIVALTALAAFADVTRFPGAKEAASYAGLVPSTYQSGACDRHGHITKRGSAELRAMLIEAAHHAARRDHPLHAVFARLCTRRGYKPALVAIAHRLCRILFALLRDQTSFNAGTLGGPVRRPRRRRSVLAAALT

SEQ ID NO: 134625 - protein, 342 aa, unidentified
MEEYVGFDVSKEETSFCVMDEAGAILAQGKARSDPDSLFEMLKEHTLCPERIVLETGTLSNWLARGLRQRGMPVDVIDARQAHAVMKLQHNKTDANDAILLAEIARTGFCRPVAVSSEAAQEHRILIKARKLLVSQRTATQNAIRGFLSSLGLRFPKGSGKLGERVLTVLAARPDLSLLIEPLLSSAENLTREIARFDQEIKARTAEMAACRLLMTVPGVAQNTALAFVATIDDPSRFTDSRAVGAYLGLTSRRYQSGEMDYTGRISKNGDGLLRSLLYEAANVLLTVVRKSHPIKDWARRIRKRSSHKKACVALARKLAVIMHRMLITGEAFRWPEKGAAA

SEQ ID NO: 134626 - protein, 367 aa, unidentified
MEEVRGFVGLDVHKATISVAVADTGRSGEVRHVGTIENTPVAIAKLARKLARHGAVEFVYEAGSCGYNVQRQLTGMGLTCQVCAPSLTPRKPGDRIKNDRRDAIALARLHRAGELTYVWVPNELHEALRDLVRARHAACQDVRRDRIRIQAFLLRYDLRFEGKPWSTRHRRWLWNRQFALPAQQIAFQTYLNALEHDEARKAEIEDQVRELLAGSPWAKQLQALQALKGIGPVVAATIIAEVGDFSRFAHPRQLVAYFGLAPGEHSSGATVRARGITKAGSSLARTVLCEAAWNYRTTPKVGQWMNERCPPVPQEIKALAWKAQLRLHKTYRRLTARGKRSVVATAAVARELLGFVWSIGRRIPLSA

SEQ ID NO: 134627 - protein, 391 aa, unidentified
MIYVGIDVAKDKHDCFITNSDGEVLFKAFTIQNNREGFDDLFQKISSVTEDLTKVKVGLEATGHYSYNLLGYLVDKGLATYVINPLHTNLYRKSLSLRQTKTDKVDARTIASMIMSDVNLKSYSDTSYHNEELKSLTRYRFDKVKERSKLKTSISRLVLILFPELEKLVSTLHMASVYALLSEFPSASAVASSHLTHLTNVLETASKGRYRKDTAVMFREAARTSIGSNMPAKSLELKHTIKLIQELDSEIDEIESEIKIIMDEINSPILSIPGISYRMGAMIIAEIGDFERFDTPDKILAYAGLSPSTYQSGQLDGAYSHMEKRGSRYLRYALFNTTKFVCMWDSTFAAYLAKKRSEGKHYNVAISHAAKKLVRVIYQLERSGQTYIKSA

SEQ ID NO: 134628 - protein, 400 aa, unidentified
MNPVVGLDVAKGESQVQAFLDKSKPFGKSFSMKHTREELNRFIGSLNEIEVMTGQMPMVILESTGHYHSPVIQYLEEHEVLYILLNPIISYQAKRSSLRKVKTDAIDAYQLCVLYYKEDFEPHKNRGIKLLNLRNLSRQQGIVTNMYVEAKLQFHTILDQVFPEYRKVFGDLYSKVSLLILKKYPTSEDVIAAGESKLAECVMEFCPRRSSLWALDKAKKLMDSASRNPFQKVVYHSHLINLQMYIELLFQYQGHLSELEIRIVTLANELEDYKIVQSIPGIGEKIAATIISEIGEIDRFSHPKKLVAFAGIDPSVHSSGKFTATTNRITKRGSSRLRHALYLAVLCGIRSSRNKKLKEFYDKKKSEGKPAKVAIVACINKLLHWIYALLNRKETFLDIG

SEQ ID NO: 134629 - protein, 400 aa, unidentified
MHLAANISVPQKNFIAIDLHSDNAVICVRRNALNKAGELVGKNIWCGLVSIRDGLDSFVKALSPYCQDFDHVAVVESTYNWYCLADVFEERGWLLRIADPSTVSQANLKSSEDRTDAQYLAERLRVGSLKHYLPLSYSSRALWDLCRYRMAMVQDCASLKIKLINLYRNQLSKNLLVADLLDRCRNHMQSNYRFDPDILEEFKDPNIRLRVAFEVSRIAMLEEMIEECNAEIQKQCKDQELVKLCKTIPGCGPVLSAVICTEIGTMQRFKSAGDFVSYCRLCSTSKLSNGKSKGLGNAKNGNAYLSWAFTEVAQYASRNPVIREILQRLLRKYDGLRVKAIRTLAAKIARVTFYVLKNKQPFYAAKCFGIELTKSIKKKLTHKTLREDAAVVLPTVAGQA

SEQ ID NO: 134630 - protein, 369 aa, unidentified
MAKRSMFVGMDVHKESIDISLAEEGRDGEVRHYGVINGDLEAVAKVVRALRAPTRRLRVVYEAGPCGFGICRYLTAQGEECVVVNPSSMPKRSGDRIKTDRRDGDALARLHRAGELTAIYIPTPEDEALRDLVRAREDAVGLSTQAKHRLKAFLLRQGRRYPGRAGWTRPYRRWLADLSFPVAPQHIALQEYRDTIDETERRVERLTDQLRQLTPAWRWAPVVDALQALRGVSFVTAVGLVTEIGDIRRFTHPRELMGYLGLVPSEYSSGPSVRRGGITKAGNPHARRLLAEAAWAYQGVPRIGRQMLYRQEALPKTICDIAWKAQRRLTSRFRKLVARGKAKPKVATAIARELTGFIWAIAREVPPPA

SEQ ID NO: 134631 - protein, 329 aa, unidentified
MFVGLDLHKNYLQTAVMDEQGRLLSQERIPNRDENIEEFASKRLRDSRAEIVIESSSTWYHVYELLSKNQNCHVVLSNPVKTKAIASAKVKTDKVDALTLANLLRTGYIPESYIPPRHIMDLREMVRYRTSLVRMRVEAKNKIHAILLQNGTRITEKPFTIGFVEELRRLGDYRIDGYLNIISSLSRQIQTVSNTIKREATEDESTRLLMTIPGVGYFSALLILSELGDINRFPDSHHLCSYAGLTPSTHSSGGVTYHGSITRSGSRYLRWILTECAKAHIRTRRDSQLTRFYTRLAKRRGGSKATVAAASKLLRIVYWVLKEKRPYHS

SEQ ID NO: 134632 - protein, 322 aa, unidentified
MSQPGSLCVDIDVSKAILDIAASSAIEQFSVGNDSDGFDAIIAELRMYAIALVLMKATGGLETAIVCALQAEGFELAVVNPRQARDFARAMGYLAKTDSIDARVLSQMAEVLNRHPERERFIRALPDTECQVLTAMVVRRRQLITMLVAERNRLHPAHPLNRKSINIIIKALEDELARLDADMNSHIHSHFKELAKRLSSIKGVSTMTAAALLAEVPEQGNLSRREISVLVGMVPVNRDSGTMRGRRTIFGGRAGVRTALYMAALVATRFNPVIKVFYMRLLAAGKPKKVALVTCIRKLLTILNAMLRKNEEWNESYHHVAP

SEQ ID NO: 134633 - protein, 315 aa, unidentified
MTKQRPSVNVGIDVGKATLDVYLLERDRMFSVPNEERSIAALLSRLSRYRLERIVIEATGRLEQPFVRAAIAKGLPVVVVSPLKIRRFAGAIGQLAKTDEIDARLIARFAATLKPVAHPTPDAKTQLIKDLVVRRRQLTSLRTMEKNRRQIMPEDLTPSIDRIVALLDEELAGLQQLIDRAVEQHAAWRHKRDLLVSMPGIGLSVASTLIGDLPELGSLNRRQIAALTGVAPYNRDSGSLRGKRRIRGGRAHSRTALFLSAMAAIRFNPHIKRFYERLLKAGKHKKVALIACIRKIVTALNAMLRDNTPWNAATT

SEQ ID NO: 134634 - protein, 352 aa, unidentified
MKPQVKGLDSAEALFVGIDLHKVSWHVTIRTADVELFSGSVPGKWEMLRMLLQRYRGSCVQVVYEAGCFGFWLHDRLIEHGVDCIITPPSLIPQESGNRVKTDRKDSRKLAHLLAKGLLKRIFVPNRQECYHRQVVRRRRQLIGDRIRVQNRVKSELRFYGIDLLNPVGKWTKRYVENLSRFRFEDRFMQESFNRLLEQYTFLSGQIEKQNVLVRELSEMDLYRERVEILKSVPGIGTLAAMELLLELQDVVRFRHADQLAAYVGLTPSQYSSADKIRMGRITKVGKHSLRALLVQAAWQLIRKDLAMKEKYERIKIRAGGKRAIVAIARTLLLRVRRIWLDATPYRLALSA

SEQ ID NO: 134635 - protein, 526 aa, unidentified
MAVGWTVAADISVAVIHDRARRSCTARRREVVNNCAAGETFAGGRPAPARSQSQSPNLRKVSGRLLAEPEALAPTSNRKTPPEGRYISKMDGRAKRRKNYKEQKQTMNDSQQWQQHRAFGALDWASEKHSVVLVNQTGKVIEDFEIEHSALGWKKFREKLQPYGSVPFAIETSQGVAVEQLLEAGMLVYPLNPKSAQAYRERKAPSGVKDDRLDAWSFADALRMDGQNWKALRPEEPLIKELRLLCRDEVTLIEQRTAFVNQLRHALAEYYPAALEAFEDWTSVSAWMFLQRFPTPEQLAQAGKRQWQKFLHSRRLWGSDQGPRRMEIFAHATEFTGTAPTVQAKSLLAQSLVQMLFAVEKQLAVYRQRIEELFARHPDHDLFGSLPGAGPKIAPRLLSEIGDDRERFGGDPQNLQCLAGSAPVTRRSGKQRKYWPVHQRWACDKHLRHAIHLFSEQSLSRCAWAEIYYQQHRQKNQSHANALRRLSHRWLKIIYKMWIDRTPYNAELHHRNQLQHGSWIFQLQQS

SEQ ID NO: 134636 - protein, 322 aa, unidentified
MEREYIGIDLHKQFFQACAVTPTGIRVWEQRFPRTDGGLVLFRERCTSMTAIAVEATGPTWAFVDALRPSGATVCVVDPRKTRLKAGYAAKTDRLDARRLADALRRESVVSIYVPPPAVRELREVCRGRHQVVRLRARIAQMIRALLLRSGVSDVPVTRVFSARGLAWLSQVQLPSEAGASLERWRRVLLAVQAEATVAEAMVKARATADAIARALDDLVGIGPVLALTLRAEIGDITRFPRGAALASYAGLVPRVDASADRYWSGRITREGRPGSAGRWCTRRYTRFDDKMGSAGGRDNSRCEKVSIRLGWHWHGGCATKS

SEQ ID NO: 134637 - protein, 480 aa, unidentified
MNIKAKKAKVQPLSKKLVINVLSQDEIKKKVQVIEQELKASTWRELETKGKFEKNDKLSFISEEMLIVGCDIGSETHYIRAIDTRGRELSKGAFEFSNSSEGFASAKAWVLKLAAKNDKKQIVLGLEPTGHYWFAIAACMVSNGISVVQVNPYAVKQSKEIEDNSQLKDDRKDPKIIANLVKDGNYGMPYLPEDIYADMRRLSMFRDQLTEDRIRNINRLHREMKIYFPEYMDAFGKIDGAFTLEILKVAPIPSDIVELDEEGLKSLWHEAKLRGRGYSRARVIVDYAKKSVGLTGGTDAGRESIKWFVEQIIQLDERLAEIENVLHQKCMEIPHAENILEINGVGENILAGILAEMGDISRFDNVKEIQKLSGMGLVACSSGKHKGQTKISHRGRKRLRYWLFQAAKSAVAHAVEFKQLHAYYTTRSMNPLKKMQSLVVIACKILRVIYTILNTGMKYDPERMLRDIRYPQGNTVQAAA

SEQ ID NO: 134638 - protein, 340 aa, unidentified
MTEIKRIAIDTSKSVFTLHGVDDAGRAVLRRNLRRGELLRYFEKLPPVEVALEACGGSHHWGRALAALGHRVRLIPPQYVKPFVKRGKNDRNDAEAIAVAAAQPSIGSVPIKSAEQQAAAMLLSVRELLVRQRTQLVNAVRGHAAEMGAVAPLGEKGLKELQAEIAAADEAAVPAAAKQAIALLSREAERIEIRLRAIEAELMQQHKANPVSRRLAAIPGIGPIGALNLALRVDQTQFASARHFAAWLGLVPRECSTAGRQRLGGISRAGDERLRQLLVLGATAVIQHAKPGRPATSQWLLNLLSHKPRKLAAVALANKMARIVWAMMTSGKTYRPAPAA

SEQ ID NO: 134639 - protein, 452 aa, unidentified
MSKRKRSKAVSLPIVEANAAGIDIGATQIFVAVPADRDVESIRCFDTFTADLERLADWLEQCQIRTVAMESTGVYWIPLFQILEERKIEACLVNAQHLKNVPGRKKTDVEDCQWIQHLHSVGLLRGSFRPDQEICAIRSLWRHRDNLIQLATIHLQHMQKALDQMNLQIHHVISDLAGTTGLAIVDAILAGERDLAKLAQLRDWRIRASEETIMKSLVGDYREEHLFTLRQSLQSYRHYQHLIQEVDGQVKQMMRRLPGRVDIGEKPLPKEKNPRKTPWRNEPPQLREDLYRAFGVDLTQIPGIHTLTAQMLLTEIGPDLSRFPTAAAFCSWLRLCPEPKISGGKVLSSKTRPTKNRAALALRMAAQGLHRSQTFLGDYFRRMKARLGTPKAMTAAAHKLARIVYHMITTRQEYDTTVFQELERRVQDRKRMKLRAQARALGFELVPREAVP

SEQ ID NO: 134640 - protein, 387 aa, unidentified
MQSVTSATAVATTAHANKITLFASLELSKSKWVVTINSPGSEKFSKHVVEGGDGAGLLDLLSRSRAKAEQRYGVQVKAIVIQEAGLDGFWIHRLLLANGIESHVVDAASIAVDRRHRRAKTDAIDGETLLRTLMAWARGERRVCSMVRAPSPEDEDRRRLTRERGTLVKERIQHTNRIRGLLGGQGVRDYNPLRRDRFERLEAVRTGDGRELPAMLKAEIRRELDRIALVTTQLAAVERARDALIRTDAEEPNNPAALLLKLKGLGPEFASLLWLESLFRSFGNRRQVAAYSGLAPSPWQSGGVERDQGISKSGNRRLRKTMIELAWFWLRHQPDSALSRWFQARVGAAKGRIRRIAIVALARKLLVALWRYVTQGVVPEGAVFKAA

SEQ ID NO: 134641 - protein, 408 aa, unidentified
MYNAVGIDASKLKSTITIIQPAGVVIRKPFDVLHTSDELNTLVTYLKSLVGETRAVIECTGRYHEPVVKSLSEVGIFISAVNPKLIKGQKQNTLRKVKSDPADARKIAKYALDNWAELREYSSMDTTREQLKTLNSQFTFFMKQKVAAKTNLISLLDNTYPGVNKLFDSPTRDDGSEKWVDYAYSFWHVDCVRKIGLKAFTERYEAFCKKHHYNYQKNKPALLFEESKQLVAVFPKEKSYKLLIQQSIQQLRLASEHIEIIRKEMNELASTLPEYETVMSMYGVGETYGPQLIAEIGDVSRFTHREAITAFAGVDPGVNESGQFKQRSNRASKNGSTRLRKTLFQVMSTYLQNKPVNEPVYQFLDRKRAEGKPYLVYMTAGANKFLRIYYGKVKECLRNLEQSQIEKS

SEQ ID NO: 134642 - protein, 449 aa, unidentified
MREPQEIPDEEYEQVLERVAAVDVAKASGMACTRVPHPERAGRRRTLVWEVPATTNAVLELADDLARERIQKITLEATSDYWRIWFYLLEAAGLEVQLVKAHDVKQAPGRPKTDKLDAVWLAKLTERGMLRPSFVPPAEICNLRDYTRLRTDLTRERTRYYARLEKLLEDALIKVSAVASSLTTLSVRDMIEALIAGERDPKVLAKLARGRMKVKYNALVEALTGRFDAHHAELARMLLDQIDVLSAQIGTLTARIEELIAAIPAAQGVDRDGTAGPGAGREPGSPVLPAVDRLDEITGIGRDSAQEIIAEIGLDMGCFPTPGHLVSWAKLSPRTVQSGAKNRSGPAGKGNPYLKGALGEAAAAAARTDTFLGERYRRIVRHRGKLKALVAVARSILVIVWHLLTNRAARYHDLGPGYYAGRIDKDRKTRSHIHQLEALGYTVTLAPAA

SEQ ID NO: 134643 - protein, 430 aa, unidentified
MKQYELLHSLFVGIDVSMKENVVHAMPFSPEDHPGHAHLRFSAPNTPAGSVGIVEKVSDFLKFYPDVIQVVIALEATSVYSFHLATFLSVAHFNGHIPAIVYSVNPKEIHAYKKTFTDVGKDDYVDAMVIADYARSNKIRSRPWKGPELLGLRVLTRLRFRIAKLMGIVKNSTGNSIYLECSGLMTGENPFCNIWTTTCQELLTTFQGPDEILSLSDEELLNFITEKGHGRFSHPLDVVEKVKKAARNSYRLDKRVYEPLTSGLSVSFFIIHSLEAAIKKLDKSIETMAKSFSSDSYQILLSIDGVGPVIAGGLLAEIGDIKRFKTDDALAKYIGLTWRGKQSGQSESPVKHLSKAGDVYLRYYVLLATGQIINYSAKYREAYERIRSRKTLFPYRAALNLVARKIVRLIFTLLDKHQLYSDNKVMVTLE

SEQ ID NO: 134644 - protein, 343 aa, unidentified
MSKITYVGADVHKTTTTLVFLNSYGKKIGSRRMHTDKVVTYFSNHPIVTIGMEVGIGTQYLAKKLNQQGHKTKVMPARKIKAFYMGQKNDEQDALAVAHATMACYIEGIQLKPTEALIAQAFLRQREQIIRHRVAACNQIRGLLVEHGFKFSQGINSLIDGVKDLLKKNIISRDLKDMIRLSLKIIEFHINIEKPLNKKLKIIAERNPETKRLQTIPGFGPLGAIAFLISIGNATTFKRGRDVSAFLGLIPKQNSSGNKIRLGRITKSGNEYTRCLMIHGARAFICHGNQKDKNKQWLLSVKNRCGYNKAAVAWANKMARIAWALLIKNATYKRELVSLKDVA

SEQ ID NO: 134645 - protein, 429 aa, unidentified
MPNSASLAPNIVAWVGLDWADQAHAVCLQEAGASPVEHSELQHTPEALQLWVAELRSRFPQGQVAIALEQSRGSVFYALMTYDFLVLYPIPPKALADYRQALYPSGSKGDPMDARLLLEFLRKHPERFRPWVADDAPTREIALLVQHRRKLVDDRTALTHRLQALLKGYFPQALEWAGDLTSPLAWDFVSQFQSLEEAQKASRWKVLKVYRAHTRRTPEQIEQLLDQIRTARPLTTDRAVIESSALMVRAQVDQLRALAAGLERLEEKLQELFAAHPDHDIFNSFPGAGKALAPRLLAAWGSDRQRYETAQDMECLSGSAPVTAQSGKKRWVHWRLACPKFLRQTFHEFAGHSILWSPWARVYYQQMRKRGADHHPAVRSLAFKWIRIFYRCWKDHTLYDEARYQQALERHGSPLAAALRQLPNQEARA

SEQ ID NO: 134646 - protein, 338 aa, unidentified
MPLYGGIDLHANNSVVVLLNEQDQVIYQRRLTNHLPEILEPLAPYQADITGVVVESTYNWYWLVDGLMEAGYRVHLANPAAMQTYSGLKYTNDHSDARWLAHLLRLGVLPEGYIYPKAERAVRDLLRKRAHLMRQHTAQVLSVQNLMVRNTGVRFGAKRIDEFTPSELARMLPNTEQVLAVTSSLAVLHCLGQQIKTLEKAVQQRLKHTPAYAQLQTVEGIGTILAQTIVLETGDIGRFPSVGHYASYCRCVGSTKISNGKRKGQGNVKNGNPYLEWAYMEAAQFAIRFSPTVQRFYQRKQVKSHLMMARKAVAHQLARACYDIMRDLVPFEVHKAFG

SEQ ID NO: 134647 - protein, 412 aa, unidentified
MTITCGIDWAENHHDVALVDEAGKLVAKRRIGDDVQGYQQLLELLADAGDSASEPVPVAVETARGLLISCLRTTGRKVYSINPMAAARYRERHTVARAKSDHADAMVLANILRTDAAAHRPLPADSELARVIAVLARAQQDAAWNRGQLSNQLRSHLKQYFPAALAAFQVKGIGLDSREARAVLAAAPDPAAAARLSAARLASVLRKAGRQRGIEAWVNRLRTIFAGDYLHQLPAVEQAMGRQALALVLQLDAACRAANDLADAAATAFAEHPDAAILSSFPGIGPVTGARVLAEIGDDRTRFRDARGLKSYAGSAPVTIASGKSCVVRNRKVKNQRLAAAGYVWVFGALPSPQVKDLYDRRRVAGDRHTAAMRNVFNRLLGCLHHCLQTGQAFDPAKAFPLPESQPEPAAA

SEQ ID NO: 134648 - protein, 392 aa, unidentified
MEPVVGLDVSKGNSVVQAFLARNEVFGKMEMIPHDEWGYLQLDRLLTELRKETEMEPVIILEATGHYHRGLVLHLNRRGWRHIIINPLQSKRARGTQLRKVKTDAADAWHLAEMYYRGDVKPHRTWEEAYRELQHVTRQHEFITGMFVQAKLNARALLDQVFPMYTQLFRDIFSATSLLVLQRCLRGETQNMDKVFGGATGRARSKQWVGEKLNQLEHLLEDWMTHPKSDSQTKVLEGMIVLLLAFLEQLNDLEERMQQLASELPEVELVKSIPGVGDKLAATIIAEIGDAKQFKDPKQLVAYAGLDPGIFSSGKFTAMSSRITKRGSKRLRRALYLAVQCGLRRSANVKIKAYYDKKRKEGKPYKVVVIACANKLLHHVYAILIKGEPFKT

SEQ ID NO: 134649 - protein, 327 aa, unidentified
MNASFEQNFIGIDVSKGTLDLAVRGQSRTVQFENTPEGISGMLEHLKCIEHIAVVLMEATGGLEREAAGQLCLAGFAVMVVNPRQAHNFAKALGYLSKTDATDAQALAQFAHTLHNGDRREKLLFRLPSEQQQMLQAVVTRRAQLIVMRVAENNRMAGSHPSQHKSLASVLKVLNLQIEKMDKDIRANLDKHFRDKLDLLKGIKGVADGTKAVLMASLPELGELSAPEISKLAGIAPLNCDSGKMRGKRTTWGGRADVRSALYMATLSAVRFNPVIRIFYTRLRAGGKPPKVALVACMHKLLIIINAIIKSGKPWQADYGYPQAAAA

SEQ ID NO: 134650 - protein, 389 aa, unidentified
MKYAGIDIGKEKHWVAIVGDDGEVVVKSRSFTSDHEGHETLVELLQRHGVVRVALEATGHYWKNLFVRLVGEVEVALVDPSRTHHFAAQEGRRAKTDAVDALGIARFCAVHRPEASGLPDGVIETLRELVRLRDRLVQDKGDRLRQLHRALDLTFPEFPKIVSIDSLLAWTLLDAFPTATAFAKAKQNEVAALVFDGRHRVGKRRAVALRRAAKKTVGAYQTEVWAMQVRMYVEDLGLFDRRIRALDERIERSLDDHDVGRLITTIQGVGTQTAAHILSAAGDPRDYDSAKTFAAYAGITPRTNHSGKRAPRRAPICRKGSAELRKKLWMPTLTAMTINPWMTAFAERLKSRGKPHKVIRVACMRKLMTAVYSVAKSGEPFVPILAPER

SEQ ID NO: 134651 - protein, 369 aa, unidentified
MPHVTSIGLDVHARSVAAAAFNPFTGEVVRRSFGTDASEIAEWALGFEDPRACYESGPTGFHMARELRALGLDCAVAAVSKMQRPAADARRKNDRRDAEFIARMLATHNIVEVPLPDMAVEAARDLDRALDDATRELRRSRQRLNMFLIRLGHVWDERNADGARKKAWTRAHWRWVSEIRLEGPQRDALEYYVTAARCAESDRRQLERRVVALAGTDRWRAAVEALSCIKGVDTLTAFRLAAEAGSFSRFRSAPAFASWCGLTPSEHSSGESERRGGITKAGNALARTALIESAWHYSTCSPRPKAPAPGTDVPPAIRSRADDCTARLHRRREALAAAGKSACKANAAVARELACWVWEIGCRSEGTVL

SEQ ID NO: 134652 - protein, 423 aa, unidentified
MMKLKYSICCGIDVHKNLIVATIVITNKDGISEYKQKSFSTINSDIQKFHNWLIDNHCFHVCMESTGKYWIPIFNYLENDIDVCLTHPKYVKAIKGKKTDKKDSKWIADLYKFDLVRCSFIPPKDFRQLRELARYRFKLVCMKSSEKNRIQNCMTVSNVGIASVLSDPFGKTAADIMSYLLEHTADSMDEKAVRKLIKKGTRAKSDEIIEAIRGYNIETDQAKKLELARGHLEYLDDMITQTEVELYVRIKPYYEFVEFVSTMPGMTELSSTIILAETGIDMNIFDDAKHLCSWCGLSPANNESAGKKKSVRIAKAGDYLKPMMVQCALAAVKNKKQPYFAIKYGRIKKRRGHKKAIIAIARMMMVCIYHMVSEKKPFSPTDYEELMDPRNHVERVVLNEDNVFAYLESLGYDSSKLVKRNDN

SEQ ID NO: 134653 - protein, 363 aa, unidentified
MRGIFPISNISCYIIIPTKNKENKMYYTGIDQHKLTSYLTTVDNKGVIIKQANLKNNDFDILNYFHQLEDQSIATVETTGGWYWLSDLLKENNIKLKLAHAKYVKAIAYAKVKTDKVDSHILAQLLRMDFIPEANKIDEDLRPLRDTLRARLRLTQKRTSALNFMNRMLEKFNVQNPSELSEQYQLQYGQFSDQAEFLKEQILTLEKSIHPELLPNEDIQRLLWIPGIGKMNAFTSFLEIYDINRFDTVKNFLSYCRLAPQASNSGGKTKQSKTPKDGNKYLKIVFSDAAIHAIQYYPVIKKYHNSLLRKKNKQIAKYIISKEIASIVYHVLKTKKSFNNKFKNIDLERIKSFQWPRITSPVV

SEQ ID NO: 134654 - protein, 322 aa, unidentified
MAVVMIGVDPHKASHTAVAINAAEGPLGEVQVRACAVQAERLLGWAAAWPDRTWAMEGAGGLGHLLAQQLLAAGEQVLDVPPKLAARVRLLATGDTNKNDPNDARSVAVAALRSRGVREVSRDDHAAVLKVWSKRHRDLGRTRTQVACRLHAVLCELIPGGVSKQITAGQATQLLTSITPSGAMEVARRELAAEFTEDLRHIDTQIRDTRKRLATAVAAAGTSLTGLFGVGPVIAAAVIGDVRQVSGFPGRDHFAAYNGTAPIEVSSGQRKIYWLSRRGNRRLNHAIHMAAVTQIRNRHSAGRAYYDKKLAEGKTAKRPCAR

SEQ ID NO: 134655 - protein, 363 aa, unidentified
MIVIGTDTHKQTHTCGAVFAGTGQLAGELTAPARKTGFTELLDWGRRLDAERIWAIEDCRHVSGSLERFLVASGERVVRVPPKLMGESRRGERSAGKSDVIDALAIARAALREGPETLPAAHLDERSLQLKLLLDHREDLVKARTEDQQRLRWHLHDLWPELEIPAGALDRMVWLDRIARKLSRAAQGTRALISRELLVEIRRRTRRVKGLEREIGALVKAQAPELLELEGCGALTAAKLVAETAGAKRLASDAKFARLAGVAPIPASSGNHTRYRLDRGGNRQLNCALHRIAVTQGRFHAPAREFLARKQAEGKSRMEALRCLKRHLARRVWRLLIDSEIDRSVITPNIQRGMPSPQITVVA

SEQ ID NO: 134656 - protein, 342 aa, unidentified
MEAKRYIGIDLHRDCFTACVRLENGREYLKKWKLEDMPKFAGKLRPADQVAVEMTGNTRLFHDQVRPLVDRIVAVNPTQFKVITHSVKKTDPNDARLLALYLAKDLLPEVRMKDKTQAQIASLTQTRDTMVKLRTALKNKVNNICSANGVNLNRESLASEKGLRAVGEMPFDPLVNLELKIIVDQIRSLNKSIAELEELIGQEGQKLDGHRNLTSIKGIGKLSGGILLSIIGDIGDFADEGKLASYFGIVPRVSNSNETEHSGRITKRGTKLGRTTLIQCALIAQRYSPYLKTYYEKIKNRRGAGKAIVALARKFLGIIYRTLKNNWVFEDFPNFVAEEATA

SEQ ID NO: 134657 - protein, 390 aa, unidentified
MKKNNTVGKSVRTKKEANGKLTVGIDLGDRSSRYCILDEQGEPVVEGSMATTKKGFAQVFGSKPRSRVALEVGTHSPWVSRYLADLGHEVIVANARRVRLITESSRKDDRLDAKTLARLARIDPQLLSPIRHRSEQAQADLIVIRARAALVEARTMLINSARGLTKSYGERLRSCGTGQVGEALAETLSEPLQKALKPMLTEIEALSERIREYDQQIEQIAKERYPETELLRQVHGVRSCGTGQVGEALAETLSEPLQKALGTLTALTYVLTLEDPHRFRRSRDAGAYFGLRPRRRESGNSRPQLRINKEGDAYVRKLLVQCAHHILGPFGPDSDLRRWGLELAKGGKNAKKRALVAVARKLAVLLHKLWVSGEVYEPLRAGKNSKTVAA

SEQ ID NO: 134658 - protein, 398 aa, unidentified
MTESSDYESVQVFIGVDVGKDTHHAVAINRSGKRLFDKALPNDENKLRSLISDLKQHGQILLVVDQPAIIGALPVPVARSEGVLVGYLPGLAMRRIADLHAGEAKTDARDAAIIAEAARTLPHALRTLKLADEQIAELSMLCGFDDDLAAQTTQASNRIRGLLTQIHPALERVLGPRLEHPAVLDLLQRYPSPEKLASLGEKKLAAQLCKLAPRLGKRLAADIAQALAEQTVVVPGTNAAAVVLPRLALQLITLREQRDEVALEVEQRVLAHPLYPVLTSMPGVGVRTAARLLTEVACRAFASAAHLAAYAGLAPVTRRSGSSIRGEHPSRRGNKALKRALFLSAFAALRDPLSRAYYTRKMSQGKRHNQALIALARRRCDVLFAMMRDGTFYTPQGS

SEQ ID NO: 134659 - protein, 384 aa, unidentified
MNQPLLWSLVPSPFLDSSSYLNPDLYNNLNRNLLRFLGYVQAPLPINQRKYMNNFYFIGVDVSKKKLDVCLMCNNQVLHEEIIPNNSTAIISQFRAIQQEYEIDGGHLIICAEYTGQYTYPLTCSCSALGIKLWLENPSSIKYSSGSIQRGKDDKTDAKRIAIYAMRFHDKARYYKHPTKEIERLKQLEAERSLYVKDLNKYQTQLNDQAEYMDAKLFKEKSKRLKKLIRVFEERIEELNTEMNQVIHSCEVLYHQYCLLQSVEGVGAVVATNMIVVTDGFTRFDNARQFNCYAGLAPFQYTSGSSQHSKARVSHRANKEMKALLHLAAMAVIRKKTSELKDYYLRKTEEGKSKMSVINAVRAKIVARMFAVIKKNDFYQPTLA

SEQ ID NO: 134660 - protein, 434 aa, unidentified
MDILSKIYPNSAGIDIGSEKVYVSVEGQSVRNFRTFTASYKELSAYLKECSITHVAMEATGVYWITLYDILEADGFDVTLVNPSDSKNLPGRKTDVQDCQWIQQLFSYGLLRKSFVPEDIVRKLRVYTRMREDKLQMASTHVQHMQKAMILMNIRLPEVLSQTHGASGLAMIEAILAGERNPEKLLGYCTTSLIKNKGKDILLALEGNYKEEYIFELQQAYDGYMFYLNQVSKCDTETGKILEEYNSSSNKNYTDNHPIKPIRHNKPKINHLHDLLLGIHGANPTTLPGLTDYSLMRLTAELGNNINQWPSVKNFVSWLGLAPGKHQSGKMNKRSKKKPATRAGQIFKQAAQSLILSKQPGLGAFARRLKARKGSGIAIKATARKLAELYYRIFDKGMMYVETGIAKYEEKIKQQQIMFLHKKANELKMQLTEI

SEQ ID NO: 134661 - protein, 345 aa, unidentified
MELHTIGIDLGKTVFHLVGLNPRGEVVVRKKFTRKQLLHFTANLRAELIGMEACGGAHFLGRALREQGHEVRLMPAQYVKPYVKTNKSDYIDAEAIAEAVGRPKMRFVPIKSDDQLDLQSLHRVRERWVMRRTAVINQIRGLLLERGITFCKGRRHVDAALPGILEDTSAKLSGALRMLLAQMKLELDHLQMRIDEADAVIKKTAGDNEACRRLVAIPGIGPITATAIIAAIGNGAAFKKGREFAAWLGIVPGEYTTGGKQKLLGISKRGNSYLRRLFVHGARAVLQQSAKQSSGLSAWLAQLTIRTHPNVAAVALANKLARMAWAVLAKNEAYRPPILVGATPA

SEQ ID NO: 134662 - protein, 339 aa, unidentified
MNTTTIGVDLAKSVLQVSLASPSGRVIERKRLSRPQFQKFLAQQPAADIVLEACATAHYWARTARDHGHVPRLLHAQYVRPYVRRNKTDSADADALLRAHRDPDLKSVPVKSVEQQALQGLHRIRSQWQDTRRQRICLARALLAEFGVHLPTGAAGIVPRLRLTLDAAPPLLSVSLGIVITEITELEAKLGQIDRELRRLAKDSPLAQRLLTIPGVGVITATALIGSVPDIHAFQRARSFAAWLGLTPREYSSGQSRFLGRISKRGDGYLRMLLTHGARSALLLAHRQASKGDDRLTRLQRWVLEVERRTNHNKATIALANKMARIIWCVWTKEEDYKA

SEQ ID NO: 134663 - protein, 337 aa, unidentified
MSNVYVLAIDLAKRSFQVCGTERGGAVLFNRSVSRARLMQLLQAQTPCIVAMEACATSHYWGRFAQSFGHEVRLVPPIYVKPFVKRQKNDAADAAAIAEAALRPNMHCVAVKSAENQARAVAFRTHQCFVGQRTQLINALRGHLAEFGVVVAQGPAHLKEVIALLDEAGASVPESVKEIARIYLDQIAVLTGRIDELTARLHGAAKQNAEMRRLCTVPGVGPVTAGAIMAFAPDPKAVSSGRNFAAWLGLVPRQRSTGGKTRLGGVSKMGQTDIRRLLIVGAMSRIRWIVRKGVLPDTWLGRLVGRKPRMVAAVALANKMARIIWAMMTRQENYGMA

SEQ ID NO: 134664 - protein, 349 aa, unidentified
MWAIGADVHKRSTTFYALDDDGVPVDGFNRLFRSVRSNEEGYLEVRRYLDGKEYSILMENSTKTHDVVWTMESLGMEVLVAHSPDLKKITKSDKKTDENDARDLAMYLLARLSGADQFNLSYMCSKEDMMARQLCRAAKQEMVDRGKIKRRMRSHALLYGIDIDRLDPTTASGRKRLLELDDPVLDNLVRSMEDNLSRQKALEERLASMFSGNRTFEKIDAIPFFGLITSAYLTSYIGDISRFKDSKAFVASLGLAPRERNSGEKTSHCGITKKGDPHARWLLIQATIGHVRGCESSPVTRFFNRKNGGSLSERGEAELTPVMNRQAIVAAAAKMATIIYTLVVKDRDW

SEQ ID NO: 134665 - protein, 423 aa, unidentified
MENTAARKRKQVPEGYLIIGVDPHKKRHAAVAITQDFTTRDKFKFDNTREGLETLLRRAKTEMVKSGCRGVMLAIETGGHYWRNVAYFLEEQGIPFRFINQFTLKRRREGKDLNRRKNDYRDSEVAAQLLCTGEFTETKIPQGVYAELRTAHNAYRRLVKERTRITNLVKGLLDGLFPEFTQVFKDPCGLTALSVLSVCTIPRVVAGMTEAEFVATIAAQHKGRLMRRKLRALHYMARTSIGIEAGARSVSSEISFLVEKLELIRRHIRIIERTLVRLVDETEEGKYLLSIRGLNYIAVAGLLAELGCFKAYRSAKQMIKMAGSNPTESESAGKRGTHTPMSKQGRPVLRYCAWTSVIPMLRLNPDFRAWAKQRRERPAHANPLNGREVVGAALNRLLRLAFAMVKGQTYYQVSKPELALVAV

SEQ ID NO: 134666 - protein, 336 aa, unidentified
MTKYIGLDIHSSTCSFCVVNNEGEILDEREIVSNGRLLIDYIQSVEGHKQLALEECELSAWAYELFVNRVDELIVCDPVKNSVYKKAKTDKLDAKNLAALLRGGFLKPVYHDGSGRQQFRALMSGYQDIVDTGVRMKNRYASLFRKAGMRQRGSAFYDDESLINDLPRPDQRFVAKSFYGMISSLEAQRESYVDEIKKMSRGFKEIKLLKSIPGIGDIQAAKIVSQVVTPERFENKHKFFSYCGLVRQMQRSGGRDYPSARIHGNRILKCVYKMAAHRAIAGSSALKEYYDSLRLKGANAKAARNAVSRKIATISLGVWRNGSKYNDAMILESVKS

SEQ ID NO: 134667 - protein, 427 aa, unidentified
MSVTQNEKIRQVTDTTMVIGVDIASELHWARAFDWRGLELGKAVKFENSAEGFNFFLRWVSELTVEQKKDSVMVGLEPTGHYWFTLAAHLQGGDFKLGLVNPYHVKRSKELDDGHPSKSDKKDPKTIAKLVLEGRYVYPYIPQGLYAELRVAMNCRWRIRKELASLQNQIQRWLKIYFPEHSKVFGRFTGAGSMALLHSAPFPSDLISLGVEGISGIWKQMKLRGIGRKRAQRIYEAAQTSVGCTTGMEAARMELQILLEDYDAKLQQYERVMQVVENLCSQIPAVAELLKIQGLGLVTVAGLFAEIGDIRRFESPRQIQKLAGLAITENSSGKHKGPTEISRRGRSRLRAILFRAAIPLLAKNREFQLLHRYYTTRQNNPLQKIQSVIAICCKLLRVFYALATKDCAYSPEKVLADIQRNQPLKAA

SEQ ID NO: 134668 - protein, 343 aa, unidentified
MEHYAGIDVSLELSSVCVVDATGRIVREAKVPSEPEALVGFLGQLGLPLTRVGLEAGPLSQWLHAGLTGAGLEAVLLETRQVKAALSAMIVKTDRKDARGIAQLLRMGWYRPVHRKSPPAQEVRALLVGRKLLHGKLVDVELSIRGLLRGFGLKLGEVSKGRFAARVRELVAGQPMLERVVEPMLRARDVLRAEYQVLHRAVLAIVREDAVCRRLMTVPGVGALVAVTFASAVDDPARFCRSRAVGAHFGLTPKRYQSGETDVTGGISKAGDGMVRAALYEAAHAMLTRTGRFSTLKRWALEVAKRRGMKRAKVALARKLSALLHRLWVDGSEFRFGREAAEA

SEQ ID NO: 134669 - protein, 451 aa, unidentified
MPKSRPSSKPAGLPIIHPFAAGIDIGSRFHVAAVSPDLCDEPVQTFQAFTSDLERMADWLVATGTKTVVMESTGVYWVAAYEVLESRGLEVVLANAREARAVPGRKSDVNDAQWLQRLHACGLLRASFRPGRDIAELRAYLRARERHTDYAAAHIQHMQKALTFMNIQLHHVIATITGVTGMRIIRAIVSGERDPDKLAAMRDVRCKESIETIRAALVGNYQPEHVFALKQALALYDFYQTCIDECDAEIERTVAGLNIDRPVPEAPLPKAKHRSKLPSDPNFDVRTAMYQLAGMDLTQIHGIGPFLALRLIGECGTDLSRWRTAKHFTSWLTLSPGCKISGGKVLSAHTRKTSNRITVALRLAAVTVGRSNTALGAFYRRLAGRIGNAKAVTATARKIAVLFYNAMRYGMDYRDPGADHYEQQYRDRVIKQLHRRAAQFGYALQPQETSA

SEQ ID NO: 134670 - protein, 391 aa, unidentified
MVCVGIDVAKDKHDCCILDSDGTIRADCITIPNNMDGFKQLLQTIRDCTKKSDKIKVGLEATGHYSYNILGFLLDNDLAVYVMNPLHTNLYRKSLSLRKTKTDRVDARTIATMLLSDVDLKSYTDTAYHNEELKSLTRYRFDKVRERAKLKQSVSRLVTILFPELEKLVPSLHIASVYALLSEYPGAKQISEIHLTKLTNLLATASKGRYGKDKAIQIRDAARTSIGSVMPAKFLELKHTIKLIRELTSEIDEIEVSIQKIMDELNPPILSIPGVGIQSAAMILAEIGDFSNFESPDKILAYAGCSPSTYQSGKLTNCYAHMEKRGSRYLRYALYNATKYVCHWNPVFAEYLAKKRAEGKHYNVALSHATKRLVRLIYALQKSGKAYLVAA

SEQ ID NO: 134671 - protein, 355 aa, unidentified
MKLMAGMDLHSNNLMCGIVDMEGKRVFGKKLPCSLDEVLKALQPFRQGLDTIAVESTYNWYWLVDGLQAQGYRTVLANPAGIQQYSGLKHTDDTSDSFFLAELLRLGILAQGYICPARLRPIRDLLRRRGRLVSQRTSLLLSVKSLYTRTTGGSLALKELKAAEVKAVQQWFKHPADQLISGLQMGLIEQLDQSIEQIEKAILHVRDRLPCYEILHTLPGVGIILALTISLETADIGRFAHAGDYASYCRCVNSGRTSNGKGKGQNNAKCGNKYLSWAFVEAANFARRFDERCRKFHDRKTAQTNGILATKALACKLAKAGWHMMKENKPYAPERVFGPSASKPSPERVEQTKTT

SEQ ID NO: 134672 - protein, 351 aa, unidentified
MDYNRILGMNIRLPVSFGGISKTYNETVGVDISKLTIDVHLHLINQHKQFANNAKGFKALLAWIKKHKVKSDEVYFCFEHTGLYSLSLAAFLAEKNILFSMVSGLEVKRSMGVVRGKNDKVDAARIAEYAHLRRDKLKKTVLPSKEVLKIKNLLAIRERMVTQKGGYKASCKEYSSVLKKSEVKVLIHTHSKLIKVLAQEIKEVEAEIMKIIRSDETINNLYKLVTSIKGVGFVLGASLIVTTNCFTAFENARQYACYTGIAPFPFQSGTSIKGNTKVSKMGNQNMKKLLLMGASSARQHDPEIRQYYLKRIEKGKNKMSTLNVIKNKLIHRVFAVVKRGTPYLSIAKYAS

SEQ ID NO: 134673 - protein, 411 aa, unidentified
MDKENFIYVGIDLHKETHTAVMIDCYNQKLGEITFPNRPADFPKLVTKVKKCNTDGKEVVYGLENAYGYGRALAVWLIDKGYLVKDVNTAISHQRAKHRGAMYRKSDSDDAKAIALATLNMLDKLPDACPNDAYWSLGQLVHRRDNIMKQRTRLVNQLHEQLCIAYPSYKQFFNDISRPTALYFWEHYPSRKYLKGKSVEDLRAELVPVSHNKCSTKTCEKILDAVASDKVKNNAYQDARDMVTLSIVSDLQHYDSQLTEVDKMLEQMYKMLGCTLTTIPGVNVITAVKILAEIGDIKRFSNANKLAQFAGIAPLHLSSSGKGKDVATKQGNRRLQATIYFLAIQMVQVSSKGTPRNPVVRAYYEKRKAEGKTSQQALICISRRLISIIYGMLKYGTEYRMPVVENAGEKL

SEQ ID NO: 134674 - protein, 424 aa, unidentified
MATITPVTATVKSEDLMQVCCDVSKEKIDVYSRVGHEGALFEMMDTIRNCGSVLQRQLKAWQELAQAHGHAGVLVVCEPTGGHERKLLALARQAGSRTAYVSGEAVGKARVIESNDTGKTDRKDARIIATLAGMGKTLKVRQLPDEYERLRELNTTYDLECTTVATIRNHVHDQVRQLFPDLDGEDGFVFSATGRAIRQLFGLNPARIRECSWREFVAKVKTFVKAARLERLEKVWAAAASSLLHQCPATVRAMREERLGELFEDLDRHLARKLQLRTRILDAYGETEESRKLADIPDASSFQLARVIAESGPLADFRHGSQLLRYFGMNIRERQSGKWTGKNRISKKGRALGRKVLYQLVFSSLIGEGKLFADPYRRKKADCACGMKAIVCLMRKALKMILGVFRSREEFSRDRVFASLPAAA

SEQ ID NO: 134675 - protein, 413 aa, unidentified
MMTTITAEVTGQHDTGEVVAGIDTHADTHHVAVIDPTGRRLADASFPATSAGYQAILAYLNAFGQVRLVGIEGTHSYGAGITLHLQQARLRVIEVLRPNRQVRRLRGKSDPIDAYEAAATALAGVEHPEPKILDGAIEALRYLFAARRSAVKARSAAQVQVKSLLVTAPDRIRRRYRDMGDAELLLALSRLRPSTEADQLSRTVLTALKSVARRHHNLTTEIDELEAELPVLLDQAAPALHRSKGIGVITAAQLLITAGENTDRLHSEAAFAALCGASPIPASSGKTNRHRLNRGGDRQANSALHHIALSRISFDPRTRAYVARKRQAGKNTKEILRCLKRAIAREVYKLITNPGTVADYRTLRPLRHQLGLTQAQIATALTINPAKVSLIERGLAHDNECVRTYHQWLCQRI

SEQ ID NO: 134676 - protein, 404 aa, unidentified
MWYVGLDWADTHHDVEVLDEAGKRVGARRFAHSHEGLNELKQFVLSIAASPDQLACIVETNHGLLITFLLEAGIPMYAVNPKMANQLRKAAGAKTDQIDAHLLAKLGRLDLAELRRLEPDSPTVQELKTLTRDQDALIQTQTRLVNQLTACLKEYYPAALHLFAKLQQRSTLVFLQAYPTPQTAQAASLEEITATLRTGKHTNPSKAAPKIFEELHCPQLVTTAVIVRAKQRLMLSLVKQLLVVIQEIASYDEAIRTLLLTHNDQQIWRSLPRAGKRLAPRLLAEWGDDRARYADANSVQTLAGTAPVPFQSGNYAKAHKRFACLKPLRNALHQFAWQSTRQEAWAASYYRRKRAEGKTHSMAVRALANVWVRIIYRMWVSNTCYQTATFEAAQLTHAPRQHVA

SEQ ID NO: 134677 - protein, 371 aa, unidentified
MKTKTTPSVVTNSPTPATIVVGGFTLGLDLGDRGHHVCVLNATGQMVREGGLPNTRPALAKLLAEFPHATVALEAGTHSPWISRFLQEHGATVLVANPRKLHAISRHERKCDQRDAQMLARLARVDPALLHPIQHGSAQAQHDLLGLKLRDALVRTRVNLINTVRFTLKSLGYPVRNPSSESFHKTVLAGVPADCLPVVQPLLTVLAQITEQIKGMERDLVQRSKKDYPATQHLQQIAGVGPLTALCFVLKIGDPQRFGRGRDVGAYLGLCPRRDQSGGTDKQLRISKCGDGLLRRLLVSAAHYILGPFGPPCALRQHGQRLAGTGSAREKKRAVVAVARKLAVLLLSLWKHGTRYEPRATARPVLVMTPA

SEQ ID NO: 134678 - protein, 396 aa, unidentified
MTTIGIDIGGRTHVAARCRDGLARADREILHMGQSRAGFDAFDAWLNRQPEPVTLVTMESSGHYWMPLASHLGRHDIPVAVVNPLAAKYFAKSRLSRTKSDPADARSLAEMAMRDTPPARDPLAGVELRQAARFAMTLVTEQAKVCQRLIRLVDLGFPELGELFDDPTCRTARGVLRIAPTARAATRRRTSTLANANAGVGHRRLGQARAERLQAAAADSIAVPELDAEVAFEVGLLLDQYDLLERQIEEADRRVASLLDGETARRLQTIPGVGPSIAATLIAEIGDIGRFGDFDQLLAFAGVHPAERSSGKKGASPETAWHMSKVGNSHLRAAAYRMAVVGVQHNPVIASHYARKRAAGKSKMNALGHCMRKALSLVWGVWRNGHDFDPNWGVGA

SEQ ID NO: 134679 - protein, 348 aa, unidentified
MQYDAGIDVSLEQSSVCVVDAAGKIVKEAKVASDPCVLVTFFKGLGFPVTRIGLEAGPLSQWLYAGLTQAGFDVVLLETRHVKAALSAMVVKTDRKDARGIAQLIRMGWFRAVHAKSASSQEIRALLTARRLLLDKLRDVELSLRGVLRGFGLKLGKVTQRGFETRVRELVANHSMLQQITRSMLQARATLQREHNMLHKALLKIVRRDKVCRQFMTAPGVGPIVAITYKTALDDPQRIKKSKGAGPLFGLTPKRYQSGETDVIGGISRIGDAMVRAMLYEAANSLLSRTMRFSALKRWGLAVAKRRGMKRAKVAVARKIAVILHRMWIDGTSFRWSNKEKVKAAAHA

SEQ ID NO: 134680 - protein, 387 aa, unidentified
MPQPNDLSRSLVALDQDSTLIAVIEMGQASWLVAGIVPGVNRHPLKKIATDQDQLMQVLRRWKNEAETAGRVIKRIAVAYEAGRDGFWLARWLRARGIEAYVIHPSSVPVSREHRRAKTDRLDTELLKRAFLGWLRGEPDHCSMAAIPTLTEEDAKRPGRERESLVRERTRITNRIKGALARLGIRNFKPMLRNAPKLLETLRTPEGATLPPNTLAELRRDMARLSFVKQQIKEVETGRIERLQRAPGERGNAMVHLLTRVVGVGVETADMLVREVFSRDLRDRRAVARYAGLTGAPDESGKKRRERGLAKSGNARVRRGMLQLAWGFLVHQPDSVLVEWYRARTADARGATRKTMIVALARKLLIALWRLATTGEVPEGLGLRAAA

SEQ ID NO: 134681 - protein, 409 aa, unidentified
MQVVHERCAGLDVHKKSVFACVMCLESNGSKHVEIRSFGTVTRELLKLQDWLRENHITHVAMEATGVYWRPIWAVLEGQFELMLVNPHQIKAIPGRKTDAKDCEWIADLLQHGLIRGSFVPVAAIQDLRDLTRYRAELTQERNRVDNRIQKLLEQCNIKLSSVASDTLGASGRSMIEAIIAGEDNPEQLAELAKRKLRAKIPELRLALEGRVRDHHRFLLKEYLQEWKAIGERIERIEREIDRKIVPFESVAKLWESIPGVNHVTACNLVAEIGVNMDQFPTAHNLASWAGVCPGNHESAGKRLSGSTRDGNNWLRRSLCQSAWAASRQGNCYLSSQFRRIAARRGSKRALMAVAHSMLVIAHTMLKTGRTYHELGGGYLDLINKEQLQRYFVKRLQNLGLTVTLEPAA

SEQ ID NO: 134682 - protein, 347 aa, unidentified
MEHIAIDLGGRESQICVRASDGTVLAEERWPTGSLKKYLVRRPKSRVVVESCAEAFSVAEAAEECGHEVNVVPATLVRALGVGARGLKTDVRDARNLSEVSCRMARLPAVHIPAKASRERKSLCSLRENLVEVRTKLANGVRGWLRSEGLGSPRVGQPERLWLRVQEHLKQRDRVMPGYVERNLKAINFLTEQIEEADRELGATAKADPTCRGLMTVPGVGPVTAVRFAGAVDQVERFPNSHALESYVGLVPGENSSSERKRITGLTKAGAQKLRWTLIQAAWSARRCRRNDPMVAWALQVEARRGKFVATVALARKMTGILYAIWRDGSTYHANRGSGPVCEPSPP

SEQ ID NO: 134683 - protein, 401 aa, unidentified
MKYVLVLDVAKGKSMFMLSSNVGEVLLEPTEYVHNKNSFELIDCNINKLNIKDNLTVVMEATSIYHKQPERFFKENNYHVIVFNPLIGKEITNTIRKTKTDKQDCIKLTNLFFKCSIPDRNYTEDEIYTKLNELSRQYFHLDEGLTRHKNRYKELLHLCFPEFELCFKDGKIYDLTVLNFIKEFSHAYIIKEKRVDALAYNMANTNNRHLNYYKRKANTIKEYAKNSYPGVNENSKDVYNLKQLVKIIIDITEQKDNVKNQMIELAKQTKNFNNIVSIFGIADLSASLIIAELKDITRFNNIKQINASCGLDPTIVQSGKSINYHGPISKRGNRYARKILFNCSRNIVTLSAKHDKDNPIYIYYQKKKQEGKHYYACLTACSTKLIRIIYALCMNNSHQQN

SEQ ID NO: 134684 - protein, 421 aa, unidentified
MRGDHAYTWGWEQVLLVGIDWADKAHVYCLMDDAGTTLSTGTMEHTAEGLEQFMNIVRARVQTPHDVLVALETSHGPLIGALLDQGFTVYAINPKAVERHRDRFRVAGAKSDLRDAWVLATLLRTDRAQYRPLVPDSEVAQELRALTRDRADLVRTRTMLSNQLTACLKAYFPEFLTLFADPDRPVALALLQTFPTRDHLQAVSRADLEAFLRRHHCPHSRKRATAIHERMQAPGFHIAPPIVRAKARLAGTLASQLLALLEHIDAYEREIERILKLHPDGELYRSLPGAADVLAARMVGELGDNRDRYRDPNVAQCEAGTAPVTRKSGSTRTVHIRRACIHPLRETLWTFAFSSLRHCAWAQAYYNQARKRGKKHAEAIRMLGNVWLRIIIAIRRDRRPYDEAVFQKARARHASPGLCFA

SEQ ID NO: 134685 - protein, 420 aa, unidentified
MISKQNVEIAAFIGLDWADQKHAVTLQESGSDQRQRFTLDHTPEALQNWIPSLRDRFGGKPVAIAVEQKRGALIYALMHVEFLHLYPVNPVTVAKMREAFYPSGAKDDPRDADLLLDILISHRRHLRVWTPDDALTRSIQLLTEDRRRIVDERTALTNQLTAALKMYFPQSLDWFGDLHTARACAFLQRWPSLDQLKQESPSAIRKFYKAQGYRGDEKLEQLVGNIKKAQPLTRDSAVLLSCSMKVETLVQQIPLLTEAIERYDQKIAVLFNQHDDSTLFGSFPGAGAALAPRLLAAFGSNRDRFECASQVQELSGIAPVTEKSGEGLWIHWRLACSTFLRQTFHEFAGCSILQSDWARACYDQLRDRGKSHHAALRALAFKWIRIMFRCWKNRKPYDEVLYCNSLKLRRSPLADELPAT

SEQ ID NO: 134686 - protein, 345 aa, unidentified
MKITTIGIDLAKNVLQVHGVNEHGKVVLKKQLKRDQVAAFFAKLPPCLIGMEACGSAHYWARKLQTFGHTVRLMAPQFVKPYVKTNKNDAADAEAICEAVARPNMRFVPIKNVEQQAVLALHRVRQGFVKARTAQANQIRGLLAEFGLVIPQGIGHIAKRVPELIEDASNELPGSFRLLVQRLLEHLKELDREVGEMEAQIVAWHRSNEDSRKLEKVPGIGPITASAIVASIGDAKNFDNARQMAAWLGLVPRQHSSGGKNVLLGISKRGDVYLRTLLIHGARSVISAVQRKKDSMDGWLGGLLKRRNVNVTAVALANKNARIVWALLRHGREFRADYVASIARV

SEQ ID NO: 134687 - protein, 350 aa, unidentified
MKIVGCDLHSKWQQIAVFDGETGEISEHKLMNGDGEAARFYRGLAQPALVGVEACGNSQWFLDLLERLGHEVWVGDAAQIRASYVRKQKTDRRDAGHILRLLIEDRLPRLWVPTVEQRDLRQLLMHRHKLVEIRTRVKNGLQHLAMNRGVQKHSRLWSVRGRACLEELPLAGWSAQRREDLLKLLSQLDAQIGSLDAAVEQAARQQEQARLLMTQPGVGPITALAFVLTIGDVRRFQHSNQVASYLGLIPREHSSGGRQKLGAITKQGNRFMRQLLVEAVQNTCRLDEGFRRQYQARCHHKPKAVAKVAAARKLAVRLYWMLRQDVGYPEIARIESSPGVALTRCKRSRP

SEQ ID NO: 134688 - protein, 391 aa, unidentified
MIYVGIDVAKDKHDCFITNSNGEVLFKAFTISNNQDGFNVLYQRIESVMEDVTKVKVGLEATGHYNYNLLGYLIDKGLTTYVINPLHTNLYRKSLSLRLTKTDKVDARTIAYMLMSDVNLKSYSNTSYHNEELKSLTRYRFDKVKERAKLKTSVSRLVCILFPELEKLVPTLHMTSVYALLSEFPGAKYVAGAHLTRLTNLLSDASKGRYGKDTAITFREAARASIGSNMPAKSLELKHTIKLILELGSEIDEIENEIKFIMDEINSPILSIPGINYRMGAMIIAEIGDFSRFDSPDKILAYSGFSPSTYQSGQLDSAYSHMEKRGSKYLRYALYNAAKYVCHWDATFAEYLAKKRAEGKHYNVAISHAVKKLVRVIYHLVKSNQQYIKVA

SEQ ID NO: 134689 - protein, 328 aa, unidentified
MQGKVSSERTAMATVYVGIDVCKEWLDIHLHPLGRSFRVTNDTAGLRRLKRELDALDQMPRSALHIVMEATGKWHRAVQRSLHADGFYVSVVDPLRARLFAKACGFLAKTDRLDARLLAIMGEALKPAQTPPQDQALEALQELVNARSAANGERTALSNRMKTAVTAFLRKELTRRLAALDTHIARLDAEIERSIGAEPEMRRRLDILISIPGIGAVTAASLIAGLCELGACSGKQAAMLAGLAPLACESGERAGHRSIRGGRPAPRNAIYMAALSASRHNPDLAHFAERLKKAGKPNKVVLVAVMRKLIVLANTLITKNRIWTPNPP

SEQ ID NO: 134690 - protein, 408 aa, unidentified
MDIVYRCCCGLDVHKDTVTACVLWADGNRQEKRLFGTFTRDLLLLADWLLQCGVTHAVMESTGVYWKPVWHILEGQFELLLVNAQHVKSIPGKKTDRRDSARLAELLQHGLLQGSFVPPQPIRELRDLTRYRVTLCQECNRIANRVQKVLEDANLKLASVASDALGVSGRAMIGAMLEGEQDAGQLAQLAKGLLRRKLPQLELALEGRVSAHHRFLLKQLMEHLQFIERKIEELEREIAARLQPHQDVVERLCTIPGVDRVSAWGIISEVGMDMSRFADAAHLASWAALCPGNWESAGKNKSGRTRKGGVWLRRHLCQCAWAISTKQKNYLSALFRRLAARRGLKRATIAVAHALLVIVWHVLKAPVVYRDLGPDYFDRLHPERLKRKLVKRLEGLGFEVNLQPATSA

SEQ ID NO: 134691 - protein, 369 aa, unidentified
MDVHSTNYTLCAMEPVIGAEDRIFANIKVTADYKNILMFIENLKLKLGLNDEYDIECGYEAGCLGYSLYNQLTAAGVKCVILAPTTMLTPQGVRIKTDARDAVMIAQCLSYGGYHAVYIPTEEDDSVKEYLRMRDDHKLALKKVKQQINAFCLRHGYHYEKTKWTTAHLKWLKGLDVSGLYKEALDEYMASYDEQTAKIERFDQRIEELASQERYQEKVKRLGCFLGIKTHTALSLIVETGDFERFAKGNIYAAYLGLAPGENSSNEKIRRLGITKAGNGHLRQLLIEAAGGICKGAVGHKSKELRRRQNGNTAEVIAYADKANTRLRSRYYKFIRRGKKRNVAVAAIARELACFVWGMMTENISIKAS

SEQ ID NO: 134692 - protein, 302 aa, unidentified
MMFIGIDISKEKIDLSWLRDQLTNKIKTKVFKNKHQDFLAIEKWLLNTTKSAANELVITLEPTGVYHGALMYFLHEQGFNIILANPGKAKKYADALNIIHKTDKSDATMLAHYGCAKHAVVSYWQPDALEVRELKALIRRLDALESNRQREANRDEIKQLKSDIDNHIDNEPDLKRNRKLLESIPGIGPVLSRELTYLFAAKKFNKAKEAAAYCGLIPRHNESGKLKGRTSISKLGPARIRCKLYMAAIVAGQWNKTIKRHKLTLINNGKTPMQAVCANMRKLIHICFGVIKNQEAFKLQES

SEQ ID NO: 134693 - protein, 422 aa, unidentified
MVLKGVPMALKIVYQICCGIDVHKTFVVACIASTNKQGVTIYKRHRFSTFTQGLKELLQWLLDNHCKDVCMESTGKYWIPIYNVLEKDCNIVLAHPKYVKAIRGKKTDKKDAKWIADLFKHDLVAGSFMPPADIRQLRDLMRYRFKLTCFMSSEKNRLQNCLTVSNIQLASVVSDPFGKSSQRILDKILENPDDTSFDIEPLIHGSMKKKLPELELAIDGFITPEQAGKLKVIKKHFEDLESRKAELEKLILALASPYQQELDLILTAPSFKNKFTAIGIISEIGVNMEAFPSAKHLCSWAGLTPTNNESAGKKKSVRVSKAGCYIKPLLVQCANSVVKSEKHPEIRNRYLRLRKRRGHKKAIIAIARMLLTALYNILKNKEPYNAELYRKSDALPVNREITIEQAILIAQFQGYKIKSATE

SEQ ID NO: 134694 - protein, 413 aa, unidentified
MRVHHTVCCGIDVHKKSVTACLMWGPADQEPQCEIRRFGTMTSQLKALGEWLKQAHCEMAAMESTGAYWKPVWNVLEGEVPLILANAKHVRALPGEKSDHKDGKRLASFVRHGLIRASFVPPRDVRELRDLTRYRTKLLANGSAERNRIQKVLEDANIKLGSVLSDVFGVSGQKMLHALVDKPALNVEEVAALAHWRLQPKIEQLKLALEGRITAHHRFMVDLSMGHMQYIEQQILRLDEEIARHIAPYQQQFELLQTIPGIGETASASILSEIGPDMSPFDDDGKLASWSGICPGNNESAGKKFNTNTRKGNRHFVSTMVECAWASTRKKGSHFKARYYRVRARRGSQRAILAVGHGLVRTVFVVLKTGKPYQEPIRPLLTEKQRHRKAERLSRELGQLGFAVTLKPKTAQP

SEQ ID NO: 134695 - protein, 412 aa, unidentified
MKDLLEISCGLDVHKEKIVACILTGPLGKPTRSEIREFSTLIPDMIALRNWIVSKNCHHVAMESTGIYWMPIYEILEDAFSGDITLLVVNARHMKNVPGKKTDMRDSEWISTLLRAGLLNGSFIPEKRIREFRDLNRYRKSVIRDITSQKNRIEKFLQSSGFRLSSFISDIFGASGRNIILHLIEHGQIDKTALDSCLKTKTRNRIDEILMSVNGTLSEHQKAFLRILMTHYDSLKKHLAEIETSLEEDMAPFTLQVEQLNSIYGISTTASCAIIAEIGIDMKPFKTAEHICSWAGLCPGNNESAGKRKSTSVTKGNPYIKSMLCEIAWVIAGKRNTYLSAWYWRIKQKKGAKKAIVALARKLLVIIYTMLKQGTLFDESCFETRRKRCEQKQLSRYIRELEKHGYHVEAQS

SEQ ID NO: 134696 - protein, 412 aa, unidentified
MKTYILRPFHPVEPQYCRRTDPTTRAITSDILSRPAAPSTDLILYVGMDVHNDSIAVAIAPSRSTEVRPYGIIGGEHDDVLKLIKKLAAAHPGAVLQFCYEAGPRGYPLCRFIRRLGYPCIIVAPSKVPRKPGDRVKTDRRDAEQLARLFRAGELTGIYVPDPQDEAIRDLIRARFQVAKAQHRARQQLKMFLLRHNLRYGGKTPWTPAHLRYLAEIKLPFPVQQIVFQEMLNVITDATSRLERYDQEIERAVPGWRWEPAVRALMALRGMALLHAATLVAELGDFNRFEHPSQLMSYLGLVPSENTSGEDRQQGGITKMGNGVARRALVEAAWQYRAPARISPHLKKRQEGLPKAIIDISWNAQRRLHHRYVHLTRVGKKKSQVAVTAVARELSGFVWAIARQIKPLDSKP

SEQ ID NO: 134697 - protein, 343 aa, unidentified
MDVHCAFSEIAVVTSQGKRVRRETCDTTIPTIVERLKAVRRRRRLTFEEGPLADWLARELRSHVDELVVCEPRRNHWIARDGDKDDPMDAFKLAELYRGGYLKAVHQVNSLERSLLKQQVLLYHDRVRERVRQGNQLAGLCRRHGVFVRAAILLDDAVWQRSLDSLPGDALLRCGWQYVRETYDLLWSREDILRRSLVGVARNIAEVQRFAALPGIGWIRGVTFYALIDTPHRFRSKAALWRYCGIGLERRHSGNGPVRTRLSRQGHRRLKDVLLGAAKSAIALGDNPFADKYETWREQGLHASNAKRNVARALTATMWSLWKNGQAYDPDRVVRGATSDLQT

SEQ ID NO: 134698 - protein, 342 aa, unidentified
MTRAITGGVDTHADVHVAAALDPIGGLLGVEEFPVTPAGYALLLGWLGGFGTVGLVGIEGTGSYGAGLARHVTAAGVRVVEVDRSDRQDRRRQGKSDPLDAVSAARAAQSGRARGAPKGRDGAVEAIRALMVAKRSAAGERTRTINQARALIVTGPDDLRTRFTQHTAASLVAGLASLRPRPGDVVGYATRIALRELGRRAEFLDGQLERLDELIVPLVTARAPGLLALYGIGPNTAALLLIAAGDHPGRLRSEAAWAHLCGVAPIPASSGKTVRHRLNPGGDRQANHALWRIVFTRLGSDTATRAYAERRTAEGKSKAEIIRCLKRYVAREVYPHLRTAAG

SEQ ID NO: 134699 - protein, 331 aa, unidentified
MNKYVGIDVGAKTVVVSRRAQGRTIKTETVAQTAAGHAKLVKQLSALQPACIVLEATGVYHLDLAVALTEAGLPVAVINPKSFHHFAQLKLTHTKTDAVDAALLAEYGERMQPPRWVAPDAAHLALRDIGRQLNRIVAARTQAKNRLHALQSRRSALPLLVADEKDAIATLNRRLHRLTLAARQQIGSAASLSAAYEHLLTAKGVGQTSAIALLAELCVLPADMRAAQVSRHAGLDVRITQSGTSVHKLPRLSKAGNAYLRSALYMPALSASAHDPRAHAFYLALQGRGKKKMQALGAIMRKYLTGLWACVRYNQDFDSTKLFSKIHLAGA

SEQ ID NO: 134700 - protein, 321 aa, unidentified
MNTEMFVGIDVAQATLDYALRPEGTVGQVANAPSGIATLVELLQSVLPTLVVLEATGGLERPLVTALSAAQIPVVVINPRRARDFAKAMGYLAKTDRIDATGLAELGARLRPPVRPLPDAAAQELAALVTRRQQLVALHTAESNRLPTALPFLQEGIRAHLTWLEEAIAKVEHEIATRIDGRSRWRHTADIVDSAPGVGPTTAATLVAALPELGELTGKQIAALVGVAPLAHDSGKRHGRRHVQAGRSGVRAVLYMATLTATRCNPVIRAFYTRLLKAGKLKKVALTACMRKFLVILNAMVKHGTYWDPSYCPTSQSVPTN

SEQ ID NO: 134701 - protein, 450 aa, unidentified
MAKRKQPFEVKFPNAAGIDICSSSHFVAVPPDRDDTPVREFPSFTVNLQEIADWLTACGVDTVAMESTGVYWIPLFELLESREFTVFLVNARNVKNVPGRKSDVLDCQWLQQLMTFGLLLGAYRPPDDICALRAISRQREMLLSYQARHIQHMQKALVQMNIQLGNVISDVVGETGQRILRAIIAGERDGKVLARFRNNHIRANEEEIAKSLVGNWREEHLFALKQAMALYDAYGERLVECDQELEMMLAHLGWYDGEPSKARRRSRAKNAPRFDARTYLFKMCGVDLTRIDSIEATTALKVIAEIGTDLARFPTVKHFTSWLGLCPGTKITGGKRLSGRTKRTANHATQALKMAAASLLKSQSALGAYYRRMCARLDKSKAITAAAHKLARLIYAMMTKGTEYVDRGQDYYEERYRERVLHHLKRKAEAMGFRLEPVADGGNNLAHSVT

SEQ ID NO: 134702 - protein, 450 aa, unidentified
MEHGMTQQAQAKKRAPRLEVTNPNAAGIDIGSASHYVAVPADRDDEPVREFKSFTVDVHKLADWLEACGVDTVAMESTGVYWIPVYEILERRGLTVLLVNARHVKNVAGRKSDVLDCQWLQQLHSYGLLRGAFRPADQICVLRALNRQRGMLLRMQARHIQHMQKALVQMNIQLANVISDVVGETGQKILRAIVAGERNPHVLAGMRNVRIKASEEDIVQSLRGNWRDEHVFSLKQALELFDEYGKKVADCDELMEQQMIMLHQHDGVPGKARKQSGRNKPKFDLRTRLYQMCGVDLTRIDGIEVGTAMTVLAEVGVDMSKFPTVKHFAAWLGLCPGTKISGGKVLGSKTQKCANKTAQALRQAASCLKNSQSALGAYYRRMCAKMDKPKAITAAAHKLARLIYTMITKGEEYVDQGQTYYEERYRQRVEVNLRRKAETLGLRLVPMEAA

SEQ ID NO: 134703 - protein, 341 aa, unidentified
MAEVSTIGLDLAKNVFQAHGADASGAVLFRKKLRRHQVLTFLAGQRPCTVAMEACGSAHHWAREIGRLGHAVRLIPPAYVKPFVKRQKNDAADAEAICEAAQRPTMRFVVPKSEQTQAAALVFRARDLLVRQRTQIINALRGHLAEFGIVAAKGPACVPQLMQAVEDPAEPIPEIARPILQMLIETLRRLDEQITRLDHEIAQRAKENDAARRLMTIPGVGPVTAVALAALAPPVETFKCGRDFAAWVGLTPLQHSTGGKQKLGATSKMGERTLRRLLIIGANSVLLQVARHGAPAGSWIARMVARKPPMLVRVALANKMARIVWALLARGEVYRAPAALA

SEQ ID NO: 134704 - protein, 322 aa, unidentified
MAMLSFGGIDVSKDRLDITVLPDEQCSSVSNDAAGWAELIEQLRGSSITAIGVEASGGYERGVVRALLAAGMSVRQINPFKLRQFAKASGILAKNDRLDARMIASFVAIMPTRPAQRQTPMIEQLAAMLTVRRQLSDHKVATENASRLLEGAMLQRLSRRRVAGLTADIDLLDQRLVEIVTADPALAHRFWLLTSMPGVGAVLACTLIALLPELGQMSRKQVAALVGLAPYDFDSGKLKGRRCIWGGRARVRHVLYMAALSASNWNPALKAFHDRLAATGKKPKVVIVAVMRKMITTLNAMLRDGTTWVDRYSGRRSAATAR

SEQ ID NO: 134705 - protein, 339 aa, unidentified
MAILFVGIDLAKNVFAIHGVDEHGQAVLVRPSVQRARLHQLVAALPPCTIGMEACSGAHHWARLFVQHGHTVRLMAPKFVSPYRMSGKRGKTDAADAQAICEAVQRANMRFVPIKSQDEQARLCIHRVRQGFVEQRTATINRLRGLLSEFGIVLAQKAGTVRREAAAHLEDLPGWANTAVGDCLSEVHRLDERLAEYDRHIGKMAGEDERSSRLMRLQGVGCTTASALVSTIGDARDFKNGRQLAAWLGLVPGQYSSGGKTRLGGITKAGDGYLRTLLVLGAKSVLAAARSKHDRLSRWALALEVRRGYWKAVIAIAAKNARMAWAVLAKGEDFKLIEA

SEQ ID NO: 134706 - protein, 402 aa, unidentified
MNPVVGLDISKEESHGQAFLARGKLFRGTFHFEHTRDGLANLHQVLKDVESVSKQRPLLILEATGHYQSPVVQFLEEHHYIYIVINPLISNRLRKSQLRKVKTDAADAYLLGELYYREEFEPFKKRGVQLLNLRYLTRQYETLSKMCVSTKLQFQAVLDQVFPGYKGVFGAMYSGVSLRFLSEFPTSYLVLQTDEDTLRAKMKELLSSKRGRSEDWINQRVQRLVDAAKQNPFQQTMYASHLINMRVLITLILQYQEHLAELEQNIDALAEEIEEYELIQSIPGIGHKIAATILSEIGEVERFDHPKKLVAFAGIDPSVFASGKFTATRNRFTKRGSRQLRYALVMAVQCGLIRSRNMRIKAFYERKRAEGKPHKVALIACANKLVHWLYAILKNKKEFRPI

SEQ ID NO: 134707 - protein, 433 aa, unidentified
MQDVQDEPLFAERVAGLDIAKAEAEATVRVPSDATAGRRQQETRTFGTTRAALESLGDWLRCWGVTKIGMEATGDYWKPVFFLLESRGFDCQLYNAGQVKALPGRPKTDRADSIWLARITERGMIGPSFVPPEPIRRLRTHTRYRRHLTQARTAEKQRVEKLLEDGHLKLSSVISDIHGVSGRDMLDALTAGQRDPKALAQLARGSMRGKIRRLEEALDCSFFTSQHAAVLAMMLAAIDYYSAQIAALTATIEALAEPWIRQITQLDAVPGIGTICAQDIIAEIGTDMTVFPTAPHLVSWARWSPQVKQSAGKRKGSNSTGRGNPYLGAALGEAAIGASRTPSFLGARYRRLARRMPKKKALVATGNSMLTIIYALLADPDANYHDLGPGYYEQRLHARRQTRNHIRSLERLGYKVTIQAINPDTGELPAAAG

SEQ ID NO: 134708 - protein, 392 aa, unidentified
MSLIEDCAGLAGAEPQTWGTGLMNNIVFVGLDVHKATIAVAVAEGARGGEVRELGYFINHPHHIQKLVERLAKGGRNLSFCYEAGPCGYGLYRQLIGLGHECVVVAPSLIPMKPGDRVKTDRRDAVMLAKLHRAGELTAVWVPDDAHEAMRDLIRARSTAVRVLIKARQHLQGFLLRHGRIYAGKKGWTLAYRRWLTTLRFDHSAQQVVLQDYINAVTGAEERVERLTQQIAELAQNWSQAPVVAALQAMRGVAFVVAVTVVAEVGDFTRFANPRQLMAYLGLVPSEHSSGSAVHRAGITKAGNALARRALIEGAWTYRMQARVSRKLHDRIDGLPQSVRDIAWKAQVRLCARYRRLAAAGKPKVVVTTAIAREMLGFVWAIATAIQAPRAA

SEQ ID NO: 134709 - protein, 350 aa, unidentified
MQIIGVDLHTRQQTVAMLNVETGEIVEKTLQHEGGSVREFYSTLAGPSRVGIEATGSMQWFLELMEELGIDCQVGHPAKIRAAEPRKQKHDRRDAALVLQLLVENRFPSIWMPSREQRDVRSLILYRHQWVRIRTRVQNALQAIALSHGLRRGSSLWSKAGQQAIASLSLSRYTAERRTALQSLYRHLEEQIDDLNRKVEELAWQRPQARRLMTHPGVGPITALATETFLGEPKRFLDGKAVASYVGLIPSEHSSGGRQRLGGLSKQGNPLLRFLWCEAVGHAVRKDAELQRFYQHKLVQKGLGKAKVAAARKLGIRLWILLRDQIDYQEFCRRGQLRQKHGGAHAGMPA

SEQ ID NO: 134710 - protein, 347 aa, unidentified
MDKVTVIGMDLGDKNHKAVVLVADGTEIERAEVKNTPEQVQEFLARHPGALLAIETGTHCRWISRLAVGLGHEVLVGNARKLRMIWNSSRKNDWNDAEMLAKLARADRSLLVPVKLRDDESQELLRLVKARDILVKHRAGIVNMIRGFCKAEGGRMDGCTTEAFVRQEFDVPKVLRDVTKPLFAVLRELSKKVALFDKMLVQNLEKKHREAAASVMAINGVGPVTAAAFIATVGNPTTFGKPRDAGAYFGLVPRQDQSGQSDRQLRITKEGNTQVRALLVNCANYIMGPFGKDCDLRRHGLRIAERGGKNARKRAKVAVARKLAVVMLALLQNQKEYCPLMGDVSMA

SEQ ID NO: 134711 - protein, 339 aa, unidentified
MKFAGCDLHKETITICVVNQSREVLKRERLVCRDERGLRSFFESLGPFQAVVEATASYEWFVRLIEPVACRVLLAHPKKLRVIAESTRKSDQLDARMLAEFLALDMIPTSYQPTPRQREHRRLVRQRHGIQRRLTSVKNRIRRILSNYNADRKSLFSTAGLAYLERVPLSAADRFSVEQVVEELQFGRRQLQAAEARLKQFAEQAPLREREARTLLRTIPGVGFVTTEVVLAELADIDRFGSQKQVVSYAGLSPGQRESAGKSRELHLEKNGSAHLRATLVEAAWRLVRHSLRWRGIYERLKVRVRAKKAIVAVARRLLCLMTAILKSGRPYSASYQPA

SEQ ID NO: 134712 - protein, 338 aa, unidentified
MKNYVGLDVSLQTTAICILDEKGKRLKEGEVESTPEHINQFLMESGLNIELIGLESGSLTHYLQKGLLSMGYQVVCMESRKMAAILATIINKTDKNDARGIAEALRVGHFRECVHRSDDAVEIRTLLHMRQTAIEQRTAIVNSLRGHLKMYGIKFKKKAGKSFRQLVEEATKELRESVRKMIESLLNILDTLDHELDEMTSEVKLLQTVDGVGPITALAFKAEIDEAKRFSNSKSAGAYVGLTPRQYSSGEVTHYGRISKNGSKRTRYLLVEAASALLTRCKRWSKLKAWGLKLQRKKGNRKAIVALARKLAVTMHKMLLTKEPFNRAYEKKKKLVVV

SEQ ID NO: 134713 - protein, 435 aa, unidentified
MTLKIKMVDHDPCPYSLPAPKLFLGGAAMPINMQYERSFGMDLSKKTFHGCILDGPDLGNRHFFTGEMGPKGKAKLAGRLCKGDLVLMEAGTSSFSLARFLIENTEAEVVVLNPAKLYNIFNSTMKTDKADSEKIARIARNMPKDEWPVVSIPTITEQAERAAVTFEVFLAEEQTMLVNRLHALFNSMGYPFVKKSELKVEEKRLKLANEYLCEASIAIEQAIMISDQLVLLADQMEQCQQTLRDICFSHPIQALALFSLPGVGLMTASSQIAYLNDGSRFDSPDSYVNYVGLSERRFDSGNVVSKGHISHMGNKCIRRNIIQAAWSASRKSAHNPLSVRYNDLRARGKCKQVAAVAVAKKMVQLSYILVRNNDIYEFTKQQGLASFRKKLKFHKLEDLIEYLPELTRRQMEEIDKGKKKEAAATTPSRTKKKLA

SEQ ID NO: 134714 - protein, 413 aa, unidentified
MDVLYQRCAGLDVSKRDAKACVRITGDRGKTSQEITTWGAMTNEVNRLADYLLAQDVGLVVIEATGDYWRQFYFLLEDKGLNVQLVHAKEARNVPGRKTDVSDAAWLAQLGAHGLLHACLVPPENIRRLRDLTRARTAITDERSREVQRLEKMLEDSGIKLSSIATDITGVSGRAMLQALIEGQNDPAVLADLAKRGMRRKIPALTEALTGRFNEHHAFMARLFLDRVDAHTKDLQRLDARIEEQMKPFSAARELLATVPGISTRTAEVIIAETGADMTVFPTAGHFASWGGTAPGANESAGRVKSTKTRPGNRYLKRALGTAALTVSRSQTTYLGAKYRRIKSRRGPMKALVAVEHSMLISIWHMLTTGECYVDPGPDYYTRRQPLRSKERAVQQLENLGYQVILEPLQRTG

SEQ ID NO: 134715 - protein, 316 aa, unidentified
MTAYAGIDIAKHGFDLAFEPKRKLQHFDNNAKGITQCCKQLKQRKPELIVMEPTGGYEVALLIALQDAGLKVAVINARRIREFARATGRLAKTDKLDAEILARYGAVIKPEPQEPLDEQSRTLKAIVARRHQLVTMHTAEANRLEHASGTAVKESLDTVLKTLENQIEKIEQQIADQIESRPELKNKTQQLQSTPGIGETTAALLVTELPELGRLNRRQIAALVGVAPINRDSGTYRGKRMTGGGRRDLRARLFMPMLSAIRCNPAIRNFYQRLLNKGKTKMTAVIAAMRKLLTILNFMVAQNQSWDPEKAQVTHA

SEQ ID NO: 134716 - protein, 404 aa, unidentified
MELKPLYRCVAALDVHQAKLTVCVLREDAAGELQVELREFGGFKRDRRAMAEWVASFHPEEVVMESTGIYWKSPYAALERYGIRALVVNARHVKQVPGRKTDIGDAQWLAILARSGLLRGGFVPPANFRALRLTARQMQKLTGMLAAEKNRLHKVLTDAGIRLAVVVSDIHGQSARAMVKGLIAGEGPEQVLTYASKRLKATEAELLDALDGELSGEHRFVLAELMDHIEELEQRIVRHGNHLLQGLAPQQGLLQALQTIPGLDERGAAMLLVEIGDDMDAFGSGEKLASWAGVCPGNHESAGKRKSGRKRKGNPYVRRILCEAANAAARTRSALAELFKSLLIRRGRKRAIFALAHKILKIVFVLISRGDYYRDATVDYEAMSVERNAPRWMRMLRKYGYISA

SEQ ID NO: 134717 - protein, 419 aa, unidentified
MRSIQTKKIKIVNNETLVVAVDIGKATNVGYCRCPNGVDTKPFSFHNDGHGLKYLWERITQMKDAHNLKEIVIGFEPTGPYGEPLVHYLRKKNVKLVQVNPLHTKRVKELQGNSPNKTDQIDPKVIADIIELGHALTVILPEGPAAELRRLTHARERAMRRRIALYSQLQDLVFVIFPEFSQVMKNVKTKSSMYILEHCPTPEDIIKYKLKNLTVTLRKVSRGQIKEERARELYAAAKTAIGIKEGRRGILIEIREILSTVETTERFITEVEKEMNHFLKDIPYSRFVLSIKGIGEITVAGLIGEVGDFRKYKTIPEVLKLAGFDLFEISSGEHKGQRRISKRGRSHMRKLLYFVAINTVRKGGIMHEYYQGCLERGMLKMKALIAVSRKLLGIMFALVRDHSEYREDYLVEQELKKAA

SEQ ID NO: 134718 - protein, 405 aa, unidentified
MDLLYLRCAGLDVHPRSVSACARLVVGGQATHEVRTFGTSTRELRVMADWLSGLGCTHVAMESTGVYWKPVWHVLEGRFDLVLANAMYIRNIPGRKSDVKDAVWIADLLAHGLLRGSFVPPEKIQDLRDLTRTRKQLTREITRHTQRIQKTLEDANVKLTEVISSVLGTSGRAILRALIAGESDPGKLVDLTEGRLKAPREKLMDALQGRITEHHRFMLKLHLDQVENLERAVRELEARADQGSFRAATELLTTIPGVSHVTARVIVAEIGDDMRRFPTAGNLISWAGLCPRLDESAGKQRSNRTRRGAPWLKTVLVQAARAAANKRDSYPRAQYLRLKARRGPNKAVLAVAATLLTAAYHMLKYGVEYRDLGPNHFDRDKELQASRLIRRLKALGLQVVVTPAA

SEQ ID NO: 134719 - protein, 312 aa, unidentified
MAILSFCGIDVSKDRLDVVVLPEGRFCSVSNDAAGWAELVARLHPLAVSAIGLEPSGGYERGIIRALLAAGLSVRRINPNKLRQFARARGVLAKNDRLDARLIAEYVAIMPTRVVQRDDAVERLAEIVTMRRQLCDEHVAVENQAAHLEDAMLRRLSKRRLTRLEADIRLLDRRLAEMVATNAAFARLYDLLTSMPGVGAVLAFTLIALLPELGKMSRKQIAALVGLAPYDFDSGKLRGHRSIFGGRMPVRNVLYMAALSASRYNPALKAFSNRLAGADKKSKVIIVAVMRKMITTLNAMLRDNAAWQLKPT

SEQ ID NO: 134720 - protein, 371 aa, unidentified
MEKDITHVGLDAHQETIQAAVLLPDGKKSAEDRLANTPEAIRRWARRLLQRAPGAVVCCYEAGPLGYGLKRELEALGLRCVVVAPALIPVKPGDRIKTDRRDARKLAELLRAGLLTEVHAPSAEQEAVRDLSRAREAVKRDQVRMRHRLSKFLLRRGVRWTPGRRAWTQAHLEWLRGRRLGYPADQAILDDHLLGLEQMESRLLALDAKLEAIGSEAPYRQPVGWLRCFRGIDTLTALALVVELHDFRRFASPRALMGYLGLVPSEFSSGGKERRGAITKAGNSRLRRLLVESAWHYRHRPGVSYRLRERRAGQPARVIAIADRAQHRLHARDIRFQARGKPHNKIVVAIGRELIGFVWAALDPKANAPTA

SEQ ID NO: 134721 - protein, 340 aa, unidentified
MIIGCDFHPRFQQIAFVDQETGECGELRLSHPQEAEQFYRSLGGRQVRIGAEATGNFRWFRRLIEELGQEFLLGDASTIRACCPRKQKTDKRDARHILTLLVEDRFPAVWQPPVENDEMRQLLLHRCRLVRMRTRVKNQLDSMAKNEGLLSLRVWSPKRRSEIEALPLPGWYAHRRADLLVLLDELDKRIKPLDEAVRKAAEGNAEACLLMTHPGVGPIVSLAYVLTIGDWRRFPRGKQVGSYLGLIPAEESSGDKRRLGHISKQGSTLLRWLLVESAVHAQRHDPSWHRQYVRLSMTKHHGVAKVAIAHKLAVRWYWMLRSGDDYRKVMERGSHVGQSV

SEQ ID NO: 134722 - protein, 356 aa, unidentified
MPIPIKRYKGMKKIFIGIDFSKEKFDATVIKAEGVEERAERQHEVFDNKVSGFRRLLRWVKSVVDEPDTGLWLFCGENTGGYSRALCNYLYGSGYDMWLENALSIRRSSALQRTKSDKADAGIIAEYAMRNYDQMRLYKPLDKNLERLREMFLYRHNLVKLKASMTTRKGEKKLTQEKSDISRFMAMSSKHLISEFNKKIAECDMRIEKIISEDENLRKNFEIITSVPGVGTQNAVCLMVYTDNFNRFDYDSRKIACYYGVAPFGRQSGTSVNTPPHVSPFANKLIKALLTQAALASINFCPQMAIYYHRLVETGKKKPVAVNNVKNKLLHIITAMVRNGEKYNPDHDYYAALEAA

SEQ ID NO: 134723 - protein, 365 aa, unidentified
MSSVASPAGLVHLGMDTSKKTIVIATLWPGEEIPVTERIANEEAAVRRFFGRLGDPSVLRSCYEAGPGGYDLYRLLTSMGVACDVVAPSLIPKGGSDKVKTDKRDACRQARLHRAGELTPVRVPTQAEEAVRDLVRVRAALVDDRKRAQQRLTAVLMRHGSVWTGSYWTAAHRAWIDAQRFGEPALAAAIAHYRGTLATREAGLAAIEAGLAPWARRDPLAGPVARLGCYRGIAELGGLTLTAEIVDWRRFPAARAFMSYTGLVPSEYSSGERTRRGSITKAGSEPVRTTLIEAAWAHQHAPAIGATLRRRQAGADPGTLARSWKAQRRLNGRYRHLTSHGKARGEAITAVARELAGFVWAEMTA

SEQ ID NO: 134724 - protein, 393 aa, unidentified
MTATPTHSSQRRPTLYLAFELGWSEWKLAFASAPADAPRLRSIGARDTAALLQEIAKAQKRFGLADDAPVCCCYEAGRDGFWLHRWLTAQGLHNLVVDSASIEVNRRRRRAKSDRLDAAKLVSMLLRHHGGEKKVWSVVHVPDVADEDRRQLHRDLLELKAERTQHVNRIKGLLAGCGLAVTAVGADFPAVLAALRQWDDTPVPAQLQQRLWREWQRHQFVQRQIQDLENERARQIRTSPEEPLGQVRKLLNLRGVGANSAWLYVMEFFGWRQIRNRKQLASLAGLTPTPYDSGDGSREQGISKAGNRRLRAMAVEIAWSWLHYQPASALSQWFQQRWGKGNSRQRRIGIVALARKLLVALWRYLEADEVPAGALTLDWKVKMAGQKRAAALG

SEQ ID NO: 134725 - protein, 451 aa, unidentified
MEILYTNCAGLDVHKKTVKVCLLTQTSNGQPHKEFRTYFTTTEELLKLGDWLKEQACTHVAFEATGVYWKPVFNLLESSFELLVVNAQHIKAVPGRKTDVKDAEWIADLLQHGLLKASFIPSGPQRELRDLTRYRVRLTEEKAREVNRVQKTLEDMNLKLGDVVSDIMGKASRLILQAIVDGETDPGRLAALAVGRVHASQEQLEAALNGNVRDHHRFLLSEHLTQIRHLEQAIERVTAEITRRFTPPSPPEDGSASQKEQEAVPEMVPDSALQQKSPSSPQAALSWSEAVVLLCSIPGIGERAAIGILAEIGINMHQFPTAAHLASWAGVCPGNHESAGKRLSGKTRKGNPWLRCLLVQAAHSASHQKRSYLAEQYRRIAKRRGAKRAAIAVAHSILVIIYHLLSHQTTYQEKGETFFEEQERQGAEKRLVRQLSRLGYHVELQPVALAG

SEQ ID NO: 134726 - protein, 415 aa, unidentified
MALKIVYKICCGIDVHKTFVVACIASTNDNGVTYYENHRFSTYTSGLKSLLQWLLERNCKDVCMESTGKYWIPVYNILESVCSIVLAHPKYVKAIRGKKTDKKDAKWIADLFKHDLVAGSFMPPADIRQLRDLMRYRFKLTCFQSSEKNRLQNCLTVSNIQLGNVVSDTFGKSAQAILDKLLENPADTSFDLEPLVYKSLKKKIPQLRDAIDGFITPEQAGKLKIIKSHYENLESRKAELEELILALAAPYQQELAILQTAPGIRSDFTAIGIISEIGTNMEAFPSAKHLCSWAGLTPTNNESAGKKKSVRVSKAGCYIKPLLVQCANAVVTSKKHPEMRNRYLRLKKRRGHKKAIIAIARMLLTALYHMLKNGENYNAKLYQKSDLPPVNHEITVAQALIIAQKQGYKIKTTTA

SEQ ID NO: 134727 - protein, 326 aa, unidentified
MEHELHYIGIDTAKEKLDVDVLRPDGRHRTKKFANTTKGHDELVSWLKGHKIDHAHICIEATGTYMKPVAECLYDAGYIVSVINPALGKAFAQSEGLRNKTDTVDARMLAEFCRQKRPAAWEAPHPLERALRALVVRHQALTDMHTQELNRTETAREVQRPSIDAHLLWLEAELKRLEKHIKDLTDDDPDMKHRRKLLESIPGIGEKTSAVLLAYIGLKDRFAHARQFAAFAGLTPRRYESGSSVKGASRMSKAGHVSLRRALYMPAMVATSKTEWGRAFRDRLAANGKKGKVILGAMMRKLAQVAYGVLKSGVPFDASRHNPVAA

SEQ ID NO: 134728 - protein, 320 aa, unidentified
MVQVNDLSRSLTVFDPISTLVVVVEMSKASWLVSGIIPGVERQPLKKLEPDATALLRAIERWRSEAVRAGRPIRRIALAYEAGRDGFWLARWLIARGIEAHVIHSASVAVSRERKRAKTDRLDAAMLMRVFLGWLRGERGHCGMVAIPTMEEEDARRPSRERESLVNERSRIINRMKSALARLGIRGFKPHLRRAPERLACLRTAEGTGLPTNIIEELRRDMVRLALVREQITSIEKTRAERLERAPDTGPHAMVRLLSRVIGIGIETADMLVREILSRKLRDRRAVARYAGLTGSPDESGLKSREKGWPRPATRGYDVG

SEQ ID NO: 134729 - protein, 410 aa, unidentified
MDVVYSRCAGLDIHKKTVVACVIVPGPKGKPHKTIRTFGTMTNELLALGDWLATEEVTHVAMESTGVYWQPIWNLLEERFVLVLVNAHHIKQVPGRKTDVGDCEWIADLLRHGLLKGSFVPDRPQRELRELTRYRTALLQERAAEVNRLQKTLEGGNIKLASVASDVLGKSGRQILEALVIGGAQAVELAQLAKGRMREKIPQLERALAGTFRPHQQFLVARHLAFIDAIDETVAQVGAEIADRLRPVEADVQLLDAITGIGRRTAEVWVAEVGTDMERFPTHGHLASWAGMCPGNNESAGKRKSGKTRKGNANLRTALVEAAQAAARKKDSYLSAQYRRLAARRGKKKAIIALGHSLLIIAYHVLKRRVDFQDLGPTYFDERDRTNVERRLVRRLERLGYKVVLESTAA

SEQ ID NO: 134730 - protein, 355 aa, unidentified
MTMLAEVVEAVIGIDTHRDSHEVEIADVTGKPVTTMRIGNDSAGFAQLLAAIAEVAPGPRVAVSIEGSRSYGIGLARALTAAGLLVIECEQPSRKQRRGKGKSDPIDAHLAVLAALRLDAGQLPVPRADGDREALRILLVARQEISEARTAQIGRLRALLLAGDDTDRQAARKALTHQALAALAGRELSAGARREQVVRHTEIRRLALALGQARQQLKDNRAQLLTIVDDIAPGLTSRYGIGPVSAAQAIVSFSHPGRCRSEAAFAALAGTSPVPASSGRTIRHRLNRGGDRALNRAIHAIAVTRMRSCPRTRAYIARRTAEGKTAREIRRCLKRYIARELYRQLTRSMNPPVSP

SEQ ID NO: 134731 - protein, 416 aa, unidentified
MLYVGIDWAVESHTVTLLTRPGEVLKSLVIANTLKGFLMLLDAIRRNIGKDKPAPSPKDVLFIIEDRNQRLVDFLLAQDFTGYLMQPSRMPGYRLRYRSSGNKTDPDDAFIMADVLCRDRDQVPTINPMNATVQTLKTLLMDREGFVRDQTRLINRLTACLRQYYPEALELFSNVAGKTALAFVAAYPDFAAAHRLSREQVQQFLTGHHCPRTKRLERIVELLAQEPIAVPAAVIETKRRLALHIIQQLQAVQATVAEYDAEIQRIGAENEEVQRFKGLPGAGPQIAGGLYTLMGDDRTRMRFRSALAVQSFVGTAPRTIQSGKMRAVCFRFGCNGFHRSQAQQMALGALRVSAWAKQYYRGKRAEGKRHQHALRCLANLLMKIAFAIWRDETAYDENRYLAQIMRHQLRQKSSTV

SEQ ID NO: 134732 - protein, 506 aa, unidentified
MHQTKSLSLSDFIRNPDSVVEDFVELPEDDDIEYVKEYGIGIDCHLRFIEVCVRYRNGSIIQKAQSTFSTDWPSLVTGRDWCINILKTKANPVPDLSQPLHYLLESTANYHMPVCMAWGGNPTIINPTIAGATKRKTDVLDSRLLALHDQINIWRECYIPSEDIKALRVMISQRDRCLHDATAAGNRIHNIITRFGLTVARSGSVVRDSAIRALVENQISDHPSVIEGICPIPIPMEVRSVLRDEYAKYDRFTAQAEECKTKIFEKARSMEWETDTGTLPGDEMIRILSTAPQVGELTAVIWLARIITPRRFRNAKALSAYCGLDPSLKISAGKVTSTVMRGGNKPLHKALNMSAHRLIHQHNEMFGIWGYNLQQQTGKKKKAANAVARKLSVAMYYMMKTGTEFTYDNYHSIRNIDVFNIPVEDLVLINSDFKRYIRILKEHQINTTVDLATAYISCSLGSLNGLGKKFFSILKDFLDHHVTYKEMYYEIQENLKHKEDTSNEPA

SEQ ID NO: 134733 - protein, 363 aa, unidentified
MQNSITWVGMDVHAENIVLAAVRGSSEAIVFRAEFPNTPKGRERLAGRLAENVPVRCVYEAGPCGYELRRFLEEKSIDCQVAAPALIPRKPGDRVKTDRKDAEKLARLHRLGELAAVFVPTPAQEALRDLLRTREDAREDLLRRRHRLSKLLLRQGRRYTEGVRWTTRHWDWIRAQTFTDHNTETVFREYIVAIEQEVERIRRIEQQIVEESRSPKVGKAIARLRALRGVDTITAMTIITEVIDLNRFRTPRELMAFIGVVPRERSSGGRERRGSITKTGNAHIRRVLIESAWHYQRLPAGTPKTILVRREGQPPEVIETARKAELRLHRKFMKLLGRGKPKGIAAVAVARELAGFIWALGRE

SEQ ID NO: 134734 - protein, 314 aa, unidentified
MEKITVGIDVSKDRLDVAVRPSGECFAVPRTGAGLDDLVARLKVLKPNLIVLEATGGLETVVAATLAGAGLPVAVANPGQIRAFAKAIGQRAKTDPIDAAVIAHFGEATGIVARPLPDQATQQLADLVARRRQIIDMIGAERQRESRANPRIKKSIGRLLKSLERELSSVDRDIDDAVRGSPAWREKEDLLSSVPSVGPAISRTLIAELPELGSLNRKQIAALVGLAPFTRQSGQWRGKSFIGGGRTSVRKALFMGAMVAARYNPVLKAFYERLVAAGKPKKVALIAVARKLLTILNAIVRDSTPWKGTVGAVS

SEQ ID NO: 134735 - protein, 321 aa, unidentified
MLIGIDVAKAELVVAARPTGERWAVANDERGIRTLVERLRAAAPRVELIVLEATGGYELLCVGALAAAGLPVVVANPRQVRDFAKATGQSAKTDRIDADVLALFAERVRPAVRALPDADAQELDALLGRRRQLLEMLQAERNRLGQVFGRGKPLVKKSLRAHIAFLERELRIADTDLGAMVKQSPAWRERDDLLRSVPGVGPVLSLTLLAELPELGRLTRREIAKLVGVAPLSRDSGTMRGRRFVQGGRAGVRAVLYMAALVATKRNVVIRALYQRLLAAGKPKKLALVACMRKLLTTLNTMARTHQRWSLDYATAARHTA

SEQ ID NO: 134736 - protein, 350 aa, unidentified
MMIIGCDLHTRYQQIAMLDTETGELVERRLEHESGEARAFYAALSGAVRVGIEATGHTHWFEAMLAELGHELWMGDAAKIRASVVRKQKTDARDAEHLLNLLREGRFPQIWRPSPAERDLRQLVWHRQKLVWMRGAVKNQLHALAMGEGVCRKKKLFTAKGRKELESLALGPWASYRRRELLRMFDELAAATAQLDVAVEQAAKNQPLAVRLMTHPGVGPVTSLAFVLILGPVERFERSKQVVSYLGLNPQEHSSGGKQRLGSISKQGNPMMRSLLVEAGHTAARFDPALKRMYQRLKFRRGASVAKVAVARKLAVRMYWMLRSTADYAQLVRMQGSPWATLVEDSPSLG

SEQ ID NO: 134737 - protein, 339 aa, unidentified
MRLHCAVDLHGDNGFYGIVDDNGKRLFKQRIPNSLPAVLTALEPYRKRLKNGVIVESTYNWYWLVDGLQANGYAVRLANPAAMQQYNGLKNSDDESDTFFLAELSRLDILPEGYIYPKEERPVRDLVRRRQLLVHQRTAHILSFQNLIARERGEEIASNVIQGLSADDMETYLPDPRLQLMGRTNIETIKFFTKQIRALERAVLAEAKLKPAFEKLLTVPGIGNILALTIMLETGDIARFEKVGNYSSYSRCVKSLRTSNDKKKGENNRKNGNRYLNWAYIEASNYMRRYCPEAKAWYQRKTRRSKTVVATKALASKICKACYFIMRDQVDFDVKLLFG

SEQ ID NO: 134738 - protein, 400 aa, unidentified
MSGLKRPFQVFVGIDVSKDKFDACGIREDGTKLFQFSATMDRKGAEKLRSHLSSIPIASVLIGMESTASYHVNLFSYLASEGYAVVVINPLLISNYVKMQLRKTKTDKKDAWVIARFLLANRDSMTQRAASPLISDLRELARQRESLVEQMTSLKNDIKRILNITFPELEHMAGIFTKSILKLLQRYPSAYAIQEADLDQLTQMLIEDSYGHKRGEFAEALLKAARSSIGTHSPMKDVILKQKISLHLHLEEALQEITEMLLQTSRGMMGDDMDILNSIKGIGEKTAASFLIEMGGDIQQFDQPGKIIAMAGIDPAVRQSGKYEGSSRITKRGNRHLRRIIWLMTTQVIHYCDVFRAYYLKRRKEGLPYKKAVLATAHKLIRVIYAMLTQRTVFRQEVNS

SEQ ID NO: 134739 - protein, 362 aa, unidentified
MLYLGCDVHKNYTTMSFITEDGKVADTSSFYNDVKELKSLLGKFPKEEFSAVLEAGLNWGVIYDMLDSLPEVKNVSLAHPPKVKAIASAKIKTDKIDSKILGQLLRTDLIPEVWIPCKETRILKDIVRSRAFIVKIKTMIKNRIHDILRKSHINPPDVKDIFGKYGRMWLEKIELSDKRADKLLRYHLQLKGVFEDMEIELKKWINKEMKTNEDLKLVKTIPGIREVFGPIIVLEIDDINRFPDPAHLHSYSGLVPSTHISGNTSYHGRLIRGNRWLRWAFIEGAHTSVRVSPYFREYYDMIKRKAGSQAASIASARKLATIVYKVLKEKRPYIEEYRIKQNKGRSPSVRPSGVVYSRSFQE

SEQ ID NO: 134740 - protein, 391 aa, unidentified
MVCVGIDVAKDKHDCCILDSDGMVRADCFTIPNNMDGFKQLLQTIRNCTKKSDKIKVGLEATGHYSYNILGFLLDNGLPTYVINPLHTNLYRKSLSLRKTKTDRVDARTIATMLLSDVDLKSYTDIAYHNEELKSLTRYRFDKVQERAKLKQSVSRLATILFPELEGLVSSIHGTSIYALLSEYPGTKQISEVHLTKLTNLLATASKGRYGKDKAIQIRDAARTSIGSVMPAKFLELKHTIKLIQELASEIDEIEDSIQKIIDELNPPILSIPGMGVNSAAVILAEIGDFSNFSSPDKILAYAGCSPSTYQSGKLTNCYAHMEKRGSRYLRYALYNATKYVCYWNPVFAEYLAKKRAEGKHYNVALSHAMKKLVRLIYALQKSGKTYLTAA

SEQ ID NO: 134741 - protein, 332 aa, unidentified
MYLGIDVHKRYAQVAVMDEAGEIVEEVRVENANLDDLAQRYAGAQAVLEATSNYYHIHDTLSEHLDVTVAHPKKINQIADTDKKTDRVDAKELARMLRLNSVPESYVPSEKVREARALVRGRQTLVENRTKYANKVHGLLSDHGITEDVKPLSVEGREFLRELSIPTPWDGLLDSYLELIESLTEEIQKLEETIEERAGSLKETQLLMSIPGVSYFTALTIYAEVGDIRRFNRDKEVVSYVGLNPVIRESGDSRIEGSISKRGSGRVRWLLVQAANTAVHTCNDEYLSRFYRRLASRKNSQKAIVATARKMLVSIYHMLDRGEVYDPPGVSA

SEQ ID NO: 134742 - protein, 373 aa, unidentified
MFTERTSVGLDVHARSVTAAALDTVTGQVWQRRLDPDAGSILAWLRDLPGPVAVAYEAGPTGFGVARALAETGVRCVVAAPSKLQRPSGDRVKTDTRDAQHLVKLLRLDELVAVTVPSVAQEAARDLVRAREDCRGDLMRARHRLSKLLLRHGYVYDTGQRGQAWSIAHDRWLRQVPREADWSPGTAATFEAYYETVIGVTARRDRLDTQITAMAADSEFTDTVRRLGCLRGVSTLTGFGLAVEIGDWSRFSGKTIGAFVGLTPSEHSSGQSRSLGSITKTGNAHARRLLVEAAWHHRPAYRPGKTMQDRWQLAPAAARARGDAGNRRLHKQWTKFIAGKKRGTIATIAVARELAGWCWSLAVLNDEQELSMS

SEQ ID NO: 134743 - protein, 343 aa, unidentified
MTYYAALDVSLRSVAICIVDRDGTVKFERTVPSNVPDISTCLRSFDHEIDVVGFEAGTLTQHLTYGLQAEGFEVVCMEARQVSAALSAMRNKTDKNDARGIAQILRTGWYSRVHVKSLASHHIRALLSSRKAVLKKCIDLENEIRGLFKVFGIKLPGKLGHGPFDAKVRPPIESDPALAQALLPMLDARLTLYRTYLELDRRVKLAAQDDAVCRRLMTAPGVGPVTAMSFKAAIDDPARFRRSRTVGAHFGLTPRRYQSGEQDNPGRISKAGDADVRSTLYAAANAMLNRTIRWSSLKAWGMRLVRTRGRRRALVAVARKLAVILHRMWSDGTDFRWEKEAAA

SEQ ID NO: 134744 - protein, 361 aa, unidentified
MKVKAIGLDLAKNVFQVHGVDERERKLFNRQIKHAQLMEFFVKLPPCIVAMEACSSAHYWARKLSALGHTVRLIAPQHVKPYVKTNKNDAADAEAICEAVLRPNMKFVAAKSPEQQAIGALQAIRDGVMKARNATANRLRGLLMEFGVRIPKGVLQVRKHVPDVVEDASNELPAVLRVALFEEYEQFKALDARIAQVYKQIEQWHRTSAASQALEKVPGIGVLTATAMVAHAGDPDSFANGRQVSAWLGIVPRQNSSGGKTQLLGISKNGDSRLRTLLIHGARSVVTALKRKLAAGTDPRKLTSTEQWLVELLKRRNTNVVCVALANKNARTAWAILKHGRPYESGHVSLSPRARAALAAG

SEQ ID NO: 134745 - protein, 348 aa, unidentified
MKYFIGLDAHSTTSTFAVVNQSGECVLRKEVDTTEKNLTWVLDQVNGERELTFEESTISQWLYIILKQKVDRLLVCNPTYVAKKQGPKTDFRDALHLAQELRTNHLKEVHHEDSHWIELRSLVSGYQDTVQSIVRSKNRLKAIFRGMGLSTCESKFYKNKDRVKELKNDSLKFVAEKLFAQIEYLEEEKLKYKDQFKKNKQLYRPLRNLITIPGIDLVRANIIAALITTPHRFKNKHKFWGYCMLVRHIQKSGGRIYGNKRIHGRRELRDVFIGAAESALRSKTSIRDYYDALRARGVTHKNAKVATARKIAALSLSILKNNEVFYDDWEEHQRKRVETRKLLNQHSL

SEQ ID NO: 134746 - protein, 346 aa, unidentified
MLHVGLDLSRKRIDVCLVSDQGELIDRLEATPDRDGLHGLARRVAVYGEPVRGVVESMNGARFVHDELVAHGWEVLVADAQKVKGLAPLACKTDKIDSRVLAELSFRDLVPAIWLPTVELRREREISRWRLHLVKHRSTLKNRVHSTLITFGHQRHMSDLFGVSGRRLLGELEIPEPWRSHVDASLVLIDDLEARITQIAKDLRRSGADHRYIPILMSAPGFGWITSFTVACEIGEISRFSSPVKLTGYTGLCPRVKQSGQMDQRGPLSKHGPKYLRWGLMEAAIAASSHPLYRERYQRTKRRLGRQRGPKVAQIDLARQLTEAIWYMLTRNQPFAPAGAIFRLAA

SEQ ID NO: 134747 - protein, 382 aa, unidentified
MKNIYSSVACGGMDVHYKFSAVTFRDEAGRVVRRERLEHPQRCQLREHLNRWPKGLPIVLEASFGWGWLSDLLSEAGLEPHLSNCYKLEQMRKARGWVKTNKKDADMLSLLPFETTGWWEVWRAPPQVRNRREQMRFRGDLVGLQTMVKSRIHAIFHRHGIFHEFSDLFGGQGRKFLAELCLHNPTNLSSQGLLALRGQVKLLDHLRRQLADVARILHKQLAKTPLTMWLKTIPGIGLILAHVLAAEIGRIERFRNHKALASYSLLAPRADDTGQDDPGHSPLGRHLGTRGNKTLKWAFIEAAHGAVRSGGKWRVVFDRVTSGGKKDRNRGYIKVARELVKVVYVVWKKDVAYRDVPPQRPGANRKKSRSGTGQLLHPMVHA

SEQ ID NO: 134748 - protein, 410 aa, unidentified
MGYETLIRRAHVMTRKNTLKSLPTDTEFRVVGLDLAKSDVSVAAIPVDDNTPSLVDRMTYADLLDWAGKISPTLFAMEPCNGYSLLCLQLENLGHEIKVISGSTVSMWINTHLSGQKTDLNDAIALARLAVSDAELTPIRHKSITEIRIQTVQAVRQQLMSQRSKSIVSFKALAQQWGIPCAAGHRNLKKLRESIEAKVDLITRPVANAMLFLLDAVKSLDRQIGQLNQTLQELVMSDERGRLLQSVLGVGTQISARVITVVGNVERFNSPRSLVAYVGVAPRNFITGHKNLTKKKHGNCPDLSHKGQGKISRRGDKLLRSLFIQGAACLYMQFCKDQLPECQLKRWILKQLAMQKPYGKLMVSLAAKLIRIVWAVLTYREKFNIQKAGMTRSMWSEMALETPLNKEVPA

SEQ ID NO: 134749 - protein, 350 aa, unidentified
MLIIGCDFHSRFQQIAMLDPQTGEMIERRLEHENGEARKFYAGLATLARVGMEATGYAQWFERMLAEQGHQLWVGDAAEIRAAMVRKQKTDSRDACHILDLLLRDKFPRIWIPSTEERDVRQLLRHRYKLVCMRTSFKNQLHAMAMGQGICRKKKLWTAVGRKELEGLSLGPWASRRRQQLLEMLDQFEPVIDELDRAVIQEAEKRPAAVRLMTQPGVGPVTALTFVLTIGPVSRFQRSKQVVSYLGLNPTEESSGGRQRLGSISKQGNSMLRFLLVEAAQTASIYDPELRRDYQRLKFRRGSGVAKVAIARKLAVRLYGKLREAAQPVPPAPMQGSPAVSVVGESLSCF

SEQ ID NO: 134750 - protein, 318 aa, unidentified
MPESIVIGIDIAKQTFDAALGVSGSIKTFANDDAGFDTLLANLAGQAVDLIVMEATGGLESNLACALQAAGFAVAVINPRQARDFAKAMGYLAKTDRIDAKALAELAQVLACSPERDRFVTVLPTPEQQALQALVARRRQLVAMQVAERQRLSVSHAAARKSIEGMIMAIRTQLDEVETELAKHIETHHADLALRLSSVRGIGPTTVATLIAEVPELGQLSRREISALIGLAPFNRDSGQMRGKRVIFGGRGQVRRGLYMAALAAIRFNAVIKQFYDRLVAAGKPKKVAIVACMRKLLTILNAMVRTGKAWDDSLHTA

SEQ ID NO: 134751 - protein, 427 aa, unidentified
MKKIKIDYLSTLFVGIDIGSRTNVISALNFDQDFLIKMVPVANAQGGAEQMEEMVAEVLSQHHEFKTVFIGLESTGFYGVHIANYLSTSEKLAPFSTKVYCLNPNEVKQYKKSFNSLDKNDGIDSFVIADFARVGRIHTEPWRGAQYLALQRLTRHRLHITECIAREKTYMLNNIFLKFSEFAMLNKDEHPFSDKYGATAEAVLTDYLSTEDIVDASVDDLVAFISSKSRGRISDPEQTTYLLQKAAQDSYRLDKCLYEPLTVSIGWSFNCISAFEKELKAINDAIQRSVKGLNPTEYQILTSVPGIGPVYASGILAELGTIRCFKSNDALAKYCGIVWKENQSGEFQAEDTPMNKAGNRYLRYYMIEAAGSVVQHCPEYKAFYDKKFAEVRTHQHKRALALTSRKLIRMLFGLLANSKLYSVEKSR

SEQ ID NO: 134752 - protein, 347 aa, unidentified
MRFYTNQHPFYCGIDLHARTMYVCIVKHDGEIMLHRNMKAAPDLFLKAIAPYREGLVVAVECIFTWYWLADLCAQEGISFVLGHALYMKAIHGGKAKNDKIDSHKIAVLLRGGMLPQAYVYPAQMRATRDLLRRRTHLMRKRAELLAHVQNTNSQYNLPEIGKKIAYKANREGVAERFADPAVQKSIEVDLALSTYYDQLLGDVELAIVKAAKHHDANTLYLLQTVPGIGKILSLVLLYEIHDIDRFPTVQDFVSYCRLVKCAKESAGKRLGTSGKKIGNAHLKWAFSEAAALFLRNNPVGQKYLARLEKKHDKGKALTILAHKLARAVYYMLKRQTAFDMDQFLHS

SEQ ID NO: 134753 - protein, 409 aa, unidentified
MKVAGIDVHKKVLMVVVVDASMPEERPARRRFVTMPSELHRLLTWLREQGVEEAVMESTAQYWRSVWLELEPHMRLHLAQAFSNRAPRGRKHDFKDAERLVRRLMANELILSFVPSGEQRIWRSMTRMKLQLTRDRVRLQNQIECLLEEMRIKLSIVVSNLLGASGLRILHALANGETDPKKLAQLGGERLQCTEEQLVDALTGRAQPVHGEMLALQLQRLQLIDQQMARLNSRIAAAMKPHQDAVIRLAEVPGLGVDSAQQIIAEVGAQASTFPSAAELTSWVGTCPGKEESAEQNHSSRSAKGNKYLRRVLNQAAHAAVAKKGSHFQAVFRRLLPRLGYQSAIWAVAHRLCRLVWKILHEGVRFIEQGHEVGPREKKKRAQMLARALRKLGYEVTITPINQLAAKPI

SEQ ID NO: 134754 - protein, 336 aa, unidentified
MTIIRIGLDTSKHVFQLHGVDENEQPVLRRKLRRSEVEKFFAKLAPTRIGIEACGASHHWARVLRRLGHEVVLLPPQYVKPYVQRGKNDAIDAEAICEAMSRPTMRFVPVKSAEQQAALTMLGVRDLLVKQRTMLINAIRGHAAEFGVTVAKGPKQVIELLKRLAIEEGVPALAREMVSMLASQLDGLDIKRKAIEARLMAWHRQDQTSQLLATIPGIGPIGGVSFALKVPDPKAFRSSRHFASWIGITPREASTAGRQRLGRISREGDEDLRRLLVIGATAVIRAAKPGRVSPWLMGLLAKKSKKLAAVALANKTARIIWAMMISGETYRLPTEA

SEQ ID NO: 134755 - protein, 360 aa, unidentified
MHATTVAVDLAKSVFQIAVANEHWHVVETQRLTRSQFERWFLNREVGLVVMEACGSAHHWARWLNGLGIEVRLLPAQYVRAYVRRDKTDAADAAALLEAVRAADLRPVRVKSVEQQALQGLHRIRSLWMGTRTSRINALRGFCREFGLAIPQGARTGLEVLGRVLADPSSAVPGLIRDSAKLLLEEVRLLEARIAQVERELASAARHSPACTLLLSVPGIGLLTATAMVAATSGDVTHFQDARHFASWFGLTPREFSSGGTRHLGRISKKGDRYLRMLLTHGARSVLRAASAAVEKGKVLSGVRDWALQVQARSNHNKATCALANKLARICYATLRDHAAFDEKATLARKAQRQSFAMPV

SEQ ID NO: 134756 - protein, 309 aa, unidentified
MDAIVVGIDVSKDRLDVHVRPAGTVLGYSRDAAGIEGLVGELVRLAAQLVAVEATGGFETVVAASLAAAGLPVVVVNPAQVRAFARAIGQRAKTDPIDAQVIAHFAAATNPPVRPLPDTATQALADLVARRRQIIQMIVAEGQREKRASARAKKSIMRMLKTLRSELSELDAEIDETVRGSPLWCEKEDLLASVPGVGHTIARTMLAELPELGSLDRRQIAALAGLAPFTRQSGQWRGKSFIGGGRASVRTALFMGAMAAVRWNPTLRIFHHRLRSAGKPKMVAIIAVARKLLTILNAILRDKTPWQTA

SEQ ID NO: 134757 - protein, 413 aa, unidentified
METLVERCAGLDVHKDSVTACVRVPDSHAGRHAETRRFTTTTAGLGLLAEWLASFGVTRVGMESTGCYWKPIWQLLEGQVECWLLNAAHLHNVPGRKTDVADAAWIAQLVEHGLVRPSFVPPRPVRELRELTRYRKTQIQERSREVQRLDKVLQDAGIKLSSVATDIIGVSGRAMLEALVAGTHDPEVLAALAKGRLRTKLPALREALAGRFRTDHHGLLVAQILAHIDYLDEAIATLSARIQQLTAPYAEQVALLDTIPGIDQRAAEVILAEIGPDMAQFPTAAHLASWAGVCPGNNESAGKHRSGRTRKGSKWLGGCLSEVAKAASRTKGTYLNAQYHRLRGRRGPGKATMAVAHSVLVIAYHVLDQGVAYQELGDDYFQQRHSAEHHQRQLVRQLERLGHKVTLEPIEAA

SEQ ID NO: 134758 - protein, 318 aa, unidentified
MTTHACKIQSALGCDVSARTVTFFSSLTRKTITVANEASALRAALKPYAGLTDMLAVCEATGGYEDVLIKVLESLAIPTHRADAAKVKAFIRSFGTKAKTDPIDARFLAAYGLERDLDLPRWQADEPQQARMKLLVARRADLVAMRVQETNRLAAPRNKPIAREIRSHVGELNKRIAAIETEIEAIVASSRQLKARQAILRAIPGIGAVLSTMLITSMPELGQINRRKAASLAACALHPRDSGTRNGYRTITGGRRHIRPALFTAALAAIRGNNRFADIFKNLVKAGKPKRLAINAVMRHIIVVANARLRALNDPVSN

SEQ ID NO: 134759 - protein, 338 aa, unidentified
MLSIGLDYHTMRSSVAILDDSGRLIQQRLIRGRYRSVLEALEAIREPFRIVFEATNGYGMLTEHLRRIRHCRRVLVAHPGQLRLIFRSKRKNDRVDAAKLAKLLFLEEVPEVHVPDLDVRAWRQLIEHRSRLVQGRAAMKNRIRALLKTHGIVAPGSLWSKKGRKWLEELRLPTSFDDLQLENLLCVLDSQDDRIGRTERVLDEHGDRHPGVQLLRTVPGIGPRTGEALVAYIDDPKRFRKVKSIGCYFGLVPCQDESAGKAKFGHITKDGPATVRSMIVESTWHAVRLSPRVRAFYERVEKGDPNRKKIAVVATAHYLLRVSLSMLRTGEVWRKESA

SEQ ID NO: 134760 - protein, 469 aa, unidentified
MKRKITYKTVEIQKLELGRVLATLVGAVTVAIDVAKEAIVAGLADEVGKTHALVRFSHPRQTELFFAMVERIRELGRTVAVVLEPTGTYSTPFVHHMRARGFEVFRVDPKAAHDIAAVLDGVSSQHDAKSCTLIAYLHAQGLSKPWHEQTPQQRKARALVKEHALYSKPAQKLYGQLEAISAACWPELNAMLETRSQWYLHLLLAYPGANAVAAADPEEVRALLRRVSSGLLSSERVEEVLRTSKTTLGAPLDEAEQEYLRALTTELLRLRAGTAMVVKKLRAFVSSAGDEALARVAEVVGPACAVAIFSDLGNPTSYGSAAALEKGCGLNLREKSSGKHQGKLSITKRGSPRVRHLLYMAALRMLLESPAARAWYERRSAYRAGLRKKAVVALMRKIIRALFHVARGSAFDAGKLFDSRVLPPDSPAPHTDPPAAAPVKKSRAGKAMSPTSARSRRSRPVEQNTSSAP

SEQ ID NO: 134761 - protein, 441 aa, unidentified
MSELSKSTPAEPEWVAFAAIDWANQKHFWRLLPAGSQRYEEGELDNTPEAIEVWAANLQRRFGGRPIAVCLEQSRGPLVYTLTKYPHLVLFPVHPTTAAHYRETFSPSGAKSDPHDAASLLDLLVRHRESLRPLQPDTQETRLLHFLVEERRQLVDEKTRHSNRLTAALKLYFPQILHWFDDLNSSLVADLLQRWPTLEELQHAHRGTLRKFFHAHNCRSEERIQERIEGIYQATPATKDASVVEAAAMSARAAMALMATLRSNIAVFELRIAELVAAHPDRKVFASLPGAGEVLVPRLIAAFGTHRDRYQNAYEMQCYSGIAPVTEASGNSEWVHFRYACPKFLRQTFHEFAEISMRYSIWAKAYYDHMRNDQNAEHHVAVRSLAFKWIRIIYRCWKDGKPYDEEAYMETLRRRGSPLVGALALATSTEWKTIAGFQKLS

SEQ ID NO: 134762 - protein, 408 aa, unidentified
MDAIVACCAGLDVPQASVVACLNRGGKRGAGKEIRSFGNTRSELAEMVAWLRDEGCTLVAMESTGIYWHPVYFALEGQFELIVGNAQHIKNVPGRKTDVKDCAWISDLARHGLIAKSFVPPQPIRELRDLTRYRRKLVQVQAGERNRLIKLLESATIKLSGLIADVFGVSGRAMLRALIEGEETPEAMAQHARGRMRRKIKDLARALDGRLEEHHRFLMRLQFARIEAAEHDREQLDARLSEKLEPYAEPLRRLMRIPGVDWITAATIIAEIGTDMSAFAGAAQLASWTGICPGNHQSGGKQRRGKIRKGNVHLKAALVTGAIAVAKTRGSYLAEKGRRLRARRGEMRAHVAIAHKILIAAYHVLSGNEYQDLGADYLDHLNKKRTVNQMTRRLEALGFNVQITPKAA

SEQ ID NO: 134763 - protein, 341 aa, unidentified
MQITTIGLDIAKNVFQVHGIDAAERVVVRKQFRRGQVMKFFAALPPCLVGMEACATSHYWARELTKLGHEVRLMPAKDVKAYVKRNKNDAADAEAICEAVRRPTMRFVQAKSAEQQGRLMQHRARDLLLRQRTQVINALRAHLDELGIVAAQGHEGLKQLLTIIADERDERLPIDARASLIVLAAQLQALHTMIGSIEKRLTVQHRANEASKRLQSIHGIGIIGASAIAATVTDPKAFRSDRDFAAWIGLVPREDSTGGKRKLGPISKQGDRYLRRILVVGAHSVLRRAKQNPEKYPWLTQLLARRPFKVVAVALANKMARIAWALLASGGHYRPRLGTAA

SEQ ID NO: 134764 - protein, 412 aa, unidentified
MYSRVNISCGLDVHKSSISATILKSDGSYENHQFSTKIDDLLALKRWIVASCCDRVLMEATGVYWIPVYSVIEPYVEVHVVNPLFIKYVPGRKTDTLDSAWIAEIALNGMFKTSYIPPKKIRELRELTRTYRKLIEERTTHKNRIHKILVRNGIRISDVLTDIFGKSGLIIVNGLIEGKPIDQTLKLIHNSRILKKNDEIKSAICGEISENDIFVIRLSLDCIRDHDSQIAQYEDRILKNMSPDKGNIEILVSIPGIGFTIGSSLLAEIGDISQFQSPKNLVSWAGLAPAVYESAGKTAHGHITKRGSKYLRSMLVEAAQSIARGKPNRLKHFFSRIQTRKGYKKAIVALARKLLSIIHHLLSNQEKFVDSTGKEKKIELPDICPDPEIDTDTMIHFLTQAGYIVHKLDHDC

SEQ ID NO: 134765 - protein, 370 aa, unidentified
MSTLARPAGPVHVGMDTSKNTIMAAVLHPGEESPVTERIVNDEPSVRRLLDRVAGAAGGRGYLRCCYEAGPGGYDLYRLLEAMGIACDVVAPSLIPKRAGDKVKTDKRDSVRLVRQHRAGELVPVRVPSRQEEAVRDLVRARAAVLDDRKTAQQRLTAVLMRHGRIWRGPSYWTKAHRDWIAAQAFAEPALAAAVASYRAALATRETELAAIEARLLPWAGRDPLAGTVARLACYRGIAQLTALTLAAEITDWRRFPCARAFMGFTGLCPAEYSSGDKTRRGHITKAGPEAVRTALTEAAWAYRHAPAIGAGLRRRQAGADPGTLARSWKAQRRLHDRYLHLVTHGKTPPEAVTAIARELAGFTWAEMTS

SEQ ID NO: 134766 - protein, 403 aa, unidentified
MKHVIAFDVSMGKSYMVIYNAQKQCVFESEIKHSKPDFKKLQEKIHKLTDETGESPKIVFEATGIYSRQLERFMQNNQYTYCLLNPLEAKIQCDSLRIHKTDRSDAHRLALTHFTVTRRVSTATDNLFYQLKSLSRLYSELDDELSIIRGRMHKVIQLTFPELERIFTSKSDLFLNFVQLFPHPDCVLGLSKTIIKNRIRANTNKKISNITAEKKAIQILEIAKICYPAVSQNDVLCDQLKLYARRYQELLHQKESCISKMVYVAKQRAEYDIIRSLPGIGPNTAVRLMAEIGDITRFNNNKQLNAFAGIDIRRFQSGKTFFKDKINKRGNKHLRKLLFLIIQNMIKQRRYGQNHIVEYYDKLKTQPYNKCHKVASIACVNKLLKLLFYLITHNIHYDYRLTA

SEQ ID NO: 134767 - protein, 386 aa, unidentified
MTVQTPHLSFNPRQFDIFAGLDVDKRRMTTTFCNHQGTLFQSQSFPYSSQQLLNYVRKHFPEQRVAFVYEAGPTGFGLYDDLVANHHTCLVVAPSMVPTAPGQRVKTNRLDSKKLSIGLRGGQLSSIHVPNQAYRELRHLVQLRDTQVGQLRATKCRIKSLLLYEGIPFPDDNGRWSGSVLRELEALPCNPTVRFKLDQLIDALGFHFQSAAKVQKQMRQFCNQDPELRQCISLLMSLPGIGAITATHALARLGDWREIKNVRQIAGFLGLVSSEHSTGDKQNRGSITRSGDSRLRNKLIQCAWTAIRKDPELREFYRSVYQRQPKKIAPRKAIVAVARKLTTRMYAVLKQQRPYVIRENSSIAPLTIEETTGPRERLDAAQSGQP

SEQ ID NO: 134768 - protein, 413 aa, unidentified
MIVGIDVGSEKHYFRAFNWRGIELTRKPVAFSNSMEGFNSFYNTIVKLMQKRELEEALVGIEPTGHYWFDLGQFMGEKNIKFVMVNPHHVHKTKELDDNSPSKNDRKDPRVIAGLVRDGRYFYSYMPTGVYAELRNASNRRFVLVEEQTRAKNRLQKWIAVYFPEYKGIYTHIDAKGGLLVLKQAPTPEEIVRLGVEGIIKIWKDAKLRGNGHKKAMLILNAAMKSIGLKSGLTEARMEIQDLIEDYELQTKRLERVNDLIKELCQQVRYADKLLEIKGIGITTVAGFIAEVGDITRFDSTKELQKLAGLELVSDSSGKHNGKTKISKRGRKRLRYLLFEAAISVVGKNEEFKEIHSYYTTREKNPLKKMQSLIAVACKLIRVFHVILTKGISYDASKMLKDIRHQGEQLKAA

SEQ ID NO: 134769 - protein, 401 aa, unidentified
MWYAGLDWADSHHDVVVIDDGGRQVASRRVAHSAQGLAELSAFLRQIAPLDQIACIVETNQGLLISTLLEAGCTLYPVNPKTIDRRRNASGAKTDLIDAYLLAKTGRSDLRDLRKLTPDSAIIQELKALTRDQDSLVQSQTRLVNQLTACLKAYYPVALQLFSKLQQRSTLIFLQTYPTLEAARQASVEEITSVLKEVGHPKPSKVAPKIRETLHQPQLHAHAITTRTKSRLMLALAAQLLPLIEQIASYDKQITALFLTHADHEIFSSLPGAGKRLAPRLLAEWGDDRRRYTASTSVQALAGTAPVAFQSGNYAKAHKRYACLKPLRNVLHQLAWQSTKQEAWALTYSKRKRAEGKSHSMAVRSLANVWVRIIYAMWFEHKSYKTATFEAAQHHHAKRAA

SEQ ID NO: 134770 - protein, 465 aa, unidentified
MKNFNLYVGIDVSKGKADAAILQVSELRSVKPKFLRKKLSFKFVKSEVLSFLETIRKYSLDSNCIHTYFALEVTGIYSINVYNFIKENCLNNEEIHQLNTDFVSKWRESHNIPKSDPLDAQTICSIIGTDDNVKYVSDNVFENKKGYQDLKALIHRHFQIKKLHSQEINRLIAQCDCYFPELQYVFEPNSAAFLAILSSYPTTHNIINASKDEVFYVAYQATKHRCSMDKIDKLFEYCNDTLVPHVSDHIKLIIIDIVENIKSIRTQIKALEKEIKLLASTFSQYNLLLSLTGCGPITAATIIAETGNIDRFKNADHFVSYSGSSPRIKRSGTSVEIMGKISKKGSKYLRHALYMTAEFGRRHNPILKHLFERVKNGNKKRHKLAVIAVANRIARYCYSIMKNHSTFIITYESLMRLPEETRNTFFQTISLDFSNNTRKQVYHYSDCNGEVHPFVYIKDPTELVI

SEQ ID NO: 134771 - protein, 416 aa, unidentified
MRRVIGIDIHRTFGEVVFWQEGRLRPAGRIDMTRTALEGFGKSLLASDEVVIEATANSMGVSRVLAPFVARVIIANPLQVKAIAQAHVKTDKIDAGTLASLQAAGYLPQIWTPDAKTERKRRLVARRYQVVRHRTRLKNEVHSILHAHLIPKCPHADLFNGRGRAWLATQPLPDDERAAIDRHVRELDRLAEDLALLDREIAKDAIDDPAVKRLMTITGVNLTVAAGIVAAIGDISRFNSPQKLVSYFGLNPRVRQSGLGAAHHSRISKIGRGHARAMLVEAAWAAAKTPGPLHAFFVRIRARRGHQIAAVAVARKLTVLCWHLLTRGEDYLWARPALVANKIRAMQLQAGQPQQKGSRRGPAYAYNIKALRDREMLIAAQAERTYERFVAQWKPRRPKIRRAGASGRQDTSQAVR

SEQ ID NO: 134772 - protein, 409 aa, unidentified
MHYYLGVDWADQTHAVWVVDERGTKITARTVPHTAEGLSEWGRELDEWRAQGIELWAAIERPEGRVVDFLLDHGVVVYPVNPKALDRARDRFRQSGAKSDPFDARVLADFLRTDHASFRALQPSSEAAQELKLLTEDCQRQIRQQTRLVNQLTATLKAYYPRGLEVAELTTALAREFLQAYPTPAAVAGLTERQWQRWARAHRLSEARTQELWAVLQRPQLPVPAHVVRAKARLLQTLLTELEPVVAAVGAYRQAVEDFFAALPAAQWIRTLPIGEHGITAPTLWARLGDAPGRWESFQHLQAHAGAVPVTVKSGKQHVVHFRFACDKMLRYVVDQVAFLSLRSSEWARAYYDQQRARGHEHREALRALGAKWLKIIFILWDRQVPYDEQYHLATMARQQLRQRSKKIA

SEQ ID NO: 134773 - protein, 360 aa, unidentified
MQTQVTKKTFVDQEFFVGIDTHKKSWTVSILGEHYEHKTMSQNPDPEILARYLKKHFPGGKYHAVYEAGFSGFESCRELQQLGIDCIVGHAADIPSSQKEKLQKNDKADSRKLAKILRGKAIEAIHVPDRKLESDRALVRQRFKIVKDLSRIKNRVKSLLFQFGIQIPDRFTAAQTRHWSKVYINWLKELLIEHESLKQTLDNYIRLGEMQRKELLLINRQVRDLSQTNAYQKNFNLLISIPGIGLMVAMTLLVQIGDIRRFKSLDDLCNYLGLVPMMHSSGEKVVTGKMLKRGRKELKIMLIEASWVAIRKDPALMAKFNNLAKRMNKNKAIIRIAKSLLNRIRFVLTHQEKYELGTLN

SEQ ID NO: 134774 - protein, 358 aa, unidentified
MEHIGIDLGSKQSHICVWTDSGIAEEKRIQTSKLKLWLSERPASRVVIETCAEAFTISEWIQDSGHEPWVVPAAVVRQLGVGYRGVKNDVRDARVLSKSSVALGDELPRVHIPSRKSRERQRLLTQRDGLVRARTQLVNGVRSQLRSELLSCRAGTTKALPQRVRDLLTDGPQSLREILEPTLTAIEALTSSIENLEAQLKEQTKNEPQIRLLKTMPGVGLLTAVSFASAVDALQRFKSSAHLASYFGLTPGEHTTGGKQRLTPITKAGKGQVRTLLIQAAWCLVRVAPQSALAQWYDEARHRRPKQVAIVGVARKMVRVLYAMMRDQKPFNPKLGHARRPRLEARQEELRQVLGHTA

SEQ ID NO: 134775 - protein, 347 aa, unidentified
MRNITTVGIDLAKLVFQVHGIDARGRVTLRKQLKRSQVVTFFAQLAPCLIGMEACAGAHFWSGKLVEFGHTVKLIAPQFVKPYVKTNKNDAADAEAICEAVGRPNMRFVPIKNTEQQALMGLHRARQGFVGARTAQANQVRGLLAEFGLVMPAGIRCIERKLPEVLQDADNGLSDASRALFARLLEHFRVLDRQVEELEREIGAWHREDSASRRLQAIPGIGPITASALVASVGDAKVFHNGRQFAAWLGLVPRQRSSGGKTNLQGISKRGDTYLRTLLIHGARSVLLSLKRDPARADGWLAHVANRRNPNIAAVALANKNARTVWALLAHGREYQAGYPSANAMTA

SEQ ID NO: 134776 - protein, 398 aa, unidentified
MRFAGIDIGGERHAVAVVNEGGAVVVKSTFFGEDAAGYQRVRDLVGDPHDCVVAMEATGHYWRNLFAFLVGQGFKVALLNPLRTRRFAEEELERTKTDSVDALGIARFAAQKRPVPTPVADEVTAELRELVRLRTRYVDEHSDRMRQLHRAVDLGFPEFTCHVRMNTVLATAILARYPTARSYSGVSVRKLARLAYDGRHQVGEILARALIETAKISVGSHHSEAYGLQVKYTCSDMELLRNRVKQLDQEIEGKLQTHEVGKLLTTIDGIGSRTAACLIAELGDPSRFRDAAALASYVGVVPRLRQSGKRAFSGARGLPLGNARLRHRLWMPTLVAVRKNPWLRAHYDRLLAAGKRPKVAIVACMRKLLGAIYSVARNRRPFVPRLATAGHEQPMTAG

SEQ ID NO: 134777 - protein, 388 aa, unidentified
MSKPFDLSKSLTALDQDSTLIVVIEMSQSSWLVAARAAGLARDPLKKLPPDPEQLFKLIDRWREESRRAGRVVRRVCVAFEAGRDGFWLARLLRQHDIEAYVIHPTSIPVKRDHRRAKTDRLDTELLMRAFLGWLRGEADHCSMAAIPTLAEEDAKRPTRERESRVNARSRLVNRMKGALARLGIRGFNPKLRKAAEKLEELRTGAGEPLPPNTLAELRRDMAQLRFVADQIKQIEKAREARLEKAPREGAHPMVLMLASIKGVGLETAEMLVAEVLSRKLRDRRAVARYGGLTGSPDESGSRSREKGLARSGNARVRRGMIQLAWRFLMFQKESALAKWFEARTANGPRGVRKTMIVALARKLLIDLWRFVEDGTVLVGVELFDSRA

SEQ ID NO: 134778 - protein, 340 aa, unidentified
MNATTYGLDVAKRVFQMYWVDAQTGEIVNRRFGRDELIRFLAQRPAGRVALEACGSGHWWARKIKAVGHEVVLLHAKFIRPFVQTNKTDAADARAIWTAVQQPEMRTVAAKTEDQQAMLSLHRMRALLVKFRTMQVNQLRGLLYEFGATFRAGRVAGLAEIRARMVELEEALPGTLIGSLQDQLQRIEALEQDINRLEQQIGAWQKQEAACRAIAAVPGIGKLTATALAATMGDAKTVKSGREFASFLGLVPRQSGTGGKIRLGSISKRGDPYLRTLLIHGARSVLYHAKVPTPWQREIRARRPANVAAVALAHKMARTAWAILAYGREYQRDYASVKAA

SEQ ID NO: 134779 - protein, 400 aa, unidentified
MISIGIDISKEKSTVCMLRPYGEVVEPPYNVAHNESELNALIEHIQSFDEDVKVVLEATGGYHHIVVSKMLSAGIFTVVVNPYIMKKYCAATLRKAKTDKIDSVKIANYGIDHWFSMTAYCPPDEVYAELKLLGRQYEQYVRLKVGCKIHLAELLDGVLPGIKKILTGNVPAFSTKDKLCDFVEKYWHYDHIKKLSEEQFLASYEKWSKKKGYRYNESQAIAIYQLSKNNIPTLKSSTSSTKMLVLQAVKSVRDAELTLSLIISQMQEIASTLPEYSVVNEMKGVGAVLSVRLIAEIGDVRRFHNGSALVAFAGIDAPPYESGSFVGTNRHISKRGSASLRKIGYEIMHALKVTKPTDDSAVYDFMIKKENEGKPKRVAKIAGFNKFLRIYYARVMEVYC

SEQ ID NO: 134780 - protein, 359 aa, unidentified
MGEFQNKKGLVRGKEVYIGVDVHKESWYVTARVDEEEVSHGRMPSQYHALRRYLDQFQECKIKVAYEAGPCGFGLYDKLTEDGIETLVVPPSLIPIESGNRVKTDKRDSRKLSKLLENKILKRVHVFTEEERMHRELLRTRHQLVTHRSDVARQIKSKLLFHGISSPFAGNQGWTSKYVQWVRSLSPRSPSFEESLEVLIDLYEYLSKQLMRIKRKVAELSRADKYREKVKLLRTVPGVGLLTGMEVLVELQEVGRFRSSEEIASYMGLTPSEYSSGEHIRQGRITRSRNWRVRKALIESSWILIGKDPWMRMIYMRLKSRKGAKRVIIAIARKLIIILRSMLLRNMSYGGVRPVVQGA

SEQ ID NO: 134781 - protein, 461 aa, unidentified
MKNKPSPDRARQRLTKHLEQINLYAAGIDIGSESHYVAVPEGLDDEPVRCFSCNTGDLEKLADWLVQIGIQSVAMESTGIYWIPLFEILEERGLEVLLVNARHVKNVSGRKSDVLDCQWLQQLHTYGLLAGAFRPPEQVTALRAYMRQRGTLVRYAGSHIQHMQKALRQMNLLLDNVVTDITGKTGMTIIRTILKGERDPNKLAAYRDRRCKKSEQAIAQSLHGHYREEHLFALRQSVELYDTYHAKILACDEAIEQQLKRFDAQGDPQQLPAGKKKAANAPAFDVRGELYRMSGVDLTAIDGINDITALKVLAETGTDMSRWKSEKHFSSWLGLSPGNKISGGKILSSKTKPTTNRAAAALRMAAFTLSNSKSALGAYYRRMRSRQGAPKAITATAHKLARLIYSMLKHGTEYVDQGQDYYEQQYQDRVMKNLKHRAALMGFVLIPSSADNGAAVEKSTA

SEQ ID NO: 134782 - protein, 339 aa, unidentified
MVIVGCDFHPGWQQVAVFDSGTGEIRELQLRNSEGEAERFYGSLPSPALVGFEACGNTHWFEDMLDRLGHEVWIGDAAEIRASYVRKQKTDKRDARHILKMLIEGRFPKLWRPSLEARDLRQLLIHRDRLVGVRTRVKNGLHHLMLNKGVQLKRKLWSKTGQKILHELPLEGWAAQRRTDLLQLLRTLDPQIEELDVAVERAAYANERARLLMTQPGVGPITSLAFVITMGDVTRFPSGKQVSSYLGLIPSEHSSSKRRRLGAISKQGSPFLRMLLVESVQTVCRLDEGFRKQYNHRCHRMKKGIAKLAAARKLAVRLYWMLRTNTAYPEIAHIEGSPR

SEQ ID NO: 134783 - protein, 353 aa, unidentified
MKTYYVGMDVHRASIVIVVLNGAGKVVMQSVIETGAERVRGYLKQLRGQVNVKFEEGTQAHWLHEVVRPLVTEVVVCDPRHNKLIQSGNKSDRVDAQRLAELLRLGSLKAVYHGDNGMQCLKELVRSYDCLVSDTTRVMNRLKAIYRGRAIGCAGHDIYRADRREQWLAKLTERGTKQRASFLYQQLAALKPLRHEAKRMMVKEARRQRAYPWLMSVPQFGSVSVAQLLAIVSTPHRFRSKRQFWTYIGLAVVTRSTADHEVVNGVLRRRQRPVSTRGLNRNHNHVLKRVFKNAATGACHSGPFKAAYDLRVKQGMVPSLARLTVARQLAATTLALWKSGAQFNPERMTPPAA

SEQ ID NO: 134784 - protein, 443 aa, unidentified
MGTVSDRETIFARCAFLDVHKKTVEATVRLLQGQQVQAETRRWGTMTGQIQALAEWLETQGVTHVGMESTGVFWKPIYNILETRFTVVLTNPGHMKQVPGRKSDVRDSQWGAYLLQYGLLRGSFIPARWQRELRDFTRYRAQLEAERTRVANRLHKHLEDANIKLGSVATDILGMSGRAMIKALMEGEQDAAQLADMAQGKLRTKLPELQLALEGKVTPHHRLMLRLLWKELEAVEELMAEVDRQVQEVTRPYTPQIEQMDPVPGVDRRVAEVVLAEVGPNVDPFPSDQHLSSWAGMCPGNEESAGKRRTGRTTKGNRWLRAALVQAAWAASHTKRSYLGAQYRRLAGRRGKKRALVAVGHSILVILYHLLKDSRPYSDLGRDFFDRMNHDRLIRYYSRRLAELSQKVTVEPLPEVIPGEGMVNVHPLAKAKGMTAGGICNDP

SEQ ID NO: 134785 - protein, 349 aa, unidentified
MVIVGIDAHKRTHTAVAIDEVGRKLGEKVTTATTTQVNLDLLRWADGFGTERRFAVEDCRHLSRRLEADLLAGGEEPVRVPPKMMAHARDAARTYGKSDPIDALAVARAALREPNLPIARLDGPSRDLRLLVDHREDLVRDRVSHINRLRWHLHELDPSWDPSPRVLGRYKHLDAIAARLEGMDQMVARIARDLVGRIRELTVAANGFEREITQVVSALAPTLLLLPGVGALTAAKIVAETADVRRFRSKDAYARHNGTAPLPVWSGNRVRHRLSRTGNRQLNAAIHRIAITQMRIHDDAKIYLERRIGMGNTKTEALRALKRKLSDVVYRRLLADAEVTQVTSVDEAA

SEQ ID NO: 134786 - protein, 424 aa, unidentified
MDVIYERVAGLDVHKKSVVATVRVRVDGKPERECRTFETTTAGLLALLAWLTEARCSHVAMEATGVYWKPVWNILSDGAFELIVANAAHIKNVPGRKTDVNDATWIADLLACGLIRGSFVPNEKFQELRALQRTRKQLTREQTRHVQRLQKTLEEANIKLDSVISDIMGVSGRRMVEAIIAGVRTPRKLADLADRRIKATPKELYDALHGRVTDHHRFRLRLHLAQYDALAEAIAALDKEIDAAINRIDEERESAGHAPFRAASRDVSEVPGVNLLAANVILAEIGLDMRRFPTAGHIVSWSGLCTGQNESAGKRKSSRLRKGAPWLKTTLVQCAVSASNKKDSYFRAQFLRLKSRRGAPKAYCAVAASLLTAIYHMLRDGTKFRDLGKDHFDKRPTKAKVNRLLAQLAKLGYQADLRPLANAA

SEQ ID NO: 134787 - protein, 360 aa, unidentified
MRKQGNKLDFKGQNIYVGIDVHLKSWSVAILSQDALLKKFSQDPSPEALHKFLTENYPGANYYSVYESGFSGFWAHYALTELGINNIVVNPADVPTIQKEKLSKSDAVDCSKLARSLRSGELKGIYIHSKDNFELRSLTRLRKTITLDVAREKNRIKGLLYLNGINYPEQFGNSHTHWSRRFIGWLQSLCAESDHLSRAFGFHIDTLLYHRKSLLEHTRVMRRITRSDRFISQMELITSVPGIGANIGMTILTEIENISRFRDSESLASFIGLIPMCHSSGEKENIGDITIRKHATLRCYLVESAWRAIRFDPAMTMAYQNYRSRGLHPNKAIIKIARKLSNRIFYVLKHQQKYVPCIVQ

SEQ ID NO: 134788 - protein, 342 aa, unidentified
MNIHTIGIDLGKTSFHLVGLNEGGEVVVRKRFSRAQLLRFTANRKVHVMGMEACGGSHFLGRALQEQGHEVRLIPAQYVKPYVKTNKNDFIDAEAIAEAVGRPTMRFVPIKSDDQLDLQSLHRVRERWVSRRTAVINQIRGLLLERGITLRKGRRYVDAALPGILEDADAKLSGALRLLLAQLKLELDQLALRMEQADRVIQKTASENEACQRLVKIPGIGPVTATAVIAAIGNGAAFHKGREFAAWMGVVPREHSTGGRQKLLGISKRGNRYLRKLFVQGARAVLQQKTKQTPGLKAWLEKLTARTHRNVAAVALANKLARMAWAVLATGEAYRAPLPAGA

SEQ ID NO: 134789 - protein, 342 aa, unidentified
MSVIIGVDPHKATHTAVAIDRSEAELARARVRATRKQVPQLLRWAEPLGERTWAVESAGGLGYLLSQQLVAAGETVLDVPSTLAARIRVLGSGRSDKNDPNDALSVAVAALRTPALREVVPADHSEVLRLLAKRNIDIGNHRTRVVCRLHNLLMELAPGGIAKELNASDAVALLDLLAPATPAEAARRDQAVELLTDVQRLDEQLKASHRRIRTAVAASETTLTELFGVGPIIACYLIGFTGDISRFPNRDGYAAYNGTAPLERSSGGRVVHRVSQRGNRRLNHALHLAAICQIRQPSSEGRVYFERKLAEGKTKKDAVRSLKRHISNAVYRQLLIDAGAKK

SEQ ID NO: 134790 - protein, 347 aa, unidentified
MSNYVGLDVSLKEVSICVMDGDGCVLASGSTPTDPSAIMAFIDKHTPQVVRIVHESGQLSTWLTRELLARGAPVICIDARMAHKALSARLNKSDRVDAEGLAHLARTGWYRAVHIKDESSDQLRILIGARERLLRIRKDIEGHIRGILKTYGIRLAPVMAARQRANFRKQLRTVAKDHPALELIAASFIVAHEAACKECAVIEKELVRRARGNELATRLMTVPGVGPIVALSFIATVDDASRFAKSTQVGAYLGLTPRRYQSGEVDYSGRISKCGDSAMRALLVEAAATLISTVKRFSALKAWAVRLVARKGFKKASVATARKLAVIMHRIWLDSTTFVWQREGVSA

SEQ ID NO: 134791 - protein, 369 aa, unidentified
MKTVKFIGLDVHKKTITIAIADAGRQNKPRLYGAIANDLDAVDKFCRKMVSTASRLYFVYEAGPCGYGLYRHLTAKGFDCMVAAPSLIPKKSGDRVKTDRRDAAKLAQLHRAGELTAVYVPDPQDEAMRDLSRARHDAVSATQKAKQRLKAFLLRNRIVYSGRCAWSKAYFRWLADIAMAYPAQQVTLQEYIDAVHEGLQRVDRLTDQIRQLVPGWRLAPVVSALQAARGVSVVVAVTLLSELGDLSRFQRPSQLMAHLGLVPSEHSSGESTKRGGITKTGNRHARRVLVEAAWAYRMPARVSGLLLKRQQGVPEQVCRIAWNAQLRLCTRYRRLAARGKLKKKVVTAIARELSAFLWAMAKQVQPAVL

SEQ ID NO: 134792 - protein, 364 aa, unidentified
MRKLANPVRKVKAQVIGLDVHKRVITYCILDRGGREIASGEFGGRPEALERFLKEHVGRRKTHIAFESSGYSLWIYDRLVELYGTERVHVAQARKIRAIANSHEKNDANDAFWLAYLTHEGRLPESYVPPTIYRELRIATRERAQLVRRRTVIFQRLRAHLAQIGRIVPTRTLRTIKARRFLLELAGELPGARGYALKLTLRELDFQEEAIGEWEARITALGKDLPEVRAIQEHMPGAGPVLASAIVAESGPIRRFRTAKAYAAYTGLTPSDRSTGGRTIHGKIDRAGSPHLRGALGQMVMACLRSKRGPGVAVGHWVRTKQRRMSIKGKARCAAARKLAESIWRLFHYGECFDPARPFGSRIA

SEQ ID NO: 134793 - protein, 408 aa, unidentified
MLFIGDDWAEAHHDIELVDDDGRRLARRRLPEGIDGLAALHALVADHLAEETEADQVVVGIETDRGPWVQALIAAGYTVYAINPLQVARYRQRHGTSGAKSDPGDAHVLAELVRLDRAHHRPVAGDSAVAEHVKVLARTHQSMIWSRQRQANALRSMLREFYPAALAAFGEDLAGRDALAILTIAPSPEAGRRLSQSKITAALRRAGRQRNLESTAERIQQTLRAPQLEAHPGVIGAYTAAVRSLIAVITELVTQTEALRAEVEAGFGRHPDAEIYLSQPGLGPVLGARVLAEFGDDPTRYADPKARKNYSGMAPITRASGTRRVVLARYARNRRLADALYHQAFTALGVSPGARAYYDRHRARGATHHQALRALANRLVGILHGCLRHHTRYDESTAWHTPVEIAAA

SEQ ID NO: 134794 - protein, 402 aa, unidentified
MDGNRRYAGIDWAKERHAVCVVDGQGRAVARFEVGHTDAGLRELVRALAGVEGVAIERPDGPVVEALLGADLPVVVIASRHVKALRARHGLAGNKDDRADAYILADALRTDGHRLRPLRPDAPETVALRAGVRARKDLVRHRTALAQQLAAHLALAFPGAVDLFDELASPIARAFLRRFPCPERAAWLSPKRLDHWLAAQGYSGRRSGAELHARLAAAPPGVRGPSADALAGVTLALVAAVAAIDEEAKALEARIVEQLGRHPDRAIFTSLPRAGRVRAAALLAEIGDRRERFPTPESLACLAGVTPSTRQSGQHRAVSFRWTCDKKMRDALIDFAQDSRRANPWAEDLYRRARARGKSHPHAVRILARAWVYVIWRCWQDRVPYDPARHHALQRVILAPAA

SEQ ID NO: 134795 - protein, 400 aa, unidentified
MISVGIDVSKGKSTVCILKPYGEIVSKPFNITHTQKDLSELSSMLFRLNDEVKIVMEATGIYHLPVLTYLQEKGFFVSVINPYLMKSYRNESLRKAKTDKIDSRIIANYGIDHWFKMKEFQTSGEIYEELKLLGQQYRHYMKLHLLSLAELTHLLDLTMPGIKNLLASWNETNRKDKRSDFVERFWHYDVITSMSEQEFTEEYILWAKEKKYVPSQEKAKVIYTLAQKSIPTLPSETSSIKMLVTEAVRVLKEVDATLGLILSRMQEIAKTLPEYSVVREMGGVGNTLAPKLIAEIGDVRRFRNGKALVAFAGIDPPPYESGQFVGCNRKISKRGSASLRKVGYETMRSLKMRSRPEDPVYRYVVKKESEGKSKKSAKIAGLNKFLRIYYARVTELYKNI

SEQ ID NO: 134796 - protein, 458 aa, unidentified
MLCELATRRHECSYRASRIAIWMKKAVANAPAVDDERSAVQLPPRCYEKAGSPDVLHPGKNALKVRKGKPAMKKAYRKEEQQAKANRKEAKKTIAKISEFGDRAANSLVIGIDLGDRTSTYTVRSRDAQEVLMRSTVTTAPEKILEAFCGLQRQRIIVETGTHSRWMAQLLEMMGHEVIVGDARKLKLISENNTKSDKVDADLLSSLGCMNVDWLHPVYVRKDETHRDLMLVRSREALMQARTALINHVRGTVKAFGMRVKSCDADQFVEVAAEGIPKVLEPALSGVLEILAALSEQIYEYDCHIAHLGQTKYQDEVKWLTQVKGVGPITGLTFVLTIEEPGRFEKSRDVGAYLGLTRKTKQSGNKDPQLGITKAGDELLRKLLVNCAHWILGYRGEDCDLRRWGMDLMERGASEGKKGARKRAAVAVARKLAVLLHLLWARREQYEPLRKGVVPKAA

SEQ ID NO: 134797 - protein, 391 aa, unidentified
MIIVGIDIASQKHDYFMIQKDTGVVFSSSSVTIPNNEYGYKKLQSDILSFSRAIGDSDIRIGLESTGIYHTNIIAFLIAHDFQVMMINPILTNMARKAAKVHSPKNDNIDSQTICKYMIDHSDKFSPYTSTLYHKQMLKSLSRKRFFIVDEYRKAKLALNNLVQITFPELKSLFSNIYCESAIAILKEYGTPKKLAKAHISKVSYLLHGRCKCSASDIIEAAKHSVGISDDCYAFEIMDAIENLEFIQHRIEKYDVQIKQLVDELCPNLLTVPGIGYVTAGLIAGEIGDAERFHSAESLISFSGVDVSVYESGNYKAKHLIPSKKGSRYLRYALFQVARIIWMHDPVFKAYYEKKLAEGKHYYVILGHIQKKLCRLVYSLMKSGNNYEVRS

SEQ ID NO: 134798 - protein, 354 aa, unidentified
MSQKLNTAIAVIGIDIGKNSFHVVGLDDRGAIALRQKWSRGQVETRLANIPPCLIGMEACVGAHHLSRRLRMLGHDAKLMPAKYVRPYSKGQKNDFRDAEAIAEAVQRPTMKFVATKTPEQLDLQALHRVRERLVSQRTGIINQIRAFLLDRGVAVRQGLRFLRAELPQILATRTDVLSARMLRAIEELASDWRRLDERIEGLSTEIEALARQDMACQRLMTVPGIGPIISSAMVAAIGNGAVFSKGRDFGAWLGLVPRQISTGDRTILGKISRRGNRYLRVLFVQAAWVVLIRPKTWERHGLKPWIEAAKKRLHHNVLAIALANKLARIAWAVLSKEREFEYARTDEMTSRSA

SEQ ID NO: 134799 - protein, 310 aa, unidentified
MDIIIDKGCGLDVHKETVVACVMGSGIKKEIRTFSAMTGDLLRMKGWLTDLGITHVAMESTGPYWKPVFNILEDSFEVILANARHIKNVPGRKTDVKDSEWICKLLRSGLLTASFVPPQAIRDLRDLTRYRQKLIQAASAEKNRIQKVLEDANVKLSSVVSDTFGVSASRMLKAIMSGNFDTDSLAELAVGRLKGKKEKLKEALQGHFRDHHGFMIQASLDHIASLEKIIADLDRQINEKLKDYHRERELLASIPGVKEQGSSSILAEIGADMNVFPSEGHLSAWAGMSPGNNESAGKKKVARQPTAIKT

SEQ ID NO: 134800 - protein, 407 aa, unidentified
MVKLDSNNIIPFGIDPSRAELATVSIIENPTLFKIKNNQRGHKGFLNQVEKMVQAHGKMPVFAVEGNSPFAISFEFQAYRKGYPVYEITPYELNRMRDIFCGEDQDDFRDAKTAAMIITQVPQLLRPAEIDLKQFALRRLVKARLRLVKDQTRDINLLHYLSSQIWGPEYKAFFPVLNSPQALQFFANFPTPEGLKIGEAEILNKLRAGGLPYYKSNWGRKRVKAILKTAEELDWVGDDYLNELGLEVTEFAQDALTRLTKIKVLEARLIKMAKGWREEELELVRTIPGFNWVLACSVVVLIGDLRRFTSASEFIGYCGLVLCKKKSGKKEAEKKRKRRNKLLSHAFQLAAVASLQTSALSQAYYQKKLNEGRKKKQAQRALAKKLAEIVYAVLKNKEPYDEKRHSH

SEQ ID NO: 134801 - protein, 352 aa, unidentified
MNKGSKLDFTGQHIYVGMDIHKKSWSVSIHTERFEHKTFTQPPEVKKLTNYLQRNFPGATYHCVYEAGFSGFWIHDQLTQEGIHSMVVNPADVPTKHKEKAGKADKVDCRKLARNLRSGDIKGIYVPFRVQAEDRHLIRTRQSMVRKQTRCKNQIKAILFFYGILIPEEGHWSRNFINWIETIRMERASGDLALKVHLEELNYLRQIIAGLNKAIRALSRTDTYRDKVLLLRTVPGISTLTAMTLLTELCDISRFSSLDKLASYAGLVPDIKSSGETEYTSGITHRRNPALRAVLIEASWVAARKDPALIIAFHKFSLRMKKTAAIVHIARKLLNRVRFVLINQERYVPAVV

SEQ ID NO: 134802 - protein, 353 aa, unidentified
MVVVGADVHKHTHTFVAVDQVGRQVGQLTVAATWVGHGKAVRWVRERFGTDVRWGIEDCRHLSARLERDLLTAGQQVVRVPPKMMAEQRRVARTRGKSDPIDALAVARAVLREPDLPVASHDEVSRELKLLVDRREVLVSQRTAAINRLLWHVHEIDPSMAPPLRSLDLAKHQSRLADQLESVEGIVAEIARDELTDVIALTGRANMLAKRIEALVTDVAPILLAMPGCGPLTAAKLVGEAAGITRFKSEAAFARHAGIAPIPVWSGSTAGRVRMTRSGNRQLNAAVHRIAVTQVRLDGLGKIYYEKKKAEGMSTPEALRCLKRRLARIIYNHLTTDHQARQQTIPAAVPDAA

SEQ ID NO: 134803 - protein, 269 aa, unidentified
MAKRSHEATVITSEGQVVQKAFSIRNNCMGYNLMMEKLRKPTNVKSQIVFAMESTAHYWLALYTRLRKDGYKAIVLNPIQTSAMREMSIRKTKTDSKDSFLIAELKKYPTPKKLARDSFGVEDCEGIYSMLLLTMLDEIQSLTEKADELEKRISSLLKEFDSTITSVPGIGPILGACVLSEIGDVTRFRSADKLTAYIGVDPSVNQSGEYISDHAHMSKRGSPYLRRAVWMASIVAVQRDPMFRAYYDKKAALYSFGEYPISALKHFVK

SEQ ID NO: 134804 - protein, 317 aa, unidentified
MDAPEVFAGIDVSKENLEVCIRPQEERMCFAQSEDGWALMSQFLQSFSPRLVVLEATGGLERGAVATLAAQGLPVVVVNPRQVRHFAISKGILAKTDKIDARVIAQFAESIRPEIRPLKDLEAQELDSLATRRRQIVQMLAAEKNRLQSALGWTREDIRMHIGWLEKRLEKIEKDMDRMIQKSPVWRVKGEILCSMKGVGPGLCRAVVSDLPELGTLKRQKISALVGVAPLNRDSGKFRGRRTTWGGRADIRSVLYMATVAAIRWNPVIGAFHERLLKAGKPPKVAIVACMRKLLIILNAMMRNQTPWQPPVASKNP

SEQ ID NO: 134805 - protein, 317 aa, unidentified
MNSSQIQTSVNIGVDVGKANLDIAIHPSGQLYSIPNSEAHIRRFVKILRNYNIERIVVEATGRHEHALVQACDQAGLPIIVVNPISVRRYAQAIGVLAKTDRIDAQVIAKYAATLKPEFRPIPDKTSKKIRDLLARRAQLLEMSTMEKNRLQIMPKPLHRSIRSMLKMLQHQIETVTRQIEQEVAKVDQWRTKMEVMTSVPGVGKVLAYTFLSELPELGSLNRKEIAALVGVAPINRDSGKLNGKRRIRGGRHRVRTVMFMAMLSSIQCNPVFKRFYERLKAQGKIPKVALIARMRKMIVVLNTMIKNQESWRGEVA

SEQ ID NO: 134806 - protein, 341 aa, unidentified
MKLYGGIDLHSNNSVIHIIDEQGVSQLKKKVANDLVTILALLKPFQDELTGLVVESTYNWYWLVDGLMEAEFEVHLANTAAIQQYSGLKYGDDDSDANWLANMLRLAILPTGYIYPKEARMQRDLLRKRMQLVQQKTANMLSIQGMYDRHLNRRINSNKLKQLTLAQLDNDFGDPNVRLAIGGNLTVQHCLAQQIKVIEASLTKQLKLTPEFIRLTSIDGIGLILALTIMLETGDISRFDQVGNYASYCRCVSGARYSNGKKKSSTNTKNGNKYLAWAFIEAANFAIRYNDTVKRYYQKKLAKTKVVIARKTVAHKLARACFYVLRDQVDFDVNKAFGYSK

SEQ ID NO: 134807 - protein, 437 aa, unidentified
MKLVHRRCCGIDVHKDRVTACVLITEPDGRRTVRKKEFDSYLRGLENLRLWLYANKVTQVAMESTGVYWKPVWHVLEGHFGLLLANPYHMHNIPGHKTDSADSEWIADLLAHGLLKPSFVPDMEIQDLRDWTRYRVNLVQERNRIHNRIAKVLEDTNLKLGSVVSDILGQTGRLILDVILKGQQDPGWLADYARGRLRCKKEQLRKVLRGRVRQHHRDLLQELLDYLRQTEEKIGRVEQKLAVLMEPYAAQVTLLLTIPGVDVLTAWTIVAELGVEMSMFPSPRHAESWAGLVPGSKESAGKRQRARTRHGNPWLRRALCQSAWVVSRKKDCYLTAVFRRRARKGGAKKATIATAHQILVIAYCMLRDGAVYKELGGDYFDKLNPAKALKNISRRAAKLGYAIKLEALGVVPPPPPRRPRGRPRKAQIPPTDGFGGP

SEQ ID NO: 134808 - protein, 348 aa, unidentified
MNYCGIDLAGVSSYAYVTDEKGRKLWSGPVETEKAAFERLVKKFRLGGLSIAIEAGNQTAWVYDELVKLGAKVTVVNPAKVRLIAESRRKTDKIDAKILCELLRLDALPHPVHIPGPEARALRGLLVARRQLVAARTKLCNVVRGMLRQTGVRLPAGALSTLAGWKRLFAAGFEHDHLLHIVTAYHDNFLALTKSIRELDRQLAEREKNEPRAARLKTMPKVGRIASLTFLAAVDDVNRFPTSRKLVGYSGLAPTVRQSGERTEYGAISREGRRELRAVWVQIAHLVAIDKKKATQPLRTWFNRVAKKRGKKTALVGLARRLLVIAYQLLKSESDYDVGRLKKKRQAA

SEQ ID NO: 134809 - protein, 344 aa, unidentified
MENYAGIDVSLELSSVCVVDAQGKVLKEAKVASEPDALVEFFETLGFAVKRIGLEAGPLSQWLHAGLKSAGFETILLETRHVKAALSAMTVKTDRKDARGIAQLIRMGWFRPVHAKSVDAQEIRALLIARKQLLGRLIDIELSIRGILRGFGLKVGPVTRRNFEARIRELVAGQSTLERIASAMLSARSALTAEYGRLHRAVLAIVRDDAVCRRLMTVPGVGPLVAVTYKSAIDDPRRIVKSKAAGALFGLTPKKYQSGEKDVTGGITLAGDETVRTVLYEAANVLLSRITRFSKLKRWGMDIAKRRGSKRAKVALARKLAVILHRIWVDGTTYRWTDVGSIAA

SEQ ID NO: 134810 - protein, 371 aa, unidentified
MVWTAPERHLCARVMGAVTNTRKEPSAMQVSTIGLYLAKQVFQVHGVDVEGMVVLRRRLRRSEVVKFFSTLPGCLIGIEACATAHHWARELSRLGHQVKLIPPSYVKAYVKRGKTDAADAEAICEAVSRPSMRFVPLKSVEQQSALMLHRSRDLLVRQRTMLVNAVRGHFAEFGMVAPQGIRRVGELAALLIEEDATTLPSLARQALRALLAQLQALEKQIESLDAAVIASHRDNEVSRRLASIPGVGPITASAIVASVADARQFKSARHFAAWLGLTPRSHSTGGKERLGGISKQGDPYLRRLLVTGATCVIRYARRKAPGEGGWVKALLARRPARLVSVALANKMARIVWALLVRGNVYQAPVVTVATA

SEQ ID NO: 134811 - protein, 345 aa, unidentified
MLYVGLDLSRKRLDWQALLPDGERAAIGAVPPDRDGLTKLVRRLGDAEGVLAVIESMSGARFVHDELELHGWDVRIADAVKARGIAPLACKTDTIDTWVLAELARLELVPEIWLPDPQVRAERERARFRLHLVKHRSALKNRIHAILFQHGVPSPGSDLFGTGGRALLERLQLPEPWASTVAASLELIDLLDERIWSCESELRALGAEHRYIPLLMTCPGIGWVLAFTIASEIGEIGRFPSPAKLVGSTGLCPRVEQSGERDRRGALRKNGPNYLRWALVEAAHSAARHPAYQPVRERMRARHGRKRGTKIAAIEIGRRLSEAIWHMLTTNQPFAPAGAPASLAA

SEQ ID NO: 134812 - protein, 431 aa, unidentified
MNYNQNNKIAQITSQTLIIGVDIAKFKHVARAQDYRGFEFGTPCFFENTKDGFSAFIDWINHLKLEQGMEKVIVGMEPTGHYWLNLAHILKENGIKFVAVNPLHVKKSKELDDNSPTKNDVKDAKVIAQLVKDGRYAEPTIPQGVYAELRVAKKIRDLLTDDLQTVQGQIHNWIDRYFPEFLTVFKKWEGKAALQFLKLFALPHELVKFSDQDLLMHLRKAVKRSVGLNKIQELKHAASKSIGLIQGANMAKLELKTLIDKYELVQLKFEELDSKIDTLIDQIPGVQQMLAIKGVGRDTVAGFFAEVGDLSEYSHPRQLIKLAGLSLKENTSGKHKGKTTITKRGRRKLRALLFRVCMILVAKNTAFKALHAYYTQRPDNPLKKMQSLIALCNKLIRIFFAIGKKQFEFSEERMLQDIPHMRTNIEVEKAA

SEQ ID NO: 134813 - protein, 311 aa, unidentified
METYVGIDVSKRKFDMAILEDSSCHSFEMTTQDIRNCIQLLRKYNVVLVAMEATGGYEHQLFIALANAGFDVAIANPRQVRDFARAVGKLAKTDKIDASVIALMAAALRPKPTALPDENCMKLRALATRRRQLVCMLIAENNRLEHVQEKHVKQTHRKLIATIEKQLVIIDQQMNDMIQASPALCRIGEILQSVPGIGEKSAMHIIADLPELGKASRREIASLVGLAPMNRDSGTMRGKRTTGGGRKIVRTMLFMPTLVATRCNPVIREYYQKLLARGKTKMVALVACMRKLLTILNALVAKNEIWDPLTT

SEQ ID NO: 134814 - protein, 451 aa, unidentified
MGKVKPQVIDDEEHERVHDRVAAVDVAKDSGMVCTRLPHPSRAGARQATVWTVRARMGTIRTLGRQLASDGIEAVTLESTSDYWRIWFFVLEACGLAVQLVSAAQAKNLPGRPKTDKLDAMWLARLTELGLLRASFVPPKAIRDLRDYTRMRTRLIQERTRCFQRLEKLLESALVKVSSVASKLTTLSAQDMIKAMIAGQRDPRVLASLARTSMKAKREELAEALDGMFDDHHGELAGLLLDHIGFLDQRITALGTRAAELTAAMPAAWGVDSDGTTGPDAGTGLHAAVLPVVARLAEIPGVSENLARAMIAETGLDMSRFPNAAHLVSWAGLCPSARQSGPRTRAGKKGQGDTWLRSALGQAANGAARTQTFLGERYHRIARRRGKKKAQVAVARSILVIVWHLLSNPEARFTDLGPGYYQARINVDRKLKNHIQQIQALGFAVTLAKTM

SEQ ID NO: 134815 - protein, 419 aa, unidentified
MSFKILKNNCCGLDVHKTWIFACIGITDSNKRTVYKQARFSSFTKGLQELCHWLAKYDCTDVCMESTGKYWIPVFNILEKNNIWVTLSHPKYTKPQKGNKTDRKDAKWICDLYMCGMVKPSFIPPADIRELRDLVRYRFKLTCMITGEKNRAHNCLTVSNLKLDDVFSDIFGRSSRSITEQILQHPGETFDVAPFVHGRCKTPIEEIQAAVDGAVSKEQAVKLRQCLNHIDELEMHKSEIEREIFRLSDKYEDILTLIRTVPGFDKNPMTAIQVLSEIGGDMSVFPTAKNLVSWAGCCPRNDQSNHKIKSTRISRAGSYFKPVLVQVANALIKSKKHPEFSTRYRRIKARRGHKKAIIAICRMILTAIWHILTDLKPYTAKGFLEPRPVSKEKVLTASQALNLLKQRGYIIKDEPIFIS

SEQ ID NO: 134816 - protein, 354 aa, unidentified
MVIVGTDVHKRTHTFVAVDEVGRKLGEKVVPATTAGHQKALGWAREQFGGDLLWGIEDCRNLSARLERDLLTAGQKVVRVAPKLMFQTRASARTRGKSDPIDALAVAQAVLRYPDLPVASHDEVSRELKLLTDRREDLVAQRTSTINRLRQRVHELDPAAEPKPASLHRAKPCAVLADWLDTQSGILAELARDELADIIHLTEAIDELAARIGERVREVAAALLALPGCGELTAAKIIGETATISRFRSEAAFARHSGTAPIPVWSGNTAGRVRLNRSGNRQLNAALHRIAITQIRLTDSAGQRYYRKRLADGKATKEALRCLKRHLARSVYRRLHTDDHTRRAHQNSDMRTAA

SEQ ID NO: 134817 - protein, 314 aa, unidentified
MSALVFVGIDVSQVRLDIAVRPGASWSIVHEEGPIAALVEQLRALGPTLIVLEATGGMEISLTSALAAADLPVVVVNPRQVRDFAKASGRLAKTDALDAQVLAQFAEVMRPDPRPIPDAETRALAALLTRRRQLVEMLTAEKNRLLSAASPIRKRVRAHIVWLERELEHTNAELSEAIRHSPVWRDKDELLQSVPGVGPVLTSTLLASLPELGTLTNKQIAALVGVAPLNRDSGTLRGRRTVWGGRAQVRAVLYMSAIVAARFNSVIRAFYQRLQRAGKAKKVALTACMRKLLTILNAMLKHRTPWREVEAQHA

SEQ ID NO: 134818 - protein, 497 aa, unidentified
MIELAYVSQAKFLHSLLNRMVASFKVCSPESEVSFKPPAVYRVAGRPFSSVGSQQSAPEWILICEGVDAPMSWVLPSRLTKNPIQKVGDNVDKLFVGIDVGSRDNAVYIMRPDGSKHSSFPVQNNLGGAQTISKRVVSALTENELTDVVIGMEATSVYGDNLMCFLREDGALARFERTLHVLNPKQVKKFKDVHPDLPKNDPVDAFVIADNLRFGRIATPVYMDDYRYKALQKLTRARFHAVDNLTREKMRFTNYLFMKCSGLAQEKVFSNNFGATALAVAEVFETPDDIVNMDIKKLTDFITEQGKNRFPNPDEVAKAVQAAARGSYRLPKTVNDSVHQIMAISISSMRAMQAQIKALEKEIARQFENIPNTLISIPGFGPVLSAGIIAEVGDINRFNGEASLAKYAGLAWNQYQSGTFEGQNSRLIKSGNRYLKYYLYEAAFSIVRCDTEYKRFYDLKYAEVNKYQHKRALALTARKLVRLVFRLLKDNRLYIPA

SEQ ID NO: 134819 - protein, 351 aa, unidentified
MKPNFEPGKWFMQCVGINIAKGTFTACLCMYEFDMGCATEPIVFSNNKTGFNQFVKWSRKEALKGYPIRYVMEPTGVYYEQLAAHLSKLDLDICIVLPNKAREFAKYEGILTKTDDMDAYTLGMLGCLDKRLKSWTPPSPIYRELRQMTRFVADINKVRTELQNHLEALTHSEITEKSIVKHYNKLINEIDKQLASNQKAIRDKIKQQPGLSERIERIATIKGLGYMTVVTVLAETNGFALITNRKQLTRYAGLDVPAHQSGPVDPKRHISKQGNVHIRTALYFPAIVSTQYNPQMKDFYGRLCARNPQSKMIGVTATMRKLLLLIYSLWKSGEEYDSKRDKPIKKEKERG

SEQ ID NO: 134820 - protein, 446 aa, unidentified
MSNGSGLSRGDRNRNARLARLRELVPHANAIVGIDLADDKQAAVVTDHDSRVIARRQVRARAWELGGLLDWAASTAAGAGFSSVTVACEPTGHRWRVLDQLAAERGLALVCVQPLLVYRAREGEDLTRDKSDPKDAVLIARLASELRCYEPERADAVWARLRHLGARRRQLTTDATAAVNQIRDLLECAWPAVLAAAASPFRSVSWCASLAVVLDRCAGDLSRVRRLGLDRFTAAVRRELPRWGGIRPRLRIIRAVFAALADPAGVAAHRPGALERAHLALGDWRDTRSRLAGTEARMGTVLEELGLAELVTTIAGLTVTGAAAILAETGDPARFATARALVKHAGLCPRDNASGAAQGKTSISGRGRPGLRVAAWRAVWAAMPNNPVMAARFAHLTTRQDNRLARQQARTACAAALLRWIHVVVTRRVTWDPAIAAGGIPLRQAA

SEQ ID NO: 134821 - protein, 311 aa, unidentified
MDKELYIGVDVSKQTLDLAYYDGESIDWKKAHIKVSNNNAGFKKIGSWVAKVSKGFDIVLFCMEYTGLYTQNFRLWLEEKHYIYRMVEPRKMHRFEPDLDDGLRSLDRIKTDELDSFRIAIYCEQNHRKILRNPSKLPSPVYFKLKRLLAERKQTVKQSVLYKQQLHDICAYDTDLSVERKNGQLKTLNDALKGIDNEIDMYIKEDADISKNFSLLTSIPGIGRVVALETIVLTENFMAIDNPRKYACYIGVAPFKKESGTSVRKGSSVSKKGFKQAKADLSIACLVCMQHIPNIRDYWERKRKEKCSGIV

SEQ ID NO: 134822 - protein, 348 aa, unidentified
MLHAGLDLSRKKIDVCLLSEHAEVVEEFAAPPDADGLRALARRVAVHREAVRAVIESMTGARFVHDRLEELGWDVLIADAAKVKGLAPLACKTDRIDARVMAVLSHRDLVPEIWLPDPRVRREREQARFRMHLVKHKSSLKNRIHSTMITFGHPCPVTDLFGVAGRQLMDRLEVPQPWRGTIDASILLIDDLERQIDRINRQLKSGGADHPYVPLLLTVPGIGWVLAFTIAAEIGDITRFPTATKLVGYTGLCPRVNQSGDRDRRGPLTKQGPKYLRWAMLEATMHACRHEVYRERYQRTKQRLGKQRGAKVAQIDIARRLTEAVWHMLTRDQPFTPAAGGSAFRLAA

SEQ ID NO: 134823 - protein, 397 aa, unidentified
MYIVGIDIAKRKHEAAVIDGEGAVIIKPFSFTNNCSGYNRLLAMLTKAKLPLDEVSFAMEATGHYWLALFTRLQKEGFRVQVINPVQTNSIRSFYIRQAKTDPRDALLIAEVIRFGHFSESTLHPENIYELRELCRGRHAIVSMQADVKRKVVALLDQVFPEYETAFTNMFSDTSMAILQNCPTPKELSEMPLEELCHLIEVSSHKRFRMAKARELQELARNSFGFAMAGDVFSTMIRLYAKHLVFLKQQVQEMDRKIAEIMDTLDTPITTITGIGPTLGAYILSEIGDISRFSSAAKLAAYAGIDPTMRQSGEYNGVRNRMSKRGSPYLRHAIWLAASSAVLHDPALKLYFQKKRDEGKPYMASVGHACRKMVSIIYAVMRDNKAYTPCIPNEISA

SEQ ID NO: 134824 - protein, 354 aa, unidentified
MPRTSQSASAALTAIGVDIGKDVFHIVGFDRAAKIALRRKIKRSALVETFEALPRCVVGLEACLSAHFVSCTLRQLGFEPRIIPAKYTKPFVKGQKNDYNDAEGIAETAMRPNFKTVAEKSQEQLDLQALHRVRSRLVSRRTATINQIRAFLIEQGIAVRTGARALRNSLFAILKNRESEISPRMTSIIDGLYEDWVSLDKRIESLTLEIEKISEVETNCERLMSVPGIGPLISTATVAAIGTGEAFDRGRDFGAWPGLVPRQYSTGGKPILGRISKQGNRYLRTLFVQAAHIILMRPKNWLKFAFGRWLEHASTRMHKNKLATALANKLARIAWSILRNGGTFGTQIRTADAI

SEQ ID NO: 134825 - protein, 364 aa, unidentified
MKRKVYVGMDVHKETIQLAILTSNTNERVKEQQIKHEEGQIKKFIQKLKSEGTEIHCCYEAGVTGYPLYRYLKTLGVNCTIVAPGKIPRQSSDKIKTDKRDAIKLAKLLRSGELESIHVPSEEDEAVRDYLRSRDSLRLDLGRNRQRLMKFLLRKGIKYSTTKYWTASHYKWLNNLHFENEILQATFNDYYSRVRVQEENLKAMDQKIREIAESEPYREKVGILRCFRGVDYLTAMFLLSEVNDFKRFKTAGSFMSFLGLVPGEYSSGPKRKQTSITKTGSPRLRRILVEAAWQHRFPGTGSKVVAARRVGQSALVVSLAEKASLRLHKKFKSMQLRGKTPQVMITAVSRELSGFLWAAMNLVA

SEQ ID NO: 134826 - protein, 373 aa, unidentified
MIVIGADTHKTSHTVGAVAEATGRVLADRTVKAKRRSFDDLLRWGRGLGGERVWAIEDCRHVSGALERFLLARGERVVRVAPKLMAGARRSARERGKSDTIDAVAIARAAIREGLETLPVAQLAGPELDVRLLVDHRERLVAQRTALINDLRWGLHDLWPELEIPPRALTAARWQDRVAGRLTRAEQTTRVRIARDELRRIRELSRSIDALEHELAGLVASLAPRLLAERGCGVLTAAKLIGEIAGIGRFTSDAKLARLAGSAPIPASSGGTDRHRLDRGGNRQLNCALHRLAISKGRLDPDSAAYLARKQAEGKSRREALRCLKRHLARRVWRLLQPAPAERARDSSTRPPTLSPPGTTIHCNMPYGRFSLT

SEQ ID NO: 134827 - protein, 345 aa, unidentified
MTIVETRAITGGVDTHADVHVAAALDPVGGLLGVKEFPATPAGYARLLAWLAGFGTVTLVGVEGTGSYGAGLARHLTRAGVRVVEVDRADRQDRRRKGKSDPLDAVSAARAAQSGRANGAPKGRDGAVEAIRALMVAKRTARAERTQTINQARSLIVTGPDDLRARFTRHTTGRLVADLAALRPRPGEVVGYATRVALRELGRRAEFLDAQLERLDELIVPLVAARAPGLLRLYGIGSDTAALLLIAAGDHPDRLNSEAAWAHLCAVAPIPASSGRITRHRLNPGGDRQANHALWRIVITRMSSHPATRAYVERRSKEGRSKTEIIRCLKRYVAREVYPHLRSPY

SEQ ID NO: 134828 - protein, 399 aa, unidentified
MLAVGIDISKSKSVAAILNQDGSMHTSPFEFHHTQPELDAFIKYILNSNQSATILMENTGHYHYPVLKAFREAGLPVCMVNAYQIKKFGDMDLRKAKTDKKDAVRIARYALEKSYSLVPYTSMEQKYEDLKFLARQYNQRMLTLKTNKVFLLNLLDETMPGITNILPLTTRTPETSLSVLFINRFKSYDRIKKMGKSRFLDAFEKIARKSRNRQTKTYGLAIYEAALRNITTRGENEYTLAAQDQCLELVCESQKAADSIIPKMQTLAETLPEYAVLRSMAGVGDRLGPLILAEIGDIRRFHSGKALNAYAGNDAPPYQSGTFESYNRHISKRGNAALRKYCFEVMQTPKLTRPQDDPVYLFLLKKEQEGNPYNVAKMAGVDKFLRIYYARAMETLKQQ

SEQ ID NO: 134829 - protein, 339 aa, unidentified
MWYSGIDQHKAYCVITTYGPDGPRVKQARVTSTPLALQQYFAEFPGPHKAVVESTGAWYWLADTVADVGVELVLAHATRVQAIATAKVKTDKVDSNTLALLLRADLIPAAHMIAPAQRAPRDLMRTRLRLVAKAVSAQNSIDRLLEKFNARDVDELDKLYQLQANCHAAQMQLLEDQIGTLERALHPHLLPNAEVQRLLWVPGLGKVNAFTIYTEIDGIARFPSERQFFSYCRLVPGADNSGGHTRHRSGSKAGNRYLKLAFSHAGIRAVQYYPEIRGFFKAKARKKPIRIARTLVALELARIVYHVLTKQEAFNGRFKNRPLSRRKHAQWPRRASPPA

SEQ ID NO: 134830 - protein, 484 aa, unidentified
METKKYRRCCGIDVHKKNVTVCILPPVGKLEAEVRKRTFRTFTRDLKQLRTWLKNCKVTEIALESTGQYWRAVWNILEEHFEKLILVNPQHIKGLAGHKTDPKDAQWIADLLETGKLKGSLVPPREIRELRDLTRQRVNLLEDLNRAKNRIEQLCQTGNIKISSVASDLFGLSGRTMLKALVEGKRDPGWMADYARSALRGKRRELELALEGSFTENQRWLLSKELNQVEWLEIQVQVLEQEIQRRMVPFEEPIRRVMTIPGIEYKTAWTIIAEIGVDMSVFADVRHLASWAGLCPGNRESGGKQMSGRTRKANRYVRRAMCQAAWAAARTKDTFLSAFYRRMQVRKGPQKAVMALAHHLIAIVYNVLKRGEEYVEMGGDFYDRRNKPKAVSRMVSRLMKLGYQVTLTAVAPEESVHLPSELPASMESASEFRQDALPEEELPTQKTRRGRPCKCVERGIPCKHQIGLRVNLLKSHGLDGAEFS

SEQ ID NO: 134831 - protein, 417 aa, unidentified
MKYARSTLRAIPVNGLACGIDWAREDHAVAIVDGGGRQVHRSIVEHSSAGLRALVTVLARAGVTEVAIERPDGPVVDALLGAGITVVVISPNQLKNLRGRYGSAGNKDDRFDAFVLADTLRTDRARLRPLVPDSESTVALRALCRARKDLVAHRVRVANQLREHLNRVFPGAVGLFTKLDSPISLRFLNRFDCQDRADWLTPRRLQAWLASAGYCGRTDPAVVFGRLSAAPRGLPAAAGAAQIPITRALVATLDNLVKQIATLSQQIGQQLNAHTDAHIFTNLPHVGTVRAARLLAEIGDCRGRFPTPEALACLAGVAPSTRQSGKMRSVAFRWACDKQLRDAVCDFADGSRRSNLWAADLYGRARARGHDHPHAVRILARAWIYIIWTCWQNDTAYNPAQHRALQTVLHQDQPPAA

SEQ ID NO: 134832 - protein, 313 aa, unidentified
MDTARYIGIDVSKDRLDVHIRPDAKAFAVANTPAGIAELADQLAPFQVEKVILEASGDYEKQAFVLLVEAGHPVAIVNPRQVRDFAKSAGRMAKTDTIDAAVLAHFAEVFRPRDTAPLSPLESQIGEYVVYRRYLIGEMIGVRNQLRRLTTPSLRQALEQRLSTAKAECKLIEREMATLVRQSDKRPLFDLLTSVPGVGALLACTLIASLRELGSLSRREIASLVGVAPMNNDSGHRRGHRFVTGGRGAIRTTLYMATLTASRFNGSIRTFYCRLREAGKPPKLALTACMRKLLTILNAMARDGRAWCHGATT

SEQ ID NO: 134833 - protein, 370 aa, unidentified
MTQSSMLYVGLDVHKESIAVAYVAQDHGAEVVSLGTIGTRQCDLDKLIRQLHSKAKHLVFVYEAGPCGYWLYRYLTKTGHDCWVVAPSLIPKKAGDRVKTDRRDARQLARLMRSGDLTPVYVPQVDDEAIRDLSRAREDSIRDLKAAKYRLKAFLLRQDIRYTGQANWSPAHLRWLAEVVCPTPAQQIVFQEYVRAVTEHTERLQRLEQELHERVKTWRLAPVVEALQALRGVQFTVAVTTVAELGDLTRFTNPKQLMSYLGLTPSEYSSGQRRSQGGITKTGNSHARRALVEGAWAYRYPAKVSRHLQLRLEQLPKPIQDLSWKAQVRLCKRYRQLMARGKNANQVVVAIARELVAFMWAIAREIALPA

SEQ ID NO: 134834 - protein, 347 aa, unidentified
MNFYTQQHKHYCGIDLHARAMYVCILDEQGTKLVHKNLPTTPEAFLRLIAPYREDLVVGVECMFTWYWLADLCSQEGIAFVLGHALYMKAIHGGKAKNDKIEAPKIAVLLRGGMFPQAYVYPSEMRATRDLLRRRCHLARKRAELLAHIHNTNSQYNLPEIGKRLANKSNREDVAEHFPDPSVRKAIEVDVALIDQYDQLLGEVELYLTRSAKAHDVQPFARLQSVPGIGQILARVILSEIQDIARFPRVQDFVSYCRLVKCAKESNGKRFGTSGKKIGNVHLRWAFAEAAVLFIRQSQPGKEYFAKLEHKHGKAKALTVLAHKLGRAVYYMLSREQAFDLKRFVTA

SEQ ID NO: 134835 - protein, 343 aa, unidentified
MQTVTTIGLDIAKSVFQVHGVDAAGQVVIRRQLKRRTVLAFFQKLPPCLVGIEACASSHHWSRELQALGHSVRLMPPAYVKPYVKRQKNDMADAEAICEAVTRANMRFVPTKTAEQQSCLMLHRTRHLLIRQQTAVINSIRAQLAEFGIIAPVGRKGVTELLHVVADPHDKRVPGVARACLAALGTQLLSLKEQIMEFDRMILDWHRSNETSQRLHYIPGVGPVLATALVASVADPRTFRSGRNFSAWIGLVPKQHSSGGKDRLGSISKQGDRYLRSLFVAGALAVIRYAKIHGTKHRPWLTALLARRPTKVAAIALANKIARMAWAMMAKGERYKQPVALAA

SEQ ID NO: 134836 - protein, 390 aa, unidentified
MIYVGIDVAKTTHYAAAADSDGVVLVEPFAFDNDAPGFAKFISKIASFPKEQLIIGLESTGIYSENLICFLFDSGYKLAVINPIQTATLRKTNIRKTKTDKVDTLLIIKSLMVNSYRLYTEQDTQSLKLKFLCRFRQSLKKSKARLKIQLSGYVNLLFPELLSFFKSGIHISTCYTLLKRCSSPAEIAALRLDSLSRLLSNASRGRFSRSTAEALKSLAKSSVGVKNPYISIQIAQTIQQIELLEQQIDEIENVIKDTICELDSVIMSIPGIGAIDGAMILGEIGNIDRFASPAKLLAYAGLDPTVCQSGKFKARSTKMSKRGSKILRFALINSAWQLTLKNDIFFNYYQLKLSQGLSHYGALGHVAHKLVRVIFTLLKHNVLFDPTRLV

SEQ ID NO: 134837 - protein, 314 aa, unidentified
MSPLVFVGIDVSQRRLDIAVRPSASYSITHDESAIATVVEQLHTLSPTLIVLAATGGMEIPLTSALATAGLPVVVVNPRQVRDFAKASGRLAKTDALDAQVLAQFAEVMRPHPRPLPDAETRALAALLTRRRQLVEMLTAEKNRLLSASLPIRKRVRAHIAWLERELTRTNTELSEAIRQSAVWREKDDLRQSVPGVGPVLTATLLASLPELGTLTHKQIAALVGVAPLNRDSGTLRGRRTVWGGRAQVRAVLYMGAIVAARFNPVIRAFYQRLQPAGKAKKVALTACMHKLLTILNAMLKHRTPWREVEAHHA

SEQ ID NO: 134838 - protein, 413 aa, unidentified
MLKIVYTTCCGLDVHKNFIFACVASTDKKGITSYKNHRFNTLTKGLRELADWLKVNSCSDVCMESTGKYWIPVYNILESTCKIVLAHPKYVKAIRGKKTDKKDAKWIADIFKHDLVAGSFIPPLDIRQLRDLMRYRTKLTNFNTGEKNRAQNCLTISNIQLASVVSDVFGKSSYAIIEHLLEHPNDKDFDFRPLLKKSLKQKAEDIGLAIDGEITPEQAEKMKIILSHMESIELCKSNLDSVILGLAEKYIPQIDIVSTVPGIKNPLSAIAIISEIGVDMSVFMTAKHLCSWAGLTPQNNESAGKKKSVRISRAGAYLKPLLVQIANAVVKSNKHPEIKNRYLSIKKRRGHKRAIIAIARMILTAIYQMLKKNEPYNDELYKKSDAIPTNRDVSVEQAIFILQRQGYTISKDT

SEQ ID NO: 134839 - protein, 343 aa, unidentified
MLYIGLDVHKEFCQACVMNKSGKVISNGRFLSTQDALDKYLDRFKDAKFVLESTGIWEFIYEGIEKRGFEVVLAHPLKVRAIAEAKVKTDKVDAEMLAHLLRANLIPRSHVPPRDIRNLRQLVRHRAYLVRQCTSIKNRIHAELLRRGIRRPDSLKKTFTFKHVGWMRSLGILTITSSLNCLEGIQEQIREVESFLLAEYNSRKDAQLIATIPGIGFYGALLILAEIDDIHRFSGPEKLCAYAGLVPTVHQSGSRGHNGSITKNGSPHLRWILIEAVHVHTNYCPESKLSAFHRKIAKRRGKQRATVATARKLLHTIYWMLLTKEKFHCQGFNLVEKAASMNA

SEQ ID NO: 134840 - protein, 408 aa, unidentified
MNPLFVGIDVSSKNNVAYLMKPDGSKHSSFSVQNNLGGAKLLSERIVSALGSMQLERVVIGLEATSIYGDSLVYALREDGRLGRFQRKIHVLNPKQVRKFKEAYSDLPKNDWVDAFVIADHLRFGRIAKEVYMDDYRYKALQTLTRARFDVIQNLTREKQRFANYLFLKCSGMAQDKDIQNTSATTIALMEHFETVDDLANADLEELTAFITETGRGKFADPDATAKAVRAAAKGSYRLPKTVNDTVNQAMAVSIASMRALKGQVKVLDKAIEQQFEIIPNTLTSIPGIGKVYSAGIIAEIGDIHRFDSQASVAKYAGLVWNRSQSGDFEAEHSRMIKSGNRYLRYYLLEAANSVRRCDSEFRRYYDLKFKEVNKYQHKRALALTARKLVRLVFRLLKDNRLYIPPEG

SEQ ID NO: 134841 - protein, 455 aa, unidentified
MLKPQVIPDEDHEVVYERVAAVDVAKASGVVCMRTPDPARPGRFVNRIWDNVPATRARIAELGRELLSCQVQMVTLESTSDYWRVWYYVLESIGLAVQLVSASQAKNLKGRPKTGKLDAMWLARLTQWGMLRPSFVPPAAIRRVRDFTRARTDLVRERTRVLQRLEKLLEDAMIKITSVARDGLKAKSVVAMVAALTAGERDPRTLADLAKGPLRGKRDQLAEALDGMFDSRHGVIAQMLLDQVAFLDQRIRQMEDQAIAALAQVTESWGVDAAGPTGPGCGTGPDSPVLAAAYRLAEIPGISVWLAIVIIAEIGLNMAVFPTPAHLVSWAGLCRSASQSGTRHGKGKQKKGNSYARAAAGQAALGAAGTATFPGERYARIARRRGKAIAQVAVARSIMIIAWHLLSGPAARYRDLGPDWHASRTSRDKKIRTHIHALKALGVTVAITDAEQQAA

SEQ ID NO: 134842 - protein, 368 aa, unidentified
MGLDVHAESIAVAIAEPEGEVRSLGTIANRAEAVRKLVRKLGPVEQLRACYEAGPTGYVLYWQLAELGVACDVIAPTLVPMKAGDRVKTDRRDAERLARSLRAGDLTAVYVPDAGSEALRDLVRAREAAKQDQLRARHRLSKFLLRSGQRPAAGVKAWTQAYLAWVRQLRFAQAAQESTRLDYLHEVEHMEERVKRLEQAIAEAVKLASPAMQEVVKGLQALRGIAQISAVTIASELGEISRFASPRQLMGYSGAVPRENSSGQRTQRGSITKTGNAHLRRIAIEAAWSYRLRPGVGPALRKRQEGVPEEIKEMAWKAQHRLHKRYMRLAAAGKDQRKIVTAVGRELLGFIWAIGTRAEAACKQKSAA

SEQ ID NO: 134843 - protein, 394 aa, unidentified
MPQQRKPNDLSRSLIALDMDTTLIAVVELSLSSWLVAGIVPGIERQPLKKLKTDENALLALFNRWRDEAVRSGHKISRIAVAFEAGRDGFWLARWLKARGIEAHVIHASSVAVSREHRRAKTDRLDTELLKRAFVGWLRGERDHCKTAAIPSLREEDAKRPSRERESLVGEQSRLVNRMKATLIRLGIRAFNPKLRYAEQRLETLRTPEGEPIPANTLAELKRDMQRRRFICGQIRSIEQERLERLERTPDTEPHAMVRLLARVTGIGIETADLLVHEVLLRNMRDRRAVARYGGLTGSPDRSGGTNREKGMARSGNARVRRGMIQLAWRFLLFQKDSALVQWYQRRTEHSPKARKTMIVALARKLLIALWRLAREGVVPEGVAMRPGVMNTSY

SEQ ID NO: 134844 - protein, 375 aa, unidentified
MKKTIYIGMDVHSKVTVFFVQDEEGKQIAQGKVRTTEEELRMAKEWIEGKVGRGVEIKVGLESGNMARYVVMILRRMGWEAIVIDAREVRAKASRINQKSDMRDAREICDGIRRGIYSSLVHIPGENIERLRGAISRRKHFVKMMTTQVNAVKRLLRVWGLGHIYRKLVTNTAWKNLLKKVDDKGDLFEYIKMHYEMWCIAKKNVECIEKMLVEIEKPFEEESRRLQTIPGIGWITALTAVAVLSDVSRFPSVKHSASYIGIVPQTYQSGDCDRHGHITRRGNSYLRSLLVESAHHASSSKHPLNPYIRVISAKRGYKVAVTAVAHRLIRIMVAMLKHKKDFDVGMLNVEKGTYTTTKTLYYKIKKPEMNYNSLE

SEQ ID NO: 134845 - protein, 453 aa, unidentified
MRLRAGLGLGPLCGYPLGYVRRSIIMSTHDTLFCGIDIGKARHVARIIDANGNILMRPTGFTNDAAGFALLRQRLDDTRRGKPLLIGMEATGHYWYALHEYLTAPPLAAPGQQGHPVVVLNPLQTAAQSRKQIRKAKTDKRDTGGIAVLMKNGDFRRTVIPGELASTCRQLTRLWFALGCQSTRLKQLAQSTLEWLWPEFEAHFSDPLCATARAVLRLAPSPRALLTVDLPTLTKLVETTSRRKLGEDLARRLLGSARTSIGMRRGSEGAAEVITTLLLQLDAGKPVRQRLKDKIEALGATLPACLLTLPGVSPISAVSLFAETDPISTFTNPDQLVAFAGLDPAVFQSGQYDAPRRHISKRGSSHLRRTFWLMSMSAILQPGPLRDYYKRRRAAGLHHKSALTAVALKLCRITWRIMTDQRDYTPEPPNPKSKVSPNAKPANASPKKRKLSR

SEQ ID NO: 134846 - protein, 342 aa, unidentified
MSYFAGLDVSLEETAICIVDNAGKIVREARIASEPEALVTFFAECGMAMERVGLEACSLTAWLTTALTEAGVPAICIEARQAKAAMGAMPNKTDRNDARGMAQIMRTGWYRAVHVKSPSCRSWRALLTARRMVLNKRRDVENGIRALLRESGLKVGTPSRQDFSTRVRALAADDPVLANLAESLLAVIEVMTAEADRLTKRVLDEVRVEPTCRRLMTVPGVGPLTALAFRATIDQPGRFRKSRDVGAHLGLTPRRYQSGETDVQGCISRCGDELARTALYEAAHSLLIRSTRWSALRAWGLKIAKRRGMARARVAVARKLAVILHRMWGDGSEFRWGKQAAA

SEQ ID NO: 134847 - protein, 295 aa, unidentified
MDGSTHNSNVSFVGIDISKSKFDVMILPEGTRLTCPYDSEGIEQLLAQLPKHDCIVVLEATGGFERRLAAELVEAGHQTAIVNPRQVRDFARGIGVLAKNDRIDARVLATYAQHVKLRLVEKRSEKQQELTALVVRRRQLVTLQNAESNRLEQTTVKLATQSIRQVLDLLRKELKKLDAKIARLIEADDDWRNKAELLQSVPGVGPGTSASLVAELPELGKLNRQQIASLVGLAPFSRDSGQFCGQRSIWGGRGSVRSALYMAAFNAKRCNPIIRAFFTAFFPSLIHCSAVPRPL

SEQ ID NO: 134848 - protein, 490 aa, unidentified
MPLLSKEAGSLSGLRYLGLDLAKRESQISVLDDAGVEVFTRRFQTTRENILQLASELRPTDTIALEVTTNAISIARLLKSNSKARIILSNPIRTKVIAVAKVKTDKIDARVLAELARANYLPEVWLPDEDTESLRQFFSDRRSLVERRTEMKNTVHSILHRNLIVCEQSDLFGVAGRQWLDSLIERSANESLHLHKLDRLRLGSLLREIDRQDLLVADMESIIASYIATRPALRAQLDHLLSVPGVSLIVGAGVLAAIGDVKRFASAKKLSSYFGLVPSTRQSGDLQARHGRITKAGRSEARWLLVEAAEHLRKAPGPLRQLYTRISRKKGRNVAVVAVARKLAELCWHLLTKHQDYIYSPPRLTLEKRARVRFLAKRKLGVKIKSATARTKSQPALYGTGLEGRRVKDKIVSLASAHAEQLYQAIVGDKDMKDLEHSPDQDNGPTNFDPTRPRMLEWQQILEKVAANLKVEEISKRRTKKKSSKEEDKD

SEQ ID NO: 134849 - protein, 357 aa, unidentified
MGKSKQLDFSGYDIFVGLDTHLKSWKTTVIVGDNVFKTFSQNPKPQILKNYLAKNFPNGNYYSAYEASFCGFTSHRELLDLGINNIVVNPADIPTTDKERKQKEDARDSRKIAKQLSQKDLKAIHVPDIDLEADRHLVRYRKTISKDLAREKARIKMQLYYFGIEIPIQFADKPYWSKKFMDWIEQVTLPTQSAKMVLNGHLDMARMLRNKQFATLKEIRTLALTERYNANFLLLQSVPGIGPLTAMILLTEIGEVTRFKTLDRFCSFIGLVPTTNSTGERESVGKITPRGNRTLRSALVESAWVAIRCDPALMLAYQKLVKRMKPQNAIIRIAKKLASRIMFVLKNKQEYVCAVVN

SEQ ID NO: 134850 - protein, 321 aa, unidentified
MAIPVQPLLIGVDVSKATLAICLGPDQPVQSLDNDRKSITRWLATLPAGPACIAAEATNTFHLDLVDLAHHAGHAVYLVDGYRLSRYRDSIGTRAKTDASDAQLLQRYLAHERDSLRPWSPPPQGYRTLQQLLQRRATLVRARVALQQSLADLPGLKQAAATLFRQLKRIDQKIQQGLIDTLAQLDWDADFKRCQGIEGVGPLTAAALTMSFHRGAFRSSDAFVAFLGLDVRVRDSGQLRGRRRLTKKGNPELRRLLFLAAMQAARSLSWKDFYQRHLDRGFSRIQALVVLARKLARVAFALLKNQTDYHPRYLKEACMET

SEQ ID NO: 134851 - protein, 312 aa, unidentified
MAQSFVGIDVAKNHLDVHINPCNERFRVANDPAGWAELIQRLRRRKVRLIAVEATGGYEAALVAELHAADLPVAVVNPRQVRDYARSLGRLAKTDQIDAEVLAMFAESIRPRRTPVPDEITTQIKILVTRRRQLRQMHQAEANHREHVVDTAIARSIARVNRAIEKELAWVDNEIQRVIHASPLWHRKLELLVSVPGVAETTAAAVLAGLPELGTLTRHQAAALVGVAPINRDSGTMRGKRTTHGGRAEVRKALYMPTLVAIRYNPTIRMFYERLLANGKAKMTALIACMRKLVLLLNAIIRDNQEWKPKCA

SEQ ID NO: 134852 - protein, 335 aa, unidentified
MLYAAIDIHKRAFQAAVLDPESGEVVEERFAADRESLARWAEQWRGRVEAVAIEATTGWRWVWRELVERGFEVRLAEPVQTRALLGRRRSAKTDRLDARWLARLLAKEMLPQSWIPPEQIQQLRDRTRLRKALAEDRRRWGQRLHAYLLHEGWPCSRSNLLRPPGLRWAAALQLCEHARLQVDSLLAVMAALQEQLDTVDGELRRFARGDERCQALQSIYGVGPILACHLLAEIGEASRFQRAEQITRLAGLDPVVDESGESRRRGHLAKAGSPHLRWALVEAAVHAHRPTAPDLALYRATRQRRDTTVARLTIARKIGKRAFHALRELELTAAA

SEQ ID NO: 134853 - protein, 355 aa, unidentified
MKRGHFIGIDVHCETCDVAVVTASGKLVERQRCATTIPALVEVLKTVPRPCSLVIEEGGMAGWLWRNLHSEVERMAVAEPRRNRLIAKDGDKDDPIDAEKLAQLYRGGYIKEVHQVASLEQAVFKQLVALYHHRVRQRVREAHRVTSLFRQHGVMIRERAYVATEDRPHLLARLPANPLLPELVTELWANYDACVEQEEAWRQRLVQAAREREVVQRFTELPGISWIRAATLYAYLDSPWRFRSKAALWKYLGIGLQRRHSGKGPEHLGVPQHTHRLLKWTILGAALSAVVQGTNPFADLYRRWLQQGLSSKLARRNVARRLATTLWGLWKNGNAYNPDWVVKAGSAHAAATVSR

SEQ ID NO: 134854 - protein, 316 aa, unidentified
MDQSPAASPGFVGIDVSKDRLDVHLRPSGRAFAVPRDGPGLDQLLVRLRAEPPALVVLEATGGFELTVAAAIAAAGLPLAVVNPRQIRDFARATGRLAKTDRLDAAAIALFAERVRPVPRPVPDAAAQALDELVARRRQIVEMIGMEQNRARQARAPKVAHTIQATLKVLEAQLAELDADIDDTVRGSPAWRAADDLLQSVPGIGGVTARTLIAEMPELGRLDRREAAALVGVAPVNRDSGQMRGHRAIAGGRTAIRNVLYMATLSAVRWNPVLKAHYQQLVARGRPKKVAIVACMRRLLGILNAILKAGTPWQSA

SEQ ID NO: 134855 - protein, 411 aa, unidentified
MSSSYRLAGIDVHKSVLAVVVSELSEQGEFTFQRRKFGVLDSDLKALSQWFQELEVREAVMESTAQYWRPVWRALEGQCALHLAQAQSNRAPRGRKGDFRDAERLVRRHVAGELILSFVPDPRQRLWRTITRTKYQLSRDRVRLQNQLEAHLEDAHLKLGACVSDLLGVSSLRILSAIAKGEKDPTVLALLGEENLKATAEQLADGLQAVSTLSPLHRQILRLFLERVELIDRQLQTLHQQIAHALHEYQQAVTRLAAIPGLGIDSAQQIIAEIGPGAAKFDSAEQLASWVGVCPGREESAEVSKSNRSPKGNRMMRRVLSQAANAAVRSKGSIFQLHYRRLVSRLGHNKAIWAIAHRLCRIAWILLHRGVDYIEHGAERNAAALRRRTTRQLRELRALGYQILPPATQCA

SEQ ID NO: 134856 - protein, 333 aa, unidentified
MSIHAGIDIAARSFVLAWREGERQAGTREFTQSPAGHAEAVELLTRLGPERVVLEATGVYYLDLAWALAEAGLPVAVINPRRFHHFAALRAAPSKTDRIDAALLAEYAERMSPPLWRAPNLARRALRDIGRQINRLTHARTQAKNRLHALEATQSTPRLLIRDERGGIATLDRRIKRLSEAAVALIEAEPSLHRQLTHLQAAKGIGLASAVALLAELCVMPEDLKAKQLARHAGLDVRLTQSGTSVDKPGRLSKSGNAYLRSALYMPALSAARHDPHARAFYQALIRRGKKKMQALCALMRKYLTGLWACIQTDEPFDSSRLFSSEHLQQAGQ

SEQ ID NO: 134857 - protein, 319 aa, unidentified
MNTTPCFVGIDVAKHTLEIARTASKESKESWTVPNNPEGFRAIVTRLRRWKPALIVMEATGRLEIPLALTLGVERFPVAIINPRQVRDFAKALGILAKTDRIDAQVLAQFAKTVQPEPRPLPEAAARELAQRLARRRQIVGMIVTEKNRLDRADPDIRPEIQRHLDWLGKELDQINHDLEQKIKTSPLWRSNDQLLRSVPGVGPTTSHTLLIGLPELGQLSRQQIAALVGVAPRNRDSGSFRGKRTIWGGRAQVRSVLYMATLAATTFNPVIREFYQRLVREGKAKKVALTACMRKLLTILNAIIKEQLPWRKPLIQNM

SEQ ID NO: 134858 - protein, 356 aa, unidentified
MSKTRVKGASVMKKVYAGMDLGSKETAAVVVDSLGRMVDSAVFRTSERNLVAFASKHPQARVLMEEGEMAAWVRSTIKPHVASVVVCDPKRNAWVAKGANKNDRVDAAKLAELNRMDSFSAVWHPDDEDIAGFKVLVKHYDETSRRLAAVKCQIKAGFRKQGVIPTGRAVFASGRNEALSRVENTLAKIAIEQDYELLDYLTGAKSAARKSVVSASRRFPVVSRLKEIPGVGPILAARFVAYVADPHRFNRRTLASYSCLAVVKRSSDGSPIGREHLSRAGNSALKDVSRTAFERAMATRRPNGIKEFCASSLKRTGDRNKARLNTQRKILALMLAIWRDGTRYSDELVSGAFPGA

SEQ ID NO: 134859 - protein, 370 aa, unidentified
MAEPTTLFVGLDVHKESIAVAHASPDRSSDVVYVGQIGTRDADLDKLLRRLHSHASTLVVAYEAGPCGYGLYRTLTNKGVSCLVVAPSLIPKKPGERVKTDRRDAAQLARLLRSGDLTSIYVPTVEDEAVRDLARAREASIGVLKDAKLRLKSFLLRHGLNYSGRATWNAAHLRYLAKVVCPTPAQQIVFQESLRAVSEQTDRVRRLEDELVEIAATWRLRPIVDAFQAMRGVQRHTAVTIAAELGDLTRFDTPRQLAAFVGLIPSEYSTGESRRLGPITKAGNGHARRALVEAAWAYRYPAKVSAHLQQRIERCAKPIQEIAWKAQVRLCRRYRRLVARGKNPNVVVTAIAREILAFLWAIAREVPIGA

SEQ ID NO: 134860 - protein, 376 aa, unidentified
MSKTTRHVECSADRTMFVALELGACSWRLAVGTDRQDGVREYAVKAGDLGAVWAKLERARAHWGLAASTPVVSCYEAGRDGFWVHRALTARGIRNLVLDATSIERDRRAKVVKTDRVDAARLLELLQLGCAGRKRLREVRVPSVEEEDARHREREYSGVQAARTAVTNRMTSLLVAQGIRLRMGRGFAAALAQARTGDGHALPPQLHGRLTRDWAAVEALTARLAGLEAARHQTVRTDAGAAQTRALVQLRGIGERSAAVFVTELFAWRAFRNGREVGAVTGLAPAPYQSGQQARDQGISKAGNWRVRTMAVEIAWCWLQFQPESALARWYQGRFGGGSARQRRIGIVALARKLLIALWRYVDAGVIPDGARLKTA

SEQ ID NO: 134861 - protein, 346 aa, unidentified
MEHYVGLDVSLKLTAICIVDRTGKIEREGVVASDPETIAAFVKSHAPHVARVGLETGATSTWLWTELNKMGLPVICIDARHAKAALKLQINKSDRNDAVGIARIMQCGWYKEVRVKDLDSHAIKALLVSRALLVKIKRDIENQVRGLLKNLGLVIGQAKMNVFAVRATELAEARPELAAAIEPLLKAREAIERQIADLDRKVMRLARNDAQVRRFMTTPGVGPITALCFLATIDDPTRFKRSRSVGAYVGLTTRRFASGEIDWTGRISKCGDKMLRSYLYEVANVLLTRVAKWSALKAWGVRLAKRTGLRKAKVAVARKLAVILHRMWIEGTEFNWSSKEATNQPA

SEQ ID NO: 134862 - protein, 356 aa, unidentified
MSQKLDSKVAVIGIDIGKNSFHIVGQDRRGALVLRQKWSRGQVEARLANLPPCLIGMEACTGAHHLSRKLQALGHDARLMPAKYVRPYSKGEKNDYRDAEAIAEAVQRPTMKFVATKTADQLDLQALHRVRERLVSQRTGIINQIRAFLLERGIAVRQGLHLLRAELPGILGTRTDVLSPRMLRVIEDLAGDWRRLDERIEGLSGEIDALAHHDKGCERLMTVPGIGPIISSAIVAAIGTGDAFSKGRDFGAWLGLVPKQMSTGDRTILGSISRRGNRYLRKLFVQAAWVVLVKLGPEQWERYGLKSWIEAAKKRLHHNVLAIALANKLARIAWAVLHKGRAFEYVKTNATASRSA

SEQ ID NO: 134863 - protein, 334 aa, unidentified
MNKIVCGIDVSYKTLEIVFGKGNKYSKSKTFTNDNKGHKVLIKSLNKKKTTHVCIEATGNYHLDISLAINKVKEIKLIVLNPRISNNYAKALNQRAKTDPLDAYVLAHFAQSMNHISWQAPDKTMFAIRACGRRLTQLTKDKAKLKNRLHAFGVTEFTPQIVIDDLKSAIEYLEKQIKNLIKGALEIILNNQQAKEIHKLITSISGVADKTAIKLIGEICVLDPEMKAKQLVAHAGLYPTTVTSGTSVNKKSWLSKAGNKYIREAIYMSALQMSYRNPNVAAYYQHLIKDNGLKKMQAICAIMRKLLMSISCMIRDKTEFNETKFYKMPMTNKN

SEQ ID NO: 134864 - protein, 377 aa, unidentified
MTQFPVSTSNEQSIYAALELSKNSWLLAIQVPGRDNPSLYPIGGGNAEGLMAKLDAARNRLAKVSGQTPKVTLCYEAGYDGFWLTRFLDQRGIECLVMEPASLQVNRRARRVKTDRIDVENILHTLIAWCRGERHVCSMVVIPSVEEEDLRRTHRERNRLVRERTAHINRIKGLLFAQGIRGINVMKDYKTLAPAELITGNGRPLPKRLGREITREIERLALVQEQLVEIEHERDQAPTPCAATERKRHDLLRLNGIGPTISAILAREVYYRRFANRRQVASYIGLAPSPYDSGDGRRSQGISKAGNSLARYSLIQAAWLWLRHQPNSALTQWFHHRTEGQSKRVRCIMIVALARKLAIAFWRYLETGLIPEGAVVK

SEQ ID NO: 134865 - protein, 366 aa, unidentified
MKKNSTVAVGRKQIFKQARLTIGLDLGDRTSYYCILDEAGKVIWERNMPTTSNGIRQAFGRIARCRIALETGTHSPWVSRQLAQMGHEVIVAHARKVRLIGESSRKDDQLDARTLARLARIDPGLLGPVCHRSAQAQIHLTVIRARAALVGTRTALVNAARGLTKSYGERLKKCGTEQMNGDSSQGLSRELRDALDPLLRGIELLNERIAEYDRRIEQIAEEVHPEVARLKQVKGVGTLIALTYVLTLDDPHRFRCSRDVGCYLGLRPGRRNSGQSEPQLHISKEGDRYLRTLMVQGAHYILGPFGQDSDLRRWGLKLGEHGGKNAKKRAVVAVARKLAVLLHKLWVSGEVYEPLRNNHKVESAVA

SEQ ID NO: 134866 - protein, 458 aa, unidentified
MSAPADNREHLQGLFQHPANCLPSVCADWFSIEVVTRRDLAGAWFKRGAAVRAFRIRSARPGLSLVSDREAGLAVMIGVDPHKGSHTAVAIDGDETQLAAVTVRATRRQVSELLRWAARFEERTWAIESAGGLGYLLARQLVAAGERVLDVPATLAARVRVLGTGRSNKNDSNDALSVAVAALRAPRLARVGRDEHSGVLRLYAKRNSDLGRARNRTACRLHALLAELVPGGIPKEINAASAERLLATVEPVTPVERARHGLALEHLEDLRRFDEQMRASKSRIAAAVTESGTTLVELFGVGPVVAAMVLGYTGDVTRFRNRDHFAAYTGTAPIEVSSGGRITHRLSRRGSRQLNHAIHIAAITQIRFTHSRAARSSTAKSPRGKRNEKQSARALKRRISDAIYRQLLLDAATTGPGGQTGTTLPSSVTGLTPQQPALRKTTPGPDPTLEPAKRHQPR

SEQ ID NO: 134867 - protein, 322 aa, unidentified
MNPKNYGGIDVAKKNFVIGIYGQDKTKTEANTPKGHAKAVEYLQKHNVDLVVLESTGGLEVPLANALHAADIRVVIANPQRTHQYAESFSLGKTDHLDAKMLADYAQALDSRKMADDMCYAPPSEEALALEALVKRRSQLVEMRKMEKNRLEQTHASQKASVVAMIKHLGELIAALDKEIDQSNRGGFNGKGEILSEMKGVGRITCATLLSMLPELGKVPHKRAALLVGVVPPPRQSGEKERKSGCVGGRMVVRNALYMAALAATRSEPKIKAFYEKLMSRGKAFKVALNACMHKLLRILNARMRDYLASLKETEESESQSA

SEQ ID NO: 134868 - protein, 364 aa, unidentified
MFTERTSVGLDVHARSVAAAAIDGVTGRVVQSRLTPSFEHIRSWLAERAGPVAVAYEAGPTGFGLYRQLTAAGIRCEVAAPSKLQRPAGDRVKTDARDAVLLARLLRLDDIVSVAVPTPEQEAARDLVRAREDCRGDLMRARHRLSKLLLRHGIVYYGGAAWTGKHDTWLRHEALAQLTGRATQLAFDCDYEAVQFVKARRDRLDTAIEQMAAGSAFTACVRRLGCLRGIGTLTGFALAVEIGDWTRFTGAGIGSFVGLTPAEYSSGSSRTLGPITKTGNSHVRRLLVEAAWHHRARYRPGKTMHDRWALAPIAAQARGDQGNRRLHQRWLTFLDRRKRDTIANVAIARELAGWCWSLATLDQP

SEQ ID NO: 134869 - protein, 412 aa, unidentified
MDLTPMHKRVIALDVHQAKITACALVEHDDGRVEITKRDFGAFKRDRRALAQWALEIAPEVVVMESTGVYWKSPFAALEAVGIIAWVVNARHVKAVPGRKTDMADAQWLATLARAGLLRASFIPPVQMRQLRLVARQRQKLVGMCSAEKNRLHKVLVDAGMRINVLVADIHGASARAMVKALIAGKPMHEVLDCKGRLRASRDELFEALSTEQFSAAHRFVAQEIMQHIEQIEQRIVRLDQYLLEGLRPWQAQIRLLQTLPGIDEQGAAMLLVEIGADMSVFGSAERLASWVGICPGNNDSAGKRKTGRIRKGNAWVRRLLCEFAQAAARTRCALKAKFDALAIRKGRKKSVVALAHKMLRTVYAMLTNGTHYQDKEVDYEALNVQRNAPRWIKMLRKHGFIATPTPATATA

SEQ ID NO: 134870 - protein, 350 aa, unidentified
MKIVGCDFHPRWQQIAVFDKETGEITEHKLMNGDGEAERFYAGLASAALVGVEACGNSQWFLDLLERLGHEVWVGDAAKIRASYVRKQKTDRRDAEHILRLLIEDRFPRLWRPTAGQRDLRQLLIHRHKLVEIRTRVKNGLQHLAMNQGVVKPLRLCGVRGRADLAALPLEGWSARRREDLLHLLAELDAQVVELDRAVEQAAFADAQARLLMTQPGVGPVTALAFVVTVGDVRRFAHSGQVASYVGLIPREHSSGGKQRLGSITKQGNRFMRQLLVEAAQTACRVDEGFRKEYVARCHHKPKGVAKVAAARKLSVRLYWMLRQEVGYPAIARIESSSGVPLAGRGRDFD

SEQ ID NO: 134871 - protein, 348 aa, unidentified
MEIIGLDLHKRESQLCSKADDGTITDRRIATSRDRFTAVFAGRPPARLLREASTESEWVARHLESLGHEVIVADPNYAPMYANRSRRTKTDKRDARTLMDACETDAWRPAYRLSEARRHVRAELAVRDALVRTRTRYIALAKALVRRDGLRVPTSASAWVPTRIAELDLSPTLTTELAPLFAVFAPLNAQIAVADARIAAFAKDDPIATRLTTAPGVGPVTASAFVATIDDITRFRTAHELEAYLGLIPCERSSGEKRQLGHITKAGNGRMRWLLVEAAWTILRSKSPNTAALRAWTVPIAQRRGKRIAAVALARRLAGILYAMWRDDVPYDAHQLRPRTPEAPPRAA

SEQ ID NO: 134872 - protein, 350 aa, unidentified
MIIIGCDYHPGFQQIAFVDIETGDCGEQRLPHREEAEKFYRDLAGQGKAVRVGMEASGHARWFERLLAELNFELWIGDAAEIRTKRVRKQKTDRQDAELILKLMLEDRFPQIWVPSWENRDLRQLLWHRHRMVQARTRIMNQLQAVALNEGLRCKKRLWREAGREQLEAFRLAPWASQRRRDLLELLDRLNPTIAKLTQAIEQEVEKCPEAQRLRTHPGVGSLTAMAFVLIIGRADRFQCGKQIASYLGLVRLEESSGNRRRLGHITKQGNSLLRFLLVEAAQVTVRSLPEWRGKYFHLAMRRGRKIAKVAMARKLAVRMYWMMRQGWDYEQLKKFGSHAGQPGNRHGVK

SEQ ID NO: 134873 - protein, 346 aa, unidentified
MTHSTTVGVDLAKNVIQVSVVSARGKELPNRSFTRRKFAEFLSKQKPALVAFEACATAHYWARAAERHGHVARIIPAKFVAPFRQGHKTDSNDALAVAEAARRPSIKEAPMKTVEQQGLQAIHRSRQLLIQESTALSNHLRGLLMEFGVVIPQGFASLLRAVPEVLEDGENELPDMYRPTLHRMYTRLLELREHIEAMTSEVEVLVKQHPICSRLTALEGIGPIGALLLYATLGSGNVFSSSREFAAYLGLAPRQYSSGGKTNIVGLSKKIGNSRLRSILILGARAYTYRLKEPKSSKDRWLKDVIDRNGHSRAAIALANKNVRTAWAMVTQGTAYQRRGQLKVAA

SEQ ID NO: 134874 - protein, 391 aa, unidentified
MGVQRRVVIGMDPHKRSVTIEVMEADEQIVGHGRFGTDVAGFAELVGFAGQWADRVWAIEGCEGIGRHVAQRLLAVGEQVVDVPAKLSARMRMFATGQGRKTDDTDAHSIALVGVRISGLQPVVSDDQLEMLRLLVDRRRRIGQEHVTKICQLHLLLLELVPGGAKKDLSAAQARKILAGTRPKDEVGKLRKRVALELVVDLERIYARKKQANKELITLLKTTGTGLLDLHGIGPTGAARLLVEVGDITRFPNRGHFASWTGTAPIDVSSGDRQHHRLSRGGNRQINAVLHMMAVVQLRNRTEGRAYYDRKLATGKSPNEAMRCLKRRLSDIVYRALLDDYVTAKATGPGGHRGATHQSSAAGSHPHTSTSDKPLPGPVTTKPTTTLAKAS

SEQ ID NO: 134875 - protein, 284 aa, unidentified
MSIFAGLDVHKDKCHGVILDEDGEVLKDEEFENSLSGVRSFFQGFLYADAVMEASYSWRPTYERLEEIGIEPKLAHPHEVEAITSSETKTDSIDAKTLAHLLRTGFVPEAYVPPKDTRELRDKTRLRAKLGDERTRMKDKIRAELEKYRIDLDRNPFTKSGKEKLKDLGIESVDHYLAVLETIEDRIEMLEEEFEEIVEDCEEAKLLKTIPGIGDFSSLLILAEIGDINRFPDPEKLCSYAGLVPKVYQSGDFKRLGSIKKDRDKFLQWILVECIWIADFTILP

SEQ ID NO: 134876 - protein, 347 aa, unidentified
MEKASQAEVQVFAGIDVSARELSVAVQCGIKEGIAITTFPNKAAGHQALLAYLLRAKGRARVCLEASGNYSLDLALTLQAHPQVEISVVNPRRARRFAESLGERSKIDPVDARVLCEYALRMPWVPWVPPSLAALRLRSITRAIEDLVAMQAQEKNRQHALLASDALPALLIRELEQHLRYLKLRITRLRREALRLIARNPELNRRFHLMLTTPGLGETSSLQILGELVVLPETLDARQWVAFSGLDPKQFSSGTSVEKKPRISRGGNRHLRRALYMPALVATRHEPFLRDFYQRLLRRGKAPLQGVVAVMRKLLHALFAMFRRDEAYDGSKLCPAEFARPTAVVCV

SEQ ID NO: 134877 - protein, 316 aa, unidentified
MFIGIDVAKSELVVATQPGSEPWAVPNDESGVRALVARIASLRPTLIVVEATGGFETLCVAALGAAGLPIVIVNPRQVRDFAKATGQLAKTDRIDAQVIALFADRVRPEVRALPDEAARNLEAVITRRRQLIEMLIAERNRLGLATGSHQRPVKQSLKKHIAYLERELKMTDTDLAQLVRESPAWRDKDDLLQSVPGIGPVVSHTLLAELPELGQLDRRAIAKLVGIAPMSRDSGVWRGRRTIQGGRATVRTALYMAALVATRRNATIRTFYQRLIANGKPKKLALIACARKLLTILNQLIRTATPWTDTPSPIPV

SEQ ID NO: 134878 - protein, 427 aa, unidentified
MKELTKVCGIDVHKMFLQVCILSRSGEYSQHRFHNTPHGILALKDLVLAEGCEVVAMESTGIYWYRLFLELESDIRTIVANARQIKSIPGRKTDMNDARWIAELALHGLIRPSRIFPRQDREFRDLTRNRETLVRTRTTIKNRIHKILDSAGIRLNVALKDIFGKSGRHLLAGIAEQKDLEATLATIPSPLILRRADQLREILQDSPLSPTQLHLLTTQLHLLEAIEEKIAQLDALILASLEDSQMEALPICTSVPGISITAATTILAELGDVRDFSSADRLVSWAGLAPSVYQSADTLVCGKITKQGSKSLRWILVQVAQAASRTTDTVFSRFFRRIAFRRGRNKAIVALARKILTILWHLLVNRELYVEPGVQRVRKLPARATLSKISIDDATEILLNAGYRIYSPESQKSAGKGVGAKRATHPL

SEQ ID NO: 134879 - protein, 371 aa, unidentified
MGKHRLAFVAFDSAKNKHAVAIADGGRGAEVRYLGEIDNSPDAVRKLVAKLTRQYERLHFCYEAGPTGYGLHRQLTELGHVCDVVAPTMIPKRSGDRVKTNRRDSVALVKLLRAGELRAIWVPDSVHEAVRDLTRARATAMVDLKTKRQQLLSFLLRHGRGFPDGRNWTKTYERWLAKQTFAHPAQQIVFQDQLEAITTAQARLAALEQQLREIVPTWTMAPVVAAYQALRGVSFLVAITFVAEVGDVRRFATPQQLMAFLGLVPSERTTGDTIRRGSITKTGNHRARRVLIEGAWTYRFSARVSETLRTRLKDLPSSVRAIAWKAQVRLCARYRRLIARGKKTPVVTTAIARELSAFLWAIGQQVAPQTG

SEQ ID NO: 134880 - protein, 324 aa, unidentified
MTTTVQHPVFIGIDVSKATLEIATRPASQPWQMDNTLEGIQQLVEQLRLLGPRSIVLEATGGYETAAATALAAAGLPVSIINPRQGRDFAKSLGKLAKTDRIDAALLAHFAEAIQPEPRRLPDEQTQQLQAILVRRRQLIGMLVAEKNRLSLAHPQIQGPLQKHIAWLRAELDELDGQLHDLVKDSPLWHEKDDLLRSVPGVGPVTATTLLAELGELGQLNRKQIAALVGVAPFNCDSGQMHGRRAIWGGRACVRNALYMATFSAVRHNAVIRAHFEHLQKEGKIFKVALVACMRKLLTILNAIIHNGTPWNPDRAMPKVCRMA

SEQ ID NO: 134881 - protein, 314 aa, unidentified
MKSQQEINVGVDTGKTQLDIFIRPIGDYFTVANDANGIKEAIKRIKKYKPTRIIIEATGRLEMPFVCAAAKANMPTVVANPLHVHRFASSTGKLAKTDKLDAQMIAHYGEALQPRATEIKSDNIILISDLLSRRSQLLEMRTMEKNRLSILPKVLHTQIKQHVQYITKSIVSIEKKLDKLINATPQWQELMTILLSVKGVGKVLAYTLISNLPELGQLNRKEIAALVGVAPMNKESGSYKGKRRIRGGRYPVRTILFMAMMSAIQSNTKFKAIYTRLVQAGKPKKVALVACMRRMITILNTMVKNGTVWDEKLA

SEQ ID NO: 134882 - protein, 361 aa, unidentified
MEHTTIAVDLAKSVFQVAVSHKAGRVDAERRLSRDRFLEYLAQQPPATVLLEACGSAHYWARRLQPLGHTVRLLPAHDVHRYVRRNKTDQTDAKALLEAGRNDEIYAVPVKTIEHQAIASLHRLRSMWLATRTARLNTVRGLLREFGITIPVGAQHVVPRVRALLADSPDVPDLLRPSLASACDEIETIETQMRAVERQLTTLARQRDDIRLLQTVPGGGLLTATALVALVGDIRRFPSSRQFASFLGLTPREESSAYRRQLGAISKQGDAYLRMLLVHGARAVLVHAKRAGQATAFQLWARATQARRGHNVATVAVANKIARIIWAVWVHQRPFAADYRDAETQRPSITSSLQEDCTELN

SEQ ID NO: 134883 - protein, 415 aa, unidentified
MRVHRKCCGLDVHKKMIAACLLTEDAEGNSVAEKRLFGTMTRELHALAQWLCAAQVTAVAMEATGVYWMPVWNVLEPYGLQLLLINPEHYKAVRGRKTDLKDGTRIAELLQDGRLEGSYVPPVAIRVLRDLTRYRIKLVQYQSALANRIQKLLEQSNIKLASVVSDALGVSAMAMLRALAQGETDAVRMANMAKKQLRKKIPQLQLALEGCLLPHHRLLLREMIEDLDHVGAKITRIEATIEQQMRPFQEAVNRWLTVPGIKHRLAWTLVAEVGPTVEAFPSAADIVSWAGVCPGNNQTAGKRKSGTTHAGNPWLRRALCEAAWAASKSRGTYLQAQFRRLAALRGPKRALIAVANSILTAGYYMLQRATTYQELGPDYFDKRNTVRATHRLVKRLEALGHRVTLEPRFIAAPSS

SEQ ID NO: 134884 - protein, 354 aa, unidentified
MTTIQHKEIAHEAKPDLFAGIDVGAEELILVIRKNGKPFDPQKFTNTPADRIRLVKKLVKLPGIIVCLEATGVYHFDLSLALHDAGALLMVVNPKASHNFAKVLMKNSKTDAVDANTLAEYAARMDFVAWTRPSNETIALRSFARRIDALTCQKAAAKNHLHALTATSETPKAVLKDVKLAIAQLEKRIDSLTAGALILIGKHPDLERILDLLIGIKGIGNTSAIALMGELLLLPPDLSHREWVKFAGLDPRAFDSGKSVHKKTRISKAGNRHIRSALYMPALSAKQHDPHVKAYFQHLVANGKKPLQAVCAIMRKLLHAIHGMLKHNEPFDVSTLNSMESPTSNLHGLRFLSN

SEQ ID NO: 134885 - protein, 424 aa, unidentified
MAGVVIGIDPHKGSHTAVALDVHEKQLGRLRVRASSRQVDGLLEWASGWPRRRWAIEGARGLGQLLAQQLIASGERVLDVPPKLAARVRLLDSGQINKNDPNDARSVAVAALRAHELPELAAEDQAMVMRVWARRYHDLARLRTQVVCRLHAVVCELVPGGVRKYLRASQATDVLDRIVADSPVAQAKLELARELVADLERIDAQRREAKGRTARAVAATRTSINDVYGVGPIVAGTVLGYVRDIRRFPTRDRFASYNGTAPIEVSSGDRKIYRLSRRGNRQLNHAIHMAAISQIRHHDSEGRAYYEKKIAEGMTGKTALRALKRKISDALYARMIDDARRLAAKDPGGHTGNDSASSAAGSHPETPALRKSHSRATANSKTGTGQRPLALRPAPDRRRTSRRAAGVQVEPRPGPHRGRRQDRP

SEQ ID NO: 134886 - protein, 368 aa, unidentified
MGTLYIGLDVHKLSIAVSTAEDGRDGAVRFLGEIRNTPTDVAKLAKRLARDGSQLEFCYEAGCCGYGVYRQLTELGHGCMVVAPSLIPRKPGDRVKTDRRDSQKLAVLHRSGDLTQVWVPDPVHEAMRDLVRARLAAVGALMRARQQLLSFLLRHGRIYEKGKPWTQRHRVWLAAQVFEQPVHQIVFQDYVEAIFTAQDRRDQLVARITGLIPSWSMGPVVEALRGLRGLETISAVTFIAGIGDLSRFETPSQLMAYLGLVPSEHSSGDHVRRGGITKTGNGEARRMLVEAAWSYRYPPRVAQEKVEVLVRLPKPVRDIAWKAQVRLCDRFRKLTHSGKKPTVVVTAIARELAGFVWAIGQQVKPAAP

SEQ ID NO: 134887 - protein, 444 aa, unidentified
MSQIIFERCAGLDVHKKTVVACRRRLTDRMEVEFETQTFGTTTEELLTLSDWLAEWDVHHVAMESTGEYWKPVFNILESNFETWLVNAQHVKHVPARKTDIKDAEWLAQLMQMGFLKPSFIPERPQRELRDLTRMRQTLVQERARVVNRVQKVLEDANIKLASVVTDILGVSARRMLDAMIRGEADPKALANLAKGRLRNKLPELEKALIGRMTDHHRFLLRRHLSHIDFLDEEIQTLSQEIAQRIEAMSDASDAKPPAEQGDGQDAQHNHGDQGGLLTWNQAIELLSTIPGIDRRIAEMVLAEIGLDMSRFPSARHLAAWAGLAPGNHQSGGKRYSGRTKKGNRTVRSILTQAAWAAQRKKDSYLAALYRRLVRRRGKKRAIVAVAHSMLVSIYYMLTRQQPYQDLGPDYFDQRRKEAKVDYLMRQLRRLGYQVALQLVAQAP

SEQ ID NO: 134888 - protein, 341 aa, unidentified
MNYYVGIDVSLEASSLCVVDANGKIVREGKVASEPDALIAWLKGLKLELTRIGLEAGPLSQWLVAAMRQAGFAVELLETRHVCAALKTMPVKSDRNDARGIAQLMRLGWFRPVHCKSMAAQETRALLTARKLLQTKLHDLELSLRGILRGFGLKVGPTTPARFEERIRELVAGHPRLEVIVKSLLAARGALRREFDHFEKQVRDAARCDTRVRLLTSIPGVGAIVSLSFTAAIDDPARFKSSKQIGAYFGLTPTKYQSGETDIDGRISKIGDASVRAALYESAHIILTKPLKGCTALKSWAMKIAKRSGMKKAKVALARKLAVIMHRMLADGTSFRNAAAV

SEQ ID NO: 134889 - protein, 386 aa, unidentified
MPRYIGFDAHKSYAYVAELREDGERLDYRVALPDGLPGFKQRLGADCQLVLEASTNTFRLVDELKPHVGKIVVTDPAQTRGAISRPATTDRNAAFALARLLASDFVRPVWVPPQEIRSLRNLVELRVRLTRQQATSVNRIRAMLRQELVPGRPTLVEGEVRAKIGDDPTLQAYCSSLFRFKDLVRAECEQVDSVLHAWCRESKDARLLMSIPGVGPLVAACVVAQVGDIKRFSSARKLCSYAGLVPRVHSSGQTHRSGSISKMGRRTLRWAMGIAAMSATRADAPLAKFKENLCERRPKAVAMVACARKLLASVWRVWTTAKPYDDQDAERYCRKLARLDRGKDCDEQHPDSESREDVEQKPKAKGRQRGRKNENREPGDPTPTTL

SEQ ID NO: 134890 - protein, 355 aa, unidentified
MTIVAHAHPFVIGVDTHARNHVLAILAATGEVIDTGQFPTTAAGLARAIAWAGRRTGGDLATLWVIEGVASYGAGLAASVARAGYEVVEAARMNARGNRGLGKSDPLDAHRIAAAVLPLDTSQLRRPRLAEGARAALRVLIASRDHMTAERTATVNALIALLRVVDLGIDARRPLTRTQIATVARWRSRDEALGTATARAEGIRLARRVVELDEQIAANSARMSELVHASQAAPLLEKCGIGPVAAAICLTAWSHHGRVRSEAAFAALAGVNPIPASSGNTVRHRLNRGGDRRLNRALHIAILTRMTHAPETRAYVERRRTQGRTTKEIRRCWKRYLARQIYRILNAAEPAISSA

SEQ ID NO: 134891 - protein, 405 aa, unidentified
MNAIGIDVSKGKSMVAAIRPGGEVIILPFEVEHTASELSALAKRLKSLDGETRVVMEYTGSYYLPVAYALHEAGLFVSAVHAKLIHDSGKDESIRRVKTDKADALKIANYGIEKWVKLRQFVPESDARRMLKLLSRQYNKYGKLKTMLKNNLISLTDNTFPGVNELFSSPPRPSDGHQKWIDFVTHFWHCECVCGGSVGMFAERYRKWCKRMGYRFNPTKAEDIYLSACGHFGVVEKNQFSKSLMIQAAAQLNAVCETQAAIAREMKHLAQMLPEYPVVSAFFGVGDILAPQLMAEIGDIYRFKKKGSLVCFAGLEVPVFQSGKFQAKEVPVSKKGSPHLRKALFQVMTCILQNAPANDPVFQFLDRKRAEGKHYYSYMTAGCAKFLRIYYARVKEYLDALDNVA

SEQ ID NO: 134892 - protein, 361 aa, unidentified
MKKLAQHLIAEVPRKRGQVELTIGIDLGDVWSHSCTLNQHGEVIDRGRFRTTPKAIEKWFVDVPHARVAMEAGVHSIWISEQLQELGHEVIVANVRELRAISHSDRKSDQVDAEKLARYARLDPNILRPIAHRTVEQQQALTLIRARALMVRLRTAGINAVRGLTKACGHRMPASATPCFAQRSMAAMPPGLGQALGPVLQQIAEMTSKIKQYDRQIQQLSQTEYPETQALLKVHGVGHLTALTFVLTLGNKERFERSRDVGCYLGLRPMRSQSGEHDPQLGITHAGNAYLRSLLIECSNHILRPHGKDSALRQWGLHLAGRGGKQARSKAVVAVARKLAVLLHRLWITQEPYMPFYATAA

SEQ ID NO: 134893 - protein, 387 aa, unidentified
MVNNSLIGKSGDGEASVASRATTSRRQEIDRVQVFKAVAEQDPRRHRGTSPNSRLNRRRPTRSASSHLQVREKTMSESVYVGIDVAKDTFSVACCPAVLKTCLPNTPNGHRRLCQSLKNHNIALVVLEATGGYERPIIAELLDAGLPVVVVNPRQVRDFARGLGQLAKTDSIDAQVLAKFAQLVQPAARPQKTAQTSDLAELVHRHRQLNDLRSQESNRLSLVHHREVRKSVQKMLKMLDRQIAEIDELISRHIRNNDNFRQKDRILRSTPGIGPQTSAMLLAQMPELGSLNRQEIAAPAGLAPWDCASGKWLGKGHIWGGRKDVRSILYMAALSARNCNPVIRQFAQRLEQQGKAFKVVITACMRKLLIILNTMIRNQSLWMWFDT

SEQ ID NO: 134894 - protein, 482 aa, unidentified
MKKKNIFQNRSQQLLRLFEKAGNRLKMMCVPIDYAKKDHMVMFCNGYGDIVRKPFSVKNTLEGVKYLLDQVMRSCRQRHIKKEYVFFGGEDVNSYAENFANALRTKGFLVANVNAHDAKKQRETLQASTDRIDLMGIAMMLLNLRAKCSPAQDGIYRNLRTLVRHRKKLVVMKTEVKNRVHTLVDRLFPGFLNEKNTGINAFSKSSLVLMEDRFSAQQIRRRQKSTLIKILKRCATPDAEKIASKLHSYAAQVITTPNEYAATLQLSLEHHIKHFRCLQENIDQLLSEIALLLAQTQGAFLTSIKGVGIVLAAGVSSEIGNPFEQKPLNNLTSYCGIIPRVKQSGGLEGHTHTGRVSKRSNHILKDYVVQSALQMGLRGPQPLLQDYKRREAAGQHADFGIGRRFLRMAMCLMRSSQVYLPPTLRSPKTQMQERAGYYLTTWPLFRDKWKKAQAHQAAFAKDQPLGQWRQMVQELYDIKLKL

SEQ ID NO: 134895 - protein, 394 aa, unidentified
MIYAGVDIAKTDHVIGAVDERGAEMCRPMPFKNTEAGLERAVAWLEGLAGSPSDVVVGMEATGHYWMACYSFLVARGYSVAVINPMQVKAVRKLKKLDKVKNDRIDAWLIAETLRIGQYDETRLATDEVASLRSLSRYLQSLRGMAAELKTQCVCLMDAHFPEYAGIFSDMFGAGSRAVLSKSPLPFELARRRADSLARDIAEASRRGGKSAGYAARIKAAARSSIGVRLGQEAASFQVKSLIRQIEFADSECAKVEARVRALLDEVEPLVLTIPGVSYATGAQIVSEIGDVSRFRNASALVSYAGLNSSVSQSGQFDSGGGPITKHGSPYLRRALWLAANRARQYDPGLRAFYDKKRAEGKPHRVAVTAVARKLCHIAFAVMRDQVPYDPGRE

SEQ ID NO: 134896 - protein, 334 aa, unidentified
MKQVNQIGVDVDSEELVCAMQRGEQRLPLARFANSAAGHKKFIGWATKGARPARVCLEATGVYGLEFAFALHRAKNVEVMVVNPRAIKDFARACMQRAKTDAVDAGAILEFLQRMSFTPWQPPASEILELQAINRRIDQLHTELTREKNRRHASEFAGPSADAIAHDIEVNINHLERRIARMQDSGLQLVRQVPALATKLAHLVSTKGIGEASAMRILAEVLVLPDDLAAPQWVAHAGLDPRPYESGTSVHRPRRITKVGNRHLRAALYMPALVAIRHEPNVKAFYDKLIAAGKKPMQAVVAVMRKLLHAIWGMLKHDQDFDGNKFFKLTERTA

SEQ ID NO: 134897 - protein, 346 aa, unidentified
MLYAGLDLSRQRLDVHVLDEEGRTVEVLAVHPDADALRTLANRVLRHGQEVSAVIESMTGSRFVHDTLERFGWDVMIADAVKAKGVAPLAAKTDKIDAHVLAELARRDLVPEIWLPDPAVRAERERARFRLHLVHHRSALKCRIHATLMTFGHTVPVTDLFGTSGRALLAGLALPEPWATTLATSLAMVDELDQRIDECGRELARLGADHPYIPLLLTVPGVGPLLAYTIASEIGDITRFASPKKLTGYTGLCPIVRQSGNRDFRGPLAKNGPKYLRWALVEAATHAARHPHYRDRYERNKKRLGRGRGAKVARIDIARQLAEAIWHVLTKNEPFAPVGPAILLVA

SEQ ID NO: 134898 - protein, 364 aa, unidentified
MKKRSTGNGAEVTGAWTAGMDLGDRTSHICVLDEGGRVVERGKVPTTQEGMRKRFEGAARMRIAMEVGTHSPWVSRRLKGFGHEVLVANPRKTRLIYQSRGKQDAVDAEALARIARLDPKLLYPVEHRPEGVAEDLAVLRARDVLVRTRTQLVNHVRGAVKATGHRLKKCSARTFSEKAVDEIPEEVGEALSSVVATIEAVSKQILQLDKRIAELGKKKYPETALLRQVGGVGPIVALAYILTLEHPGRFRKSRAVGPYLGLVPARSQSGESDPQLRITKEGDAFLRRLLVQSAQYVLGPFGPDCDLRRAGLSLSARGERNAKKRAVIAVARKLAVLLHRLWKSAEVYEPLRKARALQDATVAA

SEQ ID NO: 134899 - protein, 351 aa, unidentified
MHRYIGLDVHAASTTFAVLGESGRRLGTHVVETHGQALVEQLKAIAGKKHVCLEEGTQSAWLYEILSPHAEEVIVAMVPESRGQKSDEGDALALAEQLRTGAIKKRVFKEVGHYKTLRELGRAHAMVVQDVVRVQNRIKSLYRSRGVAVAGKTVYSEVGREPLLEKLPDAARAAAMTLYAQYDAVEKIRRQAQKALVTEAHRHPISRVLETCPGLGPVRVAQLIPIVVSPMRFRTKRQFWSYCGLGIVMRSSSDWVQTKDGRWVHADVQKTRGLNLSHNHALKNIFKGAATTVSQKLKTEPLHQDYQRLLAAGTKPNLAKLTIARKIAAIALSMWKSKERYDPTKHSKQSS

SEQ ID NO: 134900 - protein, 402 aa, unidentified
MKLNPVVGLDVAKGESEAQAFLDKDRPYGKSFSVKHIKEDLDSFASFLKGIERKTGVRPAVILESTGHYHTPIIQCLEENQYLYILVNPIISHQAKKTSLRKVKTDAVDAYHLCVLYYKEDFEPYKKRGLRLLNLRTLSRQYETVTNLYVQAKLQFHTILDQVFPEYRGVFGDLFSKVSLQVLKDFPTSQDVLSAGEGKIMERIEEMRVKRSANWARERVAKLMASAKRNPFQQCIYQSHLYSLDMYISMLLQYQEHLSNLERQIDVLAEEIEEYKIIQSIPGIGGKIAATIISEIGEVDRFNHPKKLVAYAGIDPSVHSSGKFTATINHITKRGSSRLRHALYMAVLCGIRSSRNKKLKEYYDRKRNEGKPSKVAMIACVNKLLHWIYAILKRNEPFLDMA

SEQ ID NO: 134901 - protein, 414 aa, unidentified
MSYKIAGIDVHKRVLMVVVIDASTPEEKPERRRFTTMPSDLHRLSIWLREQRVEEAVMESTAQYWRTVWLELEPYLRLQLAQAFSNRAPRGRKHDFKDAERLVRRLIAEELILSFVPGEEQRTWRNLTRMKTQLNRDRVRLQNQMECLLEEMRIKLSMVVSDLLGASGLRILRALAQGESDSKKLALLGDDQLKCSEEQLVDALTGRPHPMHREMLRLQLERLQLIDRQIEELNGLIAQAMKPHQEAVIRLAEVPGLGVDSAQQVIAEVGVQASTFPSAAELTSWVGTCPGKDESAEDNHSSRSAKGNKYLRRVLNQSAHAAVKKKGSHFQAVFRRLLPRLGYKSAIWAIAHRLCRLIWKILHEGVRYIEQGSESDPKLREHRARTLARALRKLGYDVAITPINPSTTQKAMQT

SEQ ID NO: 134902 - protein, 413 aa, unidentified
MTTVSPPTRFVALDIHRKYLVVGAVDSQQQIVLTPRRFGFEAFSDWATTHLTPSDTVVLEATANAWLFYDQLKPLVADVLVAHPQAVKLIAAARVKTDSRDTIKLASLLAANLIPAVWVPPHEVRELRALVAHRKRLVQQRTQAGNRLHGVLHRHNLVLPPGKPFAAHQREWWLSLDLPASEKLRVQQDLSLHQSLEELVKGVEAELGRLSTSEPWIKQVPFLVQLPGLGVLSVMSVLAAIGDITRFPSAKHLVGYAGLGASVHDSGETHRGGHITKEGRSDLRGVMVEAAWVAVEHHSHWKAQFERLGARIGKQKAIVAIARKLLVAIWHVLTEQQADTNAQAQAVARKLMNWITHQGVTPGQHRDRLLLLYQHLDELGLSDELEEIHYYGTTYRLSMRQKLLREAQKRGSS

SEQ ID NO: 134903 - protein, 464 aa, unidentified
MVSPSGTRGAGSTKVRAGRRQTLGCEPDLITWPPLATCPDALRARISRCRVARELPFKRLRTEERACGSLDWIFTAPLLSRLGRVIMRREALEEFAKQLSNSDIVVIEATGNAASVAAVLAPHVSRVVIANPKQVRLIAHAKIKTDKIDAAVLAQLYASGFLPEVWIADEATQALRRQVTRRNQIVRQRSRLKNIIQSILHAHLIPSCPHQDLCGPMGRAWLCEQILPGDERLAVERHLREFDRLTDDLKGIERDLAQSALADDRATRLMTIPGINMVVALALIAAIGDIKRFAKPEQLVGYLGLNPSVRQSGPGPAYHGRITKQGRGHARGMLVEAGWVAARCPGPLRSFFLRVQSRRGQHVAAVATARKLAILIWHLLTKNENYLWARPALHARKLRDLELRAGHRAARGQKGTAHAYNLKSHRDQEQRWVEQAETAYARFVAGWNARGPKPRSGAAKEERQ

SEQ ID NO: 134904 - protein, 407 aa, unidentified
MQYYLGVDWADAFHQVWISNDEGKKVAEMKVIQNVEGMAEFGRWLHERKTDGIAVWAAIEKPHGRIVDFLLDHGVVVYPVNPKALDRVRDRFRMSQSKSDSFDAYVLAEFLRTDHSHLRALEPDSELAQELKLLTRDHHRLTRQKARLLNQVQVTLKEYYPRPLEVFNDLESQVARDFLKQYPTPQALSELSRRQWSRFAGRVHHLSEARCQELWEKLSRPQLLVPEHVVRSKARLLGVLLIQLTGLIEAVENYNERIKGFFASLPVAELVKTLPGGKGGIIVPMLWAELGDARSRWESFRHLQAEAGAVPVTRSSGKSRFVQFRCACNKEMRYAVHWMAFNSLNRSEWANAYYRGQRAKGHSHPQALRALGAKWLKIIYVMWRDHQPYDENYHLANIARQGIRQAA

SEQ ID NO: 134905 - protein, 379 aa, unidentified
MEGFNSFYNTIVELMQKSELEEALVGIEPTGHYWFDLGQFMGEKSIKFVMVNPHHVHKTKELDDNSPSKNDRKDPRVIAGLVRDGRYFYSYMPTGVYAELRNASNRRFVLVEEQTRAKNRLQKWIAVYFPEYKGIYTHIDAKGGLLVLKQAPTPEEIVKLGEEGIIKIWKDAKLRRNGNKKALKILNAAMRSIGLRTGLTEARMEIQDLIEDYELQTKRLERVNDLIKELCQQIRYADKLLEIKGIGIITVAGFIAEVGDITRFDSTKELQKLAGLELVADSSGKHNGKTKISKRGRKRLRYLLFEAAISVVGKNEEFKEIHRYYTTREKNPLKKMQSLIAVACKLIRVFHVILTKGVSYDASKMLEGIRHPGEQLKAA

SEQ ID NO: 134906 - protein, 421 aa, unidentified
MTRLPMDEFAAFVGLDWADAKHDVCLQAAGSQKREFSVLEHQPDTIDAWVSTLRTRFKGQPIAICLELNKGPIVSALGKYDFLVLFPVNPLTLARYREAFTPSHAKDDPSDAELQLELLLTHRDKLKPLNPQSTAIRALEQLVEHRRRLVGDKVRLTNRLTSALKNYFPHVLQWFDDKDTTIFCDFLTQWPTLKAVQLARRSTLERFFRAHHVRYADVIDQRIQAIKSATPLTTDAGVIAPTALLVQALVSQLRVTLQAIDAFDAAIAQRAQSHPDFPLFNSLPGAGAVLAPRLLAAFGEHRDRYTSADELQKYAGIAPVTERSGNKSWVHWRLQCPTFLRQTFVEWAAESIRHSFWARAYYQQQRNKGTSHQAAVRALAFKWIRILFRCWQNRTPYDESVYLNALERRGSPLIHNLVRDS

SEQ ID NO: 134907 - protein, 354 aa, unidentified
MSQKFESAIAVIGIDIGKNSFHVVGHDEHGAIVLRQKWSRGQVEARFANMPPCLVGMEACVGAHHLSRKLNNLGHDVRLMPAKYVRPYSKGQKNDFRDAEAIAEAVQRPTMKFVATKTADQLDLQALHRVRERLVSQRTGIINQIRAFLLERGVAVRQGLRFLRAELPNILATPPDVLSPRMVRIIEDLACDWRRLDERVEGLSNEIEAIARQDAGCERLMSVPGIGPIISSAMVAAIGAGDVFTKGRDFAAWLGLVPKQISTGDRTILGKISRRGNRYLRVLFVQAAWVVLIKPRIWERHGLKPWIEAAKKRLHHNVLAIALANKLARIAWSVLAHGRSFEASKLAAAVTQPA

SEQ ID NO: 134908 - protein, 341 aa, unidentified
MPIVGGLDIHRKQITFDYLDTVTGEVRRGQIAPADREHLRAWLARFAGHGDVAFAVEGCTGWRYVTRELAAAGIAAHLGEPADTAALRGRKRHAKTDKTDSAHLRRLLAEGRLPECWIPPEHILEYRALLETYHDLRREHTAWVQRIHAVFFHQGAPPLGEGVLRTEAGLARLRAAAAAHLSAAGQQQVATALDMLAATEARMGPLRHQLRQAAAHLVLAERLYGVGPVTGLALTCWLAGAGRFSSSRKAVRFTGLDITVHSSDRKGPPGRLSRQGPPVLRWAVYEAGKTHARAAAPDHGYYAAVKDRSNGKRAALSEARKIVRQACHILAELGDDALTAA

SEQ ID NO: 134909 - protein, 337 aa, unidentified
MQYFAGLDVSMEETHVCVVTRNGTVVYEAKVSSTPASIAAALARAPACRRVLFETGRMAPMLYHGLSRLGLPVVCVESRQAYQALKSLATHKTDRNDARGLAHLARTGFFKPVHVKSLPAHAIRALIIARKKLVGQRVTLENQIRGLAVVFGVRLPRALSPAFIRQALQASEGIPGLSAAMRGLVAARAAVLAAVVAIDGDIRKMARASGACRRLMSIPGVGQLTPLAFTAAVDDPGRFRRSRDIGAYLGLVPRRYQSGEVDYTGAISKCGDRGVRTLLYEAANVMLTRYKGQLKLKDWALAIAKRSTMRKARIALARRLAIIMHAMLRHGTEFKPA

SEQ ID NO: 134910 - protein, 324 aa, unidentified
MTLPSLGIDISKLKFDVCLSREGGKFRHHVFPNSPAGFSQLATWLVKYKVERVHACLEATGTYGEALAVDLYQAGHIVSVVNPAAIKAYGQSRLSRTKTDKADATLIAQFCLERQPPGWQPLAAEIRELQALVRRLDSLLEMRQMEANRLEVAAGAGAVKASLVGHLTFLDQEIATTERLIRTHIGSHHSLQEQRNLLLTIPGIGSTTAAKLLGEIMDVKRYGSARQLAAFAGLAPRLHESGSSVRRKARLSKTGAPRLRKALYFPAIVAIKHNPQIRALGARMQGRGKCPMEIIGAAMRKLVHIAYGVLKSGRPFDPELAKTT

SEQ ID NO: 134911 - protein, 326 aa, unidentified
MHILGIDLAKLTFDVTLLREGGDRRHKQFPNTSAGFEQLQQWLRSQHIEHVHACMEATNVYWEALAAFLADAQHIVSVVNPARIKGFAQSQMMRTKTDKQDSRIIALFCLQCQPEAWTLPSAAQRRLRALTRHRDDLLQTRTQLSNRLGDTSDTVVRTSLETVLASVEEQITSVEAQLKQHLKDERDLGEQAALLTAIVGIGTITAAKLLGEFCDIDAYTSAKALAADAGVTPAQHESGTSVRRRTHLSKVGKASVRAALYWPAIVAMRRCEGFKAFAERLAARGKAKGVIIGAVMRKLLHVVYGVLKHKTPFDPNKVLGPTRSST

SEQ ID NO: 134912 - protein, 320 aa, unidentified
MAKKKSETFIGIDVSKQQLEVAAYQSDYQFRCANKVSAFGALVAELISWRPALIVLEATGGLETRVVNTLQGAGLPVVVVNPRQVRDFARALGQLAKTDRLDARVLAHFAAAIKPPLRPLKAKEQQELDALTGRRRQLVEILADEKNRRAAAATDTVRDQIKEHIDWLEDCIAELDKQIKMLLQTSPRWQVKDQILQSVPGIGPVASFSMLADLPELGLLNRQQISKLVGVAPLNRDSGQQRGTRHIYGGRARLRRVLYMAALTASRHNPRLKAFYQKLRANHKPFKVAIIACMRKLLAIINVMIRDNTCWKINEASVSP

SEQ ID NO: 134913 - protein, 343 aa, unidentified
MDHFAGLDVSVKETSVCIVDDTGKLVREVKVTSEPEALLAVLKNPAYHFKRIGLEAGPLSQWLFGALAEAELPVVCVETRHMQAVLKAQINKTDRNDARGIAQMMRVGLYRPVHVKTLRSQKLRMLLTHRKLLQSKAIAIENDLRGTLRNFGLKVGMVGKVKFEARIKELVENFPDLAELVEPLLIVRRVLGEQIVILHRRLLAIVRDDEVCRRLMTVPGVGPVVALTYRATVDVPARFRKSKAVGAVFGLTCSKYQSGEIDWSGRISRCGDEMMRVMLYEAAQSMLRSKKWSWLKAWAMQIARRRGIKKAIVALARRLAVIMHRIWVDGTEFRWTREQAVAT

SEQ ID NO: 134914 - protein, 420 aa, unidentified
MKSTKSKKVKIINEKTMIAALDIGKTAHYAYFRAPNGKDIKPFPFYNFRKSFHEFWTKLCQFKREHKLENIVVGFESSGPYAEPLFHYLRNKPVKLVQINPMHSKRVKELTGNSPNKTDKKDPRVIADVISLGHALTLVVPEGPAAQLRRLSQARERALKRRTAAINQLQDLIFIIFPEFLAIMKNISTKTASYLIKKYPTPESIVALGIESLAVIVKRVSRSKLKQQRAEEVFNAAQNSIGISEGKRSILLEVEYLISQIGADSRFIVNLEEQMEDYLEKIPYSYSLLSIKGMGRVTVAGLIGEVGDFKKFNTISEIMKLAGLDLYEISSGKHKGQRRISKRGRSLMRKLLFFASINAVKSNGIMHEQYQQMLSRGKPKMKALIAISRKLLRIAFALARDDTVYVENYSNIHDRFKLAA

SEQ ID NO: 134915 - protein, 397 aa, unidentified
MYIVGIDIAKRKHEAAVIDGEGAVIIKPFSFTNNCSGYNRLLAMLTKAKLPLDEVSFAMEATGHYWLALFTRLQKEGFRVQVINPVQTNSIRSFYIRQAKTDPRDALLIAEVIRFGHFSESTLHPENIYELRELCRGRHAIVSMQADVKRKVVALLDQVFPEYETAFTNLFGDTSMAILQACPTPKELSGMPLEELCYLIEVSSHKRFRMAKAQELQALARNSFGFAMAGDVFSTMIRLYAKHLDFLKQQVREMDRKIAEIMDTLDTPITTITGIGPTLGAYILSEIGDISRFSSAAKLAAYAGIDPTMRQSGEYNGVRNRMSKRGSPYLRHAIWLAASSAVLHDPALKLYFQKKRDEGKPYMASVGHACRKMVSIIYAVMRDNKAYTPCIPNEISA

SEQ ID NO: 134916 - protein, 414 aa, unidentified
MDIVHDRCCGLDIHKKTVVACLIAPGPDGKPKKEIRSFGTMTGDLLGLADWLQRAGCTHVAMESTGVYWKPIYNVLEDRFNLLLANTKHLKMVPGRKTDVKDCAWIAELLRVGLLQPSFVPERAERELRELTRYRSSLVRERTAEINRLQKTLEGANIKLASVASEVMGKSGRAMLEALVAGTTDPTVLADLALGQLRRKIPELQRALVGRFGAHQCFLVVEQLAHIDELDERSERVSQEIRERMRPFETEIALLDTIPGVNRWTAEVLLAEIGFDLSRFPSAGHLVSWAGLCPGNRESAGKRKSGRTRKGSPWLRVALTESAHATGRGKTYLAAQLHRLIPRIGLKKAAIAVGHSILVIVYHVLTRHQPFHDLGALYFDHRHRASLEQRLIHRLEALGNTVTIERTQAPASAA

SEQ ID NO: 134917 - protein, 344 aa, unidentified
MDHFAGLDVSVKETSICIVDDAGRIIREVKVASEPDALLAVLTNPAYRFKRIGLEAGPLSQWLYSAFAEANLPVICVETRHMRAVLQAQINKTDRNDARGMAQMMRAGLYRPVHVKTLRSQKLRMLLVHRKLLQSKAIAVENDLRGTLRNFGLKVGIVGKLKFEARIKELVESHPDLAALVEPLLVVRRVLREQTAVLHRRLLAIVRGDEVCRRLMTVPGVGPVVALTFRATVDVPARFTNSKAVGAVLGLTPCKHQSGESERTGAISKCGDEMMRVMLYEAAQILLVRSKRWSWLKAWAMQIARRRGTKKAIVALARRLAVIMHRIWVDGTEFRWTRQEAAAA

SEQ ID NO: 134918 - protein, 341 aa, unidentified
MRIIGVDYHPSVQQIAWVDKETGECGEERLAHCAEAEQFYRDLKQKGVTVRVGIEATGHSRWFERLLAELNFEVWIGDPAQIRAKQVRKQKNDRRDAEHLLKLMLENHFPQLWVPTPENRDVRQLVWHRHRLVQMPTRVMNQLQAIAMNEGVRRKRGLWTRRGRAQLEALTLPPWTSRRRQELLELLDRFDPNIDELTEAIAQEAQRRPEVERLQTHPGVGPITALAYVLVVGTPERFACGKQVGSYLGLIPCEDSSADHWRLGHISKQGNALLRYLLVQSALSAAQAEEEWRRKYVHLTMRRNHAIAKIAMARKLAVRLFWMWRRKWDYEQLKQFGSHAG

SEQ ID NO: 134919 - protein, 406 aa, unidentified
MDVIYPRCAGLDVHKQTVVACVRVASGGPALQEVRTFETTTSGLLALADWLESFGVEHVAMEATGVYWKPVWHVLEGHFQLVLANAAHVKNVPGRKTDVNDAMWLADLLAHGLIRASFVPPVAVQELRTLTRTRKQFVRERGSHAQRIEKILEDANIKLSAVISDILGKSGRAVLRALIDGQTDPEQLLCHIGRVKASRAELLEALRGRVSAHHRFMLRLHLAHVDVLDQAIASIEKEVGRGLEPFRQAAKMLSTMPGLSAVSANVVVAEIGIDMSRFATPGHLLSWACLCPRNDESAGKRRSTKLRRGGKWLKTTLVQAAWAAVKVKGSYLQAQFHRLRARRGAKKAIIGVAASMLTAAWHMLRNGTEWHDLGAAHFDRTDAAKTAARLIRRLQQIGYAVQATPG

SEQ ID NO: 134920 - protein, 341 aa, unidentified
MNAIYYIGLDIHKKTIAYCIKRIDGVLVQQGTVAAERKALSKWLTELPGPWFGAMEATIFTGWVYDFLKPHAVELKVAHPAMLKAITAAKKKNDKADAEKIADLLRVNLLPECHMMPEELRELRRILRYRNMIVRTAVKMKNKMSGLLMEVGAQYNKKRLYGRKYFSALLERVEDVPDSVKGLLRLSRNGFEMFDDIQKKLIMALRKNKLIQERVLRLMSIPGIGEVTALTWVLETGDSSRFSSSRHAISYCGLCSAQHESAGKEQRGPISKQRNKHLQTMLIEAAKLAPHWNEQLAMLHEKELARGNKNRATLAVARKLVEFMLAVDRRETNFESMKEAA

SEQ ID NO: 134921 - protein, 377 aa, unidentified
MRIVGLDVSRSVAEIAYLEDGTLHAGGRTGLRRDELERFAVKLRATDHVVLEATGNTTAIVNVLRPHVARVAIANPLQVRLIAEARVKTDKIDAAVLAQLYASGFLPEVWMPDERTLALRRQIARRSQLVRQRTRLKNEIHAVLIAHLIERCPATDLFGKKGRAWLGVQPLPLDERLGVEQRLRELDRLGDDLREVEQALAQATIDDARLRVMLTITGVNTTVAIGLLSAIGDIARFPNPEKLVSYFGLNPSVYQSGPAPARHGHITKRGRSYARAMLVEAAWGATQAPGPLRALPTRARSSRPTNCRRRDCSQARGDRMVCADTRRTVRVGSSCVDRTQTARTGTTGRNAGAAWLAQRFGCRLQSEERPPAGTSRG

SEQ ID NO: 134922 - protein, 430 aa, unidentified
MKSNTQNAKIEAITEKTLVLGIDVGSETHYARAFDYRGIEYSKKPFKFSNTEAGFVTFKEWILDIKERHEKDKVVLGMEPTGHYWFNLGKFLQDNEMKPVLVNPHHVKKSKELDDNNPTKNDRKDPKVIAGLVREGRYMIPYLPDGVYADLRTASNIRFQLQAELTRIQNRISRWFNIYFPEYKTVYGKPDAKSGILILKAAPLPEDILTLGIDVVSQIWRDAKLRAVGKARAKTLIEAAEHSVGSKEGAVAARMEIRMLLEDYESRSIRLQEVMTLIEGLVKQIPMAEKLLEIKGVGIRTVSGFLAEVGDISRFNNPKELQKLAGLALVENSSGKHKGETTISRRGRKRLRYLLFEVAMSLVAKNPEFRELHNYYTTRRLNPLKKMQSLMAIAAKLIRVFYVMLTKGVNYDPKKMVNDIKRPAVYLQTA

SEQ ID NO: 134923 - protein, 405 aa, unidentified
MSTRAPEKRKKIYINSPGCPGTDTMEETMNYIGVDLHKDNMTIVGVNEKGDVFVKERMAPKCIGKIEEFFSQESLHPCKIVCESIGFYHWFYDLISQKVDQFILANPIETRKYSWNNPKTDFRDATKLALLLAGGEFERNKSLSCYIPDKVERAFRETTRVRFHLVRRKTSIINSARRIFLKNNLAGPKILNYSTLSQFINKYGDRFNEIHRKFLYIFAEDLFYLEKQISDIEREIHNFLSMERFARIHKILITIPGVGDMVSAVLISEIGNFRRFQDPEFLASYAGMVPKVFQSDQKIRYGKITKEGSVYIRYALVNASWVAVREDERIRRIFGRIAKRAGRKKAIVAIGRKILIWSWHLVIKNETWGSLNNEFPAENRSGMTLERVLNEMKKRDEFIQKNSVA

SEQ ID NO: 134924 - protein, 356 aa, unidentified
MTTLEKQNCLYVGIDVHKDTHTAVGVSPFGEKLFEVTIGNYKSDFLALENEVKKHSGILSPFFGLEDVRGYGERLAEHLYQSFPVYHVPSILVDRLRQNATHPEKSDSLDALGVAKVMIQSIDTLLPYTISEEGEKAKQLKEISIDREDLILERTRLKNQVHTLLYRIFNNEYAKVFKDPFSLKALAHWSKSKPKCDPFLLKTMKRKVKRIRDLHYEITDLEKDMDRLLKENYTIQTASGCGVVLASTIIGEIGDIQRFNSPGALSKYAGCSPRERSSGKKTRHVKTRSGNRRLNCAFHRIALSQISRMGNEKARVYFKRKVSEGKSKSQALVCLRRQMVNIVWNMMKYKTVYRNA

SEQ ID NO: 134925 - protein, 443 aa, unidentified
MSELAVLDPRAAFVDVGSEKMHVSIAGGPPALFGTVTSQLHALRDYLAEHQVRSVAMEATGVYWLPLYGVLEAAGMEVVMVDGRQTRNLPGRKTDMKDCQWGATLHAHGLLRAGFVPPANIRRLQDYLRLRGDHIAAAAGHVQHMQKALERMNIKLHEVISSLTGASGLAVIRAILAGERDPQVLLGLCDIRIRNVKAERVVESLRGDWAEEHLFALAQAVQSWDHYQGLTAACDRQIAVVLRQMPDAKMPPAAASTKTGKPRTRPGVNAPDIADLREILAQICGAKDLTTLPAHSEYSVLQLIGEVGTDLTKWRTEKHFTSWLGLAPGSAQSGKRKASVKRRRNRAGQIFCVMARALARSKYVALGGFYRRMAARRGGLVANKALARKLATLFWRVMVKGLDFVETGVTQYEARVLETKHRILHRLARQLGQKLVPNPAAVV

SEQ ID NO: 134926 - protein, 414 aa, unidentified
MEIVYARCAGADVHKKTVVVCVVVPDERGGWRKETRTFSTMTADLLALSDWLQQCGCTHVAMESTGEYWKPVFNILEGNFEVLLVNAQHIKAVPGRKTDVGDAEWIADLLRHGLLRASFIPPLAQRELRDLTRFRSTFVRERATLANRVQKVLEDANLKLASVASDVMGVSGRAMLAALLEGQGDPEQLANLARGRLREKRPDLIKALTGRVKEHHRFVLTELLCQIDNLEEAVARFDEQIKTHCAPSEEAVTLLDTIPGVARATAEVIVAEIGTDMSRFPSADHLAAWAGVAPGNNESAGKRRSGKTRKGDRPLGVALNQAAHGAAHTKNTYLAAQYRRLAKRRGKKKAIMAVAHSILVIAYHLIQRKEPYRELGGDYFDKRRPEAAAKQFVKRLEQLGYSVVLQPQTAPVAA

SEQ ID NO: 134927 - protein, 339 aa, unidentified
MQISVIGLDIAKQVFQVHAADAAGRTVAQIKLRRAQVLDYFRALPPCVVGLEACATAHYWARELSAIGHSVRLMPPAYVKPYVRRNKTDAADAQAIAEALTRPTMRFVPVKSADQQAMLMLHRARELLVRQRTMLATALRAHLAEFGIIAPQGIHRVEKLAAQLHDPSVPPLARDALNLLVEQLASTWKQIDAIEMQLVAIHRTQAVSRRLASIPGVGPITAMAIASTVPDPTMFRSGREFAAWLGLTPKSHSSGGKDRLGRISKRGDRYIRHLLNVGAGNVIRFAKARAAAGENWIRGLQQRRPPKVVIIALANKIARIAWALMVREQPFRSPAQAAL

SEQ ID NO: 134928 - protein, 440 aa, unidentified
MSKARKRYVGLDVHKDVVEYCILDAEGRKLDGGNFICEQSVLVNFAKNVLSPKDHVALETTTNTWTVVDILEPFVEQIVVGNPFKTRIIAEAKIKTDKVDAMILAQLLRCDFLPTVWIPDKQTREYRRISSSRKSLVQEATAAKNRIKSILNHLLIKHAVVWTKQGLEELKALALPPVERIIMDTAIAVLENQELQIENIELEIQKLAYANENIRLLMTLPSIGYNTATALVAVFGDISRFKDADHAASYLGLVPTVKKSAGVTHYGSITKTGSALARGILCEAAQSLFKNDGPLGVFVRRIRDKKGGGKAVVAGARKLATLAYHILKNKEPYRYATVVSTREKLRSLRNKAGGTKLVRQQYGYDDEARQNRPQGDFVVNYVPPLADVYEREGLPPALTFDQLSSGERRVLKEMGVAEKVLAREKVQIIARPKKATPSPQ

SEQ ID NO: 134929 - protein, 404 aa, unidentified
MELTALYHCVAALDVHQAKLTVCMMYENELGEVLSETQEFGGFKKDRLAMAEWVASFKPELVVMESTGIYWKSPYAALERHGLKIAVVNARHVKQVPGRKTDLADAQWLAILARNGLLRGGFVPPSQFRELRLVSRQMQKLTGILSGEKNRLHKLLTDAGIRLSVVVSDLHGKSARAMIKGLLDGETPEHVLKHADQRLKATEEELLDALAGDLTPCHRFIITEVMGHLDELYSRIQACLTYLLQGLSPYLPVLQSLQTIPGIDEKGAAMLLVEIGDDMSAFGTPAKLASWAGVCPGNNESAGKKKSGKARKGNPYVRRILCEAANAASKTRCRLSDKFKGLMIRRGRKRAIFAIAHKLLKTVFLLIERSDYYRDADTDYEALAVQRNAPRWIKKLKQYGYISA

SEQ ID NO: 134930 - protein, 376 aa, unidentified
MRNVRFVGLDVHAETIAVAVAELGGEVRSLGVIPNRSESVRRLIGKLGKRDQLRVCYEAGPTGYVLYWQLSELGVKCDVVAPTLVPVKAGDRVKTDRRDAEKLARCYRAGDLTAVWVPDAAHEALRDLVRARLAAKRDQLRARHRLGKFLLRQGRRAPEGTTAWTAKHLAWIKQQCFEHVAQQTTLLDYLHEVEHVAERIVRLERSIDVAVQSMPTMQQAVIAGLQCLRGVAKVSAVTLVSELGQLSRFGAARQLMGYAGMGSREHSSGPRINRGSISKAGNAHLRRIVIEAAWSYRHYPALGSALRARQNGASEPVKAIAWRAQHRLHQRYRALMGRGKPKQKVITALGRELLGFIWAIGCEVERTHSQEVRRAA

SEQ ID NO: 134931 - protein, 340 aa, unidentified
MTIVMGLDQHRGQITGEWIDTDTGELQRARVAPADRAAVREFLGRFRGRELEVALEATTGWRFVVQELRAVGARVHLAEPAETSALRGNKKRPRTDRADARHLRELLMIGKLPECWIPPEHLLDLRARVRLRHTLIDDRGEWQQRIRAVLYHHGIRHRRELVLLTAEGRAWLEQAPLPDTAREQVTVGLRMIDALDQQLPALDRQLRAYARHQTGCKALMGHYGIGELTSVAILAELGDCRRFSSSRHAVRYVGLDITMYQSDQRRSPGHFSRQGPSTLRRALYEAAVVATRAGSPDRDYYLQAAARLGHKRACLAIARKLLKRSYHTLRELGDKALQPA

SEQ ID NO: 134932 - protein, 429 aa, unidentified
MSEEKSLELRISVDVGYRRHSVAMGLSSGEVLEEFEIDHRPEGFQEFFSRIEAQRKKRNCAVSVAMEGYNGHARPLDSLVRQRGYRLYNLNNLKFARFKEIFPGAAKSDRIDARKGLELFQLSDHLPLAKEVLQEVSGTAPENEILKRLTRRRRRLVNERVRVVNNLQADLQAVCPGLLEITGEASNQWFLNFLLSADTLPQLARLKRSTLLKIPSVGVKSAAIIEHWQKRAHFSQEVEWVSEMIQEDAKRCLELDEKIKRLQAKIAEVAKNSKIAQTLRSIPGFGAVCTSELAGEIGTIERFASEGSLSLYLGMSMLDNSSGKYQGTKAPKQVNTRAKAAMMIGVDRHRKYVPESQRYYEKKRSEGKKHNQAIRALGRHLARIIYKMLKQEREYEIRPEKGDTKAKVGPRSFVKTKIRRPKISSKETK

SEQ ID NO: 134933 - protein, 429 aa, unidentified
MTMSGKEKVPEPEFVAFVGIDWADQKHVWSWQKADSTEREAGELEHRPEAVEAWVGELCRRFGHGPIAVAVEQTKGALVYMLRKYECLHLYPVPSTMSASMRAALYASGAKDDPRDADLLLELLLLHRDKLRRLTPDNEATRRVQNLVEERRKLVEEKTAQLNRLIGYLKVYFPQMLEWFAKLDTKLVCDFLERWPSLEELQQVQPGEVKKFFRHRRGRHGELTEWRMEGISQAMPAIQDRSVIEAKRTVVQVIAQLLRTLLEGIATLDRKIGEAVEAHPDFFIFQSLPGAGAALAPRLLAAFGSQRDRYGSANEVQKYSGIAPVTERSGKRKWVHFRWACSKFLRQSFHEWAGHSIGQSAWARAYYQRQRERGKEHHAAVRGLAFKWIRIVFRCWQDGVAYDESRYLAALAKRGSHLTSTCAAAAVSM

SEQ ID NO: 134934 - protein, 365 aa, unidentified
MTTQEKQSTMFIGVDVHKDTHTAVGLSPFGEKVFEMTIGNEVKDFISLVEKTEVEANKTGLIPSFGLEDVHSWGERLSSFLVEVGLPVRAVAPILVDHRRQKTTHPEKNDSLDAQGVAEVMIQKIDTLPIYILSQEGGKAKQIRELSLEREWLVKERARLKNQLHILLYRIHNTGYRVKFKDPFSKKALRYWMKSMPKSTDSILAGRMKRAIRRIRDLRSEILEIESELEILIKNSGHTITTANGCGVIIAAEIIGEIGDIVRFKTPGALAKYAGCAPRQHSSGKTIRFRKTRSGNRRLNRAFHRMALSQISRMGNDAGREYFKRKISEGKTKAQALVCLRRQMVNIVWMMMKHKTAYVYPQKND

SEQ ID NO: 134935 - protein, 339 aa, unidentified
MIIQPQLLHIATFVGIDAHPDSHTAVAINRFKEMKGNLTFPNTKEGITKFHSWLEKVEQEKEKTILGIEGGSDARTALTVSILSEYDLLYEVNPLYTKHKRSFGTRADKTDIRDAKLIAGVLTTELSELPKIVPSQVGASMQILRKTVSFYEGITMQNSRLQNQLHKLIREYNLTDDPALKEVFENIIRTKKEQLSFGEKTKREITRDLGKLLQNYGGGNLTKIRGIGVVTAIRIVAHTGGITRFHNRNGYVRYVGIAPLARSSGKMKKFVNTTRGNRKLNSILYFAVLDRIIWDKEVKERYQNKIASGKTKQEAILFLMRKTALLVYGMLKSGKPYQS

SEQ ID NO: 134936 - protein, 341 aa, unidentified
MKNKSFIGIDISKNVIDVSIFCEETPIKDFSHDVFNNSRKGFGEMCTWLKKNHVVLSNSLFGMEFTGSYSMELEKFLNTRNYQFCMLSTHVVKHYPMGPKDKSDKIDSAKIADFLYRYNGTECVKPYNMPDKTMQRLKALMNERKFLVEQRTCFMNRRQLCITKEDAQLYDGYIKKFSRDIENIELEEQKLLATDDSLLSTYKNLLTIPGIGFVNAINVIVITRNFTAFETARQYASYVGVAPHFRTSGTSVKWRPRPSARCDGQAKADLSMAATVVVQYDAELQSFYNRKLGGKQDSDTKRKALNAVKFKLILRMFAIGKQNRKWEPLDSKSSNEKLAIS

SEQ ID NO: 134937 - protein, 406 aa, unidentified
MKTVIAFDVSKGNSVIVAYDKNKEYIFESKINHTQEGFSLLQKKINYLLKTYGQTPEFVLESTGVYSNCIEHYLSELNYSYCVLNPLEASFQTKLLRRNKTDISDAHMLAKTHFSADRRPKYLQDRYYVEMRAMSRHYHDIELEKNVYNNRIHKLLQETFPEYEKIFKNKSIMFYRIIQEFPHAESLLKSSKTIVRNRLKKCTKKNYAIKKLEERAIQLREAANNSVPSVKENSFTCKQIRRNAKRVLELEEEQQLLIEEMALLSEDKTEYKILMSIPGIQKTTACRLIGELGDIRRFKSNKQVNAYVGIDIARYQSGNVHYKDHINKRGNKRLRGMLFFMIVSMLGTKKQNHIVEYYYKLKKQPYSKHHKVAIIACINKFLKFTHHLIIHEKFYDYGEATNTNQP

SEQ ID NO: 134938 - protein, 338 aa, unidentified
MSAIKTIGIDLGKSTFHLVGHDHSGRELYRHKFSRVKLIQYISAHEPVTIAMEACCGAHWLARRCQEFGHQVKLIPPQYVKPYVKSHKNDFIDADAIAEAATRPKMRFVTPKSEQAQIGSVIRRIRTGYIRERTAVMNRITSILVEFGFSFPRGHANMKRLFQWLADTGQPVPPLLVLELREQLDHYNHLNEKIKEQDKKIETINNGNELFTMLQSIPGIGPMTAACCLSVVSNPKDFSNGRNFAAWIGLVPFQYSTGGKPKLLGISKRGNKELRELFVHAARSVLWRDATAEKYFGTWIIDLKRRKPFNVALVALANKLARIAWSVMATHKIFEIRI

SEQ ID NO: 134939 - protein, 365 aa, unidentified
MMGWTPPDGIYVPVCGLLESHTKEASVEEVSIIGLDLAKRIFQAHGADRSGKCLFSRKLSRAQLLGFFSSQKPCIVAMEACSSAHYWGREIAALGHEVRLIPAHYVKPYVKRGKNDAADAEAICEAASRPTMRFVEIRSAEQHSQAMVFRSRDLLVRQRTQAINAVRGHCAEFGLSAPTGHKGYEALKGLIGEATDLPEVAREVLELLMASIDQLEGQIGVLEKKMAQLAKRDPVNKALMSIPGIGPITALAVKALGPDARGFASGRDYAAWMGLVPSQHSSGGKERLGKITKKGNRTLRRLFVICAGTVITSIARSRTVPDPWLAKLLARRPRMVAVTALANKIARIVWALQVKGGVYQSPMTT

SEQ ID NO: 134940 - protein, 337 aa, unidentified
MKVTTISIDLAKSVFQVCGTNQAGTQVFNRQVRRNKLLETVIQFPDADVVMEACSGSNYWGRLFIKHGFTVKLIPPQHVKPFVRGNKNDRNDAFAISEASRRPNLTFTQPRSVAATDMAVLHRIRDRRQGSLTRLTNQIRGLLNEYGIVIPQGIEHLRRHIPLILEDGENELSPLMRSELHSLFDEWCMMESLIKQHDKAIEQFARADEQTTLLMTARGIGSITATALMSVMGSPANYKNGRHFAASLGLTPSEHSSGGKQKLGRITKRGNRYVRRLLVQCAMSHVRHLESRTDNLSLWLKKLKERRGVQVAAIALANKLARISWAMLHKQQEFKLN

SEQ ID NO: 134941 - protein, 399 aa, unidentified
MPSFEFFGEVPIVIAVGIDIAKRTHEACFMGQDGRQIGKTRRFHNTRRSVRALLDDLQQLPEPATIGLEATGHYWLALHDELVRAGHTVQVLNPLQTHAYRKTTIRKLKTDRKDAWLIADVVRIGRGRAAYVPDETILQLRELTRFRWAVVDQIGDAKRRSLSILDRVFPEYETLFSDVFIKSSRALLQQATTAAEFADADLAELTAVLKQKSRGRLGAEKAEALQLAAHDSLGITRLGGVASFELRALLDQIAFLEHQVAAIEQQIETRLAEIAQHVTEIKGISPVMAASLIAEIGDVQRFRRFESLVAYSGIDPSVFASGEFKATETHMSKRGSPHLRRALWLSAITASQSNPDLGEYLQRRLAEGKPWGTAMGAVARKLLSRIYVILRDNRPYEVR

SEQ ID NO: 134942 - protein, 356 aa, unidentified
MPTMPHDVHEIILGVDTHEDEHVAALVDELGRLVATRSFPTTAHGFKQLLAWARACGCVCRAGVEGTGSFGAGLARFLAAEGVGVIEVTRPNRRGRRHLGKTDTLDAETAARMVLSGEARATPRRRDGAVESIRVLQIARRSAIKARTQAGQQIRSLIITAPAELNYALAGLSLKRQVECCARLRPAARDGAAASTRRALRSLARRWQQLDLEIGELDRELHALVKAAAPSLLAEPGVGPDTAGKLLVIASDNVERLRSDAAFAALCGVSPIEASSGKTKRHRLNKGGDRQGNNALWTIANNRLIHHPETRAYAARRTSEGLSRREILRCLKRHLARRLYRLILADLSPTAAPDLT

SEQ ID NO: 134943 - protein, 415 aa, unidentified
MALKIVYKICCGIDVHKTFVVACIASTDSKGVTTYEHHRFSTYTKGLKDLLQWLLKHNCMDVCMESTGKYWIPVYNVLENDCTIVLAHPKYVKAIRGKKTDKKDAKWIADLFKHDLVAGSFMPPADIRQLRDLMRYRFKLTCFQSSEKNRLQNCLTVSNIQLGNVVSDTFGKSAQAILDKLLENPADTSFDLEPLVYKSLKKKLPELRDAIDGYISPEQAGKLKVIKAHYENLESRKAELEELILALAAPYQQELAILQTAPGIRSDFTAIGIISEIGTNMEAFPSAKHLCSWAGLTPTNNESAGKKKSVRVSKAGCYIKPLLVQCANAVVTSKKHPEIRNRYLRLKKRRGHKKAIIAIARMLLTALYHMLKNGENYNAELYRKSDLPPVDREITVEQAIIIARNQGYKIKSATA

SEQ ID NO: 134944 - protein, 314 aa, unidentified
MTFPATAGIDAGQRHLDVGLPSGTIFRTENRPEAFPALLARLKREGVERVVLEAIGSYTHALVQALAAAGFAVGLVNPRRIKAFRVAEGKRAKTDRLDAGLITRFADRMRDAFRPLPDADQVALKALSTRRRQLTEMIAMEKTRLKQALDPLVSESHKDTISALAEACRRIEDEIESRIAKDEQRAQNRRILLTIPGIGARVAQVLLTELPELGRSDRKAIASLAGLAPHVSQSGQAPPRAAIAGGRPCVRTALYMSALVAARHDPNLRAHYQTMRAAGKPAKVALVAIARRILVTANALIRQQASYKPEPNPT

SEQ ID NO: 134945 - protein, 429 aa, unidentified
MNTIPVAGIDVAKRFSEMAVLSPTNEVYARIRINHDSYTNFERAFKLLKKAEKEFAVKPVVVMESTGHYHKILFHSLTKVGYAVHIINPIQSDSIKNIGIRKVKNDKVDARKIALLFRFQQLKTANIPNEDVECLRSLCRHYYKLSDQLTVYKNRLMGTVDQLFLSFTDVFKDATSVTALAILEKYPSPEDILNADKDELISLIRQASRKSAKWAAGKYELLCSKARNFSPLSINSIANAAMLKANISMIKTLMQSLDEALEAIYRLLEQDSKKDMPILSFTIDILCSIPGIGLLTAATVVAEVGDFSAFSKPDKLVAFSGIDPSINQSGQFEGTKSKMSKRGSRLLRRVLFTSALANVRKKRDGKEINPVLYEYYRKKCLSKPKKVALGAVMRKLVAIIFAVMRDKKPFVLRKPEEHAKMLAAKNLAA

SEQ ID NO: 134946 - protein, 414 aa, unidentified
MDVLYPRCAGLDVHKDTVVAAVRSAANGPANTEVRTFDTTTPGLLALSGWLAECGCTLVAMEATGVYWKPVWHILSDGDVTLILANAAHVKNVPGRKTDVADAAWLADLLAHGLVRASFVPEAPTQAMRALLRTRKQLVREQASHAQRIQKTLEDANLKLASVLTQVMGKSGRAIIGALIAGERDPDALLRLVQRGVKAPPERLRAALTGRVTERHRFLLRLHLRQIDALEAAIAEIDQEVDRDLDPFRQAVRLLRTIPGLSDLTAQVIVSEIGLDMSRFPTAGHLISWAGLCPRNDESAGRRRSTRLRKGAPWLKTTLVQCAWAGTRKKGSYLQAQFQRLRHRRGPKKAVCAVAASILTAAYHMLRDGTFYQDLGPDHLRRATPEAQACRLARQITKLGFTCTIAPADTRVSV

SEQ ID NO: 134947 - protein, 316 aa, unidentified
MGGQEDYVGVDVSKERLDIAVRPSGEFFSEANDKRAVAGLVKRLKVLNCTRIVVEATGGYETLMVAALCAAGLPVVVVNPRWVRDFAKGIGWLEKTDHIDAKLLALYAERAELKVQQLPDEATRQLRELCARRMDLLEMIDAERNRLEHATSAVRREITGHIDYLRKRLKRIERDIDGAVRGSELWRHQNQLMDSVPGVGPTLRASALAWLPELGQLNRKEAGKLVGIAPLPDDSGKTRGYRRIAGGRGPLRKVLFMATMGAMLHNPHLRAYYDRLRARGKQHKVALVATMRKLLLILNAIIKTNTPWSESCLTNL

SEQ ID NO: 134948 - protein, 367 aa, unidentified
MKKVSTAAAQQSRNISQQRLTIGLDLGDRHSWYCVLDEAGQVQLEQRVRTSAQALQDVFGGMPCSRVALETGTHSPWISRLLSELGHEVIVANARKVRLIGESRKKDDRLDAQTLARLARIDPKLLCPVKHRSAQAQADLTVIRARAGLVRARTGLVNTARGVAKSYGARLRACNVRNLNPEKAEGLSPELQRALEPLLSAIEELSERIAEYNERIEALAEASYPQVALLKQIKGVGTLIALTFLLTLEDPHRFQKSRDVGCYLGLQPGRRNSGQSQPQMHISKEGDPYLRTLLVQGAQHILGPFGIDCDLRRWGLKLAERGGKSGKKRAIVATARKLAVLLHHLWVSGEVYEPLHNSRRTTVAAAA

SEQ ID NO: 134949 - protein, 347 aa, unidentified
MEKLIRVGVDTSKSVFQLHGVNCAEQVVLRQQLRRRQVLEFFARLEPTKVGLEACGGSHYWARELRALGHEVALLPPQYVKPYLKRGKNDALDAEAICEAMSRPRMGFVAVKTAEQQAALMLAGRRGQLVRQRTQVTNSIRGYAAEFGLTAATGLDKIEPLLGRIAADGQVPELARELFGDYARDYARLEAQIRAIEIKLMAWHRGNELSRRLTKIPGVGPVVASMLVMKTPDPKAFRSPRHFAAWIGLTPKDHSTAGKTRLGVITRAGDAALRSLLVVGATAVVQQVGKGRGNPSPWLVELLKRKPPKLAAVALANKIARIAWKMMVSGEAYNPARALAGARDKAA

SEQ ID NO: 134950 - protein, 330 aa, unidentified
MYIGVDYHKHYSVTTMMDEAGRIVGRQKIRNDPDSLLAFADSLPEDSKIALEATNGWYYFYELLEARCPIVLAHPLRTRAIAEARIKTDKIDSTILAHLLRTDLLPTSYIAAKEIRDTREILRYRASLISLRTSLKNKVHAILDKNGIRISVSNIFGKKAVQRLRELSLRDCYREEIDGYLRLMETLKTLTGETDRTIEKLVGMSPEASLLLSIPGIGHYSALLITSEIGDVTRFPSAKKLCSYAGLVPSVHSSGGKTRYGSITKQGSKWLRWILIELSHHFINSSPRMKGLYGRVAYKHGKNTARVAVAREMLKIIYAMLMQKRPYRRE

SEQ ID NO: 134951 - protein, 323 aa, unidentified
MSTKATKKRRSFIGIDVSKKLLEVGVHQSDYHFRCPNDPKNFPALITELISLRPARILLEATGGLERALLQALHAVALPVVVVNPRQVRDFAKALGLLAKTDRLDARVLAHFAAAIQPAIRPVKAQQETELDALMGRRTQLSDMLAQEKNRRGSAATKDTRADIEEHIEWLEERIQELDEKLKEQLKCSAVWQQKDKILQSVKGIGFVTSMSLLADCPELGQLNRHQIAKLVGVAPLNRDSGQQRGARHIWGGRAQVRRKLYMATLAAIRFNPVLKSFYQRLLAKNKLKKVAIVACMRKLLTIINVMVRENKLWNVKAQPVSA

SEQ ID NO: 134952 - protein, 411 aa, unidentified
MEIVHTRCCGLDVHKKTVVACVLISQADGLIERQVRTFKTMTVDLLALADWLSSLNVTEVALESTGVYWRPVYNVLEDDQRTLLLVNPQHMRAVPGKKTDVKDAEWLADLLRHGLLRASFIPPAPIRVVRELTRYRKTLVQSRADEANRLQKTLEGANLKLASVATDVLGMSGRAMFAALLDGERDPEVLADLARGKLRAKLPQLRQALVGRVQPHHLVLISQVLAHIDFLEEAIAQVQVEIDRCLPPFDEALELVQTIPGIKEVAAAAILAEIGPDMSRFPSAGHLASWAGLCPTNKQSAGKRMKGPANHGNVWLRAIMGEVVWASIRTKASYFYAQYHRLARRRGKEKAAIAVAHSLLVVIYHVLRTGQPYRELGVDYFDRLDSARAERHHVRRLEQLGFTVTLTPTAA

SEQ ID NO: 134953 - protein, 429 aa, unidentified
MDEVDDADLVVERVAALDLGKAGLEACVRVPNPQRPGRRMQELRGYGTSTAQLLAMAGWLRHWRVQRVVMESTSTYWKGVYYLLEAEGFDCWLVNAREVKNVPGRAKTDRADAAWLAKVAERGMCRPSLVQPPEIRRLRDLTRYRRALVQDRTREQQRVEKLLEDAQIKISAVLSNLHGVTGRAIMDALIAGERDPRTLARLAKASARKKTDRLEEALRGFFTEHHATILQMMLDNSDRISAQIAALDARIEEAIGPFSRPAARLADIPGVSTVAAAELIAEIGVDMTRFPSAAHLVSWAKFCPQIHQSAGKSMSKGRAKGNPWLAGTLGRIAFVDSRTDTFLGARYRRLARRRGKQNALVATGNSVLTVIYHLLSDPDARFCDLGPGYYESRINKHRRARDLATQLQALTGQHIAIRDGKAVITDTAA

SEQ ID NO: 134954 - protein, 355 aa, unidentified
MNSVKYIGLDVHASTISAAVLNGEGKLFMQSVLATHAGAILDFLKGLRGTLHLTFEEGTQSAWLYDLLVGRVARVVVSNPRKNALMKSGNKSDPIDARKLAELLRAGSLSPVYHGERSTATVKQLGSSYAALTEDTTRVMSRLKALYRSQAIATMGKKPYGRRQREDWLARLQGAGLVRRAQRLYQELDALQALRREARRDLIVECRQHQAAPLLRTIPFLGPIRTALLLGRVETPYRFRSKRQFWAYCGLALETRSSADYRFVDGQLERTKKPVRIRGLNWNHNHHLKNLFKSAATTASARPGVFRTFYQDRLAQGMLPAMARLTLARKIAAITLSVWKKGEAFDAEQLKPTAV

SEQ ID NO: 134955 - protein, 345 aa, unidentified
MLTDELEYVIGVDTHAKTHTLVIVEARTQRTAQKLALDANRSGYRRALRLARRRAPGCRVWAIEGTGSYGAGLTRFLAERGEQVREIERPKRAPGRRGKSDAIDAERAARELLAGSAGSHPRSDAEAQALRALLVARESAVRQCTASLNELRALLISAPSELRERLQGRSEAKLVGACCNLRAGRDRERAAYALALRILARRVRALRLEAATLEGEIERRVRESSPQLLAQRGVGPISAACILTSWSYRGRLRSEAAFARLAGAAPIPASSGQTVRHRLDRGGDRRLNRALHTILLTRRRLDPDTRAYVARRVVEGKSEREAVRCLKRYLARSLFRLLESPPLTP

SEQ ID NO: 134956 - protein, 398 aa, unidentified
MTESSDYESVQVFIGVDVGKDTHHAVAINRSGKRLFDKALPNDENKLRSLISDLKQHGQILLVVDQPATIGALPVAVARSEGVLVGYLPGLAMRRIADLHAGEAKTDARDAAIIAEAARTLPHALRTLKLADEQIAELSMLCGFDDDLAAQTTQASNRIRGLLTQIHPALERVLGPRLDHPAVLDLLQRYPSPEKLASLGEKKLAAQLCKLAPRLGKRLAADIAQALAEQTVVVPGTNAAAVVLPRLALQLITLRKQRDEVALAVEQRVLAHPLYPVLTSMPGVGVRTAARLLTEVACRAFASVAHLAAYAGLAPVTRRSGSSIRGEHPSRRGNKALKLALFLSAFAALRDPLSRAYYTRKMSQGKRHNQALIALARRRCDVLFAMMRDGTFYTPQAS

SEQ ID NO: 134957 - protein, 347 aa, unidentified
MRFYTQQHQFYCGIDLHARTMYLCLVNREGEILVHRNMPAGPEPFLKAIAPYRADLVVCVECIFTWYWLADLCAREGIPFVLGHALYMKAIHGGKAKNDKIDSQKIAALLRGGMLPQADVYPAAMRATRDLLRRRMHLAHKRAELLAHVHNTNSQYNLPAIGKKIAYKANRDGVAERFADPAVQKSIDVDLALITYYDELLRDVELTLVNTAKHHDANTLYLLQTVPGIGKILSLVLLYEIHDIDRFPRVQDFVSYCRLVKCAKESAGKRLGTSGTKIGNAHLKWAFSEAAVLFLRDHPPAQKYLARLEKKHDKGKALTVLAHKLARAVYYMLKRHVVFDRAQFFQR

SEQ ID NO: 134958 - protein, 347 aa, unidentified
MKFYTTFNKYYCGIDLHARILYVCILDERGSKLVHQKIKADKHELLKLILPYLEDIVVGVECMHCWYWVSDLCAEHNIDFVLGHALYMKAIHGGKAKNDKIDSYKIASLLRGGNFPLAYNYPAQMRSTRDLLRRRTRLVQHGAQLKAHIVNTNSQYNYPPLELHMKNKCVRQEFQTRFDDQAVQRNVNFDLAILDAYAEELKKLEYYLESKAKKHQPNYYAQLRTIPGIGLILAMTILYEIGDINRFESVQKFSSYCRLVKCKAESAGKTYGTSGNKIGNGHLKWAFSEAAVLYLRGNDKARRYLNKLQKRMSKAKALSVLAHKLGRCVYFMLKNKTVFDDDRFLKS

SEQ ID NO: 134959 - protein, 342 aa, unidentified
MQHLAIDLGGKESVFCARNQDGSIAEEGRVPTHCLGTFLAKRPTCRVILETCAEAFAIADSSVAAGHDTRVVPSRIVRALGVGDRRIKNDQRDASALSAASCRSELPSVHIRSAVSRELQALFRMREELVACRTKLINGVRGWMRTRLIRVGSGNPCTFTRRVREACLATPHGVPKYLERNLVLIDQLTTQMRAADVEVKERVTESELCQRLKTVPCVGNLTAVRFLSVVDDVRRFGSAHALESYLGITPGENSSSGRKQRLAITKAGPGDLRGLLLQVAWSAWRTRPRDPMVEWARRIEARRGRKISLVALSRKIAGAMYAVWRDGTTYDPKRMRGDVEKT

SEQ ID NO: 134960 - protein, 343 aa, unidentified
MTHYVGLDVSMKETKLHVLDEAGQRVWRGRCATEPTAIAAAVRRYAPAAVRIGLETGPLTTWLWTALTAEGLPMVCLDARHAKRALDMKVNKTDANDAEGLAHLVRAGWYREVRVKSRNAMLAKALLGARSQLLSMSLALENQIRGILKTFGRIVPKGAGGLFEKNVRALITDDAAIAAVIMPLLQARGMARSKCAALDRRLIGSVQADVTCRRLMTMPGVGPLTAVAYVAALEKPDTFKRSRAVGAWLGLTPRRFQSGEVDYDGHISRRGDSQLRALLYEAAAVLLTRVRGESALRRWGLLLWKRLGFKRAATALARRMAVVLHAMWKSGTPFNPTLGAATP

SEQ ID NO: 134961 - protein, 378 aa, unidentified
MTQIPVSTSSEQSIYAALELSKNSWLLAIQAPGRDNPSLHPIKGGNAEGLMAKLDAARDRVAKLTGQTPKVTLCYEAGYDGFWLARFLEQRGIECRVMEPASLQVNRRARRVKTDRIDVESLLHTVIAWCRGDRHVCSMVVIPSVEEEDVRRSHRERDRLVRERTAHINRIKGLLFGQGIRGINVKKDYKTLAPAALVTGDGRPLPERLGREITREIARLAQVQAQITEIERERDLASTSCAATERKRHDLLRLKGIGPTFSAILAREVYYRRFANRRQVASYIGLAPSPYDSGEGRRSQGISKAGNSMARYSLIQAAWLWIRHQPNSALTQWFHHRTEGQGKRVRCIMIVALARKLAISLWRYVELGLIPKGATLSA

SEQ ID NO: 134962 - protein, 375 aa, unidentified
MTKSNILFIGMDVHKESIEIALADDGANGEVRRYGRIGGTLDALKKTLRKLVSENRTLHFCYEAGPCGYELYRYLTDEGHVCIVVAPSLIPKKPGDKVKTDKRDAVQLVRLFRAGELTPVYVPDREDEAIRDLSRAREDAMIIQKAARQRLKAFLLRHNIRYPGRANWSEKHLRWLADGARLPTPAQQVVFQEYVNTVTEAACRMERLVTEIHHHVKTWRLYPVVQALMTMRGVRMIVAVTVIAELGDLTRFENPQQLMSFLGLTPCEYSSGERQRRGSITKTGNHHARRILIEAAWSYRFFPKVSPDIQKRQEHQPLPIRDIAWKAQLRLTKRYKMMTQRGKSPNVVVVAIARELAGFMWAIAQAVPISNTSST

SEQ ID NO: 134963 - protein, 404 aa, unidentified
MEILHTCCCGMDVHKRTVVACLLGPSGKEVRTFGTMTADLLAMNAWLRAQGCQMVAMESTGSYWKPIYNLLEAEQLPAMVVNAQHIKAVPGRKTDVKDAEWIAQLLQHGLLRASFIPARDQRELAELVRYRRSLVEMRSAESNRVQKVLEGANIKLGSVLSNVLGVSGRAVLARLIAGEEDGQVLATLVHRTVRAAKEEIARAAEGRMGAHQRFLLERQLALIDTLTRQIAEIEEEIERRLVQEREVIERLQTIPGVGICTAREIIAFIGTDMTRFPSHRHLASWAKLCPSLHESAGHRGNGGIGPGHKLLRAALTEAAQAASRSNSYLAAQYKRIARKRGTRKAIIAVAHSILTIAYHIIKDNTTYTDLGANYFDERDKEKIIRRATQRIERLGKTVTVTDAA

SEQ ID NO: 134964 - protein, 348 aa, unidentified
MIIIGCDYHPGFQEIAFVDTETGDCGEQRLEHCEGAETFIATLASQGKKVGVEASGHARWFERLLAELNIELWRGDAAVIRAKRGRKAKTDRQDALHILNLLLTGAFPKIWVPSWENRDLRQLLWHRHRMVQARTRVMNQLQAVALNEGLRCKKKLWRKHGREQLEAFRLAPWASRRREDLLKLLDRLNPTIEELSEAIEQEAEKYPPAQRLMTHPGVGALTALAFVLIIGEAERFECGKQVGSYLGLVPLEDSSGERRRLGHITKQGNSLLRFLLVEAAQVTSRKIPEWHSKYVHLTMRRGKKIAKVAMARKLAVRLFWMIRKGWNYEQLLKFGSNVEQPGHRHGVK

SEQ ID NO: 134965 - protein, 362 aa, unidentified
MLYLGCDVHKNYTTVSFVTEDGKVADTSSFYNDIEELKSLLGQFPEEEFSAVLEAGLNWGVIYDMLDSLSEVKNVSLAHPPKVKAIASAKIKTDKIDSKILGQLLKADLIPEVWIPCKETRILKDIVRSRAFIVKIKTMIKNRIHDILRKSHINPPEVKDIFGKYGNMWLEEIELSDKRADKLLRYHLQLKDTFEEMEIELKKWINKEMRSNEDLKLVKTIPGIREVFGPVIVLEIDDINRFPDPAHLHSYSGLVPSTHVSGNTSYHGRLIKGNRWLRWAFIEGAHTSVRVSPYFRKHYDSVKRKAGSQAASVASGRKLATIVYKVLKEKRPYIEEYRIKQNIGRSPSVKPSGGITSRSFQE

SEQ ID NO: 134966 - protein, 453 aa, unidentified
MSKSKRGRQSSRVLPTVHAQAAGLDVGSTFHVVAVPPELCDEPVRTFRSFTGDLHRLADWLRAIGVTTIAMESTGVYWIPVFEILETRGFEVLLVNARDTKNVPGRKTDVNDAQWLQQLHQFGLLRGSFRPHERVVRLRALLRHRERLIDSAATHIQLMQKALMQMNVQLHHVVTDITGVTGMKIIRGIVDGEHDPLTLAKHRDVRCKESVETICEALTGNYRSEHVFALRHALELFDFLQTKIVESDAEIETVLHSLNEDRVPPAVPIPHVRHSRGRNEPQFDVRAALYTMLGVDLSQIHGLGPYTVLRLIAECGDDMRKWPTVKHFTSWLTLAPGNKISGGRVLSSRTRRSSNRAAALLRIAAVNIGKTETALGAFYRRLGARIGKAKAVTATARKLAVLFYNALRYGMRYADPGANYYDERYKQRVLSNLHRRARQMGFLLIEAEATPSP

SEQ ID NO: 134967 - protein, 415 aa, unidentified
MDKRERGHRLRGSRQPPSDKGKGVRFAGIDIAAEKHFVAVINEQRELVVKPTAFTEDAAGHAKLLELLGAPGELLVAMEATGHYWRNVYVTLAAAGHTIALLNPLRTSRFAGEDLQRTKTDAIDAVGIARFAAEKRPVATRLPDGASQELRELVRLRDRLMQDLGDRVRQLHRAVDLGFPEFTRYVRTLDSELATTILHEYPTAEAFLGLPWKRLAKLCYDRRHKVGEEIAKGLVEAAKVSVGRHHGPAYRVQVRFACEDIDLLRRRLRELDADIERTLGDHEVGTLLTTIDGIGPTTAARLVAEFGDIGAFRDAAAMAAYVGCVPGLRQSGKRLATRAGLTPHGNARLRTKLWMPTLTAVRKNAWLRAYYEGLRARGKLPKVALVAAMRKLLVAVHYVAKNRKPFVPILAEARA

SEQ ID NO: 134968 - protein, 408 aa, unidentified
MDVQIERCAGLDVHQATVVATVRYPGERGRTSVTETFGTMAADLAALRDWLQAYGVTHVALESTGVYWKPVYYMLEDSVTLLLINMQTLKHVPGRKTDVKDSEWLAQLLECGLLKASFVPPPAIRELRDLTRYRLQQVRERAREVNRLCKVLEDSNLKLTSVLTDVMGVSGRAMLLALVQGTTDPAVLAELARGRLRKKLPDLRRALAGRFRRHHAFLVEQILAKIDYLDEAVERLNAEIDDRLVPFEATLARLDTIPGVNRTVAVSIIAETGGDMSRFPTAGHLCSWAALCPGQNESAGKRRSGKTRDGNQYLRGQLIQGALGAIHSKGTALQARYHRVKRHRGHKKAVVAVAHQILEIAYYVMQDGVTYHELGADYFDRRHAERATRRHVRQLEALGYRVTIEKAA

SEQ ID NO: 134969 - protein, 343 aa, unidentified
MEIYTIGIDIGKTVFNRVGLSAQGEVVVRKKFSRKQLLHFTANLRVGLIGMEACGGSHFLGRALREQGHEVRLIPAQYVKPFVKTNKNDYIDAEAIAEAVGRPRMRFVPIKTDEQLDMQSLHRVREGWVGRRTAVINQLRGLLIERGITVRRGRRYIEAALPGILEDADSKLSGALRVLLLQAYSEMRHLQSQIDEADAVIRRMAGEDEACQRLVEVPGVGPVIATAMISAVGNGAAFKKGRGFAAWLGLVPGQYSTGGKQKLLGIGKRGDKYLRRLFVHGAHAVLQQRVKQSSGLSEWLGQLTSRVHRNVAVVALANKLARMSWAVLAKGERYRPPLLAETA

SEQ ID NO: 134970 - protein, 367 aa, unidentified
MKKVSTVAAKPGKKISQQKLTVGLDLGDRNSWYCVLDESGQIQREQRVRTNAKGLREVFGELPHSRIALEIGTHSPWISRLLSELGHEVIVANARKVRLIGESRKKDDRLDARTLARLARIDPQLLCPVKHRSAKAQADLTMIRARAGLVRARTALVNTARGLAKSYGERLRGCNVRNLNPEKAEALSPELQRALEPLLAGIEAVSEQIREYNEGIEKLAQESYPQVALMKQIKGVGTLIALTFLLTLEDPHRFGKSRDVGCYLGLQPGRRNSGQSEPQLHISKEGDPYLRTLLVQGAQHILGPFGPDCDLRRWGLKLAERGGRNGKKRAIVATARKLAVLLHHLWVSGEVYEPLHNSQRTTVAAAA

SEQ ID NO: 134971 - protein, 371 aa, unidentified
MSNIYVGMDVHQETITIAVLPAVAPTPTRVEQVPNDLPKLQRYLARIAQDGAVQVCYEASGAGYVLHRAVTAWGYPCVVIAPSLIPTKPGVQRKHDRYDAAQLARLFRAGELTPVRVPSEAEERVRDLVRCRETVQRELLQSKHYLLKFLTRRGLEFRHGKHWTKAHLAWLETLTAPTSPLQAEDQLVFRKYLALFHYKNDRRLVLDREIAARATLPALAPVVGRLQCFRGIQVHAAMVLATELGDWRRFATATPLMAYLGLVPSERSSGPRERKGAITKAGNSHCRHVLIQAAWSYRHRPKVAATLRARQRHQPAPVIAHAWKAQHRLHALFQHLAYRKQPRVAVVAVARELVGFLWAVMQEVAPTTAVV

SEQ ID NO: 134972 - protein, 462 aa, unidentified
MSTPKQPKTQRRKARPTAGLRLLNPHAAGIDIGATMHYVAVPPDRAEKPVRGFGTHTADLHGLAAWLKECQITSVALESTGSYWIALYQVLERAGFTVVLCNARHVKNLPGRKTDVADAAWLQELHSYGLLSGSFRPEDQVCILRAYLRHRDNLTKATGVHIQHMQKALIEMNLKLHHVLSDITGVSGQAIIRAIVAGERDPLTLAALKHERVKKSDAEIAKALEGEYREEHLFTLRQALELYDFHLARIAECDAEIERALRGWDKKVDVAAAPLPGKTTRKTAFAQGQYELRNQLYSVTGVDLTTLPGMEVLSVQALLSEVGTDMTRWRTEKHFCSWLRVCPDNRITGGKSSRGKPHRGHNRAAQILRVCAQAAIQSKSALGAFGRRLRARMDAPRAIKALAHKLARLIYRMLREGAAYRDTGEHYYEERYRTHLIARLQKQAAHFGFHLTPQQCIEGSVS

SEQ ID NO: 134973 - protein, 439 aa, unidentified
MNTSPANTETTTAPNPTTSPVAFVAIDWADQKHDMVLLPAGSQTKEPITVEHTPEALSDWVAQLYRRFPEGKIAVIREQSRGALLYALLPHERLELYPINPKTSAKFREAFYSSGAKDDPLDADLMLDILLHHRDRLKAWQPDDAITRQLQLLVEARRRFVADQVRLTNRLRSTLKSYFPQAVDLAGENLSSPMACALVQKWPTLEAAQKTRPHLLRKFYYGHQCRSEDLIQQRLQLLARAKPLTTDAPVVTAQSLLAQCIARELATLPAILAEFDHRIARLFAQHADYAIWDSFPGAGPALAPRLAAAWGSQRDRFPDNQAMSCYSGIAPVKAASGKSVWIHMRWACPKFVRQTFYEMAQASLAFCAWAQCYLQQQIERGKGRHAAIRALAFKWQRIMWRCWQNHTPYDDAEYVASLKRNGSALYARLSAAPAQAKCE

SEQ ID NO: 134974 - protein, 358 aa, unidentified
MAVIEGVCRIVGGVDTHKDLHVAAIVDEQDRIIGTRSFATTRQGYRQMLAWMRSFGELQRIGIESTGSYGAGLLRFMQQAKVTVLEVTTPDKQDRRRRGKNDDLDAQNAAHAAFAGQRTVTPRSRDGMIESLRVLKACRKTAVSARRIALQMIHNTIVCAPDGLRDQLRSLTRMQLVRTLASWRPDLTAYRDLDSAYRIGLKSLARRYLELHDEIADLDAMIAAIVDELAPNLVARNSIGHTGAAQLLLTAGDNPERLRSEASFASLCGVSPVPASSGRTVRHRLNRGGDRAANSALHIIAIGRLRTDQRTKDYVARRLAEGHSKLDAIRALKRYLAREVFTLITQRRKEINATRIAA

SEQ ID NO: 134975 - protein, 416 aa, unidentified
MNAAGIDVSSRKSTVAVLRPFGEVVKLPFDVRHNAGDLAALAKQLKSIEGETRVVMEHTGRYYESIAKVLHEAGLYVSAVNPLLIKEYGNNSLRKVKTDKADAMKIAKYALDNWTELRDYTPMDTIRYDLKTLNRQFQLASKQKTATANNLVALQEQSFPGIRKLFDSPVRSDGTQKWVDFTHDFWHVDCVRSGSQNAFTERYRKWCKRNRYQFSMEKAAEVYALAKSAVVLVQKTSITKTLVQEAASQLTAISRSVETYRSEMNKLASQLPEYPVVMEMFGVGESLGPQLMAEIGDVRRFERKQSLVAFAGIDPAPSESGDYCSRSNRTTKRGSPYLRKTLFNIMTVYLQRAPADEPVFQFLDKKRAEGKPYYVYMTAAGNKFLRRYYGKVMAYFSTLEGLPPVDMDSTGLHHAE

SEQ ID NO: 134976 - protein, 316 aa, unidentified
MYQNFIGIDIGKENFVVAVHASKTVLTFSNDLAGFKKFYTEQKNVLSNGLVILETTGGYESAVIEYLQGKKVAVHRANTHQVKHFIRSMGRLGKSDAIDAKGLAHYGAERHATLSLFKAMPKQQRELYRMVLRRSQLTQLMVQEKNRLKSPGKDWLKNSIRPILKALKTEITRLEEAIRQLVEADEALKRYVEILKEIEGIGQITAVALLALMPELGTLNRRQAASMAGVAPHPYESGKHIGYRPVRGGRSTVKRTLFISAMSAMRSKGRLGKFYRDLIARGKKKMVALTALMRKIIIIANAKLKELRLLKTQLTT

SEQ ID NO: 134977 - protein, 309 aa, unidentified
MEQQVKFDQVIHCGCGMDVHKKTVVATIRRSDTDFETREFNTYTRSLKSLREWCKSEGVTHVAMESTGIYWKPVYNIMEEDFEVILVNARHIKNVPGHKTDKKDSRWISKLLLSGLLKGSFIPPREIRELRDLVRYKRKVIAEISSDKNRIIKMLEDCNLKLSSVFSKVSGASASKIIDDIIEGHDDVEGFLKHIHGKVQAPKNEIRQALEGTLTDHHRTMLRVIKMSIEGKERIVEALDKQIDACVKQYAIEIEQLQTIPGVGKESAIRIISEIGVDMSRFPNENHLSSWAGMSPGSNESAGKKKAPE

SEQ ID NO: 134978 - protein, 476 aa, unidentified
MGRDPVREIIHITLWPDLQPTGEGMDQQLGKSNGLSLERIEPNAAGIDVGATEIFVAVPPDRDRQPVRSFKTFTDDLRQMAAWLVQCGITTVAMESTGVYWIPPHEVLEEAGIRVCLVNSKHVKHVPGRKSDVSDCQWLQYLHSVGLLRASFRPESEIRAIRALSRHRSSLIEIASVHVQHMHKALTQMNLQIHHVLSDITGLSGMAIIEAIVAGERSPVRLAALCNQRVRSDQETVIKSLVGNYRSEHLFTLKQSLTAYKHYQELIADCDREIERLMRLLNGKIDPPPSSPATPPDPRFQKRSKNQFRFDMGSELNRVFGVDLTTIPGISGLTAHTLLAEIGPDLSRFANVAAFASWLALCPANKKSGGKVLSSRTRQTNSRASHALRIAAQTLARSKSHLGNFYRRMRARLGGPQAITATAHKLARIIYHLITTGQHYDETVFVREDQKQAQRQEKRLRKQAKSLGFQLVPIAA

SEQ ID NO: 134979 - protein, 369 aa, unidentified
MTDTSKEQPKMTAGLDLGDKYSHFFVLDNESGKMIEEGRLRTAPDDLRRRFDSEEQMKIAIEVGTHSTWVSRILHDCGHEVLIANPRKTRLIYSDKRKTDKLDAKKLARLARVDPELLYPIEHRGEESQAHLALIHSRDVLVRSRTQLINHVRGVVKSFGARLPKCSAESFHRRILNQLPQQLEEALVDVVETIGSLSERIRDYERRIERVCKEGYPQETELLRQVAGVGVLTSLTFVLTLEDPDRFKKSRTVGAYLGLVPGKDQSGEQDPGKPISKEGDKMLRRLLVSSAHYILGPFGPDSDLRRYGEKIAGRGGKNAKKRAVVAVARKLSVLLHRLWITGEVYEPLHNARLSGALLGEEVAWSGGRM

SEQ ID NO: 134980 - protein, 358 aa, unidentified
MSKRTTKSTRCKGVVLTRKDRVFVGLDVHKKSYHAAVRVNGVEVQTTVLAPKAEAVLAFLEPYRSACLHVVYEAGPTGFGLARALREAQIPAEVIAPSKTPQTPARENKTDRLDCRQLALYDEKGMLRRVAVPTPQEEADRQVIRLRDQVVKARRRVKQQIKSFLLQHGVAEPPGLGSWSKASVRALETMPLAQTLRFCLDVMLVELAQRNESLQQVNRAVENLGQEPRHARAVAPLQEHAGVGVITAMQFRTELFRPERFANARQVAAYVGLAPRVSQSGGRCRTGPLLKAGRGRLRALLVEAAWVWIRADSEAAAVYRRLLHNTGQPNKAITGMARRLAIRLWRLLVPPEARGQAA

SEQ ID NO: 134981 - protein, 326 aa, unidentified
MEHELHYIGIDTAKEKLDVDVLRPDGCHRTKKFANTTKGHDELVSWLKGHKIDHAHICIEATGTYMEPVAECLYDAGYIVSVINPALGKAFAQSEGLRNKTDTVDARMLAEFCRQKRPAAWEAPHPLERALRALVVRHQALTDMHTQELNRTETAREVQRPSIDAHLLWLEAELKRLEKQIKDLTDDDPDMKHRRKLLESIPGIGEKTSAVLLAYIGLKDRFAHARQFAAFAGLTPRRYESGSSVRGASRMSKAGHVSLRRALYMPAMVATSKTEWGRAFRDRLAANGKKGKVILGAMMRKLAQVAYGVLKSGVPFDASRHNPVAA

SEQ ID NO: 134982 - protein, 360 aa, unidentified
MNTQITATPKIFIGLDIHKKSWTVSIQTDLFFHKTYSMPSVSEDLYQYVEKTFPAHEVHLVYEAGCCGFSVARYFLNLGWNVLIVNPSDVKTGDKERYQKTDALDSKNLSNQLKAGVLKGIYIPTEQHEQFTTLARHRTQITKRLRQSKSHIKSMLLFHGIKVPDQFDNSNWSIDFVTWLEQLKFSTSCGDLALQGKIRMYKFIKSEYLQIANEMRAYCRKTNKKDYNLLRSIPGIGGYLASVIIAECGDLRRFNTEGQFSSYIGLVPGIYNSGDSEKCLGITPRSRSQLRSYLVEAAWVAIRKDTEMQNYYRKHHGKNVKSVIIKVAHKMARRILSVIKTETPYQINRNITPIAIGIEQ

SEQ ID NO: 134983 - protein, 430 aa, unidentified
MNMNTNTLPQPATAPAAAAAPPPVAWIGLDWGHHTHAFALQDRSGPPAEGTLLHSAEALHTWLRDLEQRFGGRPVALAIEASRGAVIHALVQYPWLTVYPINPVTSARYRSAFTPSGASDDLPDARVLLELARDHAAKLRPLAIQDPQTLKLAGLVEARRDTVDRRTQVLNQLTSLLRAYYPQALELVGGLDTELAVAFLSRWPDLITLKAVQPGVLKRFYYAHHLRRPELLTARLQFIQQAVALTTEDARVRVAVLQLRCLLDQLRAFRKHVLLLDAEIKTTFAAHPEVALFRDLPGAGPALAPRLCVAFGTLRALYPDPASLQKHAGVAPVREKSGQSLWTHWRWLAPTFLRQSWVEWAGQTVVHSAWAKRYYERMKAKGKDHHAILRALAFKWIRVLWKCWQTRTPYDETRYLKQLVHRKSPNAVPA

SEQ ID NO: 134984 - protein, 343 aa, unidentified
MQAITTIGLDIAKSVFQVHGIDATGSVIIRRQLKRRHVLAFFEKLPPCLIGIEACATSHHWSRELRASGHTVRLMPPAYVKPYVKRQKNDAADAEAICEAVTRANMRFVGTKTPEQQGCLMLHRTRHLFIRQQTAVINAIRAHLGEFGVVAPVGRRGVEELLDVVADSGDERVPEVARACVGALGVQLRMLKAQILAFDRQIMAWHRSNETSKRLDEIPGVGPALATALVASVADPGAFRSGRNFSAWVGLVPRQHSSGGKDRLGSISKQGDRYLRSLFTAGALAVIRYAKIHGTRHRPWLTALLARRPTKVAAIALANKIAGMAWAMMVKGERYKEPAALAA

SEQ ID NO: 134985 - protein, 411 aa, unidentified
MEVIHERCAGIDISKIDVKVCIRVPSGKRRRSEVRTFSAVTSGLLAMRDWLLAEGITVIGMEATGVYWKPVFYLLEHDMECWLLNARHMKSVSGRKTDVKDSEWIAKLVEHGLVRPSFVPPEPIRQLRDVTRYRTEVVRERTRETQRLEKPREDTGIKLSATVSNILGVSGRAMLEALVAGERDPHVLADLAKGSMRRKTDALVEALTGNFGAHHAFLARAMLDRIDAFTATETKVSEHIEVMLQPFRRRIELLVTIPGVDTRAAQVILAEIGDDIARFPSAPDLASWAGVCPGNHQSGGRSGSGKTRHGDPWLMAALGQAAVSASRTKDTYLAARYRRIVARRGKKRALVALEHSILTTIWHMFTHDAQYADLGGHYFIERTGRARQTRRLVSQLNQLGYQVTLQTEGAA

SEQ ID NO: 134986 - protein, 363 aa, unidentified
MVGNRTSVGLDVHARSVVACGLDGQTGRVFERRLSPDHAEIFEWVMGLPGPVTVTYEAGPTGFGLARFLTERGIVCLVAAPSKLQRPCGDRVKTDLRDARHLARLLHLGEIAAIAVPSVAQEAARDLVRAREDVRGDLMAARHRLSKLLLRQGIVYYGGKPWTGVHDRWLCARRRDPVFATPGLGMAFDIAYDRVLDTVARRDRLDSAIAEMAAASEFTPVVTRLGCLRGVSTLTAFGLAVEIGDWHRLDGRSIGAYLGLVPTESSSGQSRSRGSITKTGNRHARRLLIEAAWHHRPPYRVGTDLRHRLDRADPATRDRGQRANRRLHTRWAHFDTRGKRAVVANAAIARELAGWCWSLAVLE

SEQ ID NO: 134987 - protein, 354 aa, unidentified
MSEKHNSVIAVIGIDIGKNSFHVVGLDGRGAIALRQKWSRGQVETRLANMPACLIGMEACVGAHHLSRRLRLLGHDARLMPAKYVRAYSKGQKNDFRDAEAIAEAVQRPTMRFVATKTADQLDLQALHRVRGRLVSQRTGVINQIRAFLLERGVAVRQGRHFLRGGLPGILATGCEVLSERMVHLIEDLAGDWRRLDERIEGLSGEIAALARQDAGCERLMSVPGIGPIISSAMVAAIGAGDTFTKGRDFAAWLGLVPKQFSTGDRTVLGKISKRGNRYLRVLFVQAAWVVLIRSKNWERYGLKPWIEAAKRRLHRNVLAIALANKLARIAWGVLAHGRNFEAGKVAAAATLPA

SEQ ID NO: 134988 - protein, 416 aa, unidentified
MKYAPTVLAAEPVNGLTCGIDWARDDHAVSIVDNRGVEIHRSTVEHSTAGLRTLAALLAGTGVGEVAIERPDGPIVDTLLTAGVTVVVISPNQLKNLRGRYGSAGNKDDRFDAFVLADTLRTDRTRLRPLVPDTPATTALRTACRARKDLIGHRVALANQLREHLNRVFPGAVGLFADLDSVISMTFLTRYDRQDRADWLTPKRLGAWLASVGYTGGTDPTVLHARLIAAPRGATGEEGAAHAHITGALVATLKTVVEQIKTLSDTIAEQLAAHADGHIFTSLPRSGKIRAAKLLAEMGDCRGRFPTPESLACLAGVAPSTRQSGTMRSVGFRWSCDKHLRDAVTDFAADSRHANPWAADLYNRARARGHDHSHATRILARAWLYVIWHCWQTNQPYDPAQHRALQALLKDQKPAA

SEQ ID NO: 134989 - protein, 374 aa, unidentified
MFERTSVGLDVHARTVVACALNAQTGEIIPHRMTPDHGEILAWILSLPSPVRVVYEAGPTGFGLARFLLAAGIDTVVAAPSKLQRPSGERVKTDAKDALHLARLLKLGEVTGVRVPSADQEAARDLVRSREDVRGDLMRSRHRISKLLLRQGIVYSGGQAWTGTHELWLARQHFDAPARQLTYESSLEAMHEISDRRDRLDEAITAMAYGSEYTPVVRALQCLRGISTLTAFGLAVEIGDWDRFTGSTIGAYLGLVPTEHSSGQSRSLGSITKTGNSHARRLLVEAAWHHRRPYNNPSRLMRSRWEEATSEARTRGHAGNRRLNERWISYLARRKRPVIANVAIARELAGWCWSLATTNHPAPTSPAGSTASVP

SEQ ID NO: 134990 - protein, 422 aa, unidentified
MASDANIVDYAAFIGLDWGSEKHSVAFQAADSKQIEIYTLKQTPEELHGWLFKLREKVGGRPVAVAIEQTKGAVIHALLGYGFVHVFRINPHSLASYRKAFSSSGAKDDPTDAMYLLEWIKLHRERVKPWVPDNAQTRALRQLVEFRREVVEQRVAYTNHLTQVLREYFPQALDWAGEIDRVMACDFLLKWPTLEKIKKARPDTIRTFYRQHGCRNSELIEERLKGIWRAQALTEDLAVIATSVCIVQIIVRSLYPVIESIARLDKEIEERFQAHPDMACFDSFPGAGPVLAPRLLAAMGSDRTRFEFASEIQQYSGIAPVTDRSGKHVWIHRRFACPKFLRQTFHEYAGQSIKFCAWARAYYEMKRSSGMGHQAAVRELAYKWIRIIFRCWQNRVCYSDEIYIRALHDKGSAVIDFMEQVA

SEQ ID NO: 134991 - protein, 413 aa, unidentified
MDVLHPRCCGLDVHKSSISACILLREAGRVQKHQRRFGAMTQELQELAEWLRQFGVSQVAMESSGVYWKPVWNILEGQFTVVLANAQHIKNVPGRKTDQKDAEWIAQLLQYGLLRPSYVPCEIIRDLRDLTRMRASLSQEASRISSRIQKVLEDANVKLASVATNVLGKSGRAMLEDIISGEDDPEHLASLALGHLRVKIPQLRLALEGKVRSHHRFLLRRLVDQIQFVEHEIGLLDERLEEIAQQRPELSQAVARWDTIPGIDRVAAWALLAEIGDNMAQFPTAGHLASWAALCPGNHESAGKRLRGTTRQGSPWLCRMACQCAWAAARTKNTYLTSQFRRLAARRGKKRAVIAVAHTIIVIGYHLQKNQSNYEDLGGNYFDRIHSDGLKRYLVKRLQQLGHKVTLEPMEAA

SEQ ID NO: 134992 - protein, 345 aa, unidentified
MQSMYYSGLDVHKRSISYCVKDGGGKIHAEGTIPATRFDLDRWMRTLPQPWTAAMEATVFTGWIYDHLLPHAAALKVAHPLMLRAIAAAKKKNDHIDASKICDCLRCDFLPECYMASTAIRERRRALRYRNLLVRQMVQMKNKISGLLMEAGVNYNKQRLHKAGYFRELLATNPDIDEGLCALLRLCRETVVRLQKTESAVVRSLERDALLVERVERLMSIPAVGPITALTWALEIGDVQRFSSIKKAISYCGLCGAEKSSGPTVQRTPLSKQRNKHLQTTLIEAAKMAPRNSPELAILYDREKQKGNANRATLAVARKLVAYLVAVDRRQKQFLVVEKENCAAA

SEQ ID NO: 134993 - protein, 406 aa, unidentified
MRVFIGVDPHKLSVTIEVDDKNEAVLATGRFGTDNAGYRAMLKRVAPWPDRTWAVEGSNGAGRPLAQRLLADGEQVLDVPAKLSARARLFDTGHNRKTDAHDAHSVAVVAVRTPGLRVLSYDAELEALRMLVDRRDELSRTRVQTVNRLHRLLAELIPGTAKKEISTGQAKAMLASVRPRDLVGKTRRRLAAELLAELVVVEKKIKELRKELKAMVQARGSTLMDLPGVGPVIAARVLADVGDVARFADRNRFASWTGTAPIEASSGEIVRHRLSRAGNRRMNHMTHIAAATQIRHDTEGRAYYLRKIAAGKTRREAMRCLKRRISDALYRQLVADARAAGIVSAEADVEAGPGGHSGASLLSSAAGSHPHTGTSDQPLPGPAPTTLPATTPARKRTSAKALETAS

SEQ ID NO: 134994 - protein, 359 aa, unidentified
MSSVPVFVGIDYHQDSVQVCVLNAEGRQLLNRAVDNNAAAVAAAMRRYGQPRRVAIEACCGAADMADELVVEQKLPVELAHPGYVARLKRSPDKHDLGDAQLLADLARVNYLPTVWLAPESTRQLRRMVRHRAQLVRRRKDVKLRVRGLLRENRQRCLKANAWTLAWFTWLRKEAQLAPSDRWVLDDHLQELTSLAGRLQAVEAQIVAMTVDDPLVARLLTLPGVGLVTAVTMRAEIGRFDRFRTGKQLARFCGVTPRNASSGARQADAGLIKAGNPELRTVLIELAHRLIHRISGRWAELAYGMLRRGKPKNVVIAAVANRWVRWLHHELRRESDLDSGSTKGAPPLPSPPSHRPQQE

SEQ ID NO: 134995 - protein, 402 aa, unidentified
MLVATVLTDDKSKETKHFVNDEEGIDTLKGWLKASECNQAVMESTSVYWVPLYLALEESKFEVSLANAHQVKAIPGRKTDQSSSEWLAHLLLGGQIKPSYVPERRVRELRELTRMRAKFVQTRTAFKNRCHKVLNRVNIRLGSRLKDVFGKAGKEILEGLMAGKTIEAILEQTQNTWLKNRSDEIKVVARGALSEEDIFVLKELTDTVNHLNEKIRGIEGRMESLVGVQGEVVANQRDVAIVASVPGVGSKSAIAIVAEIGDVGHFATAADLASWAGLVPSVYQSAGKFVTGHITKAGSRWLRRAMVLVARSAVIVRGSRLRSFFLRVKARRGKNTAYVAVARKMLTIIWHLLVKGEDYVEGSFEKSVGLKKVAFGGYVGLEEMARVLRGAGYVVLSGPDDG

SEQ ID NO: 134996 - protein, 315 aa, unidentified
MYLGIDVSKLTIDCCLISDGLFFERKFKNSKAGFQDLKDWLKENGATERLHCCCEATGKYYEAAAEYLSKYYRMSVENPRKIKGFGTAVLQRSKTDRQDAKTIAQYCKALEPRPWQKPTEAQTKLRELTRYQHRLKRQKAAEQIKLQTAPAYLLPLIQSTITHLQQQIKAVQNQLNQFHKDNPDYKIQKERLKTITGIGEAAANSLLSVLIQKDRFKSAAQFVAYIGLDPKENQSGTSLKGRPRISKLGNTHLRTTLFIPAMHAYRSRTFAKYVSRLQKNGKRPKVIIVALMRKLAVIAFTLLKNGQDFQVERYK

SEQ ID NO: 134997 - protein, 363 aa, unidentified
MNATTVAVDLAKTVFQIAVADAHFRIIEKHRLTRTQFERFFANRAVGLVVMEACGSAHYWARRIQALGIEVRLLPPRYVRAYVKRNKTDAADAAALIEAARCADIMPVRVKSVEQQALQCLHRTREQWMRTRTARINCLRGQCREFGLNVAHGARVGLEQIARLVADPRTALPQILLGTMRSLIDEIRLLEVRIHELEKQLGELARQSSPCTTLLSIPGIGLLTATAMVGATSGEVGHFKDARHFAAWFGLTPKEHSSGSTRKLGRISKRGDAYVRMLLTHGARSVISAAAKKAKTGAPLDRLRQWALDLEKRSNRNKAVCALANKLARLCYATLRDGEPYAASKLTRSLPRKLAEHTFSCAQ

SEQ ID NO: 134998 - protein, 412 aa, unidentified
MSKSLRRVGIDWGSESHQVCRLDGEEAPKQRSFPHTGEGLKALVEFVVEGEIECEQIAIAIEVNHGAVVEALLAKGLRIHSINPKLLDRLRDRFSMAGAKDDRRDAFVLASCVESDAHAFRKIEPGNEENSRLRAATRLREELKSERRANTNRLWNELRDCRPELLPLCPAADEPWLWALIEKAPSPSEGAKLTRASIGTVLKRHRIRRLTSEEVQGVLRRDVLSLRSAYIESHAARVLILIARLKLAQDQIVKVEKQISAALAERVKAEEQTERRDLTILLSLPGFGSLTVATALGESGDAFDRRDYNALRSICGAAPITKQSGGTRYVVMRQVCQPRLRVALHLAALRASRIDPKLGDLYLRARARGQSVGRAVRNIVDRLLFLAVQLLKKNQLYDIQLRQLAPEMATTS

SEQ ID NO: 134999 - protein, 346 aa, unidentified
MEKISVVGLDLAKAVFQVHGADARGKKVLSRRLKRAQVMEFFAALPACRVGMEACGGAHEWARRISALGHEVKLMAPQYVKAYVQGHKTDARDAAAICEAAGRDSVPTVAVRSRHSQQLQALHRVREGWMKQRTATSNQIRGLLAEFGVVMAAGLRQLKAQVRQWQQQVGGELGLLCGLIDDLLLHLAQLEERIAQVDRQLLQAHGADAASQLLESIPGVGVMTATAVVASFGRAQMFQDGRRFASALGLTPRQHSSGDKQVLLGISKRGNGYVRKLLVHGARAVLKARMNKAVYADDWAVRLAARRGFNIAACALAAKNARRIWAMLQRGELFRADYAQTHGVCA

SEQ ID NO: 135000 - protein, 347 aa, unidentified
MDHVGMDLGKRESQMAILTEDGELIDMRIRTERDRLIEVFGRRPKAKILVEASTESEWVARCLEDLGHELIVADPNYAPMYAQRTRRVKTDRRDAHALAHACKLGTYRPAHRTSTERRHLRTLVAVREAVVRTRAAWIGRIQPVLRREGFRVRPGAPETFIRRVEELALPPALTTAIAPLLRLLRPVNEQIQALDAELERIVAADEVTRRLATTPGVGPVTAVAFVATVDDVTRFRDAHHLEAYLGLVPSEWSSSEIQRRGRITKAGNGRMRWLLVQAAWCILRRRKQSETAALREWADRIAGRRGRSIAVVALARRLAGILFAIWRDGTVYDASKVRRAVVATQVA

SEQ ID NO: 135001 - protein, 341 aa, unidentified
MNHYAGIDVSLECSSVCVVDASGKIVREGKVASEPEALIAWFGSLGLGLTRIGLEAGPLSQWLYAAMRDASLPVELLETRHVRDAFKAMPVKTDRKDARGIAQLMRLGWFRPVHCKSIEAQETRAILTARKLVQSKLHDVEMNLRGTLRGFGLKVGRTTSNRFAARIRELVEGHPSLQLIATSLLAVHAVLLREFKGFEKRVRIMARGDERARLLMSTPGVGAIVALTYASAIDDPGRFKSSKQAGAHFGMTPKKYQSGETDITGRISKIGDKGVRTALYEAAHIILTKPVKGSGLKSWAARLAKRVGMNKAKVALARKLAVIMHRMLVDRTPFNPAAAAA

SEQ ID NO: 135002 - protein, 366 aa, unidentified
MKQLAYIGIDYHMNTISAAVIIKGQNDFFDTIHMKNNDKTILKYFKKLSKNFEIQACYEASCNGYSFQRKMNNWGFHCDVIAPSLIPKKPGDKRKNDYRDARNLTQLYANGQLTVVHPPTEEQESIRNLIRCRLNLKKDEKNVKLQINSFCLSQGLKWPQSKWTVKHRAWLSKIEFPDAYSQQVLSEYLGHLQYLSSRIANLDKIIEEISCSKVYASSVKKLRAFKGIDTLSAMILIAEITDFRRFPTPRALMAFLGLIPSEESSADKQKGGGITKTGNSRCRTQLIESVQHLMKKPTISYKMKSNLAQVDAASSNIAIKCMHRLHKRFWALVIKGKNRNKAKAAIAREFAGFIWAMMTQPESATI

SEQ ID NO: 135003 - protein, 400 aa, unidentified
MKTVLSVDVAKNKSMIMLMNNDGEILIDTKEIKHNLGEFEKVKEEIEEINPENLTVFMESTGTYHLPVERYFKENGFNTLVINSLTTKNNFDTIRKTKTDKKDCYRLAKLFFVNEVEYHEISKKDLYANLKAMTRQYFYLTQVNIRCKNRYKRLINICFPEFESFFARNRIYEDTALNFIKAFPHAYIVREKRIDALYNNLRKVDARHDYYYKRLARQLKDAAMDSFPGVDKDHADVKNLSDMASILQENNKLIDEIRKNMIELAKQSPYFEIVNSFYGIGEVLAAELLGELGDITRFDNHKQLIAFCGLDPAIVQSGKSINVHGAISKRGDKYARWILFNISQMVVKLGHQYPSHPVYNYYLIKKAEGKHYYESLTACSTKTLRMLYSMCKNNKRFLEE

SEQ ID NO: 135004 - protein, 346 aa, unidentified
MTYYAGLDVSLKEVSICIIDDDGEIVAQGTAPADPEGVAGWLKNRSLTPKRIVHESGQLSIWLQRGMVQLGLPAICIDARKAHKSLSARLNKSDSADAEGLAQLARMNWFTPVHIRSEESDRLRALVGGRERLIRLRKDLEGHIRGVLKTFGIRMTGIGQAQQRQGFRDQLAAAGETDPVLRTIADGFIAAHSTLCKATADFDRALKAKSKNNPITRRLMTIPGVGPIVSLSFAALVDDPNRFSKTSDVGAFLGLTPRRHQSGEMDWSGRVSKCGDATMRGLLFEAASCVIRQVKRFSALKSWAVRLAGRRGFRKAAVATARKIAVLMLTLWKSETDYQWTQEATA

SEQ ID NO: 135005 - protein, 385 aa, unidentified
MGSQTFIPRDYDVFSGLDVDKRSISVTFTDHDRFLKSLRMPYSAEHLLNHVRKHFPNKKVAFVYEAGPTGYGLYDGIVAQGYPCLIAAPSMIPKAPGQRVKTNRLDSRSLSENLRGGQLKSIHVPSPLYRELRHLTQLRDVLVSELAGMKQRIKSLLLFEGIEFPPAPPGSQWSFMVKDKLRKLPCSGTVRFKLDQLLDSLEFNEKQVLKAIREIRRYCQNDPELSQCMKYLMTLPGIGWITASQLLARIGDWRELNNIRQLGGFLGLVPTEHSTGERTDRGSITRTGDERLRSKLIQASWSAIRQDGELREFFRTVYRKHPRENASRVAIVAVARKLSVRIAVVLKKQRPYEVREKVHSAPLTQEETSPQGTTRREPEPGEKNS

SEQ ID NO: 135006 - protein, 317 aa, unidentified
MTTPTASFVGIDVSKHQLDVAVRPRGETWTVAHDEAGLSALVARLRALAPTLIVLEATGGLEVALAGALATATLPVAVVNPRQVRDFARSTGTLAKTDRLDAQLLAQFADTVRPEPRPLPDAQAQELTALLQRRRQLVEMLTAEKNRLALASRRIRPQLQAHIEWLHKQIAQFDDDLRQLVRASPLWREKDDLLRSAPGVGPVLATTLLAALPELGRLTRQQIAALVGVAPLNRDSGTLRGRRTVWGGRAHVRAVLYMSTVVAMRHNPVVAAFYHRLRAAGKAPKLALTACMRKRLTILNAMLKHHTHWAPVSAQPA

SEQ ID NO: 135007 - protein, 345 aa, unidentified
MIIGCDFHPSWQQIAWLNTETGETGEQKLVHAAGDAKLFYQQLAAPVLIGMEATGNSQWFIELVQDLGHEIWIGDAAQIRASYVRKQKTDKRDAAHILKLVVESRFPRLWTPDREQRDLRQLVLHRHKLVEIRSRVKNELQHLSLNKGMQRKAKLWSQAGQKLLRELPLKPWAACRREDLLGLLAMLHQQIGKLDEAVQQAAAEHPQAQLLMTQPGVGPNTALAFVLTIGDVGRFPRGKQVASYLGLIPREESSGGRQKLGAITKQGNRLVRSLLVEAAQIAVRFDPGMKKQYLHRCHQKPKGVAKVAAARKLAVRLYWMLRTQKPYPEIVRIESSPRVPLVGAS

SEQ ID NO: 135008 - protein, 411 aa, unidentified
MSKQKARYVALDVHKSYVMVGAVDAEQEIVLHPRRVVFNSFESWISKHLRSSDEVVLEATTNAWLIHDLLEPLVARVVVAHPYHVKLISAATVKTDKRDTLALAKLLAAKMIPEVWVPPQHVRELRALIAHRKRLISQRTAAKNRLHSILHRHHLVPPSGRPFSDDNRSWWHDLPLPSSEKLRLRQDWTIIEQLTSLIAEVEVELTQLSVSPDWADQVPFLIQLPGIGLLTAMTILSAIGDISRFPSAKKLVGYAGLGGRIHASGQVHHTGSITKQGRKELRSALVEAAWITVKNHPYWQAQFQRLQLKKGSKKAIVAIARKLLVVIWHVLTAQVSDRRAEPELVAKYLMNWASQHGLSNQHLGIRRPVFVRQQLDRLGIGQDLQGFKWGSTYFKLPPSSLVEQSPQTIAA

SEQ ID NO: 135009 - protein, 357 aa, unidentified
MRIIGVDLHTRQQSIAMLDTETGELVEKILEHEGEKVREFYSALPGPVLVGIEATGSMAWFLKLMEEQQIECRVGHPAKVRAAEPRKQKHDRRDARLLLNLLAENRFPSIWMPSTEQRDLRTLLRHRHQWVRMRTRVQHTLQSLALANGLRRGATLWSQAGQRELQALPLAPHTSQRRDALLRLYPHLQKSIDNLDQQVSEQALRRPLAARLLTHPGVGPVTALATEVFLGDPWRFADGKAVASYIRMIPSERSSGGRQRLGKLSKQGNALMRHLWSEAAMHAVRQDPALKRFYQRKLIQKGLGKAKAAAARKLGIRLWIMLRDQIDYAEFCRRGLRQKSGGARCGDARPINGPAVQ

SEQ ID NO: 135010 - protein, 404 aa, unidentified
MNDQSLIVAGVDTHYAAVISVTGEHLSAAQFPTTDAGYRALEGFITCHGALLRAGVEGTNSYGAGLTRHLHEAGIEVVEVIRPARQTRRMRGKSDEIDAYAAAHIALANNNTVAAKTGTGIVEAIRVTNAARRSAMKARTEVIVQLKSLIVTAPESIRTEFRDLTTTRLITRLTGSRARVGDDEVASRTRTALKRLAARYQQLDVEIAGHDTDLAQLVDTVNPALVQARGIATVTAAQLLITAGDNPDRLRSEAAFAMLCGASPLPASSGKTTRHRLNRGGDRAANSALHKIAIVRLATDPETRAYATRRTAEGKTKKDILRCLKRAIAREVFHLITTPQPAADSSDLRPARKRLGLSLTEVADALDCAISKISLIERGTIRDTRFLHRYRAWLNENQPHQIAA

SEQ ID NO: 135011 - protein, 362 aa, unidentified
MTESTTIVAFDQHAATTVAGVLLPGQRTPATHSLTSDVAAIGRFVERLRRTGPVQCCYEAGPCGFELQRFLTARQVPCEIIAPALIPRRPGDRVKTDRRDAGQLAVLYRAGALTAIHIPTEQEEAARDLLRCREDIRADLLRARHRLSKFLLRHGRRFTGTKKAWTKRHAAWLQAQQWRWPALEQTHRAYVRAVEEAVGRLHAVELELQALLTLDPLRDRITSLRCFRGLDNLTALTVAAELGDARRFPTAPSTMAFVGLVPSEHSSGTKQARGAITKTGNAHLRRVLVEAAWHYRHHPFLGPSLRERQRGAPAAAIAQAWTAQHRLHRRYRRLAARGKPKQVIVTAIARELTGFLWAVLTQ

SEQ ID NO: 135012 - protein, 345 aa, unidentified
MNTIKVTQSEGKGKSLCLNEFDHFLALDWSMKVMAIAHMRRRSKEPETFERPSDLKEFKQYLATLKGRKVLTIEETTTAQWLYVELIDHVDRIILCDPYHNRLLSNGPKTDKIDAGKLCQLLRAGLLKEVFHSLGGLYELRRLVSAYEDLVKAGVRVLNQKASMEQGHFESGKHAPFILEHVAKSIELYQRSKEQYEHKFTDLSRRNKLVKNLMEVSGIGIIGAVKIVAIVVDARRFARAGNYLSYCGLIKHEKISGGRSYGRRRPRFNHTLKVVYKLAAMSVISGHNNPIREYYEYLLAKGCAEHNARNAVARYIARLTYGMLKTGKRYQAYQWRNQAAGHQAA

SEQ ID NO: 135013 - protein, 387 aa, unidentified
MPQPNDLSRSLVALDHNSTIVAVVELSQSSWLVGGVLPGIERQPRKKLEPSPERLLAVLHRWRDEAVRAGHTITRIAVAFEAGRDGFWLARWPEAHGVEAHVIHPSSVAVSREHRRAKTDRLDTELLKRGFSGWLRGERGHCSMVRVPTIAEEDAKRPNRERECLVGERTRINNRIKATLARLGIRNFKPTLRQAAERLATIHTPEGMPLPPNALAELQRDMARLGLVISQIREIENARQKRLEQQPETTPHAMVRLLARVVGIGIETGDLLVHEVLSRPMRERRAVARYAGLTGAPDESGARRREQGLARAGNARVRRGMIQLAWRFLRFQKQSALTLWYRARTADSRIGTRKTMIVALARKLVIALWRFVTTGEPLDGVVLRPAA

SEQ ID NO: 135014 - protein, 339 aa, unidentified
MQHIAALGIDAAKNIFHLHGVDAHGKVVLKKRLVRTKVLPFVAGLAPCLIGLEASGSAHYWARELTKLGHTVQLISPQFVKPYVQGNKNDPKDAAGICEAVSRPHMRFVPIKSVDQQDMQALHRIRERQIKARTALVNQIRGLLAEYGVVMPKGVAQVRQKLPFILEDAENGLTMLAREWLQVLAAELQALDQRIRETNTQIQRVFESHEACQRLAQLEGVGPLTATALVAAVGEAATFKNGREFAAWLGLVPRQHSTGGKPLLLGISKRGDRYLRKLLIHGARAVVRTVDGKQDGRSRWLQGLIVRRGKNRAGVAQANKTARVAWALLAKGERYRPAA

SEQ ID NO: 135015 - protein, 307 aa, unidentified
MFIGIDVSKDRLDVHVRPSSEAFAVARDSAGLEALVARLQTLAPQLIVVEATGGFETVVASAIGAAGLPLAVINPRQIRAFATACGQMAKTDRLDAQVIAHFAEAVQPEARAIPDESARALGELVTRRRQIIGMMVAERNRRRQLTQPRLLKTVDRILATLQEQLSAIERDIDEAIRGTPAWREKEELLTSAPAIGPKIARILIADLPELGTLTRRKIAALAGTAPFTRDSGKWRGQRSIAGGRGSVRAALFMAVLVSIRRNLPLAALYHRLRAAGKPAKVAIVAAMRKLLVTLNAMLRDKTEWRAA

SEQ ID NO: 135016 - protein, 373 aa, unidentified
MFNLPVFVGLDYHTKTIQVCVMDQKGKILANQSVANDPAAVFRAVAPFGSNVFAAIESSTGSAAFAEALITKYQWSVSLAHPGYASRMKQTPDKSDWTDAKLLADLIRVGYLPRVWLAPPYIRELRDSVRHRHGYVQQRTQTKLRLRALLRQHRIDCPESPWTIKGKKWLLDANNIASSHVRTLLQDYYETIEFLNKKIVNAEERMAAATADDPIVKQLLHQPGIGLITAITMRAIIGHFDRFRTGKQLAHFCAVCPRNNSSAGKTTTGGLIKAGDDLLRQVLVEAAHRLIRYNPEWKAMADRLRANGKKTCVIIAAVANRWIRKLFYQMTVPTPVDSADVRFLRHGQESTPTLETPSDAGRCVSRSTRRLST

SEQ ID NO: 135017 - protein, 370 aa, unidentified
MDPFSPTGIHVPDWRCQSSVIEKKGTIMKLIRVGVDLAKNVFQLHGVDRDERPVWRRRLSRAEWLKALQETLEPGCEIGMEACAGSHHWARLLEAKGYRVKLIAPQFVKPYVKSNKNDANDAEAICEAMSRPSMRFVTVKSVEQQDIQAAHRIRSGLIEARTAKTNQIRGLVSEYGLVAPKQIASLRTGIPDWLEDAENGLTARFRRLLHGLWQDLQALDTRIGELDREIQQIARSVPAAQRLQQLRGVGPMIATALVAAVGRGEQFANGRQMAAALGLTPRQQSSGGRERLLGISKRGDSYLRMLLIQGARSALQTAGNKTDRLSKWITSLCARSHPNAATVALANKTVRIAWALLSRESDYQIDYVAA

SEQ ID NO: 135018 - protein, 424 aa, unidentified
MKVTYQTCCGVDVHKSFLVATIVKTTGGIEPSYQKKRFSTFNNSILEFKQWLLDNDCHDVCMESTGKYWVPVFNLLEDEINVVIANPKWVKAVKGNKDDAKDSKWIGDLFRLGLVKGSYVPCKKVRILREYTRYRYKLVSCRSSEKNRYQNALTVCNVALDSVVSDIFGKSSTSIIDYLLEQSGSSINHEEIASKLLRSLKSKEDAVIESIEGYQMTDAQKYRMRLVRAHMDYITAEINDVDKMIENMISSNPDFENAVQFLCTIPGVKRDSAITIISEIGTDMTQFSSSKRLCCWAGLTPGSNESAGKKKSVRITRAGVYLKPALVQCAHAAVKSDKSPYYKKKYESLVKRRGKKRAIIAIARMILTAIYQMLSTGEEWNPSNLYKIDMPVALVEKQKAKAIRQAKKLLQREGTLPPDKPLAS

SEQ ID NO: 135019 - protein, 423 aa, unidentified
MPEPMQRYVALDLHKSYIVAGAVDSQKKVILTPCRVPFAKFEDWTKKHLRPTDAVVLEAGVNAWLVHDRLQRLVERVVVVHPYHVKLIAASMVKTDRLDTLTLARLLAANILPAIWVPPTYVRELRALVAHRGRLVKHSSAAKNRLHSVLHRHSIPPPQGTLFSQASREWWETLPLSGAERLSVRHDLAIIDCFSALIDEVEAELAQLSTAEPWADQVPFLIQLPGVGLRSAMTILAAVGDITRFPTSKKLVGYSGLGAKVHISGQTRRTGGITKQGRRELRTVMVECAWTAVRTHPTWKAQFARLERRIGKQKAIVAIARKLLVVVWNVLSARAVDRQAETDAVARSFMTWGAGHGLAKSLGLSRPQFVRQELDRLGIGRSLDKLRYCGRIYKLPASELVPAEPGEPDPRHVELLVEQPGYN

SEQ ID NO: 135020 - protein, 345 aa, unidentified
MKIVGCDLHTRYQQIAMLDQETGELVERRLEHESGEARTFYAALSSPVRVGIEATGHTRWFERMLAELGHELWIGDAAQIRASVVRKQKTDARDAAHLLELLLSERFPRIWRPTMAERDLRQLVWHRQKLVWMRNAVGNQLHALAMGEGVCRKKKLFTKKGRVELEGLRLGVWASYRRRELLTMLDRFDGSLGELDRAVAEQAQQNAAAVLLMTHPGVGPVTSLAFVLTLGPVERFERSKQVVSYLGLNPREHSSGGRQRLGAISKQGNPMMRSLLVEAGHTAARLDSELRQDYQRLKLRRGSGVAKVAIARKLAVRMYWMLRSQASYAQLVRMQGSPWATLVTE

SEQ ID NO: 135021 - protein, 461 aa, unidentified
MPRDDTKTFENTRRQLGGLPLVRRNVAGVDLGSERHWVCAPNQDGSGREIASFGATTSELMRLAEWLKACQVESVAMESTGVYWIAPHEVLEGQGLQVLLVDTRQLARVPGRDKKTDPSDCEWIQRLHSCGLLRGSFRPEEAVCMLRTLVRDKANLVAESGDWLRRMQKSLDQMNVRLHRAVSDIDGVTGLAILRAIAQGERDAHKLAKLRDPRCSKTEEEIAEQLTGHWREDHLFSLQQALKMYDAVQERIAAYEKEILHKLGEMERDEQRGQTAPPLPNTNKAKMIKKRGQEAKRQALYRMSGLDVTQIDAIGVETVEVVLSEYGCDLSRFPTEKQFVSHVTLAPHVPKSGGKAVKKRKRNSASTRVAAALRMAALSLRHSQTALGAYYRKLAQRIGGDIAVFATARKLATLIYRLLRWGQPYLDEGAAAYESRYLQQRIKSLSAKAKQLGYELSPASG

SEQ ID NO: 135022 - protein, 395 aa, unidentified
MIFVGIDIGKNSHYFAAVRKEDGEVIREPAKISNNLKGFEQLVSCIRKHRKQNILIGMEDTGHYHFPLLKFLLDKGYTVALINPVTTDLTRKASGSISKTDKLDTLTICDVLSSNKKDKKPYRIFKVNRFDLYEQRCLTRHHHNLKEELNVYTNRLQKCVDIVFPEYNSLFNSKYGIVYMNVLKTYGSAESIAKADIRSLRKCFETNHRGRRITLTAEKLKEAARNSIGISSVSEVIQIRHLISQIELINEQLEEVDKKIEEFSRQNNSPILSIPGISHFSGTSILSELGEINNFTDHRQIIKYAGVAPLTHESSQFKAQHTKITKKGSRYLRKTLYQIILPVINSNKVFKEYYDLKISQGKSHRCAQGHCVRKLLRVIFHLLKTGQNFDPALLT

SEQ ID NO: 135023 - protein, 398 aa, unidentified
MTAAAETAERRMSPTTPGCQKIGPYLVALTTHHELNFSDRLKEYDPRKTQESRWEHVEVAMQTGQTARTYTLFVGVDIAARTAAVATQRPGAKASQSFIIDQAPEGYTSLLHTLQRTGHTPCQVLVVMEATGSYWISLATLLVHEGFGVSVINPAQAHHFAKALLKRAKTDVIDAQTLAQLAMLLQPEPWTPPPQIYYALQQRLAQRDDLLNLRQQVRNQLHALVQHPEVIAEVRARMDTLLATFEAQLTEVEREIATALTQDAAWAAAATRLQSIKGVGWVTAAWMLVATLNLTSCDTVDSLTAYAGLAPMPRQSGSSVWHRPAIGHTGHGRLRTAFYMATLSAAQHNPVIKAFYTRLREVGKPEKVARCAAARKLLHIAWAVVKKDQQFDPYYTRG

SEQ ID NO: 135024 - protein, 388 aa, unidentified
MEVVYEHCCGLDIHKKTVVACVVVSGSGKQPHKEIRTFNTMTADLLELADWLTAQRVTHVALESTGVYWKPAWNVLQSSFSMLLVNARHIKQVPGRKTDVKDCEWIADLLRHGLLRASFVPDRPQRELRELTRYRTTLVRERSAERSRIQKTLEGAGIKLGDVASDVLGASGRQMLEALVRGVTDASLVADMAKGSLRGKRPQLERALTGEFGAHQRFLVGQQLAHLDGLDVLIDQLSQEIGERLRPVQDKLDRRDAITGVGRQTAEIFLAEIGTDVKRFPTAAHLASWAAMCPGNNESAGKRKSGRTGKGNQWLRTALVEAAHAVSHTKDTYLNSQFHHVAARRGKKRALVAVGHSILRIIWHLLEHDCEYVDLGSRYLEERDRQQI

SEQ ID NO: 135025 - protein, 324 aa, unidentified
MHKSDGVFVGVDVSKAHLDVAVHGEVEVRRVVNDEQGIQGLVAELVQMSPALVVLEATGGFEMPAAAALAAAEVPVVIANPRQTRDFARSTGQLSKTDAIDARGLALFAARVRPNVRELPSEDAQALDALVARRRQIIGMLTQEKNRLGFALKPVQKGIRKHVAWLERQLAEVDEDLDERIRKSPVWAAKSDLLQSVPGVGPNLSRTLIAELPELGTLTHKQIAALVGVAPRARDSGKFRGKRMIWGGRAPVRTALYLSVWSASRWNPVIRRFYDRLRAQGKPPKVAQTACMRKLLTILNAMVRDERSWDPSIPLDQLRLQHSC

SEQ ID NO: 135026 - protein, 347 aa, unidentified
MAHYAAFDVSDKETAIHVLDEHGRLVWKGKRASEPEVLATALQRHAPELQRVGLETGQLAPWLYHSLKALGVPVVCLDARHARAATALQRNKTDARDAETLAQLVRTGWYREARVKGWAAHAVRHLVGARAQLVGISTDLSNQLRSVLRTFGLRVTGRAGGAFEAKVREQMEGRPEIAAVAEPLLAAWRAVRDQVAALDRTLIDAAKADATCRLLMTCPGVGVVVAASFAAAVEAPGHFRRSRSVGAYLGLTPRRHQSGEIDRSAGVSKRGDKLLRSYLFEAAACLLIRVQRPSALKAWGLALVQRLGFKRAAVAVARKIGVVLHAMWKENKPFEAWPGAVAAPAAA

SEQ ID NO: 135027 - protein, 309 aa, unidentified
MLTCAGIDVSKDILQIELDPQGMGAVFPNDINDFSKMVDWLKCHQVSRALLEATGGYERRAMKALQAAGFEVLRVNPCRAKSFAKAMGLHAKTDPIDARLLAQFAAVIQSPESRITNAEQDNLRALVQQRENFVQQRDDDKRRLKTTVSEIVKPALQSHIDYLRKAIKSIEKLMGQSAEQLDGEKVARLCSVKGIGLVTAASLMSYLPELGEVGRHEIAALAGVAPYNDDSGKHKGKRHISGGRFAVRRSLYMASWIVIRYQPEFNARYKALRDKGKCAKVALIACMRVLLIRLNAMIRDGSEWKEHIA

SEQ ID NO: 135028 - protein, 338 aa, unidentified
MKLYGAIDLHSTNNVTVVIDEQDRVVHQKRLPNDLALILNELSVYQSEIEGIVVESTYNWYWLVDGLMEQGYKLHLANTAAIQQYEGLKYTDDHSDARWLAHLLRLGVLPEGHIYPRADRPVRDLLRKRSQMVRQRTTNLLSIQNLVTRNTGSSINAKRVKGLDGQQVDELLADSDLGLAVKANLSVMLSADEQTEILERTIMERVKLRPQFSFLKTVPGIGEILALTIMLETGDIRRFPSVGNYASYCRCVGSQKISNGKKKGKGNTKNGNRYLAWAFVEAAHFAIQFNSKIKSFDQRKKAKTKAVVAIKAVAHKLCRACYYIMKNRIAFDVTKAFA

SEQ ID NO: 135029 - protein, 312 aa, unidentified
MADMVRLAGIDVSKATLDVYVAPAGENRTVSYDEGGLAELCRWLVGAGVAVVALEASGGYERQVSEAVEAVGLVVVRLNPLRVRRFAELRGRLAKTDRLDARTIAEFARAYPQEQSVKRDRRRERLAEYLLVRRHTQEVIVDCTNQLEHLRDAQLRRLVRARKASMERMCDTLDRRLAELIAEHTDLADLSERLRSVPGVGPVLAVTLIALLPELGSLTRRQIAALVGVAPFDRSSGHQIGRKTIQAGRAAIRAPLYMAAMVAARWNPAIAAFSARLANKPGKVRLVACMRKLIVTLNAMVRDGAQWQPRTT

SEQ ID NO: 135030 - protein, 322 aa, unidentified
MTMHVGIDVVKLTLEVAVLLPDTVTYRQVSNDEPGWHDLDKWLQELGANRSHICMESTGIYSQGVAYYFRGRGYPVSIVNPLRTRSFSRSLLQRNKTDKSDAYMIALYCQRMQPNMWHPKSEDSMRLRALSRLLADLESDRIRCLNRAEGLAEDNPAQPYIRTQIALFEAQQASVQAEMDALITDSKSLNCQRKLLTSIVGIGEKTANALLGELPDLSCFASSQQLVAYAGLSPQRAESGTSVRRRTKMSKIGATRLRTLLYFPALAARRHCPHLKVFANRLTEAGKAKMVVVGAVMRKLLVLIYAILKSGKPYDRNYTFTT

SEQ ID NO: 135031 - protein, 365 aa, unidentified
MVEVVRSPGGRFGSGLQRPPESLIPGSQWFFPEQSFEPPGELALQEWERTVNKSRLSYVGIDISKDHLDLHQLPQDRASSFEANSEGISKLITYLKRRKPTLIVIEATGGYETQLAAELVTAKLSVAVVNPFQVRSYAKALGILAKTDAIDAKVLARFAQDVKPQPRPLPDEKELDLKALVMRRRQLIEMLVAEKNRQHRASSSRVKQSLQRMVNTIQQQIDQLDDQIKETVRSSPVWREKDNLLRSVPGISDKTSHTLVALLPELGKLNRRQIASLVGVAPMNRDSGLYRGKRKIYGGRKSVRNALYMATVTAIRYNPLIKSFYDRLISTGKEFKVALTACMRKLLLMVNSMIKQNAAFKQNFA

SEQ ID NO: 135032 - protein, 429 aa, unidentified
MNCTQNKKIEQVKETTMIVGIDVGSEKHYFRAFNWRGIELTRKPVAFSNSMEGFNSFYNTIVELMQKSELEEALVGIEPTGHYWFDLGQFMGEKDIKFVMVNPHHVHKTKELDDNSPSKNDRKDPRVIAGLVRDGRYFYSYMPTGVYAELRNASNRRFVLVEEQTRAKNRLQKWIAVYFPEYKGIYTHIDAKGGMLVLKKAPTPEEIVRLGVEGIIKIWKDAKLRGNGHKKAMLILAAAMRSIGLKAGLTEARMEIQDLIEDYELQTKRLERVNDLIKGLCQQVRYADKLLEIKGIGITTVAGFIAEVGDITRFDSTKELQKLAGLELVADSSGKHNGKTKISKRGRKRLRYLLFEAAISVVGKNEEFKEIHRYYTTREKNPLKKMQSLIAVACKLIRVFHAILTKGIRYDASKMLKDIRHPGEQLKAA

SEQ ID NO: 135033 - protein, 343 aa, unidentified
MEMYVGMDVSLKETAICVVDGDGNIVCEGTVISEPTAIAEFIKAKAGGAKRVGLETGPTTTWLWHELRALGCPAICIDARHAKAALSMQINKSDRNDAVGLARIMQCGWYKEVQVKRISCHEIRAVLNSRALLVKIKRDLENQIRGLLKNLGLVIGKAGGNAFHRRAEELLSEQGLLREAVRPLLEVRENVSREIAALHKKLLDLARNDADSRRSMTVPGIGPITAMAFHSAIDDPSRFRRSRSVGAYVGLTPRRHASGEVDWSGRVSKCGDRMLRTYLFEAAGVLLTRVPHWCKLKAWGHRLWKRIGFKKAKIAVARKLAVLLHRMWRDGTDFIWSAKEAAA

SEQ ID NO: 135034 - protein, 416 aa, unidentified
MNAAGIDVSSRKSTVAVLRPFGEVVRLPFDVAHNTEGLASLAEKLKALDGETRVVLEHTGRYYEPVAKALHEAGLYVSAVNPLLIKEYGANSLRRVKTDKADAVKIARYALDNWADLRDYTPMDTIRYDLKTLNRQFQLASKQRTASANNLIALLEQSFPGIRKCFDSPVRSDGTQKWVDFVHTFWHVECVRKQSLNAFSERYRKWCKRHGYIFKQGNAVEVYSLAKNAVVLVPKSEVTKVLVQEAANQLTSISRSVETYRAEMERLASTLPEYPVVMAMYGVGKSFGPQLMAEIGDVRRFERKQSLVAFAGIDPMPNQSGDKNVRSNKSSKRGSPYLRKTLFNIMGIYLKCSPQDEPVYQFLDHKRSEGKPFYVYMTAASNKFLRRYYAQVRDYLSTLDDLPPVDMDSTGLKPSD

SEQ ID NO: 135035 - protein, 338 aa, unidentified
MTVVTVGIDLAKNVFAVHGVNAAGKAVLVKPLVRRAKLLELIATLPACLIGIEACTGAHFWAREFQKMGHTVRIMAPQLVSPYRMGGRHGKNDAADAAAICEAVTRPNMRFVPIKSVEQQGQLFVHRAHQGYVSERTALINRIRGLLSELGIVLPQAFKAFLSGVAQVLEDLPGYCNQVIGDLLNELYHIEEKIKNSEKLIQQLARDNSAAQLLMQFRGIGPMTATAIVASIGNGHDFKNGRQFSAWLGLTPRQQSSGGKARLGRITKAGDSYLRTLLVLGARSVLLGAAKNDDPVSRWALQLKERRGYGRALVAIAAKNARMCWAMLHLRDEFIFPA

SEQ ID NO: 135036 - protein, 353 aa, unidentified
MKIVAIDMGKSKSVARMYEGQDKPQRLETIRTDPQSFHDLLAKEQPERVLIEIGPAAGWVCDLCQALGMAIKVANTSDEPWRWRKLKSKSDEKDTAKLLKLELLGELKEVHVPEAKVRQWRQLIGYRQAVVSKVTEAKNRIRGILECRGLRLASGDRAWSEAGCEEIRKMARDLKETTQDDLWRGMVQLELEAMVYLKGQLEQVEAKLEQIAQADKRVALLQSAPGVGRRIGEMVVAMIDKPERFTRGRTVGVWAGLTPRRFQSGQMELEGHISHCGSAQLRQLLIQGCWSGLRKEGWIKWTFDRISAGNKKRRRLAIVAVARRLLVRLWAMLRDGTSWRKEELTNGTRTAAA

SEQ ID NO: 135037 - protein, 405 aa, unidentified
MFYCGIDIAKYKHEATVIDQTGVSLLDSISFSNSKEGCEKLLALFQRLNIAKEDLLIGMEATGHYWLSVYGYLLEQGFEVKVINPIQSEAFRKMYIRQTKNDRKDSFIIAQIMRFGQFSATSLSEEVIIAMRQLSRYRLALVDACGDCKRRVIALLDQVFPEYDALFSDTFGVTSKEILSQYPVPEELLTVSTRKLTTLLENASHGRFGREKAEQLKAAAANSFGVSFAKNAFAFQIRQLVEQLEFLEGQIMELEAQISSLLKQTGSYITTIPGIGDTLGAIILSEIGDIHRFNAPNKLVAFAGLDVRVTQSGEFTGTRQKISKRGSPYLRRAIWLAASRAAFCDPILSEYYQSLRARGKHHLTAVGAVSRKLCNTIYTILREERPWQPVPPRDKKVSNHTEQQR

SEQ ID NO: 135038 - protein, 336 aa, unidentified
MNYNVKNEILSVWLDVAKEKIDVCFMYQSKETYQKIENSKDWLEKFIEELQRQNVNSSIPFILESTWDCHVLCALLLKKWGFNVKEINPIITHQYIKHSIRWTKTDKTDSKMLWRIWVLEWERLKTFDRSEEAVILKKKVSLIASLEKQIQSFKRMLSAHEKQMKIMEVIWMDYLEWLKDSLKRITKQKELLQKAIEMYEYWDEEVNTTIKIIDSITWISPYIAKVCYIIFASNQFYSKKAMLSFIGLDPKLKQSWKKNEAIRLSKRWNGYARLKLFQAAFWAVKHCEYFRKLYQKYKDNGKHYYVALLGVARKIVYIMRSLIKNRTLFNPNYQTI

SEQ ID NO: 135039 - protein, 356 aa, unidentified
MNEGSWVGLDVHAWSVVAGVIEGVSGEVRSLRVPTGNAETVAWLETLPAPVRVVYEAGPTGYGLARACAGAGISCVVAAPSRIRPAADRVKTDRRDAERLARLLRLGEITPVRVPDPEEEAARDLVRAREDARGDLMRARHRLSKLLLRHGAVYDATAWTRAHDVWLRRQRFQSGPLAIVFDECYGRMLDAKTRRDALDKAIAELAATPPYVEVVDRLVCLRGVSTLTAFALTVELGDWRRFRPESLGPFLGLTPSENSSGERRRQGGITKTGNTHARRLLIEAAWHQRRPPRMSTVLTRRRDGKPPAVQAQADRSARRLHGRWHALEARGKPRSIVVVAVARELTGHCWALATME

SEQ ID NO: 135040 - protein, 351 aa, unidentified
MPRTSIVHAVTAIGIDMGKNTLHMIGLDARGAIVLREKVSRGRIALRFANMSPCLIGIEAGLATHYVARELTAIGHDVKQVPPAYAKPFRQVHKNDFRDAHAVAEAVQRPTTRFVPAKTDEQLDLQALHRVRSRLVSDRTAVINQLRGFLLERGIIVRQGLRFLRQALPDILAKRTDVLSPRMMRIVVDLASDCRQLDERIEAVTDEIETLAKSDDSCRRVMTVPGIGPIISSAMVAAIGSGGAFARGRDFSAWLGLVPKQMSTGDRTILGRISKRGNGYLRMLFMQAARVILMRPASWPKHGFGGWLAHAAQRLHPNVLAAALANKLARIAWTVLAQERSYEARVTMTAA

SEQ ID NO: 135041 - protein, 412 aa, unidentified
MEVLHPHCAGLDIHKDTVVACVRHMVDGAVKREVRTFKTTTKDLMALSEWLSAEGCTDVAMEATGIYWKPVWHILADGDFKLILANAAHVKNVPGRKTDVNDATWLADLMAHGLIRGSFVPDEPTQEMRNFLRTRKQFVRERSSHVQRIQKTLEDANIKLDSVITDIMGLSGRRMIEALIAGETDPFALAALAHRRIKASQAELEAALRGRVSDHHRFMLRLLLQHIDAIDAAIGQIDQEVDAHVEPFRTAIQILSSIPGISDLSAEVIVSEIGIDMNRFPTEGHLISWAGLCPRNDESAGKRRSTRMRKGAPWLKTTLIQCAWAAARTKGSYLQAQFQRVRSRRGAKKAIGAVAASVLTAAYHMLKNGTLYEDLGSDHFDRRAKGKQILRLVSRIQNLGFAVQITPIGAAT

SEQ ID NO: 135042 - protein, 411 aa, unidentified
MNTNPVFLRYLALDAHKHYVVIGGVNATCETVVPPRRLEMAELEDWLRTHLQPTDKVVIEATTNTWTLYDQVARYAGAVVVAHPPHIKLIGAALVKTDKRDVFVLAKLLALNLIPEVWVPPQPVRELRELVAHRLRLTRARTQTTNRLHSMLQRHNLAAPDGDPFAAQHRPWWTSLDLSPTEKLHVRQDLATLDLLNAQIAEVEQELARLSTVAPWAAQTPFLMQLPGIGLITAMIILAAVGDITRFAHAKHLVGYAGLGTYVHDSGKTQRHGGITKHGRADLRDAMVEAAWVAVRTHPRWQAEFARLAKRMPDNQAIVAIARKLLVVVWHVLHDHAADHHALPDKVAAKFFVWSARLGQTYRGRFTPRQFVRWQLMQLGLGDDLTHVRFGGQLRSLPSAEELAALTATVT

SEQ ID NO: 135043 - protein, 454 aa, unidentified
MQKQDSYDYYVGIDCAQNKHDFAMKNNQDKFLIKKGHFSNTLQGYEKFLNTVLSKCLNKDKILFGMEVTGIYGTNLYERLKSDGYHVVMISPDSVKNYRDYKRLNKTDKIDSACIAELLLNGDAQIVHVEKNGYTDLKAYIRRRNALKVTCTQETNRFLAKVCLYFPDLLKVFPSGRATLKAIFSIYPTPYSIIEADFDELVSVLQKASKNKFGVDKANELIHAARNSIVVRKSISDGELYNIHSLIDSIDSLESEIRNLEKIIDSMAEEFPAYHVLLTLTGCGKITAATIVAEIGDISRFHKASQIVSLAGLYGDNSKSGSSVNKHGKISKKGSRYLRHAIYMVAEFARRNNPIFKAYFTKKKNGDRTKHTLAVNAVANKLCKVIYSLMKNQSTYIIQYRDLAKLSESTQNEFFQNAETDFSAKTRRKKYLYEDEYGELHEFVFKSIKTALIE

SEQ ID NO: 135044 - protein, 312 aa, unidentified
MNKMIIGIDVSKNDLDVAFWQNDKSFFLGKYPNNQIGFQTIFKDVETKRQKYNADTVLAVMEPTGGYEQHFAYFAFSKCWEVSLPNPGNVRNWIKGIAKRAKTDKQDAMMLAHFGVVQQPLLWKPLPEEVAELESMLDRLDDLNEILRSEQNRLESQQNRQICHQLSQKSIQDNIIYLQKQIEILDDAIKNHIDTHTHLKEQVKNLKTVPGVGNKISPHLLVAMHRFGVLTDGNGTNKAIAAYYGLDPQPHESGKSVYKRPSISRQGDRHIRHLLYMGVLGGIRGNKSIGVTIHCRHFTSDCLVEVKRLKQQ

SEQ ID NO: 135045 - protein, 292 aa, unidentified
MFGIGIDVSKATLDVAVHEQQFRQFSNDKRGVQRLIQWLKQWPAKQVVLEASGGYEVAALDALHAAGLPMVRINPARARRFAQGTGRAAKTDRLDAEVLAQMAHLLSLTRYTPPAPWQRRMAEFAQCRRQLVQMRVSEIQRLRQLGEPTLIAMKQRHIDELSKDIKELDAAINEQLSAQPAWKNIGTLKGVGPVLATTLACELPELGTLNGKAIAALVGIAPMNRESGTWKGQRRITGGRAVVREALYMAALTAIRYEPRLRDFYATEEQGQGEQGRAGGSHAQDAGDPQRP

SEQ ID NO: 135046 - protein, 363 aa, unidentified
MNTTTAASLVGVDLAKNVFELAVADEDWRITERARLSRRQFERWFQNRQVGLVVMEACGSAHHWARWLTGLGIEVKLLPARYVRAYVKRNKTDAADAAALLEAARCAEIVPVRVKSLEQQGLQALHRTRSLWMATRTSRINALRGFCREFGIGVAEGSRVGVEQIGRVLADPQTAIPGLLRGTMTLLIEEIRLLEARISQLERELTAAAKQSPACATLLSVPGIGLLTATAMVAATGGSVGHFKDARHFASWFGLTPKEHSSGSNRHLGRISKRGDRYLRMLLTHGARSVLRAASVATTAGKPIDALRQWAVAVQKRSNHNKATCALANKLARICYATLRDQEPYGAARLNRKLERIAFAMPA

SEQ ID NO: 135047 - protein, 358 aa, unidentified
MTDGSRGKPTMTVGIDLGDRYSYLCLLDTESGEVIEEGRLRTTPEAFRRRFGSEQWMRISIEAGTHSPWVSRLLGECGHEVLVANARKLKLIYAESRKTDQIDAQKLARLARLDPKLLSPIEHRGESSQAHLALIRSREALVRTRARLINHVRFTVKPFGHRLPKCSAQGFHKKVAGGIPEFLEPSLGPILQTIGELTDRIREYDRKLEAAAEELYPETRLLRQVQGVGPLTALAFVLILEDPMRFANGRAVGAYVGLVPGKDQSGDNDPQRRICRHGNELLRRLLVGCAHYILGPFGQDSDLRRHGEKIAQRGGKNARKRAIVAVARKLAVLLHRLWLSGEVYDPLYNARRAGEYAA

SEQ ID NO: 135048 - protein, 359 aa, unidentified
MASKVKKSKINFKGKTVSIGIDMHKKSWRITALVEEKIVLGITLASPTYEAFEKILDRFKGNHVRIVYEAGPGGFDLYDRLTDDGIECIVTPPSLIPTESGNRVKTDKKDSLKLAQMLERNMLKAVWVLSPEERAHRQLVRTRRQILNHRSDVMRQIKSLLLFNSIEIPFKSTQHWTGVFMNWLMKLDLGHKALNRSLKAQVDLFNYLNAEKKLLTKDVLQLAKDEKYAQRVDLLKTIPGIGPLSAIEILVEIQEITRFKTADELAAFLGLTPSQYSTGEYIRMGHITHAGNARVRTTLVESSWTLVGKDPEMGRKYEKIKNKRGGKKAIVAVARNLSGRIRRILLDQVPYQLDFQKAA

SEQ ID NO: 135049 - protein, 328 aa, unidentified
MNLAGIDIANDTFEICLRRGDSVASRCFNNTNAGHRQAIRWLCYRNQPARICLEATGIYHLQLALALTEAEGIELMVLNPRASRRFADAQMRRAKTDKVDAALLLSYLERMPFKPWRAPSTAVLELQSLAHRLSQLQKELRREQCRLHACERAGAHTRFARQDIRAHLKQLTSRLERFEARAIDWLRQHPQLTDDLELIDSVPGFAERSAFKVLAEVSPLPADMTAPQWVAQAGLDPRPQESGSSVHSPRRISKLGNAKLRAALFFPAMVAIQRDANVKAFYEARLARGCKPRQAQVAVMRKLLHAIWGILQHRQPWQGHRFYRLTTT

SEQ ID NO: 135050 - protein, 417 aa, unidentified
MSEYAAFVGFDWADKKHDICLVDAATGKKEPSVIKHTPQAIEEWATSLRSRFGGQKIAVCLEQSRGPLIFALLKYDFLVLYPVNPSTLAKYREAFSPSRAKDDPQDAEYAAELVIDHRERLKAWRPDDEKTRTLQYLVEHRRRVVSDRTRASNRMTALLKLYFPQVLEWFDDIRTDLVCDFLLQWPTLEAVKKLRRATLEKFFRAHNSVRGRANEERFAAIKEAVPLTQDRAVIDSSVPMIKALASQMKTAIAAIREFDQKIEELCAGHEDFHLFASLPGSGSVYSSRLLAAFGTDRERYESADEVARYSGIAPVIERSGQSCWIRWRYFCPKFLRQSFVEYAGESIKHSFWARAYYAQQKAKGKSHQAAVRALAFKWIRIIYRCWHTRTEYNEVKYLESLRKKGSSLLSYAAQKAA

SEQ ID NO: 135051 - protein, 343 aa, unidentified
MKLSRVGIDLAKNVYQLHGVDRSGKTVWKRRLKRHQWFKALLDRTEPGCVIGMEACASAHHWGRELQSRGYTVKLIPPQFVKPYVKSNKSDAKDAEAICEAMSRPNMRFVTVKTVEQQDIQATHRIRAELITQRTAKANQIRGLVAEYGLVAPKHMSSLRAAIPCWLEDAENGLTDDFRTLLHGVWNDLLGLDDRVGEMDQVIKRLAENHEDCVRLQQLRGVGPMISTAMIATVGDARQYRTSRQMAAAIGITPKQHSSGDRDRLLGISKRGDVYLRTLMIHGARAVVARAKHKDDPLSRWVTGIATKRHPNVAAVALANKTARMAWAMLRHETDYDPDFAIR

SEQ ID NO: 135052 - protein, 370 aa, unidentified
MTSMPQPVGDDQDSSRSTEEIILGADTHKDLHVAAVITALGVLRDTKTFPASAAGYDALLGWAGTFGILRRAGVECTGSYGAALARHLRQAGIEVIEVNQPDKANRRRQGKTDSLDAEAAARAVLSGRARGSAKAGDGPVEMLRMFKLAKSSAIKARTQTINQLKAVIIAADPQLRETLSGLSTLQLIRRCAQLDIDTPQDTTSAAAYTLRLLARRILTLTDEIHELEQQITTAVTTHTPQLLTRCGVGPDNAAALLIAAGDNPDRLRSEASFAALCGVSPLEASSGKTRRRRLNRGGNRQANSALYRIALSRLRWDTRTRDYLARRITEGKTHREAIRCLKRYIAREIYRIITSPPETQLSLIPTGRSN

SEQ ID NO: 135053 - protein, 436 aa, unidentified
MICAAIERCAGIDVGKKFLSVCVLTGALEGEARQQKRRYGTTVADLTKLREWLQGEAVTHVVMESTGSYWKPVFNVLEDVVKVYVANPQEVKARKGHKTDDKDGWWLAHLLRHAMIHPSFIPPRAIRELRDFTRRRKRLLGAATSERNRVQKILEDANVKLGNELTDVFGASGQLMLDALLKGKATAEEIAQFAKGRAKKKIPQIITALEGHQMSDHHRKMIGYSLKHLRFLEEQLMEMDEDIRAKIREAGLEPQWQMVQSIPGIAETSGAAILAETGGDMTVFPSVKNISSWAGVCPGNNRSAGKSKSSHTTGGNPWLRSALVECSWAATVKRDCFLKEKFWRIVSKTREHKKGPALIAVAHTLLRLVYQVLGSGKPYVEKGAAPPQARQRDRIIRHHVRRLGKLGIAVYSTRPAATGGIARPPEGLILDAGPQA

SEQ ID NO: 135054 - protein, 363 aa, unidentified
MNATAALPIVGVDLAKSVFQLAVADGTWRVVEQQRLTRLQFERWFINRAVGLVVMEACGSAHHWARWLNGLGIDVRLLPAAYIRAYVKRNKTDAADACALLEAARCAEIVPVRIKSVEQQALQAMHRTRSLWMATRTSRINALRGFCREFGIVIAQGSRLGVEQIGRVLADPHSAVPLLIRRSMSLLVEEIRLLEVRIAQLERELTALARQSPACTTLLSIPGIGLLTATAMVAATSGEVSHYRDARHFASWFGLTPKEHSSGSTRHLGRISKRGDRYLRMLLTHGARSVLRAASMAAQAGKTVDGLRQWALGVQRRSNHNKATCALANKLARICYATLRDHEPYGAARLNKKVARTAFALPA

SEQ ID NO: 135055 - protein, 366 aa, unidentified
MENMLKTVDKNTALYVGVDVHRFEHTAVVANRFEEELGLLSFPNTLSGIESFRLWLLAIDNPQKPRIIGIEGSNGNGKLLTSIISSDYQEIYEVNPVYTKQRRDHGTTGDKSDAVDARLVIEVLTRKLDKLPKVTLQDQSEDIAILDQLTTFHNDLIRQQTRLKNQLHRLFSEDNPDYQSGRGSSFSLKALKSWKSYLGKQTNSTSSIMTPSGTRRMITKDKIKQFEQLRLLLKKADGHIHNLLGNNNLLTLPGAGIITTAKIISKTKGIKRFNLDGFIKYAGIAPIEKQSGKTKKHKQNKSGNRQLNNALYTIALTQLRCCPKAKAYFEKKIKEGKTKKHAIRCLMKRVACTVYGMLRTGEKYLG

SEQ ID NO: 135056 - protein, 461 aa, unidentified
MSKRQDKEKAEKRIPLQGLPVIRQRVAGIDLGSERHWVCAPTVDGKDREITSFGATTPELLRMAAWLKARQVESVAMESTGVYWIAPHEVLEGQGLQVLLVNTRQLAQVPGRNKKSDPTDCEWIQRLHSCGLLQGSFRPEEAVCMLRTLVRDKANLVAERGDWLRRMQKSLDQMNVRVHRAVSDIDGVTGMAILRAIGNGERDAQKLAQLRDPRCSQTEQEIAEQLSGHWREDHLFSLQQALKMYDAVEERIAAYEKEILRKLEEQEQEQMRGQTPPPLKNANKARMIQHRGQEAKRGALYRMSGVDITQIDAVGVETVEVVLSEYGADLSRFPTEKQFVSHITLAPRVAQSGGKPLPKKKRNSASTRVAGVLRMAVLSMRNSQTALGAYYRRIARRIGGDVAVFATARKVATIIYRLLRWGQPYVDEGAAAFEARYQHQRLGRLTATAKELGYQLTPIQA

SEQ ID NO: 135057 - protein, 352 aa, unidentified
MRIITTIGLDLAKKVFHVHGVDAEGNVVVARRLRRKEVLAFLSNLTACLVGIEACGSAHYWAREIARLGHTVKLIPSRYVKPYVKRGKTDPGDAAAICEAVTRPTMSFVPIKGVEQQGLSMLHSARSQLIGQRTQLTNAVRGHLSEFGIVAERGLLGLAELAAIVRDESDKRLPVAARAALMVLVRQIDMISTEIDALDSTLRKENKASALGPRLETIPSVGPVIASALRARVTDAKLFENGRHLSAWIGIVPENNSTGGKLKQRGLSKKGDRYLRSLLVNGAMAVVRQAQKRPDKHPWVAKLLGRMSAKQAAIAIANKTARIAWVLMVHGGVYEAGHRAPQYRAQACVAAG

SEQ ID NO: 135058 - protein, 326 aa, unidentified
MTLSHLTDNTFVGIDVGGAGLDVAWHRGDSAHYANRPDAIATLVERLRTGPEVTRIVLEPTGGYEKPLVKALRQAQLPVEVIHTTRFNAYRALVGVKAKSDTSDARLLASYAAAPDEIRGRKAGHVELPEDAIREALSELAGRRDQLKHMIHAETCRLGTVRLSELRQAITAHLEALRAEDKQVHRMMLELVRQRIDLRRDQRLLKTIKGIGVKSALGLLASVPELGRIDNKAAAALIGVAPFVRKSGTMSAPARIHGGRAAVRSILYMAAVTASRHNPVLRPFYERLIAKGKPPKLALIAVLRRLVVFANAVLRSGQPWRGASAT

SEQ ID NO: 135059 - protein, 338 aa, unidentified
MALYCGIDLHSRVCWIAILNEGLKVIRLTKVDNDLEAILRVLESYRDDLEGIAVESTFNWYWLADGLQAEGYRVHLTNTCAVKQYDGLKYADDKHDARWLARLLVLGILPEGYIHPRRDRAVRDLLRRRSFLVRKRTSMLLAMRGAFTCRTGLATTTNDVKKWTEADVEPYLDDPVEVLGITCMIEPINALNVQIKRLEKEVLARARLRDEFALLQTVWGIGRILSLAVMYEVGDIGRFARVGRFASYCRLVKTARLSVGKSKGSGNAKNGNPYLSWAFSEAAHFAIRYHDDAKRFYQRKKSKTNGIIAVRGLAHKLARASYYVMRDQVEFDPMKVFG

SEQ ID NO: 135060 - protein, 403 aa, unidentified
MSPEHSIDIFLGLDVGKSEHHACALDRDGNKVFDKPLPQLESELAGVFHQLQKLGTVLVIVDQPNTIGALPIAVARDCGCEVGYLPGLAMRKAADLYPGRAKTDKRDAFIIADTARTMPHTLRAVDRNDEVLSALKMLSGFDDDIARDCTRTVNRLRSILTQIYPSLERVFAGSTLTRTPILELLIHYKGPQGLKRAGYQRVLNWMIKRTRKDPTPLVDDIFAALKAQTVTVPGSDAAELVIPQLAANIQALKEQRNTIAEQVEEMLADFPLCEVLMSMPGVGIKTAAQILLAIGDGSDFASAGHLAAYAGIAPVTRRSGSSIRGEFPARSGNKRLKNALFYSAFAVIRSHEPSRRYYERKRAEGKRHNAAVICLARRRCNVIYAMLKNKEFFREIPPRPVAA

SEQ ID NO: 135061 - protein, 360 aa, unidentified
MRKRLSKKESWFKENNFTAENEIYVGVDVHKVHYHVAIWHNGRTGCVYSMSSDNNKLLRDLKRIRCSLKNIVYEAGPTGYSLVRLLRSAKLPAEVVAATKTPRMVDSAGKTDRLDCQQLAEYAAKGLLTYITIPTEQQESDRQVVRLRDQLMSKRKRVMQQIKSFLLQYGIAWPGGGWSKVVLCKLRKMDIGSELRFALDQYLDEYEFFSRKIAQTKSKLRQIFSRERHSAAIKIFKSHPGVGNIVAWEFRAEMLDITRFSQPKQVSKYLGLCPRISQSGNTCRHGPITKTGRRQLRAVLIQAAWAWHRNDPHARQIYNRLLRNTGNGKKAIVGLAKRIAIHLWRMLCDGCLYDANVVKV

SEQ ID NO: 135062 - protein, 385 aa, unidentified
MQKHHDDSKACLTAFVQDNTVIAIIEMSLRSWLVAGMIPGINREPLKKIAADPEVLLRLLYRWRDEAIKAGKEITRIAVAYETGRDGFWLARWLRDRGIDAHVIHATSVAISREHRRAKTDRIDTAMLRRGFLGWLRGERGHCSMAVVPTMAEEDAKRPHRERESLVKERTRTINQMKAILTQFGVRNFKTASRKAAEKVDDVRTPEGVPLPPNAGAALRRQIEHFRLINGQIKTIEKTRLQRLRQQPTDKFNAMVFLLVRIIGLGIETAEQLVHEILSRKLRDRKAVARYSGLTGSPDESGARRREKGLSRSGNGRVRKILIQLSWRMLQFQPDSSLVRWFKDRTANSQRSRKPMIVAFARKLVIALWRYVNTGVTPEGFKLAK

SEQ ID NO: 135063 - protein, 338 aa, unidentified
MELSVILMDIAKNVFQLHCVDRQTGEIERIKLRRNEVLPYFARRTPALVAMEACGGAHWWARQLQQLGHTVRLLPAKALRPFVLRNKTDAADARAIWTAVQQPEMKTVAIKTEYQQSILALHRMRAQLLKFRHMQTNAIRGLLLEFGHPLPESYLALRKAFPTVMATLDKQLPGILIETLREQWARVQSLDNEIALIEGRLKRALAETPTCQMISDIPGVGLMTATAAVATMGDPASFKTGREFAAWLGLVPRQTGTGGRIRQLGISKRGDAYLRTLLMHGARAIIARRTYSDWVAGLIARRPYSVVIAAIANKLARTIWAVLATGKRYDGAAFAAAI

SEQ ID NO: 135064 - protein, 319 aa, unidentified
MNLVPVGVDIAKLKFDVAVQLPNQKYKTKKFANTPAGCREFLNWLARFGHCHVCMEATGCYSTELATLLADNGCCVSLENPARIHAFANTELTRNKTDKSDAALIARYCALYQPAPWHPAPLSERQLTALVRHLRNLEEMRQMEMNRLEAADEVIVPSLNEHVTMLDELIEETRNKINRHIDDNPDLKRDRELLKSIPGIGDMLSVSLLAFAGNLRRFSNSKALVAYAGLNPRRCESGMWKGKSRLSKVGHAELRSALYMPAVVAGRCNKVVKNLMERLAARGKTGKERVCAGMRKLLQLAYGVVKSGHEFNAEIPLAG

SEQ ID NO: 135065 - protein, 427 aa, unidentified
MEAIFDVAAGIDVHRDVLVVSVRRRGERGREQVETRTYPTFHDGLVQMVAWFDEQDVPVVGLESTGVYWKPVVLALRERAPSRQVWLVNPAEVKQVPGRKTDVKDSEWLSKLVMHGLVAPSFLPPPEQAELRQLTRARTKVVGNLTRCANRIVKELESSGIKLASVCSDPLGKSARAMLEALLEGTKTVEEIADLARGKLRLKIPQLQRALAGTFTEATRFILRQLLAELSHFEREIKAFDDQIAQRLTPWQREVDLLLSMPGLDRVAIASILAEIGPDMSVFGTADKLAAWGGVCPGSNESAGKPKRAPTRKGDKYLRTILVQAAQAGKNARGSFWRDVYHRLVVRLGQPKTIMAIARKMLVAVFYMLRDGVPYRRPSPPPPSPATVRRRVQRLTQQFAELGYDVQVSPMASSSPTAPGAILAPAT

SEQ ID NO: 135066 - protein, 344 aa, unidentified
MTSIDYIGLDIHKKTISFCAKAQDGTILDQGTIVARRDTLLAWAKARPRPWIGAMEATLFTGWIYDLLKPLAQELKVAHPAMLKAITAAKKKNDQVDARTIADLLRCNLLPECYMAPSAIRDLRRVLRYRNLVVRQATRMKNRIAGLLMETGTPYNKERLHGRAYFSELLGSLREVPRSVVELLQLSRGQLEFFATIQRRLLKGLCQNPDLSERVARLQTIPGVGEIMALSWALEVGEVKRLPSIAQAASYCGLTSAQHNSAGKEQRGPISKQRNKHLQTILIEAAKLAPRHNPQLAVVHERELKRGDRNQATLAVARKLVAYLMAVDKSGKPFAMRASGEEAA

SEQ ID NO: 135067 - protein, 395 aa, unidentified
MQRDVKEVMAEVLGKLTAKLDAPTVSTRAQENRKGNTVSPNRDRLTVGVDLGDRWSQYCILGLEGETLGEGQLRTTREDVGEFFVGLTTARVVVEVGTHSAWVQDVITELGHEVLVANPRLMEGSKRRKRKSDRIDANKLARLGRVDPQSLYPIRHRSREVRQDLVVLRARDALVSVRTELINTTRGLVKSMGTRLPGCSSPSFAEKVKDAIPIEIGEALQPLVQLVETVNECIERYDEKIEELGRKKYGHTTLLRQVKGVGPITSLAYVLTLEDPQRFANSREVGPYLGLVPKQEDSGDCQPQLGISKTGDRMLRRLLVGSSQYMLGAFGPDSDLRRYGLRLCERGGKNAKKRAVVAVARKLAVLLHHLWGTGDVYEPLHRRETGTGIAQAAAA

SEQ ID NO: 135068 - protein, 391 aa, unidentified
MGDDKHVVIGMDPHKRSVTIEVMTSEEQVLGGGRFTTDVEGFTSMLAYVAAWPDRVWAIEGCEGIGRHVAQRLVAEGEVVVDVPAKLSARVRVFATGQGRKTDDTDAHSIALVGVRMNGLRAVVDDEQLELLRLLVDRRRRLGEEHTRMVCQLHQLLLELIPGGAKRDLSAAQARKLLAGVRPRDVVGKTRKQHAMELVVDLERIYQRTKAANKELIELIKSTGTGLLDLHGIGPSGAARLLVEVGDITRFPDRGHFASWTGTAPIDASSGDRVRHRLSRGGNRQINVVLHIMATVQLRNPTEGRAYYDRKIAAGKSSNEAMRCLKRRLSDIVYRTMLNDLVANKATGPGGHRGASLQSSAVGSHPHADSSDKSLPGPVKAKPKTRLPRAS

SEQ ID NO: 135069 - protein, 416 aa, unidentified
MKIYPRTRPIQRYIALDIHKEYILAGGMNASQVWVLSPHKIEMGKFREWAKKNLYETDAVVIETTTNVWDIYDIVEPLVGHAVVAHAGAVRQIAEARVKTDKEDVKRLIRLLIADIVPEVWIPPQPVRELRGLISYRQRLVKTGAVFRNRLQSLLHSHNLVLPEEGLVSQEWWTQQEKISPLEKLQIGQEIALLEQIEKHKTEVDQELGKQSLGETWSKDALRLMQLPGIGVVIAMTVLAAIGDIHRFESAAKLVGFSGLGAGVHDSGQEHIEKRITKSGRKELRWAMVEAAWRAVRMSPYWKEQYEKFFHRMRRESQAIVVVARKLLVAVWHVLSKEETDERASEEELAYKMLLCSWSLSEDARQGLSYKQFAKYALMRLGVQTDITRFVRGKVPRRIASREEVLVRMAELGLNG

SEQ ID NO: 135070 - protein, 395 aa, unidentified
MKKVCGLDVHKDTIFLCILTENGQVFLREFGTLTAEVEEMRDLIKEQHVSEVAMESTGIYWMPIWRILQGHVEMKLVNPYFIKQLPGRKTDVKDSQWIATVLQKKLIKGSYIPGKHIQELRQYERRYVHICEQVTRIEQEIDRQLHRCNIRITNFTSKVGSVSVMGVVRGLVKGETTPEELVKHIHGRITNKHKEKIAASLKGVVSGSDRFIFRQNYEELELLTRQQQECVSEMQQICDTLYKQEMNLLCSVPGIQKLSAMTIIAELGVDMKTFLTAAALVGWAGLRPRNDESAKKIKSRKITNGDKYLRRILVQCAWAITRTKGCWLSGKFSELAKRRSQKKALIAIARKLLVIIWHILSKHEVYKEYKPKLSPEQKQKRIARLEKQIIELQAQ

SEQ ID NO: 135071 - protein, 380 aa, unidentified
MRCCNGACAVHDQPKHLAIAHGKLSLFPYQSQSEEYGMKLFIGLDVSLAKTAVCVINEYGKIAKEAQVPSDPQAIVDFANTLEGAVAIIGLEAGPLSQWLHRGLADAGLDVVLMETRQVKGALKAMPIKTDRRDAEGIARLLHMGWFRPVHCKSVSAQEVRALLAARKAIQQGMIALELSLRGLLRNFGLKVGAISRGQFEARIRELVDGNAMLQAAAGPMLRARASLRHELAGLERQVRLLAKDDAVCRLLMTMPGIGAVVALTFRSAVDDPARFSSSKKVGPWVGLTPSRNQSGERDVIGGITRAGDANLRRALCQAATVMIHRGRSTWLRSWAAQVAKRRGAKRAMVALARRIGTILHRMWRDGTEFSTVPLIVKSA

SEQ ID NO: 135072 - protein, 385 aa, unidentified
MTQLENMSTPSAALDQNSTLICVVEMSLKGWLVAGLVPGIKRQPLKKLEPDEAALHRLLLGWKAEAERAGRQIARIVLAFEAGRDGFWLARWLRARGIEAWVIHPTSIAVSRDHRRPKTDRLDTQMLMRAFLGWLRGEPGHCRMAAIPTLEQEDAKRPTRERDTLVAERTRIINRTKSALIRLGIRGFNPGLRKARERLASLRTPEGVPIPPNTLAEIHRDLARLAVLQTQIAEIAAARLERLKHATDSAHTMIRLLARVIGTGIETAEMLVTEVLSRNLRDRRAVARYAGLTGSPDESGSKRHEKGLAKTGNARVRRGMIQLAWRFLLFQKNSALARWYNARTENAKRSRKTMIVALARKLLIALWRFVTTGELPEGVALHPAM

SEQ ID NO: 135073 - protein, 369 aa, unidentified
MGEYSEAFVAFDVAKIKHAVAVAEGGRTGEVRFLGEIENREGPIERTVKKLAGRYGRLHFCFEAGPTGYGLYRQLQALGHDCMVVAPALIPKRPGERVKTNRRDAVTLARLHRAGELTGVWVPDAVHEAVRDLVRAREAAADDLRRKRQQLLSFLLRHSRIYSGSGHWTLAHRRWLANQAFEHAAQQIVFQDGIDAIEDAIARLRRLEEQLVAIVPSWSMAPVVEAYQAMRGASFLVAVTFAAEIGDVRRFDNPRQLMSFLGLVPAESSTGDTVRRKGLTLAGNRRARRALVEAAWTYRYPARVSETLRARLEGLPKAVRDIAWKAQIRLCARYRRLRATGKKLPVVVAAIAREMAAFLWAIGREVAPG

SEQ ID NO: 135074 - protein, 343 aa, unidentified
MQAITTIGLDIAKSVFQVHGVDAEGHVVIRRQLKRRYVLAFFQKLPACLVGIEACASSHHWSRELQALGHTVRLMPPAYVKPYVKRHKNDATDAEAICEAVSRPNMRFVATKTPEQQGCLILHRTRHLLIRQQTSVINAIRAHLAEFGIVAPVGRNGVEQLLGGVADASDKRLPEVARACVAALGTQLRVLKAQILEFDRMIRAWHRSSEVSRRLDECPGVGPVLATALVASVADPKAFRSGRDFSAWIGLVPKQNSSGGKEHLGNISKRGDRYLRSLFTAGALAVIRYAKIHGTKHRPWLTALLARRPTKVAAIALANKIARMAWAMMAKSERYREPAALAA

SEQ ID NO: 135075 - protein, 354 aa, unidentified
MMIIGCDYHPAFQQIAFVDTDTGELQERRLQHREEAENFYRDLAAQGMKVRVGMEASGQARWFERLLAELNFELWIGDAAEIRSKRVRKQKTDRQDAQLILKLMLKDDFPRIWVPSWENRDLRQLLWHRHRMVQARTRIMNQLQAVALNEGLRCKKRLWREAGREQLEAVRLAPWASRRRRDLLELMDRLNPTITDLTQTIEQEVEKCPEARRLMTHPGVGSLTALAFVLIIGTAEQFQCGKQIASYLGLVPLEESSGNRRRLGHITKQGNSLLRFLLVEAAQVSARSIPEWRAKYFHLAMRRGRKIAKVAIARRLAVQLFWMLRKGWDYEQVRKFGSHAGQPGNRNGVHSNTE

SEQ ID NO: 135076 - protein, 408 aa, unidentified
MKRYYMGVDWGDRLHQVYVGDEDGKKVREMKLQESPQGLAEIGRWLDEKRAEGFELWAAIEKPQGRIVDFLLDHGVEVYPVNPKAVDRVRDRYRMSGSKSDAFDAYVLAEFLRTDQAHLRALRPSSEKAQELKMLSRDQRRVVRHKTRFLNQLTTTLKEYYARPLEVFEDLETEIALDFLQRYPTPAHLSALTRKQFNRFATKQHHLSKQRCEELWEKLNKPQLAVPEHVVRAKAQLVEVLIEQLRASIKAVKIYNHRVESFFASSPAAQFAKTLPGGKSGTLVAAVWAELGDAQGRWESSRHLQAEAGAVPVTKASGKSRVVHFRFACNKHLRYTMYWFSFVSLNHSEWAKLYYRGQRDNGHSHHQALRALGAKWLKIIFVMWRDHKPYDENYHLANIARQKMRQAA

SEQ ID NO: 135077 - protein, 383 aa, unidentified
MRIVCGLDVHKDSVFVCILSENGDKFESKYGVLTPELEELHQLLVNHGVKEVTMESTSIYWHPIWRILEDIEELKLVNPYFIKQLPGRKSDVRDAAWIAECTMKDLIRGSFVPAPLVQRMRQYNRRIFDLNKEKVYKLTKLDAVLQRCNIRISNYVSSTDSKSYKEVVRLLSEGVTDAVLLADAIHGRTVNRVGKDVIIASLTGVVSEVDIDLIRQYREEIELDNRHLQECQEKLTAICEKEFPKEFENLQTIPGVKERSATSILSEIGADMKMFITASALVSWCGIKPRNDESAGKIKSRKITHGNKYIRKTMIECAWGASRTQDCFYSQFSYIQTVVRRKNAMKVKVAVARKMLVAVWHVLNEGVPYRDYKMLQAQAGGNS

SEQ ID NO: 135078 - protein, 338 aa, unidentified
MRYVGLDIHWRQSTICVLDHRGRKLSSQTIRAGWWKVLEEVRKLRKPFSICFEASSGYGFLFEQLSAVARRVVVAHPGQLRLIFRSKRKSDRVDAEKLAKLLFLDEVPPVHVPTAEVRSWRSMIEYRRRLVNEQTRTKNGIRALLRGQGIEAPRGLWTRRGLAWLASVQLATDLDGLQRDILQERLQSVASMIQRVERVLNRKAVTHPGVQLLRTIPGVGPRTGEAVVAYIDNPGRFHRNKAIGSYFGLIPKQDASGGSNRLGHITRQGPSVVRGLLAEAAWQGIRLCPRIRQIYERILRGDKERKKIALIATAHHLLRAMLAMLQSGEVWRYSREAA

SEQ ID NO: 135079 - protein, 358 aa, unidentified
MAITTVAHPELARITVGVDTHGDVHVAHAKDGLGRRLATVSVPTTPHGYAGLLAWARGLGQVEAFGVEGTGSYGAGLARFLHAAGQVVLEVNRPDRSARRRHGKSDPLDAEAAARAVQAGEVTVIPKARDGIVEMIRSLRVVRATAVKARTQATNALKGLLVTAPAELREQLRNLSTVQLVRAVARLTPGTLDTPLAAAMLALRTLAARHAALTAEVKALETELDRLTTKAAPGLVARFGVGPEVAGALLVAAGDNPGRLRSEAAFSMLCGSSPIEASSGKTTRHRLNRAGDRQANAALYRIVIVRLRHDQRTKNYLARRIQQGKSKREVIRCLKRYVAREIFAVLNQLDSNDPVKTT

SEQ ID NO: 135080 - protein, 461 aa, unidentified
MAKQSGKRKKGGAKADATEGLPPLNLHAAGIDVGSAEHYVAVPLDRDVEPVRRFGSFTADLHRMAHWLKDCRITTVVMQSTGVYWMALHDVLESHGFEVNVANARHTKTLPGRKTDVQECQWLQKLHTFGLLNNSFRPPEEIRVLRGYLRQRENLVAAAATCIQHMQKALTEMNIQLANVISDISGTTGLAILYDIVRGERDPYKLAMHKHSRIRASRQEIARSLEGTWRQELLFVLEQSLDLYQTYQQKIQTCDERIDGQLRSMEPKIDPVREPIPEPRRGKDWRGHQSGFDLRGQLYRITGVDLTRIDGIEVQNAQTIISEVGVDMSRWKTEKHFASWLGLCPDNRISGGKVLKRGTRHVVNRASTALRLAASALLRSQSALGAKFRRLRSKLGAPKAITAMAHMLARLVYRMLKFGHDYVDRGIEFYEAKYQHQQLQRIRKQAAALHMQLIPLTRVVS

SEQ ID NO: 135081 - protein, 481 aa, unidentified
MKHKSIYSSQSKELRTLFEEAGNSKRVLCVALDYAKDTHVALFCNGQGEILKKPFPVKNTLKGIEYLKERIKKICKKRGILRKHVFLGGEDGGPYALNFIHTFRKDGFIVAGVNAHDAKKQRENIQASSDELDLLGIAKLLLNRRGSVNPAQQGIYLNIRNLFRYRRRMVQMKTAVSNQIHAQVQQLFPGFLDESKSGIPPFSKSCLWLLSDRFSAQQLRRRSLTTLIRKMREQGLSNAEQKVKMLKDYAATVLCASGEYIHTLQTTLKHQISLYRSLEECIDQSEHEIACILAQTPGALLTTVRGIGVMLAAGLCAELGNPYQQHPVKNIVSYAGIVPRTAQSGGPEKETKTKSVSKRCNRILKDYVVQSANHIGQHGPLELMTDYHRRDANNQHADFGIGRRYIRLSMHIMLNGEIYTPYYMRNHKMAKEERLAYYMKLWKLLKDKWSRVNALEIAFNREYPLGQWRTMVEELYDVNLN

SEQ ID NO: 135082 - protein, 343 aa, unidentified
MQTVTTIGLDIAKSVFQVHGAGAAGQVVIRRQLKRRTVLAFFQKLPPCLVGIEACASSHYWSRELQGLGHSVRLMPPAYVKPYVKRQKNDMADAEAICEAVTRATMRFVPAKTPEQQSCLVLHRTRHLFIRQQTAVINSIRAYLAEFGIVAPVGRKGVEELLHVVADPSDKRVPEVARACLAALGAQLLILKKQIVKFDRMIMAWHRSNETSQRLHYIPGVGPMLATALVASVADPRTFRSGRNFSAWIGLVPKQRSSGGKDRLGSISKQGDRYLRSLFVAGALAVIRYAKIHGTKHRPWLAALLARRPTKVAAIALANKIARMAWAMMARGERYRQPVALAA

SEQ ID NO: 135083 - protein, 405 aa, unidentified
MDIQPIFRCAVGMDVHLAVIHICVILQEPGCEPEVHRRQFGAFQRDRRAMAEWIAGFAPDTVVMESTGIYWKSPYAALEKVGIRARVVNAQHVKKVPGRKTDINDAEWLAMLARAGLLRGSFIPPEKLRNVRQISRYHHRTTAMLAAEKNRLVRLLSDAGIRITAAVSDPHGVAARALIDCLLDGGTPEQALQYAGRLKAPREELLASLQGELSEEHLFVARMIRQHIATLQTQLADLERRLFDEFKPYEAAVQLLLTLPGIDRLAAAKLLVEIGVDMTAFGTPDRLSKWAGVCPGNHESAGKRKHGKTAPGNRYVRAILCEIAWATTRTTSQFKSKFQGLVIRRGTKRAIIALAHKVLKTVFVLLSRQVPYRDSTVDYQALVVKRNAPRWIRQLKKFGYLPKTA

SEQ ID NO: 135084 - protein, 412 aa, unidentified
MEGETVIAGVDTHKDVHVLCLLDGLGRKIRSGSFGADPEGYDRLAEAIGDPGSCMVVGVEGTASYGAGLTRRLVELGYNVVEVLRPKRDKARPGEGKSDPLDAERAARKAASGKGCSVPKSQDGWVEAVRQLYVARRLAVATSTSCVACAKSMLTTAPSALRERFRGRERPKDLMPLLARGRKAGDALEESVLASLRSVAAVWKEARSQVESLDERIRALLEANAPALLGVEGCGTTTAAALVVAAGDNPGRLKGEAAFSMMCGASPIPASSGKTDRHRLNRGGNRQANWALYEIAIKRMAYDERTRRYVARRTSEGKSRREAVRCLKRYIAREVYRVLMDPNPDGAAPEGPELAKMRKAMRVTQKQAAAELGLSAATLGHLERGKRRSTKLERRYYELLCELERALPQTAS

SEQ ID NO: 135085 - protein, 452 aa, unidentified
MEQATRFVGMDVHKDTIVVAVTATGEVGKATVYGTFPNTAAALETMVKRLRQAGDGPIKFCYEAGPCGYGIHRALTKMGENCMVVAPSMIPRKSGERRKNDKRDADGLAVLHRGGLLTAVWVPDAAHEAMRDLIRARLAAVRAVRAARQQLSAFLLRHERIYPGKRMPWTKAHRGWLADQTFAQPAQQIVLEESIEAVRLSEQRRDRVDGYLRAQIPSWSLFPLVRNLCALRGLDMIAAAGLAAAIGDPSRFATAPHFMAYLGMVPSEHTSGPKRRIGGITKAGDIHARTLLIEAAHTYRYPARIARHKLAAVDAVPEAVRAIAWKAQTRLCLRFRQMTAKGKPNQVVVTAIGRELAGFVWSIACITSDPVVVNNTVTGSSDEKTTSCHKVTADLEEVSQQVQKITPGMACSRAPRNQSLKGGAPRGAPSAKRRRIRGREPGAMISHCNRIG

SEQ ID NO: 135086 - protein, 345 aa, unidentified
MEIRTIGIDLGKTVFHLVGVNARGEVVIRKKCSRLQLLRFTSNLRECLIGMEACGGSHFLGRALREQGHDVRLMPAQYVKPYVKTNKNDYIDAEAIAEAVTRPSMRFVPIKTDDQLDLQSLHRVRERWVVRRTAVINQIRGMLLERGITVAKGRRRIEAALPGILEDPDNKLSGALRVLLTQLRLEMQYLHGQIEESDKLITRIAGELEPCRRLVAIPGIGPVIATATIAAIGNGSAFKKGRGFAAWLGVVPGEHSTGGKQTLIDTSRRGNKYLRKLFVQGAHTVLQNRSRQVPGLSTWLDRLTSRKRIQVTAVALANKMARMVWAVLFKGEAYRPPSLPQAIAV

SEQ ID NO: 135087 - protein, 414 aa, unidentified
MDIIYARCAGADVHKKTVVVCVIIPGDQGDWRRETQTFGTMTVDLLALSDWLQSCGVTHLAMESTGEYWKPVFNLLEGNFEVLLVNAQHVKAVPGRKTDVNDAEWLADLLRHGLLRPSFIPPVAQRELRDLTRFRSTFVRERATLVNRVQKVLEDANTKLASVASDVMGVSSRAMLAALLVGQAAPEVIADLAKGRLREKRPQLVQALEGRVKPHHRFVLSELLCQIDNLDETIARFDEQIRTACVPFEEAVVHLDTIPGVARATAETIVAEIGTDMSRFPSAADLAAWAGVAPGNHESAGKRLSGKMRKGNKTLRVALNQAAHAAARTKDTYLSAQYRRLAKRRGKKKAIMAVAHTILTIAYHLILRHEAYHELGGDYFDKRNPEATARHFMKRLEQLGYSVALQPPSVNAMA

SEQ ID NO: 135088 - protein, 312 aa, unidentified
MFYLGIDVAKAKLDCCLLDMTNGKRSTKVVANSRAGLTDLLGWLGKRHTEPGHVHVALEGTGVYHEMAACGLHDAGLSVSVVNPAQVRAFATGMGVRTKNDIVDSHVLARFAMHARPMRWSPPAPEARILQALMARREALAQDLQRERNRHEKAEITAPTALVLHSILETIEFLERHLASLQREIDDHIAAHPGLKANLMLLQSIPAVGPQVGRTLLAIMHARHFDSAEQLAAYLGLVPVQRQSGSSIQGPSRLSKAGPAKVRATLYMAAVVAKRYNPTSRHCVNAWQRVANPPCLYSALQCVSLCICVSAF

SEQ ID NO: 135089 - protein, 472 aa, unidentified
MARAARRQGGSQLRKGHSKGARSAQLEQLNLNAAGIDVGADAHWVAVPPDRDERPVQCFGAFTADLYALAEWLRQCQIETVVMESTGVYWIALFEVLEERGFDVKLVEAHYARPVPGRKTDVKAGQWLQELHPSGLLHAAFRPDAQVCVLRSSLRQRGVLVASASRAVQHMQQALEQMNLTLTEVVSDITGKTGMEILRAILAGERDPQRLALYRARRCKHDQATIAKALEGHCRAEHLFALQQALEQYEFLQQQLQACETQIEACLLTFVTHVEVDSPPPAPARTRRSRQRHAPGFEVQVYLDAMTGVDLTQIDGIDALTALKVISEIGRDMTRWPTGKHFASWLGLCPGNKLSGGKRYRMRSKPTANRAATALRLAAQGLVHSHSALGAYYRRMRTRLGAPKAITATAHKLARLVYSMLRYGTAYVDAGQQAYEQKYRDRVLTNLQRRAKAFGYQLVHVEDRDGGVASTL

SEQ ID NO: 135090 - protein, 443 aa, unidentified
MRVVFGIDVSKASSEVAILVNGEKIHGYTIPNDAIGFNRLLEDLGTVYQPEIVFEATGVYSRRLQAFFEDNSYAYIRLNPLESKKQLDSLRVRKTDKIDAEKLATSQFILNRKPSYVQEALYQELRDLSRFYQNLTEDIVCSKNRLHKVLQVTFPELENILSSPTGKQYWNLVMAFPCNSFVLELDDAALRAIIRQSTSKHISENRVTYLVDKLTKLANHSYCAVKKTSPMMEEVKYYAGELLRLSEYRQSVLEKMITLAQPLPEYEILLSIPGIAETTATSIIGELGDIRRFHSANQIKTLAQPLPEYEILLSIPGIAETTATSIIGELGDIRRFHSANQIIAFIGIDLRHYESGDFLAKEHITKRGNPYARKILFKCIHNIASASHTNPCHIADFYEKRKRQSQVTSTKPHTIASIHRLIRTMYYLITHNKLYDYTSTQNR

SEQ ID NO: 135091 - protein, 344 aa, unidentified
MEHYAGLDVSLEQTSVCVVDAQGQVVREAKVASEPDALIRFLCCQNLEIARVGLEAGPLSQWLHTGLITAGYGAVLLETRHVKAALSAMTVKTDRRDARGIAQLLRLGWYRPVHAKSASAQEVRSLLTARKLIQGKLLDIESGIRGVLRGFGLKVGAISRGRFEARILELVEGQAMLETVIGSMLAARAALQTEFAHLHRALLALVRTDPVCRQLMSVPGVGAVVAMTFRSGVDDPSRFRRSRDVGPHFGLTPRKYQSGEIDVTGSISKVGDRMVRTALYEAASVMLTRTVRMSPLKSWAMGVAKRRGAKKARVALARKLAVVLHRMWVDGTCFRWTSQTALMA

SEQ ID NO: 135092 - protein, 418 aa, unidentified
MKVWLGGIPAHYNMFRKEVFGLAKLFVGIDVSKEYSTAQGLDRSAKKLFFLRFTMDAKGFDELLNAIKKGSADINDVTVAMESTGCYHINLFSFMCSEGIRCVVINPLLIANFARLSLRKTKTDKKDALTIAQFLLANENSLNMMAYSQDTQDLRDLSRERESLTWLIAGMKNEIKQLLQTTFPELESLCKPYSETMLHFLHRFPSARLIREAKTKDIEKALICPNEKRKRVLVTAQEIIRAAKRSVASAGVAKELILSEKVSTVLYLLEKSEKITEALIENCESLRIEDLDIIRSIDGADDITGSTFLAELGQLSNFGSYKHVIAFAGLDPSINQSGQYEGISRISKRGNRHLRRIIFMMTMCSVRGDNVFREYFLRRKQEGLPPMKAILATAHKLIRVIFSMLSNRTFFKKEVAVV

SEQ ID NO: 135093 - protein, 381 aa, unidentified
MPYRIAGIDVHKKKLAVVVADVEVEDEYQFERRWYGSNPEQLRVLSEWLIEQQIEEVVMESTAQYWKPVWGTLERYWKPKCQSREGAGRMSGTLHLAQALSNRGRRGRKKDFRDAERLVKRLVSQELVLSFVPDTEQRMWRTLTRTRYQRTRDKVRLQNQLEALLEEAHIKLSSLVSDLLGASARRMLKALAEGETDPAALAALADQRLRATPAQLQDALGACTELNPVYRRLVKMTLEGLQFVEQQIGQLDQEMASLLRQHQDAVERLAVVPGLGVDSAQQIIAEVGAKAATFPSAEKLSSWVGACPGEEESAGVNRSRHSPKGNRQMRRVLNQAANAAVKHKGSIFEIDVPSSSAAPRTQQNHRRDCASPLSPDLDNFA

SEQ ID NO: 135094 - protein, 352 aa, unidentified
MLIIGCDFHPGFQQVAIFDNRTGEIEEKRLQHRAEAEQFYRSLAGQEVRVGMEACGHYPWFERLLAELGMELWLGDAARVRAAEVRKQKTDRRDAEHLLDLLRQNRFPRIWVPSLEVRDVRQLLVHRHKQVQARTRTKNQLQAMALSHGVQKKHKLWTKAGRAELEQLPLLPYAAERRKRLLEALGGLEAEISELDRRVAEEARQRPEAVRLMTHPGVGSVTALAMVLTLGPAERFASAKQVGSYFGLIPSEDSSGGKQRLGRISKQGSSFLRFLLVEAGQTAARYDPQLKRFYRRLAARKNRSVAKVAVARKLATRLYLMLREDWTYAQLIQAVMQVGPSHSVAGKQEPSV

SEQ ID NO: 135095 - protein, 496 aa, unidentified
MVFETVFTRMMLSENVKQKQSSMKLYLGGDVSKGYADWVILSAKKQTVVENFQLDDTYAGHCKLYSTLEAYFDKHKGLEMYAAVESTGGYENNWFNTLKSYQKVFNLKVARINPSGVNYNRRASMKRNVTDAISAVSIAEYMINHPENIDYDQDDKWKTLCRHWNFVEMQKKQRVQTINQLETILYCSNPLLLRFKKDNLPNWLLELIIKCPTADKLAKARPERLARIPFLTLKRAQELVAEAKQNIASATDRNAELLVSQIALQIKAFNQNIKSQMQLIEQDLISPEMELLKSFQGIDTTSAIGLLLEIGVISRFPSVKGFSCNYGVHPKFKKSGDKVIGVRMSKQGSKNMRKILFNIAKGAITYNPLIAAVYEKKLSEGMSKMAAIGVCMHKILRIIYGMLKNNKPFNPLIDKQNYERSKSKQQEKQLQENANIEKSRRYQEYDTTAPISKKQTKKRKEHDLSQCEITSQSTGSTCSFDTKLQNVKNNNLKLTS

SEQ ID NO: 135096 - protein, 359 aa, unidentified
MQRQRKELNFEGQNIYIGIDVHKKEWTVCIFSEHMEHKKFSQPPSAAALQSYLRRNFPGANYYSAYEAGFCGFHVHSKLAAVGIENIVVNAADVPTTHKEKTNKTDKRDSRKLGRSLRSGELEGIYIPSRKTQEDRSLLRTRYTVRKDLTRMKSRIKSLLNFYGIEHPEQFSSTSKHWSKRYTAWLRTISMEEESGRSVLQTLISEVEEMRKVQLDVTKEIRALSSKKSYSKDFELINGIPGIGTITGMCFLTEIEDINRFSSTDRLAAYVGLVPSCHNTGEKENNGSITSRAHKLMRDMIVESAWIATAKDPALHLAFCKLCKRMESNKAIIRIARKLLNRIYHTLKTKTVYVCGTVE

SEQ ID NO: 135097 - protein, 411 aa, unidentified
MQVIYERCCGLDVHKRTITACLLKWTGREWQKEIRQFGTMTNELLALSDWLEREGCTHVAMESTGVYWKPVYNILEGQFELLVVNAQHLKAVPGRKTDVRDAEWIAELLAHGLLRGSFVPPASVRELRELTRYRTALVRDRARTINRLQKVLEAANIKLASVVSDIQGVSARLMLEALVAGKRDTQQLASLAKGKLKEKQAQLVQALCCRLQPHQSFLIAEHLAQIDYLEGAIERLGQQIEERLRPFEQEIEWLDTIPGISRRTAEVLWAETGGDMSRFPSARHLAAWAGMCPGNNESAGKRRTGRTRKGSPWLRHCLVEAAHGAAHAKNKYLSSQYHRIAARRGKKKAQIAVGHSILVIAYHLLTRKEGYSDLGANYFDERDRQAVTKRCLNRLHKLGYRVTLEKLPMAA

SEQ ID NO: 135098 - protein, 385 aa, unidentified
MSELNDLSRSLTSLEQDKTIIAVIEMSQSSWLVAGIVPGIERHPLKKLEPSEEELVRLLMRWRTEATKNGHTITRIAVAFEAGRDGFWLARWLRARDIETYVIHPTSVAVSREHRRAKTDRLDTGLLKRVFIGWLRGEPDHCHMAAIPTLAEEDAKRPNREREGLVRERTRIVNRMKSCLARFGIRNFKPTLRKAPERLATLATPEGVPLPPNTLLELRRDMARLRFVMDQIEEVEEARAQRLEQAPQEKTHAMVRLIARVIGVGIETADMLVHEILSRQLRDRRAVARYAGLTGAPDESGNKRREKGLAKAGNARVRRGMIQLAWRFLVFQKDSALARWYRTRTESAGKKRKTMIVALARKLLIALWRLVTIGEVPAGVLLRAA

SEQ ID NO: 135099 - protein, 419 aa, unidentified
MVKNRIPVCHVAIYLRSAACLTSTNMNAAKEKINRIIGLDMHPDVFAAAALQKASADLSKVLWVQDRLSTATLESWAKKHLQPGDVLVLEASGNSFEVASRFHALGYDCLVLESAQAAKVKENFCNDDRHSAIKLARVYLSGLAKIVWQPDADTREMREVFFAHRAAVKDCTRLRNRIRTFLNEHCVRLPKGTPLTQHKGLLKALSMHEWSTLQKGLITDSFEQLWQTEARRKQLEQLMVEQLLENPEWARLWRLMGVRHIVAFALMAMIGDIHRFPTAKKLVGYFGLSPRKEQSGNNAKGKEKGMGNTGRGDVRALLIQAAQNAMTQKTSPLHKWGWKLTMKKDCKNIAVAAVARKLTVAIWHLLRGHFTPVLEINDHLKTKLMKIATTLGKAKIKAMGFKDRSAFIDHQFKRIQQTA

SEQ ID NO: 135100 - protein, 355 aa, unidentified
MRTDYQEKRFLAKNREAFIGMDVHKESWQTTIRAEGEEVFHGRLPSEYQALKKLIERLPGCKVKVAYEAGPCGFSLYDKLTADGIETIVVPPTLIPVESGNKVKTDRRDSRKLAHLLERDMLKKVYVLSEEDRADRELVRTRRQINEHRSDAMRQIKSKLLFYGIKPPFTAEQSWSKAYVKWLKEYKFDSDLLRLSLDYLIGLYEYLTSQLVKLTKEVVLLARSKKYSKRVKLLKSVPGIGTLTAIEILVELQDMKRFKSSDQLAAYIGLTPSEFSSGQYVRQGRITRSGNKRVRACLVESSWILIAKDPFMRKRYQELKNRKGGKKAIIAIARMLIIRVRRILLDSEPYLLKAA

SEQ ID NO: 135101 - protein, 343 aa, unidentified
MVRPVATIGLDIAKTVFQVHGVDAAGQVVIRQRLTRGRVLAFFEKLAPCLVGMEACGSSHYWARELTARGHEVRLMPAQYVKPYVKRSKNDAADAEAICEAVTRPTMRFVPVKTPEQQSVMMLHRVRLMLNRQRTQLSNSIRAHLSEFGIVAPIGRRGIDQLLAVVADAADTRVPADARLCLQMLAAQLAVVKEQILENDRRVRSSARTELGRRLMQVPGVGPLLASAFIATIADPTAFKTGRDLAAWIGLVPKQNSSGGKERLGSITKAGNRYLRQMLVVGAMAVIRYAERHGTRRPWLVQLLQRRSTKVAAVALANKTARIIWALMTSGERYREPTVAMAA

SEQ ID NO: 135102 - protein, 486 aa, unidentified
MKNIYSNNNKVLKETLAMFKPTEILYSPIEIGKFNHKSCITNFFGDIIIKPFEFPNNSCGLNLFMEKFKSAVSSTSAKKIILGCESTGHYHLNLIHNLKLFNLPVEIINPRDSKTENTNKNSKTDIIDLNAIARVLISNKGSRQIVPEGVYYNLQRATRTRFKFIHNKTSTSNIITGLVDRIFPGLWDKDNSIFSQRFSKASLLILQHFPHPHQIIKLGTKRLANFLSKHNTKLGIDTAKQIVDTAKISLTKPVSELEQDISALHHHLKCFHLYTQIINDLDNEIASLLIQTPGTYLLSVDGVSVTYAAYFTAEVGDINRFTYANQIISFAGTCSRKFQTAEFEAQNLRISRKGSKFLRSTINQLALALNTWSPKFRDYYTKKYLENPEKPGRARIATGNKFVKVAFALMKQEQLFKPIGLSFDEKIYYNKLWDKIIRKLSKFNVSNVISENNYLIKIKKQIENNYGLSLTTEIMDGKGYCHKTCG

SEQ ID NO: 135103 - protein, 340 aa, unidentified
MVYGAIDLHSRFRQIRIVTADGAVVRERRVVTSRSTLRNAFAAVGAVRIRVEASTESEWVAQVLEAAGYEVIVADPNSASMDGTRHRRIKTDTRDVAALSDACRLGVFRRAHRVAAAQRTLRQELAVRRQLVRRRTGLIAHLRARLRQDGFRLGSGSRTTVHERVARLERPASLRGSLTPLLETFAALTPIIATTTRRLTTTANADPVAVRLHTVPGVGPLVALTDRATVDVVTRFPSAGHVSSALGLVPREDSSGERRQRGHITKVGPSEARTMLIQAAWTCWRSRTARTTPLRQWADRLAARRGARIAVVALARRLSRILYAVWRDDTVFRVTPARAA

SEQ ID NO: 135104 - protein, 413 aa, unidentified
MEKVYDKCCGIDVHKKLIVACFKCGKKQEVREFGATTRELLKLADWLGSGGCEMVAMESTASYWKPLYNILESSGLNAMVVNARHMKAVPGRKTDVKDAEWIADLLQHGLLQASYIPDKDQRELRELVRYRKSLVGERTRELNRLQKMLEGANIKLSGTVSDINGKSARSILEYILTGESFDDAKYDEMYGNKIIAHNLKATKEQIIDDLNGIISPLQRKMMRTLLKHLDELNSHIHELDDDIDSFMKPEEKQASAAIQDVTGIGNTSAQAVISVIGTDMGRFPDDAHIASWAGLCPGENESAGKRKSGKTRKGNALLRETLVNCAHAAVKNKKSYFYAQFMRISAHRGKKRAYVAVAHSMLVAIYHILKDGVVFKDLGADYYNQFNKERKIKAYLKKLKALGWEDSAAGQPA

SEQ ID NO: 135105 - protein, 354 aa, unidentified
MKREYFIGLDAHGGFCQLSATNNSGRPIYAGRCSTTIIALRTMLEEVPRPRHLVFEEGPLANWLYRNLVDHVDSLTVAEPRRNRLIACDGDKDDPVDAEKLAHLLRGGYVKSVHQTGTLEETLFKQLVAQYHRHVRRRVAAGLQVTAILKQHGVMAPAKQFDHQEDRAELLQRLPSQALLQEMVTALLQEYDTLQAHEDAWRKRLLRQAKKDDVIERFTALPGISWIRAATLRAYLDTPWRFHSVKALWKYLGIGLDRRHSGNGPEFLCVPKQTNRLLKSTILGAAKSAIAQSDNPFADQQEVWRSRGLSAKMAKRNVARSLSATLWGLWKNGTVYHPEWVGVNWSATRRISTV

SEQ ID NO: 135106 - protein, 425 aa, unidentified
MNYKQNEKINQVKESTLVVGIDIGSTTQYARAFDWRGIELGKVFPFSNSREGFESFKAWMQHLQDKYKKLDAIVGIEPTGHYWFDLGAYLEDEGILLVMVNPYAVKQTKELDDNSQSKNDRKDPKVIAKLVTEGRYSAPYTPDGVYADLRIMVVNRKRLIREMTQIKNRFARWFAIYFPEYTDVFGDYEAQSSMLLLKKVCTPEAIVELGAEKINQIWRDAKLRAVGMKRATTLCETAKRSIGLKKGSSAAQYEMKLLLEDYEYKKAQLDAVMEEIEKLCRKIPESEQMLAIKGIGVITVAGFLAEVGDVRRFESPRQIQKLAGLSLRENSSGKHKGQTTISKRGRSKLRAVLFNAAIPLIAKNPEFKSLHEYYTTRANNPLKKKQSVIAISCKLIRVFYAILANGVTYDAQKMLSDIHRQPQAA

SEQ ID NO: 135107 - protein, 343 aa, unidentified
MNIVSVGIDLGKVTFHLVALDDHGKVVVRKKFSRNHLLAYTANLQSSLIGMEACAGAHFIGAALRDQGHDVRIIPAQFVKPFVKSNKNDFIDAEAIAEAVTRQNMRFVPIKTEDQLDLQALHRIRERLVQRRTALINQIRGFLLERGLTFAKGASHLRKNMADIVEDADANLTRRMRILLDRLWVECRQLDYDIEMASDDIERIASEDEACQRLRQIPGVGPLVSTATVAAIGNGAAFRKGREFAAWLGLVPRQHSTGGKTKLLGISKRGNGYLRRMFIHGARAVLLRVKYDTGNFGQWVRQLEARAPRNKVIVAVANKLARVAWAVLFNGVPYHYEAVCGQP

SEQ ID NO: 135108 - protein, 429 aa, unidentified
MNLKPIAGIDVGKFFSELVILSPTNEIFARMRIHHDSNNDMKRAIELLKKAEKDFASRPFVVMESTGHYHKILFHFLCKFGFEVSTINPIQTNSIKNIGIRKVKNDKIDARKIALIYRFQELKATNIPNEDIECLRSLCRQYYKLSDELTAYKNRLTAIVDQLMLNFKDAFPNIYSKAAIAVLEKYPTPTAIIKADKDELISTIQKNSRKSFEWATKKYELLVLKAKEFEPLSIDNAANLAMLAVYISMVKTLQENLDKVLMAIHQLIADDLSKDMPVMALTIQLLQSIPGVGFLSAAAIVAEIGDFKAFSNSKKLVAYFGIDPSVRQSGEFTGTRNKMSKRGSRLLRRLLYTIALANIRTKRNNEPCNSVLMDFYKKKSQYKPKKVAIGAVMHKLVFIIFAVLRDRKPFELRTPEEHAKMLAKKHAVA

SEQ ID NO: 135109 - protein, 410 aa, unidentified
MDVLIPRCCGLDVHQKTVVASVRILGPTGEVTRDTRTFGTTTRELEALAAWLRPSQITHIAMEATGVLWKPVWHILEPEWQLLLVNPQHLKRVPGRKTDVLDAAWIAQLLQCGLLRGSYVPPAVIRELRDLTRTRTTLEDETTRVVNRIHKVLEDANIKLATVATDIMGASGRAMLRAIIAGETDPLRLADLARRRLRLKHGALAEALYWRVTPHHRFLLERLLAQVEFLETEIHRFDQRVTEMSAPFAAALQRLDAIPGINRRLAENVLAEVGDDMAPFPSVPEMVSWAGICPGKRESAGVSHSARIRKGNRWLSRALVQAAWAARRKKNCYLATQFQRIARRRGAQRAVVAVAHSILTATFFILRDGVDYQDLGPEHFHRLSPDKVVRDLVKRLEKLGHRVTLEMIAA

SEQ ID NO: 135110 - protein, 380 aa, unidentified
MTTMTRDRESSAPASLLMAFELGQRSWKIGFSTGIGQRPRVRQIQAGGVGVIEGEILRAKARLGVPLDAPVISCYEAGREGFWLHRYLLAQGITSHVVDSSSIEVNRRARRAKTDRLDLAGLLSLLARYLQGDRRVWRVVRVPSVMDEDARHLPRTWETLTADRTRLINRMKGLLTTQGVQLPIDKDFRAHLRAARLWDGSPIPAGLHARLMQDWAQLQQVERQLREHKAHAPELLDRRTRTARVIEKLQRVQAVGRTGAWVLATEIFGWRQIENRRQLGGLVGLVPAPYQSGESARDQGITRAGNHHVRRVMVQLAWGWLRYQPSSALTQWYQQRFGHGGPRQRRIGIVALARKLLIALWRYVTAGIVPDGAQLKPQEG

SEQ ID NO: 135111 - protein, 423 aa, unidentified
MTKYLSTPTNAVLVAIDMSKHRQEVLIERPEGGRRRRMTVMATKDDYDRLVEELASMARQIVVGFEATGNYHRTLAHKLLMAGFQLQLISSVALARTREALHNGWDKNDPKDAQVILHMLRIGATQVYVDPLEAGINDLQELSKTHEVISKAKTQTWHRILNHYLPLYFPEIAHFAGNSRSDWFLALIERFPTPTSITSLGREAFVAEAWSLVGRKVSKARLINDIFETASSSVALPIAEDAVAISMFRMIIGQGRSLIRERNRIEQIAQSLLADHRDYQLLCKIPGIGPINALTILAEAGDLRRFRHHRQFLKFCGLDLATSQSGTFRGRTKLSKYGNARLRRTFWMAAQVASRQRDNSFRDKLGRYMAGSANDADRRRKAMTALTAKMARVAHAVIKTQTEYRPFIERPETRWKDPSLQVP

SEQ ID NO: 135112 - protein, 392 aa, unidentified
MIYVGIDVAKDKHDCFAMNSDGEILIERMTIQNNFDGFNSLFNSISQFNESFENIKVGLEATGHYSNNILNFLASKGFNVYVINPLQTNLYRKGQSLRKTKTDKLDARFIATMLITENLKPYSNLSYHISELKSLVRHRFRLVHERSKFKTSLSRLVTLVFPELEKIVWSISQNSVLYLLNELPSVKEISECNLKHLTAVLEKYSKGKYSRDKAIEIRELARKSIGTNSRSLSFELKQVIQTVLFLQSQIDDIDKELKNLVDELNSPIMSIPGISYVSAAFILAEIGDINNFDSPAKLQAFAGLDPSTYQSGKYSATHSQMVKRGSKYLRWALLNATRLVCMRDKTFNDYKNSKLAEGKHYFVALSHTTKKLIRVIYYLLKTNNSYQLSKVA

SEQ ID NO: 135113 - protein, 370 aa, unidentified
MTKTNTIAAGIDTAKDKLDVAICGQVLRLQVANSIRGWKQLRSELAKAGVERVGIEATGGYERGVVRHLQAAGFVVLVLQPIQVRAFARLHRQRAKNDALDAALIAACAAAIEPHEIGPDQRLAALADTLTFVEQIEEDIARFKTRLEHIGEPRLKRMVLADIARLKVRRLAQLRLIAKQLRAHHDLAVRLDLVMSVPGIGERTALALIIRMPELGRISREQASALAGLAPFDDDSGKYRGQRHIAGGRGRLRRSLYAAALPAAFRWNKALINLYSRLTAAGKAHNVALVACARKLLIYANTVVARGTPWVENATKPWRRCATAPRSPVFNHSFTKWKRPADRVPAPVGGGVFPWLRTSSRAVARCFSLC

SEQ ID NO: 135114 - protein, 455 aa, unidentified
MARRRSAKGTPQQRALLTIHPYAAGIDIGSRFHVVAVPPELAPEPVRTYQSFTDDLHRMADWLVELGITTVAMESTGIYWIPAFEILEARGLEVLLVNARHVKNVPGRKTDVHDALWLQQLHQHGLLRGSFRPANGLAALRAYLRHRERLLEYAAAHIQHMQKALMQMNVQLHHVVSDITGATGMKIVRAIVAGNHDPARLASYRDIRCKASVDTIKEALTGNYRPEHVFALRQALELYDSYQAKVAECDHAIEAVLASFAPAAPETALPAARHKTRAANEPTFNVRAALFQLLGTDLTQLHGFGAYTALMLVGECGTDMTKWPTVKHFTSWLTLAPGNKISGGKLLSTKTRRSANRAAKLLRISAVNVGKTQTALGAFYRRLAARVGKAKAVTATARKLAVLFYNALRYGMTYQDPGAAYYEEQYRQRVLKGLRRRAKALGYELQETTAVGGVS

SEQ ID NO: 135115 - protein, 389 aa, unidentified
MYYCGIDIAKKKHDAIIVDGEGNAQGKPFTILNTATGFEELISKLQSLDQNVLIGLEATGHYWLALYERLSDAGFKIVVLNPLQIAAYRRSGIRKVKNDRKDAWWIADYLRIANLQPTDRQLPILLKLRELTRFRYALMAQVGDLKRKVLSVLDRVFPEYETLFSDVFIKSSRALLKEAVSAEEIASFDLSELTIILKSNSQGRFGQEKASCIQDLARQSVGVGFLTDAVYLEMRCLLEQLDLLLSQIEMLENAIDKMMDQIPQYITSIPGVDKVTGSAILAEIGDINRFESSEKLVAFAGIDPTVYETGQFIAKRTRMSKRGSPHLRYALWQAASMAIQYDPELKAYYQAKRAEGKHHGTALGAVCNKLISRIYIILKEQRPYIVRET

SEQ ID NO: 135116 - protein, 483 aa, unidentified
MAAKKDGKTGTDPEGAGAAPEHGGDGAEVAEDRVQVVEYAAAIDVAKGSGMVCTRVPGSRPDRRRQKVWRVEATYAQVIALMDHLRCEGIQRLVLESTSDYWRIWYYLAEAAGLEAWLVNARDVKHLPGRGKSDKDDCVWHCKLNERGMLRRSFVPPEPVRDLRALTRTRARLAQDQARHQARVEKILEDALLKISVVISDLFGASGRRFLDALVAGERSPKALAALGDPRLKATRRELEDALTGRFRDIHAFEISTHLRIIDAINEEITRLDDKIEEQLALVPRTAPACTACGLAGGGHAPGCADEQVPLLGLAARLDEITGVGECNARAIIAELGTDPSQFPTPGHAAAWARLTPRTRQSGETARPGRTGKGNRYIRGALGQAAMTAAKTDTRLGAMYRRIARKRGKQKAIVAVSRVICEIAWILICDPGARYQELGPDYHTPRSRARQTRDKIREIERLNPGKKVILAPIDPGPEAGAAA

SEQ ID NO: 135117 - protein, 452 aa, unidentified
MSLERKEHGNYSLLRLISVGNKNTLTGGVTAMRTKKDNRQVEKRQRITGATLVIGMDIGCEFNAMCLMSKEGTVLGRYPKIYNSRKGFDYFDTVIETMKRKHGFTDVLIGMEPTGHYWRKIAFFAIDKGCEVRFIRTTALKHQRELDESSSAKNDIRDAYTIANIVREGKYIDTVIEDGAFRQLRTLAHTRERIQRSNTGAKHALKGVLEDYFPELKAIFWSMKAKGLWALLEKCPFPEDVLAIRPDALMELIAKSTRRKTKARLQTLKIYEAARQSVGLKHIGQADRHRVVTYLSEIKHSEAQLKEIGLQMEALLKKIPFAEYILSVPGVGVLTCGVFLGELGNPYNFTDPKQIVKYAGYDPKEHDSGQRIGRRIISKKGRWLLRKYLYFMAMRVVHRNSFFKEYYENKQKTMKKKEALCAVIIKLVKVIFALLRDQRMFTEKQSRLNQAA

SEQ ID NO: 135118 - protein, 430 aa, unidentified
MKSNTQNAKIEAITEKTLVLGIDVGSETHYARAFDYRGVEYSKKPFKFSNTEAGFVTFKAWVLDIKEKHGKDKVIPGMEPTGHYWFNLGKFLQDNEMKPVLVNPHHVKKSKELDDNHPTKNDRKDPKVIAGLVREGRYMIPYLPDGVYADLRTASNIRFQLQAELTRIQNRINRWFNIYFPEYKTVYGKPDAKSGILILKEAPLPEDILTLGIDGVNQIWRDAKLRAVGKARAKTLIEAAEHSVGSKEGAVSARMEIRMLLEDYESRNIRLQEVMALIEELVNQIPMAEKLLEIKGVGIKTVSGFLAEVGDIRRFNDPKELQKLAGLALVENSSGKHKGKTTISRRGRKRLRYLLFEVAMSLVAKNPEFRELHNYYTTRRLNPLKKMQSLMAIAAKLLRVFYAILTKGVGYDPKKMVNDIRRPAAYAQAA

SEQ ID NO: 135119 - protein, 533 aa, unidentified
MATKRKSRKSGTKRPALLGKPNGIIQPRVQAVGPERFGIVAVDCAKARSKWMLCDFYGRVLVEPTTVEHERAALQLATAQLREACQQHGIKDHLVAVEMTGTYHRPVQRAFRQAGSETRLVHPFASKHYRQPSHADTKTDDNDLEAIFRATVNGFGLLEPVWGEVYLRLQLLARHRRDLVQKRAKLQSQIRHHLERCLPGYAALFPDNNLWKQDLPMCIARRAGSAEAIRAAGIRGMRDWLEEAKVRYQSPSLGRVLAWAGNAADADPLAPHLARVWQTLHDDWLIKTTQIVQVERDLAEILVKTPYILLLSHPGINIVSAGELAGETGPNEHYAHAKAITGRAGLFPSRYQSDQVDHADGSLAHLRNARLRAAWLRLADNLIKSNHYCGGKAKLWTQRGVDARDIRCRVANRATRTVFQMVSGRRLYQHPSRLDRQYVLDKLLKFHEEHDTPLQDILRDLHHAAEQIPKHEQAAEAAPLAARYEKCRRSRRKGPQQLGSILLGVLARCGITGLESELEARGPDAVESDASAR

SEQ ID NO: 135120 - protein, 350 aa, unidentified
MSMVCGLDLHRGQITFDCLMIETSEVWRGRIWQPDRARFRRWLREELAPRANGEAVAVAVEGCTGWRYVVEEVTAAGWEAHVAEPADTQAKRGRKKRAKTDRADARLQRELLQKGELPESWIPPTPVLEWRERTVLYKSLLDQRRVWIQRIHAELFQHGVALPEGEIPSPKTRAWLAGEGVELSPAASQRLAAGYRMLDATDAELVPLRKEIDTFGRRQPACQALAKAHYGIGPLTAVFVWVELGDCRRFSRSMQVVRLTGLDVLVDSSDNHRAGGYLCRQGPPTLRWALFEAGKCAARAGSPDYDYYQSVKRAHDGKLAAIATARKITRRCYHTLRSLDSEVVYTIPTA

SEQ ID NO: 135121 - protein, 408 aa, unidentified
MEILHPRCAGLDVHKDSVVACARIVTEKGFEQPVQTFATTTAGLLKLSDWLASFGVTHVAMEATGVYWRPVWHVLDGVFDLVLANAMHIKNVPGRKTDVNDAMWIADLLAHGLIRGSFVPPTAVQELRALTRTRKQLVRERASHVQRIDKTLQDANLKLGSGLSDIMGQSGRAILAALVAGETDPEQLVSLVSDRVKTPRRVLLEALQGRVTRHHRFLLKLHLDQVATLEAAIAQIDTEVGNSLAPFRAAAERLTTIPGVSAVAASVIVSEIGIDMTRFPTVGHLISWAGLCPRNDESAGKRRSTRLRHGAPWLKTTLVQSAWSATRVKESYLRAQFLRLKVRRGPRKAIIAVAASILTATYFMLTRGTDYHDLGPAYLQRADRQKIARRLIRKLDELGFQVDLRDAA

SEQ ID NO: 135122 - protein, 349 aa, unidentified
MKYFAGLDVSLEETAICVVDEAGAIVKETRAASEPDTLAAALRSLDLQLDRVGLESCSLSAWLHDELRAGGWPAICVETRRAKAAMGATPNKTDRNDARALAQIMRTGWYRAVHVKSKASRIWRSLLVARRTVLNEMRTIENVVRALLREAGVKLGTPSRKDFVERTRELTADDPVLTHLTEPLLTILTTMLHEFSKLTKQVLDIVRDEPVCRRLMSVPGVGPLTALAFRATIDQPDRFARSRDVGAHLGLTPRRYQSGETDVQGAVSRCGDELARTALYEAAHSLLTCSRKWSALRAWGMAIAKRRGMARARVAVARKLAVILHRIWVDGGAFRFGREPAPSLASIQP

SEQ ID NO: 135123 - protein, 348 aa, unidentified
MNQYIGLDGHDKSCTFVVLSEKGKVKRKAVVPTEEKALLEFVKSIPGRRHLCIEEGTQSQWFFEIFSGHVHDLAIVQGRKRPGNKDDARDARSLAERFRIRDLGPRICKAPDSMVAMKDLVRSYEMLNTDLVRVKNRIKHLYRSRGLAYSDATCPYCTGRGYCKKPGFHQILELLRKQQERLEPLKAEAQKAMVTEGNRHPITRILKTAPGFGPVRSAELLSIVISPHRFRTSRQFWCYCGLAIVQRSSADWIPTADGKWRWGPSTQSRGLNRNFNRMAKAIFKGAAMTVITSMPKDPLRADYDRLLAHGTKPNLARLTLARKIAALVLAMWKNQEVYDPGKHRLNSI

SEQ ID NO: 135124 - protein, 373 aa, unidentified
MPKYSTAFGMDVHLRSTTVCALDADTGEAVTRRFPGNPWGEIAGWMDGFPGPSLAAYESGYLGFAPQRELAGLGVECVVAAVSKIPRSAADSASKNDRNDAARMAKAILAHDISPVWVPSPEVEGIRDLAGAYDGATARLATAKQRLLAFLAKRGFVYGGTTPAGNPRKYWTYDFLRWLDKVRPEDDGGVRTLAALRNEVEAAAEARADLLSEYGAAVDASPIAAEVAALQSIKGCAFALAAAFSAEVGDFTRFRSGRQVTAYFGLAPSQRSSGDSVRLGGISGAGNALVRKLAVEGSWCYAAARHQPKLMPRDTGVPLEIRMHGRKGSERLLRRREEMLARGVPAAKANAATAAELVRWLWALGMMCREGAE

SEQ ID NO: 135125 - protein, 400 aa, unidentified
MLSIGIDVSKGKSTVCGMKPGGEIVYTPFEIQHTREGMSELVSLLRSSGEEVRAVLESTGSYHCPVVAALLENGIFVSVVNSLRMKRFCSQSIRKVKTDRIDAMQIALYGLAYWQELQPTRLPEDTYRELQLLARQYYQMTSLLIKAKVDFNAICDQVLPGMQELMNDHAGRHKLSDFVLRYHHTTHILEMGETRFRKDYCKWAEKKGYRNCERMAALIFATAQNGIPVLPNALSTQIVITEAIRVLHTVEASRDAILTQMQALAKTLPEYSLVREMPCIGDTLAPRLIAEIGDVRRFHSKRALIAYAGIDAPPYQSGKFRANNRHISKRGNRYLRKTGYEVMQSYVMHKPANDPIFTFIEKKRGEGKSGKLAMVAGLNKFLRVYYGKVTELYRSLPTIE

SEQ ID NO: 135126 - protein, 324 aa, unidentified
MNLFPLGIDISKAKFDAALLRDEGKLRHKVFPNTEAGFQQLSVWLSKHGALPVHACLEATGAYGDALASYLHQAGHLVSVVNPAIIKAFASTEMSRTKTDKADASLIARYCQKHKPAVWTPPPPEISELQALVRRLEALLDMLQQERNRLAAGIQSPSVKESVEQHIGYLNEQITRTQSLIKDHIDLNPTLRHRRDLLTSIPGIGDTTAAKMLAEIVDITHYQSARQVAAFAGLVPKHRESGSSVRGKPRMCKVGAARLRKAMYFPAIVATQHNPIIKALSERLREAGKCPMVIIGAAMRKLIHIAYGVLRSGKPFDPHYGKTA

SEQ ID NO: 135127 - protein, 410 aa, unidentified
MIKENYIYVGIDLHKETHTAVMIDCYNQKLGEITFPNRPADFPKLVAKVKKCNTDGKTIVFGLENAYGYGRPLAVWLIDKGYFVKDVNTAISHRQAKHRGAMYRKSDSDDAEAIALATLNMLDKLPDACPNDAYWSLGQLVHRRDNIMKQRTRLVNQLHEQLCIAYPSYKSFFNDISRPTALYFWEHYPSKKYLKGKSVEDLRAELVPVSHNKCSTKTCEKILDAVASDKVKNNAYQDARDMVTLSIVSDLQHYDSQLAEVDKMLEQMYKMLGCTLTTIPGVNVITAVKILAEIGDIKRFSNANKLAQFAGIAPLHLSSSGKGKDVATKQGNRRLQATIYFLAIQMVQVSSKGTPRNPVVRAYYEKRKAEGKTSQQALICISRRLISVIYGMLKNGTEYRMPVVENAGEK

SEQ ID NO: 135128 - protein, 400 aa, unidentified
MNIIGIDVSQGESHATLITEEAEKITFKFKHNKSGFQILSSYIKFNTIIIFETTGVYSAQLTTYLKRKKVKFYELNPLEAKLRIASLRRNKTDKNDSFKLALLGKTQLAEIKNHCNKQSSSPYESLRILSLRYKQLIKCRTRILNFLRSSLELAFPELNQIFKNAYAVLALQIFRMYCHPDFLVGLTLKEMTDRVYKSVSRRIHKNVIQNYCAQVWLAAKDSYPAVPADSLEIEIISEYCDEIESYNKKTAYIQSKLIKTAVSLNNFKVISSIPGAGQLNSALLLGFTGDLARFDNYKQLNAFLGLDLNRYQSGKYIKGDTINRRGSSQGRDVETDMIRSMLRNQGKIKNHLIDYYYKLKKPPFNKHDKVALIACANHLNRTIINLVHTHQLYNYSKAIH

SEQ ID NO: 135129 - protein, 339 aa, unidentified
MELYAGLDLHSRNTYIGILDKEFNQVFKKRVPNHMEQILETLNPFRDQLKGLVVESTFNWYWLVDGLMDAGYQDVHLANPSAIKQYEGLKYSDDQHDAFFLSQLLILGILPQGYIYPKNQRPLRDLARKRMFLVRHRTAHKLSLQSLIRRCCAYHVNANEMRTLTDEDLRQWFKDEHLFLTAQTSLNSIKFFNQQISQIEKTIKKKIKLKKSFQCLKTVPGIGDILALIIMLEVGDISRFAKVGNFASYCRCVSSKRLSDGKSKGSGNRKNGNKYLSWAFVEATHYTRRHHTRLRRYYDRKAAQRNPIVATKALSNKLARVCYYIMRDQVPFHEQLLSG

SEQ ID NO: 135130 - protein, 332 aa, unidentified
MGSESDCPPVLRVLSRRSGRTAALPYPPPKSGHYITEKPSAEKAENTVYYCGIDLHSDNNVLGVIDSSGNRLSIKKNPNDLETVKKALSPFTANLEGIVVESTYNWYWLVDGLQEAGFKVHLANTAAIEQYSGLKHGDDETDTWWLAELLRLKLLKEGYVYPRAERAVRDLLRKRAQLVRMRTQNILSIQNLTCRNTGGRLSGNQVKQLTAGEVKELYKEETERGLAVICSINVIKALEKQIEMIEKKVKSKIKLSQPYQLLKTISGIGEILSMVIMLEAGEMSRFPGVGNFSSYCRCVKSVRMSNNKKKGNGNRKNGNKYLAWAFMEAANL

SEQ ID NO: 135131 - protein, 410 aa, unidentified
MLDSSLVRSAGADGLFAGIDWGNSYHQLCLVDPQGRIVHQARYDHDVAGLAALAGRLGQHGPVTAIAIERAEGLLVETLQDLGHRLYCVSPKMSARARERYRVAPGKSDAFDAFVLADSLRHEHRHWRPLAVPSPLLAELRALTRDRERLVWNQSDTQNQLRAIVMAYHPAVLELFSSLDRDISLAFLRDYPTPEQARRIGTARMAAFCARHGYSGRTSPEILTARLRAHLLAGSPGTTAGKAFAMLLFVDQLELLNRQVRTVTRRIRELLAGHPDAAVFLSFPGMGEITAATMLAEMGEDRGRFPTPGTLLAETGTAPVTRASGRSRTVRFRYAANKRMRHAIDWWAFVSVRENQWAREHYDQARAHGQQHNRALRGLGARWVRILWRCWTDGTPYDPTRHLKGQQTAT

SEQ ID NO: 135132 - protein, 415 aa, unidentified
MGYKVAGIDIHKKVLMVVVMLIQAGGLVEKIERRRFGTTTPELEKLAAWLQALGVQEAVMESTAQYWKPVWGALEGKIPTLNLAQAFSNRARRGRKDDFRDAERLVRRLVAGELVLSFVPDPEQRNLRTMTRMQVHLTYDRGRLHNQVECLLEEMRIKLSSVLSDLFGVTGRHILGAMVKGETDPRKLAAWAGNRLQCTAKELVAALTGHVQPMHQRLLGLYLERLKLIDQQIDELQHMIAEALQSEQDAVQRLAEVPGFGADSAQQMIAEVGPQAATFPSAGEMSSWVGTCPGQNQSAEENHSSRSAKGNRYARRVLTEAANAAVKTKGSHWQVVFRRLLPRLGYQQAAWAVAHRLCRVVWKILHDKVRYVEQGVNRDPKARAHRARTLARALRQLGYNVELTPLTPAPAPTSP

SEQ ID NO: 135133 - protein, 316 aa, unidentified
MNSQVFVGLDVSKQHLDVAVRPQGRHFVTPNDDRGIKQLVKRLAALKPQLIVLEASGGYEFLVTAALAEVQLPVALVNPQAVRKFAGATGKLAKTDKIDAQVLAHFAEALRPEPRPLPDQAQQMLKAALQRRLQVVKMIGQEKNRLEKTFMPAVRQDIQAHLTWLSQRLEQLDRDLSDQIRQSPLWRDRDRLLRTIPGIGPIVSRAVIAQLPEAGALPGKKAVALVGVAPYNRDSGRFRGKRMIRGGRSYLRRMLYMAAVVASRWNPVIRAFYQRLLAAGKPKKLALTACMRKLVLILNAMVKNNQPWNQFITQVP

SEQ ID NO: 135134 - protein, 426 aa, unidentified
MKFNTQNKKIAAITEKTLVVGIDIGSEVHFARAFDWRGYEYSSKPFQFSNSEEGFEAFRVWIEDMKAKGGKETVMPGMEPTGHYWFNLGIYLQGRGMKPLHVNPHHVKKSKEMDDNSQAKNDRKDPKVIAGLVNAGRYMYPYIPNGVYAEIRTLNSLRVFAQEEAIRLKNRIARWFSIYFPNYKDVYGNVNAISGLMILRKAPLPEDIVKLGVEGVNHIWRESKVRSVGLKKAKELVTAASHSVGVQNSQDAARIELQFLLSDYEMQVKREAELMAMIEAKIKKIPYVENLLAIKGIGMKTAIGFVAEVGDIRRFKDPKEIQKLAGYAIVNDESCKHVGESHISYRGRKRLRYVLYEAAVSVLAHSPEFRLIHHYYTTRDHNPLKKMQSLVAIACKLIRVFYRILTSGVTYDPEKMMGDIQRPQAA

SEQ ID NO: 135135 - protein, 366 aa, unidentified
MKKNSTMATSRKQIFKGKKLTIGMDLGDRFTYYCILDEAGEVMVEQKLPTTKPAIQQVFGRMPRSRVAMETGAHSPWVSRQLTQLGHEVIVAHARNVRLIGESSRKDDRLDARMLARLARLDPRLLSPVQHRSAEAQAHLTVIRARAALVGARTMLVNAARGLAKSYGERLRKCGTQQVNRNSASGLSAELRAALQPLLAEVESLNQHIAEYDRRIEQIASEVHPEVARLKQVKGVGTLIALTYVLTVADPHRFRRSRDVGCYLGLRPGRRNSGSSQPQMHISKEGDRYLRTLMVQGAHYILGPFGQDSDLRRWGLKLSERGGSNAKKRAVVAVARKLSVLLHKLWVSGEVYEPLRNSSAAVGAVA

SEQ ID NO: 135136 - protein, 411 aa, unidentified
MIKQVRNCIQTTVYKTTYGGDTMYLIGIDISKYKHDCFIATEAGEIIKDTFSFTNNQQGFTEFLEVLQSLDPNQTKRIGLEATGHYGRNLKMFCDKHGYTYMEFNPFLVKKFSSSLTLRKTKTDKVDSRLLSLILLSVEYKVYPVKSYHIEEIKSLTRYYKVLTKKRSKEIVNLTNILDYTFPEFKPFFRNKFSKTALFILENYQTPEKISNMNSKSHEKLHNVSRGKFSYARFVRLKILAKETIGSSSLVLNSQLQSSIRVYQVLEQEINITSDQLLDLSKDIDSPVFSIRGIGPISALSIISEYRNFTSFNSPAAMLSFAGLEPSVIQSGTIEKKGKMVKRGSGYLRETIMNVVPFFYMYNPKVYDYYHKKRNEGKSHRVALTHVAKKLIRIIFHLVKNNESFDDDKLK

SEQ ID NO: 135137 - protein, 329 aa, unidentified
MSVHQQGRETIAASRPSAGIDVSKAHLDAAWAERFEHVSNDADGWDALVAKFQADRVDVVVLEATGGYEKAAACALQAAGFAVVVLNPRQGREFAKAMGQLEKTDRVDAYSLRDFAAVIARHPKRERYIRELPDAQRAHLAGLVMRRRQLLNMRNEETNRLHTSHRVALKSVQAILKAIDKQLGAVDDDIDHHMQQHFKDIRTWLESVKGVADVTSSTLVGLLGELGRLPRRSIAKLVGVAPLARDSGPRKGTRAIWGGRAEVRAVLYMATVSAITHNPVIRQFHQQLIAKGKPNKVAMVACMRKLLTILNAMARDHATWDDSKHVKPA

SEQ ID NO: 135138 - protein, 439 aa, unidentified
MTTPSLPVLDPSAAAIDVGSEQLHVSVAGGRPQVFGTTTGQLHELRDWLKAQGARSVAMEVTGIYWLCPYEVLEKAGLEVVVVNGKYVKNLPGRKTDMSDCQWQATLHAHGLLKPGFVPPAHIRRLQDYLRVRTDHITMAGSHEQHMQKALDRMNLKIHEVISDLTGMSGLKMIEAIIGGQRDPLALVAVCDPQVQKNKEGRLRAALEGTWKEEHLFALRQAYELWQFYQKKIDECDQAIEKVLQGMAGPEDPTRPAPPTMKRGGINAPEIRGLHSLLWRLCGHKDLTTLPGVADYVLLQLLGEVGTDLGKNWQTEKHFTAWLGLAPGSRQSGKRRGNQKRGRNRAGRLFCVIARSVGRSVDKALGGFYRRLKGRRGGLVANLALARKLAELFWRLMVHGVSYVEQGLKKYEEKVAQTEQRLLQKLARKYNMVLQPKAG

SEQ ID NO: 135139 - protein, 332 aa, unidentified
MDKTIEFSQVVDRCCGLDVHKKVIVATVEGTGIARETREFESTTRSLTKLKEWLLELGVTHVAMESTGVYWKPVINILESGGFTLLVVNAQHIKYVPGHKTDKKDSAWICKLLRAGLLKGSFIPDRARRDLRDLTRYRRKKVQEVTAERNRMLKVLEDANLKLSSVFSDVSGVTCTKVIDAILEGRTDPDYLTSLCTHGRLRSSKEQIHDAVEGSFTEHHKFMLKAIRRSIAGLEEEIAELEAEIDRRCEPVREEIERLCTIPGIDKTGAKELIAEIGVNMEVFPTAANLASWSGVSPGNNESAGKKKLARKPRKQGNQGDNHRMRLGREPH

SEQ ID NO: 135140 - protein, 313 aa, unidentified
MPLYGGIDLHANNSVVVLLNEQDEVIYQKRLPNDLLMILGQLAPYHAELKGLVVESTYNWYWLVDGLMEASYRVHLANPAAIQQYNGLKYTDDHSDARWLAHLLRLGVLPEGYIYPKAERAVSDLLRKRTHLVRQHTANILSVQNILARNTGARFSGKRIQELTKQDLTTLLADESQVLAVTSSLVVLDCLKHQIKTLEKTVHKHLYNTPSYEQLLTVQGVGTILAQTISLETCTISHFPTVGHYASYCRCVDSRRLSNGKRKGTGNVKNGNPYLAWAYIEAAQFALRFQPEAQRFYQGLPRMAGQVVVDHVL

SEQ ID NO: 135141 - protein, 458 aa, unidentified
MASRKRKSAPSASLPPQLATVHLHAAGIDVGAEEHWAAVPACDDPQPVRRFGAHTADLDALADWLWTCGITPVALESTGVYWIPLFELLEARGFQVFLVDPSKLPRNGRPKTDVHDCQWLQRLHTYGLLSACVRPEDQVVVLRRYMRQRAALLADAARDIQHMQKALTQMNSKLQHVVSDMTGVTGLAIIKAILAGERDPTVLARLREPRCKQDETAIAQALYGTWRDEHLFALQQALERYEFQHRHLAACDARIAAHLATFADQSHGAPLPSKRGQRRRHRNRPAFEPRGPLYRMTGVDLTQIEGIDETTALTVLSEIGSDMSKWPSEKHCASWLGLSPQRRISGGKVLSSRTRPTTNRAAAALRLAAARLHHSQSALGAYFRRMKSRLGPPKAITATAHKLARLIYRMLKHGTAYVAQGMETYEQQYRQRVVKNLSRRARELGYELVKPTETLSPA

SEQ ID NO: 135142 - protein, 399 aa, unidentified
MVSVGVDISKGKSTVCFMRPYGEVLISPYNVQHCEKDLLQLVEQIHRLNDEVRVVMESTGAYHYPILTSLKQHGIFVNVVNAYLMKKYAMIAIRKGKTDPLDSIKIASYGIDYWYRLVDFEPTEETYQELKNLNRQYLNYLSMRVKAKQAMTNLIDQTMPGIKTVLWNRSDVPDKDKLCDFVRECWHYDNVTCMPECDFIERCNSWAKGKGYRTSIQKAKTIYALAVNGIPTMPSKMSSTKMLVLESVRVLHMIDKTLVSILAQMRDLASGLKEYDVVMAMPGVGNILGPRLIAEIGDARRFHSGNALVAYAGLDAPPFQSGTFTGTNRHISKRGSSSLRKTGYEVIRFLKCVKPTKNTAVYDFLLKKEAEGKPSRVAKIAALNKFLRIYYARVKELYR

SEQ ID NO: 135143 - protein, 326 aa, unidentified
MTAVASLFRVFVGVDVSKETLDVHVLVPDTPQNAGTFSVPNTSAGISTLAQKLKPYHVQLLVVESTGGYERRLVIELLTAGLVVAVINPTRARRFAEAMGTLAKTDRVDAHVLAQFAMRLEPRPSEKPSPQQVLLDELLTRRRQLISMRTMELNRQGQAVGALAVRQIKHHLEHLEKQIAQIDDELDQLIDNDPQWRKRVKLIDSVPGIGKTIAYRLVAELPELGQLNREQIAALAGVAPMNRDSGSHRGKRTIRGGRIDARNALFMAAWVAKRHNPTIKAYAARLAAAGKPFKVVITACMRKILIILNVMLKTNTTWNPNFAHGT

SEQ ID NO: 135144 - protein, 387 aa, unidentified
MQPTRIDHFMPAGEFLAVALELSGGSWKIGLHDGKREKPAIHTVSASSAPCRLEQAVQEIEKIKSRWGLAPDVRTVVLYEAGQDGFWIARALSKLGYEPLICDPASIPVERHARRAKTDRLDVIRLLMCLRAWLRGEYDRMHVIRVPSIEAEAQRHLARDRGELQKETMQHRDRIRKLLRTVGCWQDVKGDVTTRLAMGQFRCHDGAPLPPELHARLTRECRRLALAEQQFAELEKELIEQLPEPIQKRIADLERLKAVGPVGATRLVLELFWRHFDNRRQVGSCVGLVPQPYDSGQSRVDQGISKQGNRRVRSLLIEMALFWLRYQPDSAIARWFTQRTLGNAQNKRGKRIAIVAVARRLVIALWRYLEHGVLPEGAVLKSARSGG

SEQ ID NO: 135145 - protein, 414 aa, unidentified
MDVIVARQGALDVHKAQVSACVRVPGAEGRRVGQVKQFKTTVPGLLVLADWLRAHGVTHVVMEATGDYWKPIWHLLEAEFELMLVNARDVKQVPGRKTDVKDSEWLCQLAEAGLLRASFVPPKPIRDLRLLTRYRRTQISERTREAQRLHKALEDTGIKLACVATDILGKSGRDMLNALVAGTTDPDVLADLARGKLRPKIPALKEALQGRFEPLHAMLIGAILAHLDFLDEQIEQLSNAIEEQMRPFARQAELLCTIPGVAQRTAEIIIAEIGTDMSVFPSAGHLASWAGQCPGNDQSAGKRRSGKTRKGSKNLNAALNDAAMAALRTNDSYLQALYRRKKAQIGHAKALGAVKHSILCACWHMLTNGELYRDLGGDYYARRNPERQTNRLVAQLERLGHTVTLTETAVRDAA

SEQ ID NO: 135146 - protein, 344 aa, unidentified
MKYFAGLDVSLDETAICVVDEDGIVVTEGKAASEPDDLVRWLVATGLTITRVGLEAGPLSPWLHTELRAAGLPAICIETRRMKGATAAMAVKTDRNDARAIAHAMRVGWFTVVHVKTAESQELRLLLNNRRTLLEKRVAIDNEIRGTLKALGLKLGAVTVAAFEVRVLELLAKRSRLLAMVRPMLAARAALRQQCDVLHRMVLKAVRASAVCRRLLSVPGVGPIVALTYATGVDDPARFIHSRDIGPHFGLTPRKYASGEIDRSGSITKAGDGAVREVLVQAALTLLTRVQRWSALKAWGMAVAKRRGLRRAIVAVARKLAIILHRMWADSTMFNWKRETVALA

SEQ ID NO: 135147 - protein, 409 aa, unidentified
MVVHAAPVTSSTVSLAIDVGKSSFAWSLTDSARVRLLGPVECSMTGPSLRELVSRIERVLPAGAQVKVGVEAAGHYHRPLVAPTAWPAGWEVLELNPAHVTEQRRVMGRRRVKTDAIDLEAITELLLAGRGVAVTPAETVLGELTAWSAHRNRRVAIRTATKNQLLGQLDRSFPGLTLALPDVLGTKIGRLVAAEFADPARLAALSATRLIRFAATRNLQLRRPLAERLLTAARDAVPTADAAVARQVLAADLVLLADLDSQIAVAEAELTRLLPVSPFTTLTTVPGWGTVRAGNYGAALGDPARWPGPGQVYRAAGLSPMQYESAGHRRDGGISREGSVALRRALIDLGLGLWLNDQPSRGYAAELKARGKHGGIIACALAHRANKIALALVRDQAHYDPNRWSTPED

SEQ ID NO: 135148 - protein, 372 aa, unidentified
MNRILKIGMDVHSTNYTVCVVEPKLEGDPDLLYEVQVEPDYLNVVKIVSTLKQKYKDDTLHVTCGYEAGCLGYTLYHDLTNAGINCIILAPSTMAMPGGKRIKTDKRDAWLIAKCLANGGYNAVHIPTSEDEDVRDYLRMRVDHKGQQKVLKQQINSFCLRHGQKYQKSKWTGAHLRWLKDLPLNTLQREILNEYLLTYENLEDKVRRLDARIEELASGERYVESVKKLTCFNGVKTQAALSLIVETGDFRRFSKGNTYAAYLGLAPGERSSSTDINRLPITKAGNKHARTLLVEAAQSICKGRVGAKSKALIARQKGNDPSVIAYADKAGERLRRKYYRMFHKGKQRNTAVIAVARELACFVWGMMTDNIA

SEQ ID NO: 135149 - protein, 483 aa, unidentified
MNDAKLYVGIDLARRANHKAVALKGEETASPQAARSKPVSFSHDRDGFLALRDRLREQTGAASLKGVTVNLEPTSGVWETVAGFLRAQGAEVFFTRTDVVSALRKVHSKFAKTDRIDARTLAGIPRSFPERLVPVVEVEERIRTLRQLSAQRQRLVEDQTAWKNRLVAKLETAWGPLMCSLNKEQRFSQLACAFFKRFARPAKVVACGRERFLAWCKTQAHAHTDPDTFETFWQGAVESAALWSLLDDCKAIAVNWDVLHDLILQDLRLIDVFDKEIRTTEAQIRQARSDVPECDVVQQLPGVGPVVSVTLTAVLSPTTRFANTKKCGAYTGFTSRKKSSAGRDIEGLKITKTGNRRLKRDLALAADVAMHQDPQLAAFAIRLLRAGKHYNKVRVAVGRKLAVCAFSLLKRYNSGQTNVAYVWRDLQGHPIQKRQAKELARSLWDAYETQQKIKGSSPTPALPWQSENSTTQALNELPEADHD

SEQ ID NO: 135150 - protein, 341 aa, unidentified
MTEIKRIAIDTSKSVFTLHGVDDAGRAVLRRNLRRGELLRFFERLPPVEVALEACGGSHHWGRALSAFGHQVRLIPPQYVKPFVKRSKNDRNDAEAIAVAAAQPSIGSVPIKSVEQQAAAMLLSVRELLVRQRTQLVNAMRGHAAEMGVVAPLGEKGFKELQAAIATADEVAVPAAAKQAIALLGREVERIEVRLRAIEATLMQQHKTNPLSRRLAAIPGIGPIGALNLALRVDAGQFASARHFAAWLGLVPRECSTAGKQRLGGISRAGDERLRQLLVLGATAVIQHARPGRPATSQWLLNLLSRKPRKLAAVALANKMARIVWAMMTSGEAYRPRPVVA

SEQ ID NO: 135151 - protein, 438 aa, unidentified
MNSLSYVERFRQIKNELRKNHDFLLVGIDVSKNSHVACIMDSSKHIYHKKFRFDNSANGINLMLTTTKTILQKEPKKEIIFALEPTGNYHKPLANYLHNLGYMGCYVSSVAAKENRKTINGRWRKNDPDDAYNVADLLNQGKIMFYNSEQQKEFNQLKPLNILRKKLQKRLCSIKAKIRNNIFAQCFPEIDSLYNQIDNPEVIEILKNFPSAEQIRNTSFKEFYSKLIQTGRITTQKKQRIHNVWHKAASSIGCPLNAAMEIETAFILQDIELIKCQIGKIDKKINAICSHSQDYKLLLEIPGFGPIYASIFLSVINNIKNYNHPDQIVKLAGLDLEYSQSGKYHSKSQCSKKGNALLRYALCGVVNGALKHKIFQQLFEEQLQKKGDNKDNRRILKVKLAVKMIRIAYAVLSKNEPFDIEKIKVNSVKEPVFIERKG

SEQ ID NO: 135152 - protein, 440 aa, unidentified
MAVRKREDEVFPNAAGIDVGGSSHWVAVPARSSDEPVREFGAMTDDLNAMATWLLACGVDTVALESTGVYWIPVFEVLEQRGLKVWLVDARQMKYVPGRKSDVQDCQWLQKLMSLGFLRAAFRPDAQVCELRAVARQRDILVAEQASWVQRMQKSLVQMNIQLTEVLSDVMGLTGELIIRDIVAGERDPKALARHRHSRVKASLEDIIKALTGNWREEHLFVLKQSLGMYDDIARHLAECDTRLNAGLKDLGQKSVDLGKTPRAGSKQRKEYDMRQVLADWAGVDLTRINGLGLAAVTKILTEIGPDLSRFPTVKHFCSWLGLCPGTKISGGKVLSAKTKRSVNRVRQALKMAAMSLSHSGSALGAFYRRLCTRMDKLSANTAVAHKLARMVYFMLTRGEAFVDQGQQRYDEQQLERSVAALKRRATALGFAITPVAAQA

SEQ ID NO: 135153 - protein, 362 aa, unidentified
MGKLHGNEGKGKLYCAIDLHDKKMLCGMAGGTGKVKYVEFRTDDAGMRDLVGELSRRKGASECSEVWVAYEASGAGFLLADFIEGAGFRVSVIPPSHLPVSPKSRSNKTDRRDVKRIMDMLRGHDLAGGDLPEVHIADPELRDDRELVRRRVRLGEEITDVKNKIHGLLKRNGFRKPEGMDNWTGEHLAWLKRTADSAGGNTCFALHGLIRELLFYEEEVRLADREMKSLSRSPRYARPFLAVTSIKGVGLQTAMVFLVELGDLSRFPNRRCLASYLGLVPRCHESGERDDRKGHISRMGPSRVRKLLNQAAWSMVGHDAYWREWFKSRTSNKEDRKRMIVAVMRRLAIIMWHRGLAASEAS

SEQ ID NO: 135154 - protein, 371 aa, unidentified
MKKCSRFVGLDDSKNSIDVAVVSEDRDGEVRSYGTIENTPESVRKLVRRLGRSKDLYFVYEAGPCGYGLYRELLSLGANCMVAAPSKTPRCPGDRIKTDRRDALVLARLHRAGELHPVWVPDEETEAMRDLTRAREDATYVQTKARQRLLSFLLRHGRRFPGRSHWTKTHLKWLAGQKFAQPSQQICLDEYVEAVKQASARVQRLEAQVRELVSEWSLGPVVSAMTAHRGVSLVVASTVCAELGDLTRFDRVRELMGFVGLVPSLHATGLTRRTGAITKTGNGHVRRVLVEAAWAYRHPARRTAHMRGKLEGQPEEVQAISWKTQVRLCGRHRRMIARGKHPNKVTVAIARELLAFLWATARMVKPMSPAA

SEQ ID NO: 135155 - protein, 320 aa, unidentified
MVDHPVYVGIDVAKATLDVAVAPPAERWTLAYTEREMAGLVTRLTALAPALVVLEATGGLEGPLVGALATAGLPVVVVNPRQIRDFAKATGTLAKTDALDAAVLAHFAAAVRPTPWPLPDAATQSLAALVTRRRQLVEMLTAERNRLGSAPRVLRAEIQAHLTWLQRRLARLDTDLGQAIRTSPVWRVQDDLLRSVPGVGPVLSATLLASLPELGTLNRKAIAALVGVAPLNRDSGTLRGRRRVWGGRAAVRAVLYMGTLVAVRHNPVLRAFYQRLRAAGKLPKVALTACMRKLLTILNAMLKHQTPWSPAYAHPACESS

SEQ ID NO: 135156 - protein, 346 aa, unidentified
MLHVGLDLSRRRVDVCLISSEGELIDQFAVSADRDGLYGLTRRVAVYDVPVRGVVESMNGARFVHDELVTHGWEVLIADAQRVKGLAPLACKTDKIDARVLAELSFRDLVPAIWLPTPGLRREREISRFRLHLVKHRTTLKNRVHSTLIAFGHQVPMADLFGVAGRKLLYRLDIPEPWRGHVDASLDLIDELELRIGGIEHELVRSGADHRYVPILMSAPGFGWITSYTVACEIGDISRFSSPIKLTGYTGLCPRVKQSGEMDRRGPISKHGPRYLRWGLMEAAIHAAAHPLYRERYQHTKRRLGRQRGAKVAQIDLARKLTEAVWYMLTRNQPFAPAGATVRLAA

SEQ ID NO: 135157 - protein, 387 aa, unidentified
MVNKLKTTMFMQNFTHQCVGIDISKLSFTACVCKRQLAGQQSTNDVVEFENNKRGFNQFVKWSRKNTEISIPAVYAMEATGIYYESLAYHLSRLNLQVSVILPNKVKHFSKSLNIKTKTDIVDARIIGKMGVERTLELWEPPDPIFKKLRSLTRLYTDLKKEKTTFTNRLDSCKSGESPLLFIVNSNKTIIKGIELQIVKCGAEIKSLLYSEEWLASKVNKLLSIKGVGLITVAIILAETQGFKLIRNGKQLASYAGYDVVQRDSGTSIKGKTRISKKGNSRIRGALHFPSLVSSRFNPKMKSIYTRINTDKASKMVGATAIQRKILLLLYTLWKKDETFNENYLEPATDQQPDPLLTFRNEVGRSMDLPTQDEHKVDRSTVVLLRE

SEQ ID NO: 135158 - protein, 344 aa, unidentified
MKTSTVGLDLAKNVFQVHAIDEAGEVLARRALRRRHVVPFFSKLAPCLIGMEACSTSHHWARELSNLGHEVKLMPPAYVKAYVKRSKTDAADAEAICEAVTRPSMRYVAIKSPEQQSVLMLHRTRDLLIRQRTQLVNMIRAQLAEFGIVLAKGIQHALRLVAQLVDGEVPDIPPLALKVMMTLAAQVHDLQARIGALEKDIVAWFRSNAVAKRLETIPGIGVITASALAATVTDPHRFTSGRQFAAWLGLTPRANSSGGKERLGRISKMGDRYLRRLLINGMTSQLRWARLNPEAHPWVASLLQRKPAKLVAVAMANKVARIAWAVMTRGEVYRAPQPSTEAVG

SEQ ID NO: 135159 - protein, 403 aa, unidentified
MKMNVKPFGWSLVAAVAGWVPEWRRHRCAQGVIDHGLHKHHWGPEMNRKTGMSAGQIIGTIDGLQVVGLDIAKLVFQMHTVDMATGEIVNVQIKRAKVLEHFANRARCLIGMEACGGAHHWARELRGLGHAVRLIHARAVRPFVSGNKTDATDARAIWLAVQQPGTKCVGVKSLSQQATLTLHRQRELLMKMRVMQTNALRGLLYEFGATFAKGTKVMLGEVEAALESLSNKLPQMVADSLREQVARIKALGEDIAAIDKRLALQLRQDTDMRRIAEIPGVGVLTATAAIATMGDPSAFRSAREFCAWLGLVPKQWGTGGKVRLQGISKRGDSYLRTLLIHGARSVLHHAKEPGPWLEQIQARRPANVVIVAQAAKMARTIWAVTAGQQPYQRGYRSVRPLAV

SEQ ID NO: 135160 - protein, 392 aa, unidentified
MVVSVGIDVSKDKHDCFILSSEGEVLADAFTIPNTMDGFNCLLERIQDCTTPQDKMKVGIEATGHYSYNLLGFLLDNSLTTYVLNPLRTNLYRKSLSLRKTKTDQVDARTIASMLLSDVGLKPYTDAAYHNEELKSLTRYRFDKVKERAKLKSSIARLVCILFPELEKLVPSLHIASVYALLEEFPGAKQIAAAHLTRLKALLETASKGRYKRDMALEIRDAARNSIGSWMPAKSLELQHTIRLIRELDNEIAEIEAQIQFIMDEIHSPITTIPGIGFRMAAMIFAEVGDFTRFDSPDKLLAYAGMSPSTYQSGQLKNCYPHMEKRGSRYLRYALYNATKYVCHWNPTFSDYLAKKRTEGKHYNVALSHAAKKLVRLIFAMEKSRRPYCLAA

SEQ ID NO: 135161 - protein, 341 aa, unidentified
MKTNRTVVGVDTAKRVFQLHWVDMETGEIVDLKLTRAKFLEHFANRAPCLVAMEACGGTQHWARRLRELGHEPRLLPAKAVRPFVAGNKNDAHDARAIWTAAQQPGIKTVAVKSEEQQAVLALHRMRRQLVKFRTARINCLRGLLTEYGEVMPKGRAGLSRAIAPALERVANRLPAMIVDTLREQWARVAQLDREIGEIERRIKLWHRGNAASQRIAEIPGVGVLTASAVVAAMGDPAAFRSGREFAAWLGLVPRHEGTGGRVRMLGISKRGDKYLRTLLIHGARSVLTNAKAPPEWAVRLAERRPPNVATVALANKTARTIWALLAHDRAYQANFVSQPA

SEQ ID NO: 135162 - protein, 409 aa, unidentified
MDVVYRCCAGLDVHQATVVATVRRPAADGTRESVTVTFGTMTPDLLALREWLQASGVTHVALESTGVYWKPVYYALEDSLTLLLINMHAVKHVPGRKTDVRDSEWLAQLLEVGLLRPSLVPPPAIRELRDLTRYRTQQVRDRAQEVNRLCKVLEDAGVKLSTVATNVLGVSGRAMITALVDGRTDPDALADLARGKLRAKIPVLRRALQGHFRAHHAVVVTHILAKIDFLEETLADLTREIDERLRPFDTAMTGLDTIPGVNRVTAMAIIAETGADMTRFPSASHLCSWAALCPGQNESAGKRHSGRTRQGNRYLKGALIQAANAAAHSKQTALHALYVRLRARRGHKRAIVAVAHQILTIAYYIMRDGVTYQELGPMYFEQRTREHSIRRHVQRLEALGLTVTVTEAA

SEQ ID NO: 135163 - protein, 404 aa, unidentified
MIFVGIDWAEADHDVCLLDREGTVLATRRIPEGLEGVARLHAMVGDHVEDPVEVVVGIETDRGLLVGALLGAGYLVYAINPLAASRYRERHTTSRAKSDRADARMLADLVRTDRQHHRRVAPDSELHGAIKVLARSHQNLIWTRQRQLNALRSALREYYPGALAAFAELGHADALAVLAVAPDPERGRRLTEARIVSLLRRGGRQRSLERRASEIQVALRQPQLAAPALVAEAQAANTSALVAVVSTLDEQIGRLEAELTEAFEHHPDAEILRSLPGLGAILGARVLAEFGDAPDRYLDAKARRNYAGTAPITRASGTSHVVVARLVRNRRLFDACYAWAFCALTASPGARAYYDAHDPGPRTSKVARRKLANKLVGILHGCLTHGTLYDEELAWHRASERLAA

SEQ ID NO: 135164 - protein, 410 aa, unidentified
MRRVIGMDIHRTFAEVVFWEAGRLHRAGRVDMTRAGLEGFGRTLHKEDEVVVEATGNAMAVVRALEPHVARVIVANPLQVKTIAYAHVKTDKIDAGVLASLRAANFLPEIWLPDADTERLRRQVARRDQVVRHRTRIKNEVHAILHAHLIPRCPHDLFGQRGRHWLERQKLPDDERAAIARHLRELDRLGEDLEALDRDIAQAVMNNPAVKRLLTITGVNLTVAAGLVAAIGDVRRFASSEKLVSYLGLNPRVWQSGLGLAQYGRISKQGRSHARAMLVEAAWAAATAPGPLRSFFLRIRARRGHQVAAVAVARKLAVLCWHLLTNDVDYQWARPALVANKVRAMELQAGQPARKGNKRGSTYTYNVKELRHREIDIARQAEQTYEQFVRGWQRRRPAKRRTGAATEERR

SEQ ID NO: 135165 - protein, 387 aa, unidentified
MHAADQSLAPTTIGADLCAIFISLELSRSTWLVTSLSPGRGEKMSKHSVSAGDIAGLLARFSELRRKACARTGKSFPIVIIQEAGLDGFWIHRVLLSEGIESHVVDAASIATSRRRRRAKTDRIDGETLLRALLAHKRGEPRVCSMVRTPTPEDEDRRRICRERKVLIMERVQHVNRIKGLLFSQGASGYEPLRRDRRDRLDALQTGDGRRLPQHLKAQVCRELDRLELLLEQIKAVEAERDALLDEEQTKASAPPPMLLGVHGVGPEFASVLWSEGLSRQFDNRRQVAAYAGLAPTPWQSGSVNREQGISQSGNPRLRTTMIQLAWLWLRHQPRSALTLWFQDRIERNGGRRRKTTIVALARKLLVALWKYVSAGVVIEGAMIRPA

SEQ ID NO: 135166 - protein, 348 aa, unidentified
MAAVTERYEHVAGIDTHARTHTYCIIESRTGAMVDTRSFPTTAPGMQRAVSWIRRRTQGTAVLAAVEGTSSYGAGITAALLTEGIEVAEIRALYRRSRARTGKSDPLDAEAAARTALSTDTEKLAHPRRSGDRAALRVLLTSRSLTDQQRTANKNALTALLRTTDVGIDARKPLTDAQIATIAAWRTGRDERSHRVFREEGRRLAKSIIEQTRSLQQNHRALSVLTETLAPGLQSIPGVGAVTGAILVSSYSHHGRVRSEAAFAALGGIAPLPASSGNTSRHRLSRSGDRQLNRAVDVVVRTRMSYDPATCEYVERRRAEGLSKREIRRCLKRYVCRSLFRELRTRMA

SEQ ID NO: 135167 - protein, 440 aa, unidentified
MKQIRNHAAGIDIGAKNIFTAIEGKEVRSFETFTESFQQATSYLLENRIETVAMEATGVYWIILYEMLESAGLDVWLVDGRQTRQVPGRKTDVKDCQWIQQLHSYGLLNRCFVADEQVKAIRSYHRLREDHIRSTTMHVNHMQKALTEMNIRLKEVLSQLHGASGLAVIQAILNGERDAHKLLSLCHHSVIRKKADQILKALEGHYTESGLFALNQAYKGYIFYKEQIRACDHALQKSMEQINNYLDDQDSKKQIDSVKGRKPIRHNKPEVEHLGGHLMKIFTGKDATVLPGITDYTWMQLYAETGNDLSRWKSEKHYTAWLGLAPGQHNSGKQKKTRNRKYRPKAGQIFRQIAQSLIESKKIGLGAFGRRLKGKRGPGIAVKATARKLAVLYWRLMVKGLEYTENGIKFYEEKMKLQKERWLQKTVRELGYELVLLSDG

SEQ ID NO: 135168 - protein, 347 aa, unidentified
MTIVEDTRVITGGVDTHADLHVVAALDPVGGLLGVREFPATAAGYASLLGWLSGFGNLALVGVEGTGSYGAGLARHLAAAGVRVVEVDRPGRQDRHRQGRSDPLDAVSAARAAQSGRAAGAPKGRDGAVEAIRALMVAKRSARHERTQAVNQARALILTGPEELRTRFAGHTTAQLAAAIAALRPRPGDVPGYATRVALRELGRRVQFPDAQLERLDEMIGPLVTARAPGLPALHGAGPDTAALLLVAAGDHPERLRSESSWAHLCGVAPIPASSGKVAGRYRLNRGGNREASQALWRIVICRMSSHPATRAYVERRTKEGLSKREIIRCLKRYVAREVYRHLRDGA

SEQ ID NO: 135169 - protein, 343 aa, unidentified
MRHYAGLDVSVKETSVCIVDESGKVCRETKVPSHPEDLARALHDRAWCWERVGLEAGPLSQWLFSGLAATGLPVVCIETRHTKAFLQAQVNKSDRNDARGIAQMMRVNLFRPVHVKTLTSQKRRALLTARKLLQEKALAVDNDIRGLLRNFGLKVGPIGASRFETRTRELVDGMPELAEIIDPLLEARRKLRELFAVLHRKLLVIVRDDTVCRRLMTVPGVGPVVSMAFTATIDVPARFKSSKAVGAALGLTPILNQSGESKRLGRVSLCGDGMTRTLLYEAAQVMLTRTTKWSWLKAWAMKVAARRGIQKAIVALARRLAVILHRIWVSGTDFRWTREVQST

SEQ ID NO: 135170 - protein, 387 aa, unidentified
MNEVFDPRKPATAFDHTTTLVTVLELSGKSWELGASVPGVSRRPLRRISVGDVAAILKAIEQWKAEADKAGCQVSRVVVGYEAGRDGFWIARSLREHGIEVYVMHAASIAVERRGRRAKTDRIDTDMLLGTLLGWLRGEPRRCTMAPIPTAADEDMREPGREREALTAARLKIENQIGSLLTRYGIIGFKPRLKKAAQHLEQLRTPDGKALLAKTMDRLRRLMTQHRLLTEQLKDIETARQQVVAVVDPDRIERMIQLLVHIVGLGVETATTLVHEVFSRKFRDRRAIAAFVGLTGTPFNSGGSTREQGISKNGNPRVRRIVTQLMWRWIKFQPESDLTKWFLERTSGAKGRIKKIMAVALARKLLVALWRYVETGVIPDGARLAAA

SEQ ID NO: 135171 - protein, 342 aa, unidentified
MNKVYVGLDLGSSSFQQAALDHEGAITMNRSYPTSEANLRAAFADLQGEIHVHLEAGELAPWAAAVIAPLVTRVVCSHPRDNAWIAKDGDKCDRVDAYKLAELLRLNRFKEVHYAPDQPRRDFKQLVQHYDELTAHQARWKTKLKARLRMQGVIVTGERLFSPTGRAAVLARIESRDVRMAISQIYEVLDQSVAAQEQARLLMLRVAQAFPEIKLLRTVPGIGPIGACRFSAYIHTPQRFSSKRKLWKYCRLSVSHRSSNGKPLRRPQLDYSGCGRLKDVSRKAFEVALRARTDNGFKRTYQRALETTHDKTHARLTVQRKILSTMRGIWLTRTPYRDELSR

SEQ ID NO: 135172 - protein, 346 aa, unidentified
MGMDIAVLGVDLGKNVCSVVGLDASGAVVMRRKVRRETLIRLAEKLPPCVVGMEACCGAHHLGRLFAAHGHDVRLMSPEYVRPYVKAQKNDDRDAEGIAEAATRPTMRFVELKSQDQLDMQTLHRSRDRLVGERTALINQLRAILLERGMIAPQGKRKLEQFLSVLMDEQDGAGLSPRIVILVADVRAQWAELDRRIAAFDGEFVRWARENEDARRLVTIPGFGAIIASALVASVGRAEAFDRARDLSAWLGIVPQQFTTGGKPKLLGISKRGNKYLRRQLIHGARAALPYVAERDTPLGRWAKALLERAHRNVAVVALANKLARIAWAVLRRVERFVATGMPRAA

SEQ ID NO: 135173 - protein, 333 aa, unidentified
MCIITDAGEIVEQRIRTERGRFKEVLGGRKAKVLLEASTESEWVARCLEELGLEVVVADPNFAPMYGTRTRRVKTDKRDARALADACLSGTYRKAHRTSESRRQLKAELSVREALVRQRAKHLFLIGTLVRQQGLRVATGGADNFLTRLNEVELTKELKSTLAPLIEVVELLNKKLALVNARLEALAATDTQVARLRTMPSVGPVTAAAFVATLDDAKRFKGAHQAEAYLGLVPSEMSSGEKQRRGHITKTGNARMRGLLVQVAVGMMRVKKGSTKHLWEWAERIAARRGKRVAAVALARKLAGVLFAMMRDESEFKPWQAKEEVPERSAAAA

SEQ ID NO: 135174 - protein, 385 aa, unidentified
MTNEMLQSNATNTPARAPTRLLVAMEMSLKTWRLVMAPEGGTRKRVKTVEAGNYLAVEAAVVEAKARFQLLAETPVVFCYEAGRDGFYPYRRLTAEGHTVWVIDSASIEVSRRRKQAKSDGIDGDKLAELMQRQARGEPKALRIVRVPPPDVEDQRLLPRERERLLQDLGRLHNQIESILFAQGYREVPKTAGALRTWVAARPELPPHLRERLGREIERLALLESHCHAVETALAEQVRQDPSTGMMAVAWSLMQLCGIGLIGAWVLASEIFGWRQFRNRREVGAILGLTPTPYSSGQSEREQGISKAGNRRARALLVELAWLWLRYQPDSALTRWFQARFGGGGKRLRRIGIVALARRLAIALWRYTAQGVIPEGARLKSAATA

SEQ ID NO: 135175 - protein, 320 aa, unidentified
MDSLGIDIAKRTFDVALLRGSKLRHKQFPNNPDGFKLLDSWLKKLGVDRVHACLESTGTYGEALALHLHKSGHIVSILNPARIKAFAQTELQRNKTDRVDATLLARFCQMYNPSPWTPPPGEIRELQALVRHLDSLIETRTQLMNRLNTTQVESVVLSLQTLVEAVETEIQQTQTKIRDHINNHPDLKECRELLTSIPGIGAQTAAKLLAEIEHLREYKHARQAVAYAGLSPRHNESGTSVHSRTRLSKIGNARVRTALYMPAVTALRYNPIIRDLAARLAARGKCKMVIIGAAMRKLLHLAYGVLKTGKPFDENHSLSA

SEQ ID NO: 135176 - protein, 422 aa, unidentified
MNEQESVVYSVYVGIDWADKKHDVCICPRDSDTREFDVIQHRVEAIEAWVKELHQRYVGRIAIAVELSKGPIVSALQKYDFIDIYPVNPSSLAKYREAFQPSKAKDDPTDAELAVDMLLRHPEHFKALKPQSTEMRALTTMVGQRRCLVNERGRITNRLRSALKQYYPQVLEWFEHIDTPLFCAFLKRWPTLMQARRARANTLKRFFHEHHMYREDVVNSRRQAINAANPLTLDEAVIVPYRMQVLVLVEQLELMFKAIDQFDDEIAKLASRHPDYALFQPLPGAGPSLTPRLMVAFGEQRERFSSAADVQKLSGIAPVTERSGQKHWVHWRLQCPTFMRQTFVEWAAQTINKSYWAGAYYRQQRDKGSTYQAAVRSLAFKWIRILYRCWQTGVAYDESRYLKALERRGSPLVKRQKMLESA

SEQ ID NO: 135177 - protein, 401 aa, unidentified
MKYGVGIDVSKGKSTIAILSIEGEIIEEPFEITHDIDGLEFLEDKLKKLPKDDLKIVMEETGTYHLPVLGYLLDKEYFVTAENALKIKKYLDRGLRKAKTDKKDSYKLAEYACDNWFKLNKVRENDEIYNELRFLSRQYLATIAVQIKQKINFSNLCDLLFPGYYQLLDNNNFILGLEIFKKYFHPEIVKKKKENQFIIEIDKMAKKLGHKGAGITLANKIYTLAQNTIPPRPNNQYSQLSAISCVEALIITIKTSNTIIAEMDKLASKLPEYNVISEIPGCGKKLTARVIAEIGDIRRFKNAGSIIAYAGLDAPPYQSGQFEATNRHISKRGNKYLRKTGYEIMKSVRSNVNSDNELRTYIVKKENEGKLKKVAKIAGLNKFLRMYYGKVKKKYKELNIW

SEQ ID NO: 135178 - protein, 330 aa, unidentified
MVKKEIIGIDVSKLTLDVFIHSVKHHYVVSNDPKGFSKLLQVIWKKLPNKKECLFFCFEDTGKYSLPLCIFLNGERLSFAMVPGLEIKRSMGMVRGKSDKKDASVIALYAWRKRDEIKPTVFPAGSIIHMKQLLSLRNKLVKHKRGYQTGMTDVHDYFKEGDSEFYLEVNKRVIKSLNVEIANIEKEISALIKSDPKTLTNYKMLLTVPGIGKIIAFYLIAYTHNFTKFESARKFCCYCGIAPFERSSGTSLNGLPKVNPLANKMIKALLNMGAMSAIKNPEFKSYYSHRVAKGYNKMSTLNIVRNKIVFRAFSVVKRGSPYVNLHKFAA

SEQ ID NO: 135179 - protein, 355 aa, unidentified
MSQNLDVSPAAIGIDIGKNSFHIVGQNQRGAIVLRQKWSRGQVEARLANLPPCRIGMEACVGAHHLSRTLKALGHDARLMPAKYVRPYSKGQKNDYRDAEAIAEAVQRPTMKFVATKTADQLDLQALHRVRERLVGQRTGIINQIRAFMLERGIAVRQGLRFLRAELPNILATRTDALSPRMLRILEDLSADWRRLDARIEDLSSEIEALARQDKGCERLMTVPGIGPIISSAMVAAIGTGDAFSKGRDFGAWLGLVPKQLSTGDRTILGSISRRGNRYLRTLFVQAAWVVLVKVGPKHWDRYGLKSWIEAAKKRLHHNVLAIALANKLARIAWAVLHKGRAFECVKTNEAYRPA

SEQ ID NO: 135180 - protein, 339 aa, unidentified
MAIVGGFDVHRNQITFDCLDTEAGELSRGEIRPATRVRLRDWLRRFEGRQAAIALEATTGWRFVVEELQTAGVEAHLAEPADTRALRGPKRRAKNDRQDARHLRELLQAGRLPESWIPPEHIQELRSVVRFRKTLMDDRRAWQQRIQAVLYHQGQPARPHLLTVDKREWLASLELSPAGRQAVDLALRMIDRIDEELEPIERQLVHYARQQPGCRALMRHYGIGALTATAILSEQGDARRFSSSRKAIRHSGLDVTVYESDDKRAPGKLSRQGPPVLRWALYEAATSAARSTSPDHSYYLEVKARCGGGRARLAIARKLLRRAYHALRELGDQALEEVA

SEQ ID NO: 135181 - protein, 392 aa, unidentified
MFFLGIDIGKNNHVASMMDDNGKVIFKAFSFPNTSEGGDALLSKLSSYSSNTADFEIGMEATGHYWLSVYSFLYDKGFLIHVINPIQTDGWRKGVEIRKRKNDIIDSVLIADLIRYGQFVETRLSDEDIFSLRNLTRFRSYLVESISDLKRKVVCVLDQVFPEYQYIFSNIFGKTSKEILRQFSSPIDFESVSADTLEQLLTQLSRQKVGAAKAKQLKSAASNSFGITFAKDSFAFQLKALIDQISFIEQQVKDTEREISRLMEKLDSPITTITGIGNVTGATIISEIGDISKFNSPRKLVAFAGIDASVSQSGEYESTHNVMSKRGSPYLRKAIFQAALIASFKDPVLSAFYHKKRAEGKHHLTCVGAVSRKMCNIIYAVLKNNQPYVPKA

SEQ ID NO: 135182 - protein, 451 aa, unidentified
MSRHSMACLSWSPSSLPGGVIGAREQPQRGPNNEEPTVDPVTSGDVRSGDQRMFCGWDWASTIHGVCLLDDDGVTIKTWMVKHTDTELAALFGELAKLGDPALIPVAIERGEGLVVGLIARAGHPVLMVEPAAFKASRPRWGAAGAKSDAADAFMLADFARTDGHRLRRVEPLAQATRELTALVRARTSLVEARTAASNQLWAILAEHWPGAAMVFQKLTSQIALAFLADYPTPRSAARLGEGRMHQFCRRHSYRGGKSPAELVSRLRAAPASADPIAEKVLEAIVRSSLAQIGLLNAEINGLERQLAATLATHPKTALLETLPRVATVSLAALIAEIGPLLERCENPEQVAAMCGAAPVTKASGKSRNVGFRYTANKPARVAITSFADNSRHCSAWAGDSYRRARARGARHPHAVRILARGWVRVIWACWTTDTPYDPARHRGEQRLLAA

SEQ ID NO: 135183 - protein, 343 aa, unidentified
MRSTKKSVMQVYGIDLSKEKFEANFIDKKGQERSKEVKNKVVAISKFLSSVPEGAILCAEYTGVYGDLLVYLSNQEQIPIALVPGYTIKHSLGLVRGKSDPLDSRRIREYGERFKDKLVFTEYDSELISELKQLYTSREQLVKTRKMLVTSEKGREHLPMQSISVHTRLQKVLESLDSEIAGLEQEMEDLIKSDQELFENYLLVTSIIGYGPVIAIDLLVKTGNFKKITTARKAASFAGVCPFPNSSGEMKAKSRTSPFADKKLKSLLYMGARSAVTHNMEYRLYYQRKQLEGKPHYLIMNNISNKMLRTVYSVVQNKIPFDPNYVCTDPRERNINSSTKKVA

SEQ ID NO: 135184 - protein, 370 aa, unidentified
MGSIAFVGMDVHKATIAVAVAEGARGGEVRQLGIFPNRAEVIAKLAQRLAGDRRELNFCYEAGPCGYGLQRQLESLGHACMVVAPSLIPTKPGDRVKTDRRDALSLAKLHRAGELTAVWVPDAAHEAMRDLVRARATAVRVLGKARQHLQGFLLRHGRIYAGRTTWTVAYRRWLTTLHFQHPAQQIVLQDYIHAVQDAERRVTRLAEQITALLPSWSLAPVVQALQAMRGVGQIVAVTVTAEVGDFSRFANPRQLMAYLGLVPSERSSGGTVRRGGITKAGNALARRVLIEGAWTYRMQARVSRKLHDRIELLPSAIRDIAWKAQLRLCGRYRHLIAAGKAKVVVTTAIAREMVGFIWAIARQVQVQPKA

SEQ ID NO: 135185 - protein, 371 aa, unidentified
MKKNSSCSQSPKRGKKAQRGLMTIGIDLGDKASRYCLLNEQGEVLAESGVATTKQALGRVFGARQRCRIALEVGTHSPWASRLLERLGHEVIVANAREVRSISHSSRKDDRRDARMLARLARVDPQLLRPIRHRGEQAQGHLLRIRVRASLVDMRAGAVNTARGLTKAWGERLPACDTDTMGVRRLQQLPAGLQAALEPLLREVESLTEKIKACDVELEQIARKEYPETELLRQVSGVGILIALTFVLTLEDANRFARSREVGCYAGLRPRRKDSGEQRPQLGITKEGDRYLRKMLVQGAHYILGYRGPDTDLRRWGLKLAGRGGPNAKKRAIVAVARKLAVLLHCLWVTGEVYEPLRNNTAGPRRKALAA

SEQ ID NO: 135186 - protein, 391 aa, unidentified
MGGQSRVVIGMDPHKRSVTIEVMEPDETIVGRGRFGTDVAGFDQLIDFVAGWPDRVWAVEGCEGIGRHVAQRLLAAGEQVVDVPAKLSARMRMFATGQGRKTDDTDAHSIALVGVRIAGLHPVVSDDQLEMLRLLVDRRRRIGQEHVTKICQLHQLLLELVPGGAKKDLSAAQARKILAGLRPASPVGKLRKRVALELVVDLERIYLRKKQANKELVQLLKTTGTGLLDLHGIGPTGAARLLVEVGDITRFPDRGHFASWTGTAPIDVSSGDRQHHRLSRGGNRQINKVLHMMAVVHLRNDTEGRTYYDRRITDGKSPNEAMRCLKRRLSDIVYRALLNDYIATKATGPGGHRGTSLTSSAAGSHPHTDTSDKSLPGPISPKPTTTLSRAS

SEQ ID NO: 135187 - protein, 362 aa, unidentified
MKNFIFAGCDLHEETLVIRMAVGPGQSQRKTVRNNHAGRKKLIADLKKESQKHGGARIVFGYEASGQGFQLYDQMVEAGIECYVLAPTQMESSVKQQRNKNDDRDAERILKYLRACKLAGEKLPSIWIPDPQTRDDRETVRARQDLADKMTSVKAQLRSLLQRHGIEKPNIVGKPWTKSHRGWLAQLRDDSRQGIGFRTALGSLLRQIDLLELEIKKLDEAVDQLSRQPHRQAIVDALDQETGIGRLTATAYAVEVSDFTRFRRSRQIGAYWGLTPSSDESGQIHDRKGHITRQGAPRIRKLLCQATWYRVQNDAQVREVYQRLVNRNAKKKKIAVVACMRRLAVRLWHIGRQAQLAMKEVQ

SEQ ID NO: 135188 - protein, 388 aa, unidentified
MEVQTVDTLSPVAADHDPVRCLLAIELSKKSWIVAITTTLSDKISQYTLDGCDWKGLLELMERVRTRVAREVGRPVEMISCYEAGYDGFWLHRLLERHGVRSHVIDPASVQVDRRARRAKTDHIDAKRLLRSLMAYLRGEPKVWSVLRVPSVAEEDDRRLHRERDRLITERGQHVNRIKGLCAIHGIYDYEPMRRDRMLRLEQLHTGDGRKLPPRLKAEIARELQRLELILGMLKEIEAERDAIALTEKVSAHTNAKKIQNLVKLKAIGAEIATVLTGEVFYRPFNNRLQVASYVGLTPSPFQSGSKCRDQGISKAGNPKARSTMIELAWLWLRHQPDSPLSIWFRERVGTRKGRIRRITIVAVARKLLIALWRYLETGVVPTGAVLN

SEQ ID NO: 135189 - protein, 359 aa, unidentified
MKYIGCDFHPSFQQIAMLDRETGELVERRLAHGNGEAEAFYESLSGAAVVGVEASGNTYWFERLLARLGHELWMGDATVIRRQDGRKQKHDRRDARLILKLMEEDRFPRIWIPTVAERDLRQLLIHRRHLVRMRARIKNQLQHIALNQGVQKKRKLWSQAGMELLRKLELEPWTRQRRDTLLEMLEQLEQRIQPLDEAVKRQAELQPRAKRLQTHPGVGPVIALATILTMGDVGRFPDSRSWVSYVGLNPSEDSSGVRRRLGGISKQGNPFLRYLLVEGAASAAKGDPGLGRMYARLKARRHHGVAKIAVARKLAVRLYWMERTEKRYPEVVRMQGSQSHLVAEVMAVRLNRPPASPQK

SEQ ID NO: 135190 - protein, 319 aa, unidentified
MAKRIEEVTLGFDVSKQQLEVFGSDEAGIRVIENDPVSIVRFLDAFSGPVVIAVEATNVYHETLVDLALERGITVYLVDGYKLDKYREAVGLRAKTDAKDAYLIHRYLVSERAHLRALSAQHQQQRQLWRLLKRRAKLVKLRGQMDLSLRDLGLQVPEIDEALASIKRLINRLTVQACKLAKAAGWRESLVRLRTIPGVGELSALALMVMYHRGEFSNADRFIAFLGLDVRVRDSGTFKGRRKLTKKGDPEVRRLLFNGARAAANRYAGWAEQKQRLMARGFSEIQVSVVLARKIARIGYALMKTGDIYQSPEITCASS

SEQ ID NO: 135191 - protein, 336 aa, unidentified
MIGIDPHKASHTAVAIDGDEDQLSRVKVRATRRQVDELMSWAEPFEKRTWAIESAGGLGYLLAQQLVARGEDVLDVPATLASRIRMLATKRSNKNDPNDAHSIAIAALRAPMLRSVERADHGEVLRLLAKRNMDIGNHRTQVVCRLHALLAELAPGGIAKEMYVSDADVLMAKLCPETPAQQMRFDLALELLDDVRRLDGQLKESHRRIRVAIKASGTSVTEIYGVGPIVAATLIGYSGDITRFANRDAYASYNGTAPVEFSSGGRVVHRLSRRGSRKLNHALHVAAITQIRNPGVEGRIYFERKVAEGKTKKEALRSLKRQISNSAYRQLLLDAQ

SEQ ID NO: 135192 - protein, 368 aa, unidentified
MGNCILVGCDLHDANMLLKVAVGAGAVEQRLWRNTSGGRRVMIRDLQRRAQRAGAERVVLAYEASSLGFGLHDELTASGIECHVLAPTKIARSVQDRREKTDERDAQRLLDLVRAHVLAGNRLPSVWIPDQQTRDDRELVRARLDVSHKLTGVKTQVRTLLKRNGVSAPESAGKSWTVGYRAWVARLAGGAGALAWGARLALGSLLRQLDFLEKEGEGLNAHIGELAGNARYAEPAQALQAMPGVGLLTAMVFLTEMGDLGRFANRRQVGAYLGLVPSSHESGASNDRKGHITHQGPSRVRKVLCQAAWARIRWDQAEGTVYERIAEKNPRHRKVAVVALMRRLAVQMWHVGQAAQERSGAVSSKVAV

SEQ ID NO: 135193 - protein, 319 aa, unidentified
MSTTDLHAVFVGIDVAKDHLDVHLLPVGTACRVANDDDGIADLVARLGAAAPALIVLEATGGYQNPLVAALGAAGLPVAVVNPRQARRFAEGHGRLAKTDAIDAATLALFAAQVRPEARPQPSAAAQDFAALLARRRQILQMRLAEQQRLATAAGRIARDLRAHIAYLTRQFDRLEADLDAAVRSSPLWRERDELLQSVPSVGPQLSRVLLAELPELGTASSRQLAALVGLAPFNRDSGRVRGRRRIFGGRAAVRAALYMAALVAVRFNAPLAAFYRRLVERGKAKKLALIAVARRLLGILNALVRHGTPWDEKRVAIT

SEQ ID NO: 135194 - protein, 349 aa, unidentified
MQITTIGLDIAKNVFQVHGIDAAEKVAVKKQFRRVQVTKFFEALPPCLVGMEACATAHYWARELAKLGHEVRLMPAKDVKAYVRRNKNDAADAAAICEAVRRPTMRFVAVKSADQQGQLIQHRTRDLLVRQRTQVINALRAHMAELGIVAAQGHEGLKKLLAIVADEKDERLPVDARASLIVLTAQLQALQTMIRVIEKRIIAQHRASEASKRVATIPGIGPLGASAIVATLTDPSAFRSGRDFAAWIGLVPRQDSTGGKQKLGPISKQGDRYLRRLLVVGAHSALRRAKQSPQNHPWLVQLLARRPFKVVAIALANKMARVAWALLARGSRYRARGGRTYRAPQLAAA

SEQ ID NO: 135195 - protein, 446 aa, unidentified
MPLKPDTLPTVPPAQALLVGVDPHRATHTVCIMNQDGHELCARFRVPNNRRGVQLLARRLNDLAQADGYTQVRLAIEATNWYWLGLCYTLPKVCALPVESRAINPRLSANFKKVLMNDEHTDSADAFAIAERLRMGRDLPPPFSPDALYLPLRLLTRYRFHLVQRLISEKAYAANLIYLKASDYTAPDTQPFSDVFGATSRAVLTEFASFEQILDMSLDDLAAWLAQRGKRRFTDPMATARKLHAVAQASFVLPAPFQRSLQIALDLSLQHIAALEAQLKRLDVAITQQLAALNIPNTLTTIPGIGPVLAAGLIAEIGDVHRFNCDDDKVAKLAGFKWRRHQSADFVAEDTPITQHCNRYLRYYFCEAAQLVRIHEPEYAAFYQKKYTEASRHHHKRALVLTARKLVRLVVHLLATRQAYRPPEVDSHSRATSRRQAANPTEQLNR

SEQ ID NO: 135196 - protein, 329 aa, unidentified
MEQLYVGIDVSKETLDVILRWERKNGEHRVVANDASGISQLIKWLAKQKAGSLHACLEATGQYGDEVAERLYAQGYAVSVLNPLCTKSYARAGLVRNQTDKVDAGLLAEYCEKQEPRLWVPPSPLHKRLRALSRRLDDLEGIRQAERNRLHAAKHQDATIRTSLEEHIAFLSEQLAATQKELARLLDQDPELKRQKQLLMSIKGVGALTAVRFLAELGDLREFADARQLAAFLGLTPEFKTSGKSVHSKPRLSKRGNAAVRKMLFMPAVSAKNTNPIVREFCARLALSRKCDMSLVGAAMHKLAHLMFGVIHSGKPFDPNFLSNPQVAS

SEQ ID NO: 135197 - protein, 354 aa, unidentified
MKKIFIGIDFSKEKFDATLIQAEGLKECAPSVHEVFDNKTPGYRRLVKWVKAHAEGFTPEAWLFCGENTGGYSIGLSNYLYALGYDMWLECAYKIKHSTGIQRVKNDKADSRAIAEYAMRNYDKMILHKPQSTSLTCLREVFLYRHSLVRQKVALQVRRNEKRLTQEKSDARAFMSFTSKHLITEVNKAIAKCDEKIKEIIASDDELREVFDIITSMPGIGVQNATCLMVYTNNFQKFDLDSRKIACYYGIAPFGRQSGTSVNSRPQVSPFANRMIKSLLSQAALAAIKFDINVHSYYQRLIERGKHPLLVHNNIKNKMLHILVAMVRDRVKYNPDNVYRTSNKVSLAPQVLNI

SEQ ID NO: 135198 - protein, 349 aa, unidentified
MKYFAGLDVSLEETSICIVDETGRIVKELRATSEPEALVGALRDTDLTLERVGLEACSLTSWLHDGLRKAGLPAICIETRQANAAMKTMPNKTDRNDARALAQIMRTGWFRQVHVKSRQCRLWRSLLVARRTILNEMRSIENVVRAILREAGVKLGTPSRADFVERVRELAGGDSEVTPLVEPLLAILITMLRELARLTKRVLDVVRKEKVCRHLMGVPGVGPITALAFRATIDRPDRFQHSRDVGAHLGLTPARYQSGETDIQGRISRCGDELARTALYEAAHTLLTRSRKWSSLRAWGMKIAKHRGMARARVAVARKLAVILHRMWIDGAAFRFGKEPVTAQIGAAA

SEQ ID NO: 135199 - protein, 363 aa, unidentified
MTVQYVGMDVDKQKIVLARLDAGRDTRAVEHVIANTPSAVKKYFTPLLGGGEVHATYEAGCFGFGLYRQLTAMGVAVVLAAPGLIPRKPADRIKTDRRDAYSLALALRAGQLTGIYVPTVQHESVRDYLRMYESLRGDLRICKQRVLQFLLRRGISYDGGGPWTVKHKHWLSALQFSQARDRQTLDMYLSQMQELQAKCAEAAAEVESIAAQDCYRQQTKKLTAFKGIKTLIALSFVTDIGDFRRFSNARQFMAYLGLVPSERSSGNKRRQGGITKAGNSHLRRLLVEAAWHYRSYHPSSRDLIERRRGVDPSVLSYANRAGRRLNRKYLHMLLRGKRSQVAVTAISRELAGFLWGAMTDQVA

SEQ ID NO: 135200 - protein, 341 aa, unidentified
MEEYIGFDVSMKETAVSIRRDGKRIWRGKCASDPKVLADLVRKRAPHAKRVVFETGPLSVWFFHALKAEGLPAICIDARHAKAALDMAPNKTDANDADGLAHLAEVGFFREVRVKGFESMLSRTRMAARNRLVRIAVELSNQIRGLMKTFGLIVPSAKGGKFDEHICRLLDGRGDLAPIMMPILEAWRAIRIRAAELGRQLLADARQSQACQLLMSIPGVGAITATAFTSAIEDPANFKKSRSVGAWIGLTTRRYQSGEVDYDGHISRRGDAHLRGLLYEAATVIMTRSAAESDLRTWGIKLREKIGFKRAAVAVARKLAVIMHAMLVSGEFFERKATNTI

SEQ ID NO: 135201 - protein, 340 aa, unidentified
MNVKTIGMDLAKNVIQIHGADGKGNTVLRKQIKRAQVLPFFANLVPCQVGMEACGSAHFWARKLVAMGHTVQLIPPQYVKPFVKRNKNDAADAEAICEAVVRPNMPGVPIKTVEQQAILSVHRARQGFVKARTAQANQIRGLLAEYGLVIPVGIRHIPSCVALIIDDDENDLPMSFRHLLQTLVEHFKALDEQVGKLELEIKYWHRDCAASTQLATVPGVGPITASALVASIGDAKNFKNGRQMAAWMGLVPRQHSTGGKTVLQGISKRGDSYLRTLLIHGARAVIRVSEHKIGADPWLKALVARRNKNIAAVALANKNVRVIWSMLTHERDYVPNYVHA

SEQ ID NO: 135202 - protein, 353 aa, unidentified
MKINERISYRDKKVFIGVDVHRRHYTVSCICDDELVKKCQIVAIPEQLLCLIKKYFSEAKVKVVYEAGFSGFALYRHLEQHKIDCIVVNPSSIEISSRDRVKTDKRDSLRMATQLANGRLRGITVPSKKRENQRLITRSREQLLKERTRIKNQIRFKFHQFGLFPLEFQTRLTRNQVILLLKKDLSEELRASVNLYIEIWDILDTEIKKLDKELQKQADDDPLEMVYRSACGVGAVTSRTLANELGDMSQFANEKALFSYTGLTPAEYSSGEHRRLGHISRQGNARLRRVLIECAWSAIKKDKKLNEDFVRISSKAGKKRAIVAIARKLIGRVRAAVRKGEMYELGHNSAILK

SEQ ID NO: 135203 - protein, 428 aa, unidentified
MSNQEIIRRKQFCQIVKEVRSSKEYLVVGIDVAKDKHHAFMGTATGKSLFRKLIFENNMEGFSRLLRTADEIKSQNDLSKIVYGLEPTGNYHKPLARHLIRCDCNVVLVTGQAVKNNRNLLDGRWNKNDTKDAANIADLVSRGRCLYYDCPSPGIIEIRSLLSLRRRLKREEHSLRMRIRNNLLAQYFPELDRFYNACESETLSIVRYFLYPDTISAMEFGEFFHLVTRTRRGIAQTLRLRKIHSLAIESVGCPLGPAGEYESDLLVEKLNQVREQIKKTADLIKDFCLEFSEYSYLLTIPGFGPYISARVLASIGDPFRFENRKQLIKMSGYDLCANRSGKTSNKAIPVISKKGNGELRYALYQAAMVASARVDLFRTYFTRLLRGRERERGIKTKMCVKLAAKMLVIAWTLMKKREPFDPAYLNIE

SEQ ID NO: 135204 - protein, 342 aa, unidentified
MLIIGCDYHPSVQQIAFVDTETGDCGEQRLKHSDREAEKFYRDLKLRAESVRVGLEATGHTRWFERLLAELGYELWIGDAAQIAAMRVRKQKTDRQDAQFLLKLLLEDRFPRVWVPSLENRDLRQLLWHRHRLVQMRTRIMNQLQSIAMNEGIQRRGGLRSEQGRKRLEQLVLAPWATKRRQDLLGLLDQLNDSVEELSAALQQEAEKRAEARLLMTHPGVGPVTALAFVLIVGDPERFRCGKQIGSYVGLIPEEASSGVHWRLGHISKQGSTLLRFLLVEAAQAAARFNPEWRSKFLHLAMRRERRIAKVAMARKLAVSMYWMWRKQRSFQPSIEVGSHAG

SEQ ID NO: 135205 - protein, 382 aa, unidentified
MQSIDNVNPTIHLAIELSASSWLIAARLPGSEKPHLHRIDGGNIAALFALISSLRAHVARRLDAAIGVICCFEAGRDGFWLHRLLTAHGITNYVLEPTSILINRRARRAKTDRLDAIGMLRVLAAYLRGDRQSCSMVRVPTPEEEDAKRIHRERENLVQERLRIENRIEALLFTQGIRKRPSLRSWERDLANLRTGDGREMPRHLRAELNRLRRRLVTILELIREVEAERDELVVTTPQDRTSRKIVALCRIRGLGENFAAVLTREVFYRSFGNRRQIASYVGITPMPYQSGGMDRDRRISRAGNPRARTTMIQLAWLWLRYQPGSELAEWFRKRVGTLAGRTRRIAIVALARKLLIALWRYVETGVVPAGVEIRTETVVAA

SEQ ID NO: 135206 - protein, 411 aa, unidentified
MDVVVACCAGLDVHQASVVACVNSTGRDGRSHKEVRTFATMRDDLIALHDWLKDAGVTQVAMESTGVYWKPVYAALEDDFDTIVANAQHIKNVPGRKTDVKDCEWDSDLLRHGLIRPGFVPPREIRDLREVNRYRRKLAQVQAGERNRLIKVLETAGIKLAGVASDVFGVSGRAMIRALIEGEATPEAMAGLARGKLRGKRTHLARALDAPLQPHQRLMLRTQLARIEQAETDLQRLDVALTEMIAPYHRQMRLLMSIPGVEWINAVTIIAEIGVDMSAFVSAAHLASWAGLCPGNNESAGKRRSGKSRKGNVFLKTALITAAITGSRRGGGSYLGEKYRRLSARRGKLRAAVAIAHKILVSIWHMLTEGTFYQDLGAAYLDRLDRTRTARNLVRRLAAMGFDVQLQEKAA

SEQ ID NO: 135207 - protein, 382 aa, unidentified
MYIGIDAHKRMCEVGAISQDKKVLFQEQCRTSKKGLNEFAMRIPKGAKVAVEASTSGKFVARVLMEAGVDVTVGHPAEIRRRMGNTKKTDTLDCMFIAEMLRMDWLPKAYLPSKEDDELRGMLRHRLAMGKRSRTIKNQIHAMLQGQGIQLPFADIFGKGGSEYLDRLPLPASSQFMLEQLLEQLDLSVRQQRQIEDILALRASGHEACKRLMTLPGVDYYSGLLILMEIGDVTRFPDAKHLCSYAGLVPRVSQSGDHMHRGGIHKQGPGALRWIMVVCAHAAVKARNSRWHREYQRLSRRIGAKKAIVAIARKMLTVVFALLVKNEDYVEKDPKMYQRKILRMKWRAREIPVSDVSGRVDRLSPEALERLISEEDGYAVPR

SEQ ID NO: 135208 - protein, 396 aa, unidentified
MISVGIDVSKGKSTVCILKPYGEIVSKPFNITHTQKDLSELSSMLFRLNDEVKIVMEATGIYHLPVLTYLQEKGFFVSVINPYLMKSYRNESLRKAKTDKIDSRIIANYGIDHWFKMKEFQISGVIYEELKLLGQQYRHYMKLHLLSLAELTHLLDLTMPGIKNLLASWNETNRKDKRSDFVERFWHYDVITSMSEQEFTEKYILWAKEKKYVPSQEKAKVIYTLAQESIPTLPSETSSVKMLVTEAVRVLKEVDATLGLILSRMQEIAKTLPEYSVVREMGGVGNTLAPKLIAEIGDVRRFRNGKALVAFAGIDPPPYESGQFVGCNRKISKRGSASLRKVGYETMRSLKMRSRPEDPVYRYVVKKESEGKSKKNIEISRKIYRACLKNHFCNTF

SEQ ID NO: 135209 - protein, 345 aa, unidentified
METMYYIGLDVHKKTISYCVKDGSGRIYAAGSIPATRLALDMWMKTLPQPWTVAMEATIFTAWIYDHLQPHAAAVKVAHPLMLRAIAVAKKKNDRIDASKIADCLRCDFLPECYMASTEIRERRRTLRYRNLLVRQAVQMKNKIAVLLMEAGVSYNKQKLHKVGYFRELLTSNQDIDEGLKPLLRLCRETVVRLGKTESALVRSLERDSLLVERVERLMTIPAVGPITALTWALEVGDVKRFSSIKKAISYCGLCGAERSSANITKRTPLSKQRNKHLQTVLIEAAKMAPRNSPELAMLYDQAKQKGNANRATLAVARKMVAYLVAVDRRQKEFLVVENKNRTAA

SEQ ID NO: 135210 - protein, 344 aa, unidentified
MNSIDYIGFDLHKKTISFCAKAQDGHILDEGTITARRYDLEAWAKGRARPWVGAMEATLFTGWIYDYLKPLAQELKVAHPPMLKAITASKKKNDKGDARKIADLLRCNLLPECYMAPSPVRAMRRVLRYRHLVVRQATRMKNRISGLVMETGTPYNKQRLHGKAYFIELLGSLRQMPDAVVELLQLSRGQWELFDSIQKRLLKERQQRPELSQRVERLQTIPSVGEILALTWALEIGEVSRFSAIGEACSYCGLTSAERHSAGVEQRGPISKQRNKHLQTILIEAAKLAPRFHPQLAAVHQRELQRGNRNRTTLAVARKLVAYLMAVDKSGKPFQLRTSVVEQV

SEQ ID NO: 135211 - protein, 337 aa, unidentified
MEQVQQYVGIDLHRRRSVIVRRTESGETLDTVRIDNDPVTLAAELAKAGEHPEVIVEATYGWYWAADVIQECGGNVHLAHPLGNNWGNRRVKNDERDATDLVDLFRMGRLAEGWVAPPALRELRELIRYRAKLVHLRSNLKAQVHAVLAKEGVAVPMTDLFGVGGQRLLDEVKLGRAYRIRVESLRDLIELCDREIAILEKETAPFFAGDLGYHAVQAIPGVGPVLAAVFVAEIGDVSRFTSARHLTSWAGLTPTHHESDKKVRRGHITKQGSRLVRWAAVEAVSRQRGDTPIRAHHQQVGERRGAQIGRVAAARKLLILVYYGLRDGEIRCLAKAG

SEQ ID NO: 135212 - protein, 347 aa, unidentified
MRYVGIDVGKHRCRAAVMDQGGLIIEEFAFTNSHQGIDDVASRLTVDDRVAIESTGSVWVNLYERFDERKIPVVLANPLKTRAIASARIKSDKVDARILAHLLRANLIAESYVPPRELREIRALIRHRASIVKTRTMVKNKIHALIEKHGRTSEYSDLFGKRGIEWLRAVELPSLDRLMLDNHLQHIESLNHQIERVDEEIRLKASQDEYVRLLLSMTGIDIYTALLIRGEVGSIDRFPNYKKLVSWSGLAPSLHQSGSIEYHGAITKQGSRMLRWIMVEAARVAVSHDARLRAFYERVKHRRGDQKAIIAVANKMLKIIWFMLTRREPYQSRNRQLYERKLNSLIN

SEQ ID NO: 135213 - protein, 368 aa, unidentified
MIIVGCDFHPCWQQVSFVDTETGEVQDRKLINGDGEAERFYRSLPVPGLIGVEACGNSQWFLELLQELGHEVWVGDAAEIRASYVRKQKTDKRDAAHILKLLMEGRFPRLWMPSAEQRDLRQLLIHRHKLVEIRARVKNGLQHLMLNRGVQKKHRLWSEAGQRALRELPLTGWAACRRQDLLALREQLDEQIGVLDTAATKAAEEDEAARLLMTQPGVGPITSLAYVLTIGDVSRFQRGKQVASYVGLIPREHSSGGRQKLGAITKQGNRFLRMLLVEAAQSACRYDESFRKQYEHRCHQKPKGVAKVAAARKLCVRLFWMMKTQVSYPEIVQVEARCSEQSPCKQDTRKQPAVRIESSPRVALVGAS

SEQ ID NO: 135214 - protein, 373 aa, unidentified
MPKYSTAFGMDVHLRSTTVCALDADTGEAVTRRFPGNPWGEIAGWMDGFPGPSLAAYESGYLGFAPQRELAGLGVECVVAAVSKIPRSAADSASKNDRNDAARMAKAILAHDISPVWAPSPEVEGIRDLAGAYDGATARLATAKQRLLAFLAKRGFVYGGATPAGNPRKYWTYDFLRWLDKVRPEDDGGVRTLAALRNEVEAAAEARADLLSEYRAAVDASPIAAEVAALQSIKGCAFALAAAFSAEVGDFTRFRSGRQVTAYFGLAPSQRSSGDSVRLGGISGAGNALVRKLAVEGSWCYAAARHQPKLMPRDTGVPLEIRMHGRKGSERLLRRREELLARGMPAAKANAATAAELVRWLWALGMMCREGAE

SEQ ID NO: 135215 - protein, 485 aa, unidentified
MKTKRQEGASKTSRQAAAASQGKWHEMNRKQRREMTRKIQNEDLRLEIVHPDAAGIDIGNESHYVAVPPTRDSQSVRRFGCTTAELKAMAAWLNQCSIHTVAMQSTGVYWIAVYDILEQVGLEVYLVNARDTKNLPGRKSDVQESQWLMKLHTYGLLRNSFRPSQEVRTMRTYWRQRNDLVRAAARHIHRIQKALTQMNIQLANVLSDVSGMTGQAIIKAILAGERDPRKLAAFRDPRVKASEEQIALSLEGNWQQDLLFVLHQEQDGYEFCQRQMTECDRQLNHYLEQTEDRSQGAPLPEEKRTERLKKKKGNKPQFDLREGLFRMTGTDLTQIDCVDVMTATTVISEAGWDMSKWETEHHFVSWLRLCPDNRISGEKIIGKGRLPTNNRVTTALKISASNLRLSNTYLGAQFRRLRTKLGAPIAIKAMAAKLARLVYRILRYGMKYVDRGAAFYEAQHRQLQIKHLKWKAAKLGFKVIEAPAA

SEQ ID NO: 135216 - protein, 435 aa, unidentified
MEQSTRFIGMDVHKDTIVVAVTATGEVGKATAYGTFPNTASALEKLVKRLRQAGSGPMKFCYEAGPCGYGIHRTLARLGEDCMVVAPSMIPRKSGERQKNDERDAASLAVLHRGGLLTAVWVPDAAHEAMRDLILTRLAAVRTVRTARQQLSAFLLRHERVYPGNRTPWTKAHRGSLADQSFAQPAQQIVLEENIEAVCLGEQRRDRVDGYLRAQIPSWSLFPLVRNLNALRGLDTIASAGLAAAIGDPSRFASAPDFMAYLGLVPSEHSSGPRRRIGAITKAGDIHARTLLIEAAHSYRFPARIARHKLAAVDAVPEAVREIAWKAQTRLCQRYRRMMAKGKPRQVVVTAIARELAGFVWSIACITTDPPAKKVTATVTMASQEVCSPRSTGHSRTPYRQPRKTLSAVHATLNKSMPHRLKRAEGITKHDRPTG

SEQ ID NO: 135217 - protein, 474 aa, unidentified
MARTRNRPASPPVPGDAGAEVTDEPVQVISRAAAIDVAKGSGMVCMRLPHESRAGRRTQKVREVTATFAAVVALMDHLVCQGVERLVLESTSDYWRIWCYLAEAAGLEVWLVNARDVKHLPGRSKSDRLDCVWLCKLNEWGMLRRSFVPPEPVRDLRALTRLRANLTHDRVRHQNRIEKILEDALLKVSSVISDLMGGSGRRFLQALADGERSPAALAALGDYRLHASKAELKQALTGRFRDIHAFEIGMLLELIDDLSAKITELDERIEAQLENVPGLGGVCTSCGQPGPDGPCTGCGEPVLGVIARLDEITGIGRGAAQVIVAELGTGMTQFPTPGHAASWAKLTPRAIQSGATSKAGRTGKGNPYLRGATGVAVMTAARTETFPGARYRRHARRRGKQKAIVAGCRTIIEIAWRVIADPGFRYIELGPDYHDQLDPRRKTRDKIRQLEKLNPGMTVTLTPRPEPGGQAPAA

SEQ ID NO: 135218 - protein, 335 aa, unidentified
MTRFNYYIGIDVSKLTLDISMLCGDENFTKTVYYKIENTEKSIAQFVKKTLGKYELSQILFCFEDTGIYSLPLSYYFSNNKLSYWKVPSLEVKRSKGIRRGKDDKIDSKDIAFYACTHLHKFRPSSIPPKSIQQLKLLFTEREKVLKSLSSFEKTSENKEFMAKDVFNVVVSVNASVIKKLKQAIQSIEEKMLAIIASEEKLNQQYKLITSIPGIGRQTAIYLIIATKGFENFENWRQLACYSGVAPFPYQSGTSIRGRTKVHPFADKKLKTLLNMCAIVAIRHDKELKTYYERKVAEGKSKMLVINNVRCKLLARVFAVINRKTMFINTYKFAS

SEQ ID NO: 135219 - protein, 344 aa, unidentified
MERYLGMDVHAASSTICVLNERGKLLRRDVVETHGEALVGYLKQQPGTLHLCFEEGEWAGWLHEILSPHVADLVVLHGVRKSGSKSDAIDARDLADRLRTGRIERPIFKAPGQYAKLRELSRAYTLMTRDCARAKNRLKSTYRRRGLSCSGTSVLSPGTRVKREQELPLAARGAAELLGISLDCAEELKQEAEAAMVREAHRQPISRVLETVPGMGPVRVAQLLPIVVTPHRFRSKRQFWSYCGLGVVTRSSADWVRHGDRWTKAQVAQTRGLNRNYNRTLKMIFKGAATTVITHAAPNRFCEAYERLCRQGTKPNLAKVTVARQLAATVLAMWKAEEVFDPKR

SEQ ID NO: 135220 - protein, 343 aa, unidentified
MKDTIYAHYIAIDWSIENMAIARMTKKSNKIILIDVPSDIKEMKVYLKKLKGSKILVVEETTTSQWLYTELRDYVDRMVICDPHRNKLLNDGPKTDKIDAAKLVHLLKAGLIKEVYHSTDKFLYLRRFVSGYEDLVKAGVRLKNQRYSLLRACGKRGFERAGTKLDSEGDQFVLDCMDRQIEAHKQEKESYGKEFERLAKDYPEIRHQKSLPGIGPIHAVKIVARLVTPYRFADKGHFLSYTGLIKLEKISGGKSYGRKNSRYCRQLKGVYKTSIWAAIGGNNPINDYYEYLIQEKGYPEHNARHKACRKLAILSLGVFKSGKKYQPYRRDHVKGYQELKSGL

SEQ ID NO: 135221 - protein, 401 aa, unidentified
MKRLSGGIDVGSESHHITILDEEDNFLYNQKVSHQLNEFAESIKLFRKIEKQEGGKISFALEGKNGYSAPFDRILLDQGFTLYNVDNLKLKRFREAFAGEWRDDERDSLMLSKMLKLKDYINSERERVFIKIEKPSLITEGLKLLSRHQQTLINEKIRLINRLGKKLLEVCPQILKLGKLKNKKIIAVLAKYPDFSKYKKITLKSLLKIKGIGKIKAPFLVKRLNNIEYMSGLTDIYKTIILSYAQRILELQKEIEDIDRKLDEIGEKDKEVKHLKTLPGVATKLASRLIGEIGDINRFPSEKQLAIYCGIACVDNNSGKITKAKAVYKANKICKQALITMAGGSIRLSFQCRAYYLKKRTEGKSHNHALRCLARQMIKVIHRMLTEDRDYIVRKELRKVA

SEQ ID NO: 135222 - protein, 425 aa, unidentified
MDENNWQQRRYYMGLDWAKQKHDIVVVDGNGRTVLDIVIEHTAKGWHRLRTKLIELAGADLSVVAAAIETNRGPAVERLLELGCAVYPLNPKAAQRYRDRKAPSGGKTDHLDALSFADALRTDGHRWRQLKSEDPKIQELRLLCRDEINLIEQRTALVNQLQEALHEYYPAALEAFDDWTAPASWAFIERFPTPEALKKAGKRRWEKFLHTHHLYRPETYQKRLDVFSRASEFCGGQAVTNAKSMLAVALAKQLRLLAQQLKVYRRRIEELFQEHPDNYLFGSLPGVGEKLGPRLLSECGEDRGRFTDHQALQCYAGTAPVSFQSGQIHKVKFRYACNKNLRAAVHLWSDLSRARCAWAQIYYQQKRLEGKSHACALRCLGQRWLKILWKMWQTKKPYSEQVHTRNQIEHGSWMLTLKPTYTSAK

SEQ ID NO: 135223 - protein, 408 aa, unidentified
MEILYARCAGLDVHKDSVVAAVRCVSEPTHREVRTFGTTTRELFELGDWLEAHAVTHVAMEATGVYWKPVWHLLEERLELVLANAQHIRNVPGRKTDVNDAMWIADLLAHGLIRSSFVPPTRIQELRDLTRTRKQLVREVSQHTMRIQKTLEDANIKVASVLSSVLGKSGRAMLHAIIGGEADPERLADLAVGTARKKRAELIEALRGRVTPHHRAMLKMHLGVIAALESALDEVDAAAGKALEPIRAHAAILTTMPGVSDIVANVIVAEIGVDMSRFPTAGHLVSWGGLCPRNDESAGKRRSTRVRKTANWLKTTLVTAAWSAVRCKDSYLRAQFLRIKSRRGAKKAILAVAASMLTAAFYMLRDRVPYADLGAQHFDRRDKTKAISRLVRRLNDLGCEVEIRDQAA

SEQ ID NO: 135224 - protein, 411 aa, unidentified
MENIFPCCAGLDVHKESVEACVRQLEPTGPLHQQTRHWGTMTRDLLRMSDWLAAQGVTHVAMESTGVYWKPIYNILESRFTVLLVNARHLKQVPGRKSDIRDCQWIAQLLQHGLLKGSFIPPRPQRELRDLTRHRVQLGEEKTRTVNRIQKVLEDANIKLASVAADIMGVSGRAMLEALIAGREDPVQLADLAQRQLRGKIPELEKALEGHLTEHHRFMLRLLWKQLAQQEELIAELDRKIEEHTRPFADEIERLDAVPGVDRRVAETVLAEVGADMQPFPTHQHLSSWAGLCPGNEESAGKRRRRRITPGNRWLKRTLAQAAWAASHSKNTYLASQYRRLAGKRGKKRALVAVAHSILVIAYHMLKARTTYTDLGGDFFDHLEPERLTRYYVKRLESLGHTVTLETCVAP

SEQ ID NO: 135225 - protein, 418 aa, unidentified
MSLLLEQPFAAYVGIDWADTKHDICLQAAGETRREFCCIRHQVAAIDEWANALHRRFGGPIAVALELAKGPIVAALQKYDFLVLFPINPATLAKYREAFQPSGAKSDPKDAELALDLLLHHPERFGPLRPQSTAMRTLVSLVERRRQLVGDQTRLTNRLCDTLKQYYPQALEWFDDRGTVLFCDFLDRWPTLHSVKQARTATLEAFFHAHHCRSASRISARIGSIREAEPLTEDPAIIGPCRLHVLALAAQLRAVLAAIVQFEHEIASVAPTLPDYTLFKNLPGAGAQLAPRLLAAFGEQRERFRNADELQKYVGIAPVTERSGKQCWVHWRLQCPKFLRQTFVEWAAQTIPRSSWAGAYYRQQRAKGSSHHIAVRALAFKWIRVLYRCWQTRTPYNETVYLNVLRKRGSLLARKFGT

SEQ ID NO: 135226 - protein, 338 aa, unidentified
MIVIGVDVHKHSLTAVAVDEAGRTLDEATVTAADDELLVWASEIGDERLWALEDCRQLTRTLERQLLVAGEELVRVPPKLMAPERRAGRARGKSDPIDALAVARAALREPGLSRPRPDEQPFRDLKLLVDHRDDLVDERRRAQQRLRWHLHQLDPSFVVPARRLDRPTHLERVARWLARREQDVQVRVARELVARCRSLTRTIVELERELEQRTAETAPALLELPGCAALTAAKLLAEVGPIGRFQTEAQLARHSGVAPLEASSGRVQRHRLDRGGNRQLNCALYRIAITQARYHPAARAYLERKQAEGKSRREAIRCLKRQLVRVVFNTLKASPALT

SEQ ID NO: 135227 - protein, 361 aa, unidentified
MGIDAHKKDLFIAMLMGHEPKPVTWQLANEPNAVRRLVRKLEREAPGAVRVFYEAGPCGYALQRQVTTSRVSCDVVAPALIPRKPGERVKTNRRDARKLAELGRAGLLTAVQPPTAEDEAVRDLARARDDAREDLQRCRHRLGKLLLRRGLHYVGRNWTRAHRQWIERVTWTHAAERIVVDDYLLAIDHTEARLLELDARLAEIAEREPYREPVGWLRCFRGIDTLTAMLILAELHDFRRFASAPALMAYLGLVPGEDSSGEKHRRGRITRTGNALVRRLLVETAWHYQHRPTVGTALTRRRKGQPARVIAIADKAQQRLCRRFRKLAAEHKPAPKIAVAIARELTGFLWAALQREPATVN

SEQ ID NO: 135228 - protein, 406 aa, unidentified
MGAATRWHTIVVAKQLMERPMKRNDLSRSLVAFEQNNTLVAVVELSLKSWLVAGLVPGLAREPLKKQSADENALLALLHRWRAEAFKAGRRIERIVVAFEAGRDGFWLARWLRARGIETYVIHPTSVPVSREHRRAKSDRLDTALLMRAILGWLRGEAKHCSMVAIPTLAQEDARRPNREHEHLVGERTSIVSRLKAAMARHGIRNFKLKLRKASEQIEKLRTPEGGVLPPNTLAELQRDIARLRLVRDQIIQIEKQRLERLRQAPQEGSHPMVLLLAKVLGIGIETADMLVHEVLSRNLRDERALGRYAGITGSPDESGSKRREKGLARAGNARVRRGMIQLAWRWLMFQKQSALAKWFHARTASAPRDVRKTMIVALARKLLIALWRYVTTGEVPAGAQLRPAM

SEQ ID NO: 135229 - protein, 421 aa, unidentified
MKSWQEITHYAGFDWARDHHAVVIVDGQGQIVADIEFQHTQEGWKSFGEKTAAWPGLAVAIETNQGAAVDQLLQAGYTVYPINPVASESYRKRKAPSGTKTDHIDGWGLADALRVDGHGWKSLQPMDPLTQQLRLLCRDEVALIEQRTVLVNQLRQALLEYYPVALQAFEDWTCRATWDFIIEFPTPEQLVKAGKRRWEKFLHTHRLWRAETVQKRLDLFGRADQFKGSEPIMEAKSRLALSLCKLLRTLQQQLDEYRKAIEALFRSHPDHDLFGSLPGAKKVLAPRLLAAIGNDPQRYGNHSVLQCMAGTAPVSFQSGQINKVKVRWACDKFLRHTVHLWADCFRKATVWGQTYYKKKRQQGMSHACALRCLGQRLLKIVFKMLTDKKPYDAELHARNQQKHGYWVLQLMDEKPAPSSGE

SEQ ID NO: 135230 - protein, 309 aa, unidentified
MDIIVGIDVSKDRLDVAVLPSGTAFHVANNHAGIDDLVGRLTTQGAAVVALEATGGFEMVAVAALSSAGFAVAVVNPTQVRAYANALGRRAKTDPIDAAVIAAFVAAVKPPIRPLRDAETQGLSALVDRRRQIVQMIVAEENRLRMALEKPTQKSIKRLLAALNRELESLHADLDEQIRKSPLWRVREQLLVSMPGVGPATARTLLAEMPELGSLDRRQIAALAGLAPWTRQSGKWKGKSFIGGGRGKVRTVLFMAALVAIRHNPVLKAFRDRLVASGKARIVAVVATMRKLLTILNAMIRDNKPWQGA

SEQ ID NO: 135231 - protein, 315 aa, unidentified
MNLGIDVSKNTLDCCLISDGIFFERQFKNNRAGFEQLKAWLKESGATNALHCCCEATGKYYEAAADYLAESYVMSVENPRKIKGYGNAKLQRSKTDRLDARLIAQYCRDMKPRAWKKPSEAQTQLKELNQYRQRLKAQKAAEQTKLHTAPDYLAPLIEDTIRHLQKQIKAVQEKIGQFHQDYPDYKANRNRLKTITGVGDNAADTLLTVLAEQDRFENQRQFTAYLGLDPKQFKSGTSVKGRERISKVGSSRLRTSLYMPAMHAYRSRTFAPFVSRLKANGKRPKQIIVALMRKLAVIAYNLIKTGKDFETERYK

SEQ ID NO: 135232 - protein, 344 aa, unidentified
MNITMIGLDTAKSVFQIHAVDETGKTQIKRKLSRNDLVLFFTKQELCTVVMEACGAAHHWARILTGLGHDVKLIAPEAVKPFVKKGKKNDAADAAALCAAASRPDMKFVPVKSLEQQGILALHSARSLLVKQQTMLANAMRGLATEFGLTVPKGIGRLEELTVLVDTDETFPVKARQAFAGLFDQCQALTESIVTLEAEIVAHARHDETARRLATIPGIGPITASLIAATVGDIGMFKTARHFAAWLGLVPRQHSTGGKTRLGRITKTGNREIRKLLVLGATSMVYRAPQWNSAAGLWIRGILERRPVRLATVALANKMARIAWALMTRNEVYQAKGRVAAAAA

SEQ ID NO: 135233 - protein, 412 aa, unidentified
MKLLVGIDVSSKTLEVVMLTSEALKPVFQGAFENDLNGATELKTIILTLNEQRHFDQITIGMESTSIYSFHPAYFFMNDDDLAQFNIESVVLNPRDTKRYKDVFEDNKNDQIDALYIADYLRNGRFTTSLVREDEYIALQRLTRSRFELVSSLARSKQHFLENLYYKVNKLAVNTDGEKVAVFGNAIFNLLTEEMTTDELINASTEDLIDYLNAAGRGRFADVEKTAKAIQKAVRGSYRLPKVIQNSIDINVSIYAAEIRTYQKLIKELDKQIEAIVTVLPETEILQSIPGIGPVYSAGILAEIGQIERFDKETQLARYAGLAWKQNQSGDFNGQITPRTHTGNKYLRYYLIEAAGSVTRYDPVFRAYYEKKMSEVTKTPRKRGLALTARKLVRVLDVLLRRHQLYQKEESV

SEQ ID NO: 135234 - protein, 343 aa, unidentified
MSYESTCLTIDLQEYSMIFAMDWSFSTESVIARKRSGSNKIYTSKVASDMESLEAYFSQFAGKKLLVIEETTGAQWLYVNLFDVMDRIIICDPYRNALMKEGSKTDKIDAIKLLHLLMSNSLKGVYHSNSDLYELRSFMSSYFALVKAIVRLKNQIAAFKRSKGIKKNNKDFRPKKKLELFVYEKQLELLNKYEQNKAEYESQMQRLIRKYPIAKLLMTISGIGIVLSLTIYSTVIDATRFLNKYKYYGYCGLVLLLKESGKSIKGKRRGHYNPLMKWAYKSAAKAAISGKNDIHDYYMYLLGKGYTESEARNEIARYICRVSLAMMKHETPYKPYSWRNTMK

SEQ ID NO: 135235 - protein, 396 aa, unidentified
MTDSGERVVIGMDPHKRSVTIEVMAADEQVLGGGRFGTDVAGFKAMLEYASRWSDRVWAIEGCNGIGRHVAMRLLAAGEQVIDVPPKLSARARVYSTGQGRKTDATDAHCVALVGTRMAGLRPVVNDEQLAVLRLLVDRRSSLGEDHTRMISQLHQLLLELIPGGAKKSLSAAQAKALLATVRPRDVAGKTRRRVAAELVADLERVYARRKAADKELKELVAATGTSLLDLHGIGPSSAARLLVEVGDITRFPNRDHFASWNGTAPIDASSGDNVRHRLSRAGNRQINRVLHIMATVQLRNDTEGRAYYDRRRPEGKTSMEATRALKRRLSNIVYRTMLDDAVRASTAAEVTGPGGQRGSDSDSSATGSQPQHRLFGQATPGPVTTQPSAPVPRVS

SEQ ID NO: 135236 - protein, 404 aa, unidentified
MYNAVGIDVSKGKSTVAVLQPGGTVIRKPFDVSHTSQNLNELADYLSSLDGTTKIVMECTGRYHEPMVKALSEAGLFVSIVNPHLIKNFGNNSLRKVKSDPADARKIARYTLDNWTELRQYSGMDNTRTQLKTLNSQFSFFMKQKVAAKANLIALLDNTYPGVNKLFDSPTREDGSEKWVDYAYSFWHADCVRKIGLKAFTERYKSFCKKHHYIFQQDKPEKLFNASKELVAVFPKEKTYKLLIQQSIQQLNLASEHVERLRREMNELASTLPEYSIVMGIYGVGKTYGPQLIAEIGDVSRFTHREALTAFAGVDPGVDESGQHKSKSNRASKVGSARLRKTLFQIMTTLLKNAPEADPVYRFPDKKRSQGKPYYVYMTAGANKFLRIYYGKVKECLRNLEQTE

SEQ ID NO: 135237 - protein, 363 aa, unidentified
MFSERTSVGLDVHARSVVAAAIDGVTGEVTRARLTPSYEHIQSWIADLPAPAAVAYEAGPTGFGLYRALTDAGVRCEVVAPSKLQRPAGDRVKTDARDALHLARLLRLDEVTSVSIPSVNQEACRDLVRAREDCRSDLMRARHRLSKLLLRHGIVYYEGAAWTDAHDRWLRAQAAPQLPTVATRMAFDSDYEHVLMLQARRRGLDSAIEGIAVDCEFTAVVRRLSCLRGVGTLTAFALAVEIGDWNRFTGNTIGAFIGLVPSESSSGSTRSQGPITKTGNTHVRRLLVEAAWHHRTKYQARAVMRARWDKAPAAARARGHEGNRRLHNRWVDFLARRKRSTVANVAIARELAGWCWSLAVMND

SEQ ID NO: 135238 - protein, 412 aa, unidentified
MSVVQFTQVLSRGCGMDIHKKVVVATVQGEGLCKETRSFDTFTRSLTQLREWLVSLGITHVAMESTGVYWKPIYNVFEGFIPHIWIVNARHIKNVPGHKTDKNDSEWICQLLMAGLLKPSFIPPKAQRELRDLTRYRRKLIQSVSANKNRIIRILEDGNIKLSSVLSDTSGATAVKLIDMLCDGKQITLSDIESVRHGRCQHTKEEMLEACTGCLDEHKVYMLGKIRECNASLKEDILDFDKRIKDVLSPYHDAIERMCEIPGIQNRVCEDLVAEIGLDMSNFPTSAHLCSWAGMCPGNNESAGKKKSSRTNHGDKQVKETLVEAAWAASRAKGTFFMERFNRLATRKGSKKALIAVGHSLLKCIHYVLSTGGRYKELGDNYVPNKKEQKRKEYLKKELQKLGYSVTLSKED

SEQ ID NO: 135239 - protein, 340 aa, unidentified
MHYVGLDVHRKSIAFCIKLADGTIVGEGRVEARREKLDEWLATLPQPWSGAMEATIFSDWIYDYLAPHAAALAVGHPERMKAIAAGKKSDRLDARTIADLLRANLLPPAFTMPAPLRDLRRVLRYRARLVSDGADARNRIAGMLMQLGVPYDSSRLHGQKYFRELVKTHGQLIPDSARALLAFSRRQIETIAAMDRQLTSALAQHPDLAARVARLSSIRGVGQVTALTWALEIGPVERMGSIDRAVRYCGLCSEQKESADKRMRGPLSKRRNSHLQTVLIEAAHLAPHWNPELAAVQAREVARGHRNRATLAVARKLVAWLMGADRGHQPRAVPPEKAAV

SEQ ID NO: 135240 - protein, 350 aa, unidentified
MLIIGCDYHPGFQQIAFLNTDGGELGERRLAHREEAEQFYGKLKEQNLCVRVGMEASGHARWFERLLHNLGFELWIGDAAEVRTKRVRKQKTDRQDAQLLLRLMVEDRFPRIWVADAQNRDLRQLLWHRHRLVQMRTRVMNQLHVVALNEGLRRKKALWRPAGRHELESLTLAPWASRRRQDLLDLLDQLTPKIQELTLALETEVGKRPVTRRLMTHPGVGPLTALAFELVIGTAQRFHCGKQIASYVGLVPSEESSGDRRRLGHISKQGNALLRFLLVEAAQVTVRSQPQWRSKFFHLAIRRGRKIAKIAMARKLAVHLYWMWRQGLDYGQFEKLGSHAGEPGNRHGVQ

SEQ ID NO: 135241 - protein, 344 aa, unidentified
MNNIDYIGFDIHKKTISFCAKAQDGTILEEATIPALRNKLLAWAKARPRPWVGAMEATLFTGWIYDLLKPLAQTLKVAHPPMLKAIAAAKKKNDKVDARMIADLLRCNLLPECYMAPVPIRNLRRMLRYRNLVVRQATRMKNRIAGLLMETGTPYNKERLHGKAYFSELLGSLQEVPGSVVELLQLSRGQVEFFATIQRRLLKELKEHPELNQRVMRLQSIPSVGEILALSWALEVGEVDRLRSIAQAVSYCGLTSAQHSSAGKEQRGPISKQRNRHLQTILIEAAKLAPRHNPQLAAVHQRELQRGNRNRATLAVARKLVAYLMVVDKSGQPFQMRASGKEAA

SEQ ID NO: 135242 - protein, 344 aa, unidentified
MEHYAGLDVSLELSSVCIVDERGTIISEVKVASEPEALIRFLRTQEVKIGRVGLEAGPLSQWLHAGLADAGFEAVLLETRHVKAALSAMTVKTDRRDARGIAQLLRLGWYRPVHAKSASAQEVRALLTARKLIQGKLLDIESGIRGVLRGFGLKVGPISRGRFEARILELVDGHATLEEVIGAMLSARAALETEFKRLHRALLALVRDDPVCRQLMSVPGVGAIVAITFKSGVDDPSRFRRSRDVGPHFGLTPRKYQSGELDVTGSISKVGDRMVRTALYEAASVMLTRSVRFSALKAWAMAVAKRRGTKKARVALARKLAVILHRMWSDGTSFRWTNEETAIA

SEQ ID NO: 135243 - protein, 338 aa, unidentified
MELYAGIDLHSSNSVLAVIDASGMQLRSKRLANDLPAILAELEPYRADLVGVAVESTYNWYWLVDGLMDHGHRVRLVNTTAIPQYDGLKHGDDRTDARHLAELMRLGLLPEGYIYPRPARATRDLLRRRAALVRQSTQVILSMQSTYARITGRPISGQDLLKLKPQELMSALSDPTVCCGVLAQLRVWQVMREQIHRIEGWVRQDIHPKSDLARLQSTPGIGSILGMTILLETGDINRFGSVGEYASYCRMVESVRLSNGKRKGRGNAKCGNRYLCWAFIEAANFAIRYSEPIRRWYDRKHAKRHRVVALKAVAHKLARAVFHMLRDDQPFKLDRAFA

SEQ ID NO: 135244 - protein, 366 aa, unidentified
MKKISTMQVFGNEIFKEQKLTIGLDLGDRWSFYCILDEAGKIILEQKLPTTPEAMKQTFGKIPRSLIAMETGTHSPWVSRLLTELGHEVLVAHAQKVELITKSNRKDDRHDARTLARLARIDPELLGPVRHRSAKAQIHLTVIRARAELVSARTALVNAARGLAKSFGQRLPKCGTQQVSGKLAEGLSAELREVLEPLLREVESLNERIQEYDQRMEKIAKEVYPEVSLLKQVKGVGTQIALTYVLTIEDPYRFPKSRAVGCFLGLRPGRRNSGESEPQKKISKEGDRYLRTMMVQGAHYILGPFGEDSDLRRWGLKLAERGGKNAKKRAVVAVARKLAVLLHRLWVSGEVYEPLRNSQKAMRAVA

SEQ ID NO: 135245 - protein, 332 aa, unidentified
MLYAGIDIHKRVFQAVVLDPESGELSECRFEPSRERLGDWAIEWQGKLAAVAIEATTGWRWVARELEADGFEVHLVDPGRASALRGRRRQPKTDRLDARWLALLPARQLLSECEAWLPPAEIQRLRDRTRLRKALAGERTGWAQRLHALLAHEGWPCSRGRLLTPEGRRWVAALKLDPHVRAQVDVIVAVIAALEEQLTLVESELRRYARTDRRCQALETIFGVGPILACHLLAEIGDVRRFQRPRQLVRASGLDPTVIESADSKRRGRLAKQGSRHLRWALVEAANHSHRHSSPDHDLYARTVRRCGRGRARLTVARKIARRAYHVLAEAA

SEQ ID NO: 135246 - protein, 314 aa, unidentified
MTMPQVTLGIDVSGKRLDAHAHPAGRARSFANDPTGIAALTAWALECGAFVVLEATAPWDQPLLRALEDAGSAFHRANPKRARDFARALGLLAKTDAVDARMLALYGASLPLRPTAPVAPERLELQGLSARRDQLVAMRKAERIRLKGVTDPVLIDSLKAVIAVFDDQVRQLDRRVAGTLDQAPDLAQDAAIVRSANGVGPVCATVLLACLPELGQVDRRAIAALAGLAPVARDSGLMRGQRHVQGGRKRVRDALYMASLAAIRSGRWKQAYNHLRTTLGKTPKQAIVAVARKLLVALNAAVRDRRPIDNTVTT

SEQ ID NO: 135247 - protein, 384 aa, unidentified
MKNILIIGGPYNELYTESTLVLGVDIGSSEHYVRAFDYRGRELTRKVFRFSTDINGFNSFYDWVTQICIKHGKNEAMIGCEPTGHYWYTFYQFVKDHGMKLAFVNPASVKKAKELDDNSPKKTDLKDPKTIAKLVIDGRYSFPYVPEGIYAEIREVTSSRDRIMKELNAASNRIQRWLKIYFPEYLTVYKKFDTTTGRMILEEVPLPTMVTALGVDNIIKIWREHKVRGKGASFNRAKTLVDAAHDSVGKSGGQGAVMEIQMLLEDYKVKKQQLEMVTSVMEELIMQIPNAEKMLSVDGVGLVTVAGFISEVGDISRFKNPKQIQKYAGFELVENSSGKHKGRTTISKRGRKKLRKIIYQVVLPLIQSNKEFTERPTGNDSRWM

SEQ ID NO: 135248 - protein, 338 aa, unidentified
MTPFKYFVGVDLASATFTACVGTTPWAILVKPETFENDEDGFASFLGRLKEHNLPPAQTVVCMESTGVYGEGLAYYLSASDYPVAVEPPLNIQRKFPVNSSKNDGQDSQNIAEYACRYADKLSLWKPRDEVLEQIKLLLTTRQQFSVQLTAHKNALHAVKRKKVSSELAKKVHTDMIEQIIKHIKAIDIEIRRLIDSNPTFKAALLLLLSIPGIGLQLAAHLIIMMQYSLDPRVLSAFVGICPYEHESGSSVYRNPTSRHYGPAAIRKLLYLAACSVSTHRKDFRQYFLRKKAEGKPGKLVLNNIQNKLLKIACAVIRTQKPYIPTYVSVNPLVLKNA

SEQ ID NO: 135249 - protein, 346 aa, unidentified
MKQYAGIDVSLESSAVCVVDAEGRIVREAKVLSEPDALIAWFAEHDAPMERIGLEAGPLSQWLYAAMAKAGLAVELLETRHVRAAFKTMPVKTDKKDARGIAQLMRMGWFRPVHCKSLPAQEVRAVLTARKLLQGKLHDVEMSIRGILRGFGLKVGPTTPRTYAARVKALVEGHPTLEVIAEALLKARSVLADELRGFERRVRAMARKDERARRLMTTPGVGVLVSLTFVSAIDETERFRSSRMVGAHFGLTPKKYQSGETDYTGRISKIGDVGVRTALYEAAHVILTRPVRGSDLKTWALGVAKRAGMRKATVALARKLSVVLHRMLRDQTNFVAHKAAPMMAAA

SEQ ID NO: 135250 - protein, 315 aa, unidentified
MNESESTKVSVGIDVSKSMLDIAIHETGEGWSCSNDASGAVALVDKLRQLKPTRIVLEATGGFETLVTAMLSAASLPVIVVNPRQVRDFAKATGQLAKTDRIDARVLAHFAAAINPPLRPTKSDEAQHLEALLARRRQIVEMLVAEKNRLANNRDRAVVKDLKTHIAWLGRRLKSSDDELQRVLRASPVWRERDDLLRSTPGVGPVLSLTLLAQLPELGQLNRRQIAKLVGVAPFNWDSGKWRGSRHIWGGRAAVRSPLFMATLCAIRINPTIRFFYQRLIQAGKAPKVAITACMRKLLTILNLMIKTQTPWRTA

SEQ ID NO: 135251 - protein, 348 aa, unidentified
MGDGPLVLIGIDAHKRTHTLVVTDELGRPLAEKTVAATSDGHLVAMAWAASWPRRRWAVEDCRHLTRTLESDLLRAGESLVRVPTKLMSNARRSGREAGKSDPIDALAVARAAWREPNLPVACLDGPQRELRLLVDHRDDLVRERTRIQSRIRWHLHELDPTLEVRSRGLRSQRVVDRVVDQLRDREGTVAAIARELLARVRELNQRARELERQITLLVIRLAPSLLTIPGCGALTAAKIVGETAGVARFRSKSAYARWNGTAPQPVWSGNTSRFRLTRGGNRQVNAALHRIAITQARTDTLGRRYVKRRLENGNTPKEALRLLRRRLSDVVYRTLLADETSRSTIAT

SEQ ID NO: 135252 - protein, 428 aa, unidentified
MKTNNNAKLEAITHKTLIVGIDIAKLTQWARFVDYRGLELGKAVKFKNDKNGFENILATIEWFCKTKSFDAVIVGLEPTGHYWKPLANYLLIHDVKVVMVNPYHTKRAKELDDNSQTKNDKKDALTIAKLVRDGRYYDVYMPQDIFAELRVLTNTRISLMRRHNSIKNTITALLDEYFPEINTVFKNVFRGKASMQILKSCPFPALILELGVEGVLTEIKKVVKRSVGRKKAEQLVETARNSIGVNYGLSSAKFKLDLMVEELDLLTRQLEQIEDAMASALSQLDYADLILGIQGIGVVTAASLLGETGDLLRFDHPRQISKLAGYNLVEDSSGKSKSGTIISKRGRKNLRSILYRIALVMVAKNNEMKELYQYLKTRKDNPLKKKQALVVVSKKIINVIYHLVKKNMEYKPELVLGEYRKNQIRQAA

SEQ ID NO: 135253 - protein, 365 aa, unidentified
MIVIGTDTHKKTHTCAAVDALTAAAHGELTAPARKGSFGKLLVWARAIDCERVWAIEDCRHVSGAFERFLVARGERVVRVAPKHMAGARRSERERGKSDSIDAFSVARAALKEGVENLPGAHLDGMALDIRLLVDHREDLVVARTQEQQRLRWHLHDLWPEFEIPTGALDTGKWLGKASRRLARAEQSTRVRVARELVRQIGARTTRIRELEAELARLVGSYAPQLLAERGCGPLTAAKLIGEIAGADRFATDAKLARTSGSAPIPASSGNTNRHRLDRGGNRQLNCALHRLAVNKAHWDPETVAYLERRQAEGKSRKEALRCLKRHLARRVWKLLQSPVPRQDARPQKPISIYCNLPNSGFALT

SEQ ID NO: 135254 - protein, 402 aa, unidentified
MNCVGIDVSKGKSTIAVMRPFGEVVVSPFEVCHTVSELSELARLLKSLDGETRVVMESTGNYHAPVAWLLHGAGLYVSVVNAMLVHDYGNNSLRRGKTDKKDAVKLANYGLDHWLTLPRYVPEEDARLMLKTCYRQYQQYSKVQTMLKNNLISLLDTAFPDANRLFTSPPRADGSEKWVDFVAAFWHCECVCGLSKKAFTTKYQKWCRKHGYNFSEDKALDIYASACGRFGVMPKTNTAKLLVEQAISQLQATSAALAALKQEMQSLAASLPEYPVVMGMFGVGPTLGPQLIAEIGDVRRFHSKKALVAFAGIDAPPYQSGQIDVRSRSISKRGSASLRRTLFLVMGVLLQCAPMDEPVYQFMNKKRSEGKPYRVYMMASANKFLRIYYASVKAYLDSLQHN

SEQ ID NO: 135255 - protein, 434 aa, unidentified
MQTEFAALVAIDWADRKHAWALQISGSPERETGTIDHTPEAVEVWASELRLRFGGQRIAVALEQSRGPLVFTLTKYEHLVIFPVHPTVLVNYRKSFCPSGAKYDPSDPRLLLDILMLHRDKLRQLTADTSETRTLQFLVEERRKLVYEKTRYSNRLTAHLKMYFPQALAWFDEIGSNIAAEFLERRPSLDKLQRARPATIERFFIDHNSRDRERITERLEQIRKAIPATTDAAVLTSCSAAVAAWAALLKQDLAAIATYDDKIDALARAHPDYALMNSFPGAGPALTPRLIAAKGSQRERYETAHEIECYSGIAPVVASSGQQRWVHWRWACPKFLRQAFHEWALHSIAYSQWAREYYEQQRTKGKRRNTAIRSLAFKWIRILFRCWKERKPYDEAVYQRTLDAHRPKKQPSAQPVELQWKNVAGLSKIVVSEA

SEQ ID NO: 135256 - protein, 420 aa, unidentified
MGRLKIVYPVCCGMDVHRDFLIACIAATNAQGVTEYQSRRFSTYTGSLRELRDWLLANDCKDVCMESTGKYWVPVHNILEESCHVVVSHPKFVKAIKGKKTDKKDAQWIADLFKHDLVRGSFIPPKDIRQLRDLCRYWVKLSSYMTGEKNRAQNCLTVSNFKLDDVFSNVFGKSASAITTQLLEHPGEQFDVAPFVDGRCKTPIAQIQEAVDSIFTYEQAEKLKIIRGHMDSLERHKAELESLILEIAQNYLPQIELLLTVPGIHDAFTAIRILAEIGADMTVFDTSKHLCSWAGLTPQNAESAGKKKTTRIGKSGAYLKPLLIQVALAASRGEKHPEIYGKKQALQKRRGKKKAIVAIARRLLTAIYHILSKNEPYNPAAYIQEDKNPMARQISQEKAFEMLARMGFIVSNPSPLSSSG

SEQ ID NO: 135257 - protein, 355 aa, unidentified
MDNAKYIGMDVHKETISIAVLDSSGKLVMESVIETKGITVVQFMRGLRGELHVTLEEGTWAAWLYDLLKPYVHEVLVCDPRKNALLKAGNKSDQIDARKLAELLYLDRLTAVYHGEQGVRALKELSRSYLTISGDAVRVMTRLKAVYRSWAIPCAGKQVYAPRYRAEWLGKIREAGVRRRAEFYYQQLDELRALRQQVRRELLAESAKHQASKLLCQIPSIGPIRAAQLIAILQTPNRFRTKRQLWAYGGLAIQTHSSADHRYVDGQLRASKRPVSLRGLNRNHNHELKNIFKGAAIIAATKAGPFQEFYAALVAKGIRPEMARLTLARKIAAITLIVWKKGVSFDVQHLKPQTA

SEQ ID NO: 135258 - protein, 343 aa, unidentified
MNITTIGLDLAKSVFHVICFNKQFKEVKKRMLRRNQVLQFFTQLPSCLVAMEACASSHYWGRELRALGHDVKLIPPQHVKPYLRGNKNDYNDARAIAEASTRPSMPFVGIKTTEEQDMQAIHRIRSQCIRDRTALSNSTRGLLGEFGVVLPRGLATLRKSIHGLLEDADNGLSDRFRNLLARRYDQFVELDGHIAFYTNELELLSQQDDACQRLQTIPGFGPIVSSAFRSVIGDGRCYGRGREASASLGLVPRQHSSGGKNVLLGISKRGDRYLRSQLVHGARAVVIQASRKDDPLSKWINRVREERGWNKAVVATANKMARIGWAILRHKTIYQPASEQLAR

SEQ ID NO: 135259 - protein, 357 aa, unidentified
MTTATTTATTCAILALDLGKYKSVACAYDPDDGEARFQTLTTGRAELARLIDRERPAVVVIEACTLAGWVHDLCVERGVVCKVANTASEAWKFKHAKRKTDKDDALRLAQLEALGQLPTVTIPPKPTREWRALIAYRQGLVGRRVAAQNRIRAILLSQGLPAPCGHRAWTATGLEGIEQFARPLSDCGADELWRGLLLLALTELRQARDLIDQAEVRLDKMARASEAVRILETVPGVGPRTAEAVAAHLHDPRRFRSGKQVSAYAGLVPRQYQSGECDRRGRITKRGPGLLRKLLVECAWAMLRYNAWARAVYLRLSRGKARKKQAIVALARRLLVRLWAMLRDRAPWRAGPEATPA

SEQ ID NO: 135260 - protein, 369 aa, unidentified
MGNRSMFVGLDVHKETIDVSIAEGHRGGEVRHYGVIASDLEPLDKVVRALRAPDRQLHFVYEAGPCGFGIYRHLTKRGERCVVVSPSMVPKRSGDRVKTDRRDSLALARLHRAGELRPIYVPDDADEAMRDLVRAREDAVVGGTQAKYRLKAFLLRQGRRYPGREGWTLPYRRWLTDLSFPTAPQHITLQEYRDTIDETERRIERVTEQLRQLAPTWRWAPVVAALQALRGVSFITAVALVAELGDLTRFAHPRELMAYLGLVPSEYSSGPSVRRGGITKAGNPHVRRLLAEAAWAYQGIPRIGRQHAYRQEALPKVVCDIAWKAQLRLTGRFRRLVARGKAKPKVATAIARELTGFIWAIAQKVSPAS

SEQ ID NO: 135261 - protein, 406 aa, unidentified
MIRYHVGIDVGKNKHHACVYDIVEDRYTKVFPFTVDRPDFERFLLFLQRQGPIEEVMVGVEASGPYALTIGHFLLEHSYTVVELNPFQASQFRKAQGKKAKTDRVDARSLATFLAVGSYKPLTLGDPLYENLRELTRFRVDLVKDRTCQVNRLKETLAIAFPELGAHMASLESPTVLTLLTNYPGPQALAEADVQAVSACIVEASHGRLGSAQAQAIVSAAGTTIGLLQRQQALAIKLEVLASGIISVNMQLQRVETAIEDLFRHLHYDKSDFPVGGIQSLACILAEIEDVNRFPTLKQFLSHFGWCPQTFQTGGFRQEHPRMSHAGNRYVRPVLWMLAIRAVNDVPEYHEYLQRRTAAGKKKMHTIVAVGRKILSVFYAVLKTGRPYTSEGGVSHTDPCPVLTSL

SEQ ID NO: 135262 - protein, 408 aa, unidentified
MASKIAGIDVHKKVLMVVVVDPRTPESKPERHRFATMPSELRRLSEWLKELGVEEAVMESTAQYWRSVWLELEPHMRLHLAQAFSNRAPRGRKHDFKDAERLVRRLIAKELILSFVPDGEQRIWRNLTRMKLQLVRDRVRLQSQIECLLEEMRIKLSVVVSDLLGSSGLRILQALADGETDAKNLALLGDDRLRCTEEQLVEALTGSSHPMHRQMLALQLERLRLLDEQIVKLNSLIAQAMTPHQDTVIRLAEVPGLGIDSAQQIIAEVGVKASTFPSAAEFTSWVGTCPGKEESAEKNSSSRSAKGNKYMRRVLNQAAHAAARSKGTHFQAVFRRLLPRLGYQSAVWAIAHRLCRLVWKILHEGIRYIEQGVESEPKLLIYRAKYLAKQLRKFGYNVQITPPNMAPV

SEQ ID NO: 135263 - protein, 414 aa, unidentified
MAKLKIVYPICCGMDVHRDFVIACIASTNTQGVTSYSSKRFSTFSGGLRDLRDWLAQQDCKDVCMESTGKYWFPVHNILEKTCNVVVSHPKFVKAIKGKKTDKKDAQWIADLFKHDLVRGSFIPPEDIRQLRDLCRYWCKLTSYTTGEKNRAQNCLTVSNFKLDSVFSNVFGKSASAIISHMLEYPGELFDVAPFVHGTCKTPTEDIQAAVDGSFNAFQAEKLKIIREHMGNLEKLKALLESQILTLAEPYILQINSLCTVPGVSDPMTAIRIIAEIGVDMTQFESSKHLCSWAGLTPQNNESAGKKKTTRIGKAGQYIKPLLIQCACAASRSDKYPEIKGKYQQLKKRRGSKKARVAIARRLLTAIHQMLLHDEEYSPFVAPAEETIPEQRVLSQDQALALLRAKGYIIHSIA

SEQ ID NO: 135264 - protein, 392 aa, unidentified
MPKKSSNKAKSQRSRERALLQKVHLNAAGIDIGADAHWVAVPEDRDASPVRSFGVFTRDLVALCDWLKSCQVETIVMESTGVYWIPLYQMLERKGFEVRLVNAHHVKNVPGRKTDIKDCQWLQQLHTFGMLAGSFRPEAQMCVVRSYLRLRDTLSKDCNSLVQRMQKALTEMNVQIHRVISDITGVTGMSILRAILAGERDCLKLAQLKHPQIKSSAQDIAKALDGDYCQEHLFALGTALEFYDSYQLKIMACDRHVQDALSAFELKAKAPAPDVSRMRCAEKRLEALRRHHLEEMTGADLTKLPGLDLLAVERILSEIGLDMSRWPSEKHFCAWLNVAPNNRVSGGKILSSKPRKNANRAAAALRLAAQSAMQSKSAIWGVPDVADRRECS

SEQ ID NO: 135265 - protein, 454 aa, unidentified
MSRKKTRLQSVTEAPKIRADAAGIDISPEVIYVAVGPERDAPSVRRYGTFTGELYRIANWLKACGVRTVAMESTGVYWIPLFQVLEERGLEVFLVNARHYQNVPGRKTDVCDAAWLQYLHAVGLLQGSFRPAQQVCSFRTVMRHRGELVQASSRHIQHMQKSLDQMNVQIHRVLSDVTGVSGLAMMDAILAGERDGHRLAALRNGRVQASEEKIVAALEGDYRAEHLFTLKQSLESFRHYQKLIAECDHQLKKLLEELEGRGDGEAEPPAARKNMRKRADEELRQQYYRILGVDLTAIPGINVGTVEVLLGEVGPDLSRFRYAGAFANWMALCPGNTITGGKVLSSKTRKVASRLAGALRMAAESLSRDKSHLGQFYRRMKLHLASGAEAITAAAHKLARIIYTLITKQVEYDESQFAKFDQRNQQKQHQRLTQQARRLGYTLVPATQSRGVVS

SEQ ID NO: 135266 - protein, 293 aa, unidentified
MSRPSGDTFALARDGEGVAALVERLRTAIPQLIVLEATGGFEQVVAAQLAAARLPLVVVNPRQIRDFARATGRLAKTDRIDAAVIAHFAEAVRPPVRPLPDKKAHVLDEIVTRRRKVIEMMTAEGNRARQIDNKRLKKRIERLRSILQAELTAIDADLDEIIRGTPIWRESEELLKSVPGVGNVVARTLIAELPELGTLDRRKIAALVGVAPFSRDSGTMHGRRTVCGGRAPVRTALYMAALVASRRNPVIAAFYQRLVAAGKCKKLALTACMRKLLVILNAILREHAPWQAA

SEQ ID NO: 135267 - protein, 343 aa, unidentified
MLTNNVIAIDLAKNVFQVCHISIHGEMLSNRPLSRQKMKEFLAKAKPSIVAMEGCCGCHYWGQLAEKFGHEVRIINPKKVKGYLEGHKTDHNDALAIANAAIQIGIKFSRPKSLEQQSMQSLESSRRFLSRTVASLGLHIRSTILGYGVANPRGEKGLKAFVQAALDGETQIPPTVVSVLSMLWEQYKELKAQLISFEKEKNAMTRQIEPCQRLMKIEGVGEATAAMLYNTLGDGKQFKNGRQASAFVGLTPKQHSSGGKVIMIGIDKCGGVKELRSLLYLGAMSYVGRLPEKPKTQKDKWLRSIIDRIGFKRACIALANKVVRTAWAMLRYDTEYKPVLLTE

SEQ ID NO: 135268 - protein, 339 aa, unidentified
MQVTTIGLDLAKNIFQVHGITEDGTVAFNRSLRRAQMISFFEKLEPCLVGMEACGSSHYWARELSKLGHAVKLIAPIYVKPYVKRGKSDAADAEAICEAVTRPTMRFVEMKSPEQQAILSLHRARDLIVRQRTQTINMMRGLLAEFGIIFAQGVGHAIRFAKGMIEGHSPALPQAACDVVTDLSEQLLALHARVNWYGRRMTTVAKLEPRIALLQTIPGIGPITASAIVATVGSGEQFQSGRDLSAWLGLTPINKSTGGKERLGRISKMGDRYIRRLMVVGMTSRIKQIKSAPERFDPWFADILQRKPAKLAAIAMANKTARIIWAVLSRNEPYQPRTT

SEQ ID NO: 135269 - protein, 362 aa, unidentified
MRIIGCDLHTRQQTLAMLDTETGEVVKMTLTHEGNNVQEFYSTLSRPACVGIEATGSMQWFVNLMEELGIECRVGNPAKIRAAEPRKQKHDRRDADLILTLLVENRFPAIWLPSKELQDLRALLRHRHQWVRMRTRIQNALQSIALANGLRRGPSLWSRDGQSTIASLPLAPHTAHRRSELQAMYVKFESDIEKLNQRVEEQAGQRPGARLLMTHPGVGPVTALATDVFLGDPKRFADGKTLASYVGIIPREYSSGGRQKFGGLSKQGNPLLRFLWGEAAAHAVRRDPDLQRFYRRKMVQKGLGKARMAVARKLGIRLWIMLRNEINYNEFCRRGQKQQNSGAACAGMPETRYGATSHRPID

SEQ ID NO: 135270 - protein, 355 aa, unidentified
MKYYTSTTEFNCGIDLHARQMYVCVMDRQGKKLVHTNVKDNDFSFFLKLTKPYQHSLTVCCECMFGWYWLADACQAAGLTFVLAHALYLKAIHGGKNKNDRIDSEKLAHLLRSNLIPPAYVYPAHKRPLRALLRQRIFYVWRRAELLARIHSHQLAHNRIPAKQTRRVRDSWAEQLLQAEDHPLRQIALKNDLAMISHFDRQIVQLEEELQRQTKKVASRDYALLQTTPGIGENLGLTILYEIGDVARFPTVKDFLSYCRLVKGTVASAGKIKGLRGAKLGNPYLRWAFGEAAVIAKRDHFTIGPLAQRLEQRMNGNKFKANTVLAIKLARAVYFMLKNKSVFDPERLVAVLARN

SEQ ID NO: 135271 - protein, 343 aa, unidentified
MGEVSTIGLDIAKSVFQIHGVDVDGAVVVRKRISRAKLLEFFAALPACLVGIEACPTAHYWSRQLGALGHTVRLLPPSYVKAYVKRSKNDANDAAAICEAVTRPSMRFVATKSEEQQSGLMLHRSRQLLVCQRTMLSNAIRGHMAELGIISAKGRNGTAELLKIIADEQDDRIPVAARFSLEVLARQYAAVRAEIAAIEKRIHAWHRSSEESRRLEEIPGVGPIIATALVAEVGDWKVFSSGRSLAAWIGLVPRQHSTGGKERLGRISKQGNRHLRWLLVAGAMAVIRYARQHGTKRPWLARLMDRRPIKIAAVALANKIARMAWAMMVRGEQFKEPKLLPAA

SEQ ID NO: 135272 - protein, 310 aa, unidentified
MGLFAGIDVAKDTLAVAVSSGQEWSCANDPRGITLLVERLEAANPALVVLEATGGYEEELLAALIAAGIEARRVNPREVHQFARAAGQLAKTDRIDARMLALFAEHIRPPARALSDPEREQLKALVGRRSQLLQMITAERNRRAHAQRWLARSLQRTIRALERELKLIDREIAERLGRSTTLKPLHDLITSLPGAGPVLAATLIARVPELGRLSRREIAALIGVAPFTRQSGQWRGRDMMFGGRAPVRATLYMAAVSAVRHNPPLAAFYRRLRGRGKPAKVALTAVMRKLLTILNAMLKHHTVWSAPCPV

SEQ ID NO: 135273 - protein, 362 aa, unidentified
MTIVAHAHQFVIGVDTHARNHALAILAAPTGEIIDDAQFPATATGLSRAVAWVGRRTGGDLDALWVIEGIGTYGARLARAAANAGYLVVEAARMNARGHRGVGKSDPIDARRIAQAVLPLDTTQLRTPRADEGVRGAVRVLIAARDHMSTERTAAVNALTALLRVTDLGIDARRALTGTQIATVAAWRTRTENLAVATARAETIRLAKRVVALDEELKASSKQMTELVEHSPARVLLEQPGIGPVTAAVALAAWSHHGRLRNEAAFASLAGVNPIPASSGNTVRHRINRGGDRRLNRALHMAIVTRMRMDPATRAYVERRTAEGRTSKEIRRCLKRYLARQIYRQLNAAALNTAAQAQPAAA

SEQ ID NO: 135274 - protein, 343 aa, unidentified
MKRNTIGLDLAKNIFHAVGFDHRGKQIFRKKLRRKQVVNWFVQQPVCLVGVEACGGSHYWARTLMALGHEVKMVAPQHIKGFVRGQKNDYNEAAAIAEAVTNPRMRFVPIKSAAQLDLQALQRLRTRLIRERTGLSNQLRGLLGEHGIVFPRSLTVLRRRLPELLEDADNNLSALFRRLLHGGWQDLLQIDERVKTLDRELAQAVAQDEDCQRLMAIPGFGPVVASEFSVTVGDGRCYRRGRDVSALLGLVPRQHSTGGKPKLLGISKRGDNLLRVNLIQGARSVLIHAKGKEDPLCRWALKVRAERGFNKATVAVANKLARIGWAVLRNQDTYKPGYRLHTT

SEQ ID NO: 135275 - protein, 352 aa, unidentified
MKETARQKSILIKENSPRRYLGVDLHRNSFLVCIREQGQARFQRWSLEQLPEFAAGLQAEDKMAVEATGNTRWFCRTVAGRVRRMVVVNPHQFRVISQSVKKTDRRDAALLAEYLEKDLLPEVRRKSDQASELAQGAQARDQLVKMRTMLKNQLHGLFSSYGVLLEKKQLASRKQRARLGQIPLPPLADVQRRVLLGQIEALEGSIAELERAITGAAQNLPGHENLVSVKGVGSLSAAILLSAIGPVEDFPDPAHLAAYFGMVPRVNNSNETEHHGRITRRGNKLARTTLVQCALIAKRYSPFLSRFYERIQRRRGAGKAIVATARKLLTIIYYTLKNHWVFSDFAAFAVEA

SEQ ID NO: 135276 - protein, 407 aa, unidentified
MVFVGIDWAEQHHDVCVMSVDGQPLGRARVAEGVDGVARLHALVADHADDPAEVVVGIETDRGLLVTSLVATGYQVYAVNPRAVDRYRDRHAVSGAKSDGGDAKVLADLVRTDRHNHRQVAGDSVLVEAVKVTARAHQSLVWTRQRQVNQLRSALREYYPGALATFGTDLAHPDALAVLATAPTPELGRRLSSARIASALRRAGRVRNIDARAAAIRDGLRVPQLAAPTVVADAYGATAKALINVIAALTVQIAELESALADRFEQHPDADILRSLPGLAVILGARVLGELGDDPNRYANAKARRNYAGSSPITKQSGSRKIALARYVRNRRLADAITWWAFCSLQSSPGARAFYDRRRAAGDTHHKALRALSNRWVGILHGCLRHHTLYDEATAWGHLTESHAAAA

SEQ ID NO: 135277 - protein, 456 aa, unidentified
MAQQRKARSAVVPMPMLSQETRYIGVDIGKFRHVAGFLSRTWLTRHGRFEGCPTFAFEQSREGFRSLVDRIRELVPLEQVMVLFEHTGHYHRLLEQYLRELDSTVYRVHVQERPKGMLKTDKRDALRLANMLSTQLDLGAQVEDKMQLVRRAVAPTRAAAQLRGVIRHRYELSHHGTQLQNKLTAICDEVFAEFTQVFHDPNRPTALAFRERFPTPAALATASLSALQALRVRTFPSEAQLLKLPRRARETIGSKEVDRQKALLLEQALLLKELRLAQEHLALLQTESGALVTNCRAGQILLCIPPLGHVQAATIIATIGNIANFERASELKSYFGWAPRRHQTGVTFDRTKLTKTGVRPVKQMLFLMAACATTMDCDWAHLYHRLLPRLGSYDERMKDDRGKLKVIGRIAGQMASLIFALLKTDQETLSKLMPGQEPPPPMLYDPEVRRRHQEGH

SEQ ID NO: 135278 - protein, 375 aa, unidentified
MKEKLRFLGLDVHAETIAVAIAEPDGEVRGLGTIPNRAESLRKLIKKLGPAEKLRVCYEAGPTGYVTYWQLAELGVKCEVVAPTLVPVKAGDRVKTDRRDAEKLARCYRSGDLTAVWVPDEGSEALRDLVRAREAAKQDQLRARHRLGKFLLRSGQRPPSGIRPWTRPYLIWVAQLRFTQMAQEATRVDYLHEVEHMRERVARLEQAIAEAVKLASPALQQVINDLQALRGIADISAVTIAAELGQVSRFDGARQLMGYCGAVPSEDSSGKRTRRGSITKTGNAHLRRIVVEAAWSYHRPPCIWYGLRKRQESISEEAKEIAWKAQHRLHKRYMRLAAAGKDKRKITTAVARELLGFIWAIGTRAETVARQRIAA

SEQ ID NO: 135279 - protein, 347 aa, unidentified
MWYVGLDVHIATTSVSIRNSRGTITKREVVETTAAELRRVIGKVRGKARIVCESGPLARWIRDTLETRLRQVEVCDRRKTRLVAGGAKTDRIDADRLSELLWNNDLRAIHVPRGAEVVLRQYMAHYVRMVRDRTRIILRLRSLFLECGIQIKSSRRAPERVPLQRLRNPTVKYIARAYLTQLQLASHLVEDARNQFLECARASEVFRLLQTIPYVGEIRAAQLLAIVGHPDRFRSRRRFWSYGGLGVIQRTSSDHRVANGRVFREEKSRGLRLAKTGQPLLKKVLRDVALYSSLGRGSFRSIYDAHVKRGLEPSTARLALARKIAVVILAVWRSGVPFNPQLIQPCK

SEQ ID NO: 135280 - protein, 411 aa, unidentified
MTKEDFIYVGIDLHKEIHTAVMIDCYNNKLGEITFPNRPADFPKLVTKVKKCNTDAKEVVYGLENAYGYGRALAVWLIDKGYFVKDVNTAISHRQAKHRGAMYRKSDSDDVEAIALATLNMLDKLPDACPNDAYWSLGQLVHRRDNIMKQRTRLVNQLHEQLCIAYPSYKSFFNDISRPTALYFWEHYPSRKYLRGKSVEDLRKELVPVSHNRCSTKNCEKILDAVASDKVKNNAYQDARDMVTLSIVSDLQHYDSQLAEVDKMLEQMYKMLGCTLTTIPGVNVITAVKILAEIGDIKRFSNANKLAQFAGIAPLHLSSSGKGKDVATKQGNRRLQPTIYFLAIQMVQVSSKGTPRNSVVRAYYEKRKAEGKTSQQALICISRRLISVIYGMLKNGTEYRMPVVENAGENR

SEQ ID NO: 135281 - protein, 410 aa, unidentified
MDRVYARCAGIDVHKDSLVVCVRLDGRESPVQTFGTTSREILRLGDWLGGLGVTIAAMESTGVYWQPVWNLLEDRLQLMLVNPQHIRRVPGRKTDVTDSQWIAQLLEHGLLSPSFVPPKAQRQLRDLTRQRTQLLGDRGRVINRVQKVLETANVKIASLISDLAGVSGRKVLTALAQGKLTPQGMADLVDRRMELKKPALREALAVAPLGEHPRFMLRQLLAQLDHIDKQVEAFDLRVEEVMSPLERQTVQRLDEIPGFDLRTGQNVIAEIGTDMSRFPSAAHLASWAGLCPGNNQSGGKRKNGKTRRANRWLKAALTQSAWGASRTRDSYFAVQHRRLSKRRGVKRASIAVAHSLLGVAYELIKHPDLAYTDLGANHFDKKSSVERQVQQMLRRLKRLGCDVEIKRPAA

SEQ ID NO: 135282 - protein, 411 aa, unidentified
MELLVARCAGLDVAKDEVVACVRVPDGRGGRAQEVRTFQTFTSGLEALAGWLAAEGVTQVVMEATGQYWKPIWYVLEERGFQLMLVNARHVKILPGRKTDVCDAAWLAELLEHGLLRGSFVPPAPIRELRDLTRYRKRLIQAHASEGQRVQKTLEDAGIKLDSVAADVLGVSGRAMLEALVAGERDPKVLAELAKGRLRAKLPQLRQALRGRFGAHHALLIRLALEHLEQLEGSIAELDTHIDRVLAPFAQARDRLDTITGVGKRAAECMLAEIGVDMSVFPTAAHLASWAGRCPGNNLTGGKRRSGKPTKGNRWLGEVLIECAWAAARSRDTYLSAQYWRLARRIGKKKAAVAVGHSILVIAWYLLTEDCDYHDLGGDFFVRRDTDRQRQRAVAQLQALGYQVTLEPVAA

SEQ ID NO: 135283 - protein, 347 aa, unidentified
MYPFYLGIDLHLKRSYMVLMNAEGEVIDKRRLKNTEMASYLSKNIPKETYAVMEATRNWPFFYDLLEKHVERVELAHAKGVRMIAAAAVKTDQIDASVLAHLARLNFLPIAYAAPQEIRDLRQHLRYREWLIDERRRAKNRIHAVLAGYNLVSPVTDLFGRAGREWLQEVAEKKLRPTSRKVVLETLTMIDQLDTQIKELAKDIPLPEDLKSKAEILMSMPGIGKLLSAVILAEIGDISRFNSPKALCNWAGLTPRVHKSDTVVRHGRISKQGSRYLRSAMVCAAMTACRISPRWYGVYEHLARKIGRRAAKVAVGRRLLTVVYFMLKRNQPYEENYEQRRATEQGA

SEQ ID NO: 135284 - protein, 405 aa, unidentified
MAKKYWAGIDLGKGYHKVAVIEATLALAMVPFRIGRGRAGVEKLMGAVKNLGGRSSDLAVAIEATGDYWVELVGMLQTRGCRVYLIHPKKAHDLRKFYAVHTKTDITDAQALARMPLLDEGLKPVWIAPVAVQTLLRLCRLRWKSRCRIADLKRRISTLSETVVPGIDRVMPVRYSKSARLFLRRYLAPQKARRLGRRRLVEILSKAAWGKFSEKKSDELWACIENAPDLGWSADDLLLEMNVQLDELEALEHEVERLDARIAELYTEIDPDQRLKQIPGLGEFLAAALTAHIGDVSRFPNSKALISYAGLAPRVKESAGHTKPGQMITKHGSPFLRAWAYLGAACARQYDDELREYYERMRKRGKHYNVALCATAARLLERAYDVLAERREEETESHGQLSGTG

SEQ ID NO: 135285 - protein, 403 aa, unidentified
MNSVGIDISKGRSTIAVMRPFGEVVISPFEVRHTGSELSKLARQLKSLDGETRVVMEATGNYHASVAKLLHDAGLYVSVVNAKLVHDYGNNELRRVKTDRKDAVKLANYGLDRWLTLPRYIPEEDTRLLLRNCYRQYRQYSKVQTVLKNNLISLLDTVFPNANRLFSSPIRGDGSEKWVDFVAEFWHCRCVSEKSERAFTSKYLRWCRKHGYNFSEAKAHTIYAEASGHIGVMPKSETTKLLVEQAVAQLRATSTALAALKLEMQTLASQLPEYPVVMDLFGVGPTLGSQLIAEIGDVRRFYSKKALVAYAGLDAPPNDSGDVTGRHKSMSKIGASSLRRTLFLVMSVYLQNAPLDEPVYQFMDRKRAEGKPYRVYMMASANKFLRIYYATVKAYLESLEHTA

SEQ ID NO: 135286 - protein, 322 aa, unidentified
MAQQTVKFNQVIQCGCGIDVHQQVIVATVRHNDEVFETREFDAYTSSLTSLREWCKSEGVTHIAMESTGIYWKPVFNILEEDFEIILVNARHVKNVPGNKTDKKDSRWLSKLLLSGLLKGSFIPPQDIRELRDLTRYKKKLVNQAASEKNRLIKILEDCNIKLSSVLSDVGEGVSATKIINDIIKGETNVEKLMIHLHGKIKASREEIRKALEGRITPHHRFMLRIIKESIEEKEKIISKVEKQIDKAVKQYQVEVDLLQTVPGIGKDSAINIISEIGVNMEQFPNEHHLSKWAGMSPGSNESAGKKKVPEPPTETNISEQH

SEQ ID NO: 135287 - protein, 344 aa, unidentified
MDITTIGLDLAKSIFQVHGVDANGRVVIRKSLRRAQMLPFFARLPSCLVGMEACGTSHYWARELIKLGHEVRLMPPAYVKPYVKRSKTDAADAEAVCEAVTRPTMRFVPVKSPEQQAALSMHRARDLLVKQRTQLVNMIRGLLAEFGINIPKGLERALLMARRIVDDEAPDVPIEAAKIVGTLSQQALDIHVRLRQIDRDLLVWQRGNDVARRLMTIPGIGPVGATALAASVTDPHQFRSGRQFAAWLGLTPLQKSSGGKERLGRITKMGDKYLRKLLIVGMTSLVRRAKDNPPTIDPRLANLLVRKPVRVATVAMANKTARIIWAIMTRGETYRASHQPPLAA

SEQ ID NO: 135288 - protein, 324 aa, unidentified
MNKSKQFCGIDISKDVFDVVDASEKHHQFKNDPSGFKAFGKMLNENSHCVMEATGCYYQVLATWLFSQSIDVSVVNPLSVKRFIQMRLKTSKTDKLDALMIRLYGESEQPKLWNPPSKLIAEASELHKLIELLVRQRVALKNRLHALKAKGITRSPVLISVRRQIRNLSNEITELELKLEALIKEYEPDLLTRLCSIPGIGKRTSIYLIVLTHGFEKFESSRQLISFFGMNPIIRESGSSVRGKSRISKTGDNHIRNLLFMCAFTACEHNKSCREIYQRITAKGKSKKLALIAVANKLLKQSLAIAKSGLYYDENYRSVNVNLG

SEQ ID NO: 135289 - protein, 336 aa, unidentified
MKEQQIKHNEVQIKKFIKKLKLEWNEIYCCYEAGVTGYPLYRYLKSLGVNCILVAPGKIPRQSTDKIKTDKRDAIKLARLMRSGELESIHVPSEEDEAVRDYLRSRDSLRLDLGRNRQRLMKFLLRKDIKYSTTKYWTVSHYKWLNNLHFNNEILQETFNDYYSRVRVQEENLKAMDKKIQEIAESEPYREKVGILRCFRGVDYLTAMFLLSEVCDFKRFKTAGSFMSFLGLVPGEYSSGSKRKQTGITKTGSPRLRRILTEAAWQHRFPGTGSKIITARRSGQPALVVALAEKASLRLHKKFRNLQLRGKTPQVMITAVSRELSGFLWAAMNLVA

SEQ ID NO: 135290 - protein, 312 aa, unidentified
MANLVYAGIDVGKDKLFVNIHLDSQVRDFPNTHSGLERLSRFLIKNAVNLVVMEASGGYERLPASDLRARGLSVAVVNLTYVRRFAQGMGTLAKTDTIDARLIAHFAFVKQPKPQQAKTVEEEELAALVERREQLVSLLSVEKNRLSQASAYSKASLQISIQFLTGQIASIETEIKALMAKSPERLARMRCMCSFIGVGDITAVTLLTEMPELGMESGKHIAALAGVAPINRDSGKMKGKRRTYGGRARVRRTLYLAALSASRHNPIIRAFYERLLAAGKEKKVALVACMHKMLTILNAMLKKGELFNPEYS

SEQ ID NO: 135291 - protein, 340 aa, unidentified
MLYVGLDVHKEFCQACVIDESGRALSNERFSSTSEELDRFLDRFQDARFVLESTGIWEFIYEGIERRGFEAVLAHPLKVRAIAEARVKTDKVDAETLAQLLRADLIPRSWIPPKDIRDLRQLVRQRAYLVRQAARFKNRIHAEILRRGVRRPENLKTPFAQRSIRWMRSLDIPTVTSCLNCLESVQAQVQEINAQLLVEFERRGDAQLIATVPGIGFYGALLILAEVDDVRRFQHPEKLCAYAGLVPTVSQSASSVKYGSISKDGSAYLRWILTESVHVHRRYEPGSQLSRFHARVAKRRGRRVATVATSRKLLRIIYWMLVRHEPFHSHGFNPVKRLHS

SEQ ID NO: 135292 - protein, 356 aa, unidentified
MSSEVKYIGMDVHKEAIVIAVRDTRGHVVMESIVETKASSILQFIRGLQGELHVTWEEGTWAAWLYDLLKPHVHRVLVCNPRRNALLKEGSKNDKVDARKLADLLRTGMLRPVYHGEHGLRTLRELARTYQTLSQDLNRVMNRLKALYRGWGIACGGTQVYAPRYRDEWLGKIEHAGVRRRAELLYQQLDGLQALRRTLRSELLAESRKHKASKLLRQIPSIGPIRAARLVALMQTPHRFRSKRQLWTYSGLGIETHDSAQYRFVRGELQRAKKPQQIRGLNRNHNHEMKDIFKGAANRASCGVGPLHDFYVALLDKGMKPEMARLTLARKIAAIALTLWKKEERFNAEHLKTQAA

SEQ ID NO: 135293 - protein, 345 aa, unidentified
MSSIKRLGIDLGKSNFHLVGLDATESTVYRKKLSRPKLIEFITQLEPCTIAFEACGGSHWLARKCIQLGHRVKSIPPQYVKPYVKGNKNDFIDAAAIAEASTRPDMRFVPTKSESAQSIAACHRIREGFVGERTACMSRIGALLLEFGLSFPTGHKTMKELFFWLGKQKGSALPEMFLLELQVAHDHYLYLNERIEQQDRKIKQWVKENDLCQLLKTVPGIGDMTASQLVMEVGNGAEFKNGRHMAAWLGLVPRQYSTGGKTTLLGISKRGNKRLRCLFVHGARSVLSRLETYDGPFTDWLKKLRGSKPFNVVCIALANKLVRIAWAVLSSHKEFSGKTLQPGLQ

SEQ ID NO: 135294 - protein, 456 aa, unidentified
MSNRSRRLSRGDRRRNERLAALRSVVTRQSAVLAFDLAADKQVCALTDPDSRVLARRTVRVKAWQLGEAVAWGLGKAAEAGFTSVVVACEPTGHRWRVLDQIAADLGVRLVCVQPLLVGRAREAEDFTRNKNDDVDAVIIARLVTELRCYLPERATPQWARLRHLGARRARLVTEVGAARQQIRDLLECCWPAVLDAAGQPLDSKSWLAAVTVLLDRVGAAGDLAVISTGAAAAFTAAVCAELPRHGTRRPYRSIIDAVYAAAADPGQAAVGVAEQRAGALERVRFVLADLVHLRAEIATVEARMLAVLDELQLTALVSSIPGVSAVGAATILAETGDPTRFGSARALVKHAGLCPRANESGHYNGTTTISGRGRPELRAAAWRVVFAALQHNPVMAARHAHLTGRAERPLDDNQARIAIAAGLLRQLHAVIVTGTPWNAAIAAGHRDQQGAAAAA

SEQ ID NO: 135295 - protein, 338 aa, unidentified
MKLYGGIDLHSNNSVFSIKDEAGVVIARRKLYNDLTQIFLFLEPFKKQLTGLVVESTFNWYWLVDALNEAKFEVHLANTAAIQQYSGLKYADDNSDADWLAEMLRLGVLPEGYIYPKEQRTVRDLMRKRMQLVQQATQNLLSIQGLYMRHLSYKMSNNKIKQLTPEEITTHFSSTNTAQATICNLTVMRCLKEQIKLLEKVVLTQVKLTADFQQLTSIDGIGNILALTIMLETGDIQRFNKVGNYASYCRCIGGARYSNGKKKGKTNSKNGNKYLAWAFVEAANFAIRYNKTVKSYYQRKLAKTNQIVAIKTVAHKLARACFYVLRDKVPFNAEKAFC

SEQ ID NO: 135296 - protein, 377 aa, unidentified
MSIVMGVDQHRAQITAEWIDVASGEISRARVRPADRAGVRRFLARFAGQRLEVALEATTGWRFLVEELRAAGAVVHLAEPAETAARRGNKKRAKTDRADARHHRELLLAGRLPESWIPPDHILDLRARVRLRHTLIEQHSEWQQRIQAVLYHHGCPRRRGLMQGDGRDWLGALALPETARQQITVSLELIDALELQIAPLDRQLRRYARRQTGCKALIEVHYGIGELCAVTILSELGDVGRFHNSRDAVRYGGMDITVYQSDRHRSPGHLSRQGPPALRWALYEAAHAARRPGSPDRDYYLQAAERLGGNRACLALARKLLKRCYHTLRELGDDALTPPANDRRESVSSRAARRASSGGSPRSERPETRERADALAA

SEQ ID NO: 135297 - protein, 434 aa, unidentified
MPFSRWLLKTGLSVVIYAGRSETLLFVGDDWAEDHHDVEIQDEAGRKLAARRLPEGAGGIARLHELIAAHLGDDGDPGQVAVAIETDRGLWVQALIAAGYQVYGLNPKAVARFKERYNLSGAKSDAADAHALADMVRAERHQLRNVAADTTGAQAIKVVARAHQTLIWERTRHTLRLRSALREFFPAALAAYAELGLTSGDTLELLARAPGPAAAAKLTTAQIAAALKRARRRGVPARAQAIKDALRVPQLAQPAAITAAYAAAVQATAAILTTLNEQISRLETHVETHFLQHPDADVYLSQPGIGPVNGPRVLAEFGDAPHRYASAKARKNYAGSSPVTRASGRSKVVLARFIRNNRLTDALHTQALAALTASPGARAYYDKQRNRGLGHNAALRQVSNRLVGILHGCLKTSTRYTEATAWPVTITDTRNLLA

SEQ ID NO: 135298 - protein, 316 aa, unidentified
MSQPQRFVGIDVAKAQLDIAVRPTAERWAVSNDEAGIAALVAQLQAMAPTLIVLEATGSYQRAVVAALAVAGLPVVVVNPRHARDFAKATGQLAKTDGLDARALAHFADAVRPAPRPLPDAHTEELRALLARRRQLIAMRTAEQNRLDGASPRLRADIQAHITWLDTRVATLDDDLDTTLRASPVWREREALLRSVPGVGPVCTRTLLLDLPELGTLSRQRLAALVGVAPFNRDSGTLRGTRTVWGGRTHVRATLYMSTLVAVRYNPVLKVFYQRLRAAGKAAKVALTACMRKLLTILNAMVKHQKPWHVQEEPIA

SEQ ID NO: 135299 - protein, 344 aa, unidentified
MDITVLGVDLGKNVCSVVGLDGSGAVVMRRKMRRETLIALAEKLAPCVVGMEACCGAHHLGRLFAAHGHEVRLMSPEYVRPYVKAQKNDDRDAEGIAEAATRPTMRFVELKSQDQLDMQTLHRSRDRLVGERTALINQLRAILLERGLIAPQGKRKLQQFLAVLMDEQSGAGLSPRMVLLVADARAQWAELDRRIAAFDAEFVRWVKDNEDARRLATIPGFGALVASALVAAVGRAEAFDRGRDLSAWLGIVPRQFTTGGKPKLLGISKRGNRYLRRQLIHGARAALPYVAERDTPLGRWVKALLGRAQRNVAIVAFANKLARIAWAVLRRGERFAVNGSLMAA

SEQ ID NO: 135300 - protein, 344 aa, unidentified
MEHFAGLDVSVKETSVCIVDEAGRITREVKVASTPEALMQVLRAPAYHLKRVGLEAGPLSQWLFGALAEANVPVICVETRHMRAVLKAQINKTDRNDARGIAQMMRAGLYRPVHVKTLRSQKLRMLLTHRKLLQSKAIAIENDLRATLRNFGLKVGMVGTAKFEARIKELVGDDSDLVLMVEPMLIVRRVLREQLAILHRHLLALARDDGVCRRLMTVPGVGPVVALTFRATVDVPARFQNSRAVGAVFGLTPCKHQSGESDYTGGISKCGDEMMRMMLYEAAQILLIRATKWSWLKSWAMQIAKRRGVKKAIVALARRLAVIMHRIWIDGTEFCWIRQQAVAA

SEQ ID NO: 135301 - protein, 412 aa, unidentified
MAVFCGIDWAEEHHDVALVDGEGTLVAKRRISDDAAGFTALVQLLADAGDTEDQRIPVAIETNRGLLVACLRATGRQVFTINPMAVSRYRDRYSVSRKKSDAGDALVLANILRTDLAAHRPLPSDSPLAQAIAVLARAQQDAVWDRTTAHNKLRSVLREYYPAILDAFADKRGGLLRSEARTLLAAAPTPHAAAKLSTAKLRALLTRAGLQRNIDPEAHRLREIFQREYLHHPQLAEEAFGRQALALLHQLDAACASAEDLAAAAAEQFERHPDAEIITSQPGLGSLTGARILAEIGDDRTRFTDARSLKAYAGSAPVTRASGKAITVLHRRVKNQRLAATGYIWAFAALTASPGARAHYDRRKATGDRHIAAQRNLFNRLIGILHHCLQTRQRYDETTAFAATAIPTAAVA

SEQ ID NO: 135302 - protein, 338 aa, unidentified
MEGLQPLHRRVAGIDVHRMLHVVTAVIEQPDGSIEQISREFGGFKRDCRALAAWLTELGVELVVMESTGIYWKSVHAHLENAGIAAWVVNAHFIKHVPGRKTDMSDSQWLAVLARFGLVRASFIPPKDLRELRLVSRYRRKLTAMHSAEVNRLHKVLDDGSIKLGGVVSDINGVSASAMVKGLIEGHSIDRLLGLARGALKLKRDDLQAALDGDLSARHLFVLKHIHAHSQMLQRELADLDAYLLAAMQPYAVAHGLLQTIPGIDAMAAALILIEIGDDMGRFGGAARLASWAALCPGNHESAGQRQSGQTRHGNAVIRYILCECANAARMTKMSAAF

SEQ ID NO: 135303 - protein, 346 aa, unidentified
MKQSNTIGVDLAKNVIQASVVTPANRELSNREFSRSQFAEFIAKQKPSLIAFEACGAAHHWARYANLHGHQVKILPAIAVAPFRQGHKTDRNDALAVAEAATRPNIKVAPLKSVEQQTMQSIQRSRELVIQERTATSNHIRGLLLEFGIAIPKGLIYLRQRIPMILEDAENGLPMAYRPTLHRMYMRFCGMEEDITFLDNQIKTLVNANDGCRRLLKLEGVGPIGALLLYATLGTGEAFKNGREFSAYLGLTPKQFSSGGKTNVIGISRHVANRRLRAVLIQGARSYVHKHKQADTRKAAWMLALKERSGAGRAAVALANKNVRTAWAMLTQGTEYRAHTLSAVAA

SEQ ID NO: 135304 - protein, 339 aa, unidentified
MAPLKPEQSLGPLYGNEPVFARKGKEFMAQYYVGIDVAKEYVDVHRLPDGFCQRFQNDRAGIEACVKAISGPAPALVVVEATGGYEFELVCAMQEADIAVAVVNPRRIRDFARASGQLAKTDALDAAVIAGYAARMQPPVSEEMDRRRRLLKGLVARRSQLTGMHVAEQNRLEHVHDKAIGKSIEAIIAAIQRQLKEVEDEIRKQIGRMPELKDTQDTIKSVPGIGENTSAMLVAHVPELGRLNRRQIASLVGLAPMARDSGKLRGKRMTGGGRTEVRKMLFMPTLVAIRHNQPIRAFYERLVLAGKPKMTAVVACMRKLLTLINLLVAKKEHWKPNPA

SEQ ID NO: 135305 - protein, 520 aa, unidentified
MGQIDKRPGKGKRGRGQQGATQKEIQQRGMRETRTLVDHLNPIDLKVAGVDLGSTSHYVAAPDGCDHVVVREYGCFTPDLMAMAEWLKGRGVERVVMESTGVYWVPVYQVLEDSGLKVVLVDARYSKNLPGRKKTDVYDCSWLRKLQSYGMLRACFVPDKNIAEMRTYWRHRATLVEQASRQILLMQKALEQTNLQIHKVLSDISGVTGMAIIRKILEGEQDPLVLARLKHPLVRSSEETLVKALTGNYRAEHLFTLKQAVDTYDFIHGQMEECDAKLQACMAEFEPEQRANENSGKDRPENDENSGKDRPENDGNSGKAGPENDEIQRRADKKARAKRTRRGKNQPRFDLREEQIRITGVDLTKIDGINVMTVQTIITECGPRLSAFETEGRFASFLGLCPNNRVTGGKVRSSSTNKVHHRAAQALRQAAESLHHSDSALGGYYRRMAARLGPAVAITAAAHKLARLIFHMIKYGEDYVDRGQQWYEERYQRGLRERLAKQATRLGLALVEATTGEMVS

SEQ ID NO: 135306 - protein, 402 aa, unidentified
MAAGQLWAGVDVGNEHHWVAVVDSAGTMVLSRKLANDEQQISKLVAEVDRLGAQVSWTVDLTTVYATLLLAVLAEAGKSVRYLSGRSVWQASVIYRGGEAKTDANDAQVIADQSRMRGDDLPVLHPDDDLVTELRMLTAHRADLVADRTRTINRLRQQLVAVCPALERAAQPAQDRGWVALLARYQRPKAIRHSGITRLTRVLADAGVRNAPMIAQAAVTAAKTQTVRLPGEEVAAALVAQLAQGVIALDERIKQIDADIEDRFRRHPLAEVITSLPGIGFRLGAEFLAAVGDPALINSADQLAAWAGLAPVPKDSGKRTGRMHTPQRYSRRLRRVMYMSALTAIRCDPHARSYYQRKRNEGKRAVPATICLARRRTNVLYALIRDNRTWQPDSPPITTTAA

SEQ ID NO: 135307 - protein, 406 aa, unidentified
MELVPIHKRVIGLDIHQAQITACAIIEESSGETRIEQRQFGAFKRDRRALAAWAAALEPEEVVMESTGIYWKSPYAALEAVGLRATVVNARHVKQVPGRKTDVGDAQWLATLARAGLLRGSFVPPAKLRELRLIARQRQKLVGLLSSEKNRMHKVLTDAGIRLGVVVSDIHGQSARAMIKGILAGQPPEEVLKLASRRLKASREELYDALQGELTASHVFVLDELLRHIEGLEAAIARFDARLLGELASEMNALALLQTLPGVDAIGAAMLLVEIGSDMSAFGSPDRLASWVGVCPGNNESAGKRKSGRVRKGNLYVRRLLCEFAHAASRTKSAFQSKFQSLIVRRGHKRAIVALAHKMLRTIFFMLKRGEHYRDSATNYEQLSVQRNASRWIKALTRFGFIPAAA

SEQ ID NO: 135308 - protein, 361 aa, unidentified
MDTSKQQLIAGKHIIGIDPAKAKHQAVLIDPSGLQIGKSFAFDVTYEGYNQTLWKKVTLLLPKCNPDNTVFAIETSCNLWMTLAFYLKNEGYTVLMVSPLTTHLSRPMAKHDFSRTDPKDALLVASNTHHGHFDLYQEYSSSSNAMHRLGITYDKLRKELAQNRARLRAALEQLFPEFLSVLEPDTQTALYLLRRYLFPNEFLTLDIAQEAKAISTISRHQHGLQTLLRLQQLAGRSIGVRKTAEECPTERLTVNCWLSLIDTLSVQLENIFSAVVSLAQQLPEYDILRSLKGVSHLSSALFLAEVRDIHRFNHYKQIQKFAGLNLRLSQSGQYIGARHISHIGNRRLQWLLYSMTEETVK

SEQ ID NO: 135309 - protein, 344 aa, unidentified
MHIASIGIDLGKTTFHLVALGERNKVLVRKKFSRARLLAYTANLQKSLIGMEACAGAHFMGAALREQGHDVRLIPAQFIKPYRKSNKNDFIDAEAIAEAVTKENMRFVQIKTEEQLDVQAMHRVRDRLVQSRTALINQIRGFLLERGITFPADPIHLRKNLPIVIEDADQNLSSHLRSLLERLWQEWKQLEIDVKTITEEIERISQENALCRRLLQIPGFGPLVSTATVAAIGNGAAFRRGRDFAAWVGIVPRQYSTGGKQKLFGISKRGNVYLRRMLIHGARAVLFRVKYDTGGFGQWVRRLAQRAPRNKVVVAIANKLARIAWAVLSSGKQYRHQPLQPVAA

SEQ ID NO: 135310 - protein, 314 aa, unidentified
MEAAVVVGIDVSKRSLEVALSNGGGFSVANDENGISELLARLRQSGAALVVLEASGGYESPAYLALWEAGVPTALINPRDAYHFAQANRQLAKTDQLDARGLCEFGLRMQPEPLPPPEAADEELKALAVRRRQVVKMLAAERTRVQQAPRSVRPSVKRMVRALERELGAVDHQIEQRLRDNPRLAQRCAQLEQVPGLGSVTCAILVSRLPELGRLGPKQVAALVGVAPYDHQSGEWRGRSLIFGGRAEVRSALYMATLSAIRCNPVLRSFYRRLRAAGKPAKVAIIAAMRKLLVILNAMLKTNSPWRPQCATVA

SEQ ID NO: 135311 - protein, 364 aa, unidentified
MGQSSWLVAGMVPGVERQPLKKLEPNEDKLLKLMNRWRHEALQAGHAIERVVVAYEAGRDGFWLARWLRERGVEAYVMHPSSVAVSREHRRAKTDRLDTELLMRAFLGWLRGERRHCSMAAIPTIEEEDAKRPNREHEKLVGDRTRIVNRMKSTLARIGIRGFKPTLRKAEEKLRELRTAEGTLLPENTREELRRDMARLRVVREQIKEIEQQRLRKLEAATPAEKGPHAMIHLIARVMGIGIETADMLVNEILSRHLRDSKAVARYAGLTGSPDESGKRRREKGLARAGNARVRRGMIQLAWRFLRFQKDSVLAQWFRTRAGDGRSGTRKTMIVALARKLLVALWRMVKTGEIPEGVILRPAA

SEQ ID NO: 135312 - protein, 354 aa, unidentified
MPKTASTQIAVIGIDIGKNSFHVVGHDRRGSIVLRQKWSRGQIEARLANLPPCLVGMEACVGAHHLARKLTGLGHDARLMPAKYVRPYAKGQKNDFNDAEAIAEAVQRPTMKFVATKTADQLDLQALHRVRERLVSQRTGIINQIRAFMLERGIAVRQGIRFLRAQLPIILASRTDVLSPRMLRVIEDLAGDWRRLDERIETLSREIETIARQDAGCDRLMSVPGIGPIISSAVVAAIGSGDTFSKGRDFAAWLGLVPKQISTGDRTILGKISKRGNRYLRVLFVQAAWVVLIKPMSWERHGLKSWIEAAKKRLHHNVLAIALANKLARIAWAVLAKGRGFEATRTIDGSTQPA

SEQ ID NO: 135313 - protein, 338 aa, unidentified
MNNINVVGIDLAKSIFQVCCADNKGKIILNRSLRRAQILKFFSNLKPVLVGMESCSSSHYWARELTKLGHEVKLMPPQYVKPYVKTNKNDAADAEAICEAVTRPNMRFVSVKSPEQQALLLIHREREGVIRDRTSLINRIRASMQEFGISVPAGRYQLAKWFRTDFADAELRMPSLLFDHIRSMEVRLRELEEYIKRLDTLIDTTSKASQLCKSLIEIPGVGRLTASAIVASVGDAKSFKSGRQFSAWLGLVPKQHSSGGKNTLMGISKRGDTYMRRMLIHGARAVIRHIKPGKPFYEWVNELLSRMHKNKVVVALANKLARISWAILVHDRAFASNN

SEQ ID NO: 135314 - protein, 374 aa, unidentified
MLYLGIDQHAMQLTVDLGDEDGNLLLHRQVKTEPESLHKFFRGLREQAEAKGGYLAVVEVCGFNNHLLELLHEYGCARVLLVQPDGRKKHKTDRRDARALRELLWINRSRILEDERPAKLRVVRPASPEDAADRQLTVLHQRLTKHRTRLINKVKCLIRKWNLQHACPAKGIQTKKARLWLESVSLPDMDRFEMNVLLQQWTLINQHLEQVQEKIKQRQMRQEVAKLLSSIPGLSYFGSLSIACRIGDIRDFRRGSSLANFWGLTPGSRNSGETKISLHITKAGSSLVRFVLGQAVLHVIRRDGWMRKWYQKIKRGRGSKVARVAVMRRLAVIIWSMVTYGMPYMTGGPEVIREYLRKHKNFFGETTLTAGRIA

SEQ ID NO: 135315 - protein, 350 aa, unidentified
MIIIGADYHPGFQQIAFVDTDAGEFQERRLQHREEAEKFYRDLAAQGMQVRVGMEASGQARWFERLLSELHFELWIGDAAEMRTKRVGKQKTDRQDAQLILQWMLEDRFPKIWVPSWENRDLRQRLWHRHRMVQARTRIMNQLQAVALNEGLRCKKRLWREAGREQLESFALAPWANRRRRDLLELLDRLTPAIAELTQAIEQEVEKCPAARRLQTHPGVGALTGLAFVLIIGRAERFQCGKQIASYLGLVPLEDSSGQRRRLGHITKQGNSLLRFLLVEAAQVTVRSDPQWRSKYFHLAMRRGRKIAKVAMARKLAVRLDWMWRKGWDYEQWKNFGSHAGQPGNRDGVL

SEQ ID NO: 135316 - protein, 355 aa, unidentified
MLSTKYIGMDVHRESISIAVMNSAGKLVMECVIETKGSTILQFIQGLSGSLHVTFEEGTWATWLYDLLKPHVTKIVVCNPRRNALLKEGNKSDRIDARKLAELLYLNKLKPVYHGEHGVRTLKELSRSYLTISGDLARVMTRVKALYRSWAIPCTGKQVYAPRHRAEWLAKITETGVRRRAEFYYQQLDALSSLRQQVRRELLAESRKHKASKLLCQIPSIGPIRAALLIAIIQTPHRFRTKRQLWAYGGLGIETHSSADHRYVEGQLQPSKKQISLRGLNRNHNHELKNIFKGAAIIAATKPGPLQEFYAALVAKGIRPEMARLTLARKIAAITLIVWKRGVCFDAQHLKPQTA

SEQ ID NO: 135317 - protein, 340 aa, unidentified
MNNTCFAGIEVSSQELLVAVRRDAQTFPQQLFPNSPEGHRAVADYLARAGWLVRVCLESTGVYGLDLALLLHRQEGIAVMVANPRAVRHFAHALMQRSKTDPLDAMVLLEFASRMPFQSWQPPSKTALHLCALARRIQAVTDLGAAEKNRLHAASAAEALPAAVRQDLRRSIAFHERSIERLVRQAVQLLSTDPLLLRRFQHLDTIPGVARASAVALLAELALLSPDLDVRQWVAAAGIDPREHSSGSSVHKKTRISKAGNRHLRRALFMPALVAVQHDPHLRAFYEHLIARGKAKMQALVAVMRKLLHAVFGIFRNAQPYDGSKLFPELTPPIALASPS

SEQ ID NO: 135318 - protein, 372 aa, unidentified
MKKRSSSRQNPKSAVKTKRAQQSVTIGMDLGDKTSRYCLLSDEGEILREGEVATTKAGMTGTFGRIGRARIAIEVGTHSPWVSRLLRSLGHEIIVANPRQVKLITESSRKDDRLDAQTLARLARIDPQLLRPIQHRSEKAQAALMVIRVRAALIAVRTSLVNTARGLTKAMGERLPTCDADQMGVQRAESLTPKLRQVLEPLLKEVESITEKIKDSDREVEQIARKDYPETALLQQVGGVGPLIALTFVLTVEDKDRFEKSRDIGCYVGLRPRRSDSGQSQPQLRISKEGDPYLRTMLVQGAHYIISRRGPDTDLKRWGLHLAQSGGKRGKKKAVVAVARKLGVLLHRLWVTGEVYEPLRNQNLRMGRKKAA

SEQ ID NO: 135319 - protein, 367 aa, unidentified
MQNTIVHYEGAASLEAAATKVKPSGAQIKIGLDVHARLYVAVAQYDHLLPKAALRLSPGEFVPWVQVLLARGHSVHVVYEACGFGFSLYRQLIAAGAHCYVIAPRKLDEEHSRVKTDPRDATTLCQRLSRYLEGNTRELALIRVPSEEEEQARHVSRQRGQLVHHRQKLEAQGRSLLISHALPAPAHWWKEQSWTRLGRHLPAWITTRLQTGRPVLLSLQEQINALTSELEASAPSILPRGVGKLTSVVLTREICDWHRFNNRRAISSYTGLCPGERSSGSKRVPGSVTKRGNPRVRAALVECAWRMVRFQPQYPPVQKRLAILSKGSRALGAVRKKAIVAVARRLAVDLWRLHTGRCTAQQLGFTI

SEQ ID NO: 135320 - protein, 338 aa, unidentified
MTAIRVIGIDLGKNTFHLIGHDYSGREVMRKKLNRQKLLQLLSVHEPVVIAMEACGGAHWLARKCKSYGHEVKLIPAQYVKPYVKTNKNDFIDADAIAEASMRPNMRFVSAKSEQAQVGTVIRKIRSSYIKDRTACMNRIGSILLEFGISLPRGHSNMKNLFQWLADNKEPIPPMLILELRQQLDFYHQLNEWIKSQENKLEQLLKENDLLLLLQSVPGIGPMTASCCLSAISNPNDFVNGRNFAAWIGLVPRQYSTGGKPRMLGISKRGNKELRELFVHAARAVVWRDESAKRYFGTWLIELKQRKPFNVVVVALANKIARIAWSVMSTHKAFEIRT

SEQ ID NO: 135321 - protein, 332 aa, unidentified
MYYVGIDLHKRDLVIAVEDERGPVGKPRRFACRDEAAIVAHLSALRPFRAVIEASASYRWLYDRLKPLGEVILAHPLRLRASIARPAKTDKLDAALLAHLLRMGQIPEAYAPPAAYQELRDLTRARARLGRSATEAKNHLHRLLAARNIHPPYRDPFGVRGRRWMRSLEMGVVGNLERDELIGRLEHYDAQRDRLDGALEESAASFPQIESLQDIRGIGTYTALLVVAEIGEPERFSEPGQVASYAGLATRVYQSGGHDYHGHITRQGSPWLRWVLVQAAMKAIGRDRRLANFYERVRKRSSRHIARVAVARKLAEICWIRLRRWHRERAAA

SEQ ID NO: 135322 - protein, 331 aa, unidentified
MAHIGIDVSKAKLDCLWVRDLEQGKVKTKVFKNQPDAFPSLLHWLQQNTGESVDQLHVYLEATGIYHEPLAHWLYKQGVSVYVLNPAQVRYHAQGMGVRSKTDRKDSMMLARYGIERSPEPWQPELPEVRELKRLLGRLDALEEDIQREENRLEKAQFNGDSLAVESITNVLNALNEEHERLRQSIDDHFDRNDHLKQDRALLETIPGIGKVLSSYLTAAIRSRDFASARQVAAFFGLVPVEEESGTSVRKRPRLSKAGSAKLRQKLYMGAVVAAQHNPDIRAQYRRLCQRGKAKMAAIGAAMRKLMHIAYGVLKSQTVYQPQAENALKGA

SEQ ID NO: 135323 - protein, 357 aa, unidentified
MSNKATKLDFRGQVFHIGIDVHKRNWRVTVLNNGLELKTFSMNPSPEDLSSYLQSNYPGGEYYTAYEAGFCGYWIHRKLESLGIKNLVVNPADIPVNFKETVRKTDTIDSRRLARALYSNLAHGNYIPSLEQQGFRSLCRLRKQLVKDQARVKNRIKSFLDFSGIKVLSQNEISHWSGLFLNYLSNLDLGNEHSNETLSRMLGQLMSLRNQIADLVKRLKTIVRQDEAILRVMNNLMTIPGVGFSCAIVLYSELMDINRFSSVDKLCSYVGLVPDLRSSGESEYTLGISKLQLQFLRAMLIECSWIAIRKDPALTAAFNTLSIRMKKQEAIIRIGKKLLTRIMYVWRNNEPYICSIV

SEQ ID NO: 135324 - protein, 333 aa, unidentified
MVEGTQGSHHKEGSTKMHQHNMICAGIDTGKRKLDVALAEGRHRLQVNNDSDGHAALSGWMRKHRVKRVGIEASGGYEQAVVAKLRRDGFLVIVFQPAQVRAYAKFHLQRAKNDNIDAALIAACTAAAQKIHVPPDPRLGPFAEHLTLIEQITEDIAHLKTRRESSRDQRIRHHWDDEIARLKKLLRIELKALIAALRQHRDLSVRLDLIASVDGIGPKTAVAILIRMPEIGRVTREQAAALAGLAPYDDDSGDQVGARHIDGGRERLRKSLYSAALAAAFYWNPQLNLIYRRLVTAGKPHKVALVACARKLLIYANTVVERGMPWTKRPAAI

SEQ ID NO: 135325 - protein, 466 aa, unidentified
MKHNQRTPVGKRRKSPSLLERIQPDAAGIDCGEKSHYVAVPRERDPQPVREFRTFTTELYHLADWLAQCGIKTVAMESTGVYWIPVYEILEERGFEVILVNARNVHNVRGRKSDVSDCEWLQELHSVGLLRPSFRPAAAIVALRSYLRERATLVKEAATRIQRMQKALTQMNLQLHTVITDLTGTTGLNIVRSILAGVHDPEQLAVHRDPRCKADKAELVAALTGNYRAEHLFSLRQNFAAYEFHLGQIAECDAAVEALLQNLAAQQPSPSTALPPPRRKPTANNHAPRFDIRTPLHRLTGGADLSQIDAIGPQAALQLVAEIGTDMSRWRTAQHFTSWLTLAPNNKISGGRLLSSRTPPSANRAAAVLRRCAMSLTRTRTALGAFYRRLAVRIGKPKAITATARKLALLVYRVLSGDLVYQDPGANAYHQLHLARELKSIRRRATQFGYDLIDRNTGEVLLNPVS

SEQ ID NO: 135326 - protein, 336 aa, unidentified
MLIIGCDFHSRFQQIAMLDGQTGEVIERRLEHATGEARAFYAALPGRARVGMEATGYAQWFEGLLAGQGHELWVGDAAEIHAARVRKQKTDSRDACHLLDLLLQDRFPRIWVPSPQERDVRQLLRHRHKLVCSRTSVMNQLHALAMGQGVCRKQKLWTAAGRRELESLALGPWASRRRRELIEMLGRFDTSIQELDQAVIQEADRHPAAVRLMEHSGIGPVTALAWVLTIGPIERFEKSRQLVSYLGLNPRESSSGGKQRLGSISKQGNSMLRSLLVEAAQTASRFDPELRRHYVRLKFRRGRAGSQGGDRAKVGGAAVLEAAGAGQRGATGSHAG

SEQ ID NO: 135327 - protein, 347 aa, unidentified
MNFYNNTHPYYCGIDLHARILYVCILDQDGNTVLHKEISATPNKLYQLIEPYIGNIVVGVECMHCWYWVSDFCDEIGVDFILGHALYMKAIHGGKAKNDRIDSFKIASLIRGGNFPLAYVYPKEMRATRDLLRRRMKIVQHGADLKAHVVNTTSQYNLPVIKVNLKNISARDHLKSVFPDEAVQKNIDLDMLILDCYTEQLRKVEWYIVTQARQHKPIHLKLLNTVSGIGRILSLTILYEIGDINRFESVQNFASYARLVKCKAESAGKSYGTQGNKIGNAHLKWAFSEAAVMYLKGNDKAKQYLLTLQKRMSKAKALSVLAHKIGRCVYFILKNETVFDESKFLKG

SEQ ID NO: 135328 - protein, 351 aa, unidentified
MEIGVDTHKRSHVLVALDGEGRQLGTRTITNTPEGWAEALAWARGKQQQQRRWGIENGGSLGKGFAQFLLAQGEAMVREVSPQRTAQYRRRGRTQDKTDQADALAIARLLLAEGEHLPAIPRDDVSTELRLLSDHRDNLLVDRTRLINQLHAQMLQIDPDYQAHSGALTARRGLLYCRDLLLPEADGVTLTRQLIVRQLVGQILGLEEEIATITAALGARVRASRTPLLALCGVGAVIAARLIGELGIVLRVHAAAALAALAGVSPVAVASGGRGGFRLNRGGNRQRNRVIHVMALSQRRCDPRAQAYDAKKRAEGQTRRAAMRCLKRRLVDVLYRCFTRGTVEQTGAVAA

SEQ ID NO: 135329 - protein, 373 aa, unidentified
MKSITKFVGLDVSKDTISVAVADAGRTPARSMGSIPNTPEAVRKLIRRLGKPEELLVCYEAGPTGYGLYRFVGQLQVTCIVVAPSLTPVRPGDQIKTDRRDALRLAQLLRAGELTPVWVPDEEHEALRDLVRARQTAKVDLKRARQALGSFLLRHGVHLPKGTKRWSKMFMRWLDMLSFPHRATQIVFQEYLHAIHELEARVERLEAEIRAIGEDSRYAPIIQALQALKGVGIITALTLVAEVGEFSRFRNPAQLMAYAGLVPREHSSGVQTRRGGITKTGNAHIRFVLGEAAWAYRHKPAVRAELRKRQQGLDPQVLSIALKAQQRLHRKYWRLLSRGKPATVAVSAVARELLGFVWAIACHVEAKTDRMAA

SEQ ID NO: 135330 - protein, 342 aa, unidentified
MNNRTVIAADIAKSVFQCVKFKQGQQVGKNKAYKRAEFESLIVKSHPSILVMETCTGAQHWARLARQHGHEVILIPPRVVTPYRHGQKTDANDAMAIYEASQRRHLKASPQKTVEQQSLSVLESVRCHYQRRKTKLSNSIRGHLAEFGIVMPKGYKALRAQLPLILEDADNGLPMQTRLAINLYWEDWQQAHHKVLELEREKLKALAEMDTAKELLKIEGIGPVCAAQLICTLGDARVFRRAKEAAAFVGTSPKQHSSGGKEVIVGISKKSGHKQLRAALIQGAWAVILRLKAKGVPSSEKERWLFQLIERVGENRAAVALANKNVRTAWALLAHQREYIRT

SEQ ID NO: 135331 - protein, 423 aa, unidentified
MPYRIAGIDVHKRKLAVVVADVEVEDEYQFERRWYGSNPEQLRVLSEWLIEQQIEEVVMESTAQYWKPVWGALERYWKPRCQSREGAGRMSGTLHLAQALSNRGRRGRKKDFRDAERLVKRLVSQELVLSFVPDTEQRMWRTLTRTRYQRTRDKVRLQNQLEALLEEAHIKLSSLVSDLLGASARRMLKALADGETDPAAVAALADQRLRATPAQLHDALGACTELNPVYRRLVKMTLEGLQFVEQQIGQLDQEMASLLRQHQDAVERLAVVPGLGVDSAQQIIAEVGAKAATFPSAEKLSSWVGACPGEEESAGVNRSRHSPKGNRQMRRVLNQAANAAVKHKGSIFEIVYRRLVPRLGHNKTIGVIAHRLCHLIWIILHKGVRYEERGPAVSEKSRQRRTARMVRTLRILGYRVEPLTNPT

SEQ ID NO: 135332 - protein, 425 aa, unidentified
MPHRIAGIDVHKKMLAVVVADVEVEGDLQFDRQKLGTSPADLRALADWLVEREVDEVVMESTAQYWRPVWEALELHWRPKRQTREGASPICGTLHLAQAQSNRGAGGRKKDFPDAERLVKRLVAQELTLSFVPNAEQRLWRTVMRRKYQITRNRVQLHSRLESLLEEAHIKLSSLVSDLLGTSARRMLQAVADGETDPATVASLADQRLRATAAQLSDALSACTTLHPVYRRLLKLTLEELRLIEEHLGQLDQQMADLLAAHHDAVQRLAEVPGLGVDSAQQVIAEVGATAATFPSPKHLASWMGACPGTEESAGKNYSHRCPKGNRQMRRVLNQAANAAVNAKGTIFAVVYRRIVPRLGHAQAIGAITHRLCRLIWKILHERVRYEERGPSVSAEVKKVRARKMIRELRSLGYRVELASPMPTA

SEQ ID NO: 135333 - protein, 356 aa, unidentified
MDSTKYIGMDVHKEATTIAVMNAAGKLVMESIVETKAATILQFIEGLRGELYVTFEEGTWAAWLYDLLKPHVTKVVVCNPRKNALLKAGNKSDRIDARKLADLLRAGLLSAVYHGETGLRTLKELGRSYLAISKDLARTMNRIKALYRSWSIPCGGVSVYAPRHRAEWLSKITEPGVRRRAELFYQQLDGLQKLRQQARCDLLTESRKQGATKLLQRIPYIGPIRAALLIALLQTPHRFRTKRQLWAYSGLALETRTSAEYHYVQGQLQRSKRPAALRGLNQNHNHDLKSIFKGAATTAAGAKGPFHDFYSALLAQGMKPTMARLTLARKIATITLLVWKKGVCFDAQQLKRPVSV

SEQ ID NO: 135334 - protein, 345 aa, unidentified
MQPMYYIGLDLHKRTISYCVKDVSGTIHAEGTIPAIRFHLDQWMNTLPQPWTAAMEATVFTGWIYDHLQPHAAGLKVAHPLMLRAIAAAKKKNDRIDARKLSDCLRCDFLPECYMAPTAIRERRRTLRYRNLLVRQMVQMKNKIAVLLMEAGVSYNKQRLHKAGYFRELLATNPDINEGLCSLLRVCRETVVRLQRTESALVRSLERDSLLKERVERLMTIPAVGPITALTWALEVGDVWRFSSIKKAISYCGLCGAEKSSANTVQRTPLSKQRNKHLQTTLIEAAKMAPRYSPHLALLYDKEKQKGSANRATLAVARKLVAYLMAVDRGQRPFELVEASHSTAA

SEQ ID NO: 135335 - protein, 330 aa, unidentified
MKKWDYTIGVDVSKNTLDIHCAELNEHIQISNNQDGFKPFLKWCKTHKIALTKAMIVMEYTGGYEYKLIAFCEEKSLPYARISGLAIKRSMGITRGKSDKVDAARIAQYAEEKHKSIQPSKPLNKSIIELKELLSFRKRIVRETAGYKASLKERKHIYPDLKQDIICKSLESKIKENTKMIGKIDTELLKMVAENEALKTNYVLLTSIRGIGMVNALMTIAYTENFQSFSNPRSYAVYVGVVPFEHTSGISIKGRKRVSPIANKELKQELTQAARSAIQWDKEMQEYAVRKMPGKCYNIVLNNVKFKLILRMFAVVKRGEKYVDNYKKAA

SEQ ID NO: 135336 - protein, 370 aa, unidentified
MKKLIMYVGLDVHKNSIEVAFADTGRDGEVRSYGKIDGNLTALDKVIRKLEAKGAELHFAYEAGPCGYEIYRHLNSNGYDCIVVAPSMIPRQSGNRIKTDRRDAQMLARLHRAGELTSIYVPALEDEAMRDLTRAREDAKSVERKAKQRILAFLLRHGYRYSGKTPWSRAHFRWIAILKMPHPAQQIVLQESLDSLSECTERVNRLTEQIQRLLPQWRMFPVAQALQTLRGVSLIVASTTIAELGDLTRFASPVELMSYLGLVPSEHSSGEQTKRGSITKTGNGHVRRVLVEAAWAYRLPARVSTALHLRQEGMPLNVCAISWKAQLRLCNRYKRLLERGKARQLIITAIARELCGFMWAIANEVETPTA

SEQ ID NO: 135337 - protein, 341 aa, unidentified
MYRTKVGVDLAKNIIQVCTLHGKKVTSNVEMSTDEFSLWLAQSKPVTVAFEACSTSNYWYQQAIKAGHDARLISAKLVKAVRQNQKTDKNDALAIAQTLFLPEVSFINGKSIEQQQLQSIQRLRELAIKSQNASQKQIVSLLLELNIRLPNTQGGILRGLKGVLEDGENNLSDTFRATLSVAKVQLENMISAIREYDKYLEQSIQLLPDCKKLLKLEGVGPVNAVNLYIALGANQSQPFKSGKNASACIGLTPIQHSSGGKEVMGTIGKYCKNGSLRSQLITGAMSVVIKVIKYGAKTKKELWLQGLMQRRGNRCAAVALANKTVRTAYSMLQNNTEYHAA

SEQ ID NO: 135338 - protein, 404 aa, unidentified
MYNAVGIDVSKGKSTIAVLQPGGTVIRKPFDVSHTSQNLNELADYLSSLDGTTKIVMECTGRYHEPMVKALSEAGLFVSIVNPHLIKNFGNNSLRKVKSDPADARKIARYTLDNWTELRQYSGMDNTRTQLKTLNSQFGFFMKQKVAAKANLIALLDNTYPGVNKLFDSPTREDGSEKWVDYAYSFWHADCVRKIGLKAFTERYKSFCKKHHYIFQQDKPEKLFNASKELVAVFPKEKTYKLLIQQSIQQLNLASEHVERLRREMNELASTLPEYSTVMGIYGVGKTYGPQLIAEIGDVSRFTHREALTAFAGVDPGVDESGQHKSKSNRASKVGSARLRKTLFQIMTTLLQNAPEADPVYRFLDKKRSQGKPYYVYMTAGANKFLRIYYGKVKECLRNLEQTE

SEQ ID NO: 135339 - protein, 314 aa, unidentified
MGNQERAYAGIDVSKESLDLAIHDERQQWHFTNDPAGLRQVITLLRKNKPATVCFEATGGYELPLWTTLTEAGMNPAPSNPRLVRHFARSAGRLAKTDALDARVIADYAYAMKPRVTPFPETEILKEIISRRCQLVEMISAEKNRLKSARNASVKDDIQATIKYLEERLKNIDKELGAGIKASPEWRKKDKLLQSVPGVGKGLSACLIAQLPELGLLDRCKIAALVGVAPLNRDSGKSHGKRTIWGGRSRVRTALYMATLSATRHNPAIRPFYIRLLERGKTKKTAIVACMRKLLTILNAMMKNKTAWGCLTVK

SEQ ID NO: 135340 - protein, 339 aa, unidentified
MNIQTLGIDIGKSTFHLVGLDAGGRPVHKFKYTRTALMRFMANLPTCVVGMESCAGSQHLARRFTEHGHRVRLMAAQFVKPYVKSNKSDFLDAEAIAEAVTRPSMRFVPVKTPAQQDLQAVHRVRSGLVRARTAQINQLRAFLLENGLTIPRGVHALGRQVPGILEAAENGLSDRMRALVAELWQQIRELERRIGALTQELEHLADQDPACRRLLTVPGIGPLTATALVAAIGDGREFRHGRELAAFLGLVPRQYSTGGQPKLLGISKRGNVYLRTLLIHGARAVLRGADRRADRLGPWSRALTARRHPNVVAVALANKLARIAWAVLVQGHDYQPSVA

SEQ ID NO: 135341 - protein, 313 aa, unidentified
MNKVVGIDVSKAVLDIVVLPSGEALQFPNDVNGIDELCKRLKSDSADLVVMEATGGYETAVATVLVGAALRVAVVNPRQIRDFAKATGRLAKSDRIDAQVIAQFGQAIEPEIVRLPDEDARELEALLVRRRQLVAMRVQEVNRLGLVRQGAMRKNIKAHIDWLEKQIDKLDVDLTAGLRSSPAWRAKDELLRSFKGVGPITSGTLLVALPELGALDRRAIAALVGLAPFNRDSGVMRGRRSIYGGRSRVRTLLYMAATTAIRSNPVIRAFYERLKSRGKPHKVAMVACMRKMLTILNAMVRQSTPWTPETNPL

SEQ ID NO: 135342 - protein, 419 aa, unidentified
MFKIFRKNCCGLDVHKTWIFACIGITDANGRTDYKQARFSAFSKGLRELADWLAKYGCVESCMESAGKYWIPVFNILEKTCLVTLAHPKYTKPQKGNKTDRKDAKWICDLFMCDMIKPSFIPPPDIRELRDLVRYRFKLTNILTGEKNRAQNCLTVSNLKLDDVFSDVFGKSASSITAFILDHPGESFDVAPFVDKRCKHPIEEIQAAVDGSISPEQAAKLREILRHIDELETHKLKIETEILRLAAPYAEQLKLIRTVPGFSSDPMTAIAVISEIGVDMSVFPTAKHLSSWAGCCPRNDQSGGKRKSSRISRAGVYLKPLLVQVANAVVKSDKHPECKGRYRRLKSRRGHKKAIIAICRMLLTAIWNILSKLEPYSPDGYLADRPLDQSMVLTKAQALNLLRLRGFVIKDDVSSPAPA

SEQ ID NO: 135343 - protein, 406 aa, unidentified
MVNMGIDLHKTQFTVCARSRREERFYAYPTTDEGYKAFLKEAASWQKKGEQVRVAVESTGNTRYFKSRMEEAGIRVTVVNTLKLKVVNESVKKTDKHDAATIAEFLEKDMLPQSQLCSRQSEQLRRLLKIRTTLVRAQVVVKNQIHALLSSEGIEDVKSAALQSKKGRKRLLDALEQWQHGLVAQPLVETIERLEENIKSIEEQLRVLTAGDRMVELLMSIPGCGEICAWTIRAYTDDIKRFSSAKKYASYAGLAPWVQNSNETIRHGRITKRGPEELRTALVQVVMGLRRMKRRTLSWRLMQRYEAMKKSKGTGKSIIAAARKMAVIIWHMLTENVEFDITLMTAKKLMSTSVSMRAGVEVLDKNAWGEVKDQQPQLQTTNENGGQPLALPVKEKRKRQKELISS

SEQ ID NO: 135344 - protein, 398 aa, unidentified
MAVTHPSRLNRKQRKELGRRLQSTDPGLDVVHPNAAGIDVGNSTHYVAVRPERDPEPVRRFDCFTADLHRLADWLQQCGVTTVAMQSTGVYWIPLYEILDARGLDVYLVNARHTKNLPGRKTDVQESQWLLKLHTYGLLRNSFHPTAEIRITRTYWRQRGDHVRAISTCIQRMQKALTQMNIQLANVISDLSGWTGMRIVRAILGGERDPHALAALSHPGIHATREAIAKSLEGTWQPDLVFVLQQEVALYDAYQQRIAECDRALQDHLKGFADQTPDRLAAGDEPSVTPRPRRRAGPKRRRKAGSHAPQFDLGRELSRISGVDLTRIDGIDVSVAQTLISEVGLDMTRWPDEHHFASWLGLCPNNRITGGKVIRRGTCGSRIPRRQAATGSWTRPRQ

SEQ ID NO: 135345 - protein, 406 aa, unidentified
MKQIVSVGIEVSKGKSTVCAMIHPNTIIKESFEVLHTVEEMSMLADYIGSLDGEIRIVMESTGHYHLPVAQFLYQKGFFVCVENAYIIRQFSRIMLHGAKTDPLDAKKLAKYGLAYWSELKPYKFHPSCYTELSLLSKQYQTYIKLLIAAKQNVIHLMDEMLPGFKEALDTASSVQFSKVKYVDFAKEFYHVDMIKTMGKEIFRENYKQWCKEKGYRFQSEKADELFHLAEDGIPTLPTEFPSTRLCMEVATEQVSQLGYALEQILSQMQNLAKTLPEYQTIRQMGGMGEKLCVRFIADIGDVRRFHNGKALVAYAGIDAPPYQSGQYTGTKRRISKRGNSALRKTGYEVMKSLKSHPPKTDTRVYDFIIKKENEGKSRKQAKIAGLNKFLQIYYARVIEIYKNIV

SEQ ID NO: 135346 - protein, 340 aa, unidentified
MNAITIGIDLAKSVFQVHGVDTNGAVVIRKKLRRAEVLKFFEALTPCLVGMEACATAHFWARELSTLGHEVRLMPPSYVKAYVRRQKNDAADAEAICEAVTRPSMRFVAVKSAERQSVLALHRTRELLVRQRTMLINAIRGHCAEFGLVAPQGARRVTELVERLHQTEGSALPNLVRSALLMLAGQLDALATQIHGLERRLLAWHRQDQASQRLATIPGVGIITATALSAAVTDPSVFRSGREFAAFLGLVPRQNSSGGKDRLGRISKMGDRYLRKLLVVGATSVIRRARTGAVGAAPWIRSLLERRPARVVTVAMANKTARIAWAVLARGEVYRVPTMA

SEQ ID NO: 135347 - protein, 461 aa, unidentified
MQIVHRCCCGLDVHKKLIVACLISLNEAGEFQKEIRSFATMTKDIWALADWLTSAGCTHIAMESTGVYWRPIWNLLEDQFELLLVNAQHIKAVPGRKTDIKDAEWIADLLQHGLLRASFVPPAPQRHLRELTRYRSTLLAERARLVNRLHKVLEDTNLKLTAVVTNIMGLSARDMLDALLQGETNPEVLAKLARGKLRKKREDLEQALVGRVDDHHRFLLTSLLTHIDFLDEQVADCNGKIEQFLSAPSDEKAELVSSASDDQRQEQAPLSSTPVGTESMLAQDRVPEDGPKVPLSYQQAIALLDSIPGVNQRIAEIFLAEVGTDMQRFPTAGHLASWVGICPGNHQSAGKQIRGTTRKGDRWLRQALIEAAHGAMRTKDTYLSAQGRRLTHRRGKKRAVVAVAHSILIIAYHVLQRQQPYQDLGGNYFDERERSAIARQSVRRLEQLGFKVTLETAGEAA

SEQ ID NO: 135348 - protein, 344 aa, unidentified
MDHIGFDLGKVNSQLCIISADGELIERRLSTNRESLTKLLGSRPPAQILIEAATESEWVARHLEGLGHEVVVADPNFAPMYATRSRRVKTDKRDARTLAEASRLGAYRPAHRTSDQQRHVRAQLAVREALVRTRAKYISLCRALLRRDGLRIASGTARCFSLRVAELSLTAELRAELTPLLTLLEGINEQIKQADEALSQMVKEDSVIKRLTTVPGVGPVTAVCFVATLDDVTRFPDAKQARAYLGLVPTEYSSGERQQRGRINKAGPNRARYLLVEAAWSILRRRSAATADLYQWATAIRERRGTKIAVVALARKLAGILFAMWRDATDFKPSSMKTEPAVAA

SEQ ID NO: 135349 - protein, 323 aa, unidentified
MAKGITICAGIDTGKHKLDVAIDGCSEQLQVKNTPEGHEALVDWLRQHRVKRVGIEASGGYEQAVVAELRRKQFVVVVFQPAQVRAYAKFLLQRAKNDKIDAALIAACTAALKTIHAAPDPRLAPFAEQLTLIDQIGEDIARLKNRIETCRDPRIKALWKEEVSRLTKCKRAELKTLVAAIRKHPDLAKRLALINSVDGIGLPTAVAILVRMPEIGQITREQAAALAGLAPYDDDSGEQFGVRHIAGGRERLRRALYSAALPASFRWNQQTICLYQRLIAKGKGHKRALVACARKLLVFVNTVVARGTPWQDRPSATAALTIA

SEQ ID NO: 135350 - protein, 417 aa, unidentified
MAMKIVRFNCCGMDVHKNLVVATIGITDRKTNITEYFQRSFSTLNSDLYRLKDWLKSHHCSDVCMESTGKYWIPIFNILEDEINVRLTHPKYVKAIKGKKTDKKDSKWICDLFKHDLIKFSFIPPREIRELREIARYRYKLVCMRSSERNRYQNCMTVSNIGLASVISDPFGKTASNIMKEVMKSNVIDDDKILKLVHRNCKNKDKILDSLHGYRIESDQRFKMEKSLDHMEYLDQLIDSCEVELIKRAYPLRRSFQHITQIKGISALSAILIISEIGIDMSQFESDKQLVSWAGLSPANNESAGKKKSVRISKAGQYLKPLLVQCALSAIKDKASYFGRKYSNIKKRRGHKKAIIAIARMMLVSIYHMILTGEEFQPTDHESLMSPKSNTDQSLTVEKALNFLKRSGIDISSILVN

SEQ ID NO: 135351 - protein, 342 aa, unidentified
MQIITIGLDIAKNVFQVHGIGAGERVVIRKQLRRSQVLAFFEAVPPCLIGMEACATAHYWARELTKLGHQVRLMPAKDVKAYVKRNKNDAADAEAICEAVRRPTMRFVQIKSVEQQGRLMLHRARDLLLRQRTQVINALRAHLAELGIVAAQGREGVKELLRIIASEQDARLPADAHASLVVLAAELQAMQTMIGAIDKRIMAQHRLSEVSRRLESIPGIGVTGASAIVAAVPDPKVFRSGRDFAAWIGIVPRQDSTGGKQKLGPISKRGDRYLRRILVVGACAVLRYARHRPEKYPWLTRLLARKPFKVVAVALANKMARIAWALLAKGGTYRASALATAA

SEQ ID NO: 135352 - protein, 346 aa, unidentified
MNNTFSDFDACGIEVSARTVLVALGAAERPASRREFANTAEGHRALLGWLKRWKRPVRVVMEATGLYGLDVALGLDQAGILLMVANPRAARHFAQAIMQRSKTDRIDAEVLRQFAARMPFVAWHPPSAAALKLMAVARRLEALTEMLAAEKNRRHAASLSEALPAVVRRDVQRSIQTQQRAIERLTRAAQEFVAADPELARRYQLLLSIPGFAAASALHTLAELALLPPAMDVRQWVAYAGLDPRHHTSGSSVEKKPRISKAGNKHLRRALYMPALVAIVHQPHLRAFYQHLLARGKAKMQALVAVMRKLLHAIFGMFKHQQTFHGNKLYRLSPVEQALPLAQEVA

SEQ ID NO: 135353 - protein, 349 aa, unidentified
MMRYVGIDVGKGRCRAALMNQKGDIESEFFFENNSRGISNLVSALTNEDKVVMESTGNLWLNIYDALDHRNISVVLANPLKTKAIASAKVKTDKVDARILAHLLRSDLVAESYVPPRNVREMRSLVRHRLSLVKMRTMVKNKAHAISDRYGYRCEYSDMFGKAGMEWLRTLEFGELDRLMLENHLSLIESINAQMNRVDEAIRKKASQDEDVRLLLSLTGIDVYTALLLRSEVGPITRFPDYKKLVSWAGLAPSVHQSGNVEYHGAITKRGSSMLRWAMVEAARVAVQHDERLGAFYERVRARRGDQKATVAVACKMLKIVWFMLTKRETYGNANGRLYGEKLKKIGVK

SEQ ID NO: 135354 - protein, 439 aa, unidentified
MHLRDTEERVKEPDWAAFIAVDWADQKHDWAMEVPGENTRERGQVAHSPEALDTWVTQLRQRFGDRPIAVALEQSRGALLFTLSKYANLVLYPLHPRTASCFRQAMYPSGSKNDPIDADVQLDLLVKHRDRLQVWKPDTEETRLLQFLVEDRRRRVDQKTGLLNQLTGRLKLYFPQILKWFPVDSALASRFLERWPDLQSAQKASRQKLKAFLTRDARSCPADVDQFINQIRDAMPATQDRAVVNSSTVFVQGLVGELQLLRATLQKYEKEIEAIVQQHPDFPIVSSFPGIGKALAPRLIAALGTKRERFPDASSIQSYSGIAPVREASGTREWIHVRWACPKFLKQTFQEWAQHSMARCAWARRHYGAQRARGKGHQAAVRSLAFKWIRVLFRCWKDRTPYDENRYTESLGRRSAPNTDVRIVWKNVAGFSKPELFSA

SEQ ID NO: 135355 - protein, 336 aa, unidentified
MFETYLGIDVHKKRCVYTQVNTQGKIMDRGSFHNEIMEVSDFACRLDSGTHLVLEPVLNYLWLLDQLEPYVGSVHVATPYKVRVIAESKCKTDSYDSRILAELLRTNFLPESWIPPKELRSLRTLIRQRYHLVSSMVSFKNRIRYLLFTFGVHIPVSDISSEKAKRMISGSILPDTEMRSIHRCFEMIDMLKSSIGEIDESLDEASDGIEEIKLLRTIPGMGRIWSVTTYAEIGDINRFSSEKAFASYTGLVPSVRSSGDSCHHGGITHLGSKPLRHSLVEVAIRAIRRVPSLKRMHSRLLYRGNVQKARVAVARKLATIIYVMLKKKEPFRLESV

SEQ ID NO: 135356 - protein, 333 aa, unidentified
MKTTIASIGIDVAKATLSIAFHSHNGSEKVLSIRNSNTDMHRRILPKLKAFKGKIVMESTGHYHWTPALILSEAGYDVYVVNPLLAKQYVSGSVRKIKSDPADAGALARMARVADNLPQPFTSTPESLWLRKKLGLLASLSKQVQALKACLNSVKEAQAMVHGTASSSIVELENTLLTFGKQMKSLEDECVAGMKKNEKCNERMKLLVTIPGISEFGATLFLHWFDMSKGATAMSWVAYAGIDVSVRESGTWKGTCRLTKRGNAYLRKRLFSSAWGAWQNDDDFHKYYSELKEQGRPHVEILTIISRKLIRIAFSVLDNGLPYDASLCFGNGK

SEQ ID NO: 135357 - protein, 366 aa, unidentified
MAGEAGAVIGGVDTHKHTHHAAVIDQNGQLLGDGEFSTDAGGQAELLEWLRSHGHVTAVGIEGTGFYGAALTRHLSEAGVCVVEVNRPNRASRRADGKSDRLDSEQAARAVLARTATAAPKSKSGPTEVIRMLRVTRSSAVKARTQAFLTLHGIVIGSPTSLRDELVKLSKRTLVKRCAGLRPEAEDLLELVDQPDRLQVAAAKRTLRDLARRWLTLDAEVKALDRQIKTLVERTAPQLVSLFGVGVELAGQFLVTAGDNPDRIRSEAAFAKLCGVAPQPASSGRTTGRHRLSRSGDRAANSALYIAAITRMRHHEPTRAYFARRTAEGLTKREIIRCLKRYIAREVFAALPDVDHRSPSKPLDTT

SEQ ID NO: 135358 - protein, 318 aa, unidentified
MSVYVGIDVSKQTLDIATYPASQPLRLPNTTTGYQQLHAWLQHHDEITQIGLEASGRYGEAVTDFLVAQNYAVSYLNPRQVHAFSQVHLHYHKTDAQDAQLIARYCALFHPDLYRPRSTLRKHLQQRSRRLDQLKKMRQQEVNRLQSGLQDVFTQHQIKATIAYFDTLIEQTRAAVHAFIVNDDRLAHQHRLLLSIPGIGSTTADLILAEIDIDHFQTAPQLAAYIGITPQHFQSGTSVNKPATISKQGNARLRSGLYMPAVVAQRYNPPCHRFAGRLKAKQKHAMVVVIAVMRKLVHQIFGILKSNQPFDPDFGQIP

SEQ ID NO: 135359 - protein, 346 aa, unidentified
MVIVGCDFHPSWQQVSFFDSTTGEVQERKLVHGNGEAEQFYRSLPAGSLVGLESCGNSQWFVELVERLDHQVWVGDAAQIRASYVRKQKTDRRDAAHILKLLLEGRFPRVWRPDAEVRDLRQLLIHRHRLVEIRTRVKNGLQHLALNRGMQKKRTLWSAAGQKAFGELRLEGWAGCRREDLQRLRGMLEEQIGKLDAAVEQAAFADEQARLLMTQPGVGPVTALAFVLTIGDVSRFPRGKQVASYLGLIPSEHSSGGKQRLGAISKQGNSLVRMLLVEAAQTAVRLDEGFRKQYQHRCHSKPKGVAKVAAARRLAVRLYWMLRSKVAYPEIVHVESSSRCPMAGAS

SEQ ID NO: 135360 - protein, 316 aa, unidentified
MSATPCFVGIDGAKAHLDIALRPTGERWAVANDDVGIAALVERLQALQPTLIVLEATGGYQRAVVAALAAARLPVAVVNPRQARDFAKATGQLAKTDALDARALAHFAEAVRPTPRPLPDAQADALRALLARRRQLVAMRTAEQNRLGNAPPRLQTDIQAHITWLNTRLAALDDDLDTTLRTSPVWREREDLLRSVPGIGPVCTRTLLLDLPELGTLSRQRLATLVGVAPLNRDSGTLRGSRTIWGGRAHVRTALYMSTLVAVRYNPMLKAFYERLRAKGKAAKVALTACMRKLLTILNAMVKHHTPWQVQEVPNA

SEQ ID NO: 135361 - protein, 461 aa, unidentified
MPGAEQRLLGLAAAESPVGSFAPRAPVQGRRWLRQATYFLSRRLQLLEHTRRLFAGIDWGTETHHVCVVNPDAQIVEDRKVPHSASGLAEFVRWLSAMRQDSAASVVVAIEVPHGAVVEVLLEHGFEVFSINPKQLDRFRDRYFPSGAKDDGRDAFVLADSLRTDQHCFRAVCVSDPRIIRLRELTRLDEELNFCFQRHSAQLRQQLQRYFPHVLELSRTADEPWIWALLELAPTPAKAAKLTVKRIEKLLCQCKIRRIEAAQVAAALRGPTFSLSEGTVEAAGDHVLMLLPHLRLLHQQRLAVAARTERLLDELSITKESQPPSDVQVLLSLPGVGRIVTATLLAEASHLIAERDYHALRAHAGVAPVTRQSGKRTAVLMRYGCNVRLRNALYHWSRVSMQNDPRSREHYHRLRAKGHSHGRALRGLADRLLALLFAMLKSQTLFDPALRRAAISSANSA

SEQ ID NO: 135362 - protein, 370 aa, unidentified
METDSKSKETAAMTENISETIGCDLGDKKSEIRVFAANGEMVERASVRTTRQGMTGFFKRRAPAHVVIEVGAQSRWVSELLVELGHRVTVANPRRVKLISQNDDKDDPVDAELLGRLGRVDVKLLAPVKHRGSQAQMDLAVPKARDLLVGMRTKLVNHVRSTVKTLGERLPRCSAESFGRSTRGLIPTALKAALEPMYQVLERIDEQIREQDKMIERLGKRYPDVAVVAQVSGVGTLTALVFVLTVEDKERFRSSRMLGAYFGLRPRRRKSGDSDPQLRITKAGDPFVRRLLVNAANYILGPFAPESDLRRWGLELAKRGGKNAKKRAKVAVARKLAVLMHRLWVTGEVYQATGYQQHQTEEKAEEKAVA

SEQ ID NO: 135363 - protein, 355 aa, unidentified
MNSEKYIGLDVHQATIVVAVTDSTGKLVMESILETEAATILQFFAGLRGNLAVTFEEGTWSAWLYDLLNPHVEKLVVCNPRKNALLKDGNKSDHIDARKLAELLRGNQLKPVYHGENGVRMLRELSRSYLAIVKDLSRVMNRLKAVYRSWAIPCAGRDVYYRRHRAQWLDKIREAGVRRRAERLYEQLDMLQHLRQQARRELLAESRKHAITARLRQIPYLGPIRSALAVALMQTPHRFRSKRQLWAYSGLALETRISAEYRMVEGQVRRSKKLLSIRGLNKDHNHDLKGLFKGAATMASVRPGPFQDFYQAALAKGIKPTMARLTLARKIAAITLTLWKKGENFDAEKLKSQAA

SEQ ID NO: 135364 - protein, 414 aa, unidentified
MAKELDKGGGLDIHKKSVAAAIASEDGSILEAEFGMTIEQIYHLKKWLLENGCKRVLVESTASYWYRIDQVMRDEITVIVVNPRDIKSPSSKKTDKIDARKLASRCLSNYEIHPSRKFTSEQLGLKRLTRSRQQYVQTRSKLKNQIHKVLDAAGITLSIFVSDIFGVSGRYILNCLVARKSLKELIPGIPTNRIRKRAQELPERITVQLDDTQAFLIGKALHTMDDIQKTIDEIDALLYERADAYIDDLKILMSVPGIKFIAAITILAEVGNYKDFGDGDQLACYAGLTPDVKNSAERNIIGKITKHGPKGLRWILNQVAHGASKTKNSRLRKVYLRLLRRKGKPKAITALSRKILSIIHHLLVNREMWEEEGFKKKRLDFDFDGKSSSSQLTWLDLVVNNVVRIGEGKPGSGG

SEQ ID NO: 135365 - protein, 443 aa, unidentified
MSFDRLKRTQRRKRLPGHKLKPSRATLFVQNSKPHLSMKPTYFLGIDAAKHKMRAALSNRSEHVLFEKDLPVQATGLRQLLAAIKRQVKDPEQLLVLIEATGLLHLNWSTALTKAGYAVAVINPLIARRLYTLQNSIRDNKSDPIDARGLCTIGLLHGEKLLAHYRFSLRPEQFTLQRAQSVRKALRSALTNLKKTYQSLMDLSFPELGGLLQLDGVGIRQLLIQAPTPAAIASKRLSTLEKNWMVRPKAAALKALAADSMADPDLAAASGPALVALLEAVAAMEARLHALDLQIAELACTSVDPQTKALIETIPGFGPVNAAKTLAWLPTEILHSGSNRKVAARLQAFMGNDPRLRQSGQWKGHTKMSKRGVEMLRTAFFQSAFSAAHNDPELRTYYQCKRAQGKTHEVALSHLMRILTRRLVAVLRSGKPYQSHYNLKNAA

SEQ ID NO: 135366 - protein, 409 aa, unidentified
MELTPLYKRVIGLDVHQAKITACAIIEHPDGRVEVVLREFGAFKRDRRALAQWAREIAPEVVVMESTGVYWKSPYAALEQVGIAAWVVNARHVKTVPGRKTDIADAQWLATLARAGLLRGSFIPPTQMRELRLVSRQRQKLVSQCSAEKNRLHKILTDAGIRLNVVVSDIHGKAARTMIKALIDGRPLHEVLDRKGRLRASREELFETLGSERFSPAHRFVAAEVLAHIEELEQRIARMDQYLLEGLKEYEALLTLLQTIPGIDRQGAAMLLVEIGADMSVFSSAEHIASWVGICPGNNESAGKRKSGRIRRGNPWVRRLLCEFAQAAARTRCGLKAKFESLMIRKGYKKAIVALAHKLLRIIYAMLRDRTYYQDSTIDYEALTVARNAPRWLKMLRKHGFITDQAVSA

SEQ ID NO: 135367 - protein, 341 aa, unidentified
MKVSTLGIDLAKNVFQLHGVDHEGHTILRKKLTRAKFVQFVIQLEPCLIGMEACSSSHYFARLFTRYGHEVKLIPPQYVKPYVKTNKTDAADAEAICEAVTRPNMRFVQIKTEEQQAVLALHTERGILIRERIACANSLRATLAEFGITIAAGQNHLTRELPAILEDGENGLSPFVRTSIYRQSKHIRELEEQVKQVEEALASWYRTQEACQRMAKIPGVGMLTATYVVAAVGNARQFSTAKQFASWLGLTPKEHSSGGKQQLGGISKRGDGYFRYLLVHGARALTAWVNRNGAVEENSWLQGLLERKHYNVAVVAMAAKTARIMWSMLSHNTEYQPRQLA

SEQ ID NO: 135368 - protein, 441 aa, unidentified
MSVLRARIPDCPHCATLPITIKPRRGERTLYSRVNISCGLDVHKSSISGAILKSNGSFETHQFSTSFDGLLSLKEWIVTNHCERVLMEATGVYWIPVYSVLEPHVDVHVVNPLFIKYVPGRKTDTLDSVWIGEIALNGMFKASYIPPRNIRELRELTRTYRKLIEERTNHKNRIHKILVRNGIRLSDVLSDIFGKSGMIIINGLIEGKPIDQTLKMIHNSRILKKKDEIKRTICGEISENDLFVIRQSIECISQHDCQIAQYEDRILKNITPDKGNIEILVSIPGIGFTIGSSILAEIGNIRQFDNSKQLVSWSGLSPAVYESAGKTAHGHITKRGSKYLRTMLIEAAQSIARGKPNRLKHFFSRIQSRKGYKKAIVALARKLLSIIHHLLSNHEKYVEPSGKEKKITLPVIYPDPVIGHDEMIHILTQAGYIVHKSNPDI

SEQ ID NO: 135369 - protein, 305 aa, unidentified
MFNRFIGVDVAKAKVDVFLSETGELLQIKNIETDLKRFVQSLERTEETLVVIDLTGGYETQCVKAFYQAGFTIHRAEGRKVKAFMRACGQLAKTDSIDARALADYGKRLQDKLTLFQPVDNEIKPYVMRLNELKQLLQMEKNRLQSPQTDNKIYEQISRHIAFLKTEINFLAKELQQIIEKMPQLHQKQKVLTSQIGIGETTANLLLALLPELGYLPRRKIAALAGLAPYAKDSGTLNAARHVYGGRKEVKRALFICALTAIKRDKEMKRFYEKLLKNGKKKMVALVAVMRKLIIILNAKCKKLN

SEQ ID NO: 135370 - protein, 447 aa, unidentified
MNTRNLNSGAFELMHPNAAGIDIASQMHYIAVPMDRAEQSVRKFGSFTEDLHEMARWLKSCNIDTVAMESTGVYWVQPFLVLEEYGFDVFLVNARYIKNVSGRKSDVKDCQWIQQLHSYGLLNKSFQPEELIRELRTYVRQRKNLTQNSATQIQLIQKAFDQMNIKLHNVISDITGKSGRLIIDAILRGERDAGILAEFADIRIKASKEDVVKSLQGIWRQDNLFELKQAYELYQIFKDKIMECDNQIETVLQRLVNDSDKAQNKKENRKTKSKNKFSFNATDYLNIITGVNLTDIFGISELTVTEIVSEIGTDMSKWATEKNFTSWLNLAPNTRTSGGKRLKGKSIKKINKAGQAFRIAASTLKASNNWLGEFYRRIKAKSGTPVAIKATARKLAIIFYKMLKDKVDFNPLPIEEYNQCFKERKLKYINKQATNYGLKLVPVDFVS

SEQ ID NO: 135371 - protein, 414 aa, unidentified
MGLPRWVGRAIGLDVHRDFCVVAICEDGVTRSAGRVPSTPEGIAALAESLLPSDRVALEVTGGCWEVARILEPHVNRVVVVSPDDTGISSARAKTDKLDARTLASLLWKGELEAVWMPDERCRILRRRLARREQLMRARTRAKNEIHAVLQRRLQERPPCSDLFGVKGRRWLAGLELPLEERESVDAGIRQIEFLDVEIGAVERLIAQQALSWPEIRRLMTVPGVNLVCAATFIAAVGNANRFLTSRKLVAYLGLDPKVRQSGEAPARSGRISKRGSASARWALVEAAWTAVLQPGPLHAFYERTKARRGHGKAIVATARKLAILFWCMLNRSEDYAHQQPSLTRKKLRRLEITAGAPKNTRRAAGVWSTNDLMRVAERELAEQAEASYKRMVTDQQAGAPAKKAGAGVTLERA

SEQ ID NO: 135372 - protein, 425 aa, unidentified
MDNSKAIAIPNFIPTLYAQASANFAILDVTRWDEKSRSPERDAISSQVIHALEAQENKETGMKKISTTTAKAFRKMEKLTIGLDLGDRSSCYCVLDERGELVLEQKVSTTPKAMGEVFGGMPRSRIALETGTHSPWVSRLLSELGHEVIVAHARNVRLIGESRRKDDRLDAKTLARLARIDPQLLCPVKHRSAKAQAHLTVIRARAGLVRARTALINVARGLTKSYGERLRGCSPRNLNKRAEGLSVELRTALGPLLEEIESLSERIREYNQRIEGIAQEHYPETALLKQVKGVGTLVALTYMLTLEDPHRFSKSRDAGCYAGLQPGRRNSGQSQPQMRISKEGDAYLRGLLVQSAHHILGPFGADSDLRRWGLKLAERGGKNGKKRAIVATARKLAVLLHRLWVSGEVYEPFYSSSRRVLVAAA

SEQ ID NO: 135373 - protein, 342 aa, unidentified
MEQVSVVGLDLAKSVFQVHGVNAQGEAVLRRKLSRGQLLKLFEKLPPCLVGMEACASAHHWARELAALGHEVKLMPAQYVKPYVKRCKNDAADAEAICEAVTRPTMRFVGAKSPDQQATMMLHRVRKILTRQRTQISNALRAHMAEFGITAAIGRGGLDRLIAVIADQEDARLPDEARACLGVLCTQLEMVKEQILDNDRRILADARKTEAGRRLMKIPGIGPLLASAIVACVPDPATFSNARSLSAWIGLTPRQNSSGGKERLGSITKAGNTYLRELLVVGAMAVVRRAKQGSTKRPWVTQLLARKKPKVAAVALANKNARIIWAMLATGEPYREPELAAA

SEQ ID NO: 135374 - protein, 468 aa, unidentified
MKNYYLGIDVSKGYSDFVLLNEKKQTVLESFQLDDTFEGHNKLFKILSEFFTQQPDTKIFAAVESTGGYENNWYHLLHKYQGQLNLSVARLNPYGVNYNSKADLKRIKTDAISAVSIAEYLISHPEKVSYQTEDPFASLRRQWTFIKMLTKQRVQLLNQLESLLYVANTEILYHCRNKVNLWTLKLLKQYPTAKHLAKARVSTISKIPYITETLAKELINKAKHSVASETDETIAEIITATVNQILSLRKTICLQVKKLQSSCNLPEVALLKSFSGIADYSAVGLIIEIGSVERFSSVKKLACFFGVHPVFSQSGDKISGYRMSKRGRKEPRQILFNVARFAIVHNPLIKEIYIDHLKKGMSKMAAIGAIMHKILRIVYGILKNNTPFNPEIDRANRLRNLSKKKDESLVVNKMLEPIDCKAPVSRRQLKKRKGQEKSQNLKPLNAEQIVSVFAGSDSRSFPFASTQS

SEQ ID NO: 135375 - protein, 361 aa, unidentified
MKLSAALDTSSTKTAICVVNSRDGAVVFEASVLTDPAIIFEALAPYLPRLDKVGHEAGSVAPWLHRELVSLGLPMVLLETRQAAAALEAQRNKTDKNDARGLAHLVRAGWYRPVHVKSQESHKIRLLLGHRRTLKRKLLDIENEIRQSLKVFGLMVGPRVQRATFVARVHELVACDRLIAGVTDCMLRAWEALWTEYKKLHHLLVQMVGRDELCRRFCAIPGVGPVTALTFKAAIDDPHRFSKSKTVGAHFGLTSRRIQTGTSIDIEGHISKCGDGEVRTVLYEAASAMLVRSKQWCGIKAWGVRIAAKRGHKRAVVAVARKLAVVMHRMWIDGSVFRFAAEDESAAEPTFNNPTALAAAM

SEQ ID NO: 135376 - protein, 393 aa, unidentified
MIYVGVDVASKKHDIIILNEVGEIFNKHFTIPNSMEGYKKLLSEINLAKEFFNDSQVRIGLESTGHYSRNILHFLILKGYSVTLINPLLTNMDRKASSVRKTKTDSIDAKAICMFLLRNQNDFKPYTLLSYHIDELKILVRQRKSLKKQLNRTMNQLHAFIDQAFPEYYKVFKKINSISSLKLLAHYASISEFKRVRVNTLAQLVKKASKGHHGLNKAQLIKSFIKDSIGIDSCALSLSIKHSVNMIEEINYQINQINISIKDHIDNSNTTLLSIPGIGYQTGAIILAEIGDIHRFKSDDELLAYAGLDPSVYQSGNYNGSFKISKRGSSILRWAIFQAAKIAVIHDPVFNDYYLKKLSEGKHYLTVIGHVTKKLLRVVRSILKNNSVYSISH

SEQ ID NO: 135377 - protein, 391 aa, unidentified
MSDVRSSVSAKTTRTWVALDVHKDSIAAGILSAEGGTPEVVQLENSERAIRRFARRLGDPGKLAVCYEAGPCGYDLYRLLTSIDVACDIIAPSLTPVRPGDRVKTDRRDAVKLVRLYRAGELSFVCPPTPLQEGLRDFVRCRDDLRCARTAARQRIGKQLLRYGRVFREGRRTWTQRYGVWLRHQRLDDHLAQASLEQMLCHLSALDAQLLAIDAQLDEIAREEPWREAVVALTCFRGISTLTALSLLAEIGDFQRFASARELMSFVGLTVSEYSSGARRTRGSITKTGNRHVRRLLVEAAWHYQHPPRLSARIRAHEGVVAPEILARAWQAQIRLHHRHRHLTGNGKPATVATIAVARELCGFLWATMTDQPLRGSPPEEHRPSKEVLVA

SEQ ID NO: 135378 - protein, 364 aa, unidentified
MQEPTHIGLDVHKETIAVAVLRAGTVECDERVIPNTPEALRKLLSRYPDRSLLQTCYEAGPTGYDTQRLITSLGIACDVIAPSLIPRRSGVRVKTDRTDARNLARLHRAGELVAVRVPTPAEEALRDLVRAREDLKNDRRIARQRIRSFLLRYGKRYPAPGSRWSFRFEVWMRALRFDEPASQAAFDHLVGAYFVRDSQLGAVDAQITELALLEPLAEPVARLRAFRGIDTLTAVTLLTETCDFRRFATAGSYMAFTGLTPSEHSSGASRHQGSITKSGNAHIRRVLVEAAWAYRYAPAVRGKLRARQIGQPPEVVAYSWAAQCRLHGTYRRLAAKKGPNKAVVAVARELAGFVWGAMTDNMAV

SEQ ID NO: 135379 - protein, 419 aa, unidentified
MKVVYPICCGVDVHKTFIIATIIKTEGITPKYARKRFSTFNNDILRFKQWLLDNDCRDVCMESTGKYWVPVYNLLEDEINVVVASPKWVRAVKGNKDDKKDSKWIGDLFRLGLVPGSFIPPKPIRVLREYTRYRYKLVSCKSSEKNRYQNSFTVCNVALDSVVSDMFGKSASLITDYLIQTDDFDPEHCKSLLQRTLKKKADEVIDSIAGYKIDPAQKERMVMVKSHLRYVEKAIETMDAGIDTLVEPYEDKISLLCSIPGVDRRSAITIISEIGTDINQFTHSKCLCCWAGLTPGNNESAGKKKSVRITRAGVYLKPALVQVAHAAVKSIESPYYRNKYQRISKRRGKKRAIIAIARMILTAVYHMFKTGELWNPTDLFKVDLPPVLMERQKQKAIQNAIKLLASEGITLTANTHPAA

SEQ ID NO: 135380 - protein, 326 aa, unidentified
MAKSITICAGIDTGKRKLDVAIDGSPERLQVENTSEGHRALVEWLRGHRVRRVGIEASGGYEQAVVAELRRKRFVVVVFQPAQVRAYARFKLQRAKNDKIDAALIAACTAAVKKIHPAPDPRLLPFAEHLTMIDQIGEDISRLKNRLETCRDERIRQAWKQEIARLEKNERIELKALVMAIRRHSDLAKRLDLIHSVSGAGLPTAVAVLVRMPEVGQISREQVAALAGLAPYDDDSGDQVGARHIWGGRERLRRALFAAALPAAMRWNPQLIAFYKRLIAAGKEHKRALIACARKLLIFINTVVARGTPWQDKPEAAAIAASPSTA

SEQ ID NO: 135381 - protein, 389 aa, unidentified
MLFDHPSDGPAAIRTHIGAIFVSLELSRSNWLVTSLSPGKGEKMSKHGVTAGDVAGLMKLFAGFKRKAAIRTGQNYPIITIQEAGLDGFWLHRVLQQERIESHVVDPASIAMPRRRRRAKTDRLDGETLLRALLAYKRGEPRVCAMVVAPSPEEEDRRRLCRERATLIAERITHVNRIKGLLFSQGISDYAPLRRDRQLRLETLRTGDGRELPPHVRAQIGRELERIELLLEQIKAVEAERDVLLAAARKPASEQAAPDAVTMLLALKGMGANFAAVLWSEAFYRQFANRRQVAAYAGLAATPWQSGGIRHEQGVSKAGNPRLRTTMIQVAWLWTRHQPQSALTRWFKERSPQGRKRAIVALARKLLVALWKYVTQGVVIEGAVMKPAA

SEQ ID NO: 135382 - protein, 401 aa, unidentified
MQENQQHSSVDVFVGVDVGKGHHHAVALDRTGKRLYNKALPNDEAKLRALINELKTHGKLLFVVDQPATIGALPVAVARDEGVLVAYLPGLAMRRIADLHAGEAKTDARDAAIIAEAARSMPHTLRSLRLADEPLAELTMLCGFDDDLAAQITQTSNRIRGLLTQIHPALERVLGPRLDHPAVLDLLERYPSPALLASASEKTLANRLIKLAPRMGKGLAAEIVQALSEQAVVVPGTQAATLVMPRLAQQLAALRKQRDEIAREVERLVIEHPLWPVLNSMPGVGVRTAARLLTEVAHKAFASAAHLAAYAGLAPVTRRSGSSIRGEHPSRRGNKVLKRALFLSAFAALRDPVSRDYYARKIQQGKRHNQALIALARRRCDVLFAMLRDGTIYQPKTAPNA

SEQ ID NO: 135383 - protein, 338 aa, unidentified
MKATMIGLDIAKSVFQVHIEGAGEAPVRKRLGRAAMERFFATLPPAVIGIEACGTSHYWGRTLRALGHEVRLVPAAYVKPFVKRNKTDARDAAAICEAMQRPDMRLVAVKSVEQQAARGIETARELLVKQRTQLHNAMRALMAEFGLVAAQGRRGLATLVAALDAGDGALPAAVRPALGALRDQAAALDASIDALEAQIVARAKADAVMRRLTTVPGIGALGAHAIVAAIGLGHQFGSARDFAAWAGLTPLEQQSANKRRKGGISRQGDPGVRRLLVLGASAVMRQRRIKPERATEWQRGILARRPVKVAVVAQAAKTARIAWAMLRSGENYREAPAA

SEQ ID NO: 135384 - protein, 469 aa, unidentified
MDLLKLPIYTFYCKFLDVEERFMKKVFVGIDIGKGKDSIHVIDILGNPIIKKGFDIQNDYYGFIKLRDRLDLILKNLNLTYDDCLVGFESTGHYWFNVRDYLNDINIDTVMVKGDKVKHRRALEEGQKGKNDTLDARVIASCLRNNNYVLIRNDERALRALKKLTRMRDNQTKDLVSLKNKIHRCIDICNPVFFKIFGNLNSKTGLELMKLYPSPKDIINVDLLDIKEKLRVNVSRPNLRMVNLYKEECESWVHIVKEPTYAEKIEMVMYINKYFLEKEYKEELDKEIRKIAKDLFPLYSEFEKIKGIPMIQLISVLSEIGDISNFKNTRALLGFLGLTVIGKMSGQYVGEIKINKAGSRIVRKHLFNIMESLIKHNEYFRVSYCYYKSYRHKDPTKKREMQIAVMCKFVRVMYGMLKYNASFDYKEMMKGYYFGDCNMQVFKEEFEGENRRKKIENCKLAYDIYTIYS

SEQ ID NO: 135385 - protein, 343 aa, unidentified
MAIFVGLDVSLKMTSICIIDADGTLVWQGKVLSEPPALIMALWPYRDRIKLVGIEACPLSEWLYAALVESGIPTVCIETRHAQRFLSSRPNKTDKSDAHGIGEMMRLGHFRPVHVKSKASLMLRTILGARQNFVGHMIAVEQTIRGLLKVHGLKVGAVHRCAFAARIECLLADAPELRIAIAPLLETRNMMRKQQALLDRQMSQLARKDDVCKRLMTISGVGPIVSLAFKAAIDDPARFRSSKAVAAHLGLTPRIYQSGEIDRSGNISKCGDTAMRHALYEAANSHLRVSKKWSPLRAWGVKLAKRIGAKKACVAVARKLAIIMHRMWVDGTEFHFSKAPTTA

SEQ ID NO: 135386 - protein, 381 aa, unidentified
MIIIGVDFHPEFQQMASVDTDTGEFQEKRLTHREEAEKFYRALIGKKVRVGMEASGHARWFERLLSELRFELNIGDAAEIRSKRVRKQKTDRQDARLILQLLMEDRFPRIWVPSWENRDLRQLLWHRHRMVQARTRIMNQLQAVALNEGLRCKKRLWRDAGREQLESFALAPWASRRRRDLLELLDRLTPTIAELTQAIEGEVEKCPEARRLQTHPGVGALTALAFVLIIGRAERFQCGKQIASYLGLVPLEESSGNRRRLGHITKQGNSLLRFLLVEAAQVTVRSDQEWRNKYFHLALRRGRKIAKVAMARRLAVRMYWMWRKGWNYEQLKKFGSQGRKSGSHAGVPTASIRYPRLRSSRIIRLVRLRLDFAFTAGPRSS

SEQ ID NO: 135387 - protein, 361 aa, unidentified
MFIERTSVGLDVHARSVMACGVDTVTGQVVRRRLVPSAEAVLDWLRELPGPVAVAYEAGPTGFGLARQLTGAGVRCVVAAPSKLQRPAADRIKTDARDALLLARLLRMDEIVEVRVPGVAEEAARDLVRAREDVRGDLMRSRHRLSKLLLRHGIVYYGGPTWNGVHEAWLRGQHFGQRGIQLAFDAELEAMLLALDRRGRLDKAITEMAGHSQYTALVHRLGCLRGVSTLTAFGLAVEVGDWHRFTGATIGAYLGLVPTESSSGQQRSQGSITKAGNAHARRLLVEAAWHHRRDYRNPGAAMRARWNLASPAAKARGHAGNHRLHQRWQTFLARKKKTVIANVAIARELAGWCWSLAVLDD

SEQ ID NO: 135388 - protein, 416 aa, unidentified
MFMDIRSPLPYQARVGIDWADQEHEVFVRFASGDSYRRKIDSRPEAIQGWLLELRSACAEGKIAIALEQRRGALFYHLCTHLNWIDLYPINPHSLASFRKTFFSSRAKDDPVDSQLLEELVRTHSDRLRPYQPESPTERKLDLYCRHRRSLLDLATKTELKLISTLKQYFPLAVNLFAAVGMKSDIALNFLSRWPTLDELRRAKLHTVRSFFYAHNSRSQSLIEKRLQQISEAHNVTDDFALIEPLVLTTKCLVGQLRQFNQAIKEFDRKIKELFKSHPDHFLFESLPGAGEQLAPRLLSLFGSDRSRWADATDIQKYSGIAPVIERSGKSLWIHRRLSRPIFICQTFHEFAQQSTRFSSWADQLRARGKSHHSAIRALAFKWIRIIYACWKANKPYDESLYVQAIEKRNFSISSN

SEQ ID NO: 135389 - protein, 323 aa, unidentified
MSSSSKVTTKAYVGIDISAEHLDLHVLPTEQHQSFNHDNSGVRKLVGFLQPLQPTLIVVEATGKLEIGLVVALAAAQLPLVVVNPRQARDFARGLGRLAKTDRIDAHVLARFAESVHPEPRVLPSEQQQAMQELVTRQRQLVEMRVAESNRLSRTRTTRVRRNLQIHLDWLDQQIRDLDQQIRQLITQSPLWREKDQLLQSVPGVGPKMSSMLVAHLPELGRLNRHQIASLVGLAPFNRDSGKWKGKRFIGGGRSHVRCTLYMSSLVASRHNPAIQALRQRLQSRGKPFKVVLTACMRKLLTILNAMVKNGTPWDATFSRHFA

SEQ ID NO: 135390 - protein, 360 aa, unidentified
MKRVSTKSVSVVSGKKVFIGIDVHKDSWHVTARTDGEEVFNGRIPASYHSFMKLLERFRDCQIRVAYEAGPCGFSLYDELIEDGIATIVVPPSLIPIESGNRVKTDKRDSRKLARLLEGDMLKKVFVLTEEERMHRELVRTRRQLVGHRGSVARQIKSKLLFYNISSPFPSRYGWGRPYLQWLRGIVCQSQYLKESFEILIDLYEYLTKEIKRITKSVIDLSRIDKYAERMRLIRSIPGIGILTGMEILVEVQDFARFKTSEEIASYIGLTPSEYSTGPYIRQGRITRCGNTRVRVALIESSWILVGRDPCMRAKYLKLKSSKGAKRAIVAIARKLIIRIRAMLLHNAPYRVGGSILQAA

SEQ ID NO: 135391 - protein, 395 aa, unidentified
MFIVGVDIAKRSHEAIIIAEDGQVVRKAFSFRNNCTGYNLLLEQVRRLTLVKSQIVFAMESTAHYWLALYARLLKDGYAVMVLNPIQSHSLRELYIRKAKTDARDSLIIADLVRFGRCKASNVPQDKILALRELCRSRAYLVDMAADLKRKLIALLDRIFPEYESLFESVFSKASIAVLSKYSTPQKVKNAHLGKLTDILMESSNGHFGEWKAHQLKETACSSFGIDDSGGVYSTLLGMFLEQILSLTAQADSLEKQISVFFQEFNNPLTSIPGVGTVLAATILSEIGDITHFSSADKLLAYAGLDPSVKQSGEFKSNQNRMSKRGSPYLRRAIWLASTAAVHRDPMFQTYYEKKISEGLHYMNVIGHVSRKMTAVIFAVLRDGQPYQPVLQTAD

SEQ ID NO: 135392 - protein, 415 aa, unidentified
MKFTKDASGIKRYIAFDIHKEYALVGGQNAQQEWVMQPRRIGIEKLREWAKANLRTGDAVVIETTTNVWDVYDIVEPLVSYVVVAHAGGVRQIAEARVKTDKKDIERLIRLLIADIVPEVWVPPVEVRELRGMISYRNRLVKTSTMIRNRLQSLVHRHNLILPKGMLRDKGWWEAQQVSALEKIQIRQELAMLDEIEKHKGEVDAELGCQSLGEVWGKRAMRLLQLSGFGVIVSMTVLSAIGDVSRFESAKKLVGYSGLGAGVHDSGKEHIEKRITKSGRKELRWALVEAAWRAIRISPYWKEQYEKYLRRMRKPNQAIVVIARKMLVVVWHVLTKQETDEHVSEEDLAYKMLVLAWDLDENVRMGLTYKQFAKYALMKLGVETDITRFVRKNVARRVAPKAEVLARMEELGLTC

SEQ ID NO: 135393 - protein, 338 aa, unidentified
METYAGIDLHSSNNFIGVINDKDKILYGKRHQNRLDDVLRALDPFKDSLQGVVVESTFNWYWLVDGLQDHGYEVHLANPSAIQQYEGLKHTDDPWDSVWLAHMQRLGILPEGYIYPKEHRAVRDLLRRRLLFVRHSTAHILSLQSMINRNLGFKISNNEIKKLKPADIESLFDCSNLVFMANNNLAAIEFLKKIIKDIEKKVKSQVKMRKEFEMLLTIPGIGNILGLTIMLEVGDIARFVKVGDYSSYCRCVESKRLSNGKKKGENNKKNGNKYLAWAYVEAAQFARRYCVKAQSFYQSKEAKTKPVVAIKALSNKLSKASYYIMRDQVAFDEDKLFS

SEQ ID NO: 135394 - protein, 394 aa, unidentified
MILVGIDIGKNKHTFSIIDKETGEILSNPSVFNNNQDGFLLFIQKLKHYPKAELLIGMEDTGHYHFALLKYLLDSHYTVALINPTTTDLTRKLQGGITKNDPLDSLTICDVISSNQRKKPYRITKVNRFDLYEQKQLTRHHHNLKEELNTYKNRLQKCIDIVFPEFNSLFHSKYGIVYMNVLKTFASAEKIANSDIQTIQQCFEYKGRGNRISLSAEQLKTAAKVSVGLPSIAEEIQIRHLVCQIELIEEQLSEIDKKIEEFSLQNNSPILSIPGISHFSGTSILAELGDICNYTKASQIIKFAGVAPYHYESSQFTAQHTAITKKGSKYLRKTLYQVILPVINHNKVFTAYYNKKLAEGKGHRCAQGHCIRKLLRIIYHLLSTGQTFESALLI

SEQ ID NO: 135395 - protein, 311 aa, unidentified
MQELFIGVDVAKGWLDIHQPGAGARRIDNTPGAARSFAKACIKDGAWVIFEASGGYDRVLREALETANVPFSRVNPRQARDFARAMGVIGKTDRVDAWMLSELGARLRPAATEPLAAARRALQAQATRRRQLVAMRKQEATRLQQTADAEARADIRSLLVVLDRRIAKIEERMTALVAADPEMAVIDRRLRTIPGVGAVVAATLIAELPELGQLDRRRIASLVGLAPVARDSGKRSAPRAIAGGRPIVRTVLYIAALHASRWCQAFKEFRARLQTAGKPVKAALIATARKLLVTLNAMIATGTDYEPPEAA

SEQ ID NO: 135396 - protein, 443 aa, unidentified
MTPAPYDLIIGLDRADKKADLCLIETATGQRRCAVVDTAPEALCEWLAELRQQHPTARVGLCLEQPAVHLIPFLEAYAWITLHPINPITLQKYREAFVTSRAKDDTQDAEFLADLLLHHHAQLPVWAPQDSATRAVQQLVAHRRAVVDERTALSNRLIALLKQYFPQALTLCGDDLWRPLATAFLLKWPSLGAVQQAKPATVKQFYYLHGSRSQNLIAERLALVAKAVPVTDETAVIASFVLRVQLLARELQAVQRTIAEFDRQIAAAYAAHPDHGLFASLPGAGPVLGPRLLASLGADRERFADSAAQLQCYTGVAPVTKRSGGSERIHRRYCCPKFHRQSFHEYAKESVLWSRWAAAFYLQQRTKGCPHHTAVRALAFKWQRVIWRCWQDRKPYDEARYEAALRQAGSPVVTLLDRVELGKSPWKNPVKKSEKTVDGLPQR

SEQ ID NO: 135397 - protein, 371 aa, unidentified
MKQDNTKFIGMDVHKNTVSIAIADGSRKGELRSYGTIPNDIKSIDKFIRKQISMGNKLHVVYEAGPNGYGIYRHLVGNGIECIVVAPSMIPKKSGVRIKNDRRDALTLARLHRAGELDAIYVPDPEDEAIRDLLRGRDDARIAVRKAKQRLLSFLLRHGVIYTAKTKWTTAHFNWLSDVKMGHPAQQITLQEYIDSVHESKQRVTRLTQVVTATVKTWRMRPVVLAIQALRGVSELTAAIVVAEVGSLERFSTPTKLMAYLGLVPSEHSTGQTIKRGGITKAGNGYARRALVEASWTYRFPARVTRHLLKRSRDLPRNIQDIAWKAQLRLCSRYKRLIAKGKPTQVVTTAIARELIAFIWAISQEVKISTK

SEQ ID NO: 135398 - protein, 320 aa, unidentified
MTTFVGVDIASQKFDVAVLYEKSKYKHKTFPNSTQGFCEFVDWLQPYNNVHVCMEATGAYSTPLATHLHESDITVSVENPARIHAFAQSELTRNKTDRNDAKMIARYCCLYQPPLWKPAPPDIRQLLALMTRLDALKEMRRMELNRILVAAPIITNSLQKNIDSLSVQIEEIQQTVKEHVNNNKALKRNKELLKSIPGVGDILSYTFLAYTGDVSRFSNNKKLVAWVGLNPMLQESGLWKGRSKISKKGNIELRKALYMPAVAALTHNSVFIAFKKRLQQNGKSGKSIVCAGMKKLLQIMYGVLKSGVPFDEKYSLPNKF

SEQ ID NO: 135399 - protein, 458 aa, unidentified
MTGKNKPVQSRGMSPVHPRAAAIDVGAKMHVAAVGPDRASEPVRTFGTFTDDLVRLADWFQECGIRTIAMESTGVYWIPVFEMLEQRGFEVLLVNARDAKHVPGRKTDVSDAQWLQRLHEFGLLRASFLPKGEIAALRAYLRQRERLVELSASHIQHMQKALMQMNVQVHHVVSDITGVTGRRILRAIVTGERDPGVLAANRDRRCRADVETIQRALTGNWRAEHLFALEQALALYDACQEKVADCDKKIEATLKRIEAQSAKPVGKPPPARSTKRQPNALDFDVRSALHAVLGVDLTQIHGLGPSLALKLVGECGTDLSAWPSAKHFTSWLGLAPSNKISGGKVLSSSTRRTSSRAASLLRLAAVTVGRTDTALGAFYRRLGARIGKAKAVTATARKIAVLFYNALRHGMEYADPGASYYEERYRQRTIDNLQRRAKALGFVLQPSDDTLQAGTGVS

SEQ ID NO: 135400 - protein, 348 aa, unidentified
MALTIVEDTRAVTGGVDTHADMHVAAALDPIGGLLGVEEFPATTAGYARLLGWLGGFGTVGLVGIEGTGSYGAGLARHVTASGIRVVEVDRSDRQDRRRQGKSDPLDAVSAARAAQSGRARGAPKGRDGAVEAIRALMVAKRSARSERVQTNGQARSLIVAGPDDLRTRFARHTAAALVSELAALRPRPGATVGYATRIALRELGRRAEFLDGQLGRLDELIVPMVTARAPALLALHGVGPDTAALLLIAAGDHPHRLRSEAAWAHLCAAAPIPASSGKRTRHRLNPGGNREANHALWRIVITRMSTHAPTRAYVERRTTEGLPEKEIIRCLKRYVAREVYRHLRPAG

SEQ ID NO: 135401 - protein, 413 aa, unidentified
MQDILTCAMGLDIHRDIIVACLIRGELNTKPDSEIRTFTTLHSGMQELRQWVEETECRNVAMESTGIYWQPIYEILESCFDGEIRMLVVNARHMKNVPGRKTDMRDSEWIATLLRAGLLKGSFIPEKEFRELRHLTRYRKCIVHDITKQKNRVDKFLQSSGFRFAAFLADIFGASGRNIIRHLIQHGSIDREGLDFCLKAKARNRMDEILISLNGTLSKHQCAFLKMIFEHLEDLEKHKHFVEDAICEEVKKHSEMFSLLCSIPGIEITSGASILAEIGGDMTAFADSQHICSWAGLSPGNNESAGKRKTAHINKGNAYLKAMLCEVAWVVAGNRKLYLSGWYWKVKQRKGAKRAIIALARKILSLIHTILRTQQPYDEERFDIRRKQCERKRANRMVYELQRLGYTVTLPQT

SEQ ID NO: 135402 - protein, 472 aa, unidentified
MYTLKKAYYKEVSPERIQQAMIMEEKEHGNYNLLRLVSVGNKNTLTGGVTAMHRKNDNRQVEKRQRITDATLVIGMDIGCEFNAMCLMSKEGTILGRYPKIYNSRKGFDYFHGIVESMKEKYGFTDVLIGMEPTGHYWRKIAYFAMDKQYEVRFIRTTALKHQRELDESSSAKNDIRDAYTIANIAREGKYIDTVIEDNIFRQLRTLAHTREKIQRISTGAKHALKGMLEDYFPELKHIFWSMKAKGLWALLEHYPFPEDVLKTDIDTVTELIAQSTRRKIQAHEKALQIYKAAQHSIGLQRVGDADRWRVAAYLSEIRHSETQLKEIGAQMEALLKKIPFAEYILSMPGIGTLTCGVFLGELGNPCNFTNPKQIVKYAGYDPKEHDSGQRTGRRIISKKGRWLLRKYLYFMAMRVVHRSPFLKDYYENKQKTMTKKEALCAVVIKLIKVIFALLRDKRTFTEKQSCLKQAA

SEQ ID NO: 135403 - protein, 409 aa, unidentified
MKKRRQEQNTITLVGMDLHSEKVQLCITRWEHGSDPVPVKELATTVEALAGTYRRQVPAGALTVLEASTNSFHVARRLVSLGHPVKVLRSDVASGLSDKDRINDRIDARNIALAYARRSEGLEVYVPSPQYHEYRDLWFAHRNATKDVTRCRNRIWGFCSQHGLTDLAKARTRRPDRIRKRVRELGWSAEQSFQLETLLLALEFAETMRSRCLARIEKIVAETPAMRRAMTVLGVGVVNAFVLMSFVENIERFENPKRLVRYVGLNPRVCDSGDFEGRHALPRRGRGDLRALLVEAANNALRHGREPMHRWARRKVAAGKPRNLVLCALARKMVVALWHALMGHPVPWREPEACFRHKLLVLARHVGGERLAAMGFASPVDYAKTIADPIYAHLPEKSADKEGKAAKTA

SEQ ID NO: 135404 - protein, 339 aa, unidentified
MNNTNTVGVDLAKNTFHLCIQNNKGNILKKVMLNRPKFKQFLATETSSRVVFESCATSHYWFRVATSYGHTVQLIHPTFVKAFVKTNKNDFNDAEAICEAASRPSMRYVSSKSVDQQDIQLLHRIRQRQVQQRTAISNQIRGQLLEYGLTIPSGISQVKTRLSSYLEEPDNELTALTRVLFNELREELIALNQRISESDKKIKQMAAAHPVCERLMKIPGVGPITATALISTVGKATNFKNGRELSAWLGLVPKQHSTGGKSKLLGISKRGDSYVRTLLVQGAISAMTRCKNKTDNQILWAQKLRAKKGLQKASVALANKMARIIWSVMANDHDYVIMN

SEQ ID NO: 135405 - protein, 343 aa, unidentified
MQAITTIGLDIAKSVFQVHGIDADGRVVIRRQLKRRYVLTFFEKLAPCLIGIEACASSHHWARQLQTLGHTVRLMPPSYVKPYVKRQKNDSTDAEAICEAVTRPNMRFVPTKTVEQQGCLMLHRARHLFIRQQTAVINSIRAYLAEFGIVAPVGRRGVEQLLEVVADTEDRRLPEVARACLAALGSQLRALKSQILEFDRRIISWHRSSATSKRLDAIPGVGPALATALVASIADAKAFRSGRDFSAWVGLVPKQNSSGGKDKLGSISKQGDRYLRSLFTAGALAVIRYAKIHGTGHRPWLTALLVRRPTKVAAIALANKLARMAWAMMARNETYKEPAALAA

SEQ ID NO: 135406 - protein, 374 aa, unidentified
MANIIEAFVAFDTSKLRNAVAIAEAGRAGEVRFLGEIENTEAAVAKLVRKLAAKYGRLTFCYEAGPTGYGLYRQIKSLGHECMVVAPSLILKKPGERVKTNRRDAVNLVKQLRGGDLTAVWVPDPRHEAMRDLTRAREVAVEDLRRKRQQVSAFLLRQGLHYPGERAWTKAHRDWLASQKLEYAEHRIAFEEMLLAMRQAQERIERLEQAIRVAVPDWSLAEVVTALMALRGIDFISATAFLAEVGDLSRFRTPRELMAYLGLVPSEASTGDTVKRGPITKAGNRRARRVLVECSWSYQHPPRVGKEKQERVAAAPRAVREIAWKAQCRLSARYRALTRKGKLKTVAVTAVARELSAFIWAINRQIANPDAAAR

SEQ ID NO: 135407 - protein, 329 aa, unidentified
MHRKRSQVAVVTEDGTVQLNKNVVNGSEPMLRLIGELPSGTPVAFEAAFGWSWLAELLEDYGFEAHMVHPLRCKAIASARLKNDRVDAAILAQLLRADLLPEAWIAPAKVRQLRALLRHRISLVRLATQARNRIHAVAADHGYDRSASYWTGPGRGWLAELDLPAASREIITDCLAVIDGLAPVIDRIDGELHAHAKADPRVKVLRTLPGVGEFTALVMVAEIGDISRFGSARKLASWAGLTPTVRGSDLHVRHGHISKQGSVWLRWAMNQAAQTAKRSPEFAASYAAIARRRGKKIATIAIARKLLTRAWHLLSEVQAADAGTPPRRP

SEQ ID NO: 135408 - protein, 351 aa, unidentified
MPHKSTVHAVTAIGIDMGKNTLHMIGLDLRGAIVLREKVLRGRIASRLANLQPCLIGIEAGMATHYVARELAALGHDVKQVPPTYAKPFRQGHKNDFRDAHAVAEAVQRPTTRFVPAKTNEQLDLQALHRVRSRLVSERTAVINQIRGFLLERGIIVRQGLRFLRQQLPDILAKRTDVLSPRIVRIVTDLAGDWRQLDERIETVTNEIETLAKSDDNCRRVMTVPGIGPIISSAMVAAIGSGAAFARGRDYSAWLGLVPKQMSTGDRTILGRISKRGNGYLRTLFMQAARVILLRPANWPKHGFGAWLIRAAQRLHPNVLAAALANKLARIAWTVLAQERSYEARVTKAAA

SEQ ID NO: 135409 - protein, 347 aa, unidentified
MNKKWFIGIDVSKKTLDVSIFVEDVVINMFPHIQVRNDKEGFKELLRWLKEQGVRPQDALIGLEFTGYYSDALELFLTRKKLCYTMLPTTVVKHYQRGTRDKNDKTDSAKIADYLFRFQGTECIKLRMLPSKAMQDLKALKSERKFYVRHRTDCENRQKVAKSKDEQKNLQKIIDLYDKEIERIEQKMADVVTSDEEIYLTYMRLMSIPGIGPVNAINTIANTQNFTAFETARQYAKYVGVAPSEHSSGTSVRWRGRPSPHCDLQAKADLSMAAMRAVEFSFEMNVYYERKLGNRPDDKDIKRKVLNAVKFKLIRQMFSVAKQHRNFKPLEQTQTQAEIHNTDQRVN

SEQ ID NO: 135410 - protein, 338 aa, unidentified
MRYFVGIDLHSDSNYTGVIDKKDSRIFGKKLPNDLGVILKELKPFKKEIQGIVVESTYNWYWLVDGLQEAKYKVHLANPAAMQQYSGMKYTDDKWDSYWLAHMLRLGILPEGYIYPKEIRPVRDLLRKRTMLVRHRTAHILSLQNMVNRNTGRKLKVNDAKKLSEEEISKQLSDEHLIMAVQTDKAVIDFFNEQIDRIEKVVLKEVKLRYPYKELVTVPGIGEILGITIMLETGDINRFPTVSDYSSYCRCVSSKKVSNGKKKGEGNKKNGNKYLAWAYVEAANFMRRYSEPARSWHQRKASKTNKIVAIKALSNKIAKACYFIIKDQKPFDPKKLFQ

SEQ ID NO: 135411 - protein, 318 aa, unidentified
MNEVVTFEQIVKRGCGLDVHKQTVVATIDGEGLKQEIREFGATTRSLTELKEWLVKEGITHVAMESTGVYWKPVYHVLEPSVMRVWIVNSRHIKYVPGHKTDKRDSKWICKLLLAGLLKPSYIPAREQRELRDLTRYRRKMIEQIASEKNRIIRLLEDCNIKLSSVLSDTQGVVGTKLIDKLCAKGKISMKDIEEVYHGKLQASKEEIHEACEGVVTEHHVFLLKAIKEDILSCETIIAKVTLRIKEMLSPYDDVLELLKEVPGLSTKSVEDLIAEIGLDMSVFPTEKHLASWAGVSPGNNESAGKKKVDAQPMATSM

SEQ ID NO: 135412 - protein, 358 aa, unidentified
MQSNEKKSKGQKIFIGIDVHKKNWDVAIAPEIGLVKRHPQKASAKELFDFLKKHYPDCEYLAVYESGFTGFSTYYALKEVGIDCIVIHAADVPTTQYEELMKSDKIDSVKLVRSLKAGLLKGIYIRTGENIDDRSVVRIRRSIQKDLSAYKSRVKHLLHNNGVEMPERFEKSGTHWSREFIKWLKDEVTLLSPTRNSLDLLIRQVETVRSNLLNATRMLRNLSYSERYKHNCELLTTIPGIGPIIAMCILTEVFDVSRFHNERQFAAYLGLIPTSHSSGEKIAHGEMTFRGNKELGPMMVEASWIAITQDIGLGSLYQRYKDRMKPQLAIVRIARKLSNIIYTILKKQVAYAPYHLGI

SEQ ID NO: 135413 - protein, 408 aa, unidentified
MNPLFVGIDVSSRNNVAYLMKPDGSKHSSFSVQNNLGGAKLLSERIVSALGSMQLSDVVIGLEATSIYGDSLVYALREDGRLGKFQRKIHVLNPKQVRKFKEAYPDLPKNDWVDAFVIADHLRFGRIAREVYMDDYRYKALQTLTRARFEVIQNLTREKQRFANYLFLKCSGMAQDKDIANSSSTTIALMERFETVDDLANSDLEELTAFVTETGRGRFADPAATAKAVRAAAKGSYRLPKTVNDTVNQAMSVSIASMRALKEQVKVLDKAIEQQFEIIPNTLTSIPGIDKVYSAGIIAEIGDIHRFDSQASVAKFAGLVWHKNQSGEFEAEHSRMIKSGNRYLRYYLLEAANSVRRCDSEFRRYYDLKFKEVNKYQHKRALALTARKLVRLVFRLLKDNRLYIPPES

SEQ ID NO: 135414 - protein, 411 aa, unidentified
MEQIHDRVAGLDVHRDQVTVCVRTPGPRGGVHTEKARFGTTTGGLAALAEWLAGHAVTLAAMEATGVYWKPVYYALEGRFLVWLCNAHHVKNVPGRKTDMSDAEWLADVAAHGMVRPSFVPPPPIRELRELTRYRKTQIDARAAEIARLEKVLQDAGIKLTSVASKVLTQSGRAMIEALIAGEHDPAALAGLAKGKLRPKIPQLTAALHGHFGAHHAIVAARILAHLDSLDDAIAVLDGQIAARVAGGYQSAARLLADVPGLERRSIEVIIAETGADMSCFPCPAQLASWAGLCPGNHESAGKRRRVATTPGNQWLRRTLIESARAAARTRDSYFGAQYRQIARRRGPNKAAVAVAHSLLDVIWHMLTTGEVFADLGADYFTSRHDKEHQTQRLVSQLEKLGYTVQLAAAA

SEQ ID NO: 135415 - protein, 414 aa, unidentified
MSFAPATIPARVCAGIDWAKDDHAICIIDPHGQILERFFVDHDAAGLKSLVRRLLKAGVEEVGIERGDGPVVEALFQAQLTILVIAPGQLKNLRSRYGSAGNKDDRFDAYVLADVTRTDRHRLQPLVRDSAATTAMRTTVRARRDLVAHRVGAANQLRAHLQLVFPGAASVFADIDTAISLSFIERFTTQTQADWLSPKRLGTWLRSVSYCGRTDPAVLHARLLAAPRGTVGPDAEVHAATTLGYVAFLRVLNTQIALLEDNLTAQLTTHPDTHIYASLPRVKTLRTARLLAEIGDARGRFPTANSLAALAGVAPSTRQSGKAKAVTFRWGCNKQLRDAMCDFAGDSRHDNPWAADLYNRAIARGHDHQHAVRILGRAWAHVIWRCWHDNLSYDPSQHRALTKVLAQTTKTAAA

SEQ ID NO: 135416 - protein, 335 aa, unidentified
MEITKKEIYNHYIALDWSQEIVAAASISSPGSKVDICTIHPDIRFIKDYLKKHIGKKILTLEETTTSHWLYVELRDSVDKILVCNPYRNSLMKDGPKTDKIDAGNLCLLLRSGMLKEVFHSMDKSYELRKLVSAYEDFTNSSTRFKNQRSSIFRSEGKNHKKEIILSESNIKKFITEKHNLAIEHITAIRKEFEQMFKKISRGNKILRQLENVSGLGTKLAITIYAQVIDANRFENKYKYYAYCGLVKHQKKSGGRDYGSRNVKHNKILKRTYKTAAIAAIRGNNDIREYYEYLLQNNTSIEKARNEIARYIAKVSYAIIKNKTDYRSYQWRESK

SEQ ID NO: 135417 - protein, 453 aa, unidentified
MAQGSGLTRGDRNRNRKIAVVRGVVRRDRAVLAVDLGEDKQVAVVMDHEGRVLARKIVKAKAYQLGGLLGWAAGQAARAGFAGLTVACEPTGHRWTALMGLADAGGHGFCCVQSLAVARAREGDDYTRDKTDHRDAYLIGKLVIRLDCYLPERAGEDWARLRHLGARRFALVADVTSCMQQAGDLLGCAWPAPLSAAARPLESVTWLAAVAVVTDRCCGEPARLRAMGYDRFLVAVRRELPRWGGKLIRHGIARSVWEALADTGGVAAQRRGALERVHLLLGDWRALRARLADTEARMTAVLDELGLTALAASIDGVSALSAAVMLAETGDPRRFTSGRAVVKHAGLNPSERTSATMTGQARISRRGRPGLRSAAWRAVWGALRHNKVLTAKYAHLTGRDQNRLADGQARTACAATLLRWLWAVITTAQAWDARIAAGQIPARPRAVTAPAAA

SEQ ID NO: 135418 - protein, 337 aa, unidentified
MAISFLGIDVAKNVFQLHGVDASGKITLRRRVARSQLMEVILRLTPCTIGMEACGSAHHWAREFAKLGHAVRLISPQFVKPFVKGNKTDSNDAEAICEALQRPSMRFVPVKSIEQQDVQSLHRARSRLVNNRTGLVSQMRGILAERGIVFAQSITRARREIPTIVADTGNALTPLAREMLSDLMDQLRELDGRIAGFDKRIDAVFKASETCQRIAKIEGVGPKTATAIVAAVSDPKDFKNGRHFSAWLGLVPRQCSSGDKTRLQGISKRGDRHLRTLLIHGARAVLRTAPTKQDRKHAWALALQERRGANRAIVAMANKMARTIWAVLASGQPYHPA

SEQ ID NO: 135419 - protein, 430 aa, unidentified
MEKVISFEQVNEAAAGIDIGSEKIFVSPDGLLVENFGTYTSEYYRCINYLQEQGIKRVAMEATGIYWISLYNLLESAGIKVSLVNPKETKQKKGKKTDVRDCRWIQKLFSAGLLKESFIPEGKLLEIRYLVRERLDIIEMGSTYVNKMQRCLELMNIKLTQVISQVHGTSGMRMLKAIIKGERNPDVLLLLCDERIKKQKGVEVIKALEGNYNDTWLFMLEQNISLWERHQEQITQIDKRIEVLLEDLTTGKSVEEGVVGKIKPVRHHRPQINNLHETLVKFFGVNVTSISGVNSYTCLRLIGETGADMSRFETKKHFTSWCGLSAGHHQSGKRSKWVKQAPCNKAGQIFKEAAQSLENSKYIAIGSFIRRLKARRGASVAYKAGARKIAEAYYNILTKGTAYVEQGLQQYEQQIKQREIATLKNTFICA

SEQ ID NO: 135420 - protein, 437 aa, unidentified
MKKRMYRRVPVKEVEVTALCEKLATEVVVVALDVAKHDMVAAFATLETGVVLTVGFRHPDQSQQWLGLLRELQRAGKRIEVVMEPSGTYGDALRHQLRAQGAKVYRVGSKRTHDAAELFDAVPSMHDAKAAAVLVRLHHAGLSTPWVEWSDSIRELKAALAIMDLHHEHYLRNLNVLEALLARHWPELLEHLELTSASVLALLGRIGGPRAVAAQPEQAQALLRSVSRGLMKPGRIEAAVGSAPRTLGAPMLDAECTLLRELAQELHRTLAAYKQAKQRVATMGAEISEVSALSCAVGKTTAAVLVAEVGDPRGFACANAYAKAFGINLREKSSGTHRGRLSFTKRGSARARKYLWFAVLRWVQTDEVVKAYYKRKVARDGGRTMPALGALMRKLVKALYHVARGEPLDSSKLFDVSRLQLPGARSSAQTRTMEVTM

SEQ ID NO: 135421 - protein, 351 aa, unidentified
MVIIGIDCHTRVHVAAAIDGSGQVCARFTAGAKAEELEALTRWACQQAAGLIAVEGARGFGLALTRCLLAAGLEVVDVPTHMTADGRRQSRRPGKDDESDAVVIARVALREHDLPRLRPAHLDSDLKLLVDARDQVVAEGTRVRNRLHALLLTVSPGYRDHTGALSSKRALIVARRLVLRARAADPVRCRLALAAIRRLHAIDAEAAGLESEIKQAVSARHPKQLLAICGVSTLVAGKLLGEAHDITRFPTAASFAAHAGAAPLPASSGITRRHRLNRGGNRQLNRALFTIAMVQARWHPGAVAYLERKRGEGKRPAEARRCLMRHLAGVVHRAMLLDAVAVSASSAMPAA

SEQ ID NO: 135422 - protein, 319 aa, unidentified
MRKHSIVCAGIDTGKRKLDVALDGCPDEQLQVSNSEEGHQRLSAWLRQRKVKRVGIEASGGYEQAVVCRLRRDGFRVVVFQPAQVRAYAKFHLQRAKNDKIDAALIAACTAAVRKLHAAPDPRLVRLAEHQTLIDQIVDQIARIKNYLESCRDPRLRRFWQDEIKRFRGLFKTELKALVAAIRRHRDLSERLDLIASVDGIALRTATAILVRLPEIGRISREQAAALAGLAPYDNDSGERDGARHIWGGRGRLRNSLYGAAFAASFHWNAELIELYKRLIAAGKEHKVALVACARKLLIFANAVVARGTPWESRAAATP

SEQ ID NO: 135423 - protein, 334 aa, unidentified
MRQVSQVGVDVDSEKLVCMMQRVGQRMPLTTFANTAAGHKKFIRWATKRARPARVCLEATGIYSLQFALALHDAKNVEVMVVNPRAIKDFARACMQRAKTDAVDAGGILEYLERMPFTAWQPPAPEILQLQAINRRIVQLQTELTREKNRGHASEFAGASGDAVANDIEVNIRHLERRIERMHDSGLQLVHGVPALATKLAHLVSAKGIGEASAMRLLAEVLVLPVDLAAPQWVAHAGLDPRPYESGTSIHRPRRITKVGNRHLRAALYMPALVAIQHEPNVKAFYNKLVAAGKKPMQAVVAVMRKLLHAIWGMLKHDQDFDGNKFFRLAEKTA

SEQ ID NO: 135424 - protein, 468 aa, unidentified
MGRKKKLLMKIINPYCAGIDVGSRSHYVAIGQELKDVRHFGVYAQDLSDLAKWLKDNNIRSVAMESTGTYWQNLFVELLNSGFEVILTCGKFTKNINRKKTDVLDCQWIQKMHSLGLLPSSFLPDETTERLRTLCRHRTNMISQKADCSHKMQKFLKWLNFRLDVVVRDVTGLTGMKIIKDICGGNLNPKSLAKHRHYNCRKSEEEIAKALVSNQRQDYLFGLRQEFDRYQFYKLKIEECDKQIVEFLDQVIRSKEFVVDDLPEKKPDKRINKNSIKGIDLNIIAYQYFDGVDLLTIPGVSFSTVLTFMSEIGPEGIKKFSTAKKFASWLRLAPNNKISGGKTLSNRIPRGSNRLKIALRNAANAVGNLKDSDLGKFFKKIAFRKGRQAAITATARKIAVILWNMVTKKEPYKSLNPYQFLDQKRRAIAQLRKKISKFGINPNDLGIFTKPEYQIAYEKRKLDNQGFS

SEQ ID NO: 135425 - protein, 311 aa, unidentified
MTQPLYAGIDVSKDWCDVALEAGDASARFEQTAKGREELARWLKARGVTHAVLEASGGYERPVLQSLAAARLQACLVPPHRVRALAKASGMLAKTDALDARVLAAFGRLLSPRVRPSRDEDAQLLTVLVRRRRQIVDLMTLEDNRRQQDEDPGILVDIAALLGLLRNQLDALDRRIADQIRASGSLRPKHDVLVTFAGVGPVTSAVLLAEMPELGSLDAKQAASLAGLAPFNNDSGTSEKQRSIHGGRAGVRCALFMAALSAIRHNPDIRAFYKRLRDQGKPQKVAHVAAARKIVVILNAKLRDAIPNAQA

SEQ ID NO: 135426 - protein, 430 aa, unidentified
MTRQEPTPPNVVLVAIDVSMLRNDILIEFPSQMRRRRLVVLNTKAAHDRLVDLLHSFGQPVVAGFEATGNYHRPLAFRLFEAGVTLRLVSSVALARTREALHNGWDKNDPKDAQVILHMLKIGATQTYLDPIRAGINDIQELSKTHEIVSKAKTELWHRLLTHYLPLYFPEVARFAGNSRSDWFLAFLEAFPTPACITAHAKDAFVEAAWDVVGKKVSKARLLGDIYETARGSIGLPVPVDSTAVAMFRMVIAEGRNLILQRDAIEERAHAALTDNADYRRLRQLPGIGPIHAMTILAEAGELRRFRHHRQFLKFCGLDLATHQSGQFRGQTKLSKFGNARLRRTFWMAAQVAIRQRDNSFRAKFERYIAKDRDNPDLRRKALTAVTAKMARTAHAVIKTGTDYRPFVEGPMPSGRTSIRTGREGASATL

SEQ ID NO: 135427 - protein, 391 aa, unidentified
MIYVGIDVAKDKHDCFITNSDGEILFKAFSIANNLDGFNELYQKIASIMDDVTKVKVGLEATGHYSYNLLGYLIDKGLPTYVINPLHTNLYRKSLSLRQTKTDKADARTIASMLMSDVNLKSYSDISYHNEELKSLTRYRFDKVKERAKLKTSVSRLVCILFPELEKLVPTLHMASVYTMLSEFPGAKQAANAHLTRLTNLLSESSKGHYGKETAITFRDAARASIGSNMPAKSLELKHTIKLIQELDSEIDEIENEIKIIIDKINSPILSIPGISYRMGAMIIAEIGDFSRFDSPDKILAYAGFSPSTYQSGQLDGAYAHMEKRGSRYLRYALYNATKYVCHWDPTFAAYLAKKRAEGKHYNVAISHAAKKLVRVIYHLEKTKQQYIKAA

SEQ ID NO: 135428 - protein, 317 aa, unidentified
MAKVPPTYIGIDVSKARFDMASSPCRTMKSFLNDRSGTDELVKYLCAVKPVLIVLEASGGIERALVRALVAAELPVAVANPRQVRDFAKATGKLAKTDALDAQTLARFAEAVRPALRLLPNEMTLELRALVGRRRQIIEILTAEKNRLSRASRRIQTRIQAHIDWLESELERYNEDLDEAINQSPLWREQQDLLKSVPGVGYVISRTILAELPELGCLNRKQIAALVGVAPLNWDSGLMRGRRVIWGGRAHVRTALYMAAVTASRCNPVIRDFYKRLRAAGKPANVALVASIRKLLVILNAILKHHVRWRPVVDQLD

SEQ ID NO: 135429 - protein, 311 aa, unidentified
MNAQDCFIGLDVSKDTLEVAVRPTEERKTFANQEDGLSLMIDFIKPFSPRLIVLEATGGLEKATVCACAVEGLPVVVVNPRQVRDFAKAKGVLAKTDKIDAGVIAQFAEAIRPEVRPLKTEEAQKLDALLSRRRQILQMLTAEKNRLTSAPVWTRKDIQKHIEWLQKNLAQFNEDLDQMVKESPIWRAKDEILQSAKGVGPVLSVTLISQLPELGSLKGKKIAALVGVAPLNRDSGKFRGRRSIWGGRAEVRSVLLMATRIAIRFNPVIRAFFERLQKAGKIRKVAETACMRKLLTILNAMLKNNTGWQMA

SEQ ID NO: 135430 - protein, 307 aa, unidentified
MTAVGIDVGKANLDVAIEGRPRVVRVANSAAGIRKLVRQLAGLNQARIMVEATGGYEEPLLEVCCDAGLWVARVNPRQARNFARAAGDVAKTDAIDARLLCLMASMFADRLQRYRAPLPWQRELRDWLRRRGQVVTALQAHRQQMVMCPGPIRSLAAKTMTALRRELAAIDQQMKVLLDTHATPALGSCKGLGPIFQATSLALLPELGALTRRQIARLVGVAPMNRDSGQSSGVRRIRGGRAPVRVALYMATLSAVRWDETMKAHYRQLRARGKLAKVALVACMRKLLTIVNARRRDELLREAAVPA

SEQ ID NO: 135431 - protein, 381 aa, unidentified
MTKHSILFIGLDTHKEFIEVAYIEDQRGAKPVHFGRISSAKLTIKKLVRQFESKYPDVTLHFVYEAGPCGYWIYRLITGLGHCCYVIAPSLIPKKPGERVKTDKRDALKLAKLIKSEDLTPIYVPEPEDEAIRDLSRAREVAMKDLKDAKYQLKALLLRNNINYAGTANWSLKHLRWLTELVLPHPAQQIVLQEFIQTINERTARLERLDNELTHHVYQWRYYPVVKAMRGVRMLVATGVVSELGDLTRFDHPRKLMSYLGLVPSEHSSGGKRHIGAITKCGNGRARRLLIEGAHTYRYAANISTELQKRQEGLPKTIADIAWKAQVRLCKRYKKLINKGKHYNLVVTAIAREMIAYIWAIAKEVVLTPVNPKQRLARVPA

SEQ ID NO: 135432 - protein, 385 aa, unidentified
MDEAGKRVGVRRFAHSHQGFNELQQFVLSIATSPEQLACIVETNHGLLITFLLEAGIPVYPVNPKMANQLRKVAGAKTDQIDAHLLAKLGRLDLAELRRLEPGRSIVAELKTLTRDQDTLVQTQTRLVNQLTACLKEYYPAALNLFTKLQQRSTLLFLQAYPTQEAAAAVSQEEILATLRMGKHTNPRRTAKKIWEEVHRPQLQASEVIVRAKSRLMLSLVKQLLVVIEAIASYDEVIAPLFLTHPDHEIWSSLPRAGKRLAPRLLAEWGDDRARYVDANSIQALAGTAPVPFQSGNYAKAHKRFACLKPLRNALHQFAWQSTLQEAWALAYYQRKRAEGKTHSMAVRALANVWVRILYRMWMSKTCYQTNTFEAAQLAHAKRAA

SEQ ID NO: 135433 - protein, 349 aa, unidentified
MEQNEVILGVDTHLDAHVGAVISETGKLLGTLSVPADTAGYLKLLTWANSLGRLLRAGVEGTGTYGAGLAPVLRDHEIEVLEVNRPDRAARRSRGKSDPTDAENAARAVLAGKATAIPKEQSGAAEAMRAVSVARRSAVKARTQAINQLRALLVSAPQDIRERLLKTKTAECVANCARLRSLGDTPMLQTLAITLRLLAKRYVALAEELKTLDAMLERLTIQHAKRLRERFGVGPQTAAVLVAVAGDNPERLKSEAALAALCGTSPLQASSGKTVRHRLNRGGDRAANNALWTIAMVRMRSDPRTRAYVERRTREGMSNKEIHRCLKRYIVRELYPLILADLADSARTS

SEQ ID NO: 135434 - protein, 371 aa, unidentified
MKQQTKSSHITVGLDLGDRRHRFCALDERGEVVEQDSICNDRVSLRKLACRYHGALGVMEAGAHSPWISRFLEALGWRVVVSNPRKVRAIYQHERKSDQRDALMLARIGRMDLALLYPVRHGTAEAQQDLLRIKLRDSLVRARVAVINSVRFTLKSLGYTVRNPSSERFHKVVMEEVPESVREMITPSVQALAELTARIKMLELEINTLAQMKYPQSAQLQQIPGVGPITALYFVLKIEDPNRFAHVRDVGAYAGLCPRRDQSGESDPQLRISKRGDAYLRRLLVSAAHYILGPFGPQSALRAYGLMLAADGTARAKKRATVAVARKLAVLLLSLWKSQQPYQPFPGACLNGEQEDRRSGTIALHRMEATD

SEQ ID NO: 135435 - protein, 319 aa, unidentified
MNETPVFVGIDVAKATLEVAVRPSGAQWASANEEAGIQTLLGQLRALAPALVVLEATGGYEQAVAATLATAGVPIVIANPRQIRAFARATGQLAKTDAIDAQILALFAERVRPTPRPLPDDATQALEALLTRRRQLLEMLVAEKNRLGVAPAHLRRDIGQHIRWLERRVADLDRELHAGVRASPVWRAQDDLLQSVPGVGPVLSYTLLAALPELGTLGRKQIAALVGVAPLARDSGTHRGRRTSWGGRAPVRTVLYMATLTATQWNPVLRQCYQRLRAAGKPHKVALTACMRRLLLILNAIVRTQTPWRAAPTAARATA

SEQ ID NO: 135436 - protein, 370 aa, unidentified
MSIKRILVNTIDTDLEYEVIGIDLAKNCVSAILLTTDGEIFGIDRLDYQELEKSDQELSPTIFAMEPCTEMNYMVQKLEDWGHHCIVISGKNVKDYVESHFSNQKTDLNDAQALAFLTKDTQLRTVKAKDPEQLKYASLTTLREQYVKQYRQTMVSLKGICQVWGLSISKGISGKARLKDMIENHAAFPAELRTALVGMVAHAQAVQKDLKSVTKILEELAKKDKACQLIQTVPGLGTICSCRLRATVGDIQRFKHPKDFPAYYGLVPRSMATGHNEKKGKITHRGDKTMRSLMVQGAGIVINQATKGNLHSKQLTKWILKKQKEKMPWGKLVCAVAAKLLRIVRAILISGKPYNPKIAGVAKCSLPKAS

SEQ ID NO: 135437 - protein, 353 aa, unidentified
MRIVVALDVHRRQITYKTLDRESGEVRRGRIVPATRGAVREWLDQFAGCEAEFALEGTTGWRFVVEEIGRAGHRAHLADPAETAVKRGRKRRAKTDNADCDLQLKLLLAGELPESWIPPAHMLELRIRVRMRKLLIDQRTAWQQRLQAQLLHQGVVAGLKPRTPAGRAALAQAELSPAGRELVALALRTIDMIDGELAALDRALRSFARRQPACRALIANLYGVGAISATAILAELGDCRRFASSDDAVRHSGLDVTVYQSDRKRSAGHLSHEGPELLRWALFEAAHQSARRSSPDHDYYLQVAGRIDHNRACLSVARKLCRRAHHILRELGDEALAPVERERQPDEAIEAAA

SEQ ID NO: 135438 - protein, 368 aa, unidentified
MVSKAFVGLDVHRENISVSVAEEGRDGAVRFIGVIPNSPEAVAKMAKRLSRHGELDFCYEAGGCGYGIYRQLTTLGYKCTVAATCMIPRKPGERIKTDRRDSQKLAVLHRSGDLTAVWVPDTTQEAIRDLVRARVDASMQLMRARQQLCAFLLRHGRTYTAGKCWTKRHRSWLAGQTFELHAHQIVFQDYVEAVWTAQERRDALIEKITEMMASWSLGPLVEALRGLRGIDLLSAATFVATTGDLSRFESPRLLMGYLGLVPSEHSSGGHIRRGGITKTGSREARRMLIEAAWSYRYPARVAKEKAEIVVRLPKRVRDIAWKAQIRLCTRYRTLLAKGKKPTIVVAALARELAGFVWAIGQEVKPEMA

SEQ ID NO: 135439 - protein, 339 aa, unidentified
MIKPINPQQTTVFCGIDVSAATLDVAVIAPDGPVEQRQFPNRAGGHKALIGWLGKCQARVRVSLEATGIYSLDLALALDRAPHIELAVLNPKMVNRFAQTLRRSKTDAADAMVLAEYSQRMPFLAWTPPSLNGLRLRAVGRHIAALVAQHARDQNRLHAAKSSHAVPGYVLQDLKRSLASLERRIVKMRRAAMELIRADAEIEQRFRLLTGMPGIAETSAVAILGELALLSPHLTARQWVAHSGLDPVHQDSGTSVHKRSRISRAGNRHLRRALYMPALAAVRWDPHMKAFYEALQQRHKTKLQAIIAVARKMLHAIYGIFRSRTAYDGSKLFPQLQTA

SEQ ID NO: 135440 - protein, 357 aa, unidentified
MSVKETIMHQLVRIGMDTSKKVFQLHGVDAEERVALSRKLSRHQMIRFFEKLPPTVIGIEACGASHHWARTLGALGHEVRLMAPQLVKPYVRRSKNDAADAEALCEAMSRPTMRFVPVKTVEQQAALMLVGMRERLVGRRTQLANSIRGYAAEFGLTAPLGLSRVEPFLRQIASEDILPSLAREMFAQMAEEYGALMEHIRELDEKLATWHRSQEVSRRLSGIPGIGPLGAALLLMKAPDPHLFRSGRDFAAWIGLTPRDHSSGGKVRHGGITRAGDSRLRSTLVVGATTVLRHVRQNKQSRLATPWLVSLLGRKKAKLAAVALANRIARIAWKLMTSGETYRKPVAVDAMTAATAS

SEQ ID NO: 135441 - protein, 350 aa, unidentified
MQYIALDAHKRYTLASVEPVLGGRAQETRIPHEPGMLRGFLSHLDQGSPVAVETVGNWYWIVDEIEAAGMIPQLVHARKAKVMMGMVNKTDKLDAQGLNRLQRTGTLPTVWIPPAELRDKRDLARTRMAMVAQRTQLKNRVHATLAKYARVVEVSDLFGKKGRELLGQAAKELPPETRFSTKRTLEVLDGLEEQIEALEKRMSGVFNETPQAGLLKTLPGVGFILSVVIDGEVGQIERFERPEQLASYSGVVPRVSASGGRTRYGGMRTESNQYLKWAFIEAANSVCLNRAKHPQRTVSRLYERIRARKGHGKAIGAVARALAESAYWVLTRKEPYRDPAGSPAVLPTKV

SEQ ID NO: 135442 - protein, 347 aa, unidentified
MNFYKLPHKYYCGVDLHSRTMYLCIVGRDGAVLLHRGLPCDAARFLLAIAPFREDLVVAVECVYSWYWLADLCAREGISFVLGHALYMKAIHGAKAKSDRIDSEKIAVLLRGGLMPVAYAYPADMRATRDLMRRRLLFVRQRGSLLAHIQITHHQYNVDPPGKRITYRSNREGLGEGFADPSVRHTIAADLALADHYEVIIGELELAVLRQARVHDPSAFVLLNSVPGIGKVLALTILYEIHDISRFPSVRDFASYSRLVKCEHSSAGKRLGSGGNKIGNAHLKWAFSEAAVLFIAKSEQGRTVLKRLERKYGKPKALSVLAHKLGRAVYYMLARKQAFDPQRFLAA

SEQ ID NO: 135443 - protein, 414 aa, unidentified
MTEQIQVAAGLDLHKSFIVATILTLAGDKIINRFDRTQSGLIALKNWIVANNVEAVGCESTSDYWVRIFDLLNPICQVIVGNARDMKALSHKKTDKIDSEFIALITLKGMIHPSRIFPAEHREYRSTVRLRHKLVQKRSSIKNEIHHILDSELFRLSSVLTDIFGKSGALIMKGILNDMSVDEILSLLPASVLKKEEALREVLETTLSEGALARLSSCLRIIKILNQEIAELSNISTNYALTNFPREYEILKSVPGIGDITAVTLLAEIGDVKDFSTGDKLASWLGIVPRVYQSADKLYTGSITKRGSRLARWILIQAAHAAVKARDNDLKTFYIGKKDVIGTGKAIVSVARKMVIIIWHLLVNDETYKDTQYHTLKSTKKVYVKVPRKTTIEEVLKLLREASVVLQEPDPEKG

SEQ ID NO: 135444 - protein, 311 aa, unidentified
MKSEVIYVGVDVAKAHLDYALQDQSGRLSNTAAGVAGLIGRLQKLGAAVHVICEPTGGYERLLVEKLNAASIRVSVVNARQVRDLARAGGRLAKTDRIDAAMLARFGGVFAPKPTAAPSPTQNQLNQWTAQRRALSQQLVSVQNRAAGWTDPVCRRMARAQQKLLQNQIGQLDRLIEQCIASQPALACRAACLRSVPGIGPRTAAVLVAAMPELGQIQHRQLAALVGVAPLNRDSGQWRGQRRISGGRFWVRSTLYMATLVAVRFNPQIRTFYQRLRDKGKKAKVALIAAMHKLLLILNAMLRDKKTFLPA

SEQ ID NO: 135445 - protein, 402 aa, unidentified
MRRSSKRYCRFCGIDVAKDKHVACILDAEGRLVAAKQSFTNDAVGYDRIIQRLRRAGQRSQILIAMEATGHYWYSLHDFLQRHGYHVVVNPVQTAQQAKKGIRKRKTDKIDARHIATLIKNGEHRPTIIPGEPAMTCRQLTRLRYSMVRQRARIKQWIHSRLHPVWPEFESSFADPLSITARALLRAAPTPEDLIAMTLDELAQLLRKASRGRLGAERAQRIRTATETSIGMRRGLDGTRIAIGTLLDQLDALRPVEQKLQEQIERLAAQLPTYLLTLPGANALRAVSLFGETDPIESFPSPDQLVAFTGLDIDVFQTGQYTAPQRHVTKRGSPFLRRTLWAMAAIAVRTEGELRTYYLRRKRHGLHHLAAVTATAIKLTRITWRILTDRRDYIPDGRSIQS

SEQ ID NO: 135446 - protein, 490 aa, unidentified
MKSKSKDKKKGTNFVSTCTVYEVRGMPVINTHAAGIDVGSRSHFAAVGQDLSDVREFGVYDQDLRDCAAWLKSYGITTVAMESTGSYWQNLYDVLVESGFKVFLVAGRQTKNMEGKTDVKDCRWIQFLHSVGLLTSSFLPELETEELRTLFRHRDFLLKQAAKYTCALHEVQSICKMQKCLRLMNFRLDVVLNDVTGKSGQAIIKAIISGERDAQKLAALADWRVKKSKDEIAKALSYNGRTDYMYELADSFDIYQSYVKKMEECDTCAAQSASKKMEELMRAQIVKLKKPQTSPPPLKKAKKLSKNTPKIPIHELSWQWNQEVDLMSIGGVGHSTVLAINSEIGQSIDKFPTAKAFASWLRLSPDNRISGGKVLSSRVRKGSNRVASALRHAAESIGKHVCCAKCKQKDAPLYPFFQRIMHRKGRCAAIIATARKLAVIIWTMLTKKVKFIPYDTTKIENQIREKQVKKINKLLKVFEVKAHEINFAFA

SEQ ID NO: 135447 - protein, 357 aa, unidentified
MPQKLDYAAFIGIDWADTEHAVCLLTPDGSSEKQVIAQKPEDLAAWAIQLRQRFGGKRIAVCLEQSRGALIYALMQYDFLVLFPINPSQLAAYRKALNPSGAKDDPKDARLLASFLREHGEQLRAWKPDDEVTRGLRLLTEQRRRWVEDRVAYCNELLQRLKESYVLALKFAGTELHALNFLALLEQFPSQRDLQRASPQQLAKWLPRRRRVPDDPPAEELLQARIAEVRNTPMLTKDAAILDVSRLAVMHLVAMLRQLNQSIASCEKRIAELMEKHPDTPIFASFPGAGPALKPRLIAAFGTDRKKFASAQDLQRLGGIAPVTKRSGKTCYVQMRWACPKFLRQTFHEFLSSTLGS

SEQ ID NO: 135448 - protein, 440 aa, unidentified
MSKRAYRATRVNDVNWDQLAQGKDGLDIALGVDVGKYSLWAVCRWADGRFERPWRVQNPGEIPTLLTLLKRVSAGRKLVVAMESSGTYGDALRQVLADNQIEVQRVGGKAAHDYAEVFDGVPSQHDGKDAAVVAELAALGKAMPWEYQPADPWEQELAYWVEWMVAHRQMLTIWQGRLEGLLARHWPEATQVLKLSSGTLLRVLKRYGTPQALAGDGEAAKLLARWGGAFLAPEKIEQLLAGAGASVGVRLGEWQQRQIQNYAQQALAARQEANRAQRRLRSLAAGHAVLQAQGKVVGVPTACVLWVSTGDPRKYHAAGAYRKAMGLNLVERSSGTYQGRLRISKRGSPRTRQWLYFAVLRLVQKCGVRPWYEAKKAHDEADARRVVVAVMRKLAVALYYVGVHNEEFQPGRLFGRIRRRRDSPGEQKSRTKRRSRAEQI

SEQ ID NO: 135449 - protein, 345 aa, unidentified
MQLTTVSVDLAKTVFQLHAIDQQGKTALRKQLKREQVVPFFANLEPCLVGMEACGGAHYWARKLQALGHTVKLMAPQFVKPYVKSNKNDVADAEAICEAVTRPNMRFVPIKTVEQQAILAVHCARQGFVKARTAQANSIRGLLGEFGVVLPQGIRHIVERLPDILEDHENALPGSLRQLMQRLMEHFKELDRQVVELEREIQQWHRSNEDSCRLAEIPGVGPLTATALVASVGDAKNFSNGRQMAAWLGLVPRQHSSGGKPTLLGISKRGDGYLRTLLIHGARSMVRVVESKTDPSADWLKGLLARRHTNVAVVAQANKTARIAWALLAHGTKFRPDYTPDVTVA

SEQ ID NO: 135450 - protein, 344 aa, unidentified
MELFTLGIDLGKTTFHLVGMDQRGEVVLRKRFSRVQLLHFTANLKVKLIGMEACGGSHFLGRALREQGHEVRLIPAQYVRPYVKTNKSDYIDAEAIAEAVGRPTMRFVPVKSDDQLDLQSLHRVRERWVMRRTAVVNQIRGLLLERGTTLRKGRRYVDEALPGILAGSSSKLSGAVLVLLAELKQELEQLAEKIDRADKSIEKIARENEACRRLVAMPGVGPVTATAIIATIGNGAAFRKGRDFAAWLGVVPEEHSTGGKQTLWKIPRRGNQYLRRLLVQGARAVMQHRTKQSSGLSAWLAQLTARTHQNIAIVALANKLARMAWAVLAKNEAYRPPLLANTTI

SEQ ID NO: 135451 - protein, 346 aa, unidentified
MLIVGCDFHPSWQQIAWLDEDTGETGELKLVHAEGQAQQFYSQLPARARIGMESTGNSHWFIELLEDLGHEIWIGDAAQIRASYVRKQKTDKRDAAHILKLLEEERFPRLWTPDREQRDLRQLVLHRHKLVEIRTRVKNELQHLSLNKGMQRKRRLWSETGMQLLRELPLKPWAACRREDLLELLASLDQRIGKLDRAVQLAAEQHRQAKLLMTQPGVGPNTALAFVLTLGDVGRFQRGKQVASYLGLIPREESSGGRQKLGAITKQGNRLVRSLLVEATHNVVRCDPGFRKQYLHHCHQKAKGVVKVAMARKLAVRLYWMLRTQTGYPEIVQIESSPGLPLVGAS

SEQ ID NO: 135452 - protein, 400 aa, unidentified
MRVVFGIDVSKASSEVAILVNGEKVHGYTIPNDAIGFNRLLGDLKTVHQPEIVFEATGVYSRRLQAFFEDNSYTYTRLNPLESKKQLDSLRVRKTDKIDAEKLAMSQFILNRKPSYVQEALYQELRDLSRFYQNLTEDIVCAKNRLHKVLQITFPELENILSAPTGEQYWNLVITFPCNSFVLESDDATLTAIIRQSTAKRISEKRVTYLVDKLTKLANQSYCAVKKTSPVIEEVKYYAGELLRLSEHRQGVVEEMVTLAQSLPEYEILLSIPGIAETTATSIIGELGDIRRFHSANQINAFIGIDLRHYESGNFLAKEHITKRGNPYARKILFKCIHNIASASHTNPCHIADFYEKRKRQSQVTSTKPHTIASIHRIIRTMYYLITHNKLYDYTSIQNR

SEQ ID NO: 135453 - protein, 422 aa, unidentified
MSISKLALDASSQDYMNKKSVTYPVLKTLNGGVFMYLIGIDISKYKHDCFIATEAGIPIKAFSFDNDRLGFDLFLETLKSLDQSQEIRIGLESTGHYGSNLKQFMCASGYTYLEFNPYLTHMFSKALSLRKTKTDKVDAKTISSMLGSVDYKTLHTRFYHINELKQLVRYRHVQMMNRSKVLIEITNILDRIFPEFKPFFNERLSGTAIFILKKFKSRERISKLSNKDYESIKSYSKGKISYVRVQKLKSLALSSVGYETKSDLLLLKLAIKHYEDLSDTLECVDEEIISFMRDIPQTLTSIPGVNLISAAIIIAELGDFKNFTNPAQVISFAGLDTSVNQSGTMETRGHLVKRGSGLLRMTLWQITFSSLRLNPKLYDYYLKKRAEGKHHKVAMVHCVRKLIRTLYYLGVNQLTFDHSLFK

SEQ ID NO: 135454 - protein, 329 aa, unidentified
MSNIIGIDVSKASLDCAYLRDVDQQRAKRKTCHNEVRCFAALVAWAEARSELPVQALAFIIEPTHVYHEQLVQFLYHTGATVYLVNPGKVRKFAEGIGILSKNDLIDADLLARYGLMARKLIAWAPVPQELNDLRSLLNRLEVLERNRRSELNRQEKIGKTMVFHRLEQQSIARTVQRLKVEIMTFKNAIRQCIQSTPSLQQSFYLLCTIPGVGAKTAWVMLVILGSRQFRSAPEVASFLGLNPIEKRSGKSQYRRPRLSKSGSGHYRQQLFFPAMVATRKNPDIKALYERLLAADKTKMCAIGAAMRKLVHICYGVVKNQTPYQAQTV

SEQ ID NO: 135455 - protein, 329 aa, unidentified
MEKKGKRYIGLDVHKHYLVALGVDDNLEVVLPVRRVEFSYLESWMKKNLTKQDEVVLEMTTNTWQLYDELIQHVGKVTVVHPPHVALITRSQVMNDKIAASILARLLAKGLLVGIWVPPQEIRELRGLVAQRRKMTRLATQAKNRLHAVIQRHHLKPPEGNPFSKANNAWWEKLSLGKLEKMNLQSDLETLQFAEQQEVRIEKEMTGIAAEDAEIGRLLHMSGFGVVTAVTVYAAIGDIRRFLEPKKLVGYAGLGARVHDSGMTTRTGKITKAGRRDLRVALVEAAHVVANSHPHWKAELARLEPRLGRNKAIVATPAPTAGAVLPANC

SEQ ID NO: 135456 - protein, 343 aa, unidentified
MEHSAGLDVSVKETSVCIVDETGKIVREVKVASEPDALLAVLTNPAYRFKRIGLEAGPLSQWLFSALAEAGLPVICVETRHMRSALKAQINKTDRNDARGIAQMMRAGLYRPVHVKTLRSQKLRMLLTHRKLLQSKAIAVENDLRGTLRNFGLKVGVVGAAKFEARIRELVENLPDLAVLIEPLLAVRRVLREQTAVLHHRLLAIARDDEICRRLMTVPGVGPVVALTYRATVDVPVRFRNSKAVGAVFGLTPSKYQSGEVDRSGAISRCGDDMMRVMLYEAAHIMLVRSTRWSWLRAWAMQIARRRGLKKAIVALARRLAVIMHRIWVDGTEFRWTREVAAA

SEQ ID NO: 135457 - protein, 411 aa, unidentified
METLIERCAGLDVHKDTVVACVRLPGPGGQRQAETRSFGTTTGQLLELRDWLADQGVTLVGMEATGVYWKPVYYVLEDAVECWLLNARHLRNVPGRKTDMADAAWIAQLVENGLVRPSFVPPKPIRELRNLTRYRRSQIDERARESQRLDKILQDAGIKLSSVASRLRGVSSRRILEALVAGQTDGQQLAKLAKGQLRKKLPELEAALQGRFSRHHALIVGEILAKLDYLDELVERLSEEVSRAIAPFAQQVQLLDTIPGVDRRMAEALIAEIGVEMDRFGTSAHLASWAGVCPGQHESAGKSRSGKTRKGSKWLRGHLTEAAQAAARTRGTYLSAQYARLRGRRGPAKASLAVAHSILVAAFHILDRMVPYQDLGSDWFVRRHSPEQHARKLVSQLAALGYDVTLPEVAA

SEQ ID NO: 135458 - protein, 352 aa, unidentified
MERYVGLDSHARSCTLGVMSAAGQRLKSLVVETNGSALIEAVRGIPGRVHLCLEEGTQSAWLYELLRPHVAEVVVAVAPERKGAKDDQRDAWARANELRTGSIETRVYKAPEHLAGLRNAVRAYGFAVTDVVRAKNRLKAVFLSRGMSADTSVYDVKKRPEWLKKLSSPHRELAEWLGRQLDQVEPLRDEAERWLLTEAKRHPIIRKLATAPGMGPIRTAQVVAIVATPERFRTRRQFWSYCGLGIVTRSSADWVQDRNGKWVRSQVAQTRGLNRKRHPRLKAVFKGAATTVIAQLPDDPLHGDYERMLQSGIKPTMAKLTLARKIAAMVLSMWKHQEVYDPKRHHPSPDQP

SEQ ID NO: 135459 - protein, 400 aa, unidentified
MISVGIDVSKGKSTVCILKPYGEIVASPFEVRHTESELKNLIQMIQRLDGEIRIVMEATGIYHLPMLSSLQDQNFFVAVINPFEMKEYASRGLRRVKTDKQDSITIANYGIDNWYRLENHQGSDAVYSELKLLGRQYCHYMELHVKALLELTHMLDYTMPGVKKMFRSWNESSGKDKLSDFVERYWHFDNITAMTKDEFIEDYVSWAAEKKYHQNRSKAAELYDLASDGISTLPANTPSTKMLVLEAVRVLREIDSTLLKIITRMKELAKTLPEYETVRAMGGVGDVLAPKLIAEIGDIRRFHSGKALIAFAGIDAPPYESGQFVGTNRKISKRGSKVLRKIGYETMRVLKTHKAPEDDAVYRFILKKEAEGKSKRQAKIAGLNKFLRIYYARVSEVYKA

SEQ ID NO: 135460 - protein, 426 aa, unidentified
MKEHIDYLSTLFVGIDIASRIHVISALDFNQDFYIKMKPFENTKDGAGIVEKMIADVLADNHQFKYVVIGMESTGFYGVHLANYLSTSELLAPFSVRVYCLNPKEVKNYKKSFNDIGKNDGIDSFVIADFARVGRIAIKPWRGSQYLALQRLTRHRMHITECITREKTYMLNNIYLKFSQYALLRNGEHPFSNKYGATAEAILTEFTTNEDIVNSSIEELVEFINSKSKERIADPEETAKIVQAAARNSYRLDKCLYEPLTISIASSFNCISSFEKELKAIDKAILQTVQGLNPEEYTVLNSIPGIGKVYSAGILAEIGSIKAFQNANQLAKYCGIVWNDNDSGDFESEDSRMSKAGNRYLRYYIIEATGSVINHCPEYKAFYQKKYAETRNHQHKRALALTSRKFIRLLFGLLDKGQLYSPEKSR

SEQ ID NO: 135461 - protein, 358 aa, unidentified
MVQRKELNFEGQNIYIGIDVHLKTWHVSILTESGCLKKHSQQSSAQALFEHLKKHYPNGNYLSAYEAGFSGFSTYYSLLYFGIECLPVHAADIPTGQYESVMKTDAIDSTKIARALKSGLLRGIYIPKKEVLDDRNVMRLRITLKRQLSGYKSRVKHLLYNNGVIYPECFQNSKSHWSKRYLKWVHEDVQLLSESRNSLDLLLRQVELFRKSLLEITRLVRTLSRNGRYGEAYENIVSIPGIGMITGMCLLTEIGDIHRFRNERQFASYLGLVPTSHSSGEKTSHGEMTFRGNKRLGPLLVESALVAIRQDRALAAAYGEYCKRMLPQEAIIRITRKLSNRILIILKSGKKYEHDRCY

SEQ ID NO: 135462 - protein, 424 aa, unidentified
MFRYLIESGEYMEAMVKRCAGLDVHQETIVACVLTGELDKKPESEIRTFETYTKDLEELHEWLLEKEIEQIAMESTGIFWKCVWNIIEDEKYEIKLANAKEIKNMPGRKTDVKDAQWIAELLRCGLIKSSFVPNVEIRELRDLTRYRRKIIQEASAEKNRIHKILQDANIKMTTDISDIFGDTGRKLLEKIIEGKEISNEDLIEVTAGRGKASLREKIPQIKEGLKGTTRAHHRKMIKLIYEHLKYLEKEQEEIDKMINEACEKYKKEINLLDSIPGINEESAKAIIAEIGIDMNQFPTVKHLTSWAGMSPGNNESAGIKKKGKTTKGNRSLRATLNECAWSCVRSKKNRISATYWRFVKRMGPQKAIHAVGNLILRLCYHILVSGIKYEEREKEDYEKILQKKKEQRMIKELKEKGYKIEIAS

SEQ ID NO: 135463 - protein, 345 aa, unidentified
MSIVGGLDIHRRQLTFDYLDTVTGQVARGQVAPADREHLRAWLARFTGRDGVAFAIEGCTGWRYVAAELAAAGAGVHLAEPAGTALARGRKRHAKTDKTDSRHLRGLLAEGRLPECWIPPEQVLEARALLESCHDLRREHTAWLQRIHSVFFHHGAPAMGEGILSSIGGPAAARTTAAAHLSPAGQQQVTIALAMMTCLEDQMHGLRHQLLDTARHLKGPRVLAAQIYGVGLLTALALTCWPGGAGRFSSARKAVRFAGLGITVSSSDRKGPPGRLSRQGPPVLRWALYEAGKARARASAPDHACYAQVKDRKTGKRAALSEARKIIRRACRILNDLGDDAFAAV

SEQ ID NO: 135464 - protein, 330 aa, unidentified
MNMDYVGIDVSKHHLDLALGEAGVVRVANNAEGIAWLIEQVSGLSRPHVVCEATGSHTRQLSRELGERGIAFSRVNPRRVRELARADGQRAKTDAIDARVILRFARLMQPQPTPPPQPQALELADLVRRRRQVVDMLAMEKQRLEHPEAASVRASLKAHIAFMASQVRDLDAAIAERIAGDAELERRAGLLVSIPGIGRTTAAVLVAEMPELGGLDNKQVAALAGVAPFVRESGQFRGQAHIGGGRASVRCALYMASISAIRANPQIRSFYRRLRDNRKPAKLAIVAAMRKLLITANAIIATGTPWQPPSQPTFLQTRLLEGEKRDLRTQ

SEQ ID NO: 135465 - protein, 349 aa, unidentified
MKITTSGIDVAKSVFQVHGVDERGNVVLRRQIRRAQLLLFFSRLEACLIGMEACASSHYWARRLTALGHTVRLMSPQFVKPYRKNDKNDGNDAEAICEAVQRPSMRFVPVKSPEQQAELAVHRIRRRLMGQRTALINQLRGLLAEHGLVLAQGANQVRSKLPALLEDGSESLPPLAVELFRDLYEELVQLEQRIAACDRRVERLYRANPLCHRLGEIEGIGALTATAFVATVAHAAQFKNGRQCAAWLGLVPKQDSTGGKTRLLGISKRGDVYLRTLLVHGARSAMRHTPKRADPKSRWVEQLRKRRGENIAAVALAAKHARILWALMVKGESFPPPAIHSDPLEQPAV

SEQ ID NO: 135466 - protein, 422 aa, unidentified
MKAFDVSDFAALIGIDWADRKHDICEVNCQTNKQHLTVISSQPKEINAWANELKQKYNGRLVAVACELKKGPLIYALSKFSHIVLFTINPSSVAKYRKAFTHSGAKDDPTDAAIQVEILQLHMDKLNVITPDTESVRCLAQLVEYRRKLVQDRVDVTNKITTTLKNYYPHVLDWFKEKDTMIFCDFLLRWPSLEQAKRARKQTLTDFFNDHNSRYPAVNEKRINNIKEAEALTNDKAIIAPNLLLIECLVVQLKQLMLSIERFDIEIKAIYKQHKDRFIFDSLPGAGPQIAPRLLAAMGSNRDRYHSCEEIQKYAGIAPVTERSGKKEWIHWRYSCTKFLRQTFVEWAGISVRYSFWARAYYRQQESKGKPHNTIIRALAFKWIRILYRCWKSNTAYDETTYLEALKRKGSPLLKYAVESEL

SEQ ID NO: 135467 - protein, 347 aa, unidentified
MVYAEVSKQFYCGLDLHGKTIYVCIMNKAGRVVVHREIPASLTYLLRMLKPYVKSIAVCAESTFNWYWVSDGLHSNHIPFYLGHALYIKAIHSNKKKDDRIDAKMLADLLRTQLFPLAYAYPQQMRETRDLLRRRHRFVCLRGSLVRHIKILLYQQGYSEEFQDLSSEEQLRSVLKYSLPSDVKLSIEHDLGLMRELERSISKLEYHVLKSARHHDQHALALLFTIKGLGNILSLTILYEINTITRFESAQRLSSYSRVVKTQRQSAGKRTDRKNQKIGNPLLNWAFMQLAFSAQRFYPEIKTYTDRLKRKFGDRTAFRVLAHKFVVAIYYMLKNNKPFDVRQFVGA

SEQ ID NO: 135468 - protein, 358 aa, unidentified
MNDATTSEAKMTIGLDLGDRHIQMCVLSADGEVIEESRLVCRPAALHARFLAASPTRVVIEAGTHSPWVSRLLAEIGHEVIVANPRKLRLIYENDSKSDRVDAEYLARVGRLDPALLSPLAHREASTQADLAVIRSRDALVKMRAALVNHVRGSVKAAGGRISKCSTDTFPKTAADKLPAELAPALAPVLDTIAHLTEQIRAYDRQIERLCDEKYPETKALVQPKGVGELTALAYVLTIEDPARFPKARSVGSYLGLRPRQAQSGAADPQLRITKAGDDMLRRLLVGSAHYILGPFGPDTDLRRWGLSIAAGGSKAAKKRAVVAVARKLSVLLLRLWVTGEVYEPLRNAARDGEMVSA

SEQ ID NO: 135469 - protein, 343 aa, unidentified
MPHSVGLDVSQKTTAICVVDSEGRRIWRGSCPTDPCSISKLISRYAGADAKLGVETGAMTPWLVHGLRAAGPDVAVLDARRVKAALQMRLNKTDQNDAEGLAQVVRTGWYRSVHVKSLDAHQARSLLGARAQLVGMRTRLSNMVRGVLKTFGLLPGADRGLRFDRRVEAMVEDTPDVALIVRPLLATWRQLREQIAVFDAAVQRRVKADATCRLLMTVPGIGALSALAFVSTIEDPARFSRSRSVGAHLGLTPRRYQSGEIDRSGRISGCGDVLARTLMYEAAIVILHRVKRALHLKDWALAIAERAGPGKARVALARKLSVILHSVWRSGEPFRWEPVPSAA

SEQ ID NO: 135470 - protein, 310 aa, unidentified
MKVVGIDISKHHFDLYLLPEGKAAHYSNDAEGIQQCCRFLAEVRPERIVLEATGGYELALTLALQTAALPVIVVNPRRVREYARSQGRLAKTDQIDARMIAEFGQSPRVPVRELPDAQGRQRMEWLARKRQLVEMHVAESNRLEHATDPLVVRGIRRMLTMAEQEIAKIDKQIAGAIAADPQLQRKAEICDSAPGIAAATAAVLVTELPELGRVNRREIASLVGLAPLNRDSGQFRGQRTTGGGRVRIRNALYMPMLTVIRCNPVIRRFYQRLLANGKSKMTALIAAMRKLLTILNALIKKDELWNPQLT

SEQ ID NO: 135471 - protein, 417 aa, unidentified
MNDVRWFVGIDWATKQHRICLFDAEGKRVAERDVTHDGAGLSELCSWLIETTKAQPAQIAVAIETPRGPVVEALLERGFQVYAINPKQLDRFRDRFSVSGAKDDSRDAHVLGYSLHTDPQAFRRLAIDDPLVIELREWSRMHEELTQERTRLANRVRDQLWRYYPQAFELTNDLAADWFLDLWQQLPTPAKAARATDKTVARILKSHRIRRWDAVEVLRILRQPPLVVAPGTTEAASAHIHSLAARIRLVNQQIKEAERRLDELCAAIAASAETKPGQICEQRDVAILRSSPGIGRIVLATLLAEACEPLRLRNYHALRVLAGVAPVTRRSGKSCIVVRRYACNDRLAQAVYHWARAATQHDPISRQRYTELRRRGHSHGRALRTVGDRLLGVLCTMLQRQTPFDPQYKNPQIAATA

SEQ ID NO: 135472 - protein, 404 aa, unidentified
MYNAVGIDVSKGKSTIAVLQPGGTVIRKPFDVSHTSQNLNELADYLGSLEGPSKIVMECTGRYHEPMLKVLYEAGLFVSVVNPHLIKNFGNNSLRKVKSDPADARKIARYTLDNWTELRQYSNMDDTRTQLKTLNSQFSFFMKQKVAAKANLIALLDNTYPGVNKLFDSPTREDGSEKWVDYAYSFWHVDCVRRIGLKTFTERYKAFCKKHHYIFQQDKPEKLFNASKELVAVFPKEKTYKLLIQQSIQQLNLASGHVERLRQEMNALASTLPEYNTVMGIYGVGKTYGPQLIAEIGDVSRFTHREALTAFAGVDPGVDESGQHKSKSNRASKVGSARLRKTLFQIMTTLLQNAPVDDPVYRFLDKKRAQGKPYYVYMTAGSNKFLRIYYGKVKECLRNLEQAE

SEQ ID NO: 135473 - protein, 338 aa, unidentified
MKTHVGVDLHQRFCYLTAVNASGALCRQGQVVNEGAALRAWLRQLPAPRQVVVEASGFWPAFARAVGSESERLVMVHPQRVKAIASARLKNDRVDSETLAHLSRCDLLPEAWMADEATQQLRLLVRLRITLGRQRARAKNQLQAVLHQEGCRKPVTDVFGKRGRAWLKELELSPAARLVVDTWLREVDHLDVELAQQTRELERMARADARARCLQSVPGIGAYAAMVILAELGAVERFGNKRALASYAGLTPVVRESAGKRKRGGITHQGSNTLRWIMLQVAQVAARCSPGARSYYASLRQRKPAQVAKIALARKLLTVVWAMLHHGVCFDEELFMRG

SEQ ID NO: 135474 - protein, 337 aa, unidentified
MDYFAGLDVSMDETHVCVVDREGAVIYASKTASTAQTIADELRKAPSCRRIVFETGRMAPILFHGLSQLGLPVVCVESRHAYQALKSLATHKTDRNDARGLAHLARTGFFKPVHVKSLPAHALRALIIARKKLVSQRVTLENQIRGLAIVFGVRLPRALAAAFIKQALKASEGVAGLSTAIRGLIAARTAVMTAVAAIDTDMRRMTRASAACRRLMAIPGVGQLTALAFVAAIDDPSRIRRSRDIGAYLGLVPRRYQSGEVDYTGGISKCGDRRVRTLLYEAANVMLTRYKGQLKLKDWAFAIARRSTMRKARIALARRLAIIMHAMLRNGTEFLAA

SEQ ID NO: 135475 - protein, 323 aa, unidentified
MQGKEPSQQSAKARVYIGIDVCKARLDVYIYPLDKRLVVANDAAGLKQLKKAVAKFDVALVVMEATGKFHRLAHRNLHDSGFKVAIVNPLRSRKFAEAIGTLAKTDRVDARMLAIMGESLTPDAVAPPPEVIEDLQELARGREGFVDDRTAVVNKIGASKSAVLIAELKRQLRALDNAIANLEAEIERQIDADPVLARRFEILTSIPGIGHVAATALIAGMNEIGQLSSKEVTMIVGLAPIACDSGQHAGKREIKGGRKHVRTALYMPANSAAQHNPDIKTFYDRLISRGKLPKVAITAAMRKLVILANTLVRENRLWEPRHA

SEQ ID NO: 135476 - protein, 434 aa, unidentified
MICAAVERCAGIDVGKRWLSVCILIGPLNGEPRVERRRFGVNVGDLQQLRDWLQREAITHVVMESTGSYWKPVFNVLEDSVKVYLANSQEVKNRKGHKTDDKDGWWLAHLLRHAMIHPSFIPPRAIRQLRDLTRRRERLNGDGTSEKNRVQKILEDANVKLGNVLSDVFGVSGQLMLEALLRGQAKPEEIAQFAKGRTKQNMPAIIAALEGHQMSEHHRRMIRYSLAHMKFIEEQIEEIDRDIAAQIHAAGLDGPWQLLQSVPGVQQRSAAKILAETGADMAQFPTQRDLGSWAGVCPGNNRTAGKNRSSRPTKGNPWLRSALTECSWAAAAKKNCFLKEKFWRITTKHGGQKNSALIAVAHNLLQLVYIVLKTGQPFRDRQAPALNEQQKERLIRHHVRRLGKLGVRVHSLRAATGSLQNQPSACGADGSLTA

SEQ ID NO: 135477 - protein, 452 aa, unidentified
MTVNAAVLFLCSHPFAKGGTSMDTQQFEVIRPKCAGLDVHKKSVVAAVCTSDPITLTASYKTKVFNTTNSDIAALCDWLLAQDCHDVCMESTGKYWIPIFNILEPHMHVILTHPKYVKAIKGKKTDKRDAKWIANLFRFDIVKASFIPPADIRALRELSRYRLKLSYMRTAEKNRYQNSMTISRIRIDCVLTDPFGLSATRIMDYLLSDEPFNEEKCRSLIDWRVKASKDDVLDSIRGYNILEEQKFKMTHAKAHMDFINKSIDEIKAELFLRSRQYDSQIKRIATVTGITELSALFILSEIGADMSVFESDRHLCSWAGLTPANNESANKKKSTRCSRAGQYLKPLLIQCALAAVKSKKEPYFAIKYQRIAKRRGKKKAIIAIARMMLTSIYHMLSEDKDFHPDDYEATVNPPKQKPVVLTIKNTLQFLREQGADPETLKLIQQQCSAQAG

SEQ ID NO: 135478 - protein, 433 aa, unidentified
MIKINYMSTLFVGIDVSSKSNVVYAMDFDENKYINSSFSNNQPGADQLAEMIAECLHKHSALNTILLVLESTSVYSIHIANFLSSCELLMPYKPYVYCVNPKMTANYRKSYVAMDKTDPQDARLLADFARVGRTKKCEPWRGSQYLALKRLTRHRLHLAECITREKTYMVSNLYLKFSELQILEEDCQPFSNIYGATASAVLTEFLSLQEIMDTPEEELLQFLAHKSRNRIADISKTSELLKKAARDSYRLDKCMYEPLNVSLASSFNCIQTYQKEIKLIDQAIEKCISGMNPNAFLILKSIPGIGPVWAAGILSEIGDISAFHSSDALAKYTGLTWLKNDSGDFISEDNRVSKAGNTYLRYYIGEAANSVRHHIPEYADYYSKKYAEVTKHQHKRALALTSRKFVRLVFGLLVKNQLYTGEKLDAELNTEFE

SEQ ID NO: 135479 - protein, 348 aa, unidentified
MVVVTIGIDAHKSSLAVSVIDELGRELAHEEFGNDADGHDALHAWVVRLAPGERRFGIESTGWLARGVACVLLGRGERVVDVRGTLTDRERQRLRGQGKTDPRDALAIARVTAREEKLPPVRVDSPSRDLKLLCAYRQQLVGERNRVANRLHVDLVSMRPGYEKRIRTLDSGVRLDRAGRVLAGEQSVQAGLARRRIEKLRHLDAEIKQLQREIRAQVTALGSGLPQLVGLGYLSAARIIGEVGDIGRITSKARFARMNGTAPIPASSGQTQRHRLNKGGNRRLNHVLHMMALTQARMDPRARAYVERRRGEGKTRRDAIRALKRHLSDVVYQQLRADAGLGGLAAAD

SEQ ID NO: 135480 - protein, 371 aa, unidentified
MKKNTTGVLSPKQTSKRTSGPITIGLDLGDKSSRFCALDQSGEIVREDAVATTKSGLQRAFGSRKRCRIALEVGTHSPWVSRLLTQLGHEVFVANARQLHLISRSSRKDDRLDARMLARLARADPQLLRPIAHRGEQAQLDLMTIRVRATLVETRTKLVNTVRGLVKPHGLRLPACDAGAVRKHLLSELPEPMQRTLQPLLEQIELLTAQIKDSDARIEQIARNDYPETALLRQVSGVGPLIALTFVLTVGDKDRFAKSRDVGCYVGLSPKRSESGQSQPQLRITKEGDRYLRQLLVQGAHCILGFRGPDTDLRRWGKKLAERGGKNAKKRAVVAVARKLAVLLHRLWVTGEVYEPLRDSRDGQRVSQAAA

SEQ ID NO: 135481 - protein, 345 aa, unidentified
MVLSKIRQWLKTIKKTDQTCNRLYDHYIAIDWSLKTMAIGHMSRRDDHPRVFERPTEVKELKEYLGSLKGRTILTMEESGTAHWLYLELLDCVERIMVCDPFHNRLLCHGPKTDKIDAGKLCELLRAGLLKEVYHSDNGLYELRTLVSAYQDVVSAGVRALNQKKALTLGHRDKGKSASFIGEILQENIDLYRRSKQQYERRLDDVARRNELVRFQREIDGIGTIGAVRIVATVVDARRFPYAGKYFSYCGLVTHEKLSGGRSYGRRKPRYSRVLKSVYKTAPIAALQGANPMREYYDHLLAQGIAERNARHAVARYIARISYGMLKSGTRYEPYRWRGRTKEAA

SEQ ID NO: 135482 - protein, 358 aa, unidentified
MNLKALKVTDFTGQNIYVGIDIHFKSWTVSIYSDEFELKTFTQPPEVALLEKYLKTHYPQATFHLAYEAGFSGFWIQRAFSSRGLPCEVVHAADIPGSDKERIRKTDQVDSRKIARGLKNRELNAIFIPDEQLESDRMLVRRRLKMVKTLTMCKNRIKAFLKYKGVVIPEKYAGGSWSKSFFEWLNHVCFTETSSKMAFQFILDEAYFLLNQLKQIDNSIKELSVNPLYCDRVKLLRSVPSIGTLTAMILLTEIGNINRFKNTDHLCSYCGLIPNCHSSGQTERITGISRRGNSIVKTALIECSWMAIRKDPALLLYYKQLLPRMNGNKAIVKVCRKLLNRIAYVLRCQQEYIPGLVA

SEQ ID NO: 135483 - protein, 358 aa, unidentified
MAVIEGVCRIVGGVDTHKDLHVAAIADEQDRIIGTRSFATTRQGYRQMLAWMRSFGELQRIGIESTGSYGAGLLRFMQQAKVTVLEVTTPDKQDRRRRGKNDDLDAQNAAHAAFAGQRTVTPRSRDGMIESLRVLKACRKTAVSARRIALQMIHNTIVCAPDGLRDQLRSLTRMQLIRTLASWRPDLTAYRDLDSAYRIGLKSLARRYLELHDEIADLDAMIAAIVDELAPNLVARNSIGHTGAAQLLLTAGDNPERLRSEASFASLCGVSPVPASSGRTVRHRLNRGGDRAANSALHIIAIGRLRTDQRTKDYVARRLAEGHSKLDAIRALKRYLAREVFTLITQRRKEINATRIAA

SEQ ID NO: 135484 - protein, 320 aa, unidentified
MSALSVTVGIDVAKAPVDVCVLGTHSDVQRFANDVDGHSALAAALQSLDVGLVVMEATGGYEAALACALQAVGLHVAVVNPRHARDFARSMGRLAKTDAVDARMLAEMAAVLVHREDLARYLRPVANECQQWLAALVTRRRQLLAMLGSERQRLQITNRKLHPSIEAIITVIKAQLDDLETQMVGHVREHFGELDGLLQSTNGIGPVASATLIAQLPELGRLNRREIAALVGVAPMSNDSGNRKGRRRVQGGRFEIRRVLYMATLTAARYNPVIRAFYERLKAAGKLPKVALVACMRKLLTMLNAMVRTGKPWDASLHSA

SEQ ID NO: 135485 - protein, 472 aa, unidentified
MIYSVGIDLHQGRHRARCLDEKAQPCDGFIFQTTPEGLATLEERVFRDGANPIIVLEPAGLPWLMVAVYLRSRHPDCRLVKAKTQKVAALRRYLRGPVKSDRLDALTLAKMPFIDPEKLVEIYLPPAKIHALQRLTRQRKRLESDVSGRKIRISAILDGYLPGVRRAFNDAWSTPFRAFLRSRLNPFAVAREGEEALHTFLSKASPRSKWSRAETRPVFLACQSVADVCELSEPAGTVNEEFFMDLQDEIARELRLMEIEEAESESLARRIAELYRILHPLDDLCTIPGVGEHTAPIFLATVGNPARFPNQSAFANWEGVVLGARQSSDVQAKGLRMTKAGPSIMRMALYQAGDIGRRWDPQLAAVYYREMVYHGKNHRQAMGAVMSHLGARVFTVLKGGRPYEIRDNEGNPISKDDARRLILDKYQVPEEIRRERRRRNRKVSKNRETATYRTNEAAKAPQPVLVQAISRK

SEQ ID NO: 135486 - protein, 373 aa, unidentified
MELERTFVGLDVHARSVVAYALEDVTGELTRARLVPDPEVILAWLQQLPGPVAVVYQVGPTGFGLARFLFAAGLRCVVAAPTKLHRPSGDRVKTDARDALLLARLLRLGESVAVRVPTLEQEAARDLVRVREDVRGDLLRARHRTSKLLLRQGVVWSGGTAWTSTRHLWLGKQHFDRLGLQVAYDSSLEAVLLAQSRRNRLDKTIAEMAALPAWSPVLTRLQCLRGVSTLTEFGLAVEIGDWTRFTGSSIGAFLGLVPTESSSGEGRSQGSVTKTGNTHARRLLVEAAWHHRRPYGAPSKVMRDRWDQAPAAARARGHAGNQRLYERWVTFGQRKKRPVIANVAIARELAGWCWSLATLEDTERAPTGRAARR

SEQ ID NO: 135487 - protein, 359 aa, unidentified
MKHDEKEPAIIGGVDTHKDSHTAAAITELGTLLGTQTFPANAQGYEELLDWLRTHGTVDRIGVEGTGSYGSGLSEFLRQAGVAVEEVNRPNRQSRRRHGKTDDTDAVSAARTTLAGEALGSPKVRNSLVEAIRVLRVERRSAIHSRTKTANQLHALVTTAPEPLRAELRGLSVRALVDRARRMRCPKVTDVESATKRALRGLGRRWHALHEEIGELDVELEPLVRKVAPDLVALVGVGIDVAGSLLVAAGGNPERLRSERSFAALCGASPVDASSGKQHRHRLNRGGNRDANRALWVIALVRFRRDPRTRDYVARRTAEGLSKPEIMRCLKRFIAREVFKVLRSLAPSTKTSASPQEAA

SEQ ID NO: 135488 - protein, 386 aa, unidentified
MMLIGIDPHKSTHTATAIAPDANHEVASIRIDATLSEYRRMLTWARQWPQRRWAVENAEGLGRHLTSWLLARGEDVVDVSTTATARVRQLSRGGGRKNDRIDAGAAACVAALQGDARPLEAEGYADAMAVLDERRVNLAQSRVRAVNQLHALLRALIAGGAPRDLSATTAAALLRTIRPHGAVEKARKAVAKDLVSEIRTLDSQLKANAQAIAQLVAAAGSTLTDVVGVGPIMAGRLISRTGPASRFPTASAFANYAGAAPVEIASAEKSRHRLSRHGDRQLNSALHTIAITQIRMSGSRGNLYYRTKIAEGKTPREAARCLKRRLADHLWRVMITDERRQAASPGGHLGTTLQSSAAGSTPTTSSSDKSLPRLANHDSTTTKPAA

SEQ ID NO: 135489 - protein, 374 aa, unidentified
MADYSEVFVGIDTSKLRNAVAIAEGGRNGEVRYLGEIDNTEAATSKLVKKLAAQHRRLTFCYEAGPTGYGLHRLIKTLGHECVVVAPSLIPKKPGDRVKTNRRDALNLAKLLRAGELTAVWVPDARHEAMRDLVRAREAAVDDLKSKRQQVLSLLLRLGRHFTGKRTWTRAHMNWLVSQKLAHREQRIAFEEMLLAVRQADERVIRLERAIAAAVPDWSLAAVVTALMAVRGLDLISATIFLAEIGDLSRFASPRQLMAYLGLVPGEESTGDRVWRGGITKAGNHRARRILVECSWSYRHPPRVGKKKLARVEAAPPAVQEIAWKAQARLTARYRALARRGKRPTLVVTAIARELSGFIWAVSRAVGAPATPAM

SEQ ID NO: 135490 - protein, 348 aa, unidentified
MTVYIGVDFHARQQTISYLTTERREIRRLVLMHKDRMSVRAFYEGFSGQRVVVGFESSGYAAWFEELLEELDCEIWIGHATYIRQFAKRRQKNDRRDADLILELLVTGDFPRIHRYQRRTREMLQQLRYRHRLVKMRTMVMNMLLFMASSRGETLRTQLQSKRGQARLAALSLPPPLGEQRDGLLHLLQELDEKIAAMERWLKQQTADDVAVQRLQTHPGIGLLTSICVRYTLEDVKRFSTTRKVSAFAGFDPMEVSTDDYRRIGAISKQGSRWLRFYLVEAGQVAMRTDADLARVYHRVSRRGGHAKAKVAVGRRLLVRAFIMLRDEIDYQEFQRRGVAARSAREIT

SEQ ID NO: 135491 - protein, 439 aa, unidentified
MSASRPGSSDKENTVTAVDQRPLAARIGLDWADGHHDLALLPDGSEHVERFRIAHTPEDLREFLGELQRRFQGRSVGVCLEKCRGAIVHALLEYDFVRLFPVNPLTLSRFREAWTPSRAKDDPTDAEALLEILCKHANRLRCWTPDDADTRTLARLTEARRNAVDLRTRLTQALRAELKGYFPQALDWTGKTLTSQLACDFLLKWPTLEAVQRARPETVRKFYYGHNCRRGDIIEKRLQHIATAAPLTTDPAIIDVSVLTVQLLARQIRELGPAIQRYEEEIEKLFASHPDAEIFASLPGAGPAIAPRLLAAFGTDRDRFEHATEVQEYSGIAPVTERSGKKEWVHWRWAASTFLRQSFHEFAGLSIQQSEWARAHYDVQRERGKRHHAAVRSVAFKWIRIIFRCWQTRTPYDEQRYHQALRRRGSPLAHRLHPIARAA

SEQ ID NO: 135492 - protein, 457 aa, unidentified
MQQFYLGADVSKGYSDFILVDQHKRTVEDNFQLDDTAAGHAQLYDQLYQFLDQHPKAEILAAVESTGGYENNWYNTLVKFQGSLNIKTARLNPEGVYCNSKADLKRTITDKVSAKSIAEYLVAHPDKVVYQQEDYWAPMRKQWSFVTLLTKQKTQLLNQLESLVYTANPEILQYCRDGMSQWVLKLLKQYPTAEKLSRARLATVARIPYLNNDRAKLLIAEAKTSVASSQDNFTGQLIGSTIEHILQLEKSIKAQVKILAENCSIPEIEILKTFSGINDYSAIGLMLELQTVGRFSTAKKLASFFGLHPVFKASGDGSTVARMSKKGRKAPRRILFMVALAAINCNPLIRDLYQKQLANGKKKMAAIGVCMHKILRIIYGMLKNNTAFDPEIDKKNQSRSSKKALSEPKDKSRRHQSYDSNAPVSRRQRLKRKEQKMSHSATSDTTCGINTSAPEPL

SEQ ID NO: 135493 - protein, 423 aa, unidentified
MPTKTLYVGIDVSLKSNQVCSINFNQDIFFNESFENTPSGTEKLILKLLDIFNTHEDLNKLLVCMESTNVYHIHTSSLLANDSRLANYGVKVYVENAKSIENYKKTFVDREKSDPEDAFLCADYVRIGKCKNSHPINGYQKIALQRLTRQRKHVAEQLAKEKQYLSTNLYLKFSALKVNPSESPFSNMFSKTASSMLIDFLTTEEIVEASLEDLISKIIEVSHNRFDDDEEVAKLLKKAARDSYRLDKVSSDSVSMSMASSFRLIQFYETELRNLDKEILRLIEGSNNVYLTILTSIKGIGLVYAAGIIAEIDNISYFINHNKLAAYCGLRWKKNQSGEKDSKHTKQTKTGNSYLRYYIVEATGSCLRYNDELNAFYHKKYKEVKINPHKRALVLTARKFVRLIYGLLAHSKLFDPTYQPSIS

SEQ ID NO: 135494 - protein, 348 aa, unidentified
MRFYTGQHRFYCGIDLHTRTVSLCVLDPAGAIALEATLPPEPDRLLAALAPYRDGLVVGCECLFAWYWLADLCAAEGIPFVLGHALYLKAIHGGKTKTDTIDAQKLARLLRGGTFAEAYVYPKAMRATRDLLRRRTYLVRKRAELLAHLQMTFLQYNFTPPAQKFCYAANRAGLDLNVFPDPSTRSMLAADLAIVTALDQQIKRLEADLVRTAKVHDPQAFHRLRTVPGIGPVLALILLYEVHAIGRFADEGRFLSYARLVGGVRESAGKKKGTGGRKIGNAHLKWAFSEATCLLLRESPKAKSWLARKERRIGKKRALGALAARLARTVFHLWRKKEAFDESKFLAS

SEQ ID NO: 135495 - protein, 387 aa, unidentified
MPQPNDSGKSLVALDQDSTLVAVIEMGQASWLVAAIVPGLNRYPLKKIATDAEQLLQVLRRWKKEAETAGRTIQRVAVAHEAGRDGFWLARWLRARGIEAYVIHPSSVPVSREHRRAKTDRLDTELLKRAFLGWLRGEPDHCSMAAIPTLTEEDAKRPGRERENLVGERTRIVNRIKGALARLGIRNFKPVLRNASQRLETLRTPEGAALPPNTLAELQRDMARLSFVKQQIKEVETTRLERLQRAPGEAGNAMVQQLTRVVGVGVETADMLVQEVFSRNLRDRKAVARYAGLTGAPDESGKRRRERGLAKSGNARVRRGMLQIAWGFLVHQKDSALAAWYRARTADARGATRKTMIVALARKLLIALWRLATTGEVPEGLILRAAT

SEQ ID NO: 135496 - protein, 348 aa, unidentified
MALTIVEDRRAITGGVDTHADTHVAAALDPIGGLLGVQEFPVTPAGYARLLGWLGGFGTVALVGIEGTGSYGAGLARHVTAAGIRVVEVDRSDRQDRRRQGKSDPLDAISAARAAQSGRARGAPKGRDGAVEAIRALMVAKRSARAERTQTINQARSLVLTGPDDLRARFAGHTVTALVSELASLRPRPGSTVGYATRIALRELGRRAEFLDRQLERLDELIVPLVTARAPALLALHGVGPDTAALLLIAAGDHPERLRSEAAWAHLCAAAPIPASSGKVTRHRLNPGGNREANHALWRIVITRMSNHPATRAYVERRTTEGLSKTEIIRCLKRYVAREVYRHLRTAG

SEQ ID NO: 135497 - protein, 350 aa, unidentified
MQGNGRWIGLDLSKKTYEMCYFDQKGKVGRSGEETTKGGRAKLYAKLKAEDIVAMEVNSLAFVMEKEMRQIGCTVVILDASQLSVIYASTKKTDKEDALKLARLVKIYEKEDLPIVDVPTEKEYYRRKLTKECKTLKDDRTQEINRLHALFLQCGITTMKRSNLQTDANRQKVLPQLFGYEVGQAKRVCERLTLLEAQIKELEQTITKECKADKDIERLKTIPGVGDKTALAFAAYVGDGKRFNNGDEVANYLGLVPRVDCSGSINRYGHITKKGNRIVRALLYQAAWSIVRSKHGGALKAKYFYMTEHGKGKKISITAIARKMAKLMYLIMKNKGEEYKELPFPASRAG

SEQ ID NO: 135498 - protein, 408 aa, unidentified
MECMYPRCAGLDVHKDTVVACVRIQGEGSARRVTKTFRTVTTDLLALADFLGEHDVTHVVMESTGVYWKPVWHILEEGFTLLLANAQHVKNVPGRKTDVNDAAWLADLLAHGLIRGSFVPPTPQQDLRSLMRTRKQLVREKAQHIQRIQKTLEDANIKIDSVISDVDGVSGRAILRGLIDGEADPARLLDLTTGRLRAPRQHLLEALRGHVRTSHRFLLKLHLEQIEGLEHAIASIDEEVGTTLGPFREAVQTLATMTGIKDLAAEVIISEIGVDMSRFASADHLVSWACMCPRNDESAGKRRKTAIRKGAPWLKATLVQAAWSATRSKTGYLRAKFHRIKARRGMKKAIIAVAASMLRSMYYMLRDGVPFRDLGADYFDRVDKAKASRRLVKRLENLGFNVAISQAA

SEQ ID NO: 135499 - protein, 394 aa, unidentified
MIIIGIDIGKNKHEATLIDEKGNIIGKSIKFENSTAGFNKLISSINNYNISNDKFVFSMEATGHYWLALFSKLVESDYNVQVINPIQTDACRKFYIRETKNDSKDSFLIAQVTRFNGYSKTTLPDEVMISLKELTRFRTFLVDDISDYKRKATVVLDKIFPEYTQIFSDTFGKTSKEILTKYPLPKDILNEDLESLAKVLSTSSKGRLGYSKAEQLQNLAKESFCIKFATEALVMEIKSILSTIEHLQNQVSKLDEKIAVLLRSLGTTIETIPGIGPVLGAIIVSEIGDINRFSHASKLVAYAGIDPTVKQSGEFNATKNRMSKRGTPYLRRALWTASIVAAFNDPNLHEYYLKKKNEGKHHGTIIGAIARKLIYRIFIVLKDNIPYQCNKYEA

SEQ ID NO: 135500 - protein, 370 aa, unidentified
MEEGIKFFVGLDVHKDTIAVAVAETGRAPARLVGSIAHDVNQLLKRLARYGEPAQVHVVYEAGPTGYGLQRALARRGYQAQVIAPSLIPKRAGSRVKTDRRDSLRLAELSRAGELRAVWIPDPADEAIRDLARAREDAVNARTQVRQQLKGFLLRHDVRYARRTSWSKTYYRWLATLHFGETGVQTAFTAYWQAVSAADERVGRLTTALVGSIAGWRFASIVAALQALRGIDQINAIGLVAEIGDIGRFAHPRQLMSYLGLVPTEASTGERVVRGSITKTGNAHARRLLTEAAWNYRFQPRIGMRAQRRAEDLPQAIRDVAWKAQLRLSGRFRRLHTRGVHLNKVCTAVARELAGFVWAVARARSELPQS

SEQ ID NO: 135501 - protein, 355 aa, unidentified
MESVKYIGLDVHQSTISVAVLNREGKLLMQSVIATQATAVLDLLKGLHGVLQVTFEEGTYSAWLYDVVLRHVARVVVCNPRKNALLKSGNKSDQIDARKLAELLRAGMLSPVYHGEQSTRTLQQLVASYTALTEDTGRAMRRIKALYRSQAIACAGKKPFGKRYRGEWLARLSDSGQRRRVEWLYQELDAVQILRREARHAVMVECHKNQAAKLLRSMPFFGPLRAAVLIARVQTPHRFRTKRQFWTYCGLGLETRSSADYVEKDGQIMRRRKPVYIRGLNWNYSHELKNVFKSAATTASAMDGPFGAFYASRVANGMLPAMARLTLARKMAAIALILWKKGETFAAEHLKLQAA

SEQ ID NO: 135502 - protein, 440 aa, unidentified
MRPGTRMGNCRVQESAAHRISMSTEKRKVCGIDVHKAFLVATVVDREGKSETRRIQQNPESLLELRDWIQSENCDSVAFESTADYWRSLYLVLESRVPVTVANANHIKHVPGRKTDITDSRWIAQLELNGLITPSRIFAGEMYDLRSLTRSRELLVQNRTELKNKIHHLLDSANIRLSSVLSDLFGKSGTIILQGLVQNKPLEEIIESLPKKMRGSADVISATLPASIPPVTLVLLQSYLKLVDDLDNEIKLIEGRIRESLTGKSREIQILTSIPGIGFIGASTLIAEIGNVHDFGDADKLTKWAGLTPSVYQSANVTRTGSITKQGSRHIRWILVELAHVAIRSPGRIKTFFERLMPKKGYKKSIVAVARKMLRIVWHLMVHDEVFIDDFPRSKQVKFPKMPKKIQAVGINRIIELLSKASEVIIRDRDKEIFRLGLSD

SEQ ID NO: 135503 - protein, 356 aa, unidentified
MSREVKYIGMDVHKEAIVIAVLNDGGKLAMESIIETKASTLLQFIHGLRGELHVTWEEGTWAAWLYDLLKPHVHQVLVCDPRRNALLKEGNKNDKVDARKLADLLRTGMLRPVYHGEHGLRTLRELGRSYQTISKDLNRVMNRVKALYRGWSIACAGTQVYAPRYRQEWLGKLEHAGVRRRAELLYEQLDGLQALRRTLRPELLAESRKHKASKLLRQIPCIGPIRAARLIGLMQTPHRFRSKRQLWTYSGLGIETHDSAQYCYVHGQLQRSKKPQQIRGLNRNHNHEMKEIFKGAATRASCGVGPLRDFYVALLAKGMKPEMARLTLARKIAAIALTLWKKEERFDTEQLKAQAA

SEQ ID NO: 135504 - protein, 313 aa, unidentified
MDIIVGIDVSKERLDISIAPLGTAFFVENSHAGLDDLIGRLKATHGAEASCVVALEATGGFEMLAAAGLSSAGFAVIVVNPAQVRAYANAIGRRAKTDPIDAEVIAAFVAATRPEIRPLRDAETQALSALVDRRRQIVQMIVAEQNRLRMVVETQAQKSIKRLLAALRRELDSLDADLVEHIRKSPLWRVGERLLVSVPGVGPATARTLLAEMPELGGLDRRQIAALAGLAPWTRQSGQWKGKSFIGGGRGKVRAALFMAALVASRHNPILKAFRDRLVAAGKPRIVAIVATMRKLLTILNAIIRDNKPWQNA

SEQ ID NO: 135505 - protein, 393 aa, unidentified
MVYVGIDVAKDKHDCFIANSDGEVLYDVFTIQNDMDGFEDLLFKIKIASKDLNKVKVGLEATGHYNCNLLGFLKSKGLPTIVINPLHTNAYRKSLSLRKTKTDKADARAIASMIMSDVSLKPYSDTLYHNEDLKSLSRYRFDKVSERAKLKQSVSRLVNILFPELEKLVSSLHTKAVYELLSEFPGAHQVASANLKHLTALLSTASKGHFGRDKANEIREAARRSISTYLPAKSLELRHTIKLIRELDAEIAEIETEIKKIMDSIDSPILSIPGISYGIGAMIVSEIGDFSRFDSPDKILAYAGCSPTTYQSGQLYSSHAVMEKRGSRYLRWALINAARYVCNWEPTFTAYLEKKRSEGKHYYVALSHAAKKLVRLLYHLETTGEKYIPQTLS

SEQ ID NO: 135506 - protein, 358 aa, unidentified
MAGKVTETAVVGGVYTHKDLHVAAVVDQNNKVLEPQFFSTTRQGYRQMLAWMTSFGALKRIGVECTGTYGSGLLRYLQNAGLEVLEVTAPDRMERRKRGKSDTIDAECAAHAAFSGIRTVTPKTRNSMIESLRVLKTCRKTAISARRVTLQIIHSNIISAPDELREQLRNMTRMQLIRTLGSWRPDASEYRNVTNVYRISLKSLARRYLELHDEIADLDVMIAAIVDELAPELIKRNAIGYESASQLLITAGDNPQRLRSESGFAALCGVSPVPVSSEKTNRYRLNRGGDRAANSALHIIAIGRLQTDDKTKEYVARRVAEGHTKMEVIRCLKRYISREVYTLLRNQNRQINSIPITA

SEQ ID NO: 135507 - protein, 403 aa, unidentified
MNAVGIDVSKGKSMVAVLRPGGKLLARPFEVLHTKSGIKELISFVHTLGADTRIVMEHTGRYYEPLLQWLAASDLFVTAVNPKLIKDFGNNTLRKIKTDKADAKKIARYALDNWVDLRQHTGMDTTRAQLKTLNRQFAFYMKQKTACKNNLIALIDQVYPGANTYFESPTRADGSQKWVDYVCTFWHVDYVCAMRLSAFTERYRKWCHRHGYNFQPDKPRLLMEKAKDLIAMLPMDKTTKVLVQTSIAQLNVLSKTVEALRTQMIALAEQLPEYPVVIDMNGVGPTLASQLIAEIGDITRFPRRGSLTAFAGVDPGAKQSGTMQLKSNKTSKAGSPHLRRALFQIVSGLLMRSPDDPVYNFMDKKRSEGKPYYVYMTAGANKFLRIYYGRVNEYLAGLSQEQE

SEQ ID NO: 135508 - protein, 447 aa, unidentified
MELFVGDDWAEDHHDVEIQDASGRVLARARLPEGVAGVARLHELIGARLGENDGPGGVAVGIETDRGPWVRALIAAGYVVYPINPRQAARLRERHSNSGAKSDQGDSHMLADAVRTDRHQLRRAAGDSALSEAVKLVARAHQTLVWERTRHVARLRAALRESFPAALAAFGDLDAPDALELLSAAPDPASAAGLGEERIAAALKRARRRGVAGKAAEIAAALRAEQLGQPAPLVAAYAAVVRSQVAVIAALNDQVKEMEKEVEAHFGGHREAEIYLSQPGFGVVAGARALGEFGDDPGRYADAKSRKNYAGTSPITRASGKRKTVHARFVHNDRLIDALRAQAFSALSTSAGARAYYDELRARGADHEPALRQLGNRLVGILHGCLKTRTLYDEATAWGHHASRLEEAAPGHRRGTSGGQPGRQRRSGQQHGLNARPPAGARLPKAS

SEQ ID NO: 135509 - protein, 340 aa, unidentified
MEVRTLGIDLAKNLFHVHGVDGQGRTVVQRQLRRRQLLPFVAQLQPCLVAMEACGGAHYWAREIAERGHEVRLMSPRFVRPYVKSNKNDARDAEAICEAVGRPSMRFVAVKSQAQQDMLALHRVRSLLVRERTALMNQMRGLLAEYGIVVPQGAVPLRRALALILEERDNGVSEILRELLVEMSERQRLLEDRLKRYDQRITEFARADERAGRLMAVEGVGPLTATALIAAVGNARQFRSGRELSTWLGLVPRQHSSGGRSVLLGISKRGDRYLRTLLIHGARAALRFVARKRDPRSRWIGAVRERRGANIAAVALANKNARVLWALLARNEDYRVATAA

SEQ ID NO: 135510 - protein, 332 aa, unidentified
MEASSICVVDGAAKIIREAKLSSEPEAFIAWFKALPFSLARIGLEAGPLSQWLYAALKEAGFAVELLETRHVRDAFKAMPVKTDRNDARGIAQLMRLGWFRPVHCKSAPAQETRALLTARKLVQGKLYDIEMSLRGILRGFGLKVGRTKKAGFASRIMELTEHHPALKAIAKALLTVHEVLLKELNRFENQVRKLARGDARARLLMTTPGVGPIVGLTYVAAIDDPARFSSSKMVGAHFGMTPKKYQSGAIDVTGRICKMGDKGVRAALYEAAHVILTTPVKGGALKSWAAKLARRAGMRKAKVALARKLAVILHRMLADGSVFDVTKAAAA

SEQ ID NO: 135511 - protein, 422 aa, unidentified
MLEETHDNDQIIQRVAALDIGKAELVCCVRVPHPDRPGKRLQEVGSYPTMTRSLLVLVDRLGELGVTRVVMEATSDYWRSPFYLLEAHGFEVLLVNARDVKHLPGRPKTDRLDAVWLCKVAERQMLRPSFVPPPAIRRLRDVARYRVDLVEVRTAEKQRVEKLLEDAQIKLSVVASDIFGISGRQMLAALIAGERDPKLLAQLARGRMRAKLSVLAEAFTGFFTDHHGFLLAKMLARVEALDADIAELDRKLEELIVPFGQAVDRLDEITGVGRTAAQLILAEIGTDMGRFPTAGHLASWAKFTPGVKESAGKKKGKSSTGHGNRYLARVLGEAAVAAGKTSTFLGERYRRIARRRGTKRAIVAVGRSILVIVWHLLSDPDARFHDLGPGFYDTRIDAERKKRNHIRQLEALGYKVTLQPAA

SEQ ID NO: 135512 - protein, 382 aa, unidentified
MNRILKIGMDVHSTSYTLCAMEPVLGGEDRIFANIQVTSDYRNVVQFIDKLKEKLGSSDSYSIECGYEAGCLGYSLYHQLTKAGVKCTILAPTTMLTQQGKRVKTDKRDAVMIAQCLSYGGYHAVHVPADKDVSVKEYLRMRDDHKVALKKIKQQINAFCLRQGYFYAGNKWSIKHLNWLKKLVLSDLYRETLNEYLTSYEEQIAKIERFDKRIEELAEDSDYQENVKKLGCLLGIKTHTALSLIVETGDFKRFRKGNTYAAFLGLAPGESSSGEKINRTGITKAGNSHLRMLLIEAARGMCRGRIGYKSKVLRSRQDGNPTEVIAYADRGNTRMRSKYYRMIRHGKKDNVAVAAVARELACFIWGLMTNNITSKEEGTKAA

SEQ ID NO: 135513 - protein, 342 aa, unidentified
MTRVNASEPSPPDAADAAADAAGDDGIFVGVDVSKAKLDVARSDAGNAVQAFANDPAGIAELVRRLLVAGRPVRLVLLEATGGLERPLVAALLEAGLPAASVNPTRARYFAIGAGVLAKTDPVDARVLVECARRGEHRLLRKRDERRAELEALVTCRRQLLHVRTEQSNRRDGTTSRPALRAIDAVLKTLDRQVPGLDRQIEKLIESDDDLRRDGGILGGVPGVGAVLTATLLAELAELGAVGRRAVTALVGVAPYPDDSGPRTGRRRIRGGRASVRNALYMATLSAIRFNPVIRPFAQRLRDRGKAAKVVIVACMRKLLCILNAMLRDRLTWAELDLVKNA

SEQ ID NO: 135514 - protein, 387 aa, unidentified
MPQPNDLSRSLVALDHDSTIIAVVEMSQSSWLVAGMLPGIERQPRKKLEPSAERLLGLLHRWRDEAVKAGRKITRIAVAFEAGRDGFWLARWLEARGVEAHVIHPSSVAVSREHRRAKTDRLDTELLKRGFLGWLRGERGHCTMARVPTIAEEDAKRPNRERECLVGERTRIVNRMKGTLARLGIRNFKPTLRKAAERLATLHTPEGSALPPNVSAELRRDMARLGFVVSQIKEIEEARQERLEQEPETGPHAMVRHLARVVGVGIETADMLVNEVLSRPMRDRKAVARYAGLTGSPDESGAKRREQGLARAGNARVRRGMIQLAWRFLRFQKESALARWYQARTADSRAGTRKTMIVALARKLLIALWRFVTTGETLQGVILRPAG

SEQ ID NO: 135515 - protein, 347 aa, unidentified
MYYCGIDIAMKSSYIYITDSRGRKKISGEVKTTYMALTRRLRPYVRPGLKIAIEAGNQTAWIYDCLVRLGAEVVVVNPAKVKLIAESRRKTDKIDAKILAELLRLDGLPEPVHMPGREARELRGLLVARKQLVNARTKLCNVARGMLRQEGIRLPARHLSTFKGWQTLLEHEGYECNHIAPMLSAYYESFVSLTRSIQALNKQLTQREQNDERVARLQTMPKVGQIASLTFIAAVDDVKRFGSSRKLVRYSGLCPTVRSSGERTEYGSISREGRSDLRAVWIQIAHLVASDHSRQTARLRRWYQKVLRHRGKKTAVVALARKLLTIAYRLLYDETDYRSVLVSQKAA

SEQ ID NO: 135516 - protein, 396 aa, unidentified
MRFFGVDIASEVHVVAAVGAEDEVLLKPTKVEETGAGHERLLELLGDKADALVIMEATGHYWQNVFARLAGAGFQVAVVNPLAVRRFGESQLTRAKTDAADALLIARFGRAHRPLAAAVPDEALMELREHMRLRDRWVQDLGDRVRQLHRLVDLGFPELTRHVKDLGSSLATTLLARCPTAAAFRQVKPSTLAKLKYDGRHHVPEELAAALVAAAKSSAGMHHGPAYRLGVQTACEDIDVLRKRIGEIDRNIKGLIAASELASLLQTIDGIGPTTAARILAEFGDPSEYASAAAFTAHFGVVPGVNHSGKSTPSRAPTTSLGDAKLRAKLWMPTLTAVVRNSWLKAFYDRLIARGKPAKLALVAAMRKLLTAVYSVAKSRRPFVPRLPEPPAENPC

SEQ ID NO: 135517 - protein, 338 aa, unidentified
MNIARIGIDLAKQVFQIHGVDRTEKVLVRRQLRRSQMLDYFSKLTPCLIGMEACGSAHYWARELGKLGYEVRLMAPQFVKPYVKSGKNDANDAEAICEAVGRPNMRFIAIKTVEQQVIQAEHRIRARLIKSRTALSNEARGLLAEFGVVVATSIGKLRKALPELLEDGENGLPESFRVLLAGLGEELRSLDDSITAFDARIAQAARDDDRIRRLLEVEGIGPITASALVAAVGNGTQFNSGRDMSAWLGLTPRQYSSGGKNRLGGISKRGDKYMRMLLIHGARAALNAAKNKEDGRSRWVKNLATRRNKNIATVALANKNARIAWSILSRSESYRKAA

SEQ ID NO: 135518 - protein, 485 aa, unidentified
MAKRKMSTFERLQHGKLNRNQRRELGRRLNSEDSGLQVVHPDAAGIDIGNESHFVAIPPDRDPTPIREFGSWTADLHQMANWLKEHGITTVALQSTGVYWIPVLEVLEQAGLEVYLVNARGTKNLPGRKTDVQECDWIRKLHTYGLLRNSFRPPEEIRSVRTIWRQRDRLVQESGRAIQHMQKALTTMNVQLANTISDISGATGQAIIRAIVAGKRDPWELAKLRDRRIFATKEEIAHSLQGHWREDVIFELRQAVESYDFFQKQMAACDQELIKYMAAIESRETTPKQDLPKDATPLSSAKPARRSKTRRKNQPGFDLATELERTMGADLTRIDGIDVITAQVIFSEIGSDFSAFPDENHFASWLTLAPKRDISGGKVIRNIPAAGRNRVANALRMAAESLSRSNSYLGARYRRLRARLDGPVAVKAMARYLACLVYRIVTKGQAYVDRGAAHYEKKRQERERIALERRALILGLKLVPAAPTK

SEQ ID NO: 135519 - protein, 351 aa, unidentified
MEMVSGLDLHRSQITFRTVDLRTGEVKRGKIYPGARDAFRDWLGGFEPGTDAHFALEGTTGWRFAVEEIQRRGFAAHLADPAELSERRGPKRRAKTDHADCELMVNLLLEGRLPESSIPPAHILELRALVRLRKTLVDQRIEWQQRLQAQLFHQGVVPGLRLCRPEDRRRLAGMEMSPAGRQTMGTGLVMLDDFDAQLGPLSAQLVGLARTQPGCRALERELFGVGWLTAVAIVAELGDCRRFHSGDQAVRSSGLDITVHESNGRRPGGHLARQGPAVLRWALFEAAQCAARKASPDHAYYLKVRDHIDHNRACLSVARKLCRRACRILRDLGDAAMAPPEPPARRDPKAA

SEQ ID NO: 135520 - protein, 399 aa, unidentified
MQYCLAIDVAESKSMFCVLSQVGELVLPPTEYGHSISGFQAVLDVLLALDETDIHIIMESTSIYHLPVERFFREYTGFEIIILNPIISKENKRNLRKTKTDREDCLNLANIFFHNDYNQQNSHEQLYHELQAISRHLNHVQEGQNRTKNRFKQLLSLTCPEYIRIFKDNSIYSPTALHFIGCYPHCDMVKQKRVDALASCLGSVHKRHPNYYRRKAELIKLTLQDSFPAVTEDSETVRCLTDITKQLAEQEAYIDQLKARLIDLAQATEAFTIYISVPGIGPFTAALLIAEMKDIRRFSNVKKLTAACGLDPTIIQSGKSINYHGPISKRGNRLSRKILFNAIMSILMVTKRTYPDNPIRLYYEKKRGEGKHHHACVAACSTKLLRILFAMCNQNSLFQ

SEQ ID NO: 135521 - protein, 439 aa, unidentified
MPTPSLPVLDPTAAAIDVGSEQLHVSIAGGRPKVFGTTTGELHGLRDYLLAQGVRSVAMEATGIYWLCPYEVLEKAGLEVVVVNGKYVKNLPGRKTDLSDCQWQATLHAHGLLKPGFVPPEHIRRLQDYLRVRTDHIVMAGSHEQHMQKALDRMNLKIHDVISDLTGVSGLKMVQAIIGGERNPVALLALCDPQVQKNKAGRLRAALEGTWKAEHLFALRQAYELWQFYQQKIVECDQAIEAVLKELAGPEDPKNPAPSSIKRGGVNTPRIGGLHGLLWRLCGGKDPTQLPGIADYVLLQLLSEVGTDLEKNWKTEKHFTAWLGLAPGSRNSGKRRGSQRRSRNRAGRLFCVVARSVGRSVDKALGGFYRRLKGRKGGLVANLALARKLAELFWRLMVHGIAYVEQGLKKYESKVAQTEQRLLQKLACKYNMVLQPKAG

SEQ ID NO: 135522 - protein, 322 aa, unidentified
MKMALFQVFVGIDVSRDWLDVHVLPFRQRLRVANTPAGWRELIEALSDYPQAALALEASGGYEGGVLRHLVAKGWPVHRLDPYRVRQFARAGGRRAKNDRIDAEIIARYLATFSLEPARLDARLDRLDEQVTYRRQLVEERTRIANQARLLRDPRLQRLSRQRLARLDLLIARQEQALAELITADPELNAKAAVLRSLKGVAATLAATLLAQLPELGTLCRRKIAALVGVCPYDFDSGRFAGQRRIAGGRKHLRNALYMPTLSAIRSDPTIRAFYLRCAEGKKQKKPAVIAAMHKILTILNARMRDHLDSLKHQQILAHAAE

SEQ ID NO: 135523 - protein, 397 aa, unidentified
MRFAGIDVASQTHVIAIVDEARDVLVKPIPFTEDAAGYQKLFATLGMPDDILVALEATGHYGRNLLAAMHERNFRCCLLNPLRTRRFAQEDLARAKTDSIDALGIARFAVQKRPLPTPAVDAATDELRELVRLYDRVNQDLFDRVRQIHRLIHLCFPEFKRYVRTVRSQRATAILGEYPTAKAFTDGCLAQLAEIRYDGKHYVGQVLARTLVEAAKVSVARHHAAAYCAEMRYLCGELDALRAKVSSLASEIEGRVGEHSVATLLLSIEGLGALSAARIIAAVGDPARFRNGAALAAYAGVVPGTNRSGLHRPGRASLCPLGNARLRRALYMTTLGAVRRNPWLHAYYERLRGKGKLPKVALGAAMRKLLLAVFAVAKHRRPFVPRLMPPDGDTAAC

SEQ ID NO: 135524 - protein, 342 aa, unidentified
MKNHQIGIDISKEKVNICLRSGKKSVWEYETPNTVASIKKAVQKGMRERGVTLNDVIVCAEFTGRYIYPLVCACDELRLFLWMEDPTRIKNSFGIARGKDDKIDARRIAEYADRFSDKAVAYGMPDRTLASIKSKLADRDMLLEDRKRYETQLHDQKGFMDPKDYAQKSRLWNAVIKTLNKQLALLDEQLAELVASDEKISRQMELLKSVDGIGDRIALYMVAVTMGFKRFENPRQFFCYAGLAPFKYTSGKSIHSKSKVSQRANKHIKALLHLAAVSAATHMKDSEYKRYYERKTDEGKHPMLVLNVVRAKLVSRMFAVIRRDSEYQRNYDFSINHEKLSA

SEQ ID NO: 135525 - protein, 389 aa, unidentified
MIYVGIDIASDKHDYYIIHDSLVYFSKDSLTISNSDSGYKKLHKDIQTFCGAMNDDRVRIGLESTGFYHLNILKYLTELGYDVELINPMIINLFKKSRKVHHPKTDNLDSKAIAAYISQQTDFKPYTIKSYHISALKSLSRERFNLVEEMRKTKLAIYKLITIIFPEYHTLFSNIYGESSLSILSSYSSPKKLSRARAETISRLLHGKCTIDAYSIILKAKQSIGNSSPQLEFCLLEKISTLKEQLKRINRYDTIIKEYVDLIDSYITTIPGISYITAGLILGEIGDITKFKNVDQLISYSGIDIEVYESGKFKSEYNHMSKRGSKYLRYALYQVSKTIWRFDPAFSEYYLKKQLEGKHFYVILGHIEKKVLRVIYSVLKNNKPYTPQV

SEQ ID NO: 135526 - protein, 341 aa, unidentified
MNVTTIGIDLAKTVFSIHGTNQHGKVVVRKRLNRPKLLAFFAQLPPCLIGMEACSGAHYWARELTKLGHDVRIIAPRFVAPYRKSSKNDDNDAEAICEAVGRPNMRFVPIKTEDQQAVLCLHRIRRGLTKERTAQINQIRGLLAEFGLIIPQGRYAARRRVPEILEDAENDLPMLARRLINNINQRIRQLDEEILAYDREVEAMARSDEQAKRLMAIPGIGPQTATALLASAPDPRQFKSGRHFAAWLGLVPRQYSTGGKVRLGRITKRGDKYLRTLLIHGTRAVIAKLPDKNDRLSDWAKDLVERRGYKRAAVAMAAKNARIIWALLMNQTEFKTQPVEG

SEQ ID NO: 135527 - protein, 345 aa, unidentified
MNYVGIDLHKKTISIWVVNQERQKIDHKRFACSTPEIIVAYFAKLGEFQAVVEATASYEWLVRLLDPLAKRIVLAHPKKLRVIAESTRKSDKIDARLLAEFLALDMIPQAYRPTPRQREHRVLVRHRCYLQRRITSIRNKVRRILSDYNADRPDLFTVEGLEYLAKVKLSAADRFAVTQLLAEFEFQHVQLKALAAELKKFIAKAPAAEAEAREVLHSIPGVGPVTTEVVLSELADPKRFRNAKCAVAYAGMAPGQRESAGKKKELHIERTGSKMLRWILVEAAWQLVRRTGRWRVTFERLSARIGRKKAIVAIARRLLGVMMALLKSGQPYRHAYEPAGAAAPV

SEQ ID NO: 135528 - protein, 362 aa, unidentified
MQHQGNELDFKGQNIYVGIDVHLKSWTVTILTETQPHKTFSQPPKPEVLAGYLEKHFPNGSYHSAYEAGFSGFWAHYRLMSLGINNIVINPADVPTTQKEQYHKNDPVDSRKIAKSLRSGLLTPIHILGNETMEDRSLVRTRSTLVKDMTRFKVRIKSFLFFFGINYPENFENTRTHWSRNFMQWLKEIKLETWSGRAALDMLIQEAENQRQLLLQIDKKIRVLCRSERYKQNVELLQTVPGIGITNAIVFITQIENVERFRTIDELASYVGLVPTSHSSGEKDNTGEMTFRGQKILKSMLVESAWVAVRIDTALSLSYNTYIKRMQPNKAIIRIARKLLNRMYYTLKNKRPYQTGIVGQNL

SEQ ID NO: 135529 - protein, 408 aa, unidentified
MEVLYPRCAGLDVHQQSVAACARVASGTAIQQEVRTFGTTTGELLALADWLTAHGCTHVAMESTGVYWKPVWHVLDGQFELILANALQIRSVPGRKTDVNDAMWIADLLAHGLIRSSFVPPAPIHELRDLTRTRKQLVREVSQHTLRIQKVLEDANIKLTSVLSDLMGQSGRAMIEALIRGEQDSERLADLSQGRLKASRPAVLAALQGCVTAHHRFLLRLHLTQIDALNDAVREVEARLGEALAPFQAAVDRLMTIPAVGRTVARVIVAEIGLDMSRFPTAGHLVSWAGLCPRQHESAGKRLSTRTRRGNPWLKTTLVQVAWVAARTRNTYLRAQFLRLKSRRGSKKAILAVAASMLTAAYHILKDDVMYHELGADYFDHRDKVQITRRLVRRLEALGLSVEVRPAA

SEQ ID NO: 135530 - protein, 433 aa, unidentified
MDIIYDKCCGIDVHKKLIVACFRCGKKQDVRNFGATTRELLELADWLKEGGCEMVAMESTASYWKPLYNILESSDLNAMVVNARHMKAVPGRKTDVKDAEWIADLLQHGLLQPSYIPDKDQRELRELVSYRKSLVGERTRELNRLLKMLEGANIKLSGTVSDINGKSARSILEYLLTVEFIDAAKYNETYEKKIIAHNLKANKEQIIDNLNGVMSPLQRRMMKELLAHLDELNKHIKNLNDEIDNFMKPEEKQASQAIQDITGIGNTSAQAIISVIGTDMTRFPTDRHISSWAGLCPGNNESAGKRKSGKTRKGNSFLQTTLITCTHSAVRNKKSYFYAQFMRISAHRNPKRAYVAVAHSMLIAIYHILNEGVVFKDLGADYYNQFNKEHKINAYLNRGSLRFLATRKLLFHSKVCNILNITASHSSHRHPQY

SEQ ID NO: 135531 - protein, 369 aa, unidentified
MNDITYVGLDVHKATVSVAIAESGRGGEVREVGVFENRPDVLRKMIARIGKHRRRLNFCYEAGPCGYGLHRLLTGLGHDCVVVAPSLIPMKAGDRVKTDRRDALMLAKLHRAGELTPIWIPDAAHEAMRDLVRARATSVRALSKARQHLQGFLLRHDRIYHGARAWTLAYRRWLTTVRFDHPAQQIVLQDYIHAVEDAESRRDRLTRQIEELMPSWSMAPVATSLQAMRGVALVAAVTVVAEVGDFRRFTNARQLMAYLGLVPSEHSSGSTVRRAGITKAGNALARRVLIEGAWTYRMSARVSRKLHDRLEPLSAAIRDIAWKAQVRLCARYRRLVAIGKPKVVVTTAIAREMVGFIWAIARIAQPELI

SEQ ID NO: 135532 - protein, 349 aa, unidentified
MQIKSQIRSIGIDLGKTTFHLVALGVHAQVLVRKKFSRPQLLAYTANLPSSLIGMEAGVGSHFLGRALREQGHQVRLIPAQFVRPFVKSNKNDYCDAEAIAEAVERENMRFVPIKTEDQLDLQAVHRVRDRLVARRTSVINQIRAFLLERGISFRKGPASLRRQMPEILDNADAKLSTSMRRLLDFLWQEWKGLQAQIESLNADLEHIASSDPSCVRLQQIPGVGPLVSTAVVSAIGNGAAFKKGREFAAWLGLVPRQWSTGGKAKLLGISKRGNPYLRKMFIHGARAAVLRVKREGSTLGKWMSGLETRAARNVVIVATANKLARISWAVLASGNDYHPMHKAAVFSN

SEQ ID NO: 135533 - protein, 423 aa, unidentified
MNGSTLCIGADIHLKDIVLRGVDKASAQEVLKRFRVTNNRPGAESAAATIAQVATQLSYSRIEIGWEATGMLGTPFHRFLSTTPLLQPFQLELVCFNPKLLSSFKDAMVLRKPKNDDRDAFDLAARLRFGQLPISYVPDDFWQGLRRLTRYRFRLSHDKGREKMRFRSYAFLKYSDWTRVKLFSDILGATSAALLTQFTAAELRAMSHLELADLISHRGHARFHDPHATARAVQQALDTSYPVDPQLDQMITLSLATIWEHIRSIKRLIKGLDQQIARYIDPVPNPIISVKGLGPVITAGILAEIVDISRFPQHKHLAQYMGLTWRKRASGSFVSQNTRMTKVGNNYLRYYFIQGANLLRRFNLEYKAYYLRKYQEVSKYQHKRALAFTARKLVRLVHALLTKNVPYVRPRTLATLQEDASLQ

SEQ ID NO: 135534 - protein, 354 aa, unidentified
MKRTTKYVAFDVHQATTVASVREEGGRVIARSVLPTDGGALTEFVRGMRGARHVTFEEGTQAQWLYDLLAPLVDRVVVCNRRGAPHQGNKGDQIDADQLSELLRRGALRAVYHGSADRATLKELTRTYRNLVEDATRVMLRLKALFRARGIPTAGTAVYHPRHRARWLAQLLEDGARFRAAALYTELDVLRQLRPKAKAVMVTEARRDPAWRVLRTIPFLGPVRVALLLATMQTPWRFRTKRHLWAYAGLAVVTRSSADYTLVAGAPVRRRRAPLTRGLNRNHNRVLKDVFKGAATAATARPGPLQDFYHRVMARGTREELARLTLTRKLAALTLRLWKKGERYDPTKLTTSAR

SEQ ID NO: 135535 - protein, 340 aa, unidentified
MNNISIVGIDLAKHVFQLHAVDNRGHQVFSKKVKRDQLSTVIGNLPPCLVAMEACGSAHYWAREIRQLGHEAHLLPPQAVKPFIQGHKNDARDAAGIAEAAARPATRRVAVKTQEQQSLQALHRVRSRLVRARTAVGNELRGLLNEFGIIVAQGHRVIRQGDIRRLLDERHTQLGTALCDVMHDLLDEWQALDTRIAEYDKRLGAYVQATPSMKQLMSVPGSGPVNATLLFSHMGDPKRFPNGRQFSASIGLVPRQYSSGGKNILKSITKRGNSEVRRQLVHGARAALRQFQRQEHPDRLAQWIIRLAARVGQRKAIVALANKMARICWSILAHQRSYQA

SEQ ID NO: 135536 - protein, 375 aa, unidentified
MDRLSVGMDVHKEKVVMLGLPERGDTPVMRETFRGDNISGIVKRLRTLSRAWVVDSCYEAGPSGYGLARVLTEAGISCRVVAPSLMPRRPGNLVKTDIRDAKELAAALRAQTLEFVRIPSCEEEEVRGLVRCREDIARQLRSFKQIVSHWLLSHGHRPPAKVNRWSPVFWTWVRGLPLPPMERMVLDHYLDVLLMLEDRRKQVESQICELADREEYRERVCRLGSLRGFSKLAAMRLIAEVMDFSRFPKASAFMKFTGLTPSEHSSSERIRRGKITKGGNSHIRHVLVEAVQRAHVSARPGRSLLKRQEGAAGEFRQIALKCLLRLYRKFWAYTKRGVPVGKVRVAMARELAGFVWASSDGGGFLQRRPTLAGGR

SEQ ID NO: 135537 - protein, 328 aa, unidentified
MQYIGVDVSKEKLDCLWLRDPAIGKVKSKKIRNNLKGFQELEAWMLKNTQASKAEIHITMEATSVYHENLAEYLYDSGFKVSVVNPSRIKSYADSSKVIHKTDKSDSKTIACFAEHYKPDLWQPAPEEARLLKALLARLEAIESDLQRETNRLEKAESTVTPVRVMNSLHEMITRLKDEKKRLKQDIDDHIGRYPQLKENRRLLETIPCVGPVLSSYMLALLMGKDFENAGQVAAYLGLIPRIRESGKWKGQSRLSKRGPGIIRKKLYLPAVNACKKNPDIAEHTRRLMANGKCKMQAIGAAMRKLVQICFGVVKHQNEYRPQVKITA

SEQ ID NO: 135538 - protein, 426 aa, unidentified
MSESEVLRQEPEFAALVGIDWADQKHAWCLQAAGTTQRESGEVEHTPEAVEAWIGQLCQRFGNRPIAVAVEQVKGALVFMLSKYEPLHLFPVPPAMSAKLRQALYPSGAKDDPRDADLLVDLLWQHRDKLRRLSPDSEATRRVQNLVEERRHLVEEKTAQSNRLTNHLKIYFPQMLEWFDRLDTELVCALLEQWPTLEELQNVPPARLRAFFRKQRCHYPELVERRLVGIRQAMPAIRDRAVIEAKSAVVKVCVQVIRSLIRGVADLDRKIEEAAAAHPDFFIFESLPGAGAVLAPRLLAALGSQRERYANAAEVQAYSGIAPVTEQSGKKKWVHFRWACPKFLRQSFHEWAGHSIAHSPWARSYYQQQRERGKGHHAAVRGLAFKWIRIVFRCWKDRVAYDESRYLAALAKRNSPLAAVAAGTIL

SEQ ID NO: 135539 - protein, 377 aa, unidentified
MSKLLFVGLDVHAETIAVAVAEAGGEVRAIGVIPNRLESVRKMVHKLGPVQHLRACYEAGPTGYVLYWQLTQLGVACEVIAPSLVPTKPGDRVKTDRRDAEKLARCHRAGELTAVWVPDAAHEALRDLVRAREAAKKDQLKARHRLGKFLLRHGRRPEGIKAWTKEYLEWIKCKVNFDQPALEAALADYLEEVDHVAARIVKLEKAIDEAVRQAAPEIRAVIEALQSLRGVAQTTAATIVSELGSISRFESPRQLMGYSGLVAREHSSGNRVQRGGITKTGNGHLRRVLVEAAWAYQHRPNVTALLLRRQKNLALSDEVKKMAWKAQQRLHKRYTAFAARGKNKNQIVTALGRELLGFIWAIAVHTERQQKQLGKAA

SEQ ID NO: 135540 - protein, 341 aa, unidentified
MEATTIGLDIAKSVFHVHVADGNGRMILSRKLRRSQVEPFFAKLPKCVVGMEACGSAHHWARIIRALGHEVRLIPAAYVKPYVRRNKTDARDAEAICEAVSRPNMRFVQVKTVAQQASRGLERSLDLLTRQRTQLMNSLRSLLAEIGIIARPGERGFAELLAVLNDAAAEIPEVLREALHLMARHIEAMSASITVLQARVEAVVRTNPVMRRLMTIPGVGPMTAHAVVTAIGGGRQFRCARDFAAWCGLTRREHATAGKSRGGRISRQGETRLRTLLALGASTVMRHVRTRGDRATGWQRGILARRPVKVAVIAQAAKTARIVWAVLTSGETYRRPAAIAA

SEQ ID NO: 135541 - protein, 344 aa, unidentified
MSIKVVGIDIAKNLFQVCVLGTNGQILSNRKVKRDKLLDTVRQLPEQTALAMESCATSHHWGRIFQELGYTVALIPAQHVKPFVGRQKNDANDARAICEAYSRPNLHFVPVKSVEQQDLKAIRSVRKRLVENRTALANQIRGLAAEYGVVFPLSIKALRSHLPLALEDAENALSPVMRNLLQTLYCDFVSLSEEIDEMTQSVTMLSQQNPKYEAIRNIPGFGPILTAALISEIGAGNQFQNGRQFSAWCGLVPKQNSTGGKSSLGSLSKNGNRELRALLIHGARAVVRCGANKADAMGVWLRGLIARRGKAKAIVALANKLGRVAWHILAKNSEYDINQAFKPV

SEQ ID NO: 135542 - protein, 335 aa, unidentified
MLIIGCDFHTRFQQIAMLDTTTGEIIERRLEHETGEARKFYGALPAAARVGIEATIGTRWFEKMLHEHGHELWVGDAAEIRAAMVRKQKTDPRDALHILELLITDRFPRIWIPSWSQQDVRQMLRHRHKLVGFRTSARNQLHALAMGQGVCRRKKLWTAVGRKELEGLELDPWASRRRRELLQLLDQLNGWIEELNQAVEKEATSCPEARVLMQEKGVGPVTALAFVLTLGPVDRFPNSKRVVSYLGLNPSEDSSGGKQRLGRISKQGNSMMRWLLVEAGQVAARFDPELRRDYVRLKFRRGPGVAKVAIARKLAVRLYWRLREQSHPTAGSYAG

SEQ ID NO: 135543 - protein, 355 aa, unidentified
MNSEKYIGLDVHQATISVAVMDSRGKVVMESILETKASTILEFFAGLRGTLSVTFEEGTWAAWLYDLLKPHVAKVVVCNPRKNALLKDGNKSDRIDARKLAELLRLDNLKSVYHGETGVRMLRELARSYLTIVKDLTRVMNRLKALYRSWAIPCAGRDVYYTRHRTEWLGKIREAGVRRRAEQLYQQLDMLQHLRQQARRELLAESRKHPITAKLRKIPSLGPIRSALAVALIQTPHRFRTKRQLWAYSGLALETRTSGEHRYVRGQLRRSKKQVSIRGLNKDHNHDLKGLFKAAATRASVQPGPFQDFYQRSLAKGIKPTMVRLTLARKIAAITLTLWKKGENFDAEKLKSQAA

SEQ ID NO: 135544 - protein, 378 aa, unidentified
MNAPDTALQGQDTAIIGRLYMAFELGDKSWKLSLGDGVRGPSRHKLAAGDQSAILQVIAKAKARCGLAPQAPVRSCYEAGRDGFWLHRWLTEQGIANLVVDSASIEVNRRARRAKTDRLDADKLLSMLMRYHAGERRVWAVVRVPTSQQEDERRLHRELGRLRQERTAHINRIRSLLVLHNLRVARIGGRLWKPWWNEHSSHLPGGLRAEIERAIARLTLVVTQINTIETQQREAVKAGAQPAIALLARLSGIGVGSAWLLTKELFGWRRFHNRREVAGCLGLAPTPYSSGESQVEQGISKAGNKRSRWLMIELAWSWLRYQPASEFAQWFNKRFASAGPRMRRVGIVALARRLAIALWRYLEYGEIPPGASFKPLAT

SEQ ID NO: 135545 - protein, 405 aa, unidentified
MFVGIDWGRNAHTIALLKDNGEIMKIFKIRNDYAGYIDLLKHLQGSSRVVFALEHRTHRLVDFLVAHGYSGFYVNPNAMPSYRSRYKSAPVKSDELDAFILADLLRTDRPNLAEIILDTPFVRELKGLIIDRERYVRDETRLVNRLEGCLVEYYPEALKFFDNPASKVALEFWAAYPTLDHARGLTVEDIERFLAAHKWYRGRDKVAERIIKIVSGETIKVLKDVVRVKSRMLSGIVEQLKLLKKTIADYNQEIKRLVESKQDAGQYTSLPGAGSTLGPAIYTLFSGGIKFDRLVKIRAYVGTAPVTSQSGEFRGVGFRFACNHFYRNVFQRLAFCSLKESQWAMEYYRGKRREGKKHQHALRCLADLWVKVAYAMWRKKERYDEQKHLASMAQFWLRNNSRMKA

SEQ ID NO: 135546 - protein, 355 aa, unidentified
MVVVGADVHKRSHTFVAVDAVGKQVGQLTVEASTKGHLKALVWARGRFGQELTWAIEDCRHLSARLERDLLGAGQQVVRVPPKMMAQTRASARTRGKSDPIDALAVARAFLREPGLPVATHDEVSREAKLLVDRRETLVGTRTRTINSLLWRVHELDPAHAPKPRSLDLVKHQQKLREWLITREGIVAELALDELEDIIALTERIKAFDKRIGALARAQAPALLDLPGCGELTAAKLLGECAGITRFHGEAAFARHAGVAPIPVWSGNTAGRVRMTRSGNRQLNCALHRIAVTQTRLHGSLGWAYYEKKKTEGMSKREALRCLKRRLARVVYNQLNTDHQNDHTQAPPTCQPAAA

SEQ ID NO: 135547 - protein, 336 aa, unidentified
MYSGIDLHSNNSVVAVIDDGDRVVAQKRLPNDIEKITGFLARWQDELAGVVVESTYNWYWLVDGLQDAGLHVHLANTAAIKQYEGLKHSGDETDAQHLAHLLRLGILPTGTILPREHRVVRDLARKRMQLVQSCTTHVLAVENIMARQLGGRMTSNQIKRLTDDTIDSLPLAADVGLAIKANVAVIATLQSQIEVLEKRLQERVRPRTQYALLTTVPGIGQTLATVIVLETGPIDRFAEVGNFASYARCVDSVHTSNRKKKGEGNVKNGNKYLAWAFVEAANFARRFCPEAKRFHERKKAKTNNIVATKALAHKLARACYHNLKECKPFDVTRCFA

SEQ ID NO: 135548 - protein, 362 aa, unidentified
MAQVRSWAGLDVHAAKVLAATMDSESGELVVGRLSGATCEVVEFRVGLPGPTRVAYEAGPTGFGLARALEAAGVQCVVAAPGKIERPASDRVKTDRRDAERVMRLLMIGGLHPVRVPTLTEEALRDLVRAREDVRGDLMRARNRLSKLLLRHDVRFDGAGGAWTQRHRQWLAAVDLGQRGAQVTLRDYTGAIDALVVRRDSLEATIGELIADSPWAGTVARLRCLRGIDTLSAVGLCAEVGDCARLARAGHVMSFLGLVPSEHSSGQTRRQRQITKSGSGHGRRLLVKAARHYRRAPRKGDALRRRQAGQSAHVLAISWQAQQRLHRTWQRLDSERGKRRTIVAVAVARELAGFCWAVANAD

SEQ ID NO: 135549 - protein, 344 aa, unidentified
MQITTIGLDLAKSVFQVHGIDAAGQVVVRKSVRRAQMLAFFSKLPPCLVGIEACGTSHYWARELIRLGHEVRLMPPAYVKPYVKRGKTDAADAEAVCEAVTRPTMRFVPVKSPEQQAALSMHRARDLLVKQRTQLINMLRGLLAEFGVDIPKGLERALLMARQVIEGNAPEVPIEAARIANTLSQQALDIHVRLRQIDRDLAIWLRGNDVARRLMTIPGIGTVGATALVASVTDPLQFRSGRQFAAWLGLTPLQKSSGGKERLGRISKMGDKYLRKLLIVGMTSLVRRAKYAPDKIDPRLADLLARKPTRVATVAMANKTARVIWAIMARGETYRTGHQPALAA

SEQ ID NO: 135550 - protein, 336 aa, unidentified
MDKVSAVVGIDVSKKKLDISLLVEGKARTKVLENSVAGHQALLAWLEKSKVPMSALHICMESTGVYSEPVALALHNAGLMVSVVNPACIKGFGHSENIRNKNDTIDAGLIARYCAAMRPEPWVPPPLEQRQLRAWSQRVQTLKDMRQQEENRLEALTVSGIDDVAEHVKQLIDWLSKEIAKLERDINDHIDRHPGLKHDADLLASIPGLGATTVAKLLGHLGDIRRFDSAKTFAAFLGVTPKQRSSGSSVQGRTMMSRTGSTALRTALYMPSLVARRHNPILRRFAEHLAQGGMAKKAVIGAVMHKLAHLIYGIIRTGKPFDANYLPKGLAIQDGI

SEQ ID NO: 135551 - protein, 279 aa, unidentified
MFYLGIDVAKAKLDCSLLLDPASTNRKSKTFSNNKAGFINLLKWIGKFEITPVNLHAVMEGTGVYHEQVALALTDAGATVSIVNPAQIKDFGRGIAVRTKTDRMDSLVLARYGAMLQPVAWIPPAQEARVLKALLARRDAIAQDLRRELNRQEKADATNTPELICQSLDDSIKFLQKQLDKLQQDIDDHIDRFPNLRRDYELLTSIPGVGQRVGNNLLSIIHCQNFRSAEQLAAYLGLVPVERQSGSSLLGKARLSKAGPPRIRAVLYMAAIVANVTPM

SEQ ID NO: 135552 - protein, 342 aa, unidentified
MTHFVGLDVSQKITAICVVDETGRRLWRGQCSSTPEQIERAVRLHGNEAHIGIETGPMTPWLVHELRGRGLDVTCLDARHARAALKMQINKTDQNDAEGLAQIMRTGWYRSVHVKSFDSHRARALLGARAQLVGMTTRLSNHIRGVLKIFGMLPGMMRGLPFDRRVETLLADRADVAPIVRPMLAAWQQLRLQIMAFDKAVRMLVKSSPTCRHLMGVPGIGVLSVLAYVSMIEDPARFGRSRSVGAHLGLTPKQYQSGEIDRSGRISKCGDTLARTLMYEAAVVLMTRVKRASGLKDWAQAIARRSGAGKARVALARKLAVIMHSIWRSGEPFSWPEQRAAV

SEQ ID NO: 135553 - protein, 322 aa, unidentified
MINPITIAPVANTAGIDTAKDKLDVAVPDRAMHFQVANALPGWRRVAAKLAGAGVTRIGIEATGGYERPVVAHLRSAGFTVLVLQPTQVKAYARLHLRRAKNDVLDAVLIAACAATIAPPAISPDQRLERLAPHLTYLEQIEEDIVRLKVRLEHVDDPRLRRLVMADIKRLKLRRIAEIARIAKALRGHQDLGRRLDLVLSVPGIGERTALAIVVRMPELGQISREEVAALAGLAPFDADSGDHHGQRHIAGGRGRLRRSLFAAALPAAFRWNPQIKVFYQRLIAAGKPHNLALTACARKLIIYANTVVLRGTPWTERSVTI

SEQ ID NO: 135554 - protein, 397 aa, unidentified
MDAAGRRLAAARLPEGVAGITRLHEMIGAHLGEDAGAGEDAGAGEVAIGIETDRGPWVSALVAAGYTVYAVNPLQAARYRERHGVSGAKSDKADAHALADMVRTDAHQLRPVAADSPQAEAIKVVARAHKTLIWERTRHTLRLRYVLREYFPAALEAFDDLAAPDTLELLAKAPDPASAAKLNRSQIRAALKHARRRDIDMKTTRIQAALRSQQLGRAPVITAAYAATTRSIAAVLATLTEQINTLRGQVETHFGRHPDAEIILSQPGTGVLLGARVLAEFGDAPGRYADAKARKNYAGTSPITRQSGKRKITHARFVHNDRLVDALMSQAQSALLASPGARAYYDKQRARGLDHHAALRQLANRLVGILHGCLKTRTLYDEATAWSHHNQDQRTAA

SEQ ID NO: 135555 - protein, 357 aa, unidentified
MNEYIAFDSHKHYTLMEREEVKSRRVVQRRIEHCPGAIRKALADCRPSTTVAVEAMGSWYWIVHEIEQAGLVPALVHPRKAKLMMGMINKTDKLDVHGLNRLQRNGTLPTVWIAPGNVRDLREVTRTRMVLTRHRTRLKNRLLATLSKYGFDIEACSDNFGAKARLQWPGLLAKLPVHARWCSDLLWEQLDLVNRQIDQQEKRLEELMEVTPGMGLMKTLPGIGLILAGVIAMEIGDIERFASAERLASYAGTTPRVHSSGDKTRYGRLRPDVNRYLKWAFIEAANCIVLQVSRKPGRHVSKLYLRLRDRRNHAKAVGAVARHLAEASYWVLKRKEPYRDPSLGRAKEGVSAIAACL

SEQ ID NO: 135556 - protein, 402 aa, unidentified
MEKLCGVDVHRDLLVATILSGETKETRHFTNDPDSIEKLKQWLKTQECKRVAMESTSIYWVPLYLALEEAGFDVILANAHQVKGIPGRKTDQSDSEWLAYLLRGGQIKPSYVPTKHLRELRELTRLRVKYVQNRTAFKNRCQKVLNRVNIRLRSKLSDVFGKAGMEILNGLMAGKTVESILEHTENKQLKRRCDEIKAVAKGALSENDIFVLKELTDTISHLNHQIRQVEARIELIVDKENVEIVSSVPGVGKRSAAAILAEIGDAKRFVNGKQIASWTGLAPSLHQSAGVCILGSITKQGSSWLRWNMVEVAHCAVRMRNSRFRAFFLRVRAKKGNQTAYVAVARKMLTVIWHLLVNGEKYVEEGFEKTVRVSKAVYGGHVPLEEMAEVLRSAGYTVVANG

SEQ ID NO: 135557 - protein, 346 aa, unidentified
MKKIIIGIDFSKEKFDATLIKAEGVKECGPSVHEVFDNKTSGYRRLVKWVRSQSEDAPADSLLYCGENTGGYSMGLSNYLYASGYDMWLECAYSIKQSSGIQRIKNDMYDSRIIAEYAMRNHDRMILYKPQSASLNSLREVFLYRHSLVRQRVALTNRRSEKRLVQEKSDIKTFMSFTSKHLITEINKAITKCDEKIRDIISSDEELREVFDIITSMPGIGAQNAACLMIYTDNFTKFDMNSRKIACYYGIAPFERRSGSSVYQKPQVSPFANRMIKSLLSQAALAAIKADVNICCYYQHLIERGKHPMLVHNNIKNKMLHTLVAMVRNKQKYNPEHLYKPVCGVA

SEQ ID NO: 135558 - protein, 391 aa, unidentified
MYIVGIDIGKRHHEASIIDGQGNLQGKSLRFANTHTGFNKLLEAARKAADRDHQIVFGMEATGHYWLALYTHLRREGYPVHVINAVQSDALRGMYIRQAKNDSRDSFIIAEVIRFGRFCETAVSAPDLHALRELCRHRFWIVDSISDLKRKVIALLDQVFPEYEKLFTNTFGKTSLQLLSEYTTPEELLAVDTDKLAETIYAASHGHHGLEKALEIKDAARNSFGILLACDSIALLIRQYIEQIRFVEKQVDSIDIEIARLFSAFDNQLTTITGIGPTLAATILSEIGDIRRFDSPAKLAAFAGIDPSVKQSGNFTGTRVHMSKRGSPYLRRAIWLVATVATFKDPAISIYYQRKRAEGKSHLTALGHVSRKMVNIIFAVLRDNSPYSPAV

SEQ ID NO: 135559 - protein, 360 aa, unidentified
MAIERTSVGLDVHARTTVAAAIDEQTGELVQRRMGADTDEIVAWVAGLPGPVAATYEAGPTGFGLARALSAAGVRAVVAAPSKLQRPVGDRVKTDMRDAVHLARLLRLGEVVAVSVPSIEAESARDLVRAREDARGDLMSARHRVSKLLLRQGIRYSDGKAWTVAHQAWLRSQRFELVGLQAAFDAAYEAMIATVERRNRLDVAIAAMAAESEFAPVVDRLCCLRGVSTLTGFALAVEIGDWTRLDGRRIGSYVGLTPSENSSGASRALGGITKTGNGHARRLLIEAAWHHRPTYRASSPIMRARWDRASAEARARGHAGNQRLHQRWQTFQARKKRTVVANAAIARELAGWCWSLAVMT

SEQ ID NO: 135560 - protein, 348 aa, unidentified
MTMLAEIVDVVIGVDTHKHTHTAAVLDATTAAVLDQITVATDPDGYDQLVAMADRHSGLRAWSIEGTGGYGAGLVRHLGDTEIVIEIDRPNRPARRHGAKSDPLDAIRAGREALALEQLAQPRAAGQRAALAVVLAARRSAVDASSVAQRQLGALIVAAPEMLRSKFRRLTTPATIAAAARLRVSPAWDLETATTAKVLRDLARRIQAMQTEARAHEATIKSIVRSWRPDLLDQLGVGPIVAAVVLCAWSHPGRCRNEAAFANLAGVAPIPASSGQTTRHRLNRSGDRQLNRALHTIVLSRLHYDPATRAYVERRRAEGRTDREIRRCLKRYIARQLYRQLETGPPNA

SEQ ID NO: 135561 - protein, 313 aa, unidentified
MSQNNPTIYAGLDVAKDSLALEFQGRTYTLNNDPRGHARLVRILGGQPKVHVILEATGGYEQPAVRALHSASITLSVLEPSRVRAFARAKGLRAKTDPIDAAVLRAFGEALAPRPSTAPTAQQQQMGELVTRRRQLTESATCEANRAAHYSDPMARRQAAVLLRLLRLQIAQCEKAIASLIAEDQTMALRAARLQEVPGVGPITAATLMAEMPELGDLRDESVAALAGVAPYNRDSGPFAGSRRIAGGRTSVRCALYMAALSASRHDPILKAFHQRLIANGKKPRVALTAVMRKLIVLLNRLLKNPGFQLQAA

SEQ ID NO: 135562 - protein, 345 aa, unidentified
MPIVGGLDIHRKQITFDYLDTGTGQVQRGQVSPADREHLRAWLARFAGRDDVAFAVEGCTGWRYVTEELAAVGVTAHLAEPADTAFARGRKRHAKTDKTDCRHLRMLLSEGRLPECWIPPGRILECRAMLETYHDLRREHTAWVQRIHAVLFHHGAPALGGGTLRTGPGLAALREVSAACLSPAGQLQVATALEVLEALEARMSELRHQLLAEARHLTGAKVLAERLYGVGPFAALAMTCWLAGKDRFSSSRQAVRFAGLDVTVWSSDRKGPPGRLSRQGPPVLRWALYEAGKTHARAPAPDHAYYAAVKDRCNGKRAALSEARKLLRQAHHILAELGDDALSAT

SEQ ID NO: 135563 - protein, 349 aa, unidentified
MRFYNQTHQFYCGIDLHARLLAICIVDQTGTVVLRRQIPDNQQQLRELLAPYRPDVVVAVECLFAWYWVADFCAAEGIPFVLGHALYMKAIHGGKTKDDDIDAEKISRLLRGGNIPFAYVYPKGMRETRDLLRRRNYLVHQRAALITHIQITNAQYNLPPFGKKLIYAKNRAELKVAEHFPDAHVRKSIALDVAVIDCLDEQIADVELYLKRTVKVEDPHSYFLLQTIPGVGPILGLVLLYEIHQIGRFAEVGDFLSYARLVRCQHRSANKQVGSGGKKIGNAHLKWAFSEAVCLLIRSCPAVKGWQARQEKKRGKKKTLAVLAAKLGRAVYLMLHRKVAFDVRRFLGA

SEQ ID NO: 135564 - protein, 425 aa, unidentified
MNYKQNEKINQVKESTLVVGIDIGSTTQYARAFDWRGIELGKVFTFSNSREGFESFKAWMQHLQDKYKKLDAIVGIEPTGHYWFDLGAYLEDEGILLVMVNPYAVKQTKELDDNSQGKNDRKDPKVIAKLVTEGRYSAPYTPDGVYADLRIMVANRKRLIREMTQIKNRFARWFAIYFPEYTDVFGDYEAQSSMLLLKKVCTPEAIVELGAEKINQIWRDAKLRAVGMKRATTLCETAKRSIGLKKGSSAAQYEMKLLLEDYEYKKAQLDAVMEEIEKLCRKIPESEQMLAIKGIGVITVAGFLAEVGDVRRFESPRQIQKLAGLSLRENSSGKHKGQTTISKRGRSNLRAVLFNAAIPLIATNPEFKSLHEYYTTRANNPLKKKQSVIAISCKLIRVFYAILANGVTYDAQKMLSDIHRQPQAA

SEQ ID NO: 135565 - protein, 425 aa, unidentified
MEQQNDNNRLQEFRQLKHEIRLPGEFLVVGMDIAKERHHAFFGTAKGNTLLRRLVFENTKEGFEDLCFQADTLKTRHALKKVVFGLEPTADYHKPLAEYLIRQGHVVVLVAGTAVKKNRELLDGRWDKHDTKDAANVADLVAQGKCLFYDFPSPDMRELRNLLSLKRRLKKQEQGYKVRIRNHLIAQYFPEMDDYFSYGEGPAIVKWCLNPAELSNLPFEEFVRMVSSRNGGENQLRRLSEVHKKAASSIGCEVIPSVPFEAKILLEELQQLHIMILETDKKIAEVCTRFPEYAFLLSIPGFGPDISAKVLGAIGNPHRFDNERQVLKMAGLDLSADRSGKKSEVTPVISKKGKADLRYGLYQAAFIASTRNHRFMTYFTNKLKGRERERGILTNRRVKLAAKMLVIAWTLMKKKEMFNPACITE

SEQ ID NO: 135566 - protein, 346 aa, unidentified
MTMLETRPVTGGVDTHLDVHVAAALDANGGLLGVESFATAPEGFTALYRWLASFGPVARVGVEGTGAYGAGLARHLRGAGIEVIEVDRPNRQLRRVAGKSDTVDAVEAARAVLSGRARGVAKTADGNVEAMRALLIAKRSGREARITCLNQLRHLGFCAPDELRERFRGVPRTQLADVAAALRPHLDSDPVTYATKLAMRALARRVLSAVEDTDHIDTVIAHLVTATAPGLLELYGVGIDTAAILLVAAGDNADRLHSEAAWAHLCGVAPLPATSGKVTQRHRLNRGGNRQANHALWRIVFTRMSSESRTRAYVTRRLDEGLSKPQITRVLKRYVARETYRHLRPT

SEQ ID NO: 135567 - protein, 427 aa, unidentified
MEVIHPRCAGIDVSKKDAKVCVRVQGRGRKATSSTVTTWTSMTGSILALREHLIAERVTCVVIESTAAYWKPFYFLLDDALNVVLVNARHVRNVPGRKTDVSDAAWLAELGAHGLVRASFVPPEPIRVLRDLTRARTTIAQARTKEIRRLETLLEDTGIKLSSVACEITGVSGRAMLEALIAGQRDPAVLADLAKRQLRKKIPALTEALQGRFNDHHAFMVQLYLDRIDAHEADIDRLDARIEEAIAPFQAIRKLLTSIPGWSQIIANVFIAETGADMSVFPTAEHLASWAGVVPGCNESAGRVKSAKTLPGNRHLKAALGVAALSASRSTDTYFGARFRRIAGRRPTRSGTKKSRRQSAAGQTAVVALEHKMLICAWHMLVNGTFYQDPGPDYYTRHHPTKTKARAIKQLETLGYNVTLEPRTDAA

SEQ ID NO: 135568 - protein, 341 aa, unidentified
MKQDISVLGLDIAKRVFHAVGLDAMGKIVLRKPLSRHALMSFIAQLPPVLIGMEACGGAHDWARRFREHGHEVKLMAPQFVKPYVKSNKNDARDAEAIGEAVTRPTMRFVPTKEVDQQDIQALHRVRERLMGARTALVNEVHGLLHEYGIVLPKGVAKFRQAVVGILESEKDKRTPLSREMFWKLVDEFAAVEEQLAYYQEKLETVATTHPECRRLMTIPGIGPLTATALLAAVSDASAFKNGRQFAAWLGLVPRQHSTGGKERLLGISKRGDGYLRKLFVHGARAVVRGVREKTDRRSGWIRGLIARRGFNRTTVAVANKNARIVWALLTSHQDYQPTTG

SEQ ID NO: 135569 - protein, 341 aa, unidentified
MNHYAGIDVSLECSSVCVVDTNGKILREARVASEPEALIAWFASLGFGLERIGLEAGPLSQWLFAAMRQAGLAVELLETRHVRKAFEAMPVKSDRNDARGIAQLMRLGWFRPVHCKSMSAQETRTLLTARKLVQSKLRDVENSLRGILRGFGLKVGKTTEREFAGRIEELVAGHPHLQVIAKALLSVRAVLRSEFAVFEKQVRKMARSDMRTRLLMSTPAVGPIVALTYASAIDDPTRFKSSKQAGAHFGLTPKKYQSGETDYTGRISKIGDASVRTALYEAAHVMLTKPVKGCSQLKSWAMRIAKRAGISKAKVALARRLAVILHRMLADGTPFNAVAAT

SEQ ID NO: 135570 - protein, 339 aa, unidentified
MLIIGCDYHPSMQQIAWVETETGECGERRLMHRAEAEEFYRQLKGKQVRVGIEATGHSRWFERWLAELNFELWIGDPAQIRAKRVRKQRNDRFDAQHILKLMLEGNFPRIWVPTAENRDLRQLLWHRHRLVGMRTRVMNQLQAVAMNEGIRRKKGLWSEKGRQQLESLSLMPWTTRRRQELLQLLDQFDPNIEELSQAIKQEAERIPEVKLLMTHPGVGPITALAFVLVIGTPERFGCGKQVASYLGLIPCEESSSEHWRLGHITKQGNKLLRFLLGQSAQSVARCEESWHRQYAHLSMRRNKLIAKVAMARKLAVRLFWMWRKGWDYPQLKKFGSYVG

SEQ ID NO: 135571 - protein, 424 aa, unidentified
MKRTQNEKILQIKNDTLIVGVDIAKTWHYARAFDNRGIELGKLLRFENSAQGFVLFDAWVQEIQQKHGMTEAIVGFEPTAHYWFNLGDHLKARGHKLAILNPYHVKCARELDDNTPSKSDQKDPKTIAMLVKDGRYRDVYIPDGSYQELRELVRERERIQERLGSLSNQIVRWLDIHFPEFVTVFKNWRGKAAWIALRRFSTPERMAEAGAQEILLAWREEMKRPSLKRAQALCSIAEQSIGRTEGSVSAVMSLQNIMTEYELLMMQMEQVEDAMQESLIEIPHAAELLAIKGVGMVAVAIFVSEIGDIRRFKDPRQLIKYAGLNLRANSSGKYKGKTTISKRGRSRLRHALYQTMIPILATNEEFRSLHQRNLTRIQNPLTKMQSLIALCGKLLRVIFALLKKGTKYDPSKIKVVMADAAQAA

SEQ ID NO: 135572 - protein, 309 aa, unidentified
MKQEVVYCGIDVAKKQLDVALGQERWRVPNTREGIAQLLKRFQGQRLKLHVICEASGGYEKPIVAALQKSTLAVSLVQANRVRAFARAAGVLAKTDQIDAAILVSFGMAMRPLPSAAQPEQIARLRELDAQRRHLSRLLSAEQNRLAQLSCAQLRSLSRSLISKVKKQISTLDVRISTLIAQDQNLCAKAQKLTSIVGVGARTAALLLAQMPELGSLNRAQAAALAGLAPFNRDSGSMRGKRTICGGRRAVRTGLYMAALAAARYNHVLAPFYQRLCAAGKPPKVALTAVMRKLLLALNSALAPKLNPA

SEQ ID NO: 135573 - protein, 367 aa, unidentified
MPVNRHQGTRSARSMSAGELTRGEPDPQAATIKSPNSRKGYYTISPQSKEGYFMENCIGIDIAKEKLDVHLLDAQKYFTFENNKCGIAKCLKLCIESEPDLIVFEATGGYERLLAAELMAKNLPVARVNPSRIRNYAKSIGRLAKTDKIDAQIIAQYGFLNKPFKLEQHDIKSIELKDLVARRSQLVDMKTAESNRMEHAANEVVLKSIKKSIKCIEGQIDLINKTIKNHIDSIPELREKARRLDTVPGIGIITAHMLVSELPELGHRNRREIAMLNGVAPINKDSGKKRGKRSTGGGRKQVRDKLYMPILVAVRHNPKMRAFYKRLVEEKGKPKKVAIIATMRKLICIMNAMIKNNEDWRDDMVGF

SEQ ID NO: 135574 - protein, 425 aa, unidentified
MNDDVMIAVDPHKASNTAAVLDPVTKTLIDSARFANSASGYEQLTAFAARWAQRRWAVEGCHGAGRSLAQRLAADGELVLDVPAKLAARVRVYSQGHGRKTDKHDAVSIGLAALEGTGILPVACDDVTVSLRLLCDRREELTGQRTQAVCRLHRLLAELTPGGMRRELTANKAQALLARIRPVDDVATVRLHIARDHLADIRALDARLKYIGGQISALVTASGTTLTSLFGIGPVIAGRILAEVGDITRFATKDKFASCNGTAPIDVSSGDQVRHRLSRAGNRRINHALHMMAVTQIRYPGTDGRRYYERTRTEGKTPKEALRCLKRRLSDQVWRQLVRDQQGRIGTCGSPTTPPPTPPTSTSPASGSPAAAPASPPPRPKASRRSSCSTGKTTASSASKSSTPAADCTPTSSRKPKSSADNDAP

SEQ ID NO: 135575 - protein, 322 aa, unidentified
MSQPNPLCVGIDVSKATLDIAASSDVAQFTVSNDSDGFNAIITGLRRHSVALVLMEATGGLEVAVACSLQAEGFEVAVVNPRQARDFARAMGYLAKTDRIDARVLTQMAEVINRHPERKRFIRALPDAERQALAAMVVRRRQLIAMLVAERNRLHPFHPQNKKSINTIIKALEDELVRLEKEMDSHIRNHFKEIAERLSSIKGVGTMTVSAMLAEIPELGTLSRREISALIGVAPVNRDSGTMRGRRTIFGGRAGVRSALYMAALVATRFNPVIKTFYVRLLAAGKAKKVALVACMRKLLTILNAMLRKNEEWDESYHHVVP

SEQ ID NO: 135576 - protein, 341 aa, unidentified
MKNKSFIGIDISKNVIDVSIFCEETPIKDFSHDVFDNSRKGFGEMCTWLKKNHVVLSNCLFGMEFTGSYSMELEKFLNARNYQFCMLSTHVVKHYPMGPKDKSDKIDSAKIADFLYRYNDTECVKPYKMPDKTMQRLKTLMNERKFLVEQRTCFMNRRQLCTTKEDTQLYDGYIKKLSRDIENIELEEQKLLATDDSLLATYKNLLTIPGIGFVNAINVIVITRNFTAFETARQYASYVGVAPHFRTSGTSVKWRPRPSARCDGQAKADLSMAATVVVQYDAELQSFYNRKLGGKQDSDTKRKALNAVKFKLVLRMFAIGKQNRKWEPLDSKSSNEKLAIS

SEQ ID NO: 135577 - protein, 321 aa, unidentified
MTYVGIDVSKVTFVVAYSSVKTNKTRTFKNTVNGVHEFVQTISASEHNCVLEATGNYSALLVYLLSEAGITISLENPLKIKNFARVMLTVTKTDEIDARLIALYGEKMQPAPYKLRSDAILVLKQKRTVLRQLKKQLVATRNLKGSMEVLPFFDPKCKKTIEKTITFLEKQIKEMEEELASLAQGEYRKQMDLLTSIKGIGVTLAAALIVATGRFSYFDNAKQLTRYLGLSPTYQQSGTSVNVKGHINRNGDSSLRSQLYVAAFSSLRCNTECKACFDRLRSNGKPGKVVVIAVANKLVRQAFAVVTQGKPYVDGFKSEKP

SEQ ID NO: 135578 - protein, 316 aa, unidentified
MSEPLYVGIDVAKDSFDVASEPAGLALSLPNDPPGRQRLLDALRNHPVALVVLEATGGYERSLAADLLGAGHKVVVANPRQVRDFARGIGQLAKTDRLDARVLARFAGMVKPEPRQKACEQAVNLAELVTRRRQLSDLMTQESNRLPHARHPDVRRSLKKSLRMLEKQIDDLDKLIRQNIDSDDGLRRKDEIVQSFKGIGPGTSAMLLAQLPELGRINRQQIAALAGLAPWDFQSGQWAGQSRIWGGRMPVRNMLYMAALSAIRFNPIIRKFYQRLESQGKKFKVAITACMRKILVILNTLVRNDCLWSPPLVKNA

SEQ ID NO: 135579 - protein, 306 aa, unidentified
MSESVGIDVSKRWLDVQVHGQRDGRRFANSVSGLQQMCTWLGPAHLHQVVVEATGGYEQLALESLYAAGMPVARVNSRQARDFAKATGQLAKTDRLDARVLAQMAALLPLTRSQPVEGWRAQLRAYQQRRTQVVAMVQQERQRQSHLTDAWLCSQAQSSLRHLQQQLAELDKRIAQQVGARAELAVLSQVKGVGPVLLASLAAQLPELGKLTGKAIAKLVGVAPLARDSGTMRGARCIWGGRACVRQGLYMATLTAVRFNESLRAFYQRLRGQGKASKVALVAAMRKLLVILNAKLRDQLAAGAAS

SEQ ID NO: 135580 - protein, 360 aa, unidentified
MEFNFFIGTDVSKNELDFAIMQNKTFLFHKKVSNTPAAITTLLNELVKLPGFKLSMAVFCMEHTGIYSNHLLGVLFKKQCSVCLEAALHIRNSLGNIRGKSDKIDAIRIAEYAYKNREQLRLWQPKREVVIRLAQLSATRSRLIEAQKVLTTPIKESREFIPKGLVKENTTICQSTLIAIKKDLTKVDKAIQEIIASDLELRRLFALITSVDGIGKATATQIIISTNEFKTINNPTKFACYAGVVPFSKESGLFKGRARVSHLANKKMKTLLHLAALSAIRYNNDMEAYYGRKVTQENKNKMSTLNAVRNKLIHRIFACVNNNRPYEKNYQRLVNKLIHRIFACVNNNRPYEKNYQRLVA

SEQ ID NO: 135581 - protein, 337 aa, unidentified
MTEITTVGVDLAKSVFQVHGVDAGGAVVLRRQLRRNQILEFFQRLGPCLVGMEACAGAHHWARELARLGHVVRLMPPSYVKPYVRRGKTDQADAEAICEAVTRPSMRFVPVKSEETQALLMTHKAREFLVRQLTQVTNAIRAHLGEFGIVAPKGVHNIGSLLEAGERAKLPTAARVPLRLLADQFFETRDRISALTKDIRSEAENNDAAQRLQTIPGIGPITATALAATLPDVTGFRTSRDLSAWLGLTPKPHSSGGKEKLGRISKMGNRYLRRLLYLGAMGVIAARRRGQPGDDWLWRLLQRKTAKQAAIALANRMARTVWALLRNGTSYDAARAA

SEQ ID NO: 135582 - protein, 393 aa, unidentified
MICVGIDVAKDKHDCVILNSEGKVLAGVFTIPNNADGFDTLLQKIHGCTSPDDKIKVGLEATGHYSYNILGFLLNQGLPTYVINPLHTNLFRKSMSLRKTKTDRVDAKTIATMLMSNVDLKSYTDTAYHNEELKSLTRYRFDKVQERAQLKQSVSRLVTILFPELEKLVPTLHMSSVYALLIEFPGAKQIAEAHLTHLKSLLKDASKGRYGRDMATEIRDAAKRSIGSVMPAKSLELRHTIRLIRELDSEIKDIEAAIEAIMEELQSPITTIPGMGFRMAAMILAEIGDFSFFDSPDKILAYAGMSPSTYQSGHLSLAGTYSHMEKRGSRYLRYALYNATKYVCHWDPGFAAYLAKKRAEGKHYNVALSHAAKKLVRLIYALEKSRQPYRRAA

SEQ ID NO: 135583 - protein, 424 aa, unidentified
MKVVYQTCCGVDVHKSFLVATIVKTTGGIEPSYQKKRFSTFNNSILEFKQWLLDNDCHDVCMESTGKYWVPVFNLLEDEINVVIANPKWVKAVKGNKDDAKDSKWIGDLFRLGLVKGSYVPCKKVRILREYTRYRYKLVSCRSSEKNRYQNALTVCNVALDSVVSDIFGKSSTSIIDYLLEQSGSSINHEEIASKLLRSLKSKEDAVIESIEGYQMTDAQKYRMRLVRAHMDYITAEINDVDKMIENAISSDPDFENAVQFLCTIPGVKRASAITIISEIGTDMTQFSSSKRLCCWAGLTPGSNESAGKKKSVQITRAGVYLKPALVQCAHAAVKSDKSPYYKKKYDSLVKRRGKKRAIIAIARMILTAIYQMLSTGELWNPSDLYKIDMPVALVEKQKAKAIKQAKKLLQREGLLPPDEPLAS

SEQ ID NO: 135584 - protein, 325 aa, unidentified
MNDNASVLGIDVAKQKFDVALIQGENKPKAKVFGNTKSGHKKLWQWLRKNKATDSFACLEATGNYGEELAAFLHEHGAKVSVVNPARVKGFRQSELGRTKTDQADAALIARFCQAMKPDLWQPPAPHLKTLQALVHRLENLNTMRQKEVNRLHVIHDNLRENVASCIEFFDKKIRDLKKEIKEHIEKHEDLKEKQKLLKSIPGVAEVTIATILTFLAEPEKFRSAKQVAAFVGLNPKQRQSGSSVRGRTRLSKTGNPFLRKSLYMPALSAKRSNPLLAAFAQRLEQAGKSKMVILAAVMRKLLHLIYGVLKSGKPFNPAISYQGS

SEQ ID NO: 135585 - protein, 349 aa, unidentified
MHSTTVAVDLAKNVFELAVADADGKICERVRLNRARFSSFFVHRAPCRVLMEACGSAHYWARRIGAHGHEVQLLPAQYVRQYVRRNKTDRTDAAALIEAARCTSIRTVPAKSLEQQQVLVLHRLRSQWMSTRQRYLNTLRGLLREFGIAVPLGAAGARSRIAHYLAQPPQDLPIAIRPLLAQMLGEVRELEQRIEQIECELKALTRADPVVQQLRHIPGIGLLSSTALRAAVGDVGRFPCARSFASWLGLTPREYSSGERRRLGGISKRGDVYLRTLLVHGARAALLAAHRQQRTGHPLDHLRQWALQCERQRGHNVATVALANRLARIIWATWKHGRAFDGNWGRTAQ

SEQ ID NO: 135586 - protein, 367 aa, unidentified
MESFEFVVNRIVVTNPCFHTRRTTVNYVGIDLHKKTISICVVNQERQKIDYKRLACSTPETIVDYVRRLGSFQAVVEATASYEWLVRLLEPLAERIVLAHPKKLRVIAESTRKSDKIDARVLADFLALDMIPRAYRPTPRQREHRVLVRHRCFLQRRVTSIRTKIRRILSDYNADRPDLFTVEGLEYLAKVKLSAADRFAVTQLLAEFEFQHTQLRALAAELKKFVAQAPLAEAEARDLLHSIPGVGPVTTEVVLSELADPKRFRNAKCAVAYAGMAPGQRESAGKTKELHIERTGSKLLRWVLVEAAWQMVRRTGRWRVIFERLSGRIGRKKAIVAIARRLLGLMMALLKSGQPYRHAYEPAAAPG

SEQ ID NO: 135587 - protein, 305 aa, unidentified
MKTYIGIDIAKLNLDIHQDGKASRIPNNEKASTAFLKSLSDHSIIVCESSGGFEALLISLAHIHLRSIARINARQVRDFAKAKGRLAKSDAIDAQILAEFGQAFHPSPLSIPDRLQQEIAALVKLRAHFLTQITQNNNLTETISDKSLLAIIKKTVSSLKMQADKIQKLIAEKIKSSPSLQSKVSRLQEVQGIGEITASSLLGLMPELGSLSDTQAASLAGVAPFNHDSGQFRGQRHIRGGRSQVRSVLYMSALVASRHNPILKTLYQRLLVAGKPKKLALTALMRKLIILANRLLKNPNFSLAN

SEQ ID NO: 135588 - protein, 316 aa, unidentified
MTEAGGFVGIDVAKAELEVVVRPSGARWTVTNNASGLAQLQERLQAAAPSLIVLEATGGYEVAVVAALATAALPVVVLNARQVRDFARATGRLAKTDAIDAGVLAHFAEVVRPPVRPLPDAMTQDLQAWLTRRRQLVDMLLAEEQRRSRAPRAIQRQIDQHVRWLRAQLGAVEKDVAQTLRESPVWREKEDLLRSVPGVGPILTTTLLGDVPELGQLNRKHIAALIGVAPLNRDSGTYRGRRAVWGGRARVRATLYMATLTAARYNPLIRAFYERLVAAGKPKKVALTACMRKLLTILNAMIARRTAWKPPAAVTA

SEQ ID NO: 135589 - protein, 362 aa, unidentified
MTKATCLVGLDVHARQTHAAVLHLGSGELAVSRLRVAPGEVVSFLVTLPGRVVAVYEAGPTGFGLARAANARGLDVRVVAPGSVPKGSGDRVKTDRRDAIRLVRLLAAGELRFAFVPTVEDEAFRDLIRCIEDARGDLMRARHRLSKFLLRRGQRYEHSSTWGAQHLRWLRALGFQDACAQATFVDYLAAVELLVGRRGTLLSVLEQQVPGCAHAPVIARLRCFRGIDTLSAAGLCAELGSFQRFPRPALVSGFLGIVPSEHTSDLKRRQGAITKAGPGHARRLLVEAAHHYRRQPAIGPTLARRQDGQDPRVIEIAWRAQRRLHQRWQHLRNERKKPAGVVAIAVARELAAFLWEAATLDV

SEQ ID NO: 135590 - protein, 351 aa, unidentified
MELEEGPVSIVGGLDIHRKQITFDWLDLETGEVERGKIAPADREHLAAWLDARMRAGADVHLAFEGCTGWRYVAEELARVGVVGHLAEPADTAALRGPKRRAKTDRADAQHLRRLLADGRIPECWIPPAHVLEGRALLETYRDLRAEHTGWLQRIHAVLFHQGTPCPSRGVCSVDGRAELAVLTSRLSPAGQDQVMVALAMLAASEAQLDVVHRKLLLAARQLTGAKVLAANIYWVGPITGLALTCWLGGAGRFSSTRKAVRFAGLDVTVHSSDGKRSSGRLSRQGPAVLRWCLFEAGKTHARTDATDHDYYSAVKDRIDGKRAALSEARKIVRQACHILTELGDDAFAPT

SEQ ID NO: 135591 - protein, 356 aa, unidentified
MRSNKKVGKRQKIFIGIDVHSKSWDVTCVTHKGYCRSFNQPPSAEALIAFLRREFPEAEYHAVYESGFTGFSTYYALTDVGIHTIVTNAADVPTTQKEQLLKTDRRDSRKLAESLRSDELNGIHVRAVEDLDDRSLVRIRKTFKREEAATKVRIRHLLHSNGVEIPEQYSRRWTLAFTAWLRNEARLLGPSRNSLLILLDHLEVLHREVLAAGRAVSRMIRSEKYTEPLCRLMTVPGIGINFAVVLLTEIGDFNRFPNERGFACALGLIPMCHDSGESVSHGKKIFRGNRMIGSMMIEAAWRAVAKDAALNAYHHKCCQRMRSTTAIVKVARRMSNIILSMMKNKTDYDPEKTYSR

SEQ ID NO: 135592 - protein, 345 aa, unidentified
MKSMYYIGLDVHKKTISYCVKDVSGRIHAEGKIPATRFDLDRWMKTLPQPWTVAMEATIFTGWIYDHLRPHAAAVKVAHPLMLRAIAAAKKKNDRIDAKKIADVLRCNFLPECYMAPTAIRERRRTLRYRNLLVRQTVQLKNRISGLLMEAGVSYNKAKLHKVGYFRELLKSNPDIDESLRPLLQLCRETLVRLQKTESALIRSLARDRFLVERVKHLMTIPAVGPITALTWALEVGEVSRFSSIKKAISYCGLCGDEQSSGEHVKRTPISKQRNKHLQWVLVEAAHMAPRLSPELALLYDREKQKGNANRATLAVARKLVAYLVAIDRSQRDFLLVEKENQAAA

SEQ ID NO: 135593 - protein, 403 aa, unidentified
MNAVGIDVSKGKSMVAILRPFGEIVYSPFEIKHTSHDINSLVDLIHSVDGESRVVMEHTGRYYEVLAHQLSEADIFVSTINPKLIKDFDNDSLRKVKSDKADAVKIARYALDKWQNLKQYSLMDELRNQLKTMNRQFGFYMKHKTAMKNNLIGILDQTYPGVNTYFDSPARSDGSQKWVDFASIYWHVDCVRKMSLNAFTDHYQKWCKRKKYNFSKSKAEEIYGKAKELVPVLPKDEITKRIIKQAVEQLNSASSTVEELRILMNDTASKLPEYPIVMAMNGVGPSLGPQLIAEIGDVTRFTHKGAVTAFAGVDPGVNESGTFSQKSVPTSKRGSADLRKTLFLVMDVLIKTMPQDDPVYQFLDKKRSQGKPYYVYMTAGANKFLRIYYGRVKEYLASLAQSE

SEQ ID NO: 135594 - protein, 425 aa, unidentified
MEVIHPRCCGMDVSKRDAKVCVRIQQGSRASTMVTTWSSLSSAILELADHLLAQRVSLVVMEATGDYWKPFYFLLAEAGLDVMLVNARQARQIPGRKTDVADAVWLADLAAHGLLHGSFVPPKQIRELKDLVRARTTLVRLRGQEAQRLEKLLESAAIKLSSTISDLVVVTGRRMLHAMIDGEDDATVLAGLAHGNVKASAEELREALTGRFTDHHRFLAKVHLDLIDNYTDQIRVVADRIEACFTSPGGDPADDSGDLASKRALLTTIPGVSTLTAERIIAEIGADMTVFPTAAHLTSWAGITRGANESAGKVKSSRCRPGNSYLKGTLGIAALAASHTKDTFLSARYRRIASRRGHQRALVAVQRAILTSAWHILSTGQPYTELGGDYYAKRRPGAVISKALHQLRAAGITLTFTATTEAVVT

SEQ ID NO: 135595 - protein, 325 aa, unidentified
MKESLIVGIDVSKSVLDVCFMPGELSMQITNDQKGFQKWFRQCCSLMREGVEVLVILEHTGQYSLRFERFLQQQGIGYCKIAALAIKRSLGLVRGKTDNIDARRIAEYGWLRREILSADEYPSEQITQLQGLISLRLQLVRTRSMYICRLKEMKASDNMIEEKIHRELIRVFDQKIKQVEQKIKDLLTSHSELEKTAELLRSIKGVGWIVAAHMIVCTQNFKRFRNARKFNCYAGIAPFKHESGSSIKGRARISHLASKETKALLNLAALSAIRFDPEMKAYYQRRVAEGKNKMSCINIIRAKLVARMFAVTKRQTPYKQLAPAA

SEQ ID NO: 135596 - protein, 352 aa, unidentified
MTKITTIGLDLAKNVFQVHGVDAEGRVGVARQLRRKQVLAFFAKLPPCLIGIEACGSAHYWAREITKLGHTVKLMPAKYVKAYVKRGKTDAGDAAAICEAVGRPSMTFVPVKGVEQQGLSMLHSVRSQLVSQRTQLVNAVRGHLSELGIVAERGLLGLAKLAAIARDKEDERLPPMARSALLVVINQIETISAEITRLDTAMRKENNASNIGRRLETIPSVGPVIASAFRARVTKPDLFENGRHLAAWIGIVPENDSTGGKPKQKGLSKKGDRYLRALLVNGAMAVVRQAKMRPDKHPWVAGLLARMSAKQAAIAIANKTARIVWVVMVRGGVYEAGHRAPAYRGTPLSAAG

SEQ ID NO: 135597 - protein, 396 aa, unidentified
MITVGIDIGGKQHAVARCREGRDKADREILRVSQDRAGFDRLDAWLAHQDDSVGSVTMESSGHYWMALASHLRQGPVPVAVVNPLAAKYFAKSRMNRTKSDPADARSLALMAMQDRPITRDPLAGVELRQAARFAMTLVTEQARVCQRLVRLVELGFPELGEFFDDPACRTAREVLRIAPTAATARRRRVSTLAEANAGPGHRRLGQTKAEHLKTAVATSIAVSELDAEVAFEVGLLLDQYDLLEQQIAEADAHVAGLLDSELTRRLQTIPGVGPAITATLIAEIGDIWRFDDVDGLHAYAGVHPAERSSGHKGADPETSRHMSKAGNAHLRAAAYRMAVVGISHNPVIRAHYERKRAAGKSKMNALGHCMSKALDLVWGVWRNGQDFDPDWGSRP

SEQ ID NO: 135598 - protein, 375 aa, unidentified
MEEHSVAYIALDTSKLSNAVALAEGGRDGEIRYLGEIENTASATTKLVRKLSRKYGKLTFCYEAGPTGYGLYRQLTSLGHECVVAAPSLIPRKPGDRVKTNRLDALSLARQLRAGDLSAVWVPDDRHEAVRDLTRARQAASEDLRRKRQQVSALLLRLGRVYPGKTSWGKAHARWLASQKLDHLEQRIALEEQLVAIRQAGERIGRLEQAITEAVPKWSLAGLVTALMALRGIDFIAATTLLAEIGDLARFRTPRELMGYLGLVPSERSTGERVWRGGITKTGNRRARRILVESAWSYRHPPRIGKAKLAKFEAAPPAVRDIAWTAQSRLSARYRALTRAGKLDVVAIAAVARELAAFVWAVARAANASRAAPAA

SEQ ID NO: 135599 - protein, 411 aa, unidentified
MRLFVGDDWAEDHHDVELMDERGRVLARKRLPEGVAGMARLHELIGEQLGQDADDAEVIIGTETDRGPWVAALVAAGYTVYGVNPLQASRYRERHGVSGAKSDTGDAHMLADMVRTDSHQLRAVAGDSPGAAAVKVVARTHKTLIWERTRQVQRLRHQLREYFPAALEAFPDLDAPDALELLGRAPDPATAARLTRAQISAALKRARRRDIPGKATVIMAALRSAQLGQPPAVTRAYAVAVRSLAAVITVLNEQVKTLQRQVEADFGRHPDAEIYLSQPGLGPILGARVLGEFGDDPDRYASGKARKNYAGTSPITRASGKRKIVAARFIRNNRLTDALMAQAFNALSASPGARALYDAERARGTEHNPALRKLANRLVGILHGCLKTRTLYHEATAWPHQEKTPQSGIAA

SEQ ID NO: 135600 - protein, 385 aa, unidentified
MTQFARLTPSAADYDSTIIGALELSEKKWVLAVQLPGVKRHSRHVVEARGDELAAFVERLKARCAVAGHNIKRVILTHEAGRDGFWLARFLARRGVEVHVMQPSSLPVDRRARRAKTDVIDVEMLLRTLMAWLRGEPRVCSMVPIPNEADEEARRAHREREELTGERRSIANKIDGILATLGVKGFRALRRDRRDQLTSLRQPDGDPVPQMARARIERLLDRLELILKLIDEVEATRDAVLKKVAPADDAERMIRSLANLRSIGPDFATLLVREAFVREFRNRRALGGYVGLGGTPFSSGGSEREQGIGKDGNRRLRAAMVELAWMWCAGRPDSALANWFRARLGQPGSRIKKIMIVALARKLLVALWRYVKDGVIPEGAKMKTA

SEQ ID NO: 135601 - protein, 470 aa, unidentified
MAATHSSRLNRQQRKALARQLQSADPGLDVVHPNASGIDVGSSVHYVAVRPDRDPHPVRRFECFTADLHRLADWLQQCGVTTVALQSTGVYWLPLYDILDARGLEVYLVNARHTKNLPGRKTDVQESQWLLKLHTYGLLRNSFYPSADIRVVRTYWRQRADHVCAVSTCIQRMQKALTQMNIQLANVISDLSGWTGMRIVRAILAGERDPQALAALSHPGIHASRDTIAKSLEGTWRVDLLFVLQQEVTTYDAYLQRITECDQALEQHLRSLADKVDDNGDLPLASVGAQRQAHTKRRRKAGGHTPQFDLGCELHRISGVDLTRIDGIDVSVAQTIISEVGLDMSRWQDEHHFASWLGLCPDNRITGGKVIRRGTRRVVNRAATALRIAATTLLRSQSYLGAQYRRFRSKLGAPKAITAMAHKLAVLIYRMLRWGQEYADRGIAYYEERHREQQIRLLKKRAATLGLVVV

SEQ ID NO: 135602 - protein, 347 aa, unidentified
MNFYTAQHNYYCGIDLHAKQMYVCILDQLGKVIIHKNIKATADSFRPIIEDKKDLVVAVECMFTWYWLADFCEDENIPFVLEHALYMKAIHGGKAKNDKIDSHKIATLLRGGMFPQAYVYPRNMRSTRDLLRRRTHLMRKQSGMKAHVTNTLSQYNFPSLGSSLKYKFTRQEAKTLFKDPSVQKAIELDTELIGHYKRELESVERYIEKYAKDHDYHSTMILQSIPGIGRILSMVIFYEIHDINRFPSVQDFASYARLVKCRKESAGKVYGKSGAKIGNAHLKWAFSEAIPLMMREMPEVKQRVEVLAKKHGKGKAMTIMSHKLGRTVYFMLKRKKYFDRERFINWK

SEQ ID NO: 135603 - protein, 351 aa, unidentified
MLIIGCDFHPGFQQVAIFDNRTGEIEEKRLQHREEAEQFYRSLSSPVRVGMEACGHYPWFERLLDELGIELWMGDAAAIRAAVVRKQKTDRRDAEHILRLLIENRFPKIWVPSLEVRDVRQLLVHRHKQVQTKTRTKNQLQAMALSQGVQKKWKLWTKAGRAELEQLPLLPYAAERRQQLLQALDQLESEIAELNRRVEVEVQKRPEAVRLRTHPGVGSLTALAFVLIIGRAERFQCGKQIASYLGLVPSEESSGDRRRLGHITKQGSSLLRFLLVEAAQLTVRSDPAWRSKYFHLAMRRGRKIAKIAMARRLAVRLYWMWRKGWDYEQMKTFGSHAGEPGNRDGVSSNTE

SEQ ID NO: 135604 - protein, 388 aa, unidentified
MNEVGNRDYRIQKEVTTMTSILYVGMDVHKENYTVCCYSIEKDELAYRQTLMPDYRQVLKYLEQVRTRYSDDVKIVCGYEAGCLGYTLYHQLRERGVECKILAPTTMGITNTHGVKTDKRDAGNIAKCLAFHTYSAVNIPTKEDEAVKEYIRMRDDQKKALKVIKQQILAFVLRQGFRFTDGKNYWTGKHISWLKTLKMDGILGETLDEYLITYAYLTDKIERLDKRIEELASGERYQEKVQKLSCLIGVKAHTALSVIVETGDFARFAKAEQYAAYLGLVPGENTSGGKQNRTGITKAGNSHLRRLLVEASQSYARGAIGHKSLGLKKRQNGNTAEVIAYADKANERLRRKFYRMTLRNGTKRNIAVTAIARELACFMWGLMTENVA

SEQ ID NO: 135605 - protein, 419 aa, unidentified
MKIVYPACCGVDVHKNVIVATIAITDKSNITQYVVESFSTINTDLYRFRTWLLSYQCFDVCMESTGKYWIPVFNILEEANIKVLLTHPKYVRAIKGKKTDKKDSKWIADLFKFDMVRSSFIPPKDIRALRELARYRYKLVCMRSSERNRYQNCMTASNIGLASVLSDPFGKSASDIMRYVLTSNVFDEEHCKKLIQKSAKKKTELILESIRGSRIESDQRFKMKEASAHMEYLEQAILRTEAELYTRIQPHYSFVEHISNQLPGVSELSAALIISEIGVDMSVFESDKHLASWAGLAPANHESAGKKKSVRISKAGQFLKPLLVQCALAATKSTKEPYFAIKYQKLKKRRGHKKAIIAIARMMLTCIYHMIQTGEVFNPSDYEHFDNPIIRKVILTDESAIAFLAAQGYDVSSITKIAG

SEQ ID NO: 135606 - protein, 344 aa, unidentified
MDISVLDVDLGKNVCSVVGLDASGAVVMRRKVRRETLIALAEKLPPCVVGMEACCGAHHLGRVFAAHGHDVRLMSPEYVRPYVKAQKNDDRDAEGIAEAVTRPTMRFVELKSQDQLDMQTLHRSRDRLVGERTALINQLRAILLERGFVASQGKRKLEQFLSVLMDEQGGAGLSPRMIVLVTDARAQWEELDRRIAAFDAEFVRWVKENEEARRLTTIPGIGAIVASALVAAVGRAESFDHGRDLAAWLGLVPRQFTTGGKPKLLGISKRGNKCLRRQLIHGARAALPYVAERDTLLGRWAKGLMSRAHRNVVVVAFANKLARIAWAVLRRGERFAAPGMPVAA

SEQ ID NO: 135607 - protein, 417 aa, unidentified
MIFINCLGIDIGKSESVVAHYKDEVLVKEMVIQNNQNGYRYLKNYIKHLDSLFILFESTGIYSRGMKRFCEIHKIDYLEMNPLEAKFKTSSLRSWKTDKSDAHKLALLAFRMKDSKVQRQSEEIYFELRERARFHLEMEINQNRLKVELVETLHQTFPGLEKLFTNRYSKIALNIAKAFPHPDFVSTLTHDELVEKVLHSTDKGISVNKAHKYVQKLIEIKNNSFPNVDKSSFLLQKVQYLCDKLLIGIEEMKEFDQEMIDLAENTTEFENIISIPGIGELTAALLIGELGNIREFKTNKQLNAFVGIDIKRYQSGTSKSRDTINKRGNKKARRLLYLIIMNIIRGRNHYQSHIVDYYYKLREQPHGKTHKTAVIASINRLLKTIHYLIVNNKLYDYQKAPLTQPYNHIHHNTLFKN

SEQ ID NO: 135608 - protein, 325 aa, unidentified
MTQSSLIGSSYFVGIDVAKATLDLARSDAGEILTVNNDPDGIRRLVDSLGSTPPRMIVIESTGGLERPLLNALLDADLPVALVNPRNVRHFAIGLGTLAKSDPIDARVLAQFAEKASPRLAEKCSKNQVELHALVTCRRQLAELRAMEQNRRSSTVSKTALKTHDAVLRDVSKQIHKLDKKIRALVESNEDFDSNDKLLRSVPGIGTVVSSTLLAELKELGSTDHRQINALVGVAPYNDDSGTMKGKRSIYGGRASVRSVLYMATVTAIRCNPVIKAFAERLEKNGKAKKVQIVACMRKLLGFLNVMLRDRLTWNQLAVVKALDN

SEQ ID NO: 135609 - protein, 348 aa, unidentified
MLKYSVGLDISSKKIDCCFSSIDMGQKVKVQSTVTVSNNPTGFNLLADWIDKNHRQKDIALVICMEATGVYYESCALFLFEKACKVSVILPNKAKKYLQALGLKSKNDSIDAKGLAQMGAEQNLKLWEPMGKYFYELRQFTRQYQNIQEQITVYRNQLHSLKNSMYINKAIVKQLEQVIKLFTKQLKELEEQIKNHLESNPEVMQKTENICKIKGVGILSLATVLAETNGFSLFESSRQLVSFAGYDVVENQSGKRVGKTKISKKGNSRIRRILFMPAFTVVRCKEAPFLNLYTRTFSNHGIKMKSYVAVQKKLLVIIYSLYKNNQPYDPKRQNIQEKEQVLPSLLAS

SEQ ID NO: 135610 - protein, 403 aa, unidentified
MNNVAGIDVSKGKSMVSVLRPFGEVVAKPFSVGHTGSELKELADYLKSLDGETRVVMEHTGRYYEPVARFLHEEGVFVSAVNPKLIKDYGNNTLRKVKTDKADARKIARYGLDNWAELRQHTPMDTIRMQLKTLNRQQSLYAKTKTMMKNNLIALLDQTYPGVNALFDSPVREDGSQKWVDFATTFWHVDCVRNMSLTAFAERYRKWCKRHGYNFRQSKAVEVHTGAQDLIAMLPKDALTKTMVRQAIDALNAVSASLERLKAEMQALAAQLPEYPVVMAMHGVGDSLGPQLMAELGDVARFTHRNAITAFAGVDPGADQSGTHEAKSTRVSKSGPPELRRALFLVMDCLLKTQPQDDPVYRFMDKKRAEGKPYLVYMTAGANKFLRIYYGRVKEYLASLEEN

SEQ ID NO: 135611 - protein, 424 aa, unidentified
MKTTPTYAAFVGLDWADRSHQVCLRAANSERDEQSELKHDPLTLHTWAYSLQARFPQGKIAVALEQTKGPLIYALSQHEHLELYPLNPAMLTKYRQAAKSASGTKNDPLDAALACELVRIHRDWLRPLPAVPAAVRELQMLLEARRGLVNQRTGLSNQLTAALKGYYPQALQLVGEDAGSPLAGAFLRRWPTLEAVQRARPETLRRFYHAHHVRSAERIDERLAVVRAAVALTRDAAVLAALPLTVAVVLEQLAVLARAIADYDRRIAAAFARQADAALFATLPGAGAQLAPRLLVAFGPDRSRFPNVGALQQYSGVAPVQEQSGRTKITHWRWHCPKFLRQSFHEFAGCSVPQSRWAKAYYQREIARGRPRHRVLRSLAFKWQRILFRCWQTAEPYDEDRYLATLRRRGSPLVALIDDLEKAA

SEQ ID NO: 135612 - protein, 354 aa, unidentified
MLIIGCDYHPSFQQIAFVDTDTGELQERRLEPCEEAEKFYRELAVQGMKVRVGMEASGQARWFERLLAELNIELWIGDATEIARKRERKQKTDRQDAQHILHLLLKDDFPQIWVPSWENRDLRQLLWHRHRMVQARTRIMNQLQAVALNEGVRCNKRLWREKGREQLESFRLAPWASRRRHDLLEWLDRLNPTIGALSQAIEQEVEKCPEAQRLRTHPGVGPLTALAFVLIIGKPDRFQCGKQIASYLGLVPLEDSSGNRRRLGHITKQGNSLLRFLLVEAAQVTVRSLPEWRSKYVHLTMRRGRKIAKVALARKLAVRLYWMMRKGWDYEQLKKFGSHAGQPGHRDGVKQNIE

SEQ ID NO: 135613 - protein, 417 aa, unidentified
MNSPPETIPIQRYIGIDIHKYYMMIGGQNAHQEWILRPRQVQTVHFRTWAEKNLKEGDAVVVEATGSVWDIYDIVAPLVSKTVVANAHKVRQIAEARVKTDKEDIKRLITLLIADIVPEVWVPPIHVRELRSLISFRWRLTKQITMSKNRLHSVVQRFNLNAPKGGLLTDKNKSWWEKQEFTDLTGFQVDRDLEIVENLEQQKAAIDQKLAELSNIEPWASDMAFLMQIPGFGLIFSMVILSAIGDISRFSDPKKLVGYAGLGAGVHASGEKYQEKSITKAGRKELRWALVEAAWVAVRFDPYWKAQFIRLKKRMHVNKAIVAIARRMLVSIWYILTKRESYRHFDEETIAYKMLIWAQAIGEEGRQGLTRQQFAKYGLLRLGIGQDLERIVKGGGPRRIASTEEVLALKPELAPPR

SEQ ID NO: 135614 - protein, 405 aa, unidentified
MAIIGMDIHRSFAQAAFLQDGQVKREQRVDLVHDRLVRFGKSLSVEDEVVIEATGNSAAVERILRPFVKRVVVANPRMVRAIAYARVKTDKIDAIILARLHAGGFLPEVWVADDNTQRQRRQTVERMGVLEQVVRTKGRIHAILHANLIPKYSGHLFGKAGKKWLAGLPLPEEEKAIVGRLVDELERNSGQLAKLDMTIIREALENPRVVRLMTIPGIGPVVASTVLASIGDISRFATPEKLSCYFGLTPKVRQSGDRPARHGRISKQGNTHARKMLVEAAWSAKTAPGPLKAFFQRVQRNRGAPAAAVATARKLAVMIWHVLTDGTEYAYARPAFTAMKLRKAALKAGAPREYGKAGPGRDYWIKEIREREADYVRRAEQAYQQMVAAWKEKPPTAPAMTATPG

SEQ ID NO: 135615 - protein, 355 aa, unidentified
MGVDTHLNFHVAVVPDRLGSRLGEVKVPTTGKGYGELVRWAEGFGLVRCAGVEGTGSYGAGLARHLKAAGIAVMEVERPMRRHLRRRGKSDPIDAEKAARAALAGEAAGVPKSGDGEVEMIRTLRSARRSAVKARVQASNLLQTMIVTAPEELRRRLHALPTKELVAVAARFRPGGEPEDVEAATRFALRSVARRHEALSEEIAGLDAQLERLVAQAAPEVLALPGVGTNHAATLLVLAGDNPERLKSEASFASLCGVSPIEASSGKVVRHRLNRGGNRDANRALHMICVVRMGSDQRTRSYVARRTAEGKSKREIMRCLKRYIAREVYRVLLSSTTVEPSPIRSQRGFVGADVA

SEQ ID NO: 135616 - protein, 340 aa, unidentified
MTVYAALDVSMEKTAICVVNADGKTVLEASTSSDAEAIAMCLDPYCAELDQVGLEAGPLAEWIARGLGYHGMRVVLMETRHVRAALSAMIAKTDRNDARGMAQLLRSGWFRPVHVKTVPAREQRALLAARSTLVRRHRDVENSVRGLLKGFGLRIARALRGRWDNAVREAIAGNSVLLSIIDPLLVARQAIRDQLAILDKRVRDVARADNVCRRLMTAPGVGAIVALSFRAAVDQPERFKSSKAIGACFGLTPRKYQSGESDRDGAISKAGDASVRLALFEAAHVILTRVSKWSKLKAWAVGVAKRRGAKRAKVALARKLGIVLHRMWIDATDFRWGQAA

SEQ ID NO: 135617 - protein, 343 aa, unidentified
MQMITTVGLDIAKSVFQVHGIDAEDRVVIRRQLKRRYVQAFFQKLPPCLVGIEACASSHHWSRELKALGHTVRLMPPAYVKPYVKRQKNDAADAEAICEAVSRANMRFVATKTPEQQSCLMLHRTRHLFIRQQTAVINVIRAHLAEFGIVAPVGRKGVEALLDVVANPTDTRVPAIARACLAALGAQLRRLKEQILEFDRLIMAWHRSNEASKRLDAIPGVGPILATALVASVADPKVFRSGRNFSAWIGLVPKQHSSGGKDRLGHISKQGDRYLRSLFMAGALAVIRYAKIHGTKHRPWLTALLVRRPTKIAAIALANKMARMVWAMMARGERYKEPVALTA

SEQ ID NO: 135618 - protein, 373 aa, unidentified
MKYSTVYVGMDVHKDSFSLCCYTNEKEKAEFPQKVDGHYSKVINYIEAMRFHYGDDAAFICGYEAGCLGFTLYHQLTDHNVKCIVMAPTTLLRPSGRKKVKTDKRDAALLARCLAHHDYCPVHIPTEQDEQIKEYIRMRCDHKLALKKVKQQILAFCLRHGYRFEETNHHWTQAHLRWLRALKPEGLYQEILEEYLITFDQLTSKIERLDKRIEELALGEEYQTNVKKLTCFIGIQTQTALSVIVEVGDFKRFADAQHFASYLGLTPGEDSSGPDQNRLAITKAGNRHLRMLLTEAAQSYSRRQVGYKSKALKQRQEGNPPAVIAYADKANERLRRRYYHLVLGKNKRSNVAKTAIARELACFIWGMMTEVAA

SEQ ID NO: 135619 - protein, 337 aa, unidentified
MKYSGIDLHSNNSVVTVTDEEDRVVAEKRLPNDLTRIIGFLLPWREEIVAVVVESTYNWYWLVDGLQEAGFVVKLANTAAIKKYDGLKHSGDQADARQLAHLLRLGILPTGTILPPKHRAVRDLARKRMQLVRSRTSHILAIENIAARQQGAKIGCRQIKCLTPDAVDQMAFPVDVGLAIQSNLAVVATLNEQIVRLEKRLQEEMADCPEYGLLTSVPGIGRILATIILLETGPIDRFAAVGNFASYARCVDSQHMSNGKKKGQGNTRNGNKYLAWAFIEAANYTHRFCAEAKRFYERKKAKTNTAVATKALAHKLARACYHILKEQKPFDVTRCFA

SEQ ID NO: 135620 - protein, 352 aa, unidentified
MHMIAFDSHKRYTVASVQNMEGQIIKEARIEHGRGNIVRFLGQWDKGSSVAVETIGNWYWIVEEIEHAQMRPRLVHARKAKLMLGMINKTDKLDARGLNRLQQTGTLPTVWIPPLEIRDKRELPRTRMVFAHQRTRLKNRIHSVIDKYGLQQRFSDISDMFGKEGRKLIQESLVLLPEQTRYALETLLHHLDEVERQVEKIEKRMKEVFHPNEETKLLMTMPGVGFILSVVISLEVGDVGRFNGPERLASYSGTVPRVHASGDKVRYGRLRPDTNRYLKWAFSEAGNSVAVNRKKWPHRHVSKVYTRVRHRQGHAKAVGAVARHLAEATYWILTRKEPYWERGISRVSRTEA

SEQ ID NO: 135621 - protein, 386 aa, unidentified
MTSMPQTEMTPNLPVAVSSPVVLGGIDTHKDLHVAAVIDAGEKVLGTHSFSTTRAGYRALIRWLRSFGDVRRVGVEGTGSYGAGIARYLVDAGIEVVEVDRPDRSERRRKGKDDDLDAISAARAALHNRRTSTPKSKDGPVESLRVLRVTRATAIRARRNALQLLRMTIVAAPEELRDQVRNLTRMQLIRTCAAWRPDTTNVTDPVSATRIALKSLARRILELGDEIAMLDELIKPIVTALAPQLLARPGIGVEIAGQLLVTAGDNTQRLRGEAGFAMLCGVAPLPASSGMTQRHRLNRGGDRQANSALHLAVISRLRIDERTQAYLARKTAEGHSKLEIIRCLKRYLAREVYYLLNPAASTSKGGGSRTGRAGPQPARNTLPQAG

SEQ ID NO: 135622 - protein, 391 aa, unidentified
MFLLGIDIAKLNHVASCIDSSTNEIVFSNFKFKNDFIGFSALLDKIKTFDTKNLIIGLESTSHYGENLINFLFKQHFKVALINPLQTSHLRKANIRDAKNDNLGSLNIAKSLIFAKLNFISEKNINCFSLKKLTRFRSSLIKQRSKAKIQLTSLLDLLFPELQYLFKSKIHSKAIYSLLKKYPSAEEIAALKDDKISNLLYASSKGHFKKEKSIELKSLAKTTVGIKDTSISLHVIQLIELIELYDKQIKDIVTKIADTVDKLDTKLLSVPGISIIACAIILGETNNFNNFSDSTKLLAFAGLDPKIRQSGNFNASSCRMSKKGSPYLRYALIFTAWNIVRHSEKFNKYYCLKRSQGKSHYNSLGHVAHKLVRVIFTLIKKNIVYQEENLE

SEQ ID NO: 135623 - protein, 464 aa, unidentified
MEKATPERERLPAELSRMNLNAAGIDVGASSHFVAVSLDRAEPPVREFAAFTADLYRLAAWLEECGVETAVMESTGVYWIPLFGVLEERGFEVMLVDPRRIKNVSGRKTDVLDCQWLQQLHTYGLLSGAFRPEADIRRLRSYLRQRAMLVEYASHHIQHMQKALTQMNVKLQHVISNITGKTGMAIIEAMVGGERDPRQLAKLRDGRIRADEETIAKSLQGHWRDEHIFELTQALELYRFYQGKIAECDREIEAQMERFEDRSDGGSPAGNGRRGQGNAPRFDIRTHLYRMTGVDLTRIDGVDGFTALKVISEIGTDMTKWPSAKHFASWLGLSPDHRITGGRVMSSKTKPNANRAAAALRLAANALHRSDSALGAFLRRKKAQLGAPKAITATAHKLARLIYTMLRDGQEYVDAGAEYYERQYQDRALRAAKRRAAQLGYQLVPMPDPPEHATHSPPGAPIAA

SEQ ID NO: 135624 - protein, 343 aa, unidentified
MLTKNVTAIDLAKNVLQACHISIQGELLSNKPLSRQKMKEFLAKAKPSIVAMEGCCGCHYWGPLAESFGHEVRIINSKKVKGYLEGHKTDHNDALAIANAAIQIGIKYSQPKSLEQQSMQSLESSRRFLSRSVVSLGQHIRGTILGYGIANPRDEKGLKDSVQTVLDGKTSIPSNVVSVLSMLWEQYKQLKAKLIEFEKEKNALTRQIEPCQRLMEIEGVGETTAAMLYTTLGDGKQFKNGRQASAFVGLTPKQHSSGGKVFMVGIDKCGGVKELRSLLYLGAMSYVGRLPEKPKTQKDAWLRSIIDRIGFKKTCIALANKVVRTAWAMLRHETQYRPVLLTH

SEQ ID NO: 135625 - protein, 317 aa, unidentified
MSNISIVCAGIDIGKLKLDVALYGAEARLEVDNTSTGHERLAAWLKLHKVERIGTEATGGYEQDVVRTLRRAGFLVAVLQPMQVRAYAKFRLRLAKNDRIDAALIAACVASVEEIREAPDPRFEAFAAAQTLIDQLKDDIVLYKTRRETARDEHGRAFWEQEIASRKAQARSALKTLRAEMRAHDDIAAKLDLIMSVEGVAEKSAIAILIRMPEIGTLSREQVAALAGLAPYDDDSGRRSGSRHIQGGRARLRTSLYAAALPAAIFWNPQLVTFYKRLRASGKTHKIALVASARKLLIFINTVVARATPWQPKSAVS

SEQ ID NO: 135626 - protein, 344 aa, unidentified
MIWVGLDVHKRFSRMGIFDPATGDLQDLGEVTNDREALRVRLEQVASPRTVVLEAGRSSYHMAGLLESLADEVWIIDAAELRRLQHRVAKTDRRDAAALAWWAAKGALKPLWRPDRQVLELRELTRGRTALTRLATQLRNLIRSLLARHGYECPHRDLLSARGRAWLDTVTLEGYAGELFAAFRELLSLIQEKADGFEQKVEVAATDFPAAQRLRTIPGIGPVLGLSLAVEIGDVSRFPSPGHLRGYSGLTPAVSQSGEKEARGPITKHGNKWLRHTAVLAAQRMSQMHQADPGIKRTFLSVAFRHGRNPGKVAAARRLLDLSYHLLKKEADYQAPRARTAPTV

SEQ ID NO: 135627 - protein, 420 aa, unidentified
MENVTDNEEIIERIAALDIGKAELVCCARVPATGGRCRAQEVTTYPTMTRSLQAMADRLGELGVTRVVMEATSDYWKPPFYLLEACGFEVWLVNAKDVKHLPGRPKTDVLDAVWLCKIAERQMIRPSFVPPPPIRLLRDLTRYRAALISDQTGEKNRVEKLLEDAQIKLSVVATDIFGVSGRAMMKALIDGERDPAVLAQFARTAMRRKIPALEEAFVGRFSDHHAFLLTKMLDRIDGLGADIAALDARIEDQIAPFADALDRLDEIPGVGRVGAQVIIAEVGLDMGRFPTPGHLASWARFAPGVKESAGRKKGNGSTGHGNAYLARVLGEAAVGASRTDTFLGERYRRIARRRGKKKAVVAVGRSVLVIVWHLLSDPQARFEDLGPGFYDTRAGGDRARRNHVRQLEALGYKVSLEPAA

SEQ ID NO: 135628 - protein, 384 aa, unidentified
MNRIVKIGMDVHSMNYTLCAMEPVLDGEDRIFANIKVTPDYKNVIQFISKLKNKLGASDTYSIECGYEAGCLGYSLYHQLTDAGVKCTILAPTTMLTPQGKRIKTDKRDALMIAQCLSYGGYHAVHVPDEKDDAIKEYLRMRDDHKLVLKKIKQQINAFCLRHGHFYDGNKWTIKHREWLKTLKLSDLYRETLDEYMTTYEEQESKIERLDRRIEELASDSAYKEKVKKLGCFLGIKTHTALSLIVETGDFKRFAKGNTYAAFLGLAPGESSSGDNVNRTGISKAGNSHLRTLLIEGARGICKGKIGHKSKDLRLRQAGNSAEVIAYADKANVRLRSRYYRFMRHEKKKNVAVAAVARELACFIWGMMTDNISIVTERGKQNVA

SEQ ID NO: 135629 - protein, 339 aa, unidentified
MKDIKILGVDIAKDVFQLCGIDEWGKVIYTRRVKRAQYVSTVASLKVGCVVMEACGGANHWYRTFMGMGISTQLISPQHVKPYVKSNKNDRNDAQAIAEAASRASMRFVRGKTVEQQDVQALLKIRDRLVKSRTALINEIRGLLQEYGLTMARGAKRFYEELPLILASEAVGLTPRMKRVLNCLYTELLNRDEAIGDYEEELKAVAKANEDCQRVQSIPGVGYLTALSVYASVGDIHQFHRSRQLSAFIGLVPRQHSRGNKEVLLGISKRGNLMLRTLLIHGARALLRHVKNKTDKKSLWLKALIERRGMNRACVALANKNARIIWALLTRQETYRCGA

SEQ ID NO: 135630 - protein, 409 aa, unidentified
MKLFVGIDVSSQDMKACIMSFDGETLASLTVDNNLIGASYLRDQIVDIAQKHVIQEIVIGMEATSVYSWHPAMFFHEDESLKRFQTKVLTINPKLIKKFKESYVDLDKTDHIDAWIIADRLRFGRLRQSVVMQNQFIALQRLTRMRYHLVHNLTREKQYFLEHLFYKCSSFTTEVESSVFGNAIMELLLEQYSLDEISAMDIQDLAEFLRIKGKNRFTDAEYVAKSIQKAARSSYRLSKCVEDSIDLLLGTSIESIRSVTKQIKELDKAIKKLLDGIPNTIQTIPGIGPVYSAGILAEIGQIERFDNQASVAKYAGLTWNKHQSGLFEAEETKMIRSGNRYLRYYLVEAANSVQRNEPEYRAYYLKKYHEAPKHQHKRALVLTARKLVRLIDTLLRNDQIYTPRRKVNK

SEQ ID NO: 135631 - protein, 384 aa, unidentified
MYKHNILFIGLDTHKVSTAVAHVEDHRGVKPVHCGKIKTTKAAITKLARQYQSKYPHATLHFVYEAGPCGYWIYRLLTSLGHCCYVVAPSLIPKKPGERVKTDKRDALKLAKLIKDEELTPIYVPESEDEAIRDLSRARETAMKDLKDAKYQLKALFLRNNITCKVNDNWSLQHLRWLTELILPHPSQQIVLQEMIQIITERIQREKRLANELFHQVKSWRYYPVVKALQAIRGVRLLIATGLVAELGDLRRFDHPRKLMAYLGLVSKEHSSGDKRRLGSITKCGNSRARRLLVQGAHTYKHNAKISTELQKRQEGLPKEITDIAWQAQLRLCRRYNRLLSRGKHRNVVVIAIAREIAAYIWAIAREVVISPVNSRLRVSRVPA

SEQ ID NO: 135632 - protein, 310 aa, unidentified
MDARFVGIDVSKDRLDVHVCPSGEAFSIVRDAKGLQELVDRLRSVEPALIAVEATGGFEVIVAAAIGGAQLPVVVVNPAQIRHFAQAVGKRAKTDPIDAAVIARFAEAVKPELRELPDEAARFLSELVSRRVQIIEMLTAERQREKRAATVRVRKSIARHIKVLEKELPEVDRDIGTMVRNSPIWREKEDLLISFPGVAQTIARSMLAGIPELGRLNRREIASLAGLAPFTRQSGKWKGKSMIAGGRPAVRAALFMAAMSAIRCNPVLRAFYRGLLARGKPKMVALIAVARKVLTILNAMIRDNKPWQNA

SEQ ID NO: 135633 - protein, 348 aa, unidentified
MRSYTQQHRYTCGIDLHARSLYVCILDDTGQTRVHKNVKASPEALKKLIADYQDNLVIGVECMFSWYWIADFCAHNGIDFVLGHALYMKSIHGGKAKNDRIDSEKIARLLKGGMFPYAYVYPRAMRSTRDLMRRRIKLTRKRGDLMAHIKNTLSQYNLPAHPENLRYAKHRQPMRSAFPDPSVQRSIDLDLARIQFHDEQLAKLEWYLKRTAKSFDPKAVILLKSIHGVGDILSLVLLYEIHDIERFPRVQDFVSYCRLVKCQRESAGKVKGTGGARIGNPYLRWAFGEAAVLFLRGNPDAQCWLEKKTPKHNKAKALTILAHKLGRAVYYMLKRETLFDQDRFLVSS

SEQ ID NO: 135634 - protein, 359 aa, unidentified
MEGQERSPGRIVGGVDTHKDLHVAAVVDELDRVLASRCFATTRHGYKQMVAWMGAFGSLQRVGIEATGTYGAGLLRYMQKAGIEVLEVTTPDKHDRRKRGKNDDLDAQNAAHAAFAGKRTVTPKSRNGMIESLRVLKACRRTAVAARRVALQMIQNTIVCAPDELRELLRKMTRMQLIRTLAAWRPDLTDYRNVTSAYRITLKSLGRRYLELHDEIADLDTMIVSIVDELAPNLVARNSIGHESAAQLLLTAGDNVQRLRSEASFAALCGVSPVPASSGKTTRHRLSRGGDRAANSALHIIAIGRLRTDPRTQAYVAKRITEGHSKLEAIRCVKRYIAREVFSLIKQRPQESHPASTTA

SEQ ID NO: 135635 - protein, 415 aa, unidentified
MFKIIRSKCCGLDVHKTWIYACIGIADSSSRVDYKQARFSSFSKGLKQLSEWLAKYDCTEVCMESSGKYWIPVFNVLETTCDVTLAHPKYTKPQKGNKTDRKDAMWICDLFMCGMIKRSFIPPADIRELRELIRYRTKLTNMITGEKNRALNCLTVSNLKLDDVFTDVFGKSSSSIIRFMLDNPGVYFDVTPFIHGRCKTPVEEIQAAVDGAMSPAHAVKLRECMSHIDQLESHKRMVEQDILRLSAPYGDELALIRTVPGFDKNPMTAITILSEIGADMSVFPSAKHLVSWAGCCPRNDQSAKKIKSTRISRAGVYLKPLLVQVANALIKSKHHPEFKERYRKLKARRGHKKAIIAICRMLLTAIWNVLSKAEPYSPAGYLSDHQVTEVRTLTQKQALNLLKSRGYVITDEEPA

SEQ ID NO: 135636 - protein, 373 aa, unidentified
MQESTVFVGLDVHRDCISVATLRGASQDCEDVRNWPHDLVKIRRLFERIGRGAVKVRACYEASGMGFGLCRMLREMGVDCIVAAPSLIPVRPGDRRKTDKRDASKLAHLLRAGELVAVSVPEPALERVRALTRCRETFSREVRSSRHHVVKFLALQGLAYREGRQWTQAHWRWLRAVKLEPPAQQALESYVALLDFKLSQLTRIDQQLEALAPKVDFADAIARARCLRGFDTVSAMTVAAEIGDVRRFGSPRQLMAFFGLAVSEHSSGGPDKHHRGPITKTGNARCRRLMVEAAWHYRHPPRTSRALQRRREGQSAAVVAHADRAQHRLYARYRRLSEKMLLTKVVVALARELTGFLWAVLRGEPQLLLARPR

SEQ ID NO: 135637 - protein, 570 aa, unidentified
MIKNKNPYRGVWGDAGRHLRVFFIRAILYLATTLVAWEKSIMGNRRTRRKRKQHINKVQGQRLAAEFKGQDLSRVLVVAIDGAKKSHKALLADGFGEIITDTFGFPNDLAGAKMFAGSVRKAAVDINAFKIIVGLEPTGHYAENLVAYLLEQGFDVRQVNSFAVSREREAGLTWSKTDEIDLCAIGQLIINGKSSPLGHTEAIYDNMKYAARARRSTIQRTVLLESQIHAYMDRLFPGFLDRDLFSDPFGLTSMAFMARYSSANAACRAGATRIERWLSSRRGVSNPHEITQAVVELAQGALRRPADHEEALIEALRFRLREHDLLEEQIGNLNIRLAEYLVETPGIWLLAIDRVSVVSAAEYLGELGQISRYDGANQIIARAGMVPRETQSGMIAYSGGITKLGHPKLRYILGVIGHNLLTSNRYFQAFYNRLVDRGGKNERLAKTAVAGKFVRVSWAMMNLKGAFEAPTWCEDDLKKDIRTKMERFLKQFGASQIYRNSIGPRLDKVLVSGGQPSTSNSITGSHQLPSASGTHEEHDRASTKPIHIGSLIPVVLGQMAAEHDVEAHMA

SEQ ID NO: 135638 - protein, 340 aa, unidentified
MNVSMMGLDLAKNVFQVHGADTAGAVVFRKQLRRDKLLAFFAGQPACIVAMEACSSAHYWAREIGKLGHAVRLIAPAYVKPFVKRQKNDAADAEAICEAAQRPTMRFVTVKSEEQQASAAVFRARDLLVRQRTQTINALRGHLAEYGLIVAQGPTHVTTLVLHVEDSRSKLPEAARMALAILVDTLKSLDQRIQKLDVEIARRAREDEDARRLVTIPGVGPITATALIALAPEAAGFKRGRDFAAWLGLTPLQRSTGGRQKLGETSKMGERTLRRLLIIGASAVVLQARRRGTPEGSWLGRMLARKPPMLVTVALANKMARIVWALMAKGGVYKAPAVAA

SEQ ID NO: 135639 - protein, 349 aa, unidentified
MNEPYAGRQIVGFDLHRRRSVLVRMTEAGERLETVRISNDPEYLREVMTRAGEAPEVVLEACYGWYWAADTLAELGATVHLAHPLGVKMFSYRRLKNDERDAADLADLLRMGRLPEAWIAPPATRELRGWVRHRAKLVGLRSNLKCQVHGILAGAGIAVPMSDLFGASGQKLLATASLATESRSRIDSLQRMITALDFEVDLFAKLVAGRLRTHPGYQAIQLIPGVGPVLAAVFVAEIGDITRFRQPEQLASWAGLTPKHHESDTTVHRGPITKQGSRLVRWAAIEAVQRLPGHTRIGQIRDRVAARRGRNIGVVAAARELTELIFYGLRDHHVHALAMHSPARTPLPA

SEQ ID NO: 135640 - protein, 341 aa, unidentified
MNITRMGIDLAKNVFQLHGVDKHEKVVLRKQLKRSQLLEMFANKPPMLIGIEACGGAHYWARELTKLGHTVKTMAPQHVKAYVKSQKNDKRDAEAICEAVSRPTMRFVPIKTEDQQDMQAIHRVRDRLVKSRTALVNEMRGLLAEYGIVITYTGVPATRRGLLEAVENAENGLTPKMREILFELNEELNDIESRIQRFLQKIHQHRDQDDRVKRVMEIEGLGPISASAIVTAVGNAKQFKNGRDMAAWIGLVPTQHSSGGKEKLGGISKRGDKFLRTLLIHGARSVIRFSESKTDKRNRWINELIARRNKNVATVALANKNARIIWSILAREEHYRPAAQA

SEQ ID NO: 135641 - protein, 343 aa, unidentified
MQVSTIGVDLAKNVFQVHGVDNAGKVVITRQLRRKQVIDFFSKIPACLVGMEACGTAHHWAREISKLGHTVRLMPPSYVKGYVKRSKNDAADAAAICEAVTRPSMRFVPIKSADQQALLMLHRTRDLLIRQRTQLINALRAHLAEFGLVAETGREGLAQLAEIITDEGNREALPSAMKQALQAIVDQLAALELPIGALDRAIHAHHRANDMSCRIETVPGIGVIAATAIASTVTDPSNFKSGRDFAAWIGLVPRQHSTGGKERLGGISKQGDRYLRRLLVIGATSVVQHARRHPQKYPWIIRLLARKPAKLVAVAVANKMARIAWAIMAKGGYYRAPELAVAA

SEQ ID NO: 135642 - protein, 372 aa, unidentified
MKQNIIHIGLDVDDQQYHGSALNQTTGEILDFKCRPNLKGLLGQLDKLHQYFPGSIFRICYEASYIGYTLQRDLAENGYHCDVIAPTSIPSPRGKQVKTDRIDATQLVQFYANDLLTLVTIPEPEQEQDRDLIRSRQKLLEQQTELRKHIQALLRRNGRHYKVETENKTHWTLHHYCWLERTIEASSGSLKVNLELLVRQLKGANSILTEYGQQIEALAKTPRYEPLVQALTCYKGIKNLFALTMVTEIGDVKRFPHPRQLVSWIGMDIREYSSGGKYNRFGITKHGNRYLRTAFIEANQRGYRTARISRDLKARRKNTDPALINIADRCLRRLNKKGNRLLVAGKHPNKVKVACAREMVGFVWESLNKMAA

SEQ ID NO: 135643 - protein, 321 aa, unidentified
MTPTADTYVGIDVAKRHLDVSVLPAGQRWRAEYTEAGVADLVTRVQALTPQLIVIEASGGYESVVATVLAAAALPVAVVNPRQVRDFAKAIGRLAKNDRLDADVLALFGERVRPEIHPLPDRALQDLTALVTRRRQLIEMLTAERHRLVLATGTVRTSVQRHIRWLERQITDSDDNILRAIQRSPVWRVQDDLLRSVPGIAHRVSAALLAHIPELGHVSRRKIAALVGVAPFDDDSGQHRGRRHIRGGRAAARQALYMATLVATRHNPVIRAHYQHLCTVGKEKKSALVACMHKLLTIINAMLKYQQSWRAATAAAAPLDL

SEQ ID NO: 135644 - protein, 312 aa, unidentified
MDKLSYGGIDVSKDRLDVVVLPEERFFSVSNDMVGWAELVARMRPLAVSAIGIEPSGGYERGIIRALLAAGLSVRRINPNKLRQFARARGVLAKNDRLDARLIAEYVAIMPTRVVQRDEAVERLAEVVTMRRQLCDEHVTVENQAAHIEDAMLRRLNKRRLARLEADTRLLDKRLAEMVATNAALAQRYELLTSMPGVGPVLAFTLIALLPELGQMSRKQIAALVGLAPYDFDSGKLRGHRSIYGGRMPVRNVLYMAALSAYRYNPALKAFHKRLTATDKRSKVVIVAVMRKMITTLNAMLRDNVAWQPKSA

SEQ ID NO: 135645 - protein, 305 aa, unidentified
MEHYAGLDVSLKEISICVVDDDGKTIARGTCPADPEGVAGWFRTRSLTPHRIVHESGMLSIWLQRGMTKLGLPTTCIDARKAHKSLSARLNKSDAADAEGLAQLARTNWFTPVHIRSEEADRLRSLIGARERLIRLRKDLEGHIRGVLKTFGIRMTGVGQGRQRQAFRDQLAAAGETDPILRTIADGFIAAHSTLCQAADDLDKAVKKKAKAHPVARRLMTIPGVGPVNALSFIALVDNPDRFSRVTDVGAFLGLTPKRHQSGEMDWSGRVSKCGDGTMRGLLFEAASCLIRQVKRFSPLKSWAV

SEQ ID NO: 135646 - protein, 367 aa, unidentified
MVVERTSVGLDVHARSVRAAVLDTVTGELIERMVSPVTERVVAFVDEVAAGHGTVLVTYEAGPTGYGLARALQAAGHGCQVAAPSKLLRPAGDRVKTDRRDAVLLARLARNEDIVAVTIPTVAQESARDLVRAREDTRTTLMSARHRLSKLLLRHGYVYDGDAWTGRHDAWLRRIRKEQLVPGGGGTLAAFDDAYDAVCHTLSRRDRLDRDIAALAADCEFTATTRRLGCLRGISTTTGFALAVEIGDWQRLTGATIGAYLGLVPSESSSGGSRVLGGITKTGNSHARRLLIEAAWHHKPEYRPGKTMHDRWALAPAAAAARGDAGNRRLHRRWQVMTAHHKRHTVANTAIARELAGWCWSLAVMDD

SEQ ID NO: 135647 - protein, 313 aa, unidentified
MSTDKVYVGIDVAQDSFVVAVYDQPVHWTDQNNASGIAQTIARLEEIRPTLVVMEATGGLEHGLAQMLAAVEIPVAVVNPARIRSFAKAMGRLAKTDPIDAVVIAHFAQALKPSARIPALADAQERKDLLARRNQLMGMISAEKNRLHRASAPIRPTIKAHVEWMQEQIVQIDNELDKKLANDKDYQARAQQLRTVKGVGPVVARALYVGLPELGHLSGKQISALVGLAPINRDSGKFSGKRFVSGGRSAVRTALYMAALVGTRWNPVIKALYKHLLKAGKCKMVALTACMHKLLLILNAMVRDGTFWQPAAT

SEQ ID NO: 135648 - protein, 351 aa, unidentified
MKKKVFVGIDVSKKTFDAVVYDVKAAGVQDCRHCRFDNNGDGLASFRAWAVSSQGVRRGSVVVGMEDTGIYSTDLRVFLEGAGIDYCCFNALKLGMDMGRRRGKDDRTDAYRIGRYLYQNRDTLRPSRLEGGTVLKLRELASERARLVKQAAMSKALVTDRKGRRPTAQVERAKKLITYIEGLVKEVEQEMRATMEQDYEVRSNYDLLTSIKGVGPVNAMAVITSTDNFRAFSNARQYACYVGVAPFPYTSGTSVRGKTRTSKFANAGIKAVLSQAAKSAVVHNPELRAYFMRKTEEGKHYACVLNAVKFKLVCRMFAVIKRRLPYVADTDEYRSRIAMDDYTPARHINVS

SEQ ID NO: 135649 - protein, 388 aa, unidentified
MTQAPGALPTPGVLDYERTLILAIELSNTSWVLATQIPGLPGVKAKRSIEPTPEALMAAIGSYRVRAEKAGRNVDRVIAVYEAGWSGFWLVRWLAKYGIETHVIQPSSVPVDRRARRAKSDGIDAELLLRTLLAWLRGEPRVCSMVPMPTEADEDARRRVRERAELIAERVGLVNRISAILATLGAGEYNPLRRDRRQRLDELRTALGDSLPTHARAKIARMLDRLELLLIQITELEQSRDAVLEDKNPDRAASMIQQLAKLRGVGVQTATVLVHEGFVREFTNGKALGSYAGLTATPYSSGGIEREQGIGKAGNARLRTVMVELAWLWQRYQSDSAQVSWFRERISGTGRRIRKVMVVALARKLLIALWRFATQGVVPKGAVMKPAS

SEQ ID NO: 135650 - protein, 481 aa, unidentified
MTAGTGRQKDGAGRGAAAAAGEAGGDGAEVAEERVEVVTYAAAIDVAKGSGMVCTRVPGSRPDRKRQKVWQVDATYGSVVALMDHLRCEGIQRLVLESTSDYWRIWYYLAEAAGLEVWLVNAKDVKHLPGRGKSDREDSVWLCKLNERGMLRRSFVPPEGIRDLRSLTRTRSRLAQDQVRHQNRIEKILEDALLKISVVISGLFGASGRRFLDALVAGERSPRALAALGDTRLKATRQQLADALTGQFREVHAFEIATHLRLIDAINDEITRLDARIEQQLTSIPGVAPACGSCGLIGGGHSPGCASDGTPVLGLVERLDEVTGAGVRNAQVTIAELGTGMSVFPTPGHAAAWARLTSRTLQSGNTARPGRTGKGNPYLRGALGQSVMAAARTDTRLGEQYRRIARRRGKQKAIVAVSRVICEISCILIAGPAARFTDPGADYYSRANPARQTRSRIREIERLNPGMKVTLTPVEPAATAA

SEQ ID NO: 135651 - protein, 361 aa, unidentified
MSESMALVGLDVHQAQTVAAVLDPVSGELRVQRLRGEPAVVVPGLLEALGRPVRAVYEAGPTGFGLARAATERGLDVRVIAPGSIPRAPGDRVKTDRRDAKRLVRLFAAGELSFAFVPSEPDERFRDLVRCIDDARKDLMRSRHRLSKFLLRRGLRFPGRAWTQPHGRWLGRLSFDDALSQAVLVDYVCAVDALVQRRRALIAVLEDAVPASSHAHTIARLRCFRGINTLTAAGLCAEVGRFERFAKPSLLSGFLGIVPCEYTSSEKRVQGAITKAGPTHARRLLVEAAHHYRRGPRVSYELAARHAGQDPRIVQIAWRAQRRLHSRWAHLGSERGKPTGTVAVACARELAAFCWEAATLN

SEQ ID NO: 135652 - protein, 358 aa, unidentified
MQIIGVDLHARQQTIAMLDTATGELLEKTLKHDGDEVRKFYSAIPGQVLVGIEATGSMHWFLELLEELGIDHQVGHPAKVRAAEPRKQKHDRRDAALLLKLQVENRFPSIWMPSTELRDLRALLLHRHQWVRMRTRVQNSLQAIALSRGLHRGKALWSQAGQHAIESLPLPPHAAHRRTELQSLYGKLQAQIDELDERVSDRAFRRPGAKLLLTHPGVGPVTALATDVFLGDPARFANGKALVSYVGMIPSEYSSAGRQRLGGLSKQGNPLLRFLWCEAAVHAVRRDPDLQRFYRRKLQQKGLGKARVAAARKLGIRLYIMLRDQIDYEEFCRRGQMRQKNGDACAGMPEVGHSPARQ

SEQ ID NO: 135653 - protein, 356 aa, unidentified
MQLHDALTIPKIFIGLGIHKKSWSVSIQTDLFFYRTFSMPSVAEDLYQYVERTFPNHEVALVYEAGCCGFSAARYFLNLGWHVLVVNPSDVKTGDKERYQKTDALDSKNLSNQLKSGVLRSVYIPTEAHEQFTTLARHRTQITKKLRQSKSHIKSMLLFHGIEIPPAYDNSNWNKDFIAWLENIKFSSSCGELALQGKLRMYKFIRSEYLEIANQMRSHCRKTCKNDYNLLRSIPGIGGYLASVILAECGDLRRFNNEGQFSSYIGLVPGIYNSGGSEKCLGITPRSRSQLRSYLVEAAWIAIRKDVEMQQYYRKHQGKNVKSVIVKVAHKLARRILSVIKTETPYQINRNLVLEK

SEQ ID NO: 135654 - protein, 355 aa, unidentified
MSQEKYIGMDVHQATISVAVMDAQGKLIMECLLETKAATIVAFIQGLQGTLALTFEEGTSAAWLHDLLKPHVSRLVVCDPRKAALLKEGNKSDWIDARKLAEMLRTNQLKSVYHGEHGIRTLKELGRSYLTITKDVTRSMNRIKALYRSWAIPCAGTSVYAPRHRAEWLAKIVEPGVRVRAQRLYQQLDLLQPVRLEARRELLLESHKHAAVKLLRQIPSIGPIRAALLVALLQTPHRFRTKRQLWAYSGFAVETHDSGEYRCVRGKLQRNRERITVRGLNDNHNNDVTSIFKSAAISASTRPGPLHEFYMARVEKGMRPTMARLTLARKVATIALTMWKKGVDFDPQNLPRQAA

SEQ ID NO: 135655 - protein, 391 aa, unidentified
MICVGIDIAKDKHDCCILDSDGTVRADCFTIPNNMDGFKQLLQTIRNCTKKSDKIKVGLEATGHYSYNILGFLLDNGLPTYVINPLHTNLYRKSLSLRKTKTDRVDARTIATMLLSDIDLKSYTDIAYHNEELKSLTRYRFEKVRERAKLKQSVSRLVTILFPELEKLVPSLHGASVYALLSEYPGAKQISEVHLTKLTNLLVTASKGHYGKEKATLIRETARASIGSVMPAKSLELKHTIKLIQELTSEINEIEDSIQKIIDELNPPILSIPGMGVNSAAVILAEIGDFSNFSSPDKILAYAGCSPSTYQSGKLTNCYAHMEKRGSRYLRYALYNATKYVCHWNPVFAEYLAKKRAEGKHYNVALSHSMKKLVRLIYALQKSGKTYLAAA

SEQ ID NO: 135656 - protein, 451 aa, unidentified
MRSYRSYQKKRGKAAEKTIIGIDPGKSRHQAVIIDADGIPEGKTFSFAVNYKGYYEKLWNEINKQITSYTSSDLLFAVEASCNLWQTISNYLRSAGYAVVLVSPMCTKQSRVMLNNDFSKTDPKDALLIALNAQRGYYIEMRNYSERSNDMHTLSIAYNKLRKDHSSYRGRLRAAIELIFPEFLEVITLGTKTSFYLLEKYLFREEYLNMNIEVESLQIGNISRRQYGIKHLHKLQELAKHTIGIPSNNELYDRTIVLTWLEGMKEIGSRMKVILDQLIKLASSMKEFSILTSLMGISAETASLFLAEIRDISAFDNYKEIEKYAGYNLRLTQSGKHIGSRRISHLGNTRLRWVLYRMTEETMKYIPEVRIKYLKRQLKKQIYRKNLVSCVPQLLKLIFSLVKENRYYEYYEDRVTEMEKLNIQYQVVKAERAAKHRKHRSTIKEELRKTA

SEQ ID NO: 135657 - protein, 341 aa, unidentified
MNIVTVGIDLAKNVFALHGVDQSGKAVFIKPKVVRGQLLEMVAHLPPCLIGMEACSGAHYWAREFSRFGHTVKLMAPKFVAPYRMSGKRGKNDAADAAAICEAVTRPNMRFVPVKDVDQQAILCLHRTRQGFIEERTALYNRLRGLISEFGIVLPQKVERLRREIGAHLEALPGWANRCVGDLLVHADRLNERIDEYDKAIAQAAKQDQRSRQLMQLPGIGPTTASALVASLGGGHDFKNGRQLAAWAGLVPGQYSSGGKARLGKITKAGDAYLRSLLVMGARSVLAGLGDKQDRFSRWARNLAERRGYWKAAVAIAAKNLRLAWAVLHYGDDFRLIDEIA

SEQ ID NO: 135658 - protein, 320 aa, unidentified
MSKNSKFVGIDVAKKDFYACFEENGESKNFNNSKSGINEFVRHLRKNKFEKSETMIGLESTGSYHLRLCLQCSKIGFRIKVINPLIVKKQNQTNLRRVKNDKKDASLIRYCVSTGAGYEFAENAETLMLKSLVRQRNSLANNILKNKRQLEDVAYKEDCLNIKINSIYEEMQVILREKVKELEKQLRVFKKDDQKLLQTIPGVGPITAVSFIAEIGEINRFNDAKKLVAFVGLDSRVHESGTSVRGKGYISKRGNKILRTRLYNAASVAVLRPNIFQRFFEKKRSEGKPYKVALVATMNKMTHVIYSVWTNRKPFEEKQN

SEQ ID NO: 135659 - protein, 367 aa, unidentified
MKKGSTAAKQRVRNISGQTLTIGLDLGDRNRWYCVLDEAGRIQLEQRVRTNAKALQEVFGAMPRNRIALEIGTHSPWVSRLLSELGHEVIVANARKVRLIGESRKKDDRLDAQTLARLARIDPELLYPVKHRSAQAQADLMMIRGRAGLVRARTGLVNTARGLAKSYGERLRGCNARHLNPEKAEGLSPELQAALEPLLNAIESLSERIVEYNERIEKLAQQDYPQVALLKQVKGVGTLIALTYLLTLEDPHRFQKSREVGCYLGLQPGRRNSGRSEPQLHISKEGDPYLRTLLVQGAQHILGPFGIDCDLRRWGLRLAERGGKSGKKRAIVATARKLAVLLHHLWVSGEAYEPLHNRNRGAVAAAA

SEQ ID NO: 135660 - protein, 370 aa, unidentified
MSIKRILVNTIDTDLEYEVIGIDLAKNCVSAILLTTDGEIFGIDRLDYQELEKSAQELSPTIFAMEPCTEMNYMVQKLEDWGHHCIVISGKNVKDYVESHFSNQKTDLNDAQALAFLTKDTQLRTVKAKDPEQLKYASLTTLREQYVKQYRQTMVSLKGICQVWGLSISKGISGKARLKDMVENHAAFPAELRTALVGMVAHAQAVQKDLKSVTKILEELAKKDKACQLIQTVPGLGTICSCRLRATVGDIQRFKHPKDFPAYYGLVPRSMATGHNEKKGKITHRGDKTMRSLMVQGAGIVINQATKGNLHSKQLTKWILKKQKEKMPWGKLVCAVAAKLLRIVRAILISGKPYNPKIAGVAKCSLPKAS

SEQ ID NO: 135661 - protein, 421 aa, unidentified
MTRERAKSMDQRAFGRSCTAEAAGEAALAAHGFHATRLNASVRTVPRAHLLVWTAPRRHQACQNEVVTDLRQRGPSVEHISRIGMDTSKHIFQLHGVNAAEEPVLRKKLRRKEMVTFFEKLAPTVIAIEACAASHHWARLLQSLGHSVKLIAPQLVKPYVKRGKNDAADAEALCEATSRPTMRFVPVKTAEQQAALMLVGVRDRLIRNRTQLVNAIRGHAAEFGVTAAKGKAHLDALLERIQADESLPALARELFVAQAKEYAQLRAQIAEVDARLMSWHRADECSRRLAKIPGVGPIGAVLLKMKTPEPELFRSGRQFAAWIGLTPKDHSTAGKVRLGVITRAGDEGLRSVLVVGATAVIQHVRRGGRSSPWLTELLKRKSPKLVAVAQANKMARIAWKLMVTGENYAAKSAPAALAGAA

SEQ ID NO: 135662 - protein, 426 aa, unidentified
MKVVYPVCCGIDVHKSFLIATVITTKAGELTPHYQKKRFSTFNNQILALKDWLLECKCYDVCMESTGKYWVPVSNLLEDVMNVTIANPKWVRAVKGNKDDKKDSKWIAELFRMGLVRGSFIPEKDVRVLREFTRYRTRLVSHRSSEKNRLQNAFTVGNVAMDSVVSDMFGVSSKRVRDYLISSKAFDPNHVLDLLHGSMKPKGQELIQSIEGYSFTNEQIIRIQLIEEHKTYLDHSISFLDYLLDQMVEPYEPAIQLLETIPGIRRQSAIQIISEIGIDMSQFSQSKRLCCWAGLSPSSNESAGKKKSVRISRAGVYLKPTLVQCAHAAVKAKEKHPYYRLKYERIYKRRGKKRAIIAIARMMLTAIYHMLSTGEVWNPTDLYKIDMPDNLIQKQKDKALKQATKLLISEGLLPDDFVRKDLAPLI

SEQ ID NO: 135663 - protein, 312 aa, unidentified
MEKQDIFVGIDISKEYLDIGIRPTGQKWRMDNNDTDIPVLAEKLKNLAPKLIILEATGGLEIPLANTLSAEALPVVVVNPRQVRDFAKATGRLAKTDSIDADVLAHFGEAVKPTPKQLPDEESQKLKAQIKRRKQIVDMITEETNRLKSAPSYMHKDIKKHIDWLKKERKHIDNLLSKNIKLNHLWKKRDELFQSVPGIGSVVSTTLIACLPELGTLTNKQISALVGVVPFNCDSGKMKGKRRIWGGRADVRSVLYMAVISAIRWNPIIKAFYNRLIKAGKPVKVALTACMHKLIIILNAMAKSGIFWQPVS

SEQ ID NO: 135664 - protein, 360 aa, unidentified
MPQTKTWAAFDVHASGVVAATLDRDSGELVVRQLSGRSDDVVAFVRELAGPVRATYEAGPTGFGLARKLNAIGVDCLVCAPGLIPRAATDRVKTDRRDAQRLVRLFAAGELHRVAVPSPAEEALRDLVRAREDLRGDLMRARHRLSKLLLRHEVRFAGPQSNWTQVHLDWLAGVTMPEPASQRALEDYRGAVDALVIRRGQLEAEITRALPESSWSQTARRLMCLRGIDTLTAAGLCAEVGHFDRFHHPAQVMSYLGVVPSENSSGSRQRRGPITKSGSQHARRLLIEAAWHYRRPPRVAGSLARRQAHGEPEVIAIAWQAQRRLHHVWTRMEQRHKRRTVIAVAAARELAGFCWAAATA

SEQ ID NO: 135665 - protein, 350 aa, unidentified
MIIIGCDYHPSFEQIAFVDTETGELQERRLQHREEAEKFYHDLAAQGMKVRVGMEASGHARWFERLLAELQFELWIGDAAAISAKRVRKQKTDRQDAQLILRLMLKDDFPQIWVPSWENRDLRQLLWHRHRMVQARTRIMNQLQAVALNEGLRCKKKLWRDAGRGQLEAFKLAPWASQRRGDLLELLDRLNPTIGKLTQAIDLEVEKCPAARRLKTHPGVGPLTALAFVLIIGKADRFQCGKQIASYLGLVPLEKSSGNQRRLGHITKQGNSLLRFLLVEAAQVTVRSLPEWRTKYCHMALRRGRKIAKVAMARKLAVRLYWMMRKEWDYAQLNKFGSYAGKPGHRDGVK

SEQ ID NO: 135666 - protein, 411 aa, unidentified
MTKEDFIYVGIDLHKEIHTAVMIDCYNNKLGEITFPNRPADFPKLVTKVKKCNTDAKEVVYGLENAYGYGRALAVWLIDKGYFVKDVNTAISHRQAKHRGAMYRKSDSDDAEAIALATLNMLDKLPDACPNDAYWSLGQLVHRRDNIMKQRTRLVNQLHEQLCIAYPSYKSFFNDISRPTALYFWEHYPSRKYLRGKSVEDLRKELVPVSHNRCSTKNCEKILDAVASDKVKNNAYQDARDMVTLSIVSDLQHYDSQLAEVDKMLEQMYKMLGCTLTTIPGVNVITAVKILAEIGDIKRFSNANKLAQFAGIAPLHLSSSGKGKDVATKQGNRRLQATIYFLAIQMVQVSSKGTPRNSVVRAYYEKRKAEGKTSQQALICISRRLISIIYGMLKNGTEYRMPVVENAGETV

SEQ ID NO: 135667 - protein, 304 aa, unidentified
MENFYFIGVDVLKKKLNFCVMFEGKVVHEEETSNHQGAIMSLLHHLEEDYGIASGQMLVCAEHTGQYTFPLACACKAVECRLWLENAAEIKYSSGVQRGKSDKVDAKRIAIYASRFQDKVRYYERPTEDIERLKQLESERTLYVTDFAKYKGQMKDQKEYMPKSLYERKMKRLQALMDDLEEAIQSITDEMDEVIASCPVLFRQRELLMSIDGVGRVVATNMIIATEAFTRFDDPRKFNCYAGVAPFSYSSGSSQHSKARVSHRADKVMKRLLHLAAVAVTHRIGGELKKYYERKVAEAKTRCP

SEQ ID NO: 135668 - protein, 343 aa, unidentified
MKYYAGLDVSMEATSVCVVDGSGSVVSEAKVLTEAAAIAAYLSAWSGSLLKVGHEAGGLSPWLHAGLVELGVPAVCIETRRMKAYAKASPVKTDRRDARLIARAMRAGLYRMVHVKSAASHKLRLALTCRQAMLRQARQLQGKVRGDLKVFGIRLGRVSSGGFAGRVKTLLADRPDLLVLVTPLLEIRGRLLAQVRGYDRALRRLARADAVCRRLMTVPGVGVLTALAFRAGIDTPARFTRSRAVAAALGLTPRIDNSGEVARNGPITKCGDKLLRSLLFEAANALLTRTRRWCALKRWGVDLAKRRGINRARVAVARRLAVILLAMWRDGSEFRWGGEAKTA

SEQ ID NO: 135669 - protein, 348 aa, unidentified
MDYYAGLDVSLEETAICVVDGTGRIVKEARAASEPVALAVALNQFDLPLERIGLEACSLTAWLHEGLRAAGLPAICIETRQANAAMKTMPNKTDRNDARALAQIMRTGWFRQVHVKSRQCRLWRSLLVARRTVLNEMRSIENVVRAILREAGLKLGTPGRPAFAGHVRELAGDDPVVMQLVEPLLAVLASMLGALAMLTKQVMDLVKMEAVCRRLMSVPGVGPITALAFRATIDQPDRFKRSRDVGAHLGLTPARYQSGETDIQGKISRCGDELARTTLYEAAHTLLVRSKKWSSLRAWGMKIARHRGMARARVAVARKLAVILHRMWSDGAEFRWGKDPADGATAAA

SEQ ID NO: 135670 - protein, 320 aa, unidentified
MTEQRISYTGARVYVGIDVHKETYTVTCVCHKQIVKTATVPAEPARLVASLLRWFPGATLTSAYEAGFSAFVLHRALTQGRITNIVVNPASIAVAANDKVKTDRRDSKRLAIDLADGRLRGIYVPTEAEELARLLPRTRAQIVQHRATIARQIKAKLHQFGLIAPSSRRSISSRYLREIATWPLPPELGVSLMLLAEQWRFATRQLIEMRRLLRDQAKAQAEIEKVYRSVPGIGAVVARTLATELGDMTRFANERALFSYTGLTPSEYSSGTSVRRAQGEKGLWKRSARLEAFSLRHEQRDNYDFVALLVPALGPARSKV

SEQ ID NO: 135671 - protein, 389 aa, unidentified
MKIFVGIDIAKLNHFAAAISSDGEILIEPFKFTNDADGFQLLVSKLESFDKNSIIIGLESTAHYGDNLVRYLVAEFYQVCVLNPIKTCQMRKNNVRKTKTDKVDTFVIAKTLMMQDDLRFITFFDLDMMDLKALGRFRQKTIKQRTRLKIQLTTYVDQVFPEIQYFFKSGLHQHAVYALLKEAPSPKEIASMHMTHLANLLKVNSHGHFTKEQAKELRVLAQKSVGANDSAISIQITQTIQQIELLDSQLEKIEAEMTDIMKFNDSVIMTIPGIGYINGGMILGEIGDIHRFSNPNKLLAFAGLDPSVYQSGNFQAKTTRMSKRGSRVLRYALVNAAWKVVKNNATFKAYYDAKRAEGRSHYNALGHCAGKLVRVIWKMLTDEVDFNLE

SEQ ID NO: 135672 - protein, 342 aa, unidentified
MDHYAGIDVSLECSSVCVVDANGKIVREGKVASEPDALISWLRSLGYELSRIGLEAGPLSQWLFAAMREAGLAVELLETRHVRKAFEAMPVKSDRNDARGIAQLMRLGWFRPVHCKSIGAQETRAVLTARKLVQSKLRDVENHLRGILRGFGLKVGKTTNPSFGIRIRELVANHANLEMIAEGLLSVHAVLLREFKVFEKQVRSMARSDAKARLLMSTPAVGPIVALTYASAIDDPARFKSSKRVGAHFGLTPKRHQSGETDYTGRISKIGDGSVRTVLYEAAHIMLTKPVKGCSALKSWAMRIARRAGMSKAKVALARKLAVILHRMLVSRTPFNAAAAAA

SEQ ID NO: 135673 - protein, 464 aa, unidentified
MQEATQHDAVDVFVGVGVGVGVDVDVDVDVGKGRHHAVALRRNGKRLYNKALPNDEVKLRALIAELKTHRRLLFVVDQPSTIGALPVAVARAEGVLVAYLPGLAMRRIADLHAGEAKTDARDAAIIAEAARSMPHTLRSLRLADEQLAELTMLRGFDDDLAAQLTQTSNRIRGLLTQIHPALERVLGPRLDHPAVLDLLERYPSPSALAAANEKTLANRLTKLAPRLGKNLAAEIVQVLNEQAVIVPGTQAAAIVMPRLAQQLAALRKQRDEIAAEVERLVLAHPFWPVLTSMPGVGVRTAARLLTEAAQKAFATATHLAAYVGLAPVTRRSGSSIRGEHPSRRGNKVLNAPCSSPPSLPYETQSHGPIPRARSSRASATTKHSSRSHGDAATSCLPCCATAPFTHPSQPLTLDERHRAPARAVPQHRRAAPRPCAGAIPPRCSARPPTPLHAVNLSPGRRRPL

SEQ ID NO: 135674 - protein, 394 aa, unidentified
MILVGIDIGKLSHMFCVMDSSTGEFLVNPISFKNNKQGFDSFMDSINSFSKKDVLIGMEDTGHYHFTLLKFLLDSGFSVALINPITTDMTRKMQLGATKDDDLDARLICDVLASNQRRKGYRISKIDSFDLYEQKRLTREHHDLKEQLNVYTNKLQKCIDIVFPEFNSLFRSKYGSVYMNVLKTFGSADSIAHADIRNIRKCFEANRKGRRISLTPEELKEAARNSIGFPSKAEVIELRHLIDIIELINVQISEVDKKIEEFSVQNNSPILTIPGISHFSGTSILAELGDLRNYSKASQVIKFAGVSPSKYKSSQYEAQHTAITKKGSRYLRKTLYQVILPVIRYNPVFNAFYRHKLSQGKGHRCAQGHCVRKLLRIIYHLVTTDQSFDPKLLR

SEQ ID NO: 135675 - protein, 352 aa, unidentified
MIVLGADMHKQTHTVAVIAAATGELRDEKTVQVGDDGFLALLDWARSLGAERVWALEDCRHVSGSLERFLITSGERVVRVATKLMNDARRAGRDRGKSDRIDALAIARAALREGIEALPSAQLAGVELDIRLLVDHRERLIRSRVALNNDLLWHLHDLWPELKLPGSALFSKKWSTRIARRLARAEQTARVRIARDELRRLRELTLAANELEAEIADLVDQAAPQLLAEPGFGPLTTGKLLGEIAGAGRFATEAKLARAAGVAPIPVSSGKTNRHRLDRGGNRQLNTAIHRIALTRARCHPETRDYLARKRAEGKTGLEAMRCLKRHLTRRIWHLLQAPHPLGGTPPSPSIS

SEQ ID NO: 135676 - protein, 339 aa, unidentified
MKLYTGLDLHSSNSYLGIIEETGKRVYKQKLPNDRERILAALNPYKNDIAGIVVESTYNWYWLVDLLMDEGYHVHLANPAAIKKYTGLKFADDQHDAFWLAEMLRLGILPEGYIYPKEKRPIRDLLRKRMHLVRLRTSLIVSLQNILSRNNGFKLKTADVKALSEDRVAPYLSGNEDLALSGTVSKESIDFLTRQIKKIEAVIEDKVELTHPYEKLQSVFGIGKILALTIMLETGPISRFAKVGNYVSYCRKVSSKWLSNDKVKGKGNKKSGNKYLAWAYSEAAEHARRHYTQARTYYNRKMQKTNFMAAHNALAHKLARASYYVMRDEVNFMPEKIFV

SEQ ID NO: 135677 - protein, 359 aa, unidentified
MSNVPVFVGLDYHQDSVQVCVVDREGQQLCNRSVENNAGVIERIAVRYGRPRRMAIEACCGAADLAEELTTQRNLPVQLAHPGYVNRIKRSPDKTDFGDARLLADLTRVNYLPSVWLAPRSIRELRRLVRHRVQLVRRRKDVKLRVRALLRENRLSCGHARAWTKAWFAWLTERAEWSESDRWILEDHLQELVSLAGRIAGVEAKIRLRIQDDPVVARLLKLPGVGLVTAVTLRAEVGRFDRFDKGKQLARFCGVTPRNVSSGARQADAGLIKAGNPELRTVLIELAHRLIRSNGTRWTKLANHMLRSGKPKNVVVAAIANRWVRWLHHELRRPAADPPTSVPARRKGPVPSAPTIASP

SEQ ID NO: 135678 - protein, 463 aa, unidentified
MSMKERGKTPAKGAKPRIDWKALEIVHPDAAGIDIGGSEHWVAISPERDEQPVRCFDCFTADLEQMADWLIERGVRSVAMQSTGVYWIPVLEILQERGLEVYLVNARHTKNLPGRKSDIAECQWLLKLHTFGLLNNSFQPSDQIRVTRTLWRHRGGLVAQASSTIQRMQKALTEMNIQLCNVLSDLSGASGMAIVQAILNGERDPQALAAWADPQVKASRRVIAKSLKGNWREELLFVLKQEVEMYRMYQERIAACDQKLQGHLRVLAPKVDLQAQPLGPRPKGKRARGNAPKFDLRTELYRITGVDWTQVDGIDVQVAQSVIAEVGVDLHAFPSEKHFSNWLGLCPTNETSGGKVLKRQTPKVVNRAKVAFRQAASTLLRSQSYLGAQYRRLRTRLGAPKAITAMARKLACLFYRLLKHGQQYVDKGAEFYESRYREQQIRSVIKRAHQLGLQLLQSGDKSA

SEQ ID NO: 135679 - protein, 372 aa, unidentified
MSESNKILYVGLDVHKESIAVAYAPEDRGAEVVSLGAIGTRQSDIDKLIRKLQSKGAVTLVFVYEAGPSGYGLYRYLTGKGFACHVVAPSLIPRKPGDRVKTDRRDAMTLARLMRSGDLSAIYVPGVEDEALRDLSRGRDDAMQNLKRSKRRLKSFLLRQDIRYEGRASWNAAHLRWLAEVVCPTPPQQIVFQEYLRAVTEQQERRERLEGELHEAVKGWRLYPVVEAIQALRGVELTGAVILMTELGDITRFDNPRQLMSYLGLTPSEYSSGERRRQGGITKAGNSHARRALVEGAWAYRYPAKVSRHLQLRLEKLPAEIQTISWKAQVRLCKRYRQLTARGKHVNQVVVAIAREMAAFAWAIARLVPQAS

SEQ ID NO: 135680 - protein, 342 aa, unidentified
MQQSIFVGLDLGSSHCHQTVINADGTIIRSRSVPTSEQHLRNSFADLQGDIHVHAEASELSDWVRSIINPLVTRFVISHPRSLAWIAKDSVKDDAVDARKLAELLRFNLVHEVYYEDRADRRSFKQLVVHHEQLSREQARLKSKIKARLRTLGIIRKDARLFSEAGQIELFASITDLLIEQMFHQSFAVLNQMLISLMDAKTAMIEFSRRLPEVRLLQTAPGVGVITACRFVAYIQTPQRFSNKQKLWRYARLGITRRESNGKRLSHPHLDPAGVGSLKDCSRKIFEAARRTKTDNSFKNFYEQSLANTKNAVHARLSTQRKILATLRAMWQANQPYRDDGG

SEQ ID NO: 135681 - protein, 409 aa, unidentified
MLYVGDDWAEDHHDVELQDEDGRRLAKARLPEGIDGIGRLHALIGEHVGCDGRGEDALVGIETDRGPWVTALVSAGYRVYAINPKQVARFRERHANSGAKSDAGDAHALADMVRTDAHQLRPIAGDSVLVEGIKVLARAHQGLIWDRTRHVLRLRAALLEYFPAALEAFDDLSRTDTLELLAKAPEPALAAKLTQTQIGAALARARRRAPQEKAGLIQTALRTKHLMQPPMLTAAYAETARSLIVVISVLNAEITRLQEKMAAQFTSHPAAAIYTSQPGLAEVLGARVLAEFGDDRARYATAKARKNYAGTSPITKASGKKITVQARYVHNDRLINALHIQAMAALHASPGARAYYDRKRAAGLSHHAALRQLANRLVGILHGCLRHGSFYDETTAWPPAVKGVNPAAA

SEQ ID NO: 135682 - protein, 350 aa, unidentified
MRSIGIDLHKRSMTACVIDKRTGETFTRSFRCQDENRILEFFSRLAPFEAVIEASATYEWLWLLLEPVAERLVLAHPKKLRIIAESKKKTDRSDAFILAQLLARDEIPEAYRPTPQEREYQHLMKHRHCLVRDRSSVRTRIRSILAARNVDVPGLFSRPGDDWIPALSLPPAESFRLRELWGQLGEIDKRIVTAEEELERFREAAPESQKRKHEIVRSVPGVGNVVADVVVSTLGDVNRFPSIKKVTSYAGVVPGFRESDRKRKELPITKEGPRILRWALIQAAWRAVRHSPYWRDTFELLAARRGRKKAIVAIARRLLGVIYTLLKKGEKYVTKQEGGGRKLEPAASRT

SEQ ID NO: 135683 - protein, 343 aa, unidentified
MQMITTIGLDIAKSVFQVHGVDAAGEVVIRRQLKRRYVLAFFQKLPSCLVGIEACASSHHWSRELQALGHTVRLMPPAYVKPYVKRQKNDIADAEAICEAVTRANMRFVPTKTPEQQSCLMLHRTRHLFIRQQTAVINSIRAHLAEFGIIAPVGRKGVTELLHVVADPSDKRVPEVARACLAALGTQLLRLKQQILEFDRMIMAWHRSNQTSKRLHYIPGVGPILATALVASVADPRTFRSGRNFSAWIGLVPKQHSSGGKDRLGSISKQGDRYLRSLFVAGALAVIRYAKVHGTKHRPWLTALLGRRPTKVAAIALANKIARMAWAMMAKGERYKQPVALAA

SEQ ID NO: 135684 - protein, 406 aa, unidentified
MGKQPQEEEETSCDFTPRHTNVTVASIGTPAPWSLCLVNQLGEILVHRNMPAAPEPFLKTISPYREDVVVCVECMFTWYWLADLCAQEGIPFVLGHALYMKAIHGGKAKHDTIDSQKIAALLRGGMLPQAYVYPAAMRATRDLLRRRMHLARKRAELLAHVQHTNSQYNLPAIGKKIAYKANRDGGAERFADPAVHKRIEVDLALISSYDELLRDVELTILNTGKHHDANTLYLRQTVPGIGKILSLVWRYEIHDIHRFPTVQDFVSYGRLVKCAKESAGKRLGTSGTKIGNAHLKWAFSEAAVLFLRDHPAAQKYLARLEKKHDTGKALTVLAHQLARAVYDRLKRHVAFDKDQFFQRSWRGADEPGASLDTQGRNLPDALDTAASMASLNAQARIGRDTLSPAR

SEQ ID NO: 135685 - protein, 344 aa, unidentified
MQPMYYIGLDVHKRKISYCVKDSSGQIHAEGSISATRLDLDHWMRSLPQPWSAAMEATMFTGWIYDHLQPHAAVLKVAHPLMLRAIAAAKKKNDRIDASKICDCLRCDFLPECYMASTAIRERRRTLRYRNLLVRQMVQMKIKISSLLMEAGVSYNKQRLHKAGYFRELLASNPDIDEGLSSLLRLCRETVVRLGKSESALVRCLERDSLLVERVERLMSIPAVGPITALTWALEIGDVQRFPSIKKAVSYCGLCGAERSSGNTVQRTPLSKQRNKHLQITLIEAAKMAPRNSAELAMLYDKEKQKGNANRATLAVARKLVAYLMAVDRSHRNFQVVETSHIAA

SEQ ID NO: 135686 - protein, 326 aa, unidentified
MQVFKVTSDGVVTNTSVSRKDFLEHFRNIPPALIGMEACATSQHWGRELQGLGHTVKLLSPKAVKPYVKGLKNDRNDAEGIYRALIMGVREVSIKSTAVRDLSLLQTMRAKRQRDKVATINHIRGILAEYGLVMGKSVRAFLSNAGTLIARLKESETTSQLVISELEKLLKEVKEIVSRIEELESSIKKIASENKNYDLFRSAPGVGPITAAMMVVLLCNPTVFKNGRDFAAYLGLAPMSFGSGGRNQVTGIPSKYRCHNEARSLLVQCAHSITRLKYKSDWVASILSRKPKKVAIIAIANKLARQLWVMAKKGDKFEKRLVLAAV

SEQ ID NO: 135687 - protein, 401 aa, unidentified
MQDTQQRDAVDVFVGVDVGKGHHHAVALDRTGKRLYNKALPNDEAKLRALIAELKTHGRLLFVVDQPSTIGALPVAVARAEGVLVAYLPGLAMRRIADLHAGEAKTDARDAAIIAEAARSMPHTLRSLRLADEQLAELTMLCGFDDDLAAQVTQTSNRIRGLLTQIHPALERVLGPRLDHPAVLDLLERYPSPAALAGSSEKTLANRLTKLAPRMGKGLAAEIVQALSEQAVTVPGTQAATIVMPRLAQQLAALRQQRDEVAAEVERLVLAHPLWPVLTSMPGVGVRTAARLLTEVAHKAFASAAHLAAYAGLAPVTRRSGSSIRGEHPSRRGNKVLKRALFLSAFAALRDPVSRAYYSRKIQQGKRHNQALIALARRRCDVLFAMLRDGTIYQPKSASNA

SEQ ID NO: 135688 - protein, 426 aa, unidentified
MNCNTQNAKIAAITEKTLVVGIDIGSETHYARAFDWRGYEYSKKPFMFNNADEGFEAFQIWIEELKEKYGKDKVIPGMEPTGHYWFNLGSFLQKKGMRPVHVNPHHVKKSKELDDNNPSKNDRKDPKVIAGLVNEGRYSYPYIPEGVYADVRNLSNLRLQAQGELTRIKNRIARWFSIYFPNYKDVYGKPDALSGLMILKKAPLPEDIIKLGVDGVNKIWRDAKLRGAGMKRARTLVAAAECSVGCKEAQESARYEIQILLSDFDLYAEREAELVKMIDNKLKEIPYVDRLLEIKGVGIKTVVGFVAEVGDIGRFDDPKQIQKLAGLAIVENESGKHKGEHHISYRGRKRLRYVLYEAAVSVVAHNADFKEIYQQYIAREKNPLKKMQSMIAVACKLLRVFYMLATTENHFDGRKMLTDIRRPEVA

SEQ ID NO: 135689 - protein, 422 aa, unidentified
MKPQQEKRYCGMDIHKDTIVVCVLPAGRGEGSALRKTYRSFRNDLIRMRTWLKQLKVTDIAMESTGVYWRPVWNVLEDQGFRLLLVNPAQVKALAGRKSDGRDCKRIAQYLEDGRLDGSFVPPKEIRELRQLVRHRISLLEERNEVHNQIRDLFETASLKLSSVATNLMGVSGRRIIEAMIAGEDSAELLSWKVKGRLRAKEQEVREALKGFFNHFHRDMLASFYEHYKFLTSQIEQFEARIAERMKPYQERIELLSGIPGVDKVVAWHLIAELGTDMSVFPSAGHCASWAGVVPGENESAGKKKSTRCRKGNKVLRRILSQAAWGASRKKRSYLRTFFYRIRARQGASKAVMALAHKILVIAYQMLKTNTPYQELGGDYFDRLNAEKVARQCIRKLESLGLKVQVIPQGGVESVNPAISTH

SEQ ID NO: 135690 - protein, 412 aa, unidentified
MRVVHPVCCGIDVHAKMLVACLILTNGEKKTRTFSTMTADLLQLRDWLMATPCTHVAIESTGVYWKPVFNILEDALTVILINPEHAHALRGRKTDVKDAEWLADLLRHGLLKPSFIPPPLIRELRELTRYRESVVREQASVANRIQKLLESGNIKLGQVASDALGASGRAIVKALANGETDARKLSALARGKLKEKSLSLEQALQGRLTVNQRFVLGELLDRWEQLEAAEARVSREIDKYVQANPKLARARELLDSIPGIGPRVAEVISAEIGIEMALVFADAAHLASWAGICPGNKATGGKRLSGRTRKGNTYLRAALVQAAWGASLKRDCYLSSQFQRLVKRLGRKKALVAVAHSLLVISFHVLQNDQTYTELGGDYFDRHHVEQQREYYLRRLQMLGLKVTVEELRPAA

SEQ ID NO: 135691 - protein, 347 aa, unidentified
MRFYNQQHRHYCGIDLHVKTMYVCILDAAGQVLVHRNVVSTPAAFLEIVAPYRDDLVVSAECMFTWYWLADVCAAEGIRFVLGHALAMKAIHGSKSKNDKIDSHKIAHLLRGGLLPQSYVYPAAMRSTRDLLRRRLHLVRKRGQLLAHIQHTRAQYQVSEFARRLAYPANRDGVAERFLDASVRKSVEVDLALLERYDSLITDLEYTLVRTAKQHDADAFHRLRSVPGIGKILALTILYELHDVHRFDRVQEFASYARLVKGRKQSGGKTLGTSGAKMGNVHLKWAFSEAAVLFLRHATGGKRFLARIEKKHGKGKALSILAHKLGRAVYYVLARDTVFSLEKFMAA

SEQ ID NO: 135692 - protein, 351 aa, unidentified
MKEYIAFDSHKHYTLMEREDRQTARTVQLRVAHQPGAIRACLRNCESGTDVAVEATGNWYWIVSEIEQAGLKPQLVHPRKAKLMMGLINKTDKLDVHGLNRLQRNGTLPTVWIPPAELRDQRELTRTRLVLVAQRTRLKNRLQSTLAKYGLAVRDCSDAFGTVARSQWPELLAQLPEQTQWVSQQLLKQLDVLEEQIGQCEKRLNPLLKITPQIERLKSLPGVGLILGASIALEIGEVSRFASAEHLASYAGTTPRVHSSGDKLRFGRLRPDINRYLRWAFVEAANVVALHHQQRPERHVSHLYWRLKQRKGHAKAIGAVARHLAEATFHILSRQEDYEDPALRKGRSKPV

SEQ ID NO: 135693 - protein, 408 aa, unidentified
MRIIGLDIHRAFAEAVAWKDGKLSRLGRVIMRRERLEEFAKQLSNSDIVVIEATGNAASVAAVIGPHVSRVVIANPKQVRLIAHAKIKTDKIDAGVLAQLYASGFLPEVWIADETTQALRRQVTRRNQIVRQRSRLKNIIQSILHAHLIPSCPHQDLCGPKGRAWLSEQILPGDERLAVERHLREFDRLTDDLKSIERDLAQSALSDERAKRLMTIPGIDMVVALALIAAIGDVERFARPEQLVGYLGLNPSVRQSGPGPAYHGRITKQGRGHARGMLVEAGWAAARSPGPLRSFFLRVQSRRGQHVAAVATARKLAILIWHLLTKNENYLWARPALHARKLRDLELKAGYKPARGQKGTAHAYNLQSQRDQERRWVEQAETAYTRFVAGWNARGPKARTGAAKEERR

SEQ ID NO: 135694 - protein, 388 aa, unidentified
MNTITSTASTNVILAIDLGKYKSVACVHDQATGEISFTTLETTRVELRRLIDQQQPAVVVIEACLLAGWVHDLCGELGVRCLVANTASEAWKFKHLKRKTDRDDALRLAQLYLLGQLPTVTLPPTAVRQWRSLIAVRQSLVGRQIAVQNRIRALFVAQGLPAPRGARAWSETGLAGIATWAKPLADCGPDELWRGLLDLALVEHRQTIALVALAEKRLNALGKENANVVLLQTTPGMGPRTAETVAAYLHDAGRFQTGKQVSAYSGMVPRQHQSGEVDRRGRITKRGPAILRKMLVECAWCMVRYNAWARGFYLRLTGGGQRRKKQAIVALARKVLVRSWAMLRDRKAWHDPQTAPKDPLPPSKRRRQAEAQRRRQAKLQTMLAPTAM

SEQ ID NO: 135695 - protein, 309 aa, unidentified
MEHFAGIDVAKDRLDVHLRPSQETFAVARDGEGLAQLVGRLQTLAPQLVVMEATGGYETIVASAVVAARLPLAVVNPRQIRDFARATGKLAKTDRIDAAAIAHFAEAARPPVRPIADAEAQALGELVARRRQVIEMMVAERNRRRRVTQSRVRRAIDRHLELLQTELSELEQDIDGAIRKSPAWQADADLLASVPGVGKATLRTLIAELPELGRLDRRKIAALVGVAPINRDSGTMRGRRSIAGGRPTVRTALFMAALVASRANPIIAPYYVKLRAAGKTGKQALTACMRKLIVILNAILRDRKPWQPA

SEQ ID NO: 135696 - protein, 368 aa, unidentified
MATMPQLERGVTVGVDSHKDVHVAAAIDQIGRILATTQVATTLRGYAQLERWACELGRVERFGIEGTGSYAAGLARWLTSRGRQVVEVNRPNRHKRRRRGKSDPVDAEAAARAALAGDDTATPKAATGAVEMLRALRVARRSAVKARSQAANQLDSLVVTAPDQLRAQLRQLPAARLVEVAAALRPGELNSPLAAVKLALRELARRHQALSAEIDRLDAHIGKLTSTTAPELLARRGVGAQVATALLVAAGDNPTRLASEAAFAALCGASPIEASSGKTVRHRLNRGGTGRPTTRYGPSSSPGWPMTSAPAAMSSGALPKANPRRKSSAASSATSLERSTATYEPQPSALDMTIGASAAPGGAGCDVL

SEQ ID NO: 135697 - protein, 405 aa, unidentified
MYDELAEVAVPEIWAGVDIGKEHHHCVVIDAQGKRLLSRRVLNDEAELLKLLADVLELSQDVLWAVDINHGGAALVLGLLVSHDQHITYITGLAVHRASAGYRSQAKTDAKDAFVIADQARMRTDLGVLRPGDEIAVDLRTLVNRRTDLVCDRTRQINRLRAQLLEIFPALERSLDLTKKGPVMLLTGYQTPAAIRRAGTSRVTTWLTNRKVYGSAALAKVVVEAAEAQFTALPGENLAATMVARLAKGVIALDEEIAELDAQIEVRFREHPHAEVIQSLPGMGTLLSAEFLAATGGDMNAFGTADRLAGYAGLAPVPRDSGRVNGNLHRPRRYHRGLLRVFYLSAFASLRGCPASKRFYERKRTEGKGHKQALLALARRRANVLWAMIRDGACYQATPPVTAAA

SEQ ID NO: 135698 - protein, 408 aa, unidentified
MKTLHRRCAGLDVHSDSVVACARVIVRTKVTHEVRRFSTATRDLLEMADWLAAQGITHVAMEATGVYWKPIWHILEGRFELILANAAHIRNVPGRKSDVNDAVWISDLLAHGLIRASFVPPAQIQDVRDLTRTRTQLAREIAQHIQRIQKTLEDANIKLTSVISDIVGMSGRRILKAMIAGETNAAKLAELGSTRLKCPRAELTAALDGRVTAQHRFLIAHHLSLIEDMERHIAAFDARIEELLVPLRDALAQLITIPGVSRVSAQVILAEIGADMTPFSTSGHLLSWAGLVPRLDESAGKRRSTRIRKGAPWLKPVLVQCAWGAARTKGTYYQAQFLRLKARRGPKKAAIAVAASLLTAVYHMLKNGTFHQDLGADFLVKRDKARIATKLANRIKDLGYDVSFTPAA

SEQ ID NO: 135699 - protein, 355 aa, unidentified
MAVHEIAVISGIDTHTDFHQAAVIDTVGRHLATEQFETTDDGYMQLLEWLASHGEILAVGMEGTGSYGAELARFLPGNGLTVIEADRPDRKARRANGKSDPVDAYAAATAVLSGRATGTPKTRDRIVEAIRALRVVRNSAVKARTQVINQIRTLMVSATSEVRDKLRGLPTKALIDTLARSRPTGSPDDPAYTVKVALHRLARRYQVLDDEIRDAEAETGPLVTQAAPRLVALPGVGPETAGQLLETAGDNPEHLRSEASFAHLCAASPISASSGRTHRHRLNRGGDRQANKALHTIVLVRMKYDPRTQQYVSRRTAEGMSKMEIIRCLKRFAAREIYRLLPHPQITSEQLCPTT

SEQ ID NO: 135700 - protein, 399 aa, unidentified
MKPVVGVDVAKGKSVVQAFTKRNTPYGRNQEILHTPKGFEKLKQLLEDVEQKTTLKPVVILEPTGHYHRVLVLYLQQAGYEVILVNPLQAQRARRIGLRKVKTDASDAWHLGDLYYQEENWPAHPGRKEALIDLQFLSREHEFITSLYVQAKLNMRTLVDQIFPSYEGVFKDLYSKTSLNLLEACLTSEGVKAQTPEAWADMVRLATRASRSEAWMSRKVEALQIAIANNPVQRVPYGLEMALRSLLTLVREFQEQLAALEKVIMDLSETLDEVQLLKSIPGVGTKLATAVVSEIGDASQFHHPKQLVAYAGIDPSVFSSGKFVATQNKITKRGSKRLRRAMYLAVTCGLRRELNPRLREYYDKKKSEGKPHKVAVIACANKLLHHVYAMLKKRQPYTL

SEQ ID NO: 135701 - protein, 418 aa, unidentified
MWGHFILSNGSFIGKPFKIVHSDPGARDLAVAKIKEAQETYSLKSRCFLESTGIYHIPLLCFLRDKGFDCSVINPIITKNSTNINIRKLHNDKFDSKKAALVGLNVSLKTSIIPDDSVVDLRNLVRDYYYFKDLQSAVALKLTAELKVSFPAYAKVFSKVTTQSSLKLLSSYPLAEDMLAASKDDIVKIIRSTARFGEAYALRKYDTIIAAAQDAAVFGRALPSNAVRIRLYIDTYQEYQKHLDALLKALHETVDRLQDTLIYDQICLLQSLRGIGFLSAIVLIAEMGDFKLFSSPKKLYAYFGLDPAVKQSGKLNGDKVHMSKRGSSLARRVLHMVALNNVKVDKGSGTPVNPVVYDYYTRKCSGKKKTVAMGAVMHKICNIIFALLRDNKPFEVITPEEHCRRFAAEHPDKIRKAA

SEQ ID NO: 135702 - protein, 426 aa, unidentified
MAYRIAGIDVHKKMVAVVVADVDVAGTWQFDRRQLGTSPAQLRGLADWLVEREVVEVVMESTAQYWRPVWEALERSWQPRMQQTDTAPRAGTLHLAQAQSNEGPRGRKRDVPDAERLVKRLVAHELTLSFVPDVTQRLWRTVARRKYQSTCNRVQLQNRLECLLEEMHIKLSSLVADLIGPSARRMLRAIANGDTDPGAVVALGSRRLHATPDQLRDALGACTDLHPVYRRLLALTLDELEVIERHIHQLDEELAQLLRGHQDAVERLAAVPGLGVDSAQQIITEVGPTAATFPAAKRLASWVGACPGHDESAGINHSHRAPKGNRQMRRLLNQAANAAVKAKGSIFQLVYRRLVVRLGHAQAIGAIAHRLCRLIWKILHDGVTYEERGPAVTKHRAQRRAAKMIRELRSLGYRVERDLPPASALA

SEQ ID NO: 135703 - protein, 320 aa, unidentified
MSQNTTAIMNQNITSVYAGLDIAKASLQLHLQNRSYDLSNTSAGHAQLIKRLAAIPGAHVICEATGGYERAVVAALQAANLPVSIINPARVRQFARASGELAKTDPIDASMLTAFGFAFAPDPTPPRTAAEIKMAALVTRRAQLLELRVAETQRADTCAEPSLSKLFRSWLPQIEKQITKVEALIEELLAEQTTLAHHVERLDEITGVGRITAVTVLANMPELGQLNRRQAAALAGLSPYNRDSGQWAGKRCITGGRNEVRRALYMAALSASRRNHHLKPFYDRLIAAGKPAKVALTAVMRKLIILMNHLLKNPSFSLAH

SEQ ID NO: 135704 - protein, 343 aa, unidentified
MDHFAGLDVSVKDTSVCIVDDTGKITREVKVASEPDALLTVLRNPAYRFKRIGLEAGPLSQWLFSALAEADLPVICVETRHMRAVLKAQINKTDRNDARGIAQMMRAGLYRPVHVKTLRSQKLRMLLTHRKLLQAKAIAVENDLRATLRNFGLKVGVVGAVKFEARVKELIENFPDLVALVEPLLVVRRVLREQISILHRRVVAAVRNDEVCRRLMTVPGVGPVVALTYRATVDIPARFRKSKSVGAVFGLTPARDQSGERDRPGAISRCGDEMMRTTLYEAAQVMLLRSAKWSWLKAWAMKIARHRGMKKAIVALARRLAVIMHRIWIDGTEFRWTREGAAA

SEQ ID NO: 135705 - protein, 328 aa, unidentified
MNPMVGFDVAKNTVVGTVLDTGCQLLVPPATIRNTDESLQAWLAGLKAQYGELTVCCESTGYYHYPVVRASVALGLSCRVLNPIVTKQATKATIRGKKTDASDAVLIARLGLRGEGVITTDVDNQAKVLLRVSDKLQVMSQSLVLLERSMAERRIVPPAGSEIHYQACLEALKVVIVRYRTAVIAKVPRDTLDLLTSIPGVGDKTAAVLVAEVGDIARFASAEKLVAYAGLDPRVRQSGISLHRNTRLTKRGSPSLRRAIYTAANVTRQHDAGVKAYYQRKRKEGRTHTEAMIPTCRRLLNRIYAVWTERRLYEKRTERTGSHPEERG

SEQ ID NO: 135706 - protein, 350 aa, unidentified
MQIKRVGLDLAKQSIQVHAVDRHDTVVMKRSIKRAELLKLFADRPACLIGMEACAGAHYWARELSRLGHTVRLMAPKHVKPYLQGQKNDANDAAAICEAVSRPKMRFVAVKSVAQQDVQALHRIRSHCVEQRTAKVNLMRGLLAEYGIVIAQQVRNLRRALIELLEDAENSLTADFRVLLSGLREDLAYLDLRIAELTKRIEHHVAAHEPAQRLLAMPGVGPMTASALCATVGDASAFTNGRKLAAFLGLTPRQHSTGGKAKLLGIHKQGDSYLRGLLVHGARAVQRMAVKKTDARSTWLNDLGKRRHKNIATVAQANKTARIAWVILAKGETYRADLVRRLTPDAAVLA

SEQ ID NO: 135707 - protein, 353 aa, unidentified
MHTHQKSSDPVATIGLDIGKNTFHFVGLDKRGAIAMRIKVSRNQLIRRLVNLPPCLIGLEAGSGSHHIARQIKQLGHNVRLIPAQYVKPFLKGHKNDYRDAEAIAEAVQRPTMSFVAIKTPEQSDLLSLHRVRSRLVRQRTAIINQIRGFLIERGITVRQGPAPLRKVLPELLSSPPEELSPRLLRLISELDEDWRRLDARLEALSAEIESLSKNDPACQRLMTVPGIGPIISSAVVAAIATGSGFKQGRDFAAWLGLVPKQESTGDRTKLGRISKRGNKYLRTLFVQAAHVVLERRPAAAMRALWPWIERASKRLAHRNLLAIALANKLARIAWAVLARGRDYQPRFTPNAP

SEQ ID NO: 135708 - protein, 403 aa, unidentified
MIFVGDDWAEQHHDVYLMDGAGKRLASRRLPEGLAGIRQLHELMATHAEEPDQVVIGIETDRGLWVGALTGAGYRVFAGNPLAVARYRDRHHVSGAKSDASDAKLLADLVRTDRHNQRLIAGDSPEAEAIKVLARAHQSLIWTRNRHTNALRNALREYYPAALEAFEDLAHGDALGVLHRAPTPTLGAHLDLAAIQSALKRGGRKRNIATRAHEIRATLRTEQLSAPAPVADAFGATTRATVGILTELNRQIGELETSLAAHFETHPNADIYRSLPGLGVVLGARVLGEFGDDPNRYTDTKSRKNYAGTSPLTIASGKKRAVLARHIRNRRLYDAIDHWAFTALTKSPGARALYDQHRAAGDLHHQALRALGNRLVGILHGCLRHRTLYDEHTAWAHRMPAAA

SEQ ID NO: 135709 - protein, 514 aa, unidentified
MQEGSKPRIQWCLFSTSPYFSLAPSLVLTPLVTARESRRIPFRRLLTEHTRPTCGWHGESMPKQKRARSISPTIRVLEPDAAGIDIGATEVYVAIPSDRDPQPVRRFSTFTDDLNRLADWLRTCGVKSVAMESTSVFWIPLFQILEDRGFRVCLVNARHVKNVPGRKTDVSDCQWLQYLHSVGLLRASHRPPQTICVVRSICRHRESLVQMATVHIQHMQKALDQMNLQLHHVISDITGTTGLAIIDAILEGERNPEKLATLRDGRIAASRETIARALVGDYRAEHLFTLRQSLEAYHQYQEWIAACDAEIERQLRVLPGNLANDQKPLSKPKDPHRRPRRNQLRFDLRCHLYRIFGVDLTEVPGISGLTAYTLLTEVGSDLSAFPSAAAFASWLGLCPDNRISGGKVLSVATRKVKNRFAIALRMAAQSLHRSQSYLGQYFRRMRTRLGTPAVITAAAHKLARILYHLITTRQSYQESTFTTMEERARQRQLLRLTKQAASFGFQLTPTGSVP

SEQ ID NO: 135710 - protein, 435 aa, unidentified
MKVKQVSVFRERGMGAGVSRRAEPQCLVANLNTERKTDTMKNYILLKSEPVQSQMSTSTGGAESSVLFIGLDVHNDSIAVSIAPPDRTEVRRYGIIGGEHDDVLKLVKKLQAAHPGATLKFCYEAGPRGFALCRCLRSHGLDCILVCPSKVPRKPGERVKTDRRDADQLARLFRAGELTGLYVPEPADEAMRDLIRARYQVGKAQHRARQQLKMYLLRHNIRYGGQTSWTPAHLRYLAQIKMPFPVQQIVFQEMLDVITEATVRLERYDREIERAVPGWRWEPVVRALMALRGLALLHAATLVAELGDFHRFDQPGPLMNYLGLVPSEHTTGSDRQQGGITRMGNGPARRALVEAAWQYCVPARISPHLKKRQAGLPKAITDIAWKAQLRLSHRYQHLTRVGRKKSQVAVTAVARELSGFVWAIARQIQPRDAKP

SEQ ID NO: 135711 - protein, 441 aa, unidentified
MEAVYRRCAGLDVHKDVIEVCVLPPAGQSGSPQRRRFATFTSDLIRLRMWLVSLKATEVAMESTGLYWVPVWRQLEGHIGKRLLCNPQQVKALAGRKSDRRDGQRIAEFLQDGRLDPSFVPPKEIQQLRELLRMRVSLVQEHNRLSNRVEKLLQSYGVKLSSVASDILGKTGQRILTALADGQTDPDRLSWKAVGSLREKEAQLRRALRADFDEHSCWMLGVLLGQLKENEQWREQLEQRITEGMKPYEPIVIRLMTIPGVDRLTAWSMVAELGTDMSVFPDQRHCASWAGVCPGTNESAGKQHSTRTRRGNRYLRRILTQSAWATSRCKRGYLRAAFHRIAQRRGHKKAVVAIAHKILVAAYFIIRDQTTYLELGEDYFDLLHPERTARRLARRLERIGYQVTLTKAAATAPRSSEGQQPKKRGRPCKCAERGIDCKHKR

SEQ ID NO: 135712 - protein, 402 aa, unidentified
MATMIIGVDLADTVFELAIANVQFEIQQRKRLSRLRFTLFCQELPPSLFLMEACSAAHHWARTLTRLGHEVRLLPAQYVRPYVHRSKTDAADAAALLEASRCQTIRPVPIKTVEQQHLLQLHRLREQYKTTRNARLGFLRGALRELGVLVPTGLRDSLPGFQRALRAHSTPLPARMRRVYTQVLEEVQQLQVAMDSIETQLAELTRPDPIVQRLLTICGVGPLIATAIRASVGHIERFPSGRHLACWLGLTAREYSSGERRLLGRISRQGDDYLRTLLVNGARSALMAANRFYPPGSPPLDRLRRWALCIQQRRGLNKATVALASKLARIIWATWRYERPFDGNWAHAATGSRTPVLPTPAGAGPELICKNRHSQALCHRLDHRSVAGAVKPSGHLAPRPNN

SEQ ID NO: 135713 - protein, 412 aa, unidentified
MRRVIGIDVHRTFGEVAIWDNGVVRHFGRIDMTRTALEGFGKTLRSSDEVVIEATGNSLAVSRVLTPFVSRVIVANPLQVKAIAQAHVKTDKIDATTLASLHAAGYLPQIWTPDAATERKRRLVARRYQVVRHRTRIKNEVHSILHAHLIPKCPHADLFSGRGRTWLARQPLPDDEHSAVERHIHELDRLAEDLALLDREIAQFAIEDPTIKRLMTITGVNLTVAAGIVAAIGDISRFGSPQKLVSYFGLNPRVRQSGLGAAHHGRISKIGRSHARAMLVEAAWAAAKAPGPLHAFFVRIRAKRGHQIAAVAIARKLTVLCWHMLTRNEDYLWARPALVANKTRAMELQAGHPQQKGSRRGAAYAYNVKALRDKEMLVAAQAERSYEHFTAQWTARRPKEPARGRLSSAGHK

SEQ ID NO: 135714 - protein, 407 aa, unidentified
MKAKIFLGVDAGKSDHAVAALDERDQVVWEARIKNTHEGFTPLLEKIQEWQEEGIEIWVGAEGIGGYLSPLDVHLCACECKYVNIQPKQYQLFREMMEWQPEKSDERDARGLAAFLHWQVEKDKARVREGGNDYYETLRTTARAFNQTLQSKVAMQNQLVSAAREYWPELFLENYFSKTDAQGLLALLQACPTPQAVAKAGVRRVNKVLSEATQRDQKELAERLVNEARRLAPQTPVSAAKASVVQALAAGVCHLTRVLAELEKQMKEQLQNHPFGRWLLDQKGFGVRTAGGFLGEAGNLDRFENDAQLARYAGNGAVLNQSGKSEGRHWDAHRYNHRLKRVVLLMAESRARYHDDSITYVATRKEAGGEYWKIIKKLARFLIRFLWKGWQEVCAREKVLADAARPT

SEQ ID NO: 135715 - protein, 405 aa, unidentified
MDAAIPSRVAGLDWASRLHAVCVLDPDGQVRARFDVPHAGSELRGLTRRLVRLGVGQVAIERPDGPVVEALLAAGLEVVVIPGRQVKALRGRYGTAGNKDDRFDAYVLADALRTDGHRLAPLRPDAPETTALRVVSRARKSLVATRVALANELRANLEISFPGAARLFSDVDSPIALAFLRRFPSVTQAAWLTEARLAAFLRRMGYPGRKAAAELLRRLADAPAGLTGPEGEARATVTLGLVAALDTVRAQIDEFEGEVVERLGTHPDAAIFTALPRSGRVRAAALLAEIGDCRARFPDAESLTSLAGAAPSTRQSGKHKKVVFRFACDKKLRAAVMDFAGDSRHDNPWAAHLYQQARARGHRHAHAVRILARAWLRVIWRCWQDHTPYDPARHGSYQRLIAQQA

SEQ ID NO: 135716 - protein, 341 aa, unidentified
MKQEMNVLGIDIAKRVFHAVGMDERGNVVVRKRLSRHDLMPFMAKLPPVLIGMEACGGAHYWARRFRAHGHAVKLMAPQFVKPYVKSNKNDMRDAEGIAEAVTRPTMRFVPIKDIDQQDLQALHRIRDRLMSARTALVNEVHGLLHEYGIVIPKGVAKFRQAVVGKLESEKDKLTSLSQELFGKLIDEFAALEKQLAYYQEKLEALATTHPECQRLMTIPGIGPLTATALVAAVSDANAFKNGRQFAAWLGLVPRQHSTGGKERLLGISKRGDSYLRKLLVHGARTTIRWVGRKTDRRSQWIRQLVERRGKNRTAVAVANKNARIVWALLTGHQDYQPATS

SEQ ID NO: 135717 - protein, 377 aa, unidentified
MKVVHQICCGIDVHAKMLVACLLSANGEKEIRTFSTMTDDLLRMRDWLLAANCTHVAIESTGVYWKPVFNILEDRLEVILINPEHARALRGRKTDVKDAEWLADLLRHGLLRPSFIPPLEIRELRELTRYRESLVREQSAVANRIQKVIESGNIKLGQVASDALGASGRVMLWALARGETDPVKLAALAKRQLKEKMPQLQRALQGRLTVNQRFVLGELLRRWEELEAADRRVTQEIDQYLQARPKLARARVILDSIVGVGPRAAEVIMAEIGIQMKPIFATDAHLASWAGICPGNKASGGKRLSGRTRNGNTYLARGAGPSGLGRDPEEELLLAQSVSAVGQTAGPQEGFDCRSSFAVGDHLPCVRARSDLHRTRR

SEQ ID NO: 135718 - protein, 355 aa, unidentified
MNSEKYIGLDVHQATIVVAVTDSSGKLIMESMLATEAATILQFFAGLRGTLAVTFEEGTWSAWLYDLLNPHVDQLVVCNPRKNALLKDGNKSDRIDARKLAELLRGHQLKPVYQGENGVRMLRELSRSYLTIVKDLSRVMNRLKAVYRSWAIPCAGRDVYYRRHRAQWLDKIREAGVRRRAERLYEQLDMLQHLRQQARRELLAEARKHAITARLRQVPYLGPIRSALAVALMQTPHRFRTKRQLWAYSGLALETRISAEYRMVEGQVRRSKKLLCIRGLNKDHNHDLKGLFKGAATMASVRPGPFQEFYQAALAKGIKPTMARLTLARKIAAITLTLWKKGESFDAEKLKSQAA

SEQ ID NO: 135719 - protein, 356 aa, unidentified
MSYDVKYIGMDVHKEAIVIAVLNEGGKLVMESVIETKASSILQFLHGLRGELHVTWEEGTWAAWLYDLLQPQVQEVVVCNPRRNALLKEGSKSDKVDARKLADLLRTGMLRPVYHGENGLRTLRELGRSYQTISKDLTRVMNRLKALYRGWGISCAGTQVYAARCREEWLSKIPQAGVRRRAELLYQQLDGLQTLRRNLRPEFLAESRKHKASKLLRQIPCIGPIRAARLIALMQTPHRFRSKRQLWTYSGLGIETHDSAQFRFVRGQLQRSKKPQQLRGLNRNHNHEMKEIFKSAATRASCGRGPFHDFYAGLLAKGMKPEMARLTLARKIAAITLTLWKKEEGFDTEQLKTQAA

SEQ ID NO: 135720 - protein, 400 aa, unidentified
MTAVWAGIDSGKRAHHCAVIDAAGRMVLSRRVANDESALLELITSVLALAGGDQVVWATDLNAGGAALVIALLADRGQQVLYIPGRIVHHAAATYRGDGKTDAKDARIIADQARMRTDLQPVHGGDQISTDLRLLTARRTDLVCDRVRAISRLRATMLEYFPALEAAFDYSKKAPLILLSGYQTPEAIRRTGASRLAAWLKKRGCRGSANVARKAVEAANAQHTVLRTEPVAAQLVAAIAGQITAIDTEIAQLDDVISERFAQHPDAPILLSMPGFGPVLAAAFLANTGGDLRAFQSADRLASVAGLAPAPRDSGRISGNHHRPRRFNRRLMRTCYLAALSSLKNSPASRAFYERKRAEGKSHKQALIALARRRISTLWAMLRDRTTYREPAPPALAPAA

SEQ ID NO: 135721 - protein, 365 aa, unidentified
MGQNSMVCAGIDTGKYKLDVAIDGRVEQLQVPNDPAGHRTLVAWLRHRQVERVGIEASGGYEQAVVLLLRASGFIVIVFQPAQVRAYAKFLLQHAKNDKIDAALIARCTGAAEKVHEPADARLAPLAKHLTFVEQLTDDIALFKTRRESCHDARIREHWTQEIKRFKLLQTRELKQLITAIRQYGDLAKRFDLIASVDGVGPRTAVAILVRMPEIGRVSREQVAALAGLAPFDDDSASRHGVRHIKGGRDRLRRSLYAAALPAAFNWNPQLKAIYQRLIAAGKPHKLALVACARKLLIFVNTVVQRGTPWTSHAGDPNSQAVSAFDCEAVSSSRPAPAVTPRAAAVKAGRRSPGRPARRLCQATP

SEQ ID NO: 135722 - protein, 350 aa, unidentified
MKKICIGIDVSKETLDVTVIHIESYELVEKLGYSKFDNRPSGFRSMTAWVRKVIKSRGQMDEALFCMETTGSYDLPLCHWLHKNGLNVWRESALQIHCSKGFQRGKSDKEDSEVIAQYAARHQSRYTAFVPDAEAIADLKELICYRDSLVERRKECKVRLANKKETLVNRNSKAWKCIERLSKAEIKRLDKVIGECDEEIRNLMKEDEEMEKNYQHLTSIVGIGLINGAALIAYTGNFKKITTPNKMSCYCGCFTFYEDSGTSVHRKSPYRNACSKMLKGYLRMAAKSAMLANTELRKYSERLREKGKPYAVILNNVANKLLHIMFSLVKHDYDYEYNHEIVRRMEREIA

SEQ ID NO: 135723 - protein, 352 aa, unidentified
MIIGCDFHPSFQQVAYVEQETGEYGERRLNHRGEAEAFYRSLACRAVRIGIEATGNDRWFHKLMSELGHELLVGDASAIHASAPREQRTDKRDARHILKLLMENRFPAIWQPSVGNVEQRQLLLHRCRLVRMRTRIKNQLDSIAKNEGLTGSRKWSAKRRQKIQDLPLTGWYAERRVDLLGLLDALEKRIKPLDEAVLAAAEENAEAQLLMTHPGVGPVVSLAYVLIMGDWRRFPRGKQVGSYLGLIPAEASSGKHQQRMGHITKQGNTLLRWLLVEAATKAQSKDPSWHRQYLRLSMNKHHGVAKVAIAHKLAVRLYWMLRSGQSYTQIVERGSHAGQSVLSGGCGFRPTI

SEQ ID NO: 135724 - protein, 364 aa, unidentified
MEILNPEKFLYVGVDVHKDQHTAVITDCFGHTLFEKEINNSEEEFDQLISNVREVAEGKEAVFGLEDTSAYGQRLAQHLCQSSFVVKTVSPVLVDRGRKRLMHPVKSDSQDALGVARALIQGIGTLPNFSISKDDAIYQALKDCTVDREYLVKEQTRIKNQTHRLLHRAYNTGYRERFKNPFLIKALEYWSKHPLPKGMDNEFLANQIKRKVKRLKDIRKEVLVIEKEIRILLDSLDQKLETLNGCGLVLTAMVMAEIKEIGRFKNSNALARYGGFCPREKSSGKTIRRIKMKSGNRKLNTAVHRIALAQIGRRGNEYSKEYFKKKIAEGKSKMQAMCCLKRRIINIIYAMLKHKAAYDYAAKC

SEQ ID NO: 135725 - protein, 308 aa, unidentified
MEKENVYCGVDLHYGKSAFCFVDEKGNMKEQLEIKTDRESIEGLLKRCEAFQVNYAFEAGGMARYFHGIVKSMANTGRIHVVHPYKFKIITESKNKNDKEDSKKLARALQKDYLPFPVHIKSDKSRQLQIYLGIRKRRVGTRTKIINQTKCIMRGLGIKVVVKSLKTSRSFTTLINSLKTYPFEQEAVKDLYLEFCAETKKIEEIEKKIKDLIAKDFAKDYGLVETIPGIGFVGSATILAVVDDVKRFNTAGEYSSYCGLVPSEHSSGNKIIHGRITKEGPKNLRTVYIQAAWSIIRSRYKKHHKKSI

SEQ ID NO: 135726 - protein, 488 aa, unidentified
MANRKISTFERLQQGKLNRKQRRELGMRLHSEDPGLQVVHPDAAGIDIGNESHFVAIPPDRDAAPIREFGSWTADLHEMANWLIERGITTVALQSTGVYWIAVLEVLEKAGLEVYLVNARGTKNLPGRKTDVQESEWIRKLHTYGLLRNSFRPPEEIRAVRTIWRQRERWVQESGRAVQHMQKALTTMNVQLANTISDISGTTGQAIVRAIVAGKRDPWKLAELRDRRIAASKEEIAHSLQGNWRDDVIFELRQAVESYDFFQKQMTACDQELIKYMAAIDSREILPKQDPPENAVPLSCAKPRRRSKTRSKNRPGFDLAAELERTMGVDLTRIDGIDVITAQVIFSEIGPDFSAFRDENHFASWLTLAPKRDISGGKVIRHIHATGRNRVANALRMSAESYSRSNSYLGARYRRLRARMDGPVAVKAMARYLACLVFRIVTKGQAYVDRGAAHYEAKRQERERIALERRAANLGLKLVPQVPVMMAQ

SEQ ID NO: 135727 - protein, 416 aa, unidentified
MRVVGLDIHRSFAEAAMIDEGRVQQLGRIELVRERVIAFAKRLGKNAEVVVEATGNTMAVVKLMAPYVKRVVIANPLQVRAIAHAKVKTDKIDAAVLAELHAAGFLPEVWQPDEATERLRRQVARRATIVQSRTRVKNRIQSVLHANLILPYKGDLFSGKGRKWLAAQPLEDDERTTINGWLAELDRLAVDLAQVDTSLAQNGLRDDHVRRLMTITGINLTVAIGLTAAIGDITRFASSDKLVSYFGLNPRVRQSGDGRAHYGRITKQGRSMARGFLVEAAWAAAATPGPLHAFFIRIKARRGQQVAVVATARKIAVLAWHLLTKGEDYAFGRPALHQAKLRQMEIKAGMLSKRGGNTPGRARDYNIKSLRDAERAFVAQAEGAYARFVASWSERPKTKPPAVKPGARAPQNEERH

SEQ ID NO: 135728 - protein, 323 aa, unidentified
MQTNSTVAGWAGIDVSKEWVDVAVWRGERRIDVGRFARDKKGLGKMAKQLVQYEPEAVALEATGGYEVAVMAALTEACIAVVRLNPRRVRDFARAQGLLAKTDKIDAYVLALFGVRMRPAIRALPEPERVQLANWETRRQQVVEMRATERTRLQQVKHPELRKSLERTIAFLGKELARLDAQIDKCLQESQQLVEQAALLDTAPGVGPRTACVLTARVPELGAANRREIAALAGLAPIAQDSGKYQGKRRIQGGRAPVRAALYIAAWSATRVAGKLRDYYHHLIAQGKPRQLALIAVARKLLIALNEMMRKRQPWTENAVFSA

SEQ ID NO: 135729 - protein, 339 aa, unidentified
MVIVQLNIKFMKRIFVGIDISKDWMDYAVCSDKQEGVSNSERMANTVEGITSMFKSLLKKYNKSDLWFCFEHTGNYGLLLSSLLQSERFCYTAAPAIEIKKSIGISRGKNDYIDAKRIAEYAATHSHKLKESQLPSKELLEVKNLLAYRAQLTKIKSQLINSSKSYRVAQQVVDINYISEDLEEKISGLVKSIKKVEKKIETVISSNKELTNNYALIGSVKGIGLVVTAFILVYTNNFTTFDNPRKFNCFTGIAPFEHSSGMNKGISKTSHYRHKYLKSLLFNCANSAAQYDPQLKKYYERKKKEGKKHLCIMNAIACKLIARVFATVKRQSPYVIFVQ

SEQ ID NO: 135730 - protein, 426 aa, unidentified
MVKAQKMALVRGNVLIVGIDVAKKRHYARFYNQMKLDVVRPFHFHNTREGFYRLVSKIEEARSKAGAASVVIGVEPTGHYWKPLAWFLQEQSYQVVIVNPYHVKGSKEMVDNSQTKNDRKDAGIIAKLVSEGKFLSCLLPKGVYAELRVLYVTRQQQVRQLHSALCRLEAILDEYFPELPGVFKSLLGLAARWVLRNCPFPEDVLKMGPEKLAEELKKASRHRVGKKRALALLSAAQESIGVREGVEGARIKLRACLDEIEFYRAKIKSIEEAMVKFLNETGLANYLLSIPGIGVVTAAGFLGEIGDPKKYRHWKQIQKLAGYNLTENKSGQRDRGLRTISKRGRPGLRNLLYQAALTMVAKNKEFKALYRHFLTRPVNPLKKKQALVAVALKLLRVMFALITKKEAYDPAKVLGEYRQKQLNQAA

SEQ ID NO: 135731 - protein, 343 aa, unidentified
MQAITTIGLDIAKSVFQVHGVDAKGAVVLRRQIKRRYVLAFFQNLPPCLVGIEACASAHHWSRELQALSHTVRLMPPAYVTPYVKRHKNDAIDAEAICEAVTRPNMRFVATKTREQQSCLTLHRTRHLLIRQQTSVINAIRAHLAEFGIVAPVGRNGVDQLLGIVADASDKRLPELARACVAALGTQLGTLKAQILQFDRLIMAWHRSSEASRRLDAIPGVGPALATALVATVADPRAFRSGRNFSAWIGLVPKQHSSGGKHRLGSISKRGDRYLRFLFVAGALAVIRYAKIHGTKHRPWLTALLARRHTKVAAIALANKIARMTWAIMAKGEHYKEPVALAA

SEQ ID NO: 135732 - protein, 407 aa, unidentified
METDSPRVDRPRVWVGIDVGKAHHWAVAVDESGRQVWSCKIANDEAEILDAIAEALGLAEKVSWAVDINGTTASLLLALLAAHGQETVYVPGRTVNTMTGGYRGEAKTDAKDAFVIAETSRLRRDFAPVQVNAQFVADLALLTGHRTDLVADRVRMINRLRDLLTGVFPALERAFDYSHHKGALVLLTGFQAPEAIRRRGQTRLEAWLRKRGVRGAEQVAQTALAAAAAQHTVLPGQEVAGEIIADLAAQLLALDDRLGRLEAQIKTSFATHPQAEIITSVPGIGPILGAEFVVAAGDLGTYADAGRLASAAGLVPVPRDSGRRTGNLHRPKRYSRRLRRIFYLSAQTSIIREGPNRDFYLKKRSQGLKHVQALIALARRRVDVLWALLRDNRTWTPNSPNPAIPAA

SEQ ID NO: 135733 - protein, 414 aa, unidentified
MYNKTQNIEKVNKKMLIATVDIGSRSHVGYWRSWDGAQCKPFEFSNDRLGFDRFWGYVCGAKIKHNADEIMVGFEPTGSFGEPLVYYLKDKPVTVVYVNPKHTKRVKELSDNSPLKTDKKDPRVLADIIQLEHYLSVVVPTGICAELRELSGERERAIVERSCSYNRLYNKLYAVFPEFFAMVKDIRVQSIQYLLARYPLPEDIVKLGKKRLTRLLKHRSHGRFGESFCVRLYEAAKASVGVTEGSRATRDSIRYIIGQIAEHNRRIAELEEAMRRLLEEIPISRNILSIKGIGTVVAACIIGEVGNFETFPTQRSLIKFAGLNLYEVSSGKHRGVRRISKRGREYLRKTLYFAAMNTVRKNGIMHDYYIRLIESGMPRIKALIAVSRKLLGIIYALARKQENFVIEYSVHKAA

SEQ ID NO: 135734 - protein, 370 aa, unidentified
MKKNSTRPQSPRGAAARSKGPITIGLDLGDKTSRYCVVGDNGEVMSEGSVATTRKAVAQKFTGMGRCRIAMEVGTHSPWLSRMLTALGFEVIVANARQVQLISASSRKNDRMDAHLLARLARVDPELLRPIRHRSEQAQADLMTIRIRAALVEARTSLVNAARGFTKAMGERLPACDTDSLGVEKLEALPAALRSRLQPLLEQIEALTAQIKKLESNIEQIARIEYPETRLLTQVSGVGTLIALTFVLTLEDRERFQKSRDVGCYVGLRPKQSQSGQSQPQLRITKEGDRYLRTLLVQAAHLILNRRAPDTDLKRWGLKLAQRGGKNAKKRAIVAVARKLAVLLHRLWVCGEVYEPLRNSRPTPASKHAA

SEQ ID NO: 135735 - protein, 441 aa, unidentified
MKLHNLEMKRHYVSDKFVIGIDPAKHKHQAMVLDPKGIPIGNTFSFTSSYNGFHFKLWQKLKSLPFDVTPENTAFAVEISINYWQKLCHYLSEKGYTVLMVRPITTKHERPRLNNFSRTDPKDALCIASSARQGYFNFYQKYADEVMAIHRLGITYDKLKKQIVISKQRLRSEVEMLFPEFPGILKIDTDTARYLFSKYLTAKDFSEINIFYEAIELVAVSRNHHGAGTLKSLKDAASKSIGLPLDKISYMAHRMTVNMWIEQIKMLKIQQYNILREMSALAQKTPWYAILTSIKGISEITAARFIAEIPQLAGNLHFKQIETFAGLNLRLSQSGQVHGYRRISHLGNHRLRAVLYKMTEETKNHIPEIRIRFLKRQMKHPTYTKNITACTSNLLKIIIALIRDNKLYEIDPEKVKIMEALDIRYQEQKQKRQSKAFKKAV

SEQ ID NO: 135736 - protein, 340 aa, unidentified
MQITTKFYLGIDVSKHWFDLSLLTVINHQKQIMVTERFDNSEKGIKEMEQWLKKQNVSFNDNTLLVIENTGIYHRLIWEFCSTHKLPIHIGNAAHIKWSFGIARGKNDVIDSQRLCNYAHKHADELKATPELNPVFIELRDMMTSRSKLVSQSGSIRSHLKELKLSNNKATQKLIEQVHKPVLDGLKKSIALIEKQILNIIHKDGAIKTNYDLLITVPGIGHLTAVYILCCTNNFVDKISGKQLACYAGVVPFQDKSGSSIKGRNKVHKMANKELKKMLHLCALSAIKCYPEFKQYYERKKKEGKHVMSVLNAIRNKIVLRAVAVVNNQKPYVENYKKAF

SEQ ID NO: 135737 - protein, 352 aa, unidentified
MEIIALDAHKRYSYVCVQDSEGNFLCEGRINHAKGQVAGFLSQWTPGTSVAVETVGNWYWIVDEIEQAGMNPRLVHAHKAKLMLGSINKTDKLDARGLNKLQRAGTLPCVWVAPGEIRDNRELPRTRMVFANLRTRLKNRIHSVFDKYGLHTDFEGITDIFGRKGREQVALSIKQLPSETRYTLRCLLRELDMVEGQIQRIERRMKKVFSKTEQVKRLMTIPGIGFILAVTISNEIGDISRFATPQRLASYAGMVPRVHSSGGHIRYGKLRSDVNHYLKWAYSEAGNSIAVNHKRLPFRHTSKLYRRIRAKKGHAKAVGAVGRHLAEASFWILSRNEDYKEPGSKLFSSTAV

SEQ ID NO: 135738 - protein, 401 aa, unidentified
MKTVLSVDVAKNKSMIMLMNSDGGIFIDTKEINHNLEDFEKVKEEIKEINPQNLTVFMESTGTYHLPVERYFKENGFNTLVINSLTTKNNYDTIRKTKTDKKDCYRLAKLFFVNEVEYHDLSKKDLYANLKAMTRQYFYLLQNNVSCKNRYKRLINICFPELEKIFKSTRIYDDTALNFIKEFLHAEIVKEKRIDALYNNLYKTNGRNLNFYKKLATTIKIASINSYPGVDKEHEDVKNLSYMAKIVQNNNNIINELREKMIETAKQSPYYKIINSFYGIGDTLTAEILGELGDITRFDSPKEIIAFCGLDPTIKQSGKSINVKGAISKRGNKYARYILFNCSQMVVKLGASNYPEHPVYIYYQNKKAEGKHYYESLTACSTKILRMLYSMCKNNKQFLEN

SEQ ID NO: 135739 - protein, 415 aa, unidentified
MGQHRNKVCGVDIHKKFLVATILTRDGTKMQKRFGTDIDDLLNFRDWVIKENCDCVAIESTGVYWYPVNAVLENKVELILANAHQIKHTPGRKTDALDSEWIAEVALNNLIDPSRILPKEDRELRRLTRTRESLVKIRSQMKNQVHQGLESCSIKLSSVLSDSFGKSGRYILDGLIKGKNIDEIIAGIPSKRVKNNGDQIRSAIKIGLDQIQVFLIQSHLDTIDCLTKKLDEMDLEIKQRISGRKDDLKIVMSVPGIGFIAATTILAEIGNYQDFSTPDKLAAWCGIVPSVYQSADKLRTGSITKQGSKHIRWIMVQVAQAAAKKKGSKLRKFFLRVKAKKGHNVAVVALARKILCILHHLLMNREMYQEEGVEKSRPSRLDWSSATTDKMSLQTMIEIIAKAGYEVRKTERDGG

SEQ ID NO: 135740 - protein, 451 aa, unidentified
MDNKQISLEVVNPNAAGIDIGSRSHWVAVGQNAQDVSEFGVYSQDQLAMCEWLHSKGVTSIAMESTGTYWQNLFSTLVGQGFDVILVNGRQTKNIKGKKTDIKDCQWIQKLHSLGLLSASFLPDSDTDTIRTYSRHRNNLLNQGANCTKRMQKYLRLMNMRLDVVVRDIVGLTGQKIIHSFLQGEHSGQQLAKLRHFNCHKTEGEIAKALQYNGREDYLFAFTQEWESYQHIQSQIKNTDAQINQLLKNIIDKDNNKKQYVAGSKPYKRKGKNGITDTDINQISYQYFEGVDLMEIEGLNEGLVMCLISEVGMSGIKKFQSSKQFTSWLRLAPNNKISGGRVLSHHLPKGSSRLKIAFRNTANAIGNLKEGWLVDFFKRINYKKGREAAISALARKLAVIVWNMITKATKYNPPTQYQYLDEKRKAGIVNRIRKQIAKFELSKEELGYAIA

SEQ ID NO: 135741 - protein, 349 aa, unidentified
MGIIGGLDVHRSQITYDWIDSDTGQRQRGQLAPAHREHLRMWLGQFAGQQAAFAVEGCTGWRYVVEELKRAGVEAHLAEPADTSAARGPKRRAKTDQLDARHLRELLAAGRLPQSWIPPAQVLEVRTLVRCYKALTDEHTAWLQRIHATLFHHGVPAERNLLAPDRRERLEQGSGLSPAAHQLVTVALGTLDHLDVERDRLRAELVGFARRQPGCQALDALYGIGPVTAVAIWAELGEVGRFTSSRQAVRHTGLDVTVYSSDGKRTPGHLARQGPPVLRWALFEAAKCAARAASPDHAYYLQVKGRLGGNRAALSVARKLARRCYHTLGALGEQAYAPPSDSPDLGQVA

SEQ ID NO: 135742 - protein, 345 aa, unidentified
MPMLEGKVDHVIGVDTHRDRHAAAILDRSGGLVAEFEVLTDQAGYEALLGVVAEQAPGRRCWALEGTGCYGAGLASLLLDQGEWVVEVDRPKRPRGRTGAKSDPLDAIRAGREALSREHLACPRQRGQREALRVLQLARSGAVKVSADARRHLKALLVTAPEPLRAGLRRGTWLRQAQVCAALVAAPTDPIEHRATIRALRLTAERALAAHQQANALAKELRTLVQVMAPVLLAQPGVGPVTAAQLLISWSHPGRLRSEAAFAMLAGVAPIPASSGQVVRYRLNRGGDRQLNRALHTIAMIREAWHEPTKRYVAWRTRSGRGVGGQRTQMESTLDSRVHVKLPCP

SEQ ID NO: 135743 - protein, 404 aa, unidentified
MRLFVAIDVSSEKLDVCFLDSHDTVLKEICLSNDVNGANAIKEDVLHFHQLYNYEKIVIGMESTSVYSFHPSMFLTEDKDLRALDVEVVVQNPKAIHRYKKLFEEDKTDKIDAFRIADFLRIGRYNKFLIKEEKYVALQRLTRSRYQLVHQQTECKQHFLENLYYKCNTLSKELNTSVFGATMMEILSDSLSLDEIAEMDLEALATLLQKKGKGRFSDPEDLAKTIKKAIRDSYRLGKVVQDSVDVVLATYARLIQTLKKQIKEIEKSITALFEAIPEARYLTSVPGIGVVYAAGIIAEVGQIERFENEAQLAKYTGLYWKKSQSGNFESERTPMTRTGNQYLRYYMVEAANSVQLREATYRAYYLKKYDEVPKYKHKRALVLTARKLVRLVDVLLRNHQLYMP

SEQ ID NO: 135744 - protein, 404 aa, unidentified
MYNAVGIDVSKGKSTVTVLQPGGTVIRKPFDISHTSQNLNELADYLSSLDGTTKIVMECTGRYHEPMVKALSEAGLFVSIVNPHLIKNFGNNSLRKVKSDPADARKIARYTLDNWAELRQYSGMDNTRTQLKTLNSQFSFFMKQKVAAKANLIALLDNTYPGVNKLFESPTREDGSEKWVDYAYSFWHADCVRKIGLKAFTERYMSFCKKHHYIFQQDKPEKLFNASKELVAVFPKEKTYKLLIQQSIQQLNLASEHVERLRREMNELASTLPEYSTVMGIYGVGKTYGPQLIAEIGDVSRFTHREALTAFAGVDPGVDESGQHKSKSNRASKVGSARLRKTLFQIMTTLLQNAPEDDPVYRFINKKRSQGKPYYVYMTAGANKFLRIYYGKVKECLRNLEQTE

SEQ ID NO: 135745 - protein, 320 aa, unidentified
MSDRLAVGIDADSKTLVVACHGTKGSARITNSASAITKWVSGLPARSRIGVEATNRYHELVVQAAQKAGHAVFVLNPRDIKHYAKGVACRGKTDSGDAQVIARYIAKEADNLHEHVARSPAQEQLHVLLQQRDSLVRSKAKLNLSLGAGASESAIFGRIFVGLKEAIAMLDQQIQQLCRSGEQRDLYRRIMTIPGIGPTVAAFITHHITRWPLTSSDAWIACSGLDPRPNESGARIGRRRLSKRGNASLRQILYMAAMGLTRSKGGKALYTAIRERGHSSTASFNILARKLARIAWGVFKSGRDFDPAMLKVGQACFQQA

SEQ ID NO: 135746 - protein, 342 aa, unidentified
MQIATIGIDIGKSSFHVVGLDARGAIVRRRRCSRNQLMRELANLPPCLVGMEACCGAHHLGRRLATFGHTVRLIPPQFVKPFVKSQKNDLLDAEAIAEAVQRPTMRFVPLKTTDQLDLQALHRVRTRLVRRRTAVINQLRAFLLERGVTVPVGRHALIERFPEVLDNPAFGLSPRMCRLLQQLRDEWRVLDQAIQEADHEVATLAHEDEACRRLTQVPGIGPVTATALVAAIGNGAAFTKGRDLAAWLGLVPQQHSTGGKVTLRGITKRGNRYLRCLFIHGARAVCRHHRHRPHRLGRWIASLEARAHPNIVVVALANKLARTAWVVLQREVSYDGRLFMST

SEQ ID NO: 135747 - protein, 424 aa, unidentified
MAGPSTGFTCENGKAARVTATDVVWIGIDAGKASHHAAAVDAGGKRLWSVKVANGQQPIEELISRAAKSAGGGEVRWAVDLVSPAAALLLAILLTGGQKVVYVPGRVVHGMAGVFRGEGKTDAKDARIIADTARMRSDLTELTPADELVVELTRLTSYRADVMADWVRGINRLRDLLTSIFPALEASFDYSTRSALILVAGYCTPAGIRQAGPGAVAAYLREHGAWAKGIDAMAATAAAAAQQQSVALPGEATTALLIGKLARQLLDLDREIKDTGKLLTSRFRDHPQAAIIESLPGMGPILGAQLLVATDGRVLEAFASPGRLASYAGLVPVPRDSGRVTGNYHRPRRYHRPLRNVFFMMALSSLRAEGPSKAFYQRKRDENKIHTQALLALARRLVDVLWALLRDNRTYSPIPPSQVTAIAA

SEQ ID NO: 135748 - protein, 313 aa, unidentified
MKRYIGIDVSKDRLDVAVHDSAQCFSCDNTEAAVEALVKQMKELEPELIVMEATGGYERVCAAMLAAAGLALSVVNPRQVRDFAKSTGILAKTDRLDARVLAHFGAAIKPEPRALPDAQQQLLDELMLRRRQIVAGLVAEKNRLGMAHTNAVKKSLREAIAFYERLLADVDRQVGEHIERSPLWRAREDLLRSFKGVGPVSSRTLIGELPELGTLDRKRIAALVGVAPLARESGKRKGARVIFGGRGQVRAALYMVAITAIRTNVPIRQFYQRLRAAGKPAKVAIVACMRKILIILNAMVRTHSRWNEHLVIS

SEQ ID NO: 135749 - protein, 393 aa, unidentified
MICVGIDVAKDKHDCFILNSEGEVLADVFTIPNNAEGFDRLLQTIRRCARPEDKMKVGLEATGHYSYNILGFLLNEGLPTYLINPLHTNLYRKSLSLRKTKTDRIDARTIAAMLMSDVDLKPYTDTAYHNEELKSLTRYRFDKVCERAKLKQSVSRLVTILFPELEKLVPTLHMASVYALLSEFPGAKQVAGAHLTHLKAVLYDASRGRYGRDMATTLREAARCSVGSVMPAKSLELQHTIRLIRELDAEIEDIETAIQSMMDEIQSPITTIPGIGVRMGAMILAEIGDFSRFDSPDKILAYAGMSPSTYQSGQLSLSGTYSHMEKRGSRYLRYALYNATKYVCLWNSTFAAYLAKKRAEGKHYNVALSHAAKKLVRLIYAIEKSQKPYCSAA

SEQ ID NO: 135750 - protein, 322 aa, unidentified
MTSSKLATRVIGIDVSKDKLDISDSEGKIKKEVKNSTASIVKYIVKKIAEPGEAFVVCEATGGYERTLAKAMHTAGVAVCITNPFQVQQFARGIGVLEKADPIDAGKLRQFGELVDLQPTAPKSAEHERHEALVRRREQLLTLISMEQNRRAQSYDPTVTAMIDKILKVMKTQQKSLETEIEAMLKKEAETNPAVAVVQSVPGIGPVTTSTLICDLPELGKLNRSEIAKLAGVAPIVNQSGKRDKQRSIFGGRSHVRRVLYMAALVATRHNPVIKAFYTGLIARGKEKKVALVACMRKLLTILNCMVCNNETWRTEKVVTGT

SEQ ID NO: 135751 - protein, 382 aa, unidentified
MKQDIKAKQNRGNQISAEAPRGTFDLGLRRWKVQREGLTVGVDVGDKISHYCVLDEEAEVVERGKLKTTPAALQPWLEALPAGTRVVLETGTHSSWISRLIERAGQEALVAQPRKIPQIYRSKRKNDRRDAEKLARTGRLDPNSMGPIRHRSVEQQADLAVIQARDALVQVRTQLINTVRGLVKGTGERLIGCSARSFARKAEEQIRQRLRAALLPLMSQVTSLSEQIERYDAEVDKLAQKKYPETELLRQVSGVGPVTSLAFVLTVADRWRFRHSREVGPFLGLVPAQDESGESSPQLGISKAGNTYLRRLLVGSANYILGPFGPDCELRRWGKKLSERGDKNARQRAKVAVARRLAVLLHKLWVSGEVYEPLPEKRAAAA

SEQ ID NO: 135752 - protein, 418 aa, unidentified
MNATEWNQQPYFAALDWARAHHDVVVMDRLGQVKDMIRFEHTAEGWQRFQELARRYPALPVAVETSQGTVVEQLFAAHVRVYPVNPKAAERYRERQAPSGVKDDQRDAWSLADALRLDGHTWRALSPQDPIVTELQLLCRDEIALIEQRTAFVNQLQQALHEYYPAALQVFDDWTCPAAWELVLSFPTPAALEQAGRRRWEKFLHTHRLWRKDTAEERMGIFARATALSGTAPTVAAKSLLAVSLVWLLRTLETQLASYRERITAVFARHPDHHLFGSLPGVGPKLAPRLLAEIGDDRTRFADAEGLQCVAGTTPVTFQSGKLRFQKVRYACNDTLRATVHLWVDHSREQCAWAKAYYQEHRQNGQSHACALRCLGQRWLKILWKMWQTRTPYDEALHTRNQTQHGSWLLTMKPAPFS

SEQ ID NO: 135753 - protein, 427 aa, unidentified
MARAIGLDVHLEFCEVALAEDGAVRSAGRVQTKPDALELFAQSLGPDDRVALEVTGNAWEIARIVEPHVARVVVVSPADTGIRQARAKTDRLDARTLARLLWSGELDAVWMPDRVTWVMRRRLSRRGQLVWTRSRAKNEIHAVLMRCLVGRPPFADLFGVKGRRWLAELELPVEERETVDAGMRQIEFLDTEIAQVERLIAREALASVGIRRLMTVPGVNVIVAASFMAAIGDIDRFGNPRKLVGYLGLDPRVRQSGSGPASHGHISKQGSVRARHALVESCWSAVRQPGPLHAFYQRVRARRGHSVAIVACARKLACLFWVLLTREEDYAYAQPSLTRKKLRLLELAAGAQRYSPAGDGVWHANEAVRAAERELAHQAEIAYQRTVRDYHATQATTKGAGATPGRASSSRQSGKQRGRATVPDPAL

SEQ ID NO: 135754 - protein, 371 aa, unidentified
MNHVTSIGLDVHARSITAVALDSITGEVRSQRFKYSPAEVASWISRFESPKAVYESGVTGFHLVRALRDLGIDCIVGAVSKMQRPASDKRKKNDRNDAEFLARQLMAHNIVEVFVPDEETDAARNLSRVLEDIRDDLTRAKHRLTHLLIKWGYVWDEYNEEGKRRGAWTRAHWEWIRKIELPGSAAQESLDYYISEVRHIEAQKKAIEKRIAQYVQRPRWNDRVEALRCMKGIETMTAFALVVETGVFSRFDSARSYASWLGLVPSEHSSGEHVSRGGITKAGNSHLRKLLVEASWHYTRATKERKRKLNDPIVPFAVSSHAASGVKRLVERRHHLAYELRKRPVVANVATARELACWIWALGRMSEGTLA

SEQ ID NO: 135755 - protein, 392 aa, unidentified
MFYLGIDIGKRNHVATMLDDGKKAVFRAFSFSNSTEGGEALLAQIVKHAPDATQVSIGLEATGHYWLALYSFLTERGYMIHVINPIQTDGWRKGIEIRKRKTDKIDSELIAELIHYGDFSSTQLADETIQSLRTLTRFRSYLVDSIADLKRKVICVLDQVFPEYETLFSDVFGATARELLLKYPSPAELEQLSVEKLTQVLEQLSRKKCSTAKAEKVLKAAKHSFGVTHCRDTFIFQLRALLNQMNFIEQQVTDTEAEIDVLMEQLQSPITTIPGIGPVLGAVILGEIGDIHRFESPSKLVAYAGIDASVSQSGDFEGTQMHMSKRGSPYLRRVLFMAARIAVNSDAQLGAFFEKKHSEGKHYSACIGAVSRKLCFIIHAILSQNRPFSPMP

SEQ ID NO: 135756 - protein, 448 aa, unidentified
MGHDVEEIDAEWDEQVLERAGAIDVAKASAKVCVRLPASKRRITRVWDVAATTRAIIDLADELVELRIERVVLEATSDYWRPFFYLLEARGLCVWLVNARDVKNVPGRPKTDKLDAVWLAKLAERSMLSASFVPKEQMRHVRDLARARFDLVEDRSRVKQRVEKLLEDALIKIGSVLTDIHGVSGRAMIEALIAGERDPKVLAGLAKRRARAKIAELAEAADGRFSDHHARLARMLLDQADDLSRRIEQLTALLDDAIAMLTPGLGIPPGVDTATGEIMTGPDAVNTAIERICALPGAGPDTARAVIGEIGLDMGVFGTAGRLCSWAKVSPRTVQSGRKTGRAVTGKGNPYLKAALGQMAMGAAKTDTFLGARYRRLAKRMPKANALAAIERSILTIIYNLLADPTATYTDLGADYHDKRIDKARRTRSLISQLEALGHTVTLSAAAA

SEQ ID NO: 135757 - protein, 370 aa, unidentified
MGKSVLYVGLDVHKMSMDVAIAEAGPRAEVRFYGQIGGDLDSLDRVIRKLRATGAQLQFAYEAGPCGYVVYRHLTAQGWPCLVAAPSLIPRRPGDRIKCDRRDALSLARLFRAGELTSVKVPDADDEAMRDLTRAREDAVSVERRAKQRTGALLLRHGRRYPGKTTWGRGHWRWLTQQVMEHPAQQIVLQEYLDAVREANTRVQRLTGQIQELLPQWRRAPFVAAYQALRGVSLIVAATMAAELGDLSRFNNPKELMAYLGLVPSEHSSGASVRRGRITKTGNGHARRVLVEAAWAYRLRARVSRPLLQRQEGLPENIRQISWQAQLRLCARYRRFLARGKHKNTIVTAIARELAAYIWAIGQAVEPVTT

SEQ ID NO: 135758 - protein, 279 aa, unidentified
MVTLGGDSHKRTHTLVAVDENGRQLAQRTLLATKAGHLEALQWAGRWSERKWALEDCRHVSRRFEADLLAAGELVVRVPSKLTAGARKAARTSGKSDPIDALAVARAALREPDLPVAKLEGAGREVRLLLDHREDLVGERTRIQNRLRWHLHEFEPEAVIPARMLSRYHTLTELEGRLRTQHGVVVEIAVELVVRIRELTRRINQLEEDIAGRVSGLAPTLMQLTGCGALCAAKVVGEAAGVSRFRSKAAFAMNNGTAPVPASSGNQSGTDSIEAAIDS

SEQ ID NO: 135759 - protein, 338 aa, unidentified
MTLYCGIDLHSTNNFISVLNESDKPLFEKRMPNVLEQVLLALAPYRDELQGVVVESTYNWYWLVDGLMDAGFNVHLANTIAMRQYDGIKYTDDLSDARFLAHLLRLRILPEGYIYPKEERAVRDLLRKRLSLVQQRVTQHLSLQSHIARHTGERLSAVKIKQLTREDLQELLTEPNVYLAAEANLSVMQSLSETIEQIEQSVLEQCRTRSHFKYLTSIPGIGPILGMTIMLETGTIRRFPDAGHFASYCRCVKSEKLSNGKRKGSGNRKNGNKYLAWAYLEAAVKAARFNAEIKAYYQRKMSKSHHFVALKAVANKLAKASYYILRDQVPFDVKRSFG

SEQ ID NO: 135760 - protein, 482 aa, unidentified
MKKRNIYQNRSQELLSLFEEAGNSAKVMCVPMDYAKKDHVVMFCNGYGDILRKPFSVKNSPDGVKYLVDQATRSCRRRGIKKDHVFFGGEDANSYAENFVSTLRSKGWIVAGVNAHDAKKQRANLQASTDRLDLMGIATMLLNCRANCCPAQSGIYRNLRTLVRHRRKLVVMSTEVKNRIHGIVDRLFPGFLNEGKTGIVPFTSSSLYLMEDRFSPKQIRRRKREKLIEILKRFGTSKAEETADRLQQYAAQVLHTPADYVDTLQLSLAQHVKHLRCLQESVNQLEKEIAVNLAQTQGAFLTSVRGIGIVLAAGVTAEIGDPNEQKPLNNLVSYSGIIPRVKQSGGPESKAYTVSVAKRCNRILKDCVVKSALHIGLHGPEDLMADYKRRDASGQHADFSMGRRYLRMAMSLMRTSQIYLPPRLRKADATLQERADYYLMTWPYLRGKWKKLGALEAAITKDRPLGLWRQIVQELYDIKLKL

SEQ ID NO: 135761 - protein, 315 aa, unidentified
MTAQGWLGIDVAKHWLDVAWAGERTVQRFTNDAAGVAALVVTLHEQPPQRVVLEATGGHERAAVRALQRAGLAVAVVNPLQVRHFARSTGKLAKTDALDAQMLALFGERMQPEPRPQPDATSQELASLLARRRQLVEIQTGERNRRATSPPRVRPGLEEHLGWLANQIKQIDQVLRETIADDPVTQAKATVLRSIPGIGPIVTATLVGQLPELGTLDRRQIAALVGVAPLNRDSGQRSGGRHIWGGRGGVRAMLYMATVSGIVHNPLLKRCYDRLCARGKPTKVAMVACMRKLVTIANAMVRDGTVWSPQLAASD

SEQ ID NO: 135762 - protein, 361 aa, unidentified
MKCVQRNKLDFSGQNIYVGIDVHLKSWSVAILSEHNVLKRFSQSPEPELLHKYLVSNYPGANYFSVYEAGFCGFWIHESLTDLGITNIVVNPADVPTMSKEKLRKTDAVDCNKLARELRSGSLEGIYVPGTATLELRSLIRMRTLIVKDSTRAKNRIKSLLHFHGVKIPEEFIRCSSHCWSKRFLRWLHNLELSTEYGKKTLELHLEQFIRLRKMLLQETRAIREISRKAPFAKPIRLLSSVPGIGITTAATLMVEIDDIVRFNSAEHLASFIDLVPMCHSSGDNDAVSNMTIRRHFMLRWLLVESAWTAIRIDPAMTMAYTEYRKRMNPQKAIVKIARRLVNRVYFGLKYEKEYVSCIVK

SEQ ID NO: 135763 - protein, 471 aa, unidentified
MRRVIGIDIHRTFGELVFWEDGRLRHGGRVDMTRTALEGLGKTLSATDEVVIEATGNCMAVSRVLSPFVRRVVIANPLQVKAIAQAHVKTDKIDAGTLTNLYAAGYLPEIWTPDAATERMRRLAARRYQVVRHRTRIKNEVHSILHAHLIPKCPHADLFNGRGRDWLKRQPVPEDEQIAIERHVRELDRLGEDLAVLDRQIAESTMDDPVVRRLLTITGVNLTVATGLMAAIGDIRRFKSPQKLVSYFGLNPRVRQSGLGAAHHGRISKIGRSHARAMLVEAAWAAAKAPGPLHAFFVRIRARRGHQVAAVAVARKLTVLVWHMLTKETDYLWVRPSLVAHKTRAMECRRENRRRKAIRLVPPMPTTSRNCVTRRCVSPSKHRRATNASSRLGVRARQIKRRADASIRQGSNEVARRRFQPMHHASPRGRPRVSSLPRSEGKDLSILSDAALPGVLSGKSCMRAHPLQRCP

SEQ ID NO: 135764 - protein, 401 aa, unidentified
MKTVLSVDVAKNKSMIMLMNRDGEILIDTKEIKHNLEDFEKAKEEIKEINPENLTVFMESTGTYHLPVERYFKENGFNTLVINSLTTKNNYDTIRKTKTDKKDCYRLAKLFFVNEVEYHELSKKDLYANLKAMTRQYFYLLQQNVSCKNRYKRLLNICFPELEKIFKSTRIYDDTALNFIKEFPHAEIVKEKRIDALYNNLYKTNGRNLNFYKRLAETIKIVSANSYPGVDKEHKDVKNLSDMAKIVQNNNNVINELRDKMIETAKKSPYYEIINSFYGIGEILTAEILGELGDITRFDSPKQLIAFCGLDPTIKQSGKSINVKGAISKRGNKYARYILFNCSQMVVKLGASNYPEHPVYIYYQNKKAEGKHYYESLTACSTKILRMLYSMCKNNKQFLEN

SEQ ID NO: 135765 - protein, 320 aa, unidentified
MTHPSLPLFVGIDVAKAHLDVFISGDVRSTTFDNDDDGVAELARSLAARAPTLIVMEATGGYQRRLLAELLDRGLPAVAVNPRQVRDFARAMGTLEKTDAVDARLLSLLAERIRPEVRAQPDAHARRFEETLGRRRQLVEMMVSEQNRLQQAQTKGVRQDIQAHLTWLKKRLKEVDRDLDHQVDRCPAWDARVDLLQAQKGVGRVTALTLAAELPELGRLNRREIAKLVGVAPLANDSGTKRGKRSVWGGRASARAVLYMATLAATRFNAAIAAFYKRLVDAGKPKKVALVACMRKLLTILNAIMREHLRPAPEGEITTA

SEQ ID NO: 135766 - protein, 457 aa, unidentified
MYGPFNVASSTRIRFAVSLQLPRATAPSLVRRVEVVRVQVAQDDQEIIARVAALDIGKAEVVCCVRVPGVGPRARRMQEVRTYSTMTRSLLAMADWLTGLGVTRVVMEATGDYWRPPFYLLENSFETWLVNAKDVRHLPGRPKTDRLDAVWLCKVAERQMLRPSFVPPPAFRELRDLTRYRVDLVTTRTAEKQRVEKLLEDALIMMSVVASDIFGVSGRDMMAALVAGERDPKVLAQMARGRMRTKTARLEEAFTGRFTDHHAFLLRTMLARIDGITADIDVVQGRIDEQIAPFAAPVTRLDEIPGVGVTTAQAIIAEIGLDMTRFPTPAHLASWARFAPGIAESAGRKKGNSGTGKGNRYLARALGEAAVGVRGTDTFLGERYRRLAHRRGKKKAIVAVGRSILMIVWHLLSDDDARFVDLGSDYYESRINLNRRTRNHVRELQALGYKVTLEPAA

SEQ ID NO: 135767 - protein, 427 aa, unidentified
MSKVESVSQEPHFAAFVGIDWADQKHVWCLQAAGSEKRESGELEHTPEAVEAWVGQLCQRFGNRPIAVAVEQSRGALVFMLAKYEPLHLFPVPSTMAANMREALYPSGAKDDPRDADLLLDLLLQHRDKLRGLSPDTEATRRVQNLVEERRKLVDEKTEQCNRLTSHLKIYFPQILDWFEHLDTELVCALLEHWPTLEELQKVPPPKLRTFFRKQHCRDQELIERRILAIRQAIPAIRDRAVIEAKSTVVKVIVQLIRSLVKGIADLDEKIEEAAAAHPDFFIFESLPGAGAVIAPRLLAAFGSQRERYGNAGEVQSYSGIAPVTERSGKKKWVHFRWACPKFLRQSFHEWAGHSIAYSVWARSYYQQQRSKGQDHHAAVRALAFKWIRIVFRCWKDGVAYDESKYLASLARRGSPLAALAATAKTL

SEQ ID NO: 135768 - protein, 415 aa, unidentified
MDNAPRTYVGIDVGRRRRRAAILPIGRAMHGWEHAPVLAFTADTDGFREFFDALHAAGATPANTVCALEPTGGYYSQPIFQALKHHGFEVLWVKNQAVHDLRETLYGRRSKTDAEDARLIARLLYLREAIGKEYAFQVAHTGSAPYRNLRLLVELRWKQVQAHRRASNQLMQVLDVLFPEMRQIFRKGTTRPTPLHLLRRFSTVQAIAAASEQNLRHVLVNEARSLRHQTAVSELRRLAQTSVGAREGRDVLELAQGWLIQQLHDLQGSLVDLEARIEAAVEEFPETAILRTFPSMSARRIATLLAGMGAPIDAFPNDRALRKQWGWYVEIEQSGARTRSRLGRGGYRGTRRELYLMAMQFIKEQTQDNPFRHYYRRLLRRNPTPKVPKVALGPRPCGVQARHGDVRMHATPRTL

SEQ ID NO: 135769 - protein, 419 aa, unidentified
MKVEYGNVAEDAVWAGVDTRAATNWLSVVDARGSELFSGEFAADPEGYRKLCDEIRRLGSPVAAGVECTGAYGAGLVRAMAAYGIACYEVITPGRPRRGPGCDKDDAADALRAAKQALSGENLAVPKSQDGWVEEVRNMTVAREELVKQCTSLANLALATVRKGPDEIRARLERLGTAKMMGVLAGWDEAEADPICDAVMFSLAALGRVWAEARRSARLLEERIERTLKAGNPALASMYGCGPISAAMLAIAAGDNPERMGSEASFAALCGVSPIRASSGKVERHRLNRGGNRNANKALHIIAMHRMRTDPRTTEYVERRRAEGLSDREIRRCVKRYIAREAYRLIMHPYDVPIEGKGPEMRAERIASGVSQKDAAIALGVTASTLCDLELGHHQFRELALRYRQWIDDGFPLEAGIAS

SEQ ID NO: 135770 - protein, 350 aa, unidentified
MKGTAMEPKTSTTQLYCGMDLHSNNVYCAIIDQSGGRRAKKRLPLDIERIINYLEPYRGELKETAVESTYNWYWLVDGLQEAGFHVRLANPAAMSQYSGIKQTDDQSDAFWIAQMLQLGILPEGYIYPKQLRPVRDMLRRRRLVIEQRTQTLLCLQSMIARNTAKKVSVTNLKKWTPKEVKTCFEHPHLKQTASSMRKMISTQDDVIEYLGVQAEGMVKLSQSYRRLLTAPGIGTVLGVTIMLETGPIERFQSAGCYASYCRAVSSSRTSNDKKKGGNNKKNGNKYLAWAFVEAANHAQQHYPQIRHWFDKKKSATNRIVAVKSLACKLSKAVYYILRDDTEFNMNKMFG

SEQ ID NO: 135771 - protein, 389 aa, unidentified
MSHSTPESDRIMIGIDPHKASWTAAAVGPGLQPLATVRVPVGPHGYRDLRRFVARWPDAIWAIEGAGGLGAPLAARLSADGIAAVDVPAKLAARVRVLSTGHGRKNDDADAISVAVAALSAAGLRTVTVDEEVTALRALVEHRDDVVKTRTQTVNRLHVLLTQLIPAGAPRQLTADTAAQLLRTVRPRSLGPRTLRRLAADLITEIRRLDRRITVANTEIADAVQASRSTLSELRGIGNLTTGKILARVGDVHRFRSAAAFASYTGTAPIEVSSGDVVRHRLSRAGDRQLNCCLHTMAITQLQRDSPGRVYYLRKRADGKSHKEALRCLKRRLSDVVYRCLIRDADPQNGAGPRGHQGATTNSSATGSTPTAGSSDKSLPGPATTDSTT

SEQ ID NO: 135772 - protein, 449 aa, unidentified
MKTEKQIRDLQLAIIQPHTAAIDIGSMLMMVAYSDSQGNQCLLETDGFTQSLESLAETLKSEGVKEVAMEATGVYWMSLYEVLEQKGLHVTLINPRHFKNADAQKTDVKDCQWIQQLHAHGLLRASHIAPELFRELKGYLHERNVLRNQKSDTLNRIHRILTLMNIKVQHLISDMEGVTGMKLLRAIASGKEEPEELLSLINTDRLKAGKEELLKSLKGIYKQQQVIILKHSLEAYDFFLKQMKQYEQLIEEVLTKMLPIDETGNKPKIAKKKSHVRKNQYGINLKSYLEKITGTDITQVDGMDEISILEIISVTGVDMSKWRTAEHFTSWLNLCPRLKVSGGKTLGHQKRLTNNKATQAFRIAAQTMWKHKGALGNLYRRLAAQKGSKKAVKAIARKLAVIFYNMIKHKIPYDKSRLEQNAEKRKARRIIYLEKEAKKYGYIMQNIVA

SEQ ID NO: 135773 - protein, 324 aa, unidentified
MIDAILGIDVSKNTLDVSISSCTKVRTKSFANSSDGWHHLLDWLIAQKIQRVHACLEFTGRYSLGIAYSLYEAGHVVSIINPAQIRDFVRTKLGRNKTDGIDASRIREYCELFKPSPWAPPSEAHRRLGELQTIRAGIIAGLTEWKNRKNSGIVDTEAQALADATILHFTSQLGAVDKAIALTIDNDSDLRSKRDLLLSINGVGDTLAGVVLAELPGPDVLRSSGEVVAYAGLNPRQHQSGTSVDRATRISKIGNAVLRAALYMPALSAMRYNPVIVALVTRLKSRGRLKPKQIVVAAMRKLLVLCFGVLKTGKPFDPAIAMGC

SEQ ID NO: 135774 - protein, 404 aa, unidentified
MNSVGIDVSKGKSMVAIMRPMGEVVQKPFELIHDNYNLKSFALAVAELGSDTKVIMEATGRYHEPIADVLTRIGIPVCILNPIVIKQSGAGSVRKVKNDKKDALKIAKYGVDNWSNLRHYLPMDTIRQQLKLFSRQYNIHMKTATALQNNLISLLDKSFPNANDLFSSQAKDNGHQKWVDFVLTFWHSDIVSEMSLEAFTQRYHEWCKQCGYNFSHAKAKSVHEATRRHFTTLPQSDGTKILITSAVEGLMAVMKQRAAVKKEVINLAQQLPEYDCVLSMFGVGEITAAQLMAELGDVRNFANRGSIVAFAGIDPEVSQSGNQNRESNSSSKRGSPHLRKTLFQVVSTHLKRSPVDEPVYKFLDKKRSEGKPFYVYMTAAANKFLRIYYAVVKAHLNSLSDIDY

SEQ ID NO: 135775 - protein, 338 aa, unidentified
MDHFVGIDLHSNNSYIAVIDTDNNRTFKKKARNNLSEIMKHLAPFEKQIKGIVVESTYNWYWLVDGLMDNGYQLHLANPSAIKQYEGLKHCDDITDAFHLANLLRLGILPEGYIYPKQERPVRDLLRKRMHLVQHRTAMILSFQNLITRNFGSKMHVTTTNKLTEEDLEDIFEYEYLILSAKASISTIHFLRSRIIPLEKAIEKAAKLKKEYQLLKTAPGIWTILALTIMLETGPIERFKKVGNYASYCRCVQSNRFSNSKSKGKGNRKNGNKYLSWAYVEAANHALWNYEYVKRYHQRKTAKTNNVVAIKAIAHKLARACYYIIRDQKEFDPLKAFA

SEQ ID NO: 135776 - protein, 387 aa, unidentified
MYFVGIDISKFKHDCAIVDELGDVITPSWSFQNDYEGFSLLRELLGALDGEKKIGLESTGHYGQNLKLFLENNGFSFMEFNPLLINRFVRSKSLRKTKTDSIDALMIAQYMMTVEYKPYPPSFYTLEKLKSLTRFRDSLIRQRSRQMVELTNILDKVFPEFKPFFKGRFSATALYILSHYASPEKISNMNSKSYEPLRRLSRGRFSMVDFVELKTLARNTVGSAHDYLLQEMEITIDIYDQLQSKVEEIELQINDCVLGLAPPMLTIPGIGVASAAVILAEFGDLSKFSSPSKLLSFAGLEPGYFQSRISESTGKMVKHGSSHLRYAIMNCAQTVINNEPTFAAYYAKKRAEGKEHRVALTHVAKKLLRVIYTLQTKDLSYNPDLVR

SEQ ID NO: 135777 - protein, 405 aa, unidentified
MDIQPIFRCAVGMDVHLSTLSVCVIVAEPGGEPEVHRQQFGAFQRDRRAMADWIAGFQPDTVVMESTGIYWKSPYAALEKVGIRALVVNAQHVKKVPGRKTDTSDAEWLAMLARAGLLRGSFIPPASLRNLRQLSRYHHRTTAMLAAEKNRLVRVLSDAGIRLTAVVSDAHGVAARAMIDCLLNGGTPEQALAFVGRLQAPRAELLAALQGELSAHHVFVARMIRQHLQFLETQLADLERQLFDALTPQEAAMQLLLTIPGIDRLAAAKLVVEIGLDMAAFGHAGRLAKWAGVCPGNHESAGKRRAGRTIPGNRYVRAILCEIAWAAVRTTSQFKSRYQSLVMRRGTKKAIIAVAHKVLKTVFVVLSRHVPYHDTTVDYEALLVQRNAPRWLRQLKKYGYLPKAA

SEQ ID NO: 135778 - protein, 341 aa, unidentified
MSNANSYIGVDLHKKTCFITVMNEMGKIKRQTEIKNEKETICEFFKRYNDASVAVESTMNWMPFYENLENMGFNVVLSNPLQTKAIAAARIKNDKVDSRVLADLLRTNFLPTAYIQPREVRDLKELVRQRMNYVDMRTQIKNQIHSVLFKSGISHSFSNLYGKAGMEFLKKLELREVYRRQLDWHLTALGNISVQIKEMSEVIEKTAKADFDCRLLATIPGIGYFNALLIKSEIGDIARFANANKLCSYAGLIPSTYASADKVRHGRITKRGSKWLRKALVDSITSGCRHEGRLAYVYRKLKKSKGTGKARVATARKLCHIIFAMLTDKQPFREFAPVKQR

SEQ ID NO: 135779 - protein, 346 aa, unidentified
MLVIGCDFHPGWQQVCWVDTMTGETEEKKLVHGSGEAERFYRQLSGPALIGMESTGNHQWFLEMVTAAGHELWVGDAAKIRASDVRQQKHDRRDAALLLKLLLDGRFPRIWVPSSEQKDLRQLLIHRHKLVRVRAQVKNELQHLALNQGVQRKQRLWSAAGQKVLNELALRRWGSRRREDLLKLLAMLDQQIAPLDLAVEQAAQENSQAKLLQSQPGVGPVTSLAFVLTMGDVSRFRRGKQVASYLGLIPREYSSGGHQRLGSISKQGNRFMRMLLVEAAQIAVRYDPGMRNEYLHRCHSKAKGVAKVAAARKLAIRLYWMLRTQKPYPQIVRIESSSRVALVGES

SEQ ID NO: 135780 - protein, 356 aa, unidentified
MSYDVKYIGMDVHKEAIVIAVLNGTGKMIMETILETKASSILQFIHGLRGELHVTWEEGTWAAWLYDLLQPQVPHIVVCNPRRNALLKEGSKSDKVDAQKLADLLRTGMLRPVYHGENGLRTLRELARSYQTISKDLTRVMNRMKALYRGWGIPCAGTQVYAARSREEWLSKLPQVGVRRRAELLYQQLDGLQALRREVRPEFLAEGRKHKAAKLLRQIPCIGPIRAARLIALMQTPQRFRSKRQLWTYSGLGIETHDSAQYRFVSGQLQRSRKPQQLRGLNRNHNHEMKEIFKSAATRASCSRGPFHDFYTGLLAKGMRPEMARLTLARKIAAITLTLWKKEERFDVEQLKTQAA

SEQ ID NO: 135781 - protein, 324 aa, unidentified
MVAASGRFVGIDGAKASLDVWILLANTHFTVSTTEAGWRWLMTRIGPGPGGPIVLEATEVDHLGLTDALAAAGMPPVIVTPRWTYHFAPSQGTRATTDRCDARLLAAYARRALATVRPLPSATARTLTALIARRSELTKMLTMEQHRRHTADACLHPDLDGHVADLTARRRAIDRELTVVVAGDPFWHRRVAMLRSIPGIGPTRSVPLAVRLQELGDLTRQAIAALAGVVPHARDSGRYRGRRTIGGGRRDVCKALYQGSVVMRTHNPPMRAHYEHLVARGKEPNVALVAVARRSLGIMAAMVRDDLLWQDTKVGQGHFLPIPG

SEQ ID NO: 135782 - protein, 358 aa, unidentified
MAVTGGTRRIVGGVDTHKDLHVAAVVDEQDRVIGTRSFATTRQGYRQMLAWMRSFGELQRIGIESTGSYGAGLLRFMQQSGVVVLEVTTPDKQDRRRRGKNDDLDAQNAAHAAFAGQRTVTPRSRDGMIESLRVLMACRKTAVSARRVALQMIHNTIVCAPDDLRDQLRSMTRMQLVRTLASWRPDLTAYRDLESAYRISLKSLARRYLELHDEIADLDAMIAAIVDELAPNLVARNSIGHTGAAQLLLTAGDNPERLRSEASFASLCGVSPVPASSGKTVRHRLNRGGDRAANSALHIIAIGRLRTDQRTKDYVARRIAEGHSKLDAIRALKRYLAREVFTLITQRRKEINATRIAA

SEQ ID NO: 135783 - protein, 393 aa, unidentified
MRKPKKQKKPINDLSRSLTPLDVNQTLICVIELGKESWLVAGIVPGVERQPLKKLPADESGLLKLLERWRAEAEKTGRKITRIAVAFEAGRDGFWLARWLRARGIEAHVIHAASVAVPREHRRAKTDRLDTQQLIRAFLGWLRGERNHCKMCAIPTFAEEDAKRPHRERQTLVDQQTSIINRIKATLTRLGIRNFNPKLKKAAERLEHLRTPEGEPIPPNTLAELHRDMQRKQLVAEQIKQIEKARLEQLKEAPKAGPNLIVLILMRVIGIGIDTADMLVKEILSRNLRDRRAVARYGGLTGSPDESGKTRREKGLARSGNARVRKAMIQLSWRFLEFQKESALAKWFRARTENNRGSRKKMIVALARKLLIALWHFVRDGVVPEGVALRPAH

SEQ ID NO: 135784 - protein, 355 aa, unidentified
MTRTVYCGVDFHARMQTIAYCDSANGEIQLAQLDHRKDDVRDFYSKLTGQVIVGLEAGGYSRWFEAMLEELGHTVWMGHAAEIRRRANWRQKNDRRDAELILEIMLRGDFPQIHRHSRESVEVLRMLRYRARLVKMRTMISNNLQAIAISSGLSERSRMLSRAGQQRLKNARMTPVIKLQSEDLISLLVPLNERIAKAERWLKEQASTDERVKLLMTHPGVGVLTALGVVHTLEPFNRFTRQRSVVAYVGLEPMERSSAERKRYVGISKAGSRLLRFLLGEAAHTAVRLDPELKRFYERVGKRRGKPKATVAVARKLLIRCWIMLRNNIDYVEFRSRGVEARLARNMDRPSVPVE

SEQ ID NO: 135785 - protein, 459 aa, unidentified
MARSRRAPEEIPDVEYEQVLERVCAIDVAKEFGQVCVRTPRADGKRASKVFAVDAITGDILRLGESLLEQGIEMITLESTSDYWRIFYYLLEGCGLRVQLVNARDVKHVPGRPKSDKHDCVWLAKLTERGMLRPSFVPPAEIRVLRDYTRTRIDLTRDRTRHWQRLEKLLEDALIKVTTVASKTTTVSVRDMIDALIRGERDPEVLADLARGVMRAKRRDLVRALDGRFDEHHAELATILLGQIDSLTAEIDRLTTRIEQLVDQLPTPGHPVDPDRAPTPTPNPGNAQPATAPSQPRPALQRLADIPGIKLAAAEVILAEIGLDISRFPTPEHLCAWARLTPQLIQSGNKRRGGKTSKGNPYLKGVLGAAAASASRTNTFLGERYRRIVKRRGKGKALVAVARSILVIVWHLLANPDADYRDLGANFYDSRIDKERRKRQLIRQLEALGLQVTLTPAAA

SEQ ID NO: 135786 - protein, 345 aa, unidentified
MMIIGCDFHPSWQQVSWLDTETGETGERKLVQASGDAERFYRQVAAPALIGMEATGNCHWLADLLSELGHELWVGDGAQIRASYVRQQKTDKRDAAHILKLLVEGRFPRIWMPSSEVRDLRQLLLHRYKLVIMRARVKNELQHLCLNKGVQRKHKLWSAAGQQILRELPLKPWAGRRRDDLLKLMAMLDQQIEPLDQAVKAEAQRDKMALLLQTQPGVGAITALAYVLTMGDVGRFPRGKQVASYLGLIPREHSSGGRQKLGAITKQGNRMLRMLLVEAAQIAVRYDPQFRRYLHGCYQKPKAVAKVAAARKLAVRLYWMLRTQQPYPAVVRIESSPRVALVGAS

SEQ ID NO: 135787 - protein, 531 aa, unidentified
MGAGKLGRPRSGAFEPAPEFGLRGLEISVLVSARCPNSEGIPISRVDAFHSAPAQRPLEILEESPMRQIEISTRRERRAATRAAARGEVFPLVRPNAAGIDVGSRVHYVAVPPELGEPVRAFDCMTADLREMAIWLKACGVRTVALEATGVYWIPVVEMLEDHGFEVYLVDARQTRSVSGRKSDVQDCQWIQRLHSYGLLAPAFRPEKSITVLRSYWRQRQGLVVSCSEQIQLMHKALEQMNVQLHKVLSDVTGQSGLRIIRAIVAGERDGEKLSALCHRGIKCSRGQVARALEGHYRPEHVFALSQALEAHDFFQRQLQACDQVLEAEIATVPSRHTEPNRQHPDRPPRAKRRKNQPYFDLRAELHRLAGVDLTRVEGIDAMTAFSVLSETGMNMTRFPSEKAFASWMHLCPNNRVTGGRVRSRRVMPGTNRAGQALKLAAQSLHHSKSALGAFFRRMKARLGPQKAITATAHKLARLIYRLLKYGDAYVTQTEAQYQELTRRRTLRELTSRARRLGFALVDTASGEVVS

SEQ ID NO: 135788 - protein, 386 aa, unidentified
MDSKKYIGMDVHKEAIAIAVVNSSGKLVMECVIETKAITILDFLKGLRGSLHVTFEEGTWAAWLYDLIKPHVTELIVCNPRRNALLKEGSKSDRIDARKLAELLHSNMLRSVYHGEHGVRKLKELARSYLAISKDLGRVMSRVKAIYRSWGIPCAGKQVYAPRYRSEWLGKIQEAGVRRRAEFYYQQFDALRTLRQEVRRELLAEARKHEARRLLRGIPFIGPIRTALLIALMQTPHRFRTKRQLWTYSGFGIETHSSAEQRFIHGELRRAKKPASIRGLNRNHNHDLKNLFKGAATVAAAKAGPFQEFYDALVAKGIRPEMARLTLARKIAAITLIVWKKGVRFDAKHLKPQSLWKSVPSLGFLPVVASRVLETFGFEGESQLVS

SEQ ID NO: 135789 - protein, 414 aa, unidentified
MRVYHNVCCGIDVHKKSVTACLMWGPADREPQYEIRRFGTMTRDLQRLAEWLEQAGCEVATMESTGSYWKPVWNVLEGRRMKLILANAKHVRALPGEKTDRKDGKRLAELMRHGQIRPSFVPPQAILELRDLTRYRSKLLAAGGDERRRIQKVLETANIKLGSVLSDVFGVSGQRMLQALVDQDAVDTQKVAQLAHWSLKPKMDALQQALEGKLTPHHRFLIELSLNHMRAVEAQVLRLDEEIQRRLKAYQEEYALLQTIPGIKEAGAARILSEIGADMSAFADGDHLSSWGGVCPGNNESAGKKFQSKIRKGNQHLLSALTECSWAATHKKDCHFRRKYYRLKARRGSQRAIVAVSHAMLKCIFIVLSQRRAYEEPKPASLTDPQKRRKVSSLCRQLRELGYQVELKSKELNG

SEQ ID NO: 135790 - protein, 317 aa, unidentified
MSKRITICAGIDIGKRKLEVALQAGRERLEADNNRAGHQAVSDWLRRHRVKRVGIEASGGYEQDVAAELRRKGLVVVVFQPAQVRAYAMFHLQRAKNDKIDAALIARCTADAKKIHAPPDPRLAPFAHDLTLLDQITDTIAGHRNRRETCRDPRIRQFWKEEIARLKKRQRTELKRLVAAIRQYPDLAQRLDLINSVDGIGLPTAVAILVRMPELGRITREQAAALAGLAPYDDDSGDHVGVRHIEGGRKRLRIALYCAAVPASFRWNPQLIALYQRPIAAGKQHKRALVACARKLLIFANTVVARGTPWISQPNPA

SEQ ID NO: 135791 - protein, 474 aa, unidentified
MGKRSGGNGMTRGDRRRNARRERLRGLLPRDGVVIGIDLAEDKQALGVIDHDVRVLARKTVKVKAFRLGEALDWAVAQAKVKGFAAVTVACEPTGPRWLQVQRLCAERGLPLVCIQPLISHIAREQQDYTPHKTDESDCVMIARLAVELHCYIPEELDEAWAHLRHLGRRRAQLITAATASAQRIRDFLSVAWPTVTETCVQPLESKTWLAAVQLVTGRCGADPGKLAAMGPEAFTALVRSAVGSWGGKKAWGTICGRVFAALTDTEGVVAWSRRGLLRRCADELGDLQRTRAQLRAVEADMVMVLGELGLSRLGDIPGLTAVGAAAILAETGDPRRYDSSSSLVKHAGLAPSDNASGAFYGEAHISRRGRPGLRLTVWRAVWPMLRFNPVMAAKYQAMTSAADAAALAAGTQDGARTRPATAAAAAARARRAKARVACAASLLRWIYTIVVHDTGWDPAAASGAAARHQAEAA

SEQ ID NO: 135792 - protein, 344 aa, unidentified
MTYYAGLDVSLRSTNICVIDDQGEVVTESKTDAEVADIVSFLDELDIEISQVGLEAGTLTQYLTYGLQFAGFDVVCMEARQVKAALSAMRNKTDKHDARGIAQLLRSGWYSRVHIKSMESHRVRALLASRKAVLAKCIDLENEIRGIFKVFGIKLPPRLGHGAFDPKVRPLIEADETLSLSLLPLLEARLMLYQTFRVLDNRTRHLAHDDPICRRLMSAPGVGFITALAFKAGVDDPARFKHSRTVAAHFGLTPRRFQSGELDLEGHISRCGDANVRSTLYTAANAMLTRSSKWSSLKAWGMQLAKTRGHRRAVIAVARKLAVILHRMWIDDTQFRWGTEGVRS

SEQ ID NO: 135793 - protein, 337 aa, unidentified
MPEVTTIGLDIGKRVLQAHGADATGHAVLQRKLRREEVLAFFAKLPTCLVGMEACATAHYWARELRALGHEVRLIPPAYVKPYVVRQKNDAADAAAICEAVTRPAVRTVPVKTAEQQGARTVHRTHELLSRQRVTLINAIRSHLAEFGILAPAGPQHIGRLIERIADPATPIPGAARGALNVLADQLVALGHQINRLESAMGRRCREDPDGARLLTIPGIGPITGSAILAGVPNIGGFRSGRDFAAWLGLVPRQSSSGGNERLGRITKMGDRTIRRLLVTGALSVIRWGRQREDFAERWIGKLMARKPLKLAAVALANKMARIVWAVLTRGEAYRTA

SEQ ID NO: 135794 - protein, 337 aa, unidentified
MGGDSTVVGLDTHKVAIHVAMLLPGAIQPVQWQIANEPAAVRHLARKLRRAAEGEVRCCYEAGPCGYALQRQLEAAGVSCTVVAPSLIPVKPGERIKTDRRDARKLAELFRAGLLTAVAPPTAAEEAVRDLCRAREDAVEDRLRARHRLGKFLLRRGLIWRGGKKAWTQRYRDWVRGLRFEDAADQAVVATYLLAIEQVEERVRTLEGQLETVAQAEPYRERVGWLRCFRGIDTVTAVTLLAELHGFQRFTTPRALMAYLGLVPSEHSSGEAQHRGGITKAGNLHARRLLIEAAWHYRHPAPAPARATRTPARCGRPRATAPASPLQPAERARQDGQ

SEQ ID NO: 135795 - protein, 339 aa, unidentified
MVEGTVGSHHKEGSSKMSEHITICAGIDTGKYKLDVAIDRCVDQLQVDNTADGHAALSAWLKWRRVKRIGIEASGGYEQGVVAHLRRDGFVVVVFQPAQVRAYARFLLQRAKNDKIDAALIAACTAAIKKIHAPPDPRLAPFAARMTLIEQLTDQIACCKNYREGHREPQIREFWKKEIARFNKQLRVELKSLAAAIRQHRDLAERLDLIESVDGVGLKTAVAILVRMPEIGRLTREQATALAGLAPYDDDSATHLGIRHIAGGRERLRGSLYKAALAAAFHWNRQLIALYRRLTKAGKPHKVALVACARKLLIFVNTVVERGTPWVSARPLSVTGNPA

SEQ ID NO: 135796 - protein, 353 aa, unidentified
MTEITTVGVDLAKNVIVVCAADGAGRTTVFRQFSFRGFGEWAANLPPCTLGMEACSSAHYWARRLSEYGHTVRLIAGELVKPFRKSKAAKNDRNDAEAILTALRQPNMRFVAVKSVESQAMLAWHRVRRGFTTERTALINRARGLLAEFGVWLGQSPNALLRALPALQSDERLPPRFRPLLAQMHEHLRALDARIDQCEAEIFTHAKQNDDAQRIGAIVGVGPITSSAIVATVGRALDFKNGRQLAAWMGLVPQQMSSGGKERLGVITKRGDTYLRSLLTQGARSAMRSAQVRAPERRSRLEQWMIELARRVGYHKALTAVANKHARMIWAILAKGENYDPNAWQRYEHRQTA

SEQ ID NO: 135797 - protein, 359 aa, unidentified
MTQYKRIGIDTSKAVFTLHGIDQRDQPTLRINLRRSQMITFFRKLPPTEVAMEACCGAHYWARELTALGHAVLLIPPQYVKPYVKRGKNDRNDAAAICEAAGRPGMHFVPAKSLSQQAQGMVLKVRDTLIGQRTLLVNTLRGHASEFGVVAGKGVGRVGSLLAAIEQDATIPAEARDMIALLGQQIEHLNKKIKALEATLNATHKTNAVSQRLATIPGLGPVTALTLATEIDPAAFASGRHMAAWIGLTPKEHSTGGKQRLVGISRAGNERLRSLLVVCATSVIKAATMPASKQMTGWLRGLLQRKPRKVAAVALANKIARVAWAVMTYGTVYRRSPTDSEVSFCGMKRRIRLVPHQAA

SEQ ID NO: 135798 - protein, 451 aa, unidentified
MWALWNACPYEYGFDCSGRLAPQLFISSRNELDNARTFHFAQVSVMGSCGDRTAAISRRHFHMPYHVGIDVSKWKHDVFAMDQDGVVALKPFQIGNDSEGFSALLKSLETLGEKSEVRICVESTGHYHRAVCGFLADSGYAPSVVNPYLVSAFAKGLSLRKEKNDRADAMALARYSLEKKPAPGDAQPDALDQLKSLTRARDKLVRERSDKIVVVTNCLDRIFPEFTRFFAVKSTVARLILSKRPDAESIASMTPAFTERVRKASHRASAMKIQSLKEAARSTVGRPDPSASAIISATLPVLDSIDGAIDEIEGKIKAIMSGVDERVSSIPGISVVSAAAILGEYGDISRFGNPGKMLAFAGLESSHSQSGQSDNHGRMVKRGSPHLRYVLMNVAITAKNYNAVLAEYYNKKHVVEGKKRRVALNHVAKKLIRIIWKLQTGRIDFDSSKLR

SEQ ID NO: 135799 - protein, 342 aa, unidentified
MISTSKLINKFMKEQQIIIGIDVSKLTLDACVWDGQAFHSRRIDNSLKSIASFLKQLQKKFKDTPIKIAIENTGYYNWPFYEAVKLLQANVYVINPLHLHKSLGMVRGKNDQVDAQRIAKYLMLHIHDLKPTVLPRTQIRHLQALVAQRKRLMDIRTKLMVPAKELELLGNKTITEQVMKSTKQAVKSIDIQIAVVEKQIDSLIVSDEDMQQQFRYITSVQGVGKVLAWAMIIKTNEFKSINNPRKLACFAGVVPFEHSSGTSIQRRPKVSYMADKTLKKLLHLAAMRAIQLNGDMRNYYMRKVEEGKNKMSALNAVRNKIVARICSCVNNNKFYTPDLNLS

SEQ ID NO: 135800 - protein, 323 aa, unidentified
MTAFLGIDIAKDSFDVTLLLEPGGKHRRQFTNNATGYKQLHHWLQHHTAALLPACMESTSCYWEDLALYLHQAGYPVSVVNPARIRGYAISQMRRSKTDPIDADVIADFCRTQQPSSWTPPTQAQRKLRALVRHLQALKKSRTQQSNRLATCADSEVRASVETILHTLESEIGRMQQRIRDFFAEHPDLSQKREWLKSIKGIGETTATHILAEMYDLEHYENAKAAAADAGITTSHYRSGTSVRRRSKMSRMGKAAIRAALYFPAITAIEHNPVVKQLAKRLEAKGKLKQVIQVAAMRKLMHLAYGVLKNKQMFDPNYATAVG

SEQ ID NO: 135801 - protein, 354 aa, unidentified
MPQPIEVIGGIDTHTDVHQAAVIDTIGRHLATEAFPTTPAGYRRLLEWLRSHGRVLVVGMEGTGSFGAELARYLHANQVTIIEVDRPDRRARRAAGKSDPVDAYAAATAVLSGRAKGTPKHRDGSVEAIRGLRVVRASAVKARTQTINQIKSLIITAPAAVREALRSLTTTELIRRLAASRPGADLTDPATAVKLALKRLAKRYRHLSEEIADADADLRVLIARTAPGLLALPGVGTETAGQLLVTAGDNPDRLVSEASFAHLCAAAPVPASSGRTDRHRLNRGGDRQANRALHTIVLVRMRHDPRTRDYVARRTLEGLKTKDIFRCLKRFVAREVYHHVTSAFSSTPSTSPAT

SEQ ID NO: 135802 - protein, 343 aa, unidentified
MQAVTTIGLDIAKSVFQVHGVDAEGNVVIRRQLKRRYILAFFQKLPPCLVGIEACASAHHWSRELQALGHTVRVMPPAYVKPYVKRHKNDAIDAEAICEAVTRPNMRFVATKTREQQSCLTLHRTRHLLIRQQTSVINAIRAHLAEFGIVAPVGRNGVEQLLGVVADASDKRLPELARASVAALGDQLRALKAQILQFDRLIMAWHRSSEASRRLDDIPGVGPTLATALVATVADPRAFRSGRNFSAWIGLVPKQHSSGGKDRLGSISKRGDRYLRGLFVAGALAVIRYAKIHGTKHRPWLTALLARRPTKIAAIALANKIARMAWAMMARGERYKEPVALTA

SEQ ID NO: 135803 - protein, 351 aa, unidentified
MSHKTAATVAHTIGIDTGKNTLHLIGLDDQGAIVLREKIARGRIAARLANVPRCLIGIEAGMATHYVARELGALGHDVKQVPPAYSKPFRQGHKNDFRDAHAIAEAVQRPSTRCVPVKTDDQLDLQALHRVRSRLVGQRTAVINQIRGFLLEHGIAVRQGLRFLRQQLPDILAKRSDVLSPRMIRIMEDLSGDWRRLDERIEHITKEIEVLADTDVNCGQLMTVPGIGPIVASAMVAAIGNGAAFARGRDFAAWLGLVPKQMSTGDRTILGRITKRGNRYLRMLFVQGARAILLRPKSWAKHSFGPWLTTAARRLHRNILTIALANKLARIALSVLIQGRSYETRIVPAAA

SEQ ID NO: 135804 - protein, 312 aa, unidentified
MATSNYVGIDVSKDRLDVAVLGEKQEKQVNNTREGITQLVQQMQALQPELIVVEATGGYQRAMVEGLFLAGLAVAVVNPVRVRQFARACGLLAKTDKLDAQVLAEFGQRVQPRHYESKSEAGKQLSALLVRRRQLDEMLKAEQNRFRTISLSLKASVERIIACLKEEKKTLDGQIQQFMKEQEDWQEPTEILGSAPGVGKVTTATLLAELPELGKLDRKKIAALVGVAPMNFDSGKKRGYRKTKGGRSDVRSVLYMSTLVATRYNPVIQAQYQQLLKRGKEKKVALTACMRKFLTILNAMMRDRQPFRCAAM

SEQ ID NO: 135805 - protein, 379 aa, unidentified
MLNKIRLWLMVWTAPYGIDCARMRLSRSHTREPSVSEIIRIGMDTSKYIFVLHGVDAEERTVLRKRLSRKAMLEFFAKLPPTLVAIEACGASHYWARELAKLGHEVRQIAPQLVKPYVARNKNDGRDAEGLCEAVSRPRMRFVPTKTAEQQAAVMLLGVREQLVTRRTQLANAIRGHATEFGLIAAQGLDKLASLLERIAQDEGLPELARGLFTMLGRQYEQVQVELKAIEAKLMAWHRADATCRRLAEIPGIGPVTAAALVMKAPDPHAFRSGRLFAAWLGLTPKDHSTAGKTRLGTITRAGDETLRSLLVVGATSVVKLAKGPKQRGPRWLIELLKRKSPKLAAVALANKMARIAWKLMTTGESYRARIDAAAPTLA

SEQ ID NO: 135806 - protein, 414 aa, unidentified
MFAVGVDVSNGRSMVAVLGARRSVVVQPHEVPHTADGFAELAARLHALDGEVRIVMEHTGRYYESFAMSMYRAGFFVSAVNPLAIKGYQEGISVRKVKTDKADALKIAQFAIDKWEILPHYTPMDTIRYDLKTLHRQFQLSSKTKTALNNNLIALLEQSYPGANRYFDSPVRPDGSQKWVDFVDTFWHVDCVARVSRKAFVERYQKWCKRHGYNFSEVKAVEIHEDARQRFPLVPKSDTCKLMVREAVAQLNAVSRTVETYRAEMDRLASQLPEYETVMAMTGVGKSMGPQLIAEIGDLRRFAHQKSLVGFAGTDPIKDDSGDKVSDSKPSSKRSSPYLRRTLFVIMTILLQLQPPDDPVYQFLDKKRSEGKPYYVYMTAGMTKFLRIYYGKVRDCLKEKGLWEQPNVDEVNPV

SEQ ID NO: 135807 - protein, 343 aa, unidentified
MTFVGCDLHTRQQQVAVLDTTTGEILEQQLPHEGTTVEDFYAALPRPVTVGIESTGYAIWFHTLLQRLGHTVLVGDAAKIRAMVVRKTKTDRRDALHILDLLRHDRFPSIWIPDPATRELRALLMHRLRLVRIQTMLKNGVHALALNQGLARGSKLLRRAGLAQLQALPLPPYTAQRRDQSLDLLGTLRTHLDHLDDAIAAAALAHPDAPRLLTHPGVGPVTALATVVVLGTVSRFPDSKHVVSYVGLAPALNASADKYRLGKITKQGSALLRFVLGQAAAHAARLDPDLTRTYRTLAQRRGRSKAKVAVARKLLVRLFIMLRDHIDYDEFRRRGRAPAVAPG

SEQ ID NO: 135808 - protein, 366 aa, unidentified
MIIIGVDSHPEFQQIALLNTTTGEVEEKRLAHPDEAEKYYRALASAGETVRIGMEASGHARWFERLAAELQFDLWIGDAAEIRAKRGRKQKTDRQDAQHILKLMRKDDFPKIWVPSWENRDLRQLLWHRHRMVQARTRVMNQLQAVALNEGLHCKKKLWREHGRQQLESFALAPWASRRRRDLLDLLDRLNPAIADLTQAIEREVENYPAAQRLRTHPGVGVLTSLAFVLILGDAERFRCGKQVASYLGLVPLEDSSGNRRRLGHITKQGSSIVRFLLVEAAQVTVRSLPEWRSKYFHLVLRRGRKIAKVAMARRLAVQLFWMMRKEWDYEQLKKFGSHAGQPGHRDGMIVVRDRRDAWVGPRFRT

SEQ ID NO: 135809 - protein, 344 aa, unidentified
MDHFGGLDVSVKETSICIVDDSGRIVKEVKVASEPEALLKVLGNPTYRFKRIGLEAGPLSQWLFSALAEAELPVICVETRHMQAVLKAQINKTDRNDARGIAQMIRVGLYRPVHVKTLRSQKLRMLLTHRKLLQSKAIAIENDLRGTLRNFGLKVGMVGKVRFEARIQELVENIPDLAVLVEPLLIVRRVLREQIVILHRRLLAIVREDEVCRRLMTTPGVGPVVALTYRATVDVPARFRKSKSVGAVFGLTCSRYQSGEIDWSGKISRCGDEMMRTMLYEAAQSMMHSKKWSWLKAWAMQIARRRGIKKAIVALARRLAVIMHRIWVDGTEFRWTREQAAAAA

SEQ ID NO: 135810 - protein, 417 aa, unidentified
MQTNMQHPELTRTYVGCDSHQNTHTFVFLTCFHKKLGEVTVGSAPSEFPKFLKQAKKYLQPGTEFVFAFEDCSAYGRAFVKFLVERGYLVKHANAVLVAGMRSTSTASDYTDAHDAECCAKVLINEFDKLPHANPQDKYWTLSTLVTRRNDITKNNVGVKNSLHHLLAENYPHYKTFFSSIIRNSALAFYEAYPAPHYLDNVTVETLAEFLHSASKGRLSTTKATLILQTVERDKVQSTEYQDTRDFNIRSLIRQIKSNLAELAAIDCEIEKMLAHFDYPLTSIKGIDTLTAAKLISEIGDIRRFKNAKALAKYSGVSPVTFASGMTKLQMANERGNRKLNEIFYRIALTSVMPIGSKGALINPIFRDYYLKKISEGKLKNQALKCVQRRLVNIIFKVMKEQRPYINPELGYVKEVA

SEQ ID NO: 135811 - protein, 349 aa, unidentified
MKPTSQMTLDVYFRQCVGIDISKDKFTACLYMYDRASDVGCCTKSIDFANTKSGFNQMVRWSRKEAVKSHPLTYLMEPTGVYYERLAYHLHKIGQTVYVVLPNKARKFCESEGIKTKTDAMDARCLALMGCVSRKLKPWSPPAAIYRELRQMTRFHADLCQVRASVANRMEALDHMEGTAKSVHKNCEKLLQEIDTLMEKNGKAIMKKVAEDKELEAKVKRIATVKGLREPTIVCVIAETEGFHYIENRKQLVGYAGLDVKAEQSGNEDPKHRISKKGNANIRTALYMPALVAVRYNRQIKAAYGRICQKHPNEKMIGVTAAMRRLLLLIYTLWKNGEEYDETRGTMPL

SEQ ID NO: 135812 - protein, 412 aa, unidentified
MNHLHIGIDVSSADLVVCLLDHQGQRLDNVQTMENSLPGAEKLESLILEIAKKIRVDQILIGTESTSVYDLHIADFLASSVLLKPLNTSLFRFNAKVIANFKKAYLEENKTDPGDAFIIADRLRFRKPDHPYTAHLPHLPLQRLTRYRVHIVDSIRKETQYFLMHLFLKYNRFSNMEIFSNTMGTTSISLINDFSCEELASMSIEEITSFIIQKSKNRCRDPHKIALTVQRALRESYRLRPTMAQSVDLILSGIHQNIRALKASLKQLNKAIEDQFKAFPNTLTSVAGIGPVFAAGIYAEIGDVSRFAHDSQLAKFAGLTWKISQSGQFTAEETRLTGRGNQFLRYYLCEAANSLRVHNEEYKTYYSKKFDEVPKHRHKRAIVLTARKLVRLVFALLAKKQLYDTSLPADRS

SEQ ID NO: 135813 - protein, 344 aa, unidentified
MVYAGLDVHKRCTQICLEDENGALVERRILTERHRLLEEFGGKPPMRILLESATESEWVARCLESAGHEVIVGDPNFAPMYAQRSRRVKTDRRDARALMEACKLGAYKPAHRCSDVHHRVRARISARDLLVQTRTKCISLVRALLRHEGIKPERKSSATFAQRVREIGAPDALASELAPVLDLIDALNEKIRRADERVSEIARDETHQRLMSVPGVGPVTAVAFIATLDDPKRFRGPKQVRAYLGLVPREHSSGEKALRGRITKQGSSRMRRLFVQAAWAVLRSRPTPEAEPLKRWTTNVAGRRGRYVAIVALARRLAGILFAVWRDGTSYRAPGPLGGGEVTT

SEQ ID NO: 135814 - protein, 344 aa, unidentified
MIEEDGIRHVVGGVDTHKDLHVAAVVDERDLVLGTRCFATTRQGYRQMLGWMRSFGELRRVGIESTGSYGAGLLRFAQQAGIEVLEVTTPDNQDRRRRGKNDDLDAQNAAHAAFAGKRTVTPRSRDGMVESLRVLAACRKTAVAARRVALQMIQNTIVCAPDGLRDTLRAMTRMQLIRTLAAWRPDLSAYRDVEAAYRISLRSLARRYLELHDEIADLDAMIGAIVDELAPDLIARNSIGHTGAAQLLLTAGDNPERLRSEASFAALCGVSPIPASSGKTVRHRLNRGGDRHANSALHIIAIGRLRTDPKTKAYVAKRVAEGHSKLDAIRASHGEVQVKGVVLG

SEQ ID NO: 135815 - protein, 418 aa, unidentified
MKPWAELTHFVGFDWASDHHDVVVLDRHGQMAADFSFEDTAAGWASFLKQMGPFAAPAVVIETCQGPAVERLMELGLTVYPINPKNAQRYRERKVSSGAKSDHLDALSSADALRTDGHAWRALQLEDPIIVELRQLCRDEIGFIEQRTAFVNQLREGLRQYYPAALEAFDDWTHESAWAFVEKFPTPQALLRAGKREWEKFLHVHKLYRPETYEKRLACFARATEFCGSPPTTAAKKLLAVTLCKSLCALELQLKEYRKQIDALFRRHPDHDLFGSLPGVGDKIGPRLLGEVGTDRGRFDAADALQCYGGTAPVTYKSGKSRRVYIRRACNKVLRSTVQFLADHSRSTCAWAQAYYQKKIEEGKAHNTALRCLGQRWLKIVWKMWQTRTSYDSELHQRNQLAHGSWVLKLLPSVQPAQ

SEQ ID NO: 135816 - protein, 353 aa, unidentified
MSQEKYIGMDVHQATISVAVMDAQGKLIMECLLETKAATIVEFIQGLQGTLSLTFEEGTSAAWLHDLLKPHVSRLVVCDPRKAALLKDGNKSDRIDARKLAELLRTNQLKPVYHGEHGVRTLKELGRSYLTITKDVTRVMNRIKALYRSWAIPCSGTTVYAPRHHAEWLAKIVEPGVRVRAERLYQQLDSLQPVRLQARRELLLESHKHPAVKLLRQIPSIGPIRAALLVALLQTPHRFRTKRQLWAYSGFAVETHDSGEYRCVRGKLQRNRERITVRGLNDNHNKDVKNLFKSAAISASTRPGPLHDFYAARIAKGIRPTMARLTLARKIAAIALWKKGVAFDPQQLHRQAA

SEQ ID NO: 135817 - protein, 414 aa, unidentified
MEVVNTHCAGLDVHKKTVVACVMTPDAHGKLQKDIRTFGTMTADLLTLLDWLQANAITHVAMESTGEYWKPIYNILEGNLEVLLVNAQHIKAVPGRKTDVKDAEWIADLLRHGLVRASFIPPVAQRDLRELTRHRANFVRERASLVNRVQKTLESANIKLASVATDVVGVSGRAMLNGILAGQRDGPVLAELAKGRMRNKREELARALTGRVKAHHCFVLTELLCQIDALDETIEHFDAEVEKYCAPFEEAIPLLDTIPGVAQTTAELIVSEIGTDMSRFPSADHLAAWAGLVPGQNESAGRRRSGKMRKGNHVLRTGLVQAAHAVSHTKNNYLVAQYHRIAARRGKKKALVAVAHSILVIAYHILERKQAYSDLGANYFDEQDPVKTAQRLVKRIEKLGYQVTMQTQPVPGPA

SEQ ID NO: 135818 - protein, 343 aa, unidentified
MQTITTIGLDIAKSVFQVHGVDADGQVVISRQLKRRYVLAFFQKLTPCLVGIEACASSHHWSRALQALGHTVRLIPPAYVKPYVKRQKNDAADAEAICEAVTRANMRFVPTKTPEQQSGLVLHRTRQLFIRQRTAVINAIRAHLAEFGIVAPVGRHGVEELLTVVANPNDMRVPEIARACLLAFEAQLRGIKKQILEFDRLIRAWHRSNEMSMRLEEAPGVGPVLATALVAAVADPKSFRSGRNFSAWIGMVPKQHSSGGKNRLGNISKQGDRYLRGLFVAGALSVIRYAKIHGTKHRPWLTALLARRPTKVAAIALANKIARMVWAMMARGERYKEPVALAR

SEQ ID NO: 135819 - protein, 331 aa, unidentified
MRNYSESLGLDISKLHFDAVLYQKKLHRQFENNPCGFKALGKWIRGHKYSWDNILVCFENTGYYSLDISYYLQSNGIDYIQEHGLQIKRSIGFRRGKSDKADAFDIAFYCWQNRANAELSAPPSILLSKLKQLNRTRDILVKQRVALRNQIQALSAVRDKAIYTEACKSLKKVIRSIDQQLKNLEGTIKELIKSDSEIDKNYRLCTSVKGVGPVLAIEIILHTHNFTCFDSWRKFAAYSGTVPYPHQSGSSINWKTKIHPFCDKRLKSLLTMGAISALRFDQSLKLYYLKRIEEGKNKMSVINIIRNKLIARTFAVVKRGTPYVMIDKYAA

SEQ ID NO: 135820 - protein, 394 aa, unidentified
MLYLGIDQHRKQLTVNLRDEAGDVLLKRQVSTEWKRVRAFFEQLKGLAEDADGFAAIVEVCGFNDWLLKMLDEYDCRETVLIQPDKRSKKKTDRRDASALSEILWLNRLRLLGKKRMRGLRRVFLPSKEDAESRRITAMRRRLGQQRTRTVNKVQRILLKHNLQQDMPVKGIQTKTARKWLATVALPDGDRFEMDLLLAQWDLWERQIGAITEEIHSQCEDNKAVAVLKTHPGGADYSSLALACRIGDIKRFPTPGSLANYCGLTPGCRNSGDANNRMGSITKEGSSMIRFILGQLVLHVLRCDPWMKQWYLRIKRRRGAKIARVAVMRRLTTIIWHMLTYEEPYVIGGPPRLRNTRKRREQLASLEASAPARQKGPPLSPSPSIGPEGPSAQG

SEQ ID NO: 135821 - protein, 412 aa, unidentified
MFKIFRNNCCGLDVHKTWIYACIGITDANGRTEYKQARFSSFSKGLRDLAAWLANYSCFEVCLESSGKYWIPVFNILEKTCLVTLAHPKYTKPQKGNKTDVKDAKWICDLFMCDMIKPSFIPSPEIRQLRDLIRYRIKLTNMLTGEKNRAQNCLTVSNLKLDDVFSDVFGKSSRSITNHMLDHPGETFDVAPFVDARCQTPLDEIQAAVDGAISSEQAVKLRQCLAHIDELEAHRKEIEREILMIAEPFSAVLELLYTLPGLDKNPMTAIAILSEIGPDMSVFPSSKHLVSWAGCCPRNDQSNQKVKSRRISRAGCYLKPLLVQVANALIKSKKHPEFKERYRRIKSHRGHKKAIIAVCKMLLIAIWNMLSKLEPYNPDGFLEHRPVNEKRVLTKSQALELLRLRGYTITND

SEQ ID NO: 135822 - protein, 428 aa, unidentified
MDQVNRNRLEEFRQLRKEVRHSEEYLIVGIDIAKDRHYAFFGTATGKTLLKRIVFSNDHEGFRKLLDHAEALRVQHGLKKVVYGMEPTANYHKPLGEYLINLGRTVVLVSGVTVARNRESLDGRWDKHDGKDSANVADLISQGKCLYYEHPSAELRGLRGLLSLKRRLKKQEQGYRVRIRNHLIAQYFPEMDRDYERLGAEGLSIVRWCLPASQITQLDVDPFIERVTSRRIRMEKRRRLEEVWEKAAESIGCEDVPGVDHEAKIMVEGLKQIRAMIKETEDKIEELCREFPEYHYILTIPGFGPDVSAKVLGAIGDPYRFLNGKQVLKMGGLDLSADRSGKDSDKAIPQISKRGKADLRYALYQAALIASLKNRDVMIYYTNKIRGREREKGIQMKMRVKLSAKMLLIAWTLMKKKEAFDPAYLNVD

SEQ ID NO: 135823 - protein, 395 aa, unidentified
MVVVEASTPEWKPERRRFATLPSDLRRLSTWLREQGVEEAVMESTAQYWRSVWLELEPYMRLHLAQAFSNRAPRGRKHDFKDAERLVRRQIAGELVLSFVPDGEQRTWRTMTRMKTQLRRDRVRLQNQMECLLEEMRIKLSSVVTDLLGVSGLRILRALARGETDPKQLAALGEERLQCSEERLVDALTGSPQPMHRELLGLQLERLHLIDEQIARLSGLIAGALKPHQEAVARLAEVPGLGVDSAQQVISEVGVQANTFPSAAHLTSWVGTCPGKEESAEANHNSRSAKGNKYLRRLLNQAAHAAVRKKGSYFQAAFRRLLPRLGYKSALWAIAHRLCRVVWKVLHEGVRFIEHGRESDPTVRRRRARLLARALRKLGYNVALTPINPATAEMR

SEQ ID NO: 135824 - protein, 383 aa, unidentified
MTGTEPQAWEMGLMENITYVGLDVHKATVCVAIAEGSRSGEVRQLGVFENRPELLLKLVARLGKGGRRLSFCYEAGPCGYGLHRFLSGCGHDCVVVAPSLIPMKAGDRVKTDRRDAVMLAKLHRAGELTPIWIPDAAHEAMRDLVRARATAGRVLSKARQHLQSFLLRHDQIYRGVRAWTLAYRRWLTTVRFAHPAQQIVLQDYIHAVQDAEARLDRLTRQIEELLPSWSMAPVVTALQAMRGIALVVAVTVVAEVGDFRRFANARQLMAYLGLVPSEHSSGASIRRGGITKAGNVLARRVLIEGAWTYRMPARVSRKLHDRNEKLSPAIRDIAWKGQIRLCSRYRRLAAAGKPKVVVTTAIAREMVGFIWAIARIAQPTLQG

SEQ ID NO: 135825 - protein, 348 aa, unidentified
MTHFVGLDVSVKETSVCVVDGAGKVLCERKVPTEPDDIAVLLTSIGGDYIRVGIEAGPLSQWLMNGLADAGLPMVCVETRHMKALLKAQQINKSDRNDARGIAQMMRVGLFKPVHVKTLAAQEQRMLLTSRKLIQHKLLDIECDMRGTLRNFGLKVGVISTAGYDARIRHLVESFPKLAAIVEPLLTVRRVMRQQLATLHKMLLDTVRHDPVCRRFMTVPGVGPVVALTYRASVDQPHRFVHSRAVGAHAGLTPKRHQSGETDYDGGVSKCGDTMLRAMLYEAAQSMLTHSKKWSWLKAWGVRVAQRRGMRRATVAVARRLAVILHRMWVDGTDFRWSNSSGAVAPAA

SEQ ID NO: 135826 - protein, 416 aa, unidentified
MKIVRPICCGMDVHKNIIVATIGITNKKTRITEYIQETFSTLNPDLLNLKQWLINHKCFDACMESTGKYWIPIFNILEDEINIYLTHPKYVKAIKGKKTDKKDSKWICDLFKHDLIKFSFIPPKEIRALREISRYRYKLVGMRSSERNRYQNCMTVSNIGIGSVFSDPFGKSAQAIMKEVLESDIIEDEKILKCIHGSCKNKDKILDSIKHCNIETDQRFKMNESMTHMEELQVHINNCEIEIMKRAAPMFDRFMHITQLPGISTLSAILIISEIGVDMKQFESDKQLACWAGLAPANNESANKKKSVRISKAGQYLKPLLVQCALGAIKDKEGYFGIKYSRIKKRRGHKKAIIAIARMMLVSIYHMILTGGIFNPSDYESFKNPKPPIKQQILTEESAIEFLKKSGFDVSKLTKP

SEQ ID NO: 135827 - protein, 574 aa, unidentified
MSVADAFRSFLGNIKITNGLTISARYGEITAALNKKFRDTESKIANSLQVGSYGRHTAIKGVSDLDMLYIMPAKTWNDYKDGGQYRLLSDCAAAIKARYPSTTVKVDRLVVRVLYSNFHIEVQPVFEQSDNSYKYPDSYKDGSWKITKPRDELKAMMEFNAQKNDNLRRLARMARAWKNKHGVAMGGLLIDTLAYNFLKQMGWMAPAPTDGISMPRCGCCQSSSHAHAGAIPMEITTVGIDLAKSIFQVHAVDAVGHVVVRKALRRAQVVPFFAKLPRCLVGMEACGTAHHWARELMSLGHDVRLMPPAYVKPYVKRGKTDANDAAAICEAVTRPSMRFVPVKSTDQQAALALHRTRDLLVKQRTQLVNMIRGLLAEFGIEMARGLRHALELAARVSAGDAAEVPPLAQRVVTGLADQIGAVQIQLTRLEKELLAWHRDSDLSQRLATIPGVGIVSATALAASVSEPERFRSGRQFAASLGLTPLQNCSGGKERLGRISRMGDRYLRRLLVVGMTSLIRRAKATPTSVDPRLPALLQRKPVRVVTVAAANRTARVAWAIMTRGGTYRAPLAAAA

SEQ ID NO: 135828 - protein, 480 aa, unidentified
MKKNQKNKRDELIYKLKKRQIKDVDEIKNYSLEVSNPMAAGGDISSTTIFVCIPPKVSLKKKIPLVYVFGCFTDDLYQLRDLLLKCKVPTFAMESTSVYWIPLYDVLSAAGIEVCLVNPKKYRMIPGRKNDEDDAIWLQTLHSYGLLKGSFHPAPQIKELRTLMRLRDTYVKETGRFIQRMQKCMTEMNVLLHNVISDIAGETGMSILKAILNGERDAQKLADLSNFRIKASREEVVKSLQGNWKKDQLFALKINLDSYENMWKQIREIDNEIEELLKEFPLKKTHESKPDSIKRNPHNKARNNPVMKTALEKHLWSVMGVDLTRIDGLGAYSVLQIISEVGTDLGSFPSEKHFASYLGLVPRTDISNGRILRSKTDRIKSQASLVFRKAVLGLVNSKTSLGAYYRRLRARIGKLQANVATARKLACIYFRMIRYGNDYVDIGETKYKEKQDLRHRKLLIKNAQKLGLLLVDDNGSIIKK

SEQ ID NO: 135829 - protein, 344 aa, unidentified
MPSIVGGMDIHRKQVTFDYLDLVTGEVKCGQIAPADRASLRAWLRRFAGVPGVTFAVEACTGWRYVTEELQRAGIEAHLAEPADTAAARGRKRRAKTDKADSRLMRDLLAGGRLPECWIPPPQILEYRALLETYHALRREHTAWIQRVHAVLFHQGAPVFHDLSRAGAPQELAALARAHLSPAGQQQVALYLRMLEVTGGELDALRRQLVSAAGQLRGARVLAGQLYGVGPVTALALTCWLGGAGRFSSARKAVRFTGLDITVYSSDGKRSPGHLSRQGPPVLRWCAYEAGKTHARAGAPDHGYYAAVKDRKGGKRAALSEARKIVRRACHILGELGDDAFAMA

SEQ ID NO: 135830 - protein, 363 aa, unidentified
MSAITADINTGTRQTMRKHSAKGPVTILGIDLAKQSFQLHGVDANGEVVLRKKLNRSKLAAFMAQLPTCLIGMEACGGAHHWSRVFKSYGHTVRMMAPQFVKPYVKSNKNDAVDAEAICEAVQRPSMRFVPMKSIEQQDLQSLHRIRSQAVARRTAQSNQIRGLLLEYGIALPQGIRHVRTQVPSILETADNGLSDLFRELLYELYEELVKLDDRVRRLEAKLRCLCEQNEDCQRLRSVQGIGVLTATALVAAIGDIGAFRSGRELAAWIGLVPRQHSTGGKSTLMGISKRGDAYLRTLLIHGGRTVVRVAHKHQSRHCRWVSEVEQRRGKNIAAVAVANKNARIAWALLSRKTSYQASAVTM

SEQ ID NO: 135831 - protein, 344 aa, unidentified
MKITTVGIDLAKNVFQIHAVDERGKTVLKKQLKRDQVAAFFANLPPCLIGMEACGSAHHWARKLDGFGHTLRLMAPQFVKPYVKTNKNDAADAEAICEAVARPNMRFVPIKNIEQQSVLSLHRVRQGFVKARTAQGNQIRGLLGEFGLIIPQGIANIAKRVPELIEDAANELTGSFRLLVKRLMDHLNELDKQVGELELQIKTWHRQSDASCKLEKIPGIGPITASALVATIGTAKNFDDGRQLAAWLGLVPKQHSTGGKSKLLGISKRGDSYLRTLLIHGARSVIFRAQQKVDKTSWLHKLLDRRNPNVAAVALANKNARVVWALLANDREFRSDYTPAVAAA

SEQ ID NO: 135832 - protein, 365 aa, unidentified
MRIDIGVDLHKTQFTVYTQRGEKSGVNGQYPTTEEGYVTFLRKIGKWKRSGHDIRIGVESTGNTRYFKHRMEEKGYSVIVINTMKFKVINESAKKTDKHDAATIAEFLAKDMLPESKLCSEDSEQLRRLLKVRSTLVRTRVTVKNQIHGLLVSMGMEDTKASLQSKRGRQRILDTLAGAGNGLVVQPLFETIDRLTENVKVIECEIEKLVAGDKVVELLETIPGCGPVTACTIRAYTDDIQRFSNHKKYASYAGLAPWVQCSNETEHYGRITKRGPEELRTAFVQLVVGIRRSRQSASWRLMERYEAMKTVKGSGKSIIATARKLSKIVWFMLMREEVFNVGLMTDDFLESKIDSMRRTLNKISA

SEQ ID NO: 135833 - protein, 341 aa, unidentified
MPIVTIGIDLAKNVFAVHGVNEAGKAMLVKPRVPRDQLAMLIAQLPPCVIGMEACSGAHHWARLFQQHGHTVKLMAPNLVAPYRMSGKRGKNDAADAAAICEAVTRPSMRFVPLKDEHQQATLCLHRTRQGFVEERTATYNRLRGLLSEFGVVLPQSPEKLRRHITEHLDTLPGWAKRSISDLLEHAGHIEDRLLEYDRAIAEIAREDARSKRLMQLRGIGPTTASALLASIGAGHDFKNGRQVAAWIGLTPGQYSSGGKARLGSITKAGDAYLRGLLVNGARAVIANLGEKQDRFSRWARTLIERRGYWRAAIAIAAKNARLAWAVLKYGHDFKLEPVAD

SEQ ID NO: 135834 - protein, 350 aa, unidentified
MIVLGADTHKRSHTIAGVGATTGELLGERTVQVGRAGFGALLAWARALGGERVWALEDCRHVSGSLERFLIERGERVLRIPTNLMAETRKSARQRGKSDAIDAVNVARAALREGLATFPAAHLDGPELDLRLLVDHRERLVIHRVELNNTLQWHLHDLWPELELPGGALFSKKWSTRIARRLSRAEQTMRVRIARDDLRRLRELTETIKALAREITQLIEQIAPRLLAEPGFGPLIAAKLVGEIAGAQRFATDAKLARAAGAAPIPASSTNTRRQRLDRGGNRQINAALHRVIVTRARCHQPTRDYIERRRGEGKTTRDAIRCLKRHLARRIWHLLQPPTPSEIPINLLT

SEQ ID NO: 135835 - protein, 354 aa, unidentified
MKELLKQSLGIDCAMDEHVASFSVMTGEFEIVHRATLTFKNTKSGFEKLNKWIQHQHPIQSLVIVMEATGVYHEQLACFLTDRNYYVSVILPNKAKYFAKTLDLKTVNDKIASQSLAIMGLEKKLSKWEKPSELLNKIRQLTRERDQIVNERTQIKCQLHAEKSGAWANASSIKRMNQRIKILDKQEAEIKNEIAELVKKDAELARKIKLVSTIKGVGLLTAATVIAETNGFRTVRNKKQLVSYAGLDVMQHTSGISINKKSKISKHGNKYLRKCLHLPALSAIKSSKNQKELFVRLVSRHGIKMKAAVAVQRKLLVLIYTIWKTETPYDTNYEVKKSRNELGQPRRATLKELA

SEQ ID NO: 135836 - protein, 353 aa, unidentified
MAIVAESFDFVIGVDTHAKTHTLAVVTPAGLVADTGTFPTSSPGLGRATSWVSKHTGGPEGCARVLVSMEGTGSYGARLAAVLTHAGYQVVEAITPTSRARGSRGKNDPIDAQLAARTVLPVDTRRLTTPRSGNLRAALRVLVVAREEMNGEATRAKHALLALLRITDLGVDARGHLTGGTLTTVAAWRGREEDLATATARTEATRLAKRVLALDLELAGNKTTCQAIVAQMAPRILELPGVGPITAAITLLAFSHPGRIHSEAAFAALAGACPIPASSGNTVRHRLNRGGDRRLNRALHTIVLVRTVYDQTTREYVQRRTAQGRTRREIVRCLKRYVARQLYRTLNIPTATA

SEQ ID NO: 135837 - protein, 332 aa, unidentified
MSVYVGIDVHRKRSQVAVIDQDGEVLANRNVPNGVEPILRVIGGLPPGTPAAFEAAFGWGWLVELLEDYGFEPHLVHPLQCKAIASARLKNDKVDAAILAQLLRADLLPEAWIAPPAVRQLRALLRHRIQLVRLRTLLRNRIHAVLADHGHDRPSGYWSGPGRSWLASLDLPAVSAEVISDALALIDALESVIDRLDVEIRGHARSDPRVKVLTALPGVGPFTALVLLAEIGDITRFGSARKLAAWAGLTPTVRGSDRMVRHGHISKQGSVWVRWILCEAAQTAKRSPQFAARYQAIARRRGKKIATTAIARKLLTRAYHLLTDASSDGAPS

SEQ ID NO: 135838 - protein, 305 aa, unidentified
MKSYLGIDISKLHLDLSHPAPAKRLANTEKAILPWLKSLPPETILVCEASGGYEALLLSLAHALHRPVIHLNARQVRDFARAKNRLAKTDRIDAGLIAEFAQTFQPKPLPLPDPLQEQLLALVKHRSHLLTQITQNNNLSQTLTDKNLLRLIAKTVAFLHKQVAQLEALIQTKVTASPDLLAKVNRLQQVQGIGRLTATSLVALMPELGSLSDTQAAALAGVAPFNHDSGQFRGQRHIFGGRSQLRSVLYMAALVASRHNPVLRPLYLRLLTRGKAKKLALTALMRKLIVLANHLLKCPDFVLAI

SEQ ID NO: 135839 - protein, 341 aa, unidentified
MKQEMSILGIDIAKRVMHAVGMDERGQIVFRKRLSRHDLIPFLAKLPPVLIGLEACGGAHYWARRCRAYGHEVKLMAPQFVKPYVKSNKNDSRDAEAIAEAVTRPTMRFVPIKDVDQQDIQALHRVRERLISERTALVNEVHGLLNEYGIVIPKGVAKFRQAVVGKLESEKDKLTPLSQEMFWKLVDEFAALEEQLAYYQEKLEALATTHPECQRLMTIPGIGPLSATALVAAVSDASAFKNGRQFAAWLGLVPRQYSTGGKERLLGISKRGDSYLRKLLIHGARATMRWVGLKTDRRSQWIRQLSERRGKNRTAVAVANKNARIVWALLTSHQAYEPAKG

SEQ ID NO: 135840 - protein, 421 aa, unidentified
MSKGMTEKQWFAGVDWASENHHVYLMDCNGKRLGERQFRHGGAGLAEMADWLIATSGGAPGMIHVAIEVPHGPIVETLLERGFKVYAINPKQLDRFRDRFSPAGAKDDSRDAKVLADALRTDMRAFRKLELAEAILVELREWSRVADDLSTDKNRLANRLREQLWRYYPQMLELDEDITSEWVLDLWETLPTPAKAARVRESTVKKILKDHRIRRIDAAQALAILKKPAVVVAPGTTEAATAHIRTLIARLRPVNEQLKGAHRQLDILCTRLAEPVENTDGETEAGQVSEQRDAAILASMPGNGRIVLATLLAEAWDALQRRDYHALRALCGVAPITKRSGKSLIVIRRLACHPRLRNAVYHWARVAVQYDDKSRAKYDALRARGHSHGRALRSVADRLLAVACAMLKNGTLFDPSLAHAH

SEQ ID NO: 135841 - protein, 356 aa, unidentified
MKIIGVDLHTRQQSIAMLDDQTGELVEKELPHEGEQVREFYAGLARPVLVGLEATGSMQWFLRLLEELQIEFRVGHPAKIRAAEPRRQKNDRRDARLLLTLLTENRFPAIWMPSREQRDLQILLRHRDQFVRIRTRVQLSLQALALSHGLRRGHTLWTREGQHTLRALPLAQHAGAQRDTLLALQPQLQSPIDDLDREVEKQARQRPQSQRLMTHPGVGPITALATEVFLGDPRRFADGKAVASYVGMIPREHSSGGRQRFGRLSKQGNSLLRFLWGEAAIHAVRRDSELLRFYRRKLVQKGMGKARVAAARKLGIRLWIMLRDEIDYVEFCRRSHQRQDRGAACAGMPGVGQWSN

SEQ ID NO: 135842 - protein, 422 aa, unidentified
MSDFLSAPLALFYVGIDWAAETHAVCVLDDTGRVKSRFTIAHTADGFADLIRRLRRLGECVDVSVGIERPDGRLVDALLEAGHPVIPVSPNAIKAWRDGEVISGAKSDAGDALVIAEYLRLRQHRLRVATPFSDQTKAVRTAVRTRGDLVEMRVAATNQLSALLDMHWPGAKTIFADVESPIALTFLSRYPTPASAARLGEKRVAAFCAANGYSGRRPAAELLTRLRAAPAGTTSPALTDALKHAVLAMVTVLSALNAAVKDLDRTVVAHLGEHPDGQIFTSLPRSGQINAAQMLAEWGDCRQAYGSADAVAALAGLTPVTKESGKHRAVSFRWACNTRFRVAMTTFADNSRHASPWAADIYNRARAADKDHPHAIRILARAWTRVIYRCWLQATPYDPARHGNATALAARPAAATQTVVAA

SEQ ID NO: 135843 - protein, 310 aa, unidentified
MTLSPTWIGIDVSKAWLDIASSGGEGVQRIANTMDAIAAFAATLEREGTLVVLEASGVYDKSLRAGLALAGIGHVRVNPQRARDFARASGQLAKTDALDAAMLAEMGWALRLVADPLPEAGRERLGLLSRRRDQLVAMRTQEKQRRIEMTDPFIGADLDRHLAGLNQAIAAIEVEIQNQIGSDAALAQDQALIRSVPGIGPVTASVLAALMPELGRRSGKQIATLAGLAPLNNDSGLRRGQRSIRGGRRRVRQALYMAAVASLRTQSPLNAFYHRLRQAGKPPKPALVALARKLLVTINAIMKNRTSFAT

SEQ ID NO: 135844 - protein, 380 aa, unidentified
MKKNTIVNLQVTKSQIRRMAAKQRLTVGLDLGDRTSRYCILDEAGEKANEDQLPTTKTGLEAMFGKMPPSRIALEVGTHSPWVSRQLKAMGHEVIVANPRKVKLITESVKKNDRMDAEQLARLARVDPKLLSPIQHRGAEAQADLAVVRARMVLVDVRTELVNSARGLAKPMGERLKKCDTDYVKESLADGLSEAAQNAIRPLLKSVEEINQQIGVYDQRIEEIAKRYPEMKLLKQVHGVGTLIALTYILTIEDAERFAHSREVGPYLGLTRKLRDSGDSRPELGISKAGDELLRRLLVQGAHCILRDGAPDSDLKVWGKAMLQSGGKKVSKARKKKAVVAVARKLAVLLHRLWVTGEVYDPQYNRKAAQQAAKGKGKAA

SEQ ID NO: 135845 - protein, 391 aa, unidentified
MIFIGIDAAKDKHDCFIVNSDGEVLYDVFTIPNTLNGFNDLLLKIQSVSPDLSKTKVGLEATGHYSYNLLGFLLDKGLTTYVINPLHTNLYRKSLTLRKTKTDKVDARMIASMLMSCIDLKPYTRTLYHNQELKSLTRYRFNKVSERAKLKTSVSRLVNILFPELEKLVPTLHMKSVYALLSEFPSAHHIAKAHLTRITNILYEASKGRYNRDTAIRFRDAARNSIGSVMLAKSLELKHTIKLIGELTAEIDEMETEIKHIVESLGTTVLTIPGISYTTAASILAEIGDFSNFETPDKILAFAGMSPSTYQSGRLNNCYAHMEKRGSRYLRFALYNAAKHVCNWDKTFSNYLVKKRSEGKHYNVAISHAAKKLVRLIFALEKSHLPYNPAA

SEQ ID NO: 135846 - protein, 317 aa, unidentified
MNTIQPAVYIGVDVGKFQLDFHCHESAEHFSVSNNATGIRQALKQLSAGSIQCMVVEATGRHEQSLVQAAQRHNLPIVIAQPISIRRFAGALGILAKTDQLDSQVIAHYAALIQPPVRELPDKTTRQLKDLSVRRKQVIGMLTMEKNRLQVMPAFLRADIRRSIATLKRQLRKLDEHIHQLSLSVEAWRKRREVMQSMPAVGTVLATTLISDLPELGALNQKQIAALVGVAPMNRDSGKMRGKRRIRGGRAQVRTVLFMATMCAVQHNPVIRAFYRRLLAKGKHKKVALVACMRKMLILLNAMVRDETCWEEMKAAA

SEQ ID NO: 135847 - protein, 358 aa, unidentified
MSHRTWKLGNVKSVPVSEGDVMTVGLDVHKTTVYAALRCNGQEVATWVMPMDNKTVVASLKRFAPALKKVVYEAGPTGYGLARALKKAGLPAEVIAPGKVPQAPNPDSKSDRLDCRKLAEEAEKGSLKAIAIPTEQEEADRQLARLRDQLVGKQRRVKQQIKSLLLQQGLPEPSGLAHWSAEGLAALKGMRLRHQLQLSLAVLIEELEHLVACRKRVERHEAWLMKQRRHRRSARLLQTHPGVGVVTATAFRLEVYQPARFDNAEQLTKYLGLAPRVRQSGARRREGPLIKAGRGSLRALLIEASWRWIRDDAAAAKTYRRIVRNTGSPQKAVVAMARRMAVHLWCMMCRGAEYRSAA

SEQ ID NO: 135848 - protein, 391 aa, unidentified
MPEDAPRPAQPAIRTDLGAIFVSLELSRKTWLITSLSPGGGEKMSKHSVPAGEVSGLLRRFAELRRKAAARTGRDFPIIVIQEAGLDGFWIHRVLQSEGIESHVVDAASILTSRRRRRAKTDRIDGETLVRTLMAFKRGEPRVCSMVRAPTPQEEDRRRVCRERRTLMGERVRHVNRIKGLLFAQGVFGYEPLRSGRRERLEDLRTGDGRPLPMHLKAQIIRELDRLEVVLAQLKTVEAERDALLKPASEEAASSAAMLVRLKGIGPETAAVLCSEGLFRRFDNRRQLAAYAGLAPTPWQSGSIDHEQGVSKAGNPRLRTTMVELAWLWLRNQPTSTLSLWFHERVRRLSGRMRKTIIVALARKLLIALWRYTAAGVVIEGAVMKEASATI

SEQ ID NO: 135849 - protein, 341 aa, unidentified
MKIRSIGIDLGKTTFHLVALAEHGKVVVRKKLSRKQLLAFTANLDSALIGMEACSGSHFLGRALSQQGHDVRLIPAQFVKPFLKSNKNDFLDAEAIAEAVERENMRFVPIKTDDQLDLQALHRVRERLVSRRTAVINQIRAFLLERGVTFRKGPASLKRQMPEILENADAQLSPRIRALLATMWEEWKQLDEQVESFSTQIEAIGSDDPVCQRLREIPGVGPLIASAVVASIGNGAAFHKGREFAAWLGLIPKQYSTGGKTKLLGISKRGNRYLRTMFIHGARSLVLRANRERSPVGGWISALEARAHRNVVIVAMAHKLARITWAVLSSGERYRPASLAA

SEQ ID NO: 135850 - protein, 360 aa, unidentified
MSKISKQTGRKKTTMDKPERTMGIDVGDRYSHLCLVDGDGEVVERDRVRSTEAAFRRHFEGAPRLRIALECGTHSPWMSRLLKQFGHQVIIANARKIPTITESESKNDRNDAEQLARFAAFDPRLLSPLQHRSLGRQQDLNLIQARAILVKARTMIVNALRGLVKSAGGRLPACSSASFPNRAAGAVPPTLADVAGPLIEQIARLNVQIGAMDQQIEKLVIKYPEIGTLRSAPGVGPLVAAAYVLTLDRPNAVPSSRSAGAFLGLRPGQSQSGDSDPQRRITRTGNTYLRCLLVQSAQYVLGRFGPDSALRRWGLKLTAGGGKRAKKRAIIAVARKLAVILHSMWRSGQRFEPFPQSVQA

SEQ ID NO: 135851 - protein, 408 aa, unidentified
MTISLHVGIDIGKNKNVACFMKLDGTILLKKLVFDNSISGAESLASKTKELSIKDSFDHVVFGMEATSLYHFHLMNYLLITEELKPYRPTVYQLNARSIKNFKKSYPPKGKNDAYDAYIIAEKLRHGRLPKPYEVDEMYLPLQRLTRYRFHLVGSLVREKSYFLTMLFMKFSNYGDVFSDIFGATSMSIITDFFGPEEIINTPLEDLVQLLVDKGNKQFSNPETLATELKRICRESYRMSPKLTDSVNLILETSMNNIRFFEQTIRKLDSVIARDMAKLSNPLMSIKGIGPVFSAGIISEIGDINKFEDQSQLAKFSGITWNSNQSGEFDGEDKPLNRAGNRYLRYYLIEAADSLRRHNDEYRAYYQKKFQESKKHAHKRAQVLTARKFVRLVFSLLSKNQLYRSDRG

SEQ ID NO: 135852 - protein, 394 aa, unidentified
MILVGIDIGKNQHTFSIIDKGTGEILSNPSVFNNNQEGFLSLIKKLSDYAKSELLIGMEDTGHYHFALLKYLLDSHYTVALINPATTDLTRKLQGGITKNDSLDSLTICDVISSNHRKKPYRITKVNRFDLYEQKQLTRHHHNLKEELNIYKNRLQKCIDIVFPEFNSLFRSKYGIVYMNVLKTFASAKKIADSDIQTIRECFEYNRRGKRISLSAEQLKAAAKTSVGIHSVAEEIQIRHLVRQIEMIEEQLSEIDKKIEEFSLQNDSPILSIPGISHFSGTSILAELGDICNYTKASQIIKFAGVAPCHHESSQFTAQHTAITKKGSRYLRKTLYQIILTVINNNKVFTAYYNKKLAEGKGHRCAQGHCIRKLLRIIYHLLSTGQTFDPDLLR

SEQ ID NO: 135853 - protein, 339 aa, unidentified
MELYAGLDLHSRNTYIGIMDKAFNRVFKKRVPNHLEHILQTLAPFRDQIKGFVVESTFNWYWLVDGLMDAGYSSAHLANPSAIKQYEGLKHSDDQHDAFFLAQLLILGILPQGYIYPKMDRPVRDLARKRMFLVQHKTAHILSLQSLIQRCCAMKVRANDMRHLTVKELEAWLEEEYLVLSAQANLDSINFLKQKIQGLEKAIRKKVKLKKAFHHLKTVPGIGDILALTIMLEVGDIKRFSKVGNFTSYCRCVPSRRLSDGKTKGYGNRKNGNRYLSWAFTEAAQLGRRHNERFRRYYNRKVAQANTSLATKALGNKLARICYFIIKDQVPFREELFGQ

SEQ ID NO: 135854 - protein, 316 aa, unidentified
MSETANEKFVGIDVSKATLDAHIEPAGETLHVGYDEAGIGRLVERLKEVGPALIVMEATGGLEVRLASELASAGLPVAIINPRQARDFAKATGQLAKTDQVDAAMLAAFARAIRPQARPLKDADTRALDEMVSRRRQLIAMRVQETLRLGTATSKPMQKSLKVHIAWLEKQITEIDGDLNRRLRESDIWRAKDDLLRAIPGIGAVTSLTMLAKCPELGTLNRREIAALTGVAPLANDSGKHRGKRFIWGGRAEVRVVLYMAAVSAMRCNEAIKAFADRLKQAGKPPKVVIIACMRKLLTIMNAMLKNNAPWCPKHP

SEQ ID NO: 135855 - protein, 433 aa, unidentified
MPTTHPYDLVIGLDRSDRKADLHLIDTRTGQTQKQTVATSPEALHDWLARLRQDRPQDRVGLCLEQPAANLIVFLETYSWITLYPINPISLQKFRETFVTSRAKDDGKDAEYLAELLLSHHDKLKPWQPDDSQTRQLQQLVLHRRAVVDQRTGLTNRLKALLKQYFPQALDLCGEELWRPLATALLLKWPTLQSLKKARKESLKQFYYLQGSRSQKLIDQRLECIDQAVPLTDELALLQSYTLRVQLICKELQLLLKTLEQFDQQIAKVFEQHPDREIFAALPGAGPVLAPRLLAGMGSERERFAGPANLQAFSGVAPVTKQSGGKRHVHRRYLCPKFLRQSFQEYAKESILHSRWAAAYYGQQRTKGCAHHTAVRALAFKWQRILWRCWQSRTVYKEALYEAALKKNKSPLVGLLDQIELGKSPVKTRAKKS

SEQ ID NO: 135856 - protein, 353 aa, unidentified
MKRDKYIGMDVHQATTVVAVLDTNGKVIWETIVPTQAGPIIELLESLSGPLHVTLEETTQAEWLYEIVRVYVAEVVVCDPRRNRLLSEGSKADKVDARRLAELLRVGMLRSVYHGNEGTRKLKQLARGYQTLLSDMQRTMTRIKAMYRSRGIHTPGRGVYQAKQREQWLSRLTDPGIQQRTAWLYEQLDQLGSLRRQAKRAMLAESRKHRAVTLLRTIPQLGPIRSALLVAILDTPHRFRTRRQLWSYSGLAVVTHMSSEYEIKEGRVVRSRKPIATRGLNRNCNRVLKDVFIGAATGGGQREPYRQYLQGLQDRGMRKEMARLTLARKISSIALTIWKKGEAFDPKKLKWAT

SEQ ID NO: 135857 - protein, 343 aa, unidentified
MKYIGLDLHKKSIFATVLDGDGNILSKTQIGAKSRDVLYYLKRQGKRNELSVAMEASYNWPYYYRAAEEAADTIVLAHPLKTRIIGEAKIKTDKIDSAALAYMLKADMLPAAYVPSRATMENKLLLRSRMSLVRIRTQVKNKIHSIVDRNTDSYFGLDNLTDIFTRTGIKILRDTKICPTDYRILKGYLDLMDEINKKIKDIESQIDKKSIEDSDIELLKTMPGIGTFSAFLVKSEIDDIGRFSSKGKLSSYAGLIPSTHASGARLHHGRIVKQGNKFLRWALVEAAQTSVRCSEYFRYHYSKVRSRKSGNSAIIAVARRMLEIIYTMLKENREYIEKPVDIK

SEQ ID NO: 135858 - protein, 366 aa, unidentified
MKKTSTIRENGNMIFKGRKLTIGLDLGDRWSFYCVLDEAGQIILEQKLSTTPEAMKQTFESTPRSLIALETGTHSPWVSRLLRELGHEVLVAHAQKVQLISKSNRKDDRHDARTLARLARIDPELLGPVRHRSAKAQIHLTVIRARAELVSARTALVNAARGLAKSYGERLRKCGTQQVSRELAAELSVELREVLEPLLQEVESLNERIKQYDARMEKIARESYPQIELLKQVKGVGTQIALTFVLTLEDPHRFPKSREVGCFLGLRPGRRDSGESQPQMHISKEGDPYLRTMLVQGAHYILGPFGQDSDLRRWGLKLAARGGKNAKKRAVIAVARKLAVLLHRLWVGGEVYEPLRNSHKAMRAVA

SEQ ID NO: 135859 - protein, 312 aa, unidentified
MSNPVRYLGVDVSKNTLVVAFERHRWQFPNAKEGHLKFIAQIQKLPTPMHMVCESTGPYHIAMCLALQEAGIAVTIANPARIRYFGKSEGTLAKNDPIDAKLIERFANSKRPPADPPLCRKHLAFSEMATHRSHLVEMVKVLRTHREQAREPALVKEIDKSIAVLEKRLGLVEDQLRQTIEANPVWQRKFDELTTVKGVGFVTALVMLVRMPELGTLNRGQCAALGGLAPFDDDSGEHHGKRSIRGGRHEVRTALYMAAISASRFNPILKVFYQRLIAQKKPFKVAITAVMRKLLIYLNGLLKTLSEQTSPA

SEQ ID NO: 135860 - protein, 438 aa, unidentified
MSNKIIFNLDELFISVGIDVGADFSWMSIVLPNQQFVGKPYKILHNSMDSLASAVSKIKEAEEMYSLESRIFLESTGIYHYPLFCYLRDKGFNCSVINPIITKNSTNINIRKVHNDRFDSKKAALVGLKPDLKVSLMPSDLALNCRNLCREYYDLMDNRSAYVNKLQGELRMAFPQYLGIFSKVTINTSLTLLETYTSPSAFLKADKQEIIDIIKSTAHFGLTYAQNKYNAIIQAATDANQFGYIIDSNIKRIRLYISFIRKYDEEINSILESLHELVDANEDSDFVKQIHLIETFKGAGFLSSVSIMGEIGDFSAFSKPKQLFAYFGLDPAVKQSGKFEGTKVQMSKRGSAIARRVIHTLTLQSISISRNREAKNPVLREYYLKKCDSKPKLVAMGAVSHKVCNMIFAILRDNKPFKIIAPQEHIKQYNSAKCDIAA

SEQ ID NO: 135861 - protein, 352 aa, unidentified
MEQVKQITRETAMLFIGIDMHQVKWHITIRDEAKVLWRGSKPGTWEDLRKLLDRYRGYRMRAVYEAGCFGFWLHDNLKEYGVECIVTPPSLVPMEYGNKVKTDRRDSDKLAKLLAKDLLKSVYVPSKEEVMHRQTFRQRNQMMKDRVRTQNRIKSILRLFGLGVPDIRAPFSLTFVSNLRHVNFRNHYLQKSFNLLLDEYELLNELIRQQTKLISEMAELPRYREQVKILTSTRGVGVLTAMEMILELQDVSRFPNGDHLSAYVGLTPSQHSTGDHVRMGRITGIGKPHLRGTIIEISWTLIRYYPKEREFYLKLKARAGAKRAIVAVARRFIIKARYMLLTNTPYHIRAAG

SEQ ID NO: 135862 - protein, 373 aa, unidentified
MNYSTVYVGMDVHKETFSLCCYTNEKEQAEYPQKVDGHYSKVINYIEAMRFHYGDDALFICGYEAGCLGFTLYHQLTDHNVKCVILAPTTMLQQKGKKKVKTDKRDAALIARCLAHHDYASVHIPTGQDEQTKEYIRMRDDHKLALKKVKQQILSFCLRHNYRFDGTTNHWTQAHLKWLRALKPEGLYAETLYEYLLTYDNLTDKLERLDKRIEELAADDAYQENVHKLSCFIGVKTVTALAVLTEIGDFNRFSSAQHFASYIGLTPGEDSSGDDQNRLGITKAGNRHVRSLLVEAAQSYSRGQIGFKSKVLKARQEGNPPEVIAYADKANERLRRKYYHLVLKNNKRTNVAKTAVARELACFMWGMITCNVA

SEQ ID NO: 135863 - protein, 391 aa, unidentified
MFYIGIDIAKKNHEASIIDSSGKSLSKSISFPNSTKGIEKFNNFIAEFGVTTNNCIIGMEATGHYWISLFSYIVDLGFTCYVINPIQSDAFRKMYVRQTKNDSVDSFIIAQIMRFGEFSISNFSDENTFALRNLTRYRFALVDECSDWKRKLIAILDQVFPEYSSLFSNIYGVASKELLSKYPLPEDMLSIPAEELGDLLCKCSKGRLGINKAEEIQSCARETFGIKFAKRSFSFQIKQIISQISFLEEQLKEIEIEISYLLEDICPIITTITGIGSILGASIVSEIGNISRFERANQLVAYAGLDTRIKQSGDFSATNTKLSKRGSPYLRRSIWLAATVAAFKDPALSIYYQGLRARGKAHGTAIGAVARKLTNIIFAVLRDQKPYTPNI

SEQ ID NO: 135864 - protein, 320 aa, unidentified
MNPNADKIQFALGCDVAKDTITFFDSQTRETFTISNTTGALKTALKSYAGCLDMLAVCEATGGYEDLLLDTLKALSIPAHRADAAKVKAFIRSCGTRAKTDPIDARHIAEYGLARSANLSLWQAEAPDNAKIKLLVRRRDDLVNMRVQEENRLKAPRNKPIAKEIASHVAEIKRRIATLDKQIEAIVQNNQRMKERQVILLGVPGIGKVIAPVLLALMPELGHIDRKKAASLAGCAPHPRDSGTYRGRRFATGGRRQLRPLLFIAAMAASISRTHLAQTYKRLLAAGKSKLTALGALMRHIIVIANARLKEYENNQSRLT

SEQ ID NO: 135865 - protein, 343 aa, unidentified
MKLSRVGIDLAKNVYQLHGVDRSGKTILKRRLKRHQWFKVLLDKTEPDCVIGMEACAGAHHWGRELQALGYTVKLIPPQFVKPYVKSNKSDAKDAEAICEAMSRPNMRFVTVKRVEQQDIQATHRIRAELMTQRTAKANQIRGLVAEYGLVAPKHLSSLRAAIPCWLEDAENGLTGDFRALLQGVWNDLLGLDDRVCEMDQVIKRLAENNEDCVRLQQLRGVGPMISTAMVATVGDARQYQKSRQMAAAIGITPKQHSSGDKHRLLGISKRGDVYLRTLMIHGARAVVARAKHKDDQLSRWVTNIANKKHPNVAAVALANKTARMAWAMLRNETDYDPDYAIS

SEQ ID NO: 135866 - protein, 454 aa, unidentified
MILPNHAQPRRQPPLSAVHPHAAGIDVGAESHVVAVPPACDPEPVRSFHAFTGDLHRLADWLVACGIKTVAMESTGVYWIPLYEILEARGLQVLLANARTVKHVPGRKTDVNDAQWLQQLHTYGLLRGSFHPPAEIAALRAYLRQRERLLDYAAQHVQHMQKALTQMNLKLQQVVSDITGQTGMQIIRAILAGTHDPRVLANCRDRRCRRTVEEIAQALEGHYRPEHLFALQQAVTLYDTYQTQIAACDQRIAAALALLQAPAPPADPLPPPTGKTRQKNALACDVRAALYGIIGVDLTQIHGLGSSLALKLIAECGTDLSAWPTAKHFVSWLCLSPGNKISGGKLLSARTRRTANRATSLLRLAAVTVGKTDSALGAFYRRLAMRVGKAKAITATARKLAMLFYNTVRHGRDYRDPGASAYENRHRERVLHHLERRARQLGYVLEPAPVAGVS

SEQ ID NO: 135867 - protein, 320 aa, unidentified
MPDGQSLQFANSPAGFAAIIELLAGQRAQGWEVLAVVEATGGYERALVEALCAACLPIAVVNPKRVRAYAKALGIRAKTDHLDARVIARYGQTVRPRPSETRDRDRLELAELLAYRDQLTGEIVARTQQKRLYTSPALLSRAETALASLRREQRELEREIARMLTERETLEGTAALVLSVFGVGTVAAASLLAFLPELGQLDEKEIASLAGLAPMARDSGQHRGRRHIAEGRSKVRRVLYMAVVAGLRRNAGLRTVYDRLIKAGKPGKVAMVACMRKLLVWLNAMVRDGVSWQPDATKRRRHQAANEDTAAPAAERPRAA

SEQ ID NO: 135868 - protein, 510 aa, unidentified
MINGASFGSPFLSMVPDSVLKTVVTAAPHWGTSIPFKRVLCSAQSGPSRMAECFKRRAMSRKRKNSKKIGAPMLHCLNPNAAGVDVGATEIYIAVPVDRDPQPVRHFSTFTEDLHAAADWLKACNIETVAMESTGVYWIPFFQILEARGFTVLLVNARHVKNVPGRKSDVSDCQWLQYLHSVGLLRGSFRPEQAVCTVRSILRHRDSLVQMASSHVQHMQKALDQMNLQLHHVISDITGVTGIRIIEAILAGERNPHTLAALRDGRVKASADTIAKSLVGDYRREHLFTLGQSLAAFRHYQELIGACDKEIEQYLEAFGSKVDPPEGSASQSQDGQKPSNGEPRFDLQSDLYRIFGVDLTLIPGINVLTTQTLLSEIGPDLSRFASAPAFTSWLGLCPDNRVSGGKVLSVKTRKVKNRAATALRMAAQALHRSQSYLGHFYRRMRAKLGAPKAITATAHKLARIIYHMVTTRHAYDETICVQNEVRNRECLEARLRKQARQLGFQLVAAS

SEQ ID NO: 135869 - protein, 387 aa, unidentified
MRASTVDTPTADHCGTIFVAIELSQKTWLVTLHSPDKGKMSRHRLDGGDHAELLALVGRERDRSARALGAVPAVVSCYEAGYDGFWLHRLLMAAGITNYVFDPASIAVDQRARRVKTDRIDGEKMLRTLMAYLRGEPQVVRIVRAPAPEQEDARRASRERGRLVKEQTAHTTRIKALLRLLGMAVGNPRRRDWLSWLSAQRDWQGQAVPPRMLAEIKYEHARLMLVREQLEGLAQASAQADPAPAAAQMAERSELLLRLKCLGPMFATTLASEVFYKDFRNRREVASYFGLAPSPWQSGGIDRDQGISKAGNPRARCAAIELSWLWLRHQPESALTRWFRSRTHNNASKRNKRIAVVALARKLMVALWRYLTTGLVPEGAMLKAAKA

SEQ ID NO: 135870 - protein, 402 aa, unidentified
MNCVGIDVSKGKSMIAVMRPFGEVVVSPFEVRHTASELSELARLLKNLDGETRVVMESTGNYHAPVAWLLHGAGFYVSVVNAMLVHDYGNNSLRRAKTDKKDAVKLANYGLDHWLTLPRYVPEEDTRLMLKTCYRQYQQYSKVQTMLKNNLISLLDTAFPDANRLFTSPPRADGSEKWVDFVAAFWHCECVCGLSEKAFTTRYQKWCRKHGYNFSEDKARDIYASACGHFGVIPKTDTAKLLVEQAISQLQTTSAALAALKQEMQSLAASLPEYPVVMEMFGVGPTLGPQLIAEIGDVRRFHSKKALVAFAGIDAPPYQSGQIDVRSRSISKRGSASLRRTLFLVMGVLLQCAPMDEPVYQFMNKKRSEGKPYRVYMMASANKFLRIYYASVKAYLDSLEHD

SEQ ID NO: 135871 - protein, 315 aa, unidentified
MGIDVSKGDFYACINEIETPRKFNNTPAGVRGFLSFLHANDYLPRTTEIGLESTGPYHYPLSFSCTKRGYTVNIINPLITHAYNKTTVRRTKTDKKDASLIRYVLTQGAGYPFVETTDTLILKNLVRQRAYLSNMKRDMKRKATDIQYKETIIHTPITTVNQEIATLLREKMNDIDRQLKQYKIQDQTLLQTIPGLGPVTAATLIAEITDIHRFKTHKHFTAFIGLDPRTHQSGTSIHGKGYITKRGNKILRTLFYNCASVAIQRPNTFQDFYQKKVSEGKPKMVALIATTHKLAKVAYAVWKTETSYRENRPTS

SEQ ID NO: 135872 - protein, 353 aa, unidentified
MSTNVANFTIGVDLGDRQNVVCVLDASGEVVKIFKVSNTKKAMHKSFEKYSGSLVAIETGTHSGWVSRLLEELGCEVLVGNTRKLRAIWQDPVKTDYRDAEMLARIARVDPKLLEPIQHRSEQSQEDLVLIQSRDMLVKSRSSLINHVRGIVKSFGERIPSCSAPSFHKKAYEHVPERLKFALFPLIEQIESLTKRIREYEQKIAEVSQKSYPETDVLRQVPGVGPITALAFILTLEDSSRFHKSRDVGPFLGMVPKRDQSGDMDKQLRITKCGNKDLRRLLINAAHYILGPFGPDSELKRHGERISQRGGKISKKRAIVAVARKLAVLLHRLWVTGEEYDPFYNQSVVRQAA

SEQ ID NO: 135873 - protein, 354 aa, unidentified
MYQLSGSTQGALDYNSTIIGALELSEKKWVLAVQLPGVRRHSRHVLEACGDGLASFVERLKARCAAAGRKIARVILTHEAGRDGFWLARFLARRGVEVHVIQPSSLPVDRRARRAKTDIIDVEMLLRTLMAWLRGEPRVCSMVPIPSEADEEARRAYREREDLTGERRSIVNKIDGILATLGVKGYKALRRDRREQLTAVRQPDGDPIPQKARARIERLLDRLDLVLKLIEQVESARDAVLKKDAPADEAERMIRSLTDLRSIGPDFATLLVREAFVRQFRNRRALGGYVGLGGTPFSSGGSEREQGIGKDGNRRVRAAMSNSPGRGCAGSRTAPCPCGSAHVSAQWEGGSRKS

SEQ ID NO: 135874 - protein, 457 aa, unidentified
MGRKGKRTAGMEEAHPFTGMSQVNLNAAGVDIGAVEIVVCVSGDENTQIVRAFGNYTVDLQAIGKWLKEYSVKTVAMESTGVYWIPLFEELERQGFECLLISSRSLRRVAGRKSDISDAQWIQTLHSYGLLESSFRPQAELIALRTLLRHRSQLVEHRSPHILHMQKALLQMNVQLSQAVSDITGVTGLTILRAILAGECNPQELASMREPGCKKSAEEIGKALTGTWREEHLFILKQSLEMFDFYTWQILACDEEIERVYGLTRPEWEAGEVKPLSERKRNSHSKNRPQNPEGIRKHLKRISGVDLSVVDGFGVSLAQTVIMEVGTDMSKFPSEKHFCSWLGLAPKHEISGGKVLKNKTLKTKNRAGQAFRMAAQSVKQADCVFGVTYRRLKARLGPAQATVATAHAIARVVYRMLKYKVEYETISVEEYEKKYQDQQLKYMRKKAAKLGYQLVPA

SEQ ID NO: 135875 - protein, 426 aa, unidentified
MNTTTTFAATIGLDWADRKHDLWIRPADGSKAQHLRLEQTPDALHEWVAKLRERFGNRPVAIGIETSRGPVISAFLAYDFMVIFPVNPKALKDYRAAFSVSGAKDDRTDAQLLEQFIRRHRDKLQALEPDTELTRQLAGLVEIRRHLVDERTRFVNQLHSTLKTYYPLAEALLDGEMNKPMAADFLARWPDLESLQKAEVQTLRAFFYKHNSRSAKKMEERLAAVQKAKALTTDPAIIVPAGRLVGALAAMLRPLHRVVAQLDKEIEQAMDQHPDAAIFRSFPGAGPALAPRLLVAFGTNRDRFQSAQEVAQFYGLAPVVIQSGNSKTTHLRHRCPKFGRQTFHENAGCAFKKEPWARVYYEQQRKRHDDKHHQACRALAYKLIRIYFACWKQRKTYAPDHYLRALEKHGSPLHAKLETQTVLRCE

SEQ ID NO: 135876 - protein, 370 aa, unidentified
MKKYSEAFVGVDTAKKKHAVAIADAGRDGEIRYLGEIDSSPATVARVIRKLADRYETLHVCYEAGPTGYGLFRDIRALGHDCIVVAPSLIPKKPGERVKTNRRDAVTLVRLLRAGELTSVWVPDAVHEAVRDLVRAREAAAEDFRKKRQQLLSFLLRHGRIFMGHKHWTQAHRRWLAGQKFERPAQQIVFQDAIDAIEDATTRAQRLEEQLALIVPSWSMAPVVAAYQAMRGVSFVVAVTFAAEIGDVRRFDNARQVTAFVGLVPSERSTGESVRRGGLTLAGNRRARRALIEAAWTYRYPARVSKVLQTRIEGLPKAVREIAWKAQIRLCARYRKLIAHGKKKPVAVAAIAREIAAFLWAIARHVAPAA

SEQ ID NO: 135877 - protein, 311 aa, unidentified
MTGDTIGIDISKAQLDVFRLEDQSTRQFENSPRGFQALKRWLGRKPIARIVFEATGPYHGAFERAFSGKQPLVKINPLQARRFAQACGTMTKTDAVDAQMRALMGDALQMKPDAPISENQSILRELQTGRSTLSTQRTRLRNRGHILSNTVLKRLNKARLALVERQIAELNVEISRHITSDVSLGCKREILCLLPGIGSIAAAMILSFLPEIGCLDRKPAGSLAGLVPHSRESGKWKGKSFISGGQKPLLNALYMPALVAMRFIPDLKAKYDSLRKAGKPAMVAIIALMRKLIETANAFIKANRNWARKGA

SEQ ID NO: 135878 - protein, 337 aa, unidentified
MLTVGVDSAKATLEAATWQDGRAVRLGTFEQTPAGWTALQDAIAGLQTAPADTRPATDREPVAMVLEPTGGYELACALWARQQASWQVHRPNPARVRAWARSQGLRAKTDRQDALLLARFGASAQPALPVWQPLASEVSELEQLLHRRDEVADWLQRERRRYEQLGVRPDASMTVRASLERLLTTLDGELADLERAITDHTQRHAELRAGEERLRTVPGVGARIALPLLVTCERFHALTAGQGDAKGLVAYVGLDPQPHESGVSVWRPALISRQGDRGLRARLYLGALGALRGDNSVHAFYQRLVDRGKPKKESGFGCGCTQAAGLGVGGVYLGPDV

SEQ ID NO: 135879 - protein, 443 aa, unidentified
MKKTEEMQIINPHASGIDVGSKSHFVSVGQNLDAIKEFGVYSSDHEKIISYLKDNKVNTVAMESTGSYWQSLFMALQNAGFEVLLVSGHLTKNVRAKTDVKDCQWIQKLHSLGLLRGCFLPDEQTLKLRTLNRHRLSLIEESAKMINKMQKALRLCNFRLDVVINDITGNSGRAIIEAILSGERDGNKLSQLANNRCRKSKKEIAEALQGHHNDELMFELEDCYDLYKIIQAKVEACDKKIEQILKSYLVGNSQINHHSVKITQKQTKGKNQVKFDLPQLSYQYYGVDLFAIESVSMNTVLTLITEIGQGIYKFKTAKQFSAFLRLAPNNKVSGGKLISSRTPKGANKLSIALRNAANTIDRIKKGSLVSFFKRIAYKKGRAAAITATARKLAVIIWNMIVKKQQYKPLSEDVYRELIKVKVIKNIQHQMIKLNIVANDLLIT

SEQ ID NO: 135880 - protein, 397 aa, unidentified
MKGFCISLDVSKGSSFYQGFKGLDEPITKPKKIEHNLEGFKELLNLKEKIKKQYNEDCVVIFESTGIYHKPLQTYLDEHDFKYTIISPLLSAKVRKSDIRGTKTDAKDCASIAKVFYLKELRIYTKIDEIYADLKEKSRYYDFLVDEMKRWKIEFRRLLDIIYPGLDKIFGDLYADYIQAFLLEYSHPEIIRKRRLDTIAKFLEKKTCHKEAYSLRQAQIIKEYAENCASGCSSKSYLVNQFDTVIHNLNAQIKHLQIVLEEIIELAKTLPNYDSIASIPGIGENLAARILAEIGDISRFNNASQLVAFSGVDPQIYQSGQVSGLHLRISKKGNKKLRCLSYLAVTCMIKTSRDTSIVDFYKKKKADGLAPKSALVASMNKLIRIIYSLCKNGCLFE

SEQ ID NO: 135881 - protein, 403 aa, unidentified
MISVGIDVSKGKSTVCAMIHPNTIIKESFEVLHTVEEMSMLADYIGSLDGEIRIVMESTGHYHLPVAQFLYQKGFFVCVENAYIIRQFSRIMLHGAKTDPLDAKKLAKYGLAYWSELKPYKFHPSCYTELSLLSKQYQTYIKLLIAAKQNVIHLMDEMLPGFKEALDTASSVQFSKVKYVDFAKEFYHVDMIKSMGKEIFRENYKQWCKEKGYRFQSEKADELFHLAEDGIPTLPTEFPSTRLCMEVATEQVSQLGYALEQILSQMQNLAKTLPEYQTIRQMGGMGEKLCVRFIADIGDVRRFHNGKALVAYAGIDAPPYQSGQYTGTKRRISKRGNSALRKTGYEVMKSLKSHPPKTDTRVYDFIIKKENEGKSKKQAKIAGLNKFLQIYYARVIEIYKNIV

SEQ ID NO: 135882 - protein, 420 aa, unidentified
MDVVSERCAGVDIGKDEVVACVRTPGPNGKGRRKQTRTFPSFTGNLEAMADWFVAEAVTDVVMEATGSYWKPVWYVLEERSFELKLVNAQHVKILPGRKSDVLDAEWLAELLEHGLLRGSFVPPPAIRELRDLTRYRKRLIQAHTAECQRIQKTLEDAGIKLDSVASDVLGVSGRAMLHALVAGERDPDVLAQLAKGVLRKKIPELRQALRGRFRDHHALLIGLCLDHTAHLEAATVKLDERVDAIFAATTSGAGVPFERARDRLDTITGVGKRAAETIIAEIGVDMSRFPTAGHLASWAGMAPGTNITGGKRQSGRTTKGDAWLRDVLTQCSWSAARTRDTYLSAQFWRLARRIGRKKAAIAVGHSILVICWHLLTNDCNYNDLGGDYFQRRNGHDRHRDHLIEQLHRLGYAVTVKKTA

SEQ ID NO: 135883 - protein, 344 aa, unidentified
MNKLSRVGIDLAKNVFQLHGVDRHGKAIWRRRLTRDKWLRVLLENIEPGCEIGMEACAGAHHWARQLQAKGFTVKLIAPQFVKPYVKSNKNDANDAEAICEAVSRSSMRFVAVKTVEQQDIQAAHRIRSELISQRTARANQIRSLVAEYGLVAPQQLAQLRAAAPVWLEDAENGLTSRFRRLLNNLWDDLKTLDQRVAELDHEINMIAQSDPVAKRLQQLRGVGPMVATALVATVGNAEQFANGRQMAASLGLTPKQHSSGGKDRLLGISKRGDAHLRSILIHGARSVIRTAKEKDDRLSQWVTSLAERRHPNVAAVALANKTARIAWAMLRHGTDYQPDRIVA

SEQ ID NO: 135884 - protein, 334 aa, unidentified
MKHYIGIDAHCEYCDIAVVNEAGRLVSHRSVTTSARNLIEAVCGVKDMRIVVIEESTLAGWLQRSLAPYADEVAIVDPRRNALISRSENKSDRNDCERLAMLQRGGYTNAIHHTLDAGFLELKEMVLHYHDTVNQVTRFKNKLKAVYRQHGLIRMPEGVYDPVEGLTHIKQLPFPSSRHRARWILSMITRAEKMKRKAHQKIQRMSARFPAVEMFTAIPGVGLIVAATVVAIVETPHRFSTKEKLWKYAALAVATPESAGKTQRRHASKEGNKLLKKVLMLAAHNAARGEHRFGQAFRRHSSRSFSNAQRTVARMILSTMYGMWKSGECYRETA

SEQ ID NO: 135885 - protein, 371 aa, unidentified
MKRTIFVGLDVHKQWINVAVLLPGQDTPIEWRIVNEPQAIRRMLKRVAELSPGDVRYCYEAGPCGYALQRQIISWSDASCMLVAPSLIPRKPGERIKTDRRDASKLAHLFRAGLLTEVHPLTEEDEAARDLSRARDDLREDLTRARHRLSKFLLRRAITFTGKKAWTNAHRRWLESLRFDNPADSAVVADYLLAIEHIEQRLKSLLVHVERLGHDPRYAKAVATLRCFRSIDTLSAVGYAVELHNFDRFTSARRLMSFVGLIPGEHSSGERRRQGSITKTGNSHVRRLLIEAAWNYRHRPHVGASLRERRKGQPPRVIALADRAMLRLHRRYERLTHRGVLPQKAVVAMARELAGFIWAALSPLASQAAAH

SEQ ID NO: 135886 - protein, 311 aa, unidentified
MEIYIGVDVGKFNLDVYYLNKHLQVTNDSTGITSLLEDFKNNIPTSDNIVVICEATGGYEQLLIQTLLKHAISFHIAHPNKVRAFAKTQGILAKTDRIDAIILRDYGTLMHPQPSKNLLSESANTIRSLIKRRDQLLEDKRREQARLDKLTLPDIKNSVQSHISWITQEINNINTKIEKASEEDKIKQQVELLTSVPAVGNFTALMLISYLPELGSTNDAQISALVGVAPFNKDSGRYKGKRFIQAGRSMIRKSLYMSAVSSVRWNPDMKSFYTRLREAGKPAKVALVAVMRKLLILLNKIMKRQTPWKIT

SEQ ID NO: 135887 - protein, 329 aa, unidentified
MYHVGIDVSKAKLDICLLADGLDGKRKTKSLPNGISSAEAVINWLVMQKREPKQARIVMEATGIYHEHLAYGLHRAGVSVSVVNPCRIREFAKGMGILTKTDKVDAYVLACYSSLKQPQEWQPPSEEVRKFRALLQHRDVLLEDKLRTENRVKTLSSTQAPEEVMMSLSLMINHLKDELARIESLISKHVDNHPGLKDDLALLTSINGVGAQTGLNMLAELRGNTFESASQAAAYLGVVPIERRSGSSVRGKSRLSKTGPSKIRAKLYMAALTAISKNMHVKNQYERLLLKGKAKMQALGAAMRKLVHLCYGVLHTQQPYSQDYGMVTE

SEQ ID NO: 135888 - protein, 418 aa, unidentified
MTKSKSQKNKRVNKETMIVTLDIGKSFHHGYFRAPDGQDVDPFVFYNTRDSFHSFWKKLSRFKKAHGCRQVVVGFESTGPYAEPITHFLKQRPVTLVQINPMHSKRIKELTGNSPNKTDRKDPRVIADVIMLGHALRVVIPQGSPAHLRRLTQARERAVRDRTAMLNQLQHLLFVIFPEFLQVIKNVSCKTGLYLLRHYPSRQALAALGEEKLSRIIKRVSRGRMGQGRARALFQSAQRSVGINEGQESIVEEIGHLVDNIDRENDFIERLECQMRSHLEQVAYSSCLLSLPGVGLITVAGLIGEVGDFRQYGTVAEITKLAGLDLFEVSSGKHKGLRHISKRGRPLMRKLLYFAAINTVKSTGVMHQPYTRMVERGMPKTKALVAIARKLLRVMYALARDQSMYMENFVSHRYQCAA

SEQ ID NO: 135889 - protein, 352 aa, unidentified
MVIIGIDAHTQTHTAGAIDEQGRALATLEVGASPRELERLLAWVQSLGDVRLVAVEGAKGFGLPLTRRLLAAGQEVVDVPTHLTADGRRSSRSRGKDDPADAITIARIALREPGLPKLRESHLAADLKLLVDARDQLVAEATRVRNRLHALLLTLAPGYRAETGALSNRSGLRTARRLVRQGQPEDPIRARLALAAIRRLKLIEAEAADLEAEIREAVEATGANRLLAVCGVGPIVAAKILGETHDVGRFPSAAAFAAHAGVAPLPASSGTINRHRLNRGGNRQLNRALFTIAMVQARWDPQGSAYLTRKRAEGKSPPEARRCLMRHLAAVVFRSMVADAAKARRDPQIGAA

SEQ ID NO: 135890 - protein, 304 aa, unidentified
MNGIGIDVSKRQLDVGTTNGEILQVSNSASGFAELDLWLRKHPASQIVLEATGGYEQSVLNFLHNAGHPVVRANALRARRLAQGLGQLAKTDRLDACALAQMAALVKLPTYQPLEPWQQKMREFVRARRQTMEALTVARQQQEMVTDRELRRLLQANISRLQGIVGRLGKQIAEQVAQQPQLAVLKSMKGVGPGLQAVLASYLPELGRISGKRIASLVGVAPMSHDSGTMRGKRSIHGGRAEIRQVLYMASMSAMRHEPRLRDFYQSLRARGKEGKVAIVAVMRKMLVILNARVRDAQGGSIPA

SEQ ID NO: 135891 - protein, 387 aa, unidentified
MPQPNDLSRSLFALEQDATLIAVIEMGQASWLVAGIVPGIERQPLKKLTTDQEGLLQLLHRWRKEATQTGRTIKRITVAFEAGRDGFWLARWLRAHEIEVHVIHPSSVPVSREHRRAKTDRLDTELLKRAFLGWLRGEPNHCTMAAIPTIEDEDARRPSRERESLVKECTRIVNRLRANLARLGIRSFRPTLAHTADRLETLRTPEGAAVPPNTLAELQRDMAHLRFVKQQIKEVEVARAERLERTPEEGRNPMVHLLARVVGIGIESADMLVQEVFSRKLRDRKAVARYAGLTGAPAESGKRRREQGLAKAGNARVRRGMIQLAWGHLLHQKDSVLAEWYRKRTADARGGTRKTMIVALARKLLIALWRLVTTGEVRAGLLLRPAT

SEQ ID NO: 135892 - protein, 345 aa, unidentified
MNKSSKIIGVDLAKNVFQLALASSEHVVFQHKRLNRTQFLEFFTNHPAVHIVMETCGTAHYWARTLIGMGHDVTLLPAQYIRPYVRRNKTDRNDAIAIVEAARNQSIHTVPVKTEYQQSIQSLHRLREQWKSTRVARINALRGVMREFGILVPLGPRAAMKTTLDSLETLPVLLQATVQNVLTELNTIQENIHALEKQLKQIVKQDVVVQQFMQVNGIGLLSATAIRASVQSPSQFKNGRQLSAWIGITPKEYSSGNQRYLGRISKRGDKYLRTLLIHGARSAMARIKIMQRNQEKLSALQQWAAQLEQRVGHNKATVALANKMVRILWATWMHQRDFDGNYATQ

SEQ ID NO: 135893 - protein, 413 aa, unidentified
MAGTKKARPDLALIPMLPHETLYIGVDVGKFRHVAGFLSRTLLQRHERFEGCPAFAFEQSREGFRALVDRIREYVPLEQATVLIEHTGHYHKNLEQYLLELDITVYRIHVQERPKGMTKTDKRDALNLANRLYTQLELGAQVEEKLQLVRRTVPPTQAAMQLRGFMQHRDALSHQRTQLRNKLTAICDELFPEFTQIFHDPNLAVALAFREKFPTPHDIATASLSALRETRVQYFPSETNLLRLQQLSRETIGITNVDRLRGMKVEQELLIKELRLVQEHLERLDAEIADIVKTCREGQILLSMPPIGPVQAATIIATIGHINNFEKAAELKSYFGWAPRREQTGVSFDRTKLAQGGVRSVKQMLYLMAVRATTLDCEWARIYRRLLPRMATYDDRIKEYRGPSRLRTIEKKS

SEQ ID NO: 135894 - protein, 353 aa, unidentified
MKRTNKYVALDVHQATTVTSVRVQSGRVVARSILPTEPSALVEYFGGMRGSIRVVFEEGTQAQWLHDLLAPIVAEVVVCDRRGEPRGHKADQRDADQLSRRLLSGDLRTVYHGRGDRRSLQELTRTYLNLVEDSTRTMLRLKSLFRARAIRVPGKRIYGTKERALWLARLPDRGARFRAETLYAELDVLRELRPKAKALMAIEARRDPAAAVLRSIPFVGPVRVALLLATMKTPWRFRTKRNLWAYAGLAVVTESSADHVFIAGHPVRRRRKPLTRGLNKNHNRVLKSVFKGLATASIGKPGPFQDLYRGMLDRGMREDMARVTLARKFAALTLRLWKTGESYDPTKLTMRVT

SEQ ID NO: 135895 - protein, 369 aa, unidentified
MKNGSTLRVGLDVHKESIAVAYAGEAGTEAVYVGEIGTRQCDIDAVIRKLQSKGAELVFVYEAGPCGYWLYRYLTGKGLTCFVVAPSLIPRKAGDRVKTDRRDAVMLARLARSGDLTPVYVPAVGDEAIRDLSRAREDALHDLNAARFRLKAFLLRNDIRYSGRANWSAEHVRWLARLVLPTPAQQIVFQEYVRTVSERTELLRRLESELLEQAKTWRLAPVVEALQALRGVQFTVAITTVAELGDLTRFDSPRQVMNYLGLTPSEYSSGERRRQGGITKMGNGHARRVLVEAAKAYRHRAKVSEQIQARQQQLPKEICDIAWRAQVRLCGRYKKLALRGKHANTIAAAIARELAGFMWAIAKAQATAA

SEQ ID NO: 135896 - protein, 345 aa, unidentified
MPIVGGLDIHRKQITFDYLDTATGEIRRGQIAPADRAHLRAWLARFAGRDDVAFALEGCTGWRYVAEELAAAGVTAHVAEPADTAFARGRKRHAKTDRTDSRHLRVLLEQGRLPECWIPPAQILECRALLEAYHDLRREHTAWIERIHAVFFHQGAPRLGEGALRTEHGLAALREAAACHLSPAGQLQVATALDMLAAVEARMDTLRQQLLHAARHLAGARALQARLYGVGPLAGLAMTCWLGGAGRFSSSRKAVRFAGLDVTVYSSDGKRSPGHLSRQGPEILRWVAYEAGKTHGRASAPGHDYYAAVKDRTDGKIAALSQARKLIRQACHILAELGDDALTAA

SEQ ID NO: 135897 - protein, 371 aa, unidentified
MKKGTTRYLGLDVHKATVTVALAEDGSQPVVYGTIANDPSSVRKLVRQLGREAKLVVADEAGPTGYALHRQLLELGAECTVVAPALIPRRPGDRVKTDTRDALTLARLLRSGDLTPVWVPGEEDEALRDLVRARFDAKADVLRAKHRLSKFLLRRGIQVPPGTKAWTARYQAWLNQLSFPQAAAQVVFDDYRATVRATEDRIRRLETELRSCAQDSRQAALIAALQTLRGIGFLSAVTIAAESGDIRRFANAPRYMSFTGLTSSEYSSGQSHHRGAITHAGNAYLRHVLVQAAHNARHAPNSSRELQQRQAGLPSDLVALAWRAQLRLHQRYRHLVGRLGRPKAVTAVARELAGFVWAVGQRMAEQEVSPA

SEQ ID NO: 135898 - protein, 431 aa, unidentified
MLKINPLSTLYVGIDVSSKSNYVCALDFFKNKYINSSFANNQPGAEELALKILECLNQHPDLTMVVAALESTSVYSIHIANYLSSCEELMRFKPYVFVLNPKCTANYKKSYIGLGKSDPIDAFVIADYARAGNIESEPWRGSQFLALKRLTRHRIHLVECITREKTYLISNLYLKFSELQMLEGDDQPFCDIYGATSSSVLMEYLSPEEILASSEENLIAFLAEKSRNRIKDISKTADLLKKAARDSYRLDKALYEPLNVSIASSFNCIETFKREIKVIDNAIEKEIKGLNPNAFIILQSIDGIGPVFAGGIIAEIGDITAFHSSDALAKYAGLTWKSNQSGDFYGEDTPMIKAGNRYLRYYLGEAANSMRKHNVEYGAYYRKKYNEVPKHQHKRALALTSRKFVRLVYGLLARNQLYSGVSLDTSIKDSN

SEQ ID NO: 135899 - protein, 371 aa, unidentified
MLLPRQPLKLARGAKDEEHVMSQQINARVAVVGIDIGKNSFHVVGQDTRGEIVLRQKWSRSQVEARFANMSPCLIGMEACVGAHHLSRRLKALGHNARLMPAKYVRPYSKGQKNDFRDAEAIAEAVQRPTMKFVAMKTADQLDLQALHRVRERLVSQRTGTIDQIRAFLLERGIAVRQGQHCLRAELPRILATPSDTLSPRIVRVIEALALDLRLFDQRIEGLSSEIGELAKQDVGCQRLISVPGIGPIISSAMVAAIGTGDAFAKGRDFAAWLGLVPKQISTGDRTILGKISKRGNRYLRVLFVQAAWVVLVKVKPARWESHGLKSWIEAAKKRLHRNVLAIALANKLARIAWSVLARGRAFEASKLQVV

SEQ ID NO: 135900 - protein, 343 aa, unidentified
MKIAILGIDLGKNSCSVVGLDHAGTVVKRRRMRPESIPAFTRTMPACTVAMEACCGAHHFGRLLRSQGHTVRLMSPEYVRPYVKAQKNDDRDAEAIAEAATRPTMRFVELKSEEQLDMQTLHRVRDRLVGERTALINQLRAILLDRGCAVPQGRRKLEQHLAAMPDPDNDTSLSPRVCRLIDDMRAEWLELDRRIATFDNEFAARARNDADARRLTTIPGIGVLNATALVAAIGNGETFARGRDLAAWLGLVPRQVTTGGKPRLVGITKRGNKYLRKLIIHGARSALPVLASGPTPLGEWLRALMKRVHKNVAVVALANKLARITWAVLRRGEEFAATARAAT

SEQ ID NO: 135901 - protein, 420 aa, unidentified
MNTDTNNHNSYSDYAAFIAIDWADQQHVFSLKAADQTKKETGTLEQKPEIIGLWVAKLQERFGGRPVAVALEQSRGALIHALLAYDFIVLYPIHPTTVAKFREAFRFSGAKSDPLDTDQILEILTKHLDLLKPINPDTPETRLLGRLVQDRRKAVDLRTSHIQACLAGLKEYFPQAIELVNGNLSSRLACDFLMKWPTFEAFQQAKPSTLKRFYYGHNIRSPEVIQKVLNLATTAKALTTDPAIVESGSRLSQMYAQLIQTLNPVIEDYDQRIKKVFHDHPEAPLFSKLPGAGPALAPRLLAAFGTDRSRYETAGSVQTFSGISPVTRSSGKTRFVYFRHACPKFLRQTFHEFARLSLPKCQWARNYVEYYTGKGKKYHTIIRALAFKWIRILFGCWKHRKPYDDDQYMQILKKRGSRFC

SEQ ID NO: 135902 - protein, 321 aa, unidentified
MTYVGIDVSKATFVVAYSSAKTSKTKTFKNTVKGIHEFVQTISAAEHHCVLEATGNYSALLVYLLSEAGITVSLENPLKIKNFARVMLTVTKTDEIDARLIALYGERMQPTPYKLRSDSILVLKQKRTVLRQLKKQLVATRNLKGSMEVLPHFDPECKKNIEKTIGFLEKQIKAMEEKLASLAQGEYKKQMDLLTSIKGIGVTLATALIVATGGFTYFDNAKQLTRYLGLSPTYQQSGTSVNVKGHINRNGDSNLRSQLYVAAFSSLRCNTECKACFDRLRSNGKPGKVAVIAVANKLVRQAFAVVTHGKPYVDGFKSEKP

SEQ ID NO: 135903 - protein, 456 aa, unidentified
MRRNDPVDNKVRGSLPMVHPNAAAIDIGARMHVAAVGADRTVEPVRSFGTFTTDLHRLVDWFTECGVETVVMESTSVYWIPVFELLEARGFVVFLVNARDAKHVPGRKTDVSDAQWLQRLHSHGLLRASFRPKGEIVELRAYLRQRERLLEYAASHIQHMQKALTEMNLQLHHVVADITGATGLRIIRAILAGEHDPAVLALLRDTRCHASVETITKALTGHYRAEHLFALEQALALYDAYQEKALACDARIEAVLKQLSFRRSREVNPLPSPRRGMRRQPNGPGFDVRAALFALLGKDLTQINGLGPYLALKLVAECGDDLSAWPSAKHFTSWLCLAPSNKISGGKVLSSRTRRSGSRAAALLRLSAVTIGRTDTALGAFYRRLSARIGKVKAITATARKIAVLFYNALRHGMDYVDPGASSYETRYRARVIDNLHRRAKAFGFILQPTAPVAVS

SEQ ID NO: 135904 - protein, 341 aa, unidentified
MDEVSTIGLDIAKSVFQVHGIDAAGAVVIRKRVSRAKVLEYFGELPPCLVGIEACPSAHHWGRELQGLGHTVKLIPPSYVKAYLKRGKNDANDAAAICEAVTRPSMRFVPIKTKEQQTALMLHRARQLLVRQRTMLSNALRGHLAELGIVSAKGRNGTAELLRIIADGCVSPAVCGILKVLARQYGAIGAEIASIDKGIMALHRACEASRRLAEIPGIGPVGATALVAEIGDWKTFSSGRSLAAWIGLVPKQHSTGGKERLGSITKQGNRYLRWLLVVGAMAIIRYARKHGTERRPWLGRLMERRPTKVAAVALANKIARMAWAIMVRGERYKEPELLLAA

SEQ ID NO: 135905 - protein, 307 aa, unidentified
MSVCVGIDVSKHSLEWSVGSDGAIQHTRNEPRPIAQLTRRLVEIDPERIVVESTGGYERTLVAKLAEAGLPVVVVNPRRVRSFGEGMGFLAKTDAIDARLLALFGEKAQPSLRPILQGTDRLLADLVARRRQLVAMIVAEKNRREPATRDVRRTIDPVLRTLSKLVRDLERRIDHALRQDLERAELLALLQTVPGVGPGVARTLLIDLPELGHLGRREIASLVGVAPFARDSGSTRGVRRIRGGRASVRTVLYLAAMTASRFNPPLAALYQRLRKAGKPPKLAFVALARKLLTILNAIARERTAWQA

SEQ ID NO: 135906 - protein, 438 aa, unidentified
MIAELVKMKGNVSGIDIGSEKIFIATSKDDEVVNYDTYTESYKRAIEYLKSKEIQSIVIEATGIYWIAFFELLESAGFEVYVVNGKHVKNVPGRKTDVLDCQWLRTLHSYGLLRASFIPPQNIRALRSYVRLRDDNIGLGSQHIQHIQKALELMNIKINNVISHITGVSGIKILKSIIAGETDAWKLLELCDKSKKDKKQKEVLESLKGNFRQEHIFLLKQALEGWEFYQRRLGECDTEIEKLLKEMTKDKEEIKTKGPSKRNNSPNRMKIESLHSLLLKLTGGKDAEKVVGISDTMLIQLTSEIGINLSAWKTEKHFTSWLGLAPRVNRSGKGRKRKKDKINTRAGQLFKIAVQGIAKSKGTALCGFYRRIKSKHGAMVANKATARKLAVMYYNIMTKGIEYVEVGLKKYQEKYEQQRLKFLIKQASSFNLKLVPAI

SEQ ID NO: 135907 - protein, 421 aa, unidentified
MQVLYERCAGVDIGKDVIAVAVRLPGDGPGGRKTIKRMFETFYGVLRECARWLTDHGVTHVAMEATGIYSMPVYHALLAHGEFEQVLVCNAGHVKNVPGRKSDLSDAEWLAHLLECGLLRGSFIPSAEIKAARDVIRYRAKLTESRTSELSRLGNVLQDAGIKADSVASSITTKSVRAMVEALIDGERRPTVLAELARGRMRSKIPDLQRALEGRFDDHHALMCRLHLEHLDHLDAMIAKLDSQVEQMMRPFRPRRDLIVSIPGFGVRASAAVVSEIGADPAAWFPSAEQLASWAGLCPGNHESAGKRRHGRRRKGNQHLQPVLVECAWAAVRTDGFLREFYRRQVRKFGGFRSPAAKQKAIIAVAHKLIVILWHVLATGRPYEDLGADYFTTRIDPEKERRRLVAKLEAQGFKVTLEPAA

SEQ ID NO: 135908 - protein, 347 aa, unidentified
MHSTTIAVDLAKSVFEVALSERPGKVRTRRRLSRGQFSRFLAEQPPATVVMEACGTAHFWGREASERGHRVVLLPPHAVRPYVPRNKTDGADAKGLLEAVRNEAIRPVPVKSIDQHVLAGLHRLRSAWMATRTARLNTLRGLLRELGFAIPVGARQVVPTVRALLSEAESGLPAALRPALAEAAREIAELEARIREVERSLESMAEESELLAKLRTIPGVGLLTATALVAFVGDVRRFPSGRHFASYLGLTPREASSGLRRRLGAISKRGDPYLRMLLIHGARSVLLHAKRRPAHEHDRLRSWALGRERARGHNKAAVALANKLARVVWAVWRSERPFGSHERRGTN

SEQ ID NO: 135909 - protein, 400 aa, unidentified
MKVSGLDLHKDSIFCAICNGKKVEEVKEYPTFTHSIREMGVYLQKEGVKKIAMESTGIYWIPVWNILEEMGFILTLVNPYIIKQIPGRKSDVKDAQWIATLLHKGLLRGSLVPDKTIRQLRSYSRKYVRLQSDITRVFQEMERILEMCNIRITSLVSNNNSVSVKNIIEQIIQGNSSPEELACYVHGRILKAKGELVQLSLEGFIQEHHRFSLELAYEQYHLFQKQLLLVESKMEEICNAHYQEQMELLESIPGIKKQAAMQIIAETGADMTAFENSGKLTGWAGLRPKNDQSAGKMKSTSVTKGNKYLRRIMVQSAWAASRTKGSFYKSKFEQLCIRKSRKKALIAIARKLLTVTWHVLSEKKGYNKNILPTYNPEKIKHKIIYHQRELLKLESLGFSL

SEQ ID NO: 135910 - protein, 402 aa, unidentified
METSITGHDSVDVFIGVDVGKGEHHAVAIDRTGKKLFDKALPNDESKLRALIDGLKDHGTLLFVVDQPATIGALPIAVAQAAGVLVGYLPGLAMRRIADLHAGEAKTDARDAAIIAESARTLPHALRSIQLADEQVAELSMLCGFDDDLAGQVTATSNRIRGLLTQIHPALERVLGPHLDHKAVVDLLQRHPAPADLAKLGPTRLANRLVKLAPRMGKRLAAEIMQALSEQTVVVVGTNAASLVLPRLAKQLEDLRTQRAEIAVEVERLVDAHPLHPVLTSMPGVGVRTAARLLTEVAGKQFATAGHLASYAGLAPVTRRSGSSIRGEHASRRGNKILKRTLFLSAFAALKDPVSRTYYDRKRAQGKRHNQALIALARRRCDVLYAMLRDGTIYQTPTPQNP

SEQ ID NO: 135911 - protein, 394 aa, unidentified
MILVGIDIGKKQHTFSIIDKGTGEILSNPSVFNNNQKGFLLLIGKLSSYVKSELLIGMEDTGHYHLALLKYLLERHYTVALINPTTTDLTRKLQGGITKNDPLDSLTICDVIGSNQRKKPYRITKVNRFDLYEQKQLTRHHHNLKEELNIYKNRLQKCIDIVFPEFNSLFRSKYGIVYMNVLKTFASAEKIANSDIRIIRKCFEYEGRGKRIPLSAEQLKTVAKASVGIPSVAEEIQIRHLVCQIEMIEEQLSEIDKKIEEFSLQNNSPILSIPGISHFSGTSILAELGDICNYTKASQIIKFAGVAPYHYESSQFTAQHTAITKKGSRYLRKTLYQIILPVINHNRVFTAYYNKKLAEGKGHRCAQGHCIRKLLRIIYHLLSTGQTFDPALLI

SEQ ID NO: 135912 - protein, 369 aa, unidentified
MADYREAFVAFDVAKIKHAVAVADSGRAGEVRFLGEIENRPVTIERTIRKLAKRYDRLHVCFEAGPTGYGLYRQVGDLGHDCMVVAPALIPKRAGERIKTNRRDAVTLARLHRAGELSAVWVPDIVHEAVRDLVRARQAGAEDLRRKRQQLLSFLLRHGRIYDAGGHWTLAHRRWLARQAFEHQAAQIVFQETSDAIEDAAQRLHRLDEQLAAIVETWSMKPVVEAYQAMRGASFLVAVIFAAEIGDVRRFETPPQLMAFLGLVPGERSTGDTVRRSGLTLAGNRRARRALIEAAWTYRYPARVSEPLRARLEGLPKAVRDIAWKAQVRLCARYRRLAAAGKKPPVIAAAIAREMAAFLWAIGREVAPS

SEQ ID NO: 135913 - protein, 331 aa, unidentified
MQPGEGIIGIDISKDSFDMVLRSVRGEAHRVFANNQKGFTAMIVWVEKQPERIERICMEATGSYWEGLAEYLDERGYPVSVVNPYQIKRYGDHLLNRNKTDKADASLIAEFCEKDLERLRRWKPYPAEIKALRSMERRLDELQSMKQQEQNRLKSGVSDAVVIESLEENLKHLEEQIKALKEKIEDHMEQHPDLKAKQRLLTSIPGIGKQTANKLIAEIRDIEDFASASQLAAYAGLSPRQYRSGSSVYKQTRISKQGRSQLRTCMYMPAVVAADHNPIVMDLKRRMLASGHAKMEVIVAAMKKLLHLVYGVLKHGIPFDPEYVQNSTLIP

SEQ ID NO: 135914 - protein, 358 aa, unidentified
MQTQGTKIDFHGQNIYVGIDTHLKSWKVALFHDDISLKVFSQEPDPLLLVKHLRKHFPNATFKCAYEAGFSGFWLQKALTREGLDCIVVNPADVPTTDKEKRLKTDKRDCRKIARSLRSQELEAIYVPSDEGLEERQVIRFYRDMIKSRTKTKNKIKAFLNFYGIVYPEEFKNPAYHWNRSFLSWLKSLKVKTGEGNWVLQSYIQEYEHASDKVKETLKQVHQLSQSDKYTSKVKFLRSIPGIGIVSAMTILTEIEDIHRFNTLDELCGYVGLIPNTDSSGEKENTGGITNRGNTHLKAVIIEAAWMAVRYDPALLLSFQKLKSRMEANKAIIRIARKLVNRIRFVLKNEIEYQTGII

SEQ ID NO: 135915 - protein, 402 aa, unidentified
MNAVGIDVSKGKSMVAIMRPFGEIVSAPFEIKHTASDINSLVELINSVEGESRIVMEHTGRYYEVLAHQLSAANLFVSAINPKLIKDFDNDSLRKVKSDKADAVKIARYALDKWQNLKQYSVMDELRNQLKTMNRQFGFYMKHKTAMKNNLIGTLDQTYPGVNTYFDSPARSDGSQKWVDFASTYWHVDCIRKMSLNAFIDHYQNWCKRKKYNFSQSKAVEIYGKAKELVPVLPKDAITKLIIKQAVDQLKSASTTVESLRTLMNETASKLPEYPVIMAMKGVGTSLGPQLMAEIGDVSRFTHKSAITAFAGVDPGVNESGTYAQKSVPTSKRGSSDLRKTLFQVMDVLIKTHPEDDPVYQFLDKKRAQGKPYYVYMTAGANKFLRIYYGRVKEYLSSLPES

SEQ ID NO: 135916 - protein, 347 aa, unidentified
MVTVGSDSHKRTHTLVAVDENGRPLDDQTFAATTPGHLEALRWASQWPDRRWALENCRHLSRRLESDLLHAGEAVVLVQARLMATVRVTGRQLGKSDPIDALAVARAALREPNLPVARLEGKSREVKLLLDHREDLVGERTRICCRLHWNLHELEPGMELSDSALIRWCVMDRVERVARRHSGLLVEIVLEQLDSIRCLTRRIKALELQLRALMRQLTPSLLELQGCGTLCAAKVFAESADIRRFETRAAFALNNGTAPIPVWSGNNVRHRLNRGGNRQLNAAIYRIAVIQARDEGLGRTYMAKRQALGNTRREALRSLKRRLSDEIFRRLWRDLPLALEERFLAVA

SEQ ID NO: 135917 - protein, 410 aa, unidentified
MPLFCGIDWATDHHDVAVVDDGGHVVARGRVGNDAAGFAQLLTMLAEAGDTREHPIPVAIETDRGLWVAALRETGRVIYPINPLAASRYRARYAVSGAKSDATDAVLLANIVRTDAAAHRPLATDTELAQAIRVLARAQQDAVWARQQIGNQIRDLLKDFYPAALVAFAELPSGGLARVDARTILAAAPTPAQAAKLTPARLRRLLVKAGRRRDLDRDVTRLRMVFTDTYLHQPPMVENAMGIQLAALLRQFEAACAAAEELAQAAIAHFDQHPDAAIITSFPGLGSLTGARVLAEIGDDRTRFADARGLKAFAGSAPITRASGKKTVVTHRHIKNRRLTAVGSIWAVASLRGSPGARRHFDARRATGDWNRQAQRHLFNKFLGQLHHCLQTGQLYNEHRAFPPPLPLAA

SEQ ID NO: 135918 - protein, 359 aa, unidentified
MQTQSNKIDFKGQDIFVGFDVHQKSWKVTVMTEQLILKTFSQDPRPELLHQYLIRNFPNARYHTAYEAGFCGFWIHNKLKALGIDSIVVNPADIPTTDKEKVTKTDQRDSKKIAKSLRGGLLKGIHVLSLKTLEDRSLVRTRATLVRDHTRTKNRIKSFLFFHGIELPDHFKQTSSHWSRRFMEWLESIDLKEVSAKKSLSLLIRESENMRSTILDATRAIRELSQSETYVSQVQLLQSIPGIGSLTAMVLLTEIETISRFSNFDKLCSFIGLVPSTHSSGEKEIIGELTHRGNDSLRSILVECAWIAVRWDPSLNKSYNEYCRRMEPNKAIIRIARKLLSRIQFVLKTNQRYVCQIIK

SEQ ID NO: 135919 - protein, 344 aa, unidentified
MNNLSRVGIDLAKNIYQLHGVNRTETSTWCRRLKRDNWIKVLLNKAEPGCEIGMEACTGAHHWARLLQSKGFHVKLIAPQFVKPYVKSNKNDANDAEAICEAMSRPGMRFVTVKTVGQQEIQAVHRIRSELVGQRTAKGNQIRGLVAEYGLVAPQQINHLRAAIPAWLEDAENGLSDRFRRLLNGLWGDLKRLDERVSEMDKEIALIANNDPVAKRLQQLCGVGPMVATALLASVGDGKQFANGRQMAASLGLTPKQHSSGGKDRLLGISKRGDAYLRSLLIHGARSAIYAARGKEDRLSQWVMSIATRRHPNIAAVALANKTTRIAWAMLRHDTDYDPELAAA

SEQ ID NO: 135920 - protein, 413 aa, unidentified
MEMEVIVERCAFLDVHRDTVMACARTPDGHGGRREEVVEFATTTSQLLVLADWLAERKVTLVGMEATGVYWKPVHWVLEASVPEVWVINARHMRNVPGRKTDVADAVWGASLLEHGLVRPSFIPPEPFRALRDLTRYRKSVIEERARESQRLHKVLEDAGVKLSSVASSVLTKSGRDMIDALIVGERDSTVLAKMAKGRMRSKIPQLQDALAGRFNEHHALLCRAMLARIDQADATIEVLGERIDELLVPYEAAVTLLVTIPGVSTRTAQVILAEIGADMSRFPTAGHLASWAGMCPGNNESAGKRKSGRTRHGSKWLRKALIEAGQAAGRSKNTYLSAQYAQIRARRGPQRAAVAVGHSILVICWHLLSTGEVYDDLGADYFDKRRNSEARQRRLVRQLEAMGHKVTLEPAA

SEQ ID NO: 135921 - protein, 350 aa, unidentified
MKKICIGIDVSKETLDVTVIHIESYELVEKLGYSKFDNRPSGFRSMTAWVRKVIKSRGQMDEALFCMETTGSYDLPLCHWLHKNGLNVWRESALQIHCSKGFQRGKSDKEDSEVIAQYAARHQSRYTAFVPDAEAVADLKELICYRDSLVERRKECKVRLANKKETLVNRNSKAWKCIERLSKAEIKRLDKVIGECDEEIRNLMKEDKEMEKNYQHLTSIVGIGLINGAALIAYTGNFKKITTPNKMSCYCGCFTFYEDSGTSVHRKSPYRNACCKMLKGYLRMAAKSAMLANTELRKYSERLREKGKPYAVILNNVANKLLHIMFSLVKHDYDYEYNHEIVRRMEREIA

SEQ ID NO: 135922 - protein, 318 aa, unidentified
MIKYHKHIGIDIGKYNFVVGIEGIKDTKEYENTSSGIFEFINDNKDILANSLTVVETTGGYELELLYSLCERGYVVHRADARKVKNFIRSYGNSTKTDKLDAKALGLYGKERADKLEVFKPESKQNIQLFRLVQRRNDLKQMLVAEKNRLQQANTDKFVKNSCINMIDVLSNQITEITNQVEVIISSDQLLKAKHEILKEINGIGNIVAFELLILLPELGKLTRRQIASLAGLAPKANDSGKYQGYRKVGHGRAGVKPILFLAAMSARNSKTSGLRLFYERLINNGKKKMVALTALMRKIIVIANAKLKSLLFNLKHS

SEQ ID NO: 135923 - protein, 345 aa, unidentified
MNKLSVVGLDLAKNVFQVHGVNTEGEVVVRKQLRRSEMRKYFAQLAPCLIGMEACGGAHYWSRELTRLGHSVRMMAPAFVKPYLKSNKNDRNDAAAICEAVQRPSMRFVQPKLPEQQAVLHLHHGRQLLVRQRVALSNHMRGVLSEYGIVVPQGVKVLSRQLPEILEDAENNLPMLARHLLAELKAEHDQLIERVDRFEQQLKAWHANSPVSQRLASIPGIGVLTATALAATVGEGQDFKNGRQLAAYLGLVPRQASSGGKDRLLGISKRGDGYLRSLLIHGARAVIHHIRRRLNAGRPGGNPWVEQLLQRCHVNEAAVALANKMARTAWVLLARNETWCPARPV

SEQ ID NO: 135924 - protein, 387 aa, unidentified
MNRVEDLSRSILPFDQEKAVVAVIELSSTSWLVAGTLPGITRRPLKKLEPDPAALGRLLDRWREEATSKGMQIDRVIVAYEAGRDGFWLARWLQARGMETHVIHPTSVAVSREHRRSKTDRLDTAMLMRVFLGWLRGERGHCGMVAIPTMAEEDARRPSREREKLVGEKTRIINTIKAAMQRLGIRGFNPALKRAAKQLDSLTTPDGDPLPPNLRSELQRYLERLSLVREQIATIERERLARLEAAPDMKTNAMVLLLTRIIGVGVETADMLVQELLSRKLRDRRAVARYAGLTGAPDESGARRREKGLSKSGNARVRRGLIQLAWRFLMFQKESGLAQWYRHRTVGDAPTPRKKMIVALARKLLIAFWRMVTTGEVPAGVVLRPTV

SEQ ID NO: 135925 - protein, 366 aa, unidentified
MMGWMAPLRHLSAKMLGVESPADGEPSMSEITTIGLDLAKHVFQVHGVDANGATVVRKRLRRVQVLAFFSRLPRCLIGLEACTTAHYWARELRTLGHEVQLMPAQYVKAYVKRNKNDAADAEAICEAVVRPTMRFVPVKTPEQQAAVLLHRGRERLVRQRTGLVNALRAHLAEFGVVAPQGLRNVGKLITIVRDESDARLPDLAHQVLAVLAAQIEQIEAAVAALEKQLMAWHKSNAVSQRLATIPGIGPIIATAIAATVVEPSAFRSGREFAAWLGLVPRQNSTGGKTRLGGISKRGNQYLRRLLINGASANLLRSKLTNADPWVIGMRRRRPSLVVAVALANKTARIAWAVMHRQEVYQRMAAA

SEQ ID NO: 135926 - protein, 375 aa, unidentified
MTKSNILFIGMDVHKESIEIALADDGANGEVRRYGRIGGTLDALSKTLRKLVSENKTLHFCYEAGPCGYELYRYLTDAGHICIVVAPSLIPKKPGDKVKTDKRDAVQLVRLFRAGELTPVYVPDREDEAIRDLSRAREDAMIIQKSARQRLKSFLLRHNIRYQGRANWGEKHLRWLADEVRLPIAAQQVVFQEYVNTVTEAACRMERLVGEIHHYVKAWRLYPVVQALMAMRGVRMIVAVTVIAELGDLTRFENPKQLMSYLGLTPCEYSSGERQRRGAITKTGNHHARRILIEAAWSYRFFPKVSPEIQKRQQNLPLPIRDIAWKAQLRLTKRYKMMTQRGKLPNVVVVAVARELAGFMWAIAQAVPLSKPPQV

SEQ ID NO: 135927 - protein, 348 aa, unidentified
MNSLHYIGFDVHKKTISFCVKTAAGEIVEEGSTPAQREALRKWAAARPQPWRGAMEATLFSGWIYDTLKPYGEQLEVAHPAKMKAISAGKKKSDTIDARTIADLVRCNLLPACYVAPPRIRELRRLLRYRSLVVSEAVRMKNKMAGLLMETGALYVKEKLHRKKYFASLLEELEEVPESVIDLLRLSRGALEMFESTQKRLVRELLADPELAQRVERLMTIPAVGEITALTWALEVGDPQRFPSCSDAMSYCGLTAALKSSAGKQQRGPISKQRNHWLQTTLIEAAKLAPRWNPQLAALHARELERGHRNRATLAVARKLVSYLLAVDKSGQPFQVRAPSELPTQKAA

SEQ ID NO: 135928 - protein, 389 aa, unidentified
MLAGDGAAQRDREVHDFAEGKVSASFSFANDKAGFEKFISETSRFSRKKDFSDVKIGLESTGHFSTNITNYLLQKRLSVKIFNPLVVSFERKAKSLRKTKTDKSDSKFLAQLLFADTSQPYLLPLYPISELKTLTRNRHRLVSMRSKLKVSVSRLVTILFPELPDAVYSINQKSCYALLLEFPTAKSIAEAHLTKLMNLLLDNSKGKYGREKALEIRTLAANSIGNNSRATGFELQQTIRLIQNLESEISILEREIKSIMDDLDSPILSVPGIGYILGAIILSEIGSVENFSSPNKLLKFAGLEPSVYESGNYKASNTPMVKRGSPYLRWAILQAAWLVAYRDKTFHEYADKKLAEGKHFFVVQGHVAKKLVRTLFCLLKNNVQFAPQS

SEQ ID NO: 135929 - protein, 351 aa, unidentified
MLIIGVDYHPSFQQIAFFDQETGECGERRLNHSDGEAEKFYRDLKSRGVSTRVGMEATGYSRWFERLLTEPGIEVWIGNAGEIKAKRVRKQKTDRQDAQLLLKLLLEDRFPRIWVPSPENRDLRQLLWHRHRLVQMRTRIMNQLQALAMNEGKRWKKKLFSEQGRAQLEKFPLSPWASRRRQDLLELLDRLDPKIAELTAAIEQEARKWPEVLRLMTHPGVGPLTALAFVLIIGTPERFHRGKQIGSYLGLIPSEDSSAGHQRLGHISKQGNSLLRFLLVEAAQAAARCNSDWRRRYVHLAMRRENSIAKVAMGRRLALRLYWMWRNGGEYSQSLEFGSYAGQLGTGHGVK

SEQ ID NO: 135930 - protein, 352 aa, unidentified
MSRKSLPCGITTIGLDIGKNTFHLIGFDRRGAVALQLKLSRAQLERRLANVPACLIGMEACSGAHHIGRELESLGHDVRLIPAQYVKPFLKGHKNDYRDAEAIAEAVQRPTMRFVRIKTPEQMDLLALHRVRSRLVGQRTAVTNQIRGFLIERGITVRQGLMPLRRALPEILSANSGPLSPRMVALIADLTGDWRRLDERIAGVSADIEALAEQDDGCQRLMTVPGIGPIISSAVVAAIGNGAGFKQGRDFGAWLGLVPRQESTGDRTILGKISKRGNKYLRTLFVQAAHVVLIRRPNTARHALWPWIVRASKRLHRNMLAIALANKLARIAWAVLARGHTYQPRIAADAAS

SEQ ID NO: 135931 - protein, 415 aa, unidentified
MALKIVYKICCGIDVHKTFVVACIASTNDKGVTSYESHRFSTYTSGLKTLLQWLLDRNCKDVCMESTGKYWIPVYNILEKDCSIVLAHPKYVKAIRGKKTDKKDAKWIADLFKHDLVAGSFMPPAGIRQLRDLMRYRFKLTCFKSSEKNRLQNCLTVSNIQLGNVVSDTFGKSAQAILDKLLENPADTSFDLEPLVYKSLKKKLPELRDAIDGYITPEQAGKLKVIKAHYENLESRKAELEELILALAAPYQQELAILQTAPGISSDFTAIGIISEIGTNMEAFPSAKHLCSWAGLTPTNNESAGKKKSVRVSKAGCYIKPLLVQCANAVVKSNKHPEIRNRYLRIKKRRGHKKAIIAIARMLLTALYHMLKNGENYNAELYRKSDLPPVNREITVEQALMIARNQGYKIKSATA

SEQ ID NO: 135932 - protein, 427 aa, unidentified
MNYTQNEKIMSITERTLVVGVDIAKSIHYARAFDYRGIELAKVFRFENTREGLELFKEWISILEKENSKSSSIVGMEPTGHYWFNLGHFLKEEGIRLVLVNPFHVKRSKELDDNSPTKNDRKDPKTIAKLVIDGRYSIPYIPEGIYRDLRIVMDMRDSISKSLTRIKNRVIQWLDKYFPEFFDVFADWEGKAALITLREFPIPEKIIAAGIDDIVVTWRKGVKRAVGSKRAARLVEAAKGSIGVKEGLRMAQKELRAIMQQYDLYMEQLSEVELDMEELALQVPGVSEMLTIKGVGILTAAAFMAEVGDISRFSHPSQIQKLAGLNLVEDSSGKHKGQTTISKRGRSRLRSTMFKVMMPLVAKNDEFKALHEHYTTRRENPLKKKQSLILLCCKLIRIFYALITKEVAYSPEKLLKNISYLQLQDAA

SEQ ID NO: 135933 - protein, 337 aa, unidentified
MNYSGIDLHSNNSVVSVIDETDRVVAERRLPNDLAKIMAFLAPWQAELAGVVVESTYNWYWLVDGLQAAGFVVHLANTTAIKKYDGLKHTGDETDARYLAHLLRLGILPTGTILPAKHREVRDLARKRMQLVRSRTTHILAVENITARQCGTRITSNQVKQLDEAAVDQLHLPEDVALAVRANVAVITTLSAQIAIVEKRLQEKVTAHADYALLTTVPGIGQALATVIMLETGTIERFASAGNFASYARCVDSQRVSNGKKKGEGNTRNGNPYLCWAFIEAANFAMRFSAEARQFYERKKAKTNPVIARKALAHKLARACFHMLKERKPFDVTRCFA

SEQ ID NO: 135934 - protein, 422 aa, unidentified
MLEPTSDDERIVERIAALDIGKAELVCCLRVPDPKAPGKRLQEVSTYSMMTRSLLVLCDRLRQAGVTRVIMEATGEYWKSPYYLLEAAGLDPWLVNAKDVKHLPGRPKSDRIDSVWLCKVGERGMLRPSFVPPPPIRILRDLTRYRSDLVGVRTAEKQRVEKLLEDAQIKLSVVASDIFGVSGRDMMAALIGGERDPKVLAQLARARMRAKISELEEAFHGRFTDHHAFLLAKMLARIDALNADIAEVEDRVEKQIAPFADAVARLDAIPGINSTTAQVIIAEVGVDMTRFPTAAHLASWAKFSPIISESAGKKKGKNATGKGNRYLARALGEAAVSAGKTDTFLGERYRRLARRRGKQKAIVAVGRSILVIVWHLLSDPPVDFVDLGPNFYDTRGGTQRAVRNHVHRLQELGYQVTLSPAA

SEQ ID NO: 135935 - protein, 343 aa, unidentified
MEHFAGLDVSVKETSLCIVDGTGRIVREVRVASEPEALLGALTNPAWHFKRIGLEAGPLSQWLFNALAEASLPVICVETRHMRAVLKAQINKTDRNDARGIAQMMRAGLYRPVHVKTLGSQKLRMLLTHRKLLQSKAIAIENDLRATLRNFGLKVGVVGAAKFEARIKELVENLPDLALLVEPLLVVRRVLRDQIGILHRRLLAIVRDDDVCRRLMTVPGVGPVVALTYRATVDVPSRFRNSKAVGAVFGLTPSQHQSGESNRTGGISRCGDEMIRTMLYEAAQILLVRSTKWSWLKAWAMQIARRRGIKKALVALARRLAVIMHRIWIDGTEFRWTREAAAA

SEQ ID NO: 135936 - protein, 355 aa, unidentified
MSQEKYIGMDVHQATISVAVRDADGKLIMECLLETKAARIVEFIQGLHGTLSLTFEEGTSAAWLHDLLNPHVSKLVVCDPRKNALLQHGNKSDRIDARKLAELLRTHQLTSVYHGEHGIRTLKELGRSYGTITKDVTRVMNRIKALYRSWAIPCTGTAVYAPSHRAEWLAKLVEPGVRVRAEHLYQQLDSLQPVRLLACRELLRESHKHAAVKLLRQIPSLGPIRAALLVAWLQTPHRFRTKRQLWAYSGFAVETHDSGQYRYVRGKLQRNRERITVRGLNDNHNKDVKNIFKSAAISASTRPGPLQVFYVALLAKGIRPTMARLTLARKIAAITLTLWKKGVSFDPKQLHRQAA

SEQ ID NO: 135937 - protein, 349 aa, unidentified
MRFYNNSHTHSCGIDLHAKTMYLCVLGPEDDVLLHENIRSEPEAFLQAVEPYRHDLVVAAECTFTWYWLADLCAKEGIEFVLGHALYMKAIHGAKAKNDKLDAFKIAKLLRAGMLPEAYAYPRKMRATRDLLRRRLHLVRKRGELLAHIQNTHHQANLSVPSAKVAYAANRVGVAERFTERDTRKSVELDFALIAHYDTLIKDLELHLVSQAKQHDPDVFHRLRSVPGIGKILALTILYEIHDIVRFPRVQDFVSYARLVRCEHSSAGKKLGTGGSKIGNAHLKWAFSEAAVLFLRNNPRGQKLVRRLAGKHGKGKALSILAARLGRAVYFMWLREKSFDVERFFAEAR

SEQ ID NO: 135938 - protein, 273 aa, unidentified
MESVLIELAKEVRNYKFSNNSDAISAFLSDIAQKHKHLVIAAESTSYFHQRLALTCIKANILFRLINPITTQQFVKVTVRGHKTDMSDALIIAKLVLHGEGRYMLKKDFSFNKSISRTASKLSEMERSIGNMINRLSSIEDEEKYLVGDVLKTCRQTLKASIKKLRKYLHKRTDSTLQRLPTSIPGIGPTIADILIAEIGSIDRFYSGKALVAFAGIDPRVKQSGASLKRNTRITKRGSPHLRHVLYFATVVAQLHCKEFREHFLKKTTEGKT

SEQ ID NO: 135939 - protein, 346 aa, unidentified
MDYVALDVHKHYTWARVENDQGQKIFECKLAHSRGTIRNFTRQWSPGTPVAVETVGNWYWVVDEIEAGKGSPQLVNARLAKLMIGSVNKSDKLDAKGMNRLQRVGTLPTVWIAPSAVRDARELPRTRMVLSKQRTQFKNRIHATLEKYGLKVEGVSDAFGKKGRQIIEELSSKLPPHTQQALGLMLDELDHVGANLKTIEGQMQQAFAPCAETTQLQSEPGVGEMLAVVIWTEIGTIERFGRAEQLASYAGLVPRENSSGGKVRYGRVRKDVNLYLKWAFTEAANSAVLNRERCQYRHVARLYENVKARRGHGKAIVAVARHLAEAAFWMLKKGESYREPMSSTQG

SEQ ID NO: 135940 - protein, 341 aa, unidentified
MRIVGGLDIHRRQITFDYLDERSGQVCRGRIAPADRMLLRRWLATTLEGAPAAFAVEACTGWRFVVEELQRAGVEAHLAEPAETAAARGPKRRAKTDRTDARLLRELLAADRLPESWIPPEQVLEMRARLQLFRDLREEHTAWVQRVHAILLHQGAPALAGNLLGADNRRRLETAEDLSPAGQEAVAAALRMLDALDAELTALRRQIAAFARRQPGCRALQAHYGVGEITAVALWAELGDTRRFSSSRKAVRHTGLDITVYSSDDKRPPGHLSRQGSPLLRWALFEAAKCAARPGAPDHAYYRQVADRLGGNRAALSVARKIARRAHHTLRALGDEALATV

SEQ ID NO: 135941 - protein, 377 aa, unidentified
MKKELYLGLDVHKDCIATAVAEEGRRGEVRDTGTISHDLHAVEKWIARLRQAHGKETRLRACYEAGPCGFGLARRLRQLGVECEVVAPSMTPTRSGDRIKTDKRDARKLARLLRAGELTAVYIPEATDEAIRDLCRARTDAVDDRRRARHRLKGFLLRHGYRYQGKSAWSAAHERYLRELVLPHPAMKVILEEYLQAIAAAGERIARCEAGMGELLQGWRLKPAVCALMALKGFQTVAAMILVSELGEVHRFAHPRQVMAYLGLVPTENSSSDKRRQGRISKCGNAHARWLLVECAQHYASPPKVSAHLSRRQQGQPAQVRALSWRAQHRLHQRYSRLLGRRLQRNKAMVALARELCGFIWELLRTQPCYQAESSLV

SEQ ID NO: 135942 - protein, 320 aa, unidentified
MRNTVGLDISKLTFDASAIVGNAEYSAKFDNDSKGLDQFSDRLKSLGCQNLHICMEATGSYYEEVADYFAQYYSVYVVNPLKISKYAESRFKRTKTDKQDAKLIAQYCRSAKESELVKRQKPTDEQYRLLRMTAAYAQIKSECAAMKNRHHAAKDEEAAKAYAQIIKAMNEQLEVLKEKIKEQTEKPNCKEGVKRLETIPAIGRMTAAVLFHHLTSSKFETSNKFAAFAGLSPQQKESGTSVRGKGKLTKFGNRKLRAVLFMLTMVAYRIRAFPDFIKRLEEKKKPKKVIIAALMRKLAVIAYHVHKKGGDYDPSRYKSA

SEQ ID NO: 135943 - protein, 346 aa, unidentified
MKHFAALDVSLKQTSVCIVDDAGGIVREAKVATEPDDLRTFFRGTGLTFERIGLEAGPLSQWLHAGLTMAGLPAICVETRHAKAVLSGLANKTDRLDARGLAHMMRTGWYRPDHVKTVASQELRLLLTNRKLLVNKRVDIDSEIRGTLRGFGLKVGPVTPRQFEAQVRELVADRPQLLAGVEPVLRVRAVLISQYQVLHRMVLDAVRDDPVCRRLITVPGVGAVVALTYRATIDQPARFAKSKSVGASFGLTPRTYQSGETDRTGRISKAGDALTRAALYEAAHTMLMRVTKWSSLKAWAVRVASRRDRQKAIVALARRLAVVMHAMWRDGTEFRWTSRGDVAPAL

SEQ ID NO: 135944 - protein, 344 aa, unidentified
MQITTIGLDLAKSVFQVHGVDATGQVVVRKSLRRSQMLPFFTKLPPCLVGIEACGTSHHWARELIKLGHEVRLMPPAYVKPYVKRGKTDAADAEAVCEAVARPTMRFVPVKSPEQQAALSIHRTRDLLVKQRTQLINMIRGLLAEFGVDIPKGLERALLMVRQIVDGKAPEVPFEAAKIVGTLSQQALDTHVRLREIDRDLAVWLRGNDVARRLMTIPGIGPIGATALAASVTDPHQFRSGRQFAAWLGLTPLQKSSGGKERLGRITKMGDKYLRKLIIVGMTSLVRRAKYNPGKIDPRLADLLTRKPTRVATVAMANKTARVIWAIMARGETYRTGHQPALAA

SEQ ID NO: 135945 - protein, 354 aa, unidentified
MLIIGCDYHPGFQQIAFVDSETGELQERRLEHPEAAEKFYRELAAPGKKVRVGMEASGHARWFERLLAELNFELWIGDAAEIHRKRERKQKTDRQDAQHILRLLLKDDFPRIWVPSWENRDLRQLLWHRHRMVQARTRMMNQLQAVALNEGLRCKKKLWREAGRKQLEAFRLAPWASRRRHDLLELLDRLNPTIAALSQAIEQKVQNCPEAQRLMTHPGVGPLTALAFVLIIERADRFQCGKQIASYLGLVPLEDSSGNRRRLGHITKQGNSLLRFLLVEAAQVTVRSLPEWRSKYVHLTMRRGRKIAKVAMARKLAVRLYWMMRKGWDYEQVKKFGSHAGQPGHRDGVKSNIE

SEQ ID NO: 135946 - protein, 336 aa, unidentified
MFIIGCDYHPRFQMIAVLEKATGEVKVLRLEHENGEAKKFYSSLPKGVLVGIEATGSTAWFERMVSECGHELWVGDPAEIRARRVRKQKTDERDALHLLDLLLTNRFPRVWVPSPEERDARQLLQHRQKLVGMRTSVKNQLHGLAMGQGLCRQQKLFSESGRKQLEALELGAWASRRREELLKLLDDLDPKIAELDQAVEAEAARRPEVVRLRKQKGVGPVVGLAFVLTLGTVERFRRSRQVVSYLGLNPLENSSGGHQRFGHITKQGNTMMRWLLVEAAQTAARLDPELSRVYKHLKFRRGANVAKVAIARRLAVKMYWILRQAPEPAPAGSHAG

SEQ ID NO: 135947 - protein, 337 aa, unidentified
MKYCGIDLHGNNNWLVIIDEQDRVLYSRRQANDLSRILAVLAVHRSELSGIVVESTFNWYWLVDGLQEAGYRVLLANTAAIKQYDGLKHRGDESDARQLAHLLRLGLLPQGHIMPKAARAVRDLARKRMQLVQQRTAQILSIESSLSRHSGWKLSSNRIKCLRQADLDEMRLDEMPMLGLKANVAVMQALQTQIDGLEKVLADYCRAEPGYQLLRSVTGIGEVLATVILLETGGIERFAEAGNYASYCRCVGSAHLSNGKKKGEGNTKNGNRYLAWAFVEAANFAVRHCEAARRFYQRKKAARNSIVAIKAVAHKLARACYHMLKTQTPFCVERCFA

SEQ ID NO: 135948 - protein, 320 aa, unidentified
MAMSVSRSVVGVDVAKAEVVVYQADTDLLLPVSNDKPSLTKWLKTLPANSAIAIEATNIYHLDTVELAHAMGHVVYVIDGFRLSNYRKGVGGRAKTDASDARLLARYLKNEEEELRPWSPPPKVYTKLQSLLRRRATLVQARVSLTQSWNDEPLLKAAFKQQIAAMGRLDLLIQKKLLEVVKEAGLLDQVKRCQAVEGVGFLTATALTMAFQRGDFASGDAYIAFLGMDLRVSDSGQMNGRRKLTKKGDSEIRRLLHNAAMAASRSKTWKPFYERYLERGLKTTQVLVILARKLARVAFALMKNQSEYQPNPVFGASPQT

SEQ ID NO: 135949 - protein, 366 aa, unidentified
MISVAPAAERIYVGMDVSRDKIAVAVLGPGEDVPAVEVISHDGEMVRRLIGKFADRSVLAACYEAGPGGYELYRLLAAAGVACDVVAPALIPKAAADRVKTDRRDCVRLALSHRAGLLTAIRVPSEQEEAVRDLVRTRADLVDDRKRMMQRIGALLQRHGRVWRAARWTYQHRARLDQQSFTEPALQAALRTYLAALDARDAELAVLESQLRGCWASVDPLASMVRQLGCYRGIAELTALTLAAEVADFRRFASAPAFMGFTGLTPSEYSSGARTRRGAITKAGPQLVRGALIEAAWSYRHRPAIGATLRRRQAGCAAETLARSWKAQQRLHATYAKLTRRGKIPSVAVTATARELAGFVWAEMTS

SEQ ID NO: 135950 - protein, 344 aa, unidentified
MTYFAALDVSLRSVSVCIIDDVGNYQFEAKVTSEVEGIVRCLEAFDGEIEMVGFEAGMLTQYLSYGLKASGFEAVCIEARHAQKTLSAMRNKTDKHDARGIAQLLRTGWYVPVHVKSVASHRVRAMLSSRRTVLKKCVDLENELRGLLRIFGDKLPSKVSHSSFDVVVRPLVEKDAALSRALVPLLDTRAVLYQTYLQLDAQVKAIVRQDAVCRRLMTVPGVGAITALTFKAAVDDPTRFKNSRLVAAHFGLTPRRQQSGEMDYAGHISRAGDADVRSALYVAAHALITRNSEWSSLKVWGIKLMKTKGHRKATIAVARKLAVILHRMWIDGTDFRWQSGDRAA

SEQ ID NO: 135951 - protein, 323 aa, unidentified
MSSPSLETNIGIDISKEMLELAVHETNTHWTAKHEFTEFPKLIKSLRSLTPTRIILEASGGLENLLVSYLATAGLPVIVINPRQARDFARATGQLAKTDRLDAFVLAQLGATLKPAVRPLKSVETQELEALVTRRAQLVEMLTAERLRLQQAQQQRRQSIIRDVKAHISWLQKRLDQGEHDLSQLLRSSPLWRETDERLQSVPGVGPVTSLVLIAELPELGHLSNKQIVALCGLAPHARDSGKWHGKRTTRGGRARVRATLYMATLVATKYNLVIKTFYRRLLQAGKQKKVALTACMRKLLVTLNAMFRNHTSWQPSRFVSGA

SEQ ID NO: 135952 - protein, 411 aa, unidentified
MDVYCGIDWAEDHHDIAIVDRDGKLLARRRISDDAAGLAALLDLLAEHGDTPDDRIPVAIETPRGLLTACLRATGRQVYPINPMAVARYRDRHSVSGGKSDHGDSFVLAGVLRTDISFHRPLPAGSELAQAIAVLARAQQDAVWDRTTAHNKLRSHLREYYPAFLAAFGTARGGILRPDARTILAAAPTPGQAAALTAAQLRALLRKAGRTRSIDAEAARLREAFHAGQMRQLPLVEQAMGRQTLALLGQLNAACTAASDLEHAATESFNLHPDAGIITSFPGLGALTGARVLAEIGDDRSRFQDAKGLKAYAGAAPITRASGKTRSVTYRKIKNNRLTAAGYSWAFSALTASPGARAHYDRRREAGDRHAAAQRNLFGRLLGCLHHCLTTGQHYAEDTAFPTTTTLTAAA

SEQ ID NO: 135953 - protein, 452 aa, unidentified
MEENEISMRIVNPHAAGVDIGSRSHWVAVGQHENDIREFGVFNQDLFAMADWLKERQVKTVAMESTGTYWQSLYSVLIAKGFHVILCNGKFTKNIKGKKTDVKDCQWIQKLHSLGLLTSSFLPDGKTEQLRTYCRHRSNLLFSSASTIKKMQKYLRLLNLRLDVVVRDICGLTGLSIIRAICAGETNPEKLASFRHGNCHKSQEEIASALQSNGRKDYLFALQQELETYDHLQKKISECDVQIGAMLEEIIGNDDNKSQHHIDPKAHKKINKNTPKDIDLNLKAYQMFEGTDLLAIEGMSFSTILALMSEVGIEGIKKFPSAKHFASWLRLSPNNKISGGKVLSSKIPKGSNRLKIALRNAANAIGNLKESTPLRDFFQRISFRKGRMSAISATARKLAVIIWNMVVKGTAYHNPSGYLFLDQKRKLGMVKRIKKQLEKYALTPEDLSLVKA

SEQ ID NO: 135954 - protein, 379 aa, unidentified
MKKNTIVKLQVTKSQIRRMAAKQRLTVGLDLGDRTSRYCILDEAGEKANEDQLPTTKTGLEALFGKMPRCRIALEVGTHSPWVSRHLKAMGHEVIVANPRKVKLITESVKKNDRMDAEQLARLARVDPKLLSPIQHRGAEAQADLAVVRARMALVDARTELVNSARGLAKPMGERLKKCDTDYVKESLADGLSEAAQNAIRPLLKSVEEINRQIGVYDQRIEEIAKRYPEMKLLKQVHGVGTLIALTYILTIEDAERFAHSREVGPYLGLTRKLRDSGDSRPELGISKAGDELLRRLLVQGAHCILRDGAPDSDLKVWGKAMLQSGGKKVSKARKKKAVVAVARKLAVLLHRLWVTGEVYDPQYNRKAAQAAKGKGKAA

SEQ ID NO: 135955 - protein, 379 aa, unidentified
MRHVCGLDVHKDSVFVCILNEKGVVFQEKFGVLTPELERMVGVIMEHGVTEVGMESTSVYWMTVWRVIDPYVEQKLVNPYFIRQLPGKKSDVKDAEWIATCILKGLVRGSYVPEERIQRLRQYDRRIFDLNDDIVHKLTRLDAALQRCNIRLSNYVSTTDCKSYGDVVDAIARGETSPDALLRCVHGRIVNRHGADVIRSAQTGVVTPVDVDVIRQLREEIELARRHRDECQRRMDGLCSEWFPEQYANLQTIPGVKARSATAIIAELGTDMSSFEDAAHLVSWAGLRPRNDESAGRIKARGITHGNKYLRKTLIECAWGASRTRGCFYSHFSHHQTVVRRKSRMKVQVATARKMLSAIWFILHDGVAYRDFEGDANAA

SEQ ID NO: 135956 - protein, 461 aa, unidentified
MPAPRRSPKKLQLDGLPTILPNAAGMDIGTEEIVVAVPPDRDEQPVRAFATFTPDLHALVAWLVACRIDTVAMESTGVYWIPIYELLEQHGITPYLVNARHVKTVPGRKSDWNDAQWLQKLHALGLLQASFRPDGEIAALRTLVRYRAEIIQHRSPHILHMQRAMGQMNIQLPEVLSDIMGETGQAILRAIVAGERDPVKLAQLRNPACKSSVEVIAKALTGTWKDELLFVLQQALVLFDVYTAQLAVCDAEIERYLKAMESRGEPDAPLPDLPPAKADSKSKNAPNFNARAQYARILGVDLVAVMGLSASSVQTIITEIGTDMSRFPSAKHFCAWLGLAPRNEISGGKVLRSRTQKTTNRAGQAFRQAAQAVSRSDSAAGAYYRAMRARKGPQQATVATAHKIARVIYHLLKYGEAFEEESAEAYEHKRQERELRHLTRRANKLGYTLTRVGDPPPAAAP

SEQ ID NO: 135957 - protein, 450 aa, unidentified
MSKLFVGLDVSQKLVATRFLLEDGTEPVKRFSFEHNPTGVDTLVTRINATAEKIGIDQVLIGMETTGMLWWHLSEALRNSERLKHLQPKVYAINAKLVAHFKKAYVEADKTDPGDAFVIADRLRFGRLPRLAEPDERYLAIQKLTRHRFHLTHSLTREKNRFLTHLFLKFSSFCQEEPLSDPFGAASSALLTEFFSVDEIAQMPIEALADFLAEKGKNRFADPMKIAGAINQAARNSYRLSKALADPVNIVLAMTLENIRFFEKQITVVDKAITRELAAFPGAQALLSVPGLGPVFVAGIIAEVQDVNRFDTDAQLARFASIVWKKNQSGQFDADDTPMMHSGNEYLRYYLIEAANSLRMHNDEYAAYYQSKYREATTHHHKRACVLSARKLVRLVHTLLRKGQLYQTPDQRKESRAANPLPAGMTPGELARHIVRRRQAKDRFKVHLNH

SEQ ID NO: 135958 - protein, 409 aa, unidentified
MIYCGIDWAEKTHDVALVDDSGQLLAKRHITDDAAGYQILKDLLTEYGDTEENPIPVAIETSRGLLVAVLRTGKRQVFAINPMAAARYRDRHSVSRKKSDLGDALVLANILRTDMHAHRPLPNDSDRARAITVLARAQQDVVWNRQQIANQLRSLLREYYPAALAAFSVWQNGLCRPEARELLKTAPTPSRAARLTRAQLAAALKRAGRQRGIEAETERLREAFRAEWAHQPPLVEEALGQQMLALLVQLNAACTAADDLAEAVEEAFPQHPDADILLSFPGLGVQLGARVLAEIGDDRTRFADARGLKAYAGSSPVTRASGKKSSITRRWVKNDRLNHAGYLWAFASLRASPGAMAHYRRRRDDHGDWHAAAQRNLFNRMLGQLFHCLKQRVLFDEATAFPTALAAAA

SEQ ID NO: 135959 - protein, 418 aa, unidentified
MEDKEFDVWVGIDWGSESHQVCVLGVDGAPLAEKSIPHSGPGMAALVAWLTEMGTPTRIAVAIEVPRGPVVETLLDHAFSVFAVNPKQLDRFRDRFSAAGAKDDRRDALVLASALRTDLVAFHRVKLDDPLIVRLREVSRMTEELSRELRQRTNQLRDLLLRYFPQPLRLSAGADEPWLWSLLSVAPTPTGAARLTRAKLERLLKHHRIRRFSPDELHATLREAPLTVAPGVVEAAAEHVTLLVKRIELAAEQQRQCERRLAELLDELEADAGHNAEHRDVQVLRSLPGAGNHVVATMLGEASDLLRDRNYHALRCIAGAAPVTRQSGKRKQVVMRRGCSRRLRNAVHFLGAAHAQYDPHGRERYEQLRGRGHSHARAVRAIADRLLDVLMVMLRTGTTYDPELRRRHASPLSRKMPC

SEQ ID NO: 135960 - protein, 422 aa, unidentified
MVQVETTKEKERRKAMISVGIDISKEKFTICALEQGSKIIWKPFDVSLNKRKVEEFLEKLEKLKEKVKITMEATGKYHLPILYELKDRGYFVAVINPLKMKQFCRALNFRKAKNDNIDAKQIAEYGLMYWKELEEYKIDEDNYMVLKELNRNYQHYMELRINQINFIDQTIHQTFPGIKKLIPHNSGDFSKDKLLDFLEKWWHKDLVLEKTEEEFIEEYKTWAKEKRYHPNANKAKAIYKLAEDSISTQPSHNSKIETNIREGINLIKQINQILNSILSQMIEISEPLEEYQEAKKFSGISEKLAVQIVAEFGDLSKFKNKKSLISFIGIDAPPYESGNFKADQRKISKRGNTILRKVGYQAMKCMMSAKDPENEIYKYMIKKEKEGKAKKVCKFAGLNKFLRIYYARVMESKAEKKELKAA

SEQ ID NO: 135961 - protein, 398 aa, unidentified
MNAVGIDVSKGKSTVAVIQPFGVVIAAPYDVSHTDSELAKLADFIKSLPGETRVVMEYTGTYYEPIANALHNAGIFVSVVNPLVIDDYDTNRVRKVKTDKHDALRLASFAIDKWLNLREYAPAEDIRRMLKTMNRQYDQFNKILVMQKNSFIALLDSCFPNANTLFSSPRRCSDGHEKWVDFVLVFPHVECVSKLSLSAFKIKYQSWCKKKGYHYNDEKAADLHKYSRTVSATLPCTQAVMKMVIIAAKQLNSTLETLSAIRHEMDALSSKLPEYDVVMSLFGVGDVFCSQLIAEIGDIRRLKSSKSIVALAGIDPPPDQSGKHDPKSRSISKCGSSSLRKTLFQIMTVYLQKHPTDEPVYQFLDKKRSEGKPYRVYMIAAANKFLRIYYARVMQALI

SEQ ID NO: 135962 - protein, 348 aa, unidentified
MTLYTQSHKHYCGIDLHTKMMYVSIMDDNGTELLHKSMPSTAEHLTRALAPFLDDLVIGCECIFTWYWLSDYSSTRNISFALGHALGMSAIHKSKHTNDSLDSRTICNLLRTKYFPLSYNYPQEMRATRDLMRRRMEIMHMRSDILSHAQTLSYIYSGKRFEKKLRVQSYVETLDNHFDDPMAQLSLDVDRALIAQYDKTLSLVEKAIAKQARHHDAQSIQLLQSIPGLGNILSLIILYEMNTIQRFPTVQKFISYARLISPTHESGGKRVGRGNKKIGNRYLRWAFGELAVLTLRFNEHAREAHKRLVEKKGKQKALSILAAHLGRTVYYMLKTGTPFDEERFMRNC

SEQ ID NO: 135963 - protein, 384 aa, unidentified
MQMILGQSRLASFGLPYLGFWELNEGEQIVTAPYDYHIGVDYHKSYSHLVVQDSSGKTLRSGRVKNDRQSLGSFLERYRDNSHAVVEATRNWMVMYDWLDDICEDVVLAHPLKVKAIADAKIKTDKIDATVLAHLLRADLVPEAWAPGEYARELRVALRERMFYVRLRTMTKNRIVTVFDRYPEQTALLKRQGDLFGKAGRQQLAAIKVSEIDRIQIDRGLEFVGDIDGRIKQSEATIRAMTKANGNVKLLKTIPGIGEFFARLIDAEIDDISRFRNPKKLAAYAGLVPSTYSSGGKTYHGKIIKQGNKWLRWAFVEAVAPAIATDPQLRTQYEHLKFRGTNKARVAIARKLLTIAFQILRDQRPYERRANGEEGALSTISRLS

SEQ ID NO: 135964 - protein, 323 aa, unidentified
MQQFVGIDISKKTFDVYFEQEGKGSHVKLDQTEEGYKVLLHLIKKDAICVMEATGNYHLNLAHYLYRAGIKVVAENPLKIKRFSQMSLQRTKTDKADAKLIYAYGKVIILPSSPRFWQPDSADIGQLKQYDTVRQQLIKQRTALSNTEEAMSALTGLNKEVTEVLQDMVSVVEKAIKQLDKGMLKLVKKHHGETFDLVTSVPGIGPKTATMMICLTDGFQKFSHDQVKQFISYIGMSPRTFESGTSVKGRAHISKVGNSRLRSMLYMCSWTAKTKNQQCTALYERLSEKGKPEKVIKVAIAHKLVRQIFGVIKSGAPFSKEYV

SEQ ID NO: 135965 - protein, 344 aa, unidentified
MQIRSVGIDLGKTTFHLVALGATGKVLVKKKFTQKQLLTFTANMQISLIGLEACSGAHFLGRALKQQGHDVRLIAAQFVKPFVKSNKNDFVDAEAIAEAVERKNMRFVPIKTDDQLDLQAIHRVRDRLVSRRTAVINQIRAFLLERGMVFAQKPAKLKAAMADVLENAENALTPMMRNLIGMLWDEWKTVEEQIDELTDRLEQIAASDAGCCRIRQIPGIGPIVATAIVAAIGNGAAFRKGRDFAAWLGLVPRQYSTGGKAKLLGISKRGNIYLRKVLIHGARAAAMRIKRDRFPIGAWMNALEARAPRNVLVVAMANKLARIAWAVLSTGEEYRPGVIGAVAA

SEQ ID NO: 135966 - protein, 388 aa, unidentified
MTTLTTSAVGPILGIDLGKYKSVGCTHEGAGGEIAFTTFETTRAELQRLIGRDRPAVVIIEACLLAGWVHDLCGEVGVPCVVANTASEAWKFKHLKRKTDRDDALRLAQLYWLGQLPTVNLPPSRVRQWRSLIATRQNLVGRRVAVQNRIRAIFVAQGLPAPRGAKAWSATGLAGMMLQAKPIAACGPDELWRGLLDLALTEYRQIGELVTQAEERLDALGRHNAEVKLLQTAPGLGPRTAEVVAAYLHEPQRFHKAKQVSAYSGLVPRQHQSGEMDRRGRISKRGPALLRKLLVECAWCMVRYNAWARGFYLRLTGGGQRRKKQAIVALARKILVRSWAMLRDGKSWHDPQMPPKPALPPSKQRRAAEAARRRQEKARAATATAGCS

SEQ ID NO: 135967 - protein, 337 aa, unidentified
MNVTLIGIDLAKSVFQVCAVNQAGKPVFNRQVKRQRLLALLLEYPKAIVAMEACSGSNYWGRTLQRHGMDVRLIPPQHVKPFVKGNKNDRNDAFAITEAAQRPHLRCVPPRTLAQTDLIQAHRVRERQVNQRTALTNQIRGLLNEYGIVLPQGRRRLQSALPGLLENADNELTPEARVLLEELLIEWQQRDAAINRLDRCIDRQAKGSDAAQRLMTVKGIAEKTATALVAHAGDGRAYRNGRELAANLGLVPREHSSGGKQNLGGLTRRGNTYLRRMLIQGAWSVLRNAHRNHDRLSCWARQVAERRGKHKAVGAIANKMARISWALMYYQQSYRSA

SEQ ID NO: 135968 - protein, 361 aa, unidentified
MASIALVRSDVIVGVDTHKDQHVAVALDGLGGRLGELFVPATAGGYATLLAWARDHGRVIAFGVEGTGSYGAGLASFLRRHAHKVIEVNRPARQADRRLAGKSDTIDAEHAAREVLAGNATNVPKTADGAIEAIRLIKIARDGAVKARSKAMITLKASLVTGGDELRAELEALTDHKLVLACAEFPDTLDDSADPAAAMRYLLGTLARRWLSLHDEIKVHFKLLERATAAAAPELVEAFGIGPDVAAEMLVTAGDNTDRVRSEAAFAKLCGACPIPAGSGNTNGRHRLYRGGNRQANAALYRTVIVRMRWHEPTIAYVERRTAEGLSKKEIIRCLKRFVAREVFALLPEPALLRIVERIAA

SEQ ID NO: 135969 - protein, 365 aa, unidentified
MQKISTMRTSGKNIFEGQLTIGVDLGDRSSAYCVLNEAGEIVFEHKLATTPEAMKQVFASMPRCRIAMETGTHSPWVSRLLTALGHEVIVGHAQKVRLITKSRRKDDRLDARTLARLARIDPELLSPVKHRSAQAQLHLTEIRARAALVSARTALVNAARGLVKSYGERLRKCHTQQVGREMAGALSVGLREALEPLLREVESLNERIQEYDRRIAKMARETYPETALLKQVKGVGDLIAAGYVLTIEDPHRFRKSRDAGCFVGLQPGRRNSGESEPQMHISKEGDAYLRTLLVQGAHYILGPFGEDSDLRRWGLKLSARGGKNAKKRAVVAVARKLAVLLHRLWVSGEVYEPLRNGQKTMTVAA

SEQ ID NO: 135970 - protein, 331 aa, unidentified
MMNASEMIFVGIDVSKDTLELALDDKSKTRCFNNDEKGIKQVMACIKAAETGSVPVAVGAIVLEATGGFERQAAIALCEAGWPVMVLNPRQARDFAKAMGYLSKTDAIDARVLSHFARTLHQSDNRERLLMKLPDAQQVALQALLTRRKQLITMRVAEDNRLETSHKSQHKSIMAVRKVINKQLAMIDIDIDDLLHTHFVEKLSLLKNFKGIGVGTQASLMAALPELGTLSHEQISKLVGVAPLNCDSGKHKGKRMTWGGRADVRSMLYMAALSAVRYNPVIRVFYDRLISKGKAKKVALVACMHKLLVILNAIMKSGKKWNPLHLETIKA

SEQ ID NO: 135971 - protein, 523 aa, unidentified
MNARPDTFSKVIHRRGERGEQNAQPQVVNNLAVGHNGHGEQLAPPELRLARPHPTRVQGRLPTPAVVPGLSAKRTPPFEGSGIRSRSFQVPAPLRAARHMNTHWSEQPYFAALDWPKEHHDVMGVDRVGTIVADFQFAHTAAGWEECSPQMQPFSHCPVTIETSAGMAVDQLLQRGYTLYPINPLAAKAYRKRKSPSGTKTDRQDAWSLADALRTDGQTWRPLHPQDEATSTLRLLCRDEISLIGHRTALVNQLQATLNDYYPLALESFEDWAKPFAWAFVRTFPTPAALGAAGPRKRQNFLHTHKLWRPDTAPQRLALWARGQQLNASPAVVNAKSLLALSLAAVLESLQRQIQEYRRRITQAFAQHPDHQIFGSLPGAKQTLAPRLLSLLGQVREVFPDADSLMCQAGVSPVSYQSGKLRKARLRYVCDHFLRHTVHLWVDQSRKTCAWAQAYYQSKRDQGHQHASALRCLGKRWLKLLWRMWQDHSAYDEIKYLQALQQHGSQLCQTLQDQLPHPHPACA

SEQ ID NO: 135972 - protein, 392 aa, unidentified
MVVSVGIDVSKDKHDCFILSSEGEVLVDVFTIPNTMDGFNCLLQRIQDCTTPQGKMKVGLEATGHYSYNLLGFLLDNGLATYVLNPLRTNLYRKSLSLRKTKTDRVDARTIASMLLSDAGLKPYTDTAYHNEELKSLTRYRFDKVKERAKLKSSIARLVCILFPELEKLVPSLHIASVYALLEAFPGAKQVANTHLTRLKALLETASNGHYKRDMALKIRNAAKNSIGSQMPAKSLELQHTIRLIRELDREIDEIEEQIQSIMDELHSPITTIPGLGFRMAAMILAEVGDFTRFDSPDKLLAYAGMSPSTYQSGQLKNCYPHMEKRGSRYLRYALYNATKYVCHWDPAFADYLAKKRAEGKHYNIAISHAAKKLVRLIFAMEKSRQPYCSAA

SEQ ID NO: 135973 - protein, 364 aa, unidentified
MKKSISGARREVKIDWNEVSAVGIDLGDRFSQFACVNAAGERVGEGRIPTTAAALEKQFGAVGSKLIAIETGTHSPWVSRLLARLGHHVTVANSRKLRLIYENRRKNDRVDAEYLARLVRLDRKLLCPVEHRNARAQQHVALFRARDEAVETRTRLINHVRGAVKSMGMRLPACSAEAFAKRAASALPTELKSALEPLLTLITVSNEQIKKYDQSVERLIDDEYRQVQVLTQIAGVGALTAVAFAVTIGDRKRFVQSRTVGAWVGLTPGQRASGKQDPQQRITKEGDHYLRRLLVNCAHYILGPFGPDCDLRRHGEAIAARGGMNAKKRAVVAVARKLAVLMHRLWCTQAIYEPLRKGATAIAA

SEQ ID NO: 135974 - protein, 316 aa, unidentified
MDISNHKDITIGIDVSKQRLDVFVRPTGETFHVINTPEGISTAIKRCRAIRPARIVVEATGRLESTFVDAAHQAGLPIVVANPTQVRRFAQATGRQAKTDRLDAQDIAHFGEALQPPLTPAKNKSSRLISDLLARRTQLMDMRSMEKNRASILPKSLLVSVRRHIKQLTDEIDRIDRALDQATKKVPEWAEKKALLTSVNGVGRVLAYTLLSELPELGTLNRKEIAALVGVAPMNKDSGAFTGKRRIRAGRPRIRTVLFMAIMSATQSNPKLKAQYQRLLSAGKPPKVALVACMRKLITILNVMMKNGQHWDPELA

SEQ ID NO: 135975 - protein, 363 aa, unidentified
MTSIALKRTDVVVGVDTHKDQHVAVALDGLGGHLAEPLVIDATNEGYAVLLAWAEALGDVYGFGVEGCGSYGIGLARFLRRHGRTPLEVSRPPRAGERRASGKSDAIDAEHAARAVLSGVGLATPKVADGQVEAIRLVKIARDTAVKAHTTAIITLKAVLVTATAEQRAELEPLSDFKLVTACAALDLDGEINDPAVAMCHTLRFLAQRWLDLHEEIKVHSAHLKSLTAAAAPQLVGAFGIGLDIAAQMLITAGDNNDRVRSEAAFAKLCGACPIPAGSGKTNGRHRLNRGGNRQANAALYRAVIVRMRWHAPTMAYVERRTAQGLSKKDIIRCLKRYLIREVYQLLPPTAASDGSIGALEAA

SEQ ID NO: 135976 - protein, 402 aa, unidentified
MNAVGIDVSKGKSMVAIMRPFGEIVSAPFEIKHTASDINSLVELINSVEGESRIVMEHTGRYYELLAHQLSAANLFVSAINPKLIKDFDNDSLRKVKSDKADAVKIARYALDKWQNLKQYSVMDELRNQLKTMNRQFGFYMKHKTAMKNNLIGILDQTYPGVNTYFDSPARSDGSQKWVDFASTYWHVDCIRKMSLNAFIDHYQNWCKRKKYNFSQSKAVEIYGKAKELVPVLPKDAITKLIIKQAVDQLKSASTTVESLRTLMNETASKLPEYPVIMAMKGVGTSLGPQLMAEIGDVSRFTHKSAITAFAGVDPGVNESGTYAQKSVPTSKRGSSDLRKTLFQVMDVLIKTHPEDDPVYQFLDKKRAQGKPYYVYMTAGANKFLRIYYGRVKEYLSSLPES

SEQ ID NO: 135977 - protein, 344 aa, unidentified
MEYGAIDFHTKHSQIRIVTADGTVVVERRIATRADQFAGVFGGRDRMRILLESSTESEWVATGLEGLGHEVIVADPNFAAMYGSRTRRIKTDRRDVAALAEANRTGVYRPAYRVSPAQRAIRQRLLVRDQLVRMRTQLINLLRSQVRATGQRMATGGAESFSRRFAALEWPAPMREALRPLAELLEGLAVSLREAEAWARQAAAADPVTRRLMTAPGVGPVTALSYRATLDHVERFPDAGRATAYLGLVPRENSSAERRHRGAITKAGPRRPRALLLQASWHIWRSGRGGAVALHAWVHRVAARRGRRIALVALARRLARCLYAMWRDGRDFDGTRVRLIAAAA

SEQ ID NO: 135978 - protein, 331 aa, unidentified
MVYVGIDVAKDKHDCFIVNSDGEVLYDVFTIQNDMDGFEDLLFKIKTASKDLSKVKVGLEATGHYSCNILGFLHNKGLTTIVINPLYTSLSRKSVSLRKTKTDKVDARTIASMIMSDVSLKPYSDTVYHNEDLKSLSRYRFDKVSDRSKLKQSVSRLVNILFPELEKLVSTLHAKAVYALLSEFPGAHQVASANLKHLTALLSTASKGHFGREKANEIREAARRSISSYLPAKSLELRHTIKLIHELNAEIAEIETEIKKIMDSIDSPTLSVPGISYALGSVIVSEVGDFSRFDNPDKLLAFAGCSPSTYQSGQIYSTHAKMEKRGSKYLR

SEQ ID NO: 135979 - protein, 445 aa, unidentified
MKKEISMQIIHSHAAGIDVGSRSHFVAVGQNSGDVSEFGVYTEDHQELIKWLSGYGITTIAMESTGSYWQTLFSALQQAGFEVLLVNGRQIKNVKGKTDVKDCQWIQRLHSLGLLTGSFLPTDQVEQLRTYQRHRSWLVEQSAKMTNKMQKALRLMNLRLDVVLSDIMGKSGQLIIRAILQGSRSGEELSLLADGRVRKSKQEIAKALEGHWREEFLFELRDCYELYQIYESRIAGCDLRMESLLSEFTKYLSTQQGQNEAMRSKRKRGFKNQPKFDVSSLSFDLLGVDLFAIDGVSHNTVMTFISEVGTDIYKFPTAKQFASWMRLAPNNKISGGKMISSRTPKGKNRLALALRNAANSIGSMKKGALKNFFGRIAYKKGRAAAITATARKLAVIIWNMIIKKQPFQNPDETFYIEKVKASVIFNIKAKMKRLNLSAFDLNLTC

SEQ ID NO: 135980 - protein, 387 aa, unidentified
MVQINDLSRSLAAFDPISTLVLVVEMSKASWLVSGVVPGVERQPLKKLEPDATALLRLIERWRNEAVRAGRPIRRIALAYEAGRDGFWLARWLIARGIEAHVIHSASVAVSRERKRAKTDRLDAAMLMRVFLGWLRGERGHCGMVAIPTMEEEDARRPNRERESLVNERSRIINRMKSALARLGIRGFKAHLRKAPERLAGLQTPEGTGLPTNMIEEFRRDMARLALVREQISSIEKTRAERLERAPDTGPHAMVRLLARVIGIGIETADMLVREILSRNLRDRRALARYAGLTGSPDESGLKSREKGLAKAGNARVRRGLIQLAWRFLMFQKDSALARWYRTRTEGPSGARKTTMIVALARKLLIALWRLVTTGEVPDGVELRSAA

SEQ ID NO: 135981 - protein, 345 aa, unidentified
MKKVMAGIDLHSNNVVIGIMDTDGKRVTSAKLPCELKEIAKFLAPFKKRLEQVAVESTYNWYWLVDGLQGLKYPVVLANPAAMQQYSGIKHADDTNDAFFLAELVRLKILPTGHIYDAQLRPVRDLLRRRMTLVHQRTALMLSFKSLYTRTTGQEMTLSQLKELEIKEAQDLYAHPANQMIAGMQIKHMDQLTESIEKIEKVVMASARELPSYAKLTTLPGVGIILGMTMTMEVGDIKRFASPGDFASYCRTVQAQRTSNSKKKGENNSKCGNKYLAWAFIEAANFARRYDEQCRKWYDRKAAKTSKVIATKALACKLAKAAWFLMSQGTEYDAQRMFGQPATTK

SEQ ID NO: 135982 - protein, 350 aa, unidentified
MNNSVIAFDPCGIEVSYLILVVALRCGDHDQPLREFPNTPEGHQTILRYLARSGRGVRVAMESTGLYGLDLALCLQGAGVAVMVANPRAVRHFGQAMLQRSKNDQLDAVVLREFAARMPFQPWHPPSAAALKLVSVARRLEALTDMMTAEKNRRHAASLSQALPAIIRRDLQRSIQTQQRAIDRLTRAAQDFIAADPELTRRFALLLSIPGFGTTSAVHVLAELTLLPAHMDVRQWVAYAGLDPRQYSSGTSVQKKVRISKAGNKHLRRALYMPALVAVQHQPQVRAYYDHLQARGKTKMQALVATMRKLLHAISGMFKHDQIFDGHKLYAAPDLAPISPAPQPQEVLCP

SEQ ID NO: 135983 - protein, 354 aa, unidentified
MITIGVDAHKGIHVALALDEAGRELGEWRGANSLEGWHALADWAQALDESSQWGIEGAWSNGRGLAQYLVGLELTVFEINARWTARERRSSRKPGKSDRLDARAVARCVREEAPKLPIVNAEDDTVLLDLLCSEREAAVAESTRLRNQIHALLLLVDPEYQRHLPSLTTAAGVLALRNYHVSPVAGPLQDYRAASVRRLALRLQLAQDQAEDLADQIRALARAKYEPLTRLCGVNLLTAGALAGMLGPGQRFSSDAELAAYAGASPLETSSAGLVRHRLNRGGNRRLNAALYRIVLTQAHYLPAARTYIARRMSDGKTKREAHRCLRRYVARAIWRLWQECLQAPLGSTAKIAA

SEQ ID NO: 135984 - protein, 461 aa, unidentified
MKAEKIENQEAGRELDGLPVLRRNVAGIDLGSQMQWVCAPSLDGQSWEERAFGATTPELERMAEWLKQRQVESVAMESTGVYWIAPQEVLEGHGLEVLLVSTRELTHVPGRPKTDRIDCRWIRRLHSCGLLRGSFRPPEQICMLRTLVRDKGRLVEERADWVRRMQKSLDQMNVRVHRAVSDIQGTTGMKIIRAIVEGQRDPLELAKLRDPGCHKSELEIAEQLSGHWREDYLFSLQQSLKMYDAIGERIAAYEKEILRQLGEMEKPDLPDRSAPELKNKNKAKKIRDRGEEPVRQALYRMSAVDLTSIDAVGAGAAQAVLSEYGPDLSRFPSEKEFISHVLLAPRRGITGGQPIHKKKRNSASCRVSEILRSAALSLQHSQTALGAYYRHTAQRLGPDVAAFATARKLATMIYRMLRWGQSYLDEGAAAYEKRYQQARFNRLHAAAADLGFQLVAQTANP

SEQ ID NO: 135985 - protein, 359 aa, unidentified
MREQRNEISFRGQKIYVGIDVHLKSWSVTVLSETSVLKKFSQRPSPEALHGFLTRSYPGAEYRSVYEAGFCGFWIHERLTALGIDNIVVNPADVPTKSSEKLRKSDAVDSGKLARGLRANELKGIYTPDSVSLEMRSLIRLKNSITKDTTRQKNRIKSQLRYLGIGIPQEFLEPFSNWSKRFFAWLKEVETLTPSGRQALDIQIRHWEELRRQKLEMTRALRTLAKTDRFREPLRLIMSIPGFGQATGMAFLSEICDITRFRNAEQLAAYIGMIPMCHSSGEKDGTGDITLRKHAVMRCNLIEAAWVAVRQDPAMNLFFTEQCKRMPKSKAIVKVARKLANRLYFVLKHQTEYVNSVVS

SEQ ID NO: 135986 - protein, 338 aa, unidentified
MSFAKVIGIDLGKSTFHLIGHDYAGREVFRHKYSRAKLVDFLSVQESTTIAMEACCGAHWLARKCKQFGHEVKLIPAQYVKPYVKSHKNDYIDADAIAEAATRPNMRFVSVKTEEAQLGIVIRRVRSGYIKERTACMNRIGSILLEFGLSFPRGHHQMKNLFQWIADQNEVLPPLLIAELTTQYEYYNQLNVWIKAQEEKLLALNKENYVAQLLQTIPGVGPMTASCCISAVGSPQDFDNGRNFAAWLGLVPFQYSTGGKPRMLGISKRGNKELRELFIHAARAVMWRDKTAEKFFGTWLIDLKCRKPFNVALVALANKIARIAWSVMTTKKPFEIRV

SEQ ID NO: 135987 - protein, 341 aa, unidentified
MKKKLSVLGIDIAKQVFHLVGMDAHGTIQLRKRLARAQVMTFIAQLPPTLIAMEACGGAHYWARRLREHGHEVKLMAPQCVTPYRQANKNDMRDAEAIAEALTRPTMRFVPVKSVDQQDLQALHRVRERLMKARTALINETRGLLHEDGIIVPQGASAFRQHVLAKLATEDAKLTPLSRELFQQLLEELGALDARIAAYDVQLAQVAQTHPVCQRLLTIPGLGELTITALVAAVSDATPCKNGRQFAAWLGLVPRQHSTGGKPRLLGISKHGDSSLRKLLVPGARSCLRWVGRKCDRRSQWVRSLLERRGWNRAAVALANKNARVAWVLLCTEEVYRTAAA

SEQ ID NO: 135988 - protein, 415 aa, unidentified
MALKIVYKICCGIDVHKTFVVACIASTNDKGITSYESHRFSTYTSGLKTLLQWLIDRNCKDVCMESTGKYWIPVYNILEKDCSIVLAHPKYVKAIRGKKTDKKDAKWIADLFKHDLVSGSFMPPADIRQLRDLMRYRFKLTCFKSSEKNRLQNCLTVSNIQLGNVVSDTFGKSAQAILDKLLENPSDTSFDLEPLVYKSLKKKLPELRDAIDGFITPEQAGKLKIIKDHYDNLESRKAELEELILALAAPYQQELTILQTAPGISSNFTAIGIISEIGTNMEAFPSAKHLCSWAGLTPTNNESAGKKKSVRVSKAGCYIKPLLVQCANAVVKSTKHPEMRNRYLRLKKRRGHKKAIIAIARMLLTALYHMLKNGENYNPELYQKTDLPPVDREITIEQALMLIRNQGYKIKSATT

SEQ ID NO: 135989 - protein, 367 aa, unidentified
MKALIAHVGSRTGEVIIGVDTHRDEHVAVAINEQGVRLGEHHVVTTKQGYAELHRWSRSLGEIRAFGIEGTGSYGAGVARFLTGLGYTIVEVNRPDRSTRRLKGKSDPTDAEMAARAVLAEVAHATPKSGEGEVEMIRMLKNTKDSAIKARTQAINQMKALVVTAPAELRETLNGLAAGALAKRCANFRLGPLGDPTAAAKYALRSLARRYRQLTAEIQDLEEELDRLTQEAAPALVGTFGIGPDTAATLLVTAGSNPERLHSEAAFAALCGVNPIPASSGKTNRHRLNRGGDRQANAALFRIVLVRLRYDHRTKEYMQRRTGEGMSKTEVIRCLKRYVAREVFSRLRELSPNSTEDIRIQDSVPIA

SEQ ID NO: 135990 - protein, 403 aa, unidentified
MSNYFAGLDWASKTHALCVIDERGGVVERFDIDHDAGGLTELRRRLRRFGSPPVAIERPSGLLVDTLVDADFTVVPIHPNAVKASRPRYRSHGGKSDASDAYVLADLLRTDGHRLKALTPQSDEIRALRALVRGRDDLVATRVQLANQLRTLLESFWPGAAAVFADIDSPIALAFIERYPTPESASRLGPKRMAAFCAQHAYCGRRSPDDLLARLQEAPSAVSAETEMEAKGELARCVARTLTRLVEQLRLLSSRIEHLVASLDDGRILMSFPRAGRICAAQILAELGSVRERFATDAQLAAEAGVAPVTYESGKSKAVTFRWACNHRLRAAITCLADNSRHVNAWAAHVYANARARGCDHPHAIRILARAWLRVIWRAWTDRKTYDPMQHRAAQLLLKAAGG

SEQ ID NO: 135991 - protein, 465 aa, unidentified
MTPQKGKKFRTSDRVTDLTITHRHAAGIDVHSAVHFVAVPVEDVPAGFINPEARLPAGVRKFGTNTGDLEAIAAWLKDCGVTTVAMESTGVYWIPLYDLLASQGFDVILVDPRQTKHAPGRPKSDVLDCQWIRRLHSYGLLTASFRPADEIVQWRGFQRQRDMLVRYAAQHVQHMQKALEEMNVKLTEVVSDVAGQTGMKIIKDIVRGERDPLKLAKHRHERCKATEAQIASALYGNWRKEHLFALKQAVQMYEFYQRQLRACDQEIETCLRGFADKSAGAAMPARPKKQAPRRHEPKFGARALLFRMAGVDLTVIEGISETTALAILSEIGTDLSRFPTEKNFVSWLGLCPQHRGSAGKIFNRRVRRGANRAARAMRMAAQGCHHAKNALGAFYRRIQARCGGAKAVVATARKIAERVYRLLKYGQQYVAQAEQAYEEAYRLQTLKAMARKAETLGYKLVPATA

SEQ ID NO: 135992 - protein, 407 aa, unidentified
MEVICPRCAGLDVHKQTVVACARIVGEGPALQEVRTFATTTSGLLALADWLESLGVEHVAMEATGVYWKPVWHVLEGHFELVLANAAHVKNVPGRKTDVNDAMWLADLLAHGLIRASFVPPVAVQELRTLTRTRKQFVRERSAHAQRIDKVLEDANLKLGVVLSDILGKSGRAVLQALIDGHTDPERLASCISTRVKASRAELLEALHGHVSAHHRFMLELHLGHIDALDQAIADIEKEVGLGLEPFRQAAKLLSTMPGLSAVGSNVVIAEIGIDMSRFATPGHLLSWACMCPRNDESAGKRRSTRLRRGGKWLKTTMVQAAWAAVKVKGSYLQAQFHRIRARRGAKKAIIAVAASMLTAAWHMLRDGTEWHDLGAAHFDRADAHKTANRLIRRLQQIGYTVQVTPA

SEQ ID NO: 135993 - protein, 385 aa, unidentified
MTVPAQFVPRNYDVFAGLDVDKKSMAVIFTDHQQLMQSLRLPYSAEQLLRYVRKRFPEQRVAFVYEAGPTGFGLHDELVGAGHLCLVVAPPMVPTAPGARVKTNRLDARKLSTALRGGELKSIHVPSPKYRELRHLVQLRDTHVQQLTATKCRIKALLLYEGIAFPSDDGKEKQWSARVLDELLELPCSEAVRFKLDQLIGTLHFNFNAAAAAQKQIRHYCKKDAELRQSIAWLKSLPGIGEIVATHLVARLGDPALITNVRQIAGFLGLVSSEHSTGDKQNRGEITRAGDSRLRNKLIQSAWVTIRKDPELREFYQRVYQRHAKKVAARKAIVAVARKLTTRIYAVLKERRPFILREVSTAPLTTEETAGHRERLDGQQNEQSR

SEQ ID NO: 135994 - protein, 342 aa, unidentified
MWIIGCDFHPRFQQITFVNRETGAYGQRRLEHGNGEAAAFYRQLQGQRVRVGMEAGGHSLWFERLLGELGHELWTGDPATIAAKRVRKQRNDARDAEHLLSLLERDDFPRVWRPTLAERDVRQLVLHRHRLVQIRTRVKNQLQAVAMNEGVCQKQKLWSQAGRAQLKALPLPAWTARRRQDNLELLAELERRTEPLDQAVREEGARRPEVARLMTHPGVGEVTALAYVLTIGDPGRFHCGKQVASYLGLIPAEDSSGGKQRLGHLSKQGNALLRGLLVEAAHVAVRHDAELGRGYRRLAMKKNRSLAIVAVARKLAVRLWWMWLRGLAYGQKHESGSHAGKA

SEQ ID NO: 135995 - protein, 342 aa, unidentified
MSELCTVGIDLAKSIFYVHGADQSGRKLFNKRLIRKDVLDFFANINPCLVGMEAGGGTHYWAREIAKLGHDVKIMAPQFVKPYIKSNKTDSNDAEGICEAVTRPSMRFVGTKTIDQQDIQSIHRIRERLVTSRTALACEIRGLLAEYGIVLPKGIREIKRKLPDIISNAENQLTTFTREIMQNLLSELIEFNKKVNKYDTYIRHIHKAHPVVQRLTTIPGVGDLTATAILAMVSDAKQFKNGREFAAYLGLVPKQKSSGGKSNLLGISKRGDKYIRTMLIHGARVIVAYSEKLEYRMPKNMKWVQGVRARRGYCKTAVALANKNARICWALMMKDEDFKAVA

SEQ ID NO: 135996 - protein, 404 aa, unidentified
MLFVGVDWAEDHHDVCVMAEDGVVLGKRRVPDSVVGIGALHGLVAEHGDDDQAVVVGIEIDRGLVVWSLLAAGYEVYAINPMAASRYRDRHATSGAKSDPGDAKVLADLVRTDRHNHRPVAGDSDLAEGVKLLARAHQSAIWSRQRQCNALRSALREYYPGALAAFGTDLTSTDALVVLAMAPTPELGRAISRSKIASALRKGGRQRNVEHRAEEIQAALQTDQLEAPEIIVRTQGLITRSAVEIISTFNTQVAGLEAALSEHFEQHPDAKVVRSLPGLGTVLGARVLGEFGDDRTRFSGPKSRKNYAGTSPVTKASGHSRVVLARFARNRRLGDACDQWAFCALNTSAGARHYYDQLRARGKTHRQALRQVANRLVGILHVCLERGILYDELIAWRDDSQLAA

SEQ ID NO: 135997 - protein, 435 aa, unidentified
MSSKAYRATRVNEVNWAQIARGKEGLGATVGVDVGKFDLLVICRWADGRFERPWRVKNPWEIPTLVGVLKQVKADRKLVVALEPSGTYGEALRQALGDNGIEVQRVGTKASHDYAEVFDGVPSQHDGKDAAVVAELAALGKAKPWAYQAADSWEEELAYWVEEMVVQRQILMPWQGRLEGLLARHWPEASQVLKLSSGTLLRILKRYGNPQALAEDPDAATQLARWGRSLLSPAKIEELLTGARSSVGVRLGSWQQRQIQEYAERALAARQQANRAQRQLRRLAAGHPVLQAQGKVVGVPTACVLWVSTGDPRDFDSAGAYRKAMGLNLAERSSGTYQGRLRISKRGSARTRQWLYFAVLRLVQQCGVRPWYEAKKARHEGEARQVVVAVMRKLAVALYHVGVRNEEFQPRRLFGRSGRRSGRSAKPSVSSQQRA

SEQ ID NO: 135998 - protein, 305 aa, unidentified
MACAERSFTPRKIANNRAALLAWLKTLPAHSRIGMEATSTYHELLAQLARKLGLEVYVLNPKDVRHYAKGVGQRAKTDRVDAQLIARFVANEHTRLHLFAPPTPNQRQLDRLLKRRTKLTRIRGALKQSLKGVSGFASELKSIVVRLDAMIKRIDGKVRELIDASPESQEACARLQRIPGVGPVVGSGVLNSLQRVPFGNADAFVAFCGWDPRPDDSGRKSGRRRLSKRGSSQLRYLLYNAAMAASRTKAWRPFYERALGKGLSRIEALVILARQIARTAWSIYAHKTQFDPKRISQPQQASRNA

SEQ ID NO: 135999 - protein, 341 aa, unidentified
MKQEISVLGIDIAKRVFHAVGMENRGPVVYRKRLSRHDLMPFRAKLPPVRIGIEACGGAHYWARRFWAYGHEVQLMAPPCVKPYVKSNKNDSRDAEAIAEAVTRPTRRFVPAKDVDQQDIQALHRVRERLIGERTALVNAVHGLMHEYGMVMPNGVAKFRQAVVGKLEAEKDKLTPLRQEMLWKLVEEFAALEKQLAYDQEQLEALATTHPECQRLMTIPGIGPLTATALVAAVSDASAFKNGRQFAAWLGLVPRQYSTGGQARLLGIRKRGDSYLRKLLIHGARATLRWVGRTTDRRSQWMRQLVERRGKNRTAVAIANKNARIVWALLTSHQVYEPAKG

SEQ ID NO: 136000 - protein, 330 aa, unidentified
MKKTTIGIDLGDRKHAVCVLNEAGTVVEERTVVNDRNSIREWIYRYKGATVAMETGTHSPWVSRLLEDLGFRVYVANARKLRAISSSNTKSDKEDARMLARLCRADVELLSPVKHRSERCQRDLVKVKVRDALVRTRVNQMNSVRFLMKSLGMKMPSGCKATSFVKKVRAELAAEYLELVTPLLEMLEVIEVKIKEVDKELERMATERYPETAILQQVPGVGPLTALSFVLILESPERFAKARDVGPYLGLSPRRDQSGETDKQLRITKAGNAQLRCLLVNCSHYILGPFGPPSDLRESGERIYQRGAGIAKKKGSTTKSGDCVIILSFH

SEQ ID NO: 136001 - protein, 372 aa, unidentified
MNYNTVYVGMDVHKESFSLCAYTIEAEKAFHYQRTEADYKKVLNYLEFLRTIYGDDANFICGYEAGCFGYTLYHQLTANNVKCIILAPTTMLEQRSKKRIKTDRRDAEIIAKCLAQHNYSPVHIPTAKDEATKEFLRMRDDHKLALKKVKQQILAFCLRHNYRYDGKSHWTAAHLKWLKALTPEALYKEILDEYLLTYQTLSDKIERLDKRIEELATQDEYKEAVKKLCCFIGVKTHTALSVLVEVGDFKRFASAQHFASYLGLVPGEDSSGDDQNRLGITKAGNRHVRLLLTEASQCYARGQVGFKSKELKSRQSGNTPAVIAYADKANERLRRRYYKMVLNKYKKHNVAKTAIARELACFMWGMMTDNIA

SEQ ID NO: 136002 - protein, 430 aa, unidentified
MKYNTQNAKIASITEETLVLGIDVGSETHYVRAFDWRNYEYSKTPLAFSNDKAGFLTFKAWVENLKEKHGKTAVIPGMEPTGHYWFNLGKFLQDSGMRPVHVNPHHVKKSKEMDDNNPNKNDRKDPKTIAALVNEGRFSYPYIPTGIYAEIRSLSNLRFQTQEEITRIRNRIARWISIYFPEYKDVYGKLDAVSGLMVLKEAPLPGRMKELGAEGINQIWRNARLRGAGMKRAKTLLSAAEHSVGSQEAPETASLEIRNLLEDYEKYNSRMKDLMAKIEEKIKEVPYVDKLLEIKGIGLKTVCGFIAEAGDLSRFDDPKQLQKLAGYAIVKNSSGKHAGESHISYRGRKRLRYVLYEAAISVIGKNGEFREIHRYYQTRDKNPLKKMQSVVAVACKVLRVFYAILTKGVDYDGEKMLRDIRRPGMSARAA

SEQ ID NO: 136003 - protein, 454 aa, unidentified
MAKRSKKSNFNVQSLPEHLRHINLNAAGIDIGSERHMVAVPEGRDEVSVREFGAFTADLQALANWLEQCGVTTVAMESTGVYWIPLFELLDSRGFEVKLVDARHVKNVSGRKSDVLDCQWIQQLHTYGLLAGAFRPTDELCVLRSYLRQREMLSQSSSMHIQHMQKALQQMNLLLHNVVSDITGVTGMKIIKAILAGERDPRRLARNRHKRCHNTSATIAKSLVGNYRAEHLFALQQAVDLYETYQAKIADCEEAIVKQVDKQPDLTADSLPPSEKPIQARERIRSGVDVRELLFKKSGVDLFATPGLAADTLLTLSSEVGFDMSPWKTIKHFTSWLGVCPGTKISGGRVLDKKTKRRPNRAAQAFRMAAATQARSKTALGAFYRRIKSRAGGKQAITATAHKIARIYYTLLTKGTSYVELGQEAYEQKYKERRLHHLMTQAKSFGFQLVPCAT

SEQ ID NO: 136004 - protein, 367 aa, unidentified
MKTVNEKQGENQTIFLGIDYHKNTSTLCFKDQQGLKKKTITVKTTELTDALAEYKNLEIAIETTGGSNHMAMVLENLGYKVFLVNTNKAKAIGMNGQKTDDKDAEVLTDLLRTNFLPKVHLKSIVCREVKSILVQREYVVQSRVGMICHIRGILREYGITIDTGVQFFYKQAGGAIAKVENELIRKNLEILLEQCLGLKREELRIDNDVLEFVKLKHPEFFSKAEKLEKIPGIGWTTALLMVSVIDNAERFPDAQKFGAYLGLIPGQFSSGDKVRMGYITRSGCEMLRRYLIHGARALLKYAKNKTKKSDLESWSLRIAKKKGMNKGTVATAHKLARICFAIVRDGDEFIKDFKKTKSDFKIELKAS

SEQ ID NO: 136005 - protein, 395 aa, unidentified
MYQPVLSIDVSKSTSYAAAFLSYEKPHLKPFSFSHSPGDMDNLISCLASLEEKTSIKPNVVLEATGNFSKPLVEFFENEGYRVITLNPLQTHQQKKKSIRKVKTDPVDANRIAQVYYLSDFKLRNKVDNSLLDLRNLCRQYEGFNALYTESQLRFRSTLDLVFPNYDTVFSHLCCKTSLNLISNFPTSKADLIAALKVSRLGDTWSNKMADKLISAAKESLPIVSSHESNLQVLKNYLEILLTHQKILTQLRDQILQWASLQSDYELLCSIPGVGFLTAATILGEIGDICNFPSSKQLVAFAGLDPSVYQSGKFTSTNNKISKRGSTYLRKALYQATVAAISNRKKGPVNEILFEFYSKKKSEGKASKVAIIAACSKLLRMIYGVLKNKVPYTVN

SEQ ID NO: 136006 - protein, 346 aa, unidentified
MQIRSVGSVGIDLGKTTFHLVALGDNGKVLLRKKFSQKQLIAFTANMQTCLIGMEACSGSHFLGRALREQGHDVKLIPAQFVKPFVKSNKNDFIDAEAIAEAVDRENMRFVPIKTDDQLDLQALHRVRDRLMARRTSLINQIRAFLLERGIVFAKSPIRLKEALPEVLENVNENLTPRMRNLVAMLWSEWKDLELQIVQMNDEVERIASSDAACRRLRQIPGIGPLVATAIVASIGNGAAFRKGREFAAWMGLLPKQHSTGGKARLYGISKRGNSYLRKILIHGARAVVLRSKRDRIAMGAWMTSLETRAPRNVLIVATAHKLARIAWAVLSTGQDYRAVPEALTV

SEQ ID NO: 136007 - protein, 346 aa, unidentified
MRYFAGLDVSLEETAICVVDETGRILKEVRAASEPDPLVAALQRTGLPLERIGLEACSLSAWLNEGLRQAGLPAICIEARRANAAMKTMPNKTDRNDARALAQIMRTGWYREVHVKSRQCRFWRSLLVARRTVLNEMRAIENVVRAILREAGIKLGTPSRTNFADRVRELAGADVLLMPLVEPLLAILATMLRELARLTKQVLDTVRTEKVCRRLMGVPGVGPITALTFRATIDRPDRFRRSRQVGAHLGLTPARYQSGDTDVQGKISRCGDELARTALYEAAHTLLVRSRKWSSLRAWGVKIAKQRGMARARVAVARKLAVVLHRMWSDETEFRFGKEPNTPAAA

SEQ ID NO: 136008 - protein, 358 aa, unidentified
MDGSKQQPKVTAGLDIGDKYSYLCLIDTASGAIMEEGRLRTSPETFKRRFASERPMRIAIEAGTHSPWVSRVLEECGHEVLVANPRKLRLIYANKRKTDEIDAENLARLARVDPRLLYPLKHRGEDSQAHLAIIRSRQALVDCRTQLVNHVRGAVKSFGARLPKCSARSFHKRASEHIPEALRPALGPILEVIASLTERIRDYERELETISKEHYPETELLRQVEGVGTLTALTFVLTVEDPYRFERSRSVGAYLGLVPASDRSGDRDPQKRISKEGDQMLRKLLVGSAHYILGPFGHDSDLKRHGQKIASRGGKNAKKRAVVAVARKLAVLLHSLWASAEVYEPLRNAHRSAGGQAA

SEQ ID NO: 136009 - protein, 351 aa, unidentified
MTRITTIGLDLAKSVFQVHGVDEEGKVVVARPFRRREVLAFFAKLPPCLVGMEACGSAHFWAREIAKLGHTVKLMPPKYVKAYVKRGKTDAGDAAAICEAVGRPSMSFVAVKSVEQQGLAMLHGARTLLIGQRTQSINALRGHLSELGIVAERGLLGLGELAAIVDDETDVRLPILARGTLKCLLHHIEAVSAQIATLDDALRKENKASELGARLQTVPSIGPVIASALRARVTDPHLFENGRHLAAWIGLVPENDSTGGKNRQKGLSRKGDRYLRALLVNGAMALVQHARRRPDKYPGIVRLLARMPAKRAAIAIANKTARIAWAIMTRGGVYEPGHRAPGYRAMEHAAA

SEQ ID NO: 136010 - protein, 402 aa, unidentified
MIIKPQLTHAAGLDIHKKKIIVFFYVAGQVQQFREYGTFTEDLEKIRNDLMGFNIQDALMESTGVYWIALSSVLISAGIRVRVVNARAVKALPKEKTDKKDAAFLCKVLVNGTVRHSYIAPDAQRSFRDLCRQRTKYSQSTTQARNRIARLLERRNIKLRSVVSNMHTKSGNDIVAALADGETNIDKLTALCRGRLKKKKEEMRKALHGVLTADDRFLLKRLMLDIDHFNSQIMELEKQIKQHMDKASGELIEKLKQVKGIGDQSTEIILAEIGDNVKSFPTADHLAAWTGLAPGNHQTADHIKPMPTREGNKHLRSALIAVAWAAVRSKNSYWRALFSHLHKKMHHNKAIVVVARKLLKVIYKIIKGVYTYTEYGADYFIQHLQQRLQQKQNNSNKGLQSC

SEQ ID NO: 136011 - protein, 406 aa, unidentified
MRGPVITVDVSKGSCHYQPFLENGKPLRKPKVLHDTIEGFNQLMETIEMTREKSSEEKVPVVFEATGVYHRCLQKYLDDNGISYYIISPLLSAAYRKTNLHSNKTDPLDCAHIAKAYYCEGNLLPFQQQEDIYVKLQKMNRYYETELIHLKKRKVSFRSFMDIVYPRLDKSFGSNATLYDPIPMEVLKKYPHPSLLLKHREETIVKAIEKKVNHDKRFIEKIVHKMYECARHCYSGAKVTDIEVIKLPEMIEKLQDQMKLCDSLLNELICEAEKIPYFNCVVSIVGIGRNLAARIIAELGDMSRFPNRRAISAFAGLNPKILQSGDVDGIHLKISKKGNRHLRCLLYLGATCNFRLKKHDPLYEFNQKKRQQSQSPLKPKAANTATAHKLLIMIYAMSQSGESYRF

SEQ ID NO: 136012 - protein, 402 aa, unidentified
MAVAVGIDIAKEFHWVAIVGMESGELLVSRRVDNDPDGIDGLISQLEQIASEHGEVIAGIDLMGGVASLLTTMFGDAGIRLVHVPGLVVNRARRAAKGGEAKSDPRDAQAIADQLRLRNDWRVVTTEDEIGLDLRILVGRRRELVVEQTRRLNRLRELLTSYFPGLERGLDVTHLGDLILLTRHTTPQQIRRAGHRRVLDYLLGNSVGRRYAERLADHAIAAAQAQRIVVPGQDRLAEFVREFATDAIAARRRIADLDTQIAADLDHHPDAALIRSLPGMGATLTAEFLAEAGDLTRFPTPDALASAAGLAPVLQQSGKIRYLRRSTAGSKTLKFIFYQSAFCALQRDPASKTFYARKRAEGKRHHQALIALARRRINVLHAMLRTRQPYQPGHRPNTTTAA

SEQ ID NO: 136013 - protein, 356 aa, unidentified
MSRDVKYIGMDVHKEAIVIAVLNASGKLMMESIVETKANSLLQFIHGLEGELHVTWEEGTWASWLHNLLQPRVEKVVVCNPRRNALLKEGSKSDKVDARKLANLLRTGMLRPVYHGENGIRTLRELGRSYETISKDLNRVMNRIKALYRGWGIACGGTQVYAPRYREESLHKIAHTGVRRRAELLYQQLDGLQGLRRTLRPELLAESRKHKATKLLRQIPCIGPIRAARLLALMQTPYRFRSKRQLWTYSGLGIETHDSAQYRYVNGQLQRSKKPQQIRGLNQNHNHEMKEIFKGAATRASCGVGPLRDFYVALLDKGMRPEMARLTLARKIAAIALTLWKKEERFDAERLKPQAA

SEQ ID NO: 136014 - protein, 338 aa, unidentified
MRLYAGIDLHANSNYSGIINEENKIVFKHKLPNDLRKILATFEPFREQVEGVVVESTFNWYWLVDGLMDHGYRVHLANPAAIQQYEGLKHVDDQRTALWLANLLRLGILPEGYIYPKQERPIRDLLRKRLQLVRHRTSHILSIQNIVSRSLGVRMGGNDVKRLDEQRVGDLFPEEHLFLAVNTSVGVMRYLGERIKHIEAVVKSRVKLRKEFEGLLTLPGVGDILALTIMLEVGDIGRFPEVGNYSSYCRCVRSTRISAGKRKGEGNRKNGNKYLSWAYVEAANFAIRSYPVVQRYYQRKAARTNGVVAIKAISHKLARASYYIMRDQVVYDANRLFR

SEQ ID NO: 136015 - protein, 342 aa, unidentified
MNHYAGIDVSLECSCVCVIDANGKILREAKVASEPEALIAWFRCSGFDLERIGLEAGPLSQWLFAAMKAAGLAVELLETRHVRKAFEAMPVKSDRNDARGIAQLMRLGWFRPVHCKSMSAQETRSLLTARKLVQSKLLDVENSLRGILRGFGLKVGKTTGQTFAGRIEELVHGHPHLQMIAKALLAVRAVLRTEFAAFEKQTRRMVRSDMQARLLTSVPAVGPIVALTYASAIDDPTRFKSSKQAGAHFGLTPKKHQSGETDYTGRISKIGDASVRTALYEAANVMLTKPLKGCSQLKSWAMRIKKRAGMSKAKVALARRLAVIMHRMLADGTPFNAAAAAA

SEQ ID NO: 136016 - protein, 340 aa, unidentified
MNIVFMGIDLAKNVFQLCGLNQAGKPVYTRRVERKILLQTLVNIPACLIGIEACTGAFYWQREFEKLGHKVKIISPQYVKPFIRGQKNDGNDAQAIAVALMQPTMQFVPPKSPEQQDIQALHRARQRIVNHRTATICQIRGLLLDRGISIGTAMSRARRAVPLILEDGENGLSIRMRKTIAELYELFIDLEKRINFFDKEIETVFRQSAECQRIAKVKGIGPKTATAVVAAIGNGQEFKNGRHFAAWLGLVPRQHSSGDRQVLMNITKKGDKHLRTLLIHGARAVVRVATNNNDGSLNQWVNQLKERRGFNKTTVAVANKNARIIWSILRHETEYQPALN

SEQ ID NO: 136017 - protein, 423 aa, unidentified
MDILYERVAGLDVHRDTVVACVRIMVDGKAQRECRTFAATTDPLVELRRWLEESRCTHVAVEATGVYWMPVFRILGEGAFELIVANAAHIKNVPGRKTDMNDAMWIADLLACGLIKGSFIPEEKVQELRALTRTRKQLVREQTRHVQRIDKTLAEANIKLGSVISDIMGASGRRIIQAMIDGVRQPNKLAELAGKQLKASPKELYDALHGRLTDHHRFLLALHLKQRDGLDETIRKLDVEIAQRIEGMEAEAGGSKTPFRHLIGLLTTIPGISAVAAPAILSEIGADMSRFETAGHLVAWTGLCPGQNESAGKRKSSRLRKGAPWLKTMLVQCAWAAKRSKNSYYRAQFFRLQARRGPQKAICAVAASILTAIYHILKNGTEHHDLGVAYFDRRPTEVKASRLVARLKKLGFTVQLQHIAEAA

SEQ ID NO: 136018 - protein, 386 aa, unidentified
MSKPNDLSRSLTAFEQDSTLIVVIEMSQASWLVAGIVPGVDREPLKKVEPNGDALLRLLQRWRDEATKAGRMLKRIAVAYEAGRDGFWLARWLRERGVEAYVIHPTSVAVSREHRRAKTDRLDTALLKRVFLGWLRGEPKHCSMVAIPTLTEEDAKRPNREHESLVGERTRLVNRIKSGLVRLGIRTFKPMLRRAPEHLDALRTPEGAPVPVNTLAELRRDLARLHLIRAQIKVIEAARLERLQQGPEQGPHAMVRLLARVIGIGVETADMLVQEVLSRNLRDRRAVARYAGLTGAPDESGAKRREKGLAKAGNARVRRGMIQLAWRFLMFQSESALAQWFRSRTAQAPKTRKTMIVALARKLLIALWRLVRTGAVPEGLALRPAI

SEQ ID NO: 136019 - protein, 394 aa, unidentified
MFFIGIDVAKRSHQAAVTDISGNVIVKPFNFKNSSDGFTKFLSIVESNAIEKNDCTIGLESTGHYWYPLYFFLIENGFDVKVFNPIQTAAFREITIRKVKNDNLDSLLIADFTRFGRYSETYIPDENMLALKNLTRFRLSISDICGSLKKKVIAILDQVFPEYTGVFSDVFGKTSKQLLEQFSTPDEFMDISTTKLTNLLLKVSRGRNGREKAELIKTAAQSSIGISYALDAFSFELKQLLAQIEFMENQLSDVDAEMEKLLSQSEYAVITTISGIGPMLGSVIVSEIGDIERFETSSKLVAYAGLDASVKQSGEFNSSRNKISKRGSPYLRRALWMAAFMSLQCDPALYDYYSRLRARGKSHRLATTAVARKLCIIVWAIMKSKKPYSPVLRN

SEQ ID NO: 136020 - protein, 341 aa, unidentified
MSDYSYFCGIDLAKNHFSLHAVDQNGKVILHKSVTRSNLLTTIANMPLMRIGVEACGGAHYWVRTLHKLGHDARIMAVKYVIPYRTKGKNDLNDAVAICEAVLRPSTRFVPVKSPEQQAILSVHRMRDHWVRERTALMNRMRALLSEFGLIIPVGRSSLMKHVPLMLEDAENELPHLARTVIADAYHHLGELNQRTTDTEQVFDSFAKVSTNIQRVMKVRGIGPQTVTAILASIGNGSQFDKSRDFSAWLGLVPKQYSTGGKPRLGRITKHGDKYLRTLLVHGARTVIANLGDKQDKLSQWCRGVLERRGMNREIVALAAKNARIIWSLLHNQTEYENYAA

SEQ ID NO: 136021 - protein, 277 aa, unidentified
MTVHKDSITVAYALGTGEVELLGKIGTTKTDTDRLYTRLQPKARHIRIVYEAAPCGYGLYRQLVQKGFDCLVCAPSLIPKKPGERVKTDRCDAIKLVRSLRAGDLSAVYLPSVEDEAFRDLARAWVSGKDDLKCARQQLKAFLLLHGVRYAGRADWGPADCRWLSAYAFDSVWQQLAFEEYRRTIEAVLHWRFYPAALGLQTMRGVRFTTAVGMLVELGDLSRLAHPRQVMAWLGVTPSEHSSGDKRRQGSISPRMATAMQESCCWKRPGATSIRPV

SEQ ID NO: 136022 - protein, 355 aa, unidentified
MSSVAHLEAARITVGVDTHRDEHVAVALDALGKKVATTSTPTTPRGYRDLLAWAEGLGAVEAWGVEGTGSYGAGLARHLLSAQHLVHEVIRPNRSLRRRKGKSDPVDAEAAARAVQAGVAAGVPKSGDGAVEMIRVLRVERSSAVKQRTQSINNMRGLIVTAPAELREALRALSTPRLVAACCLLRPGELATPTAAVKFALRGLARRLRDLAEEIKVLDAELDSLTLKASPRLTSLFGVGAEVAGQLLATAGDNPGRLHSEASFAALCGVSPVEASSGQTQRHRLNRGGDRQANAALHRIVIVRLRHDEQTQRYMAKRTAEGKSKKEVIRCLKRYVANEVYAALMSPPAEPQEAA

SEQ ID NO: 136023 - protein, 384 aa, unidentified
MGYSAGGAPLDYRWRVLRFRLMVDVACVEQPQTSQEKRSMKYYAGLDVSIKETSICILDETGKVCRETKVMSHPEDIIQALNCPALRLERIGLEAGPLSQWLFSCLAEAGLPVVCIETRQAKAFLKAQVNKSDRNDARGIAQMMRVNLFRPVHVKTLTSQKRRALLTARKLLQEKAIALENDIRGVLRNFGLKVGVVGAVKFEERISELVEGARELAEIMTCLLAPRRTLREQAAKLHRMLLSIVRDDDVCRRLMTIPGIGPVVSLAFVATIDIPARFKNSRSVGPALGLTPILNQSGESSRIGRISQCGDAMMRALLYEAAHVMLTRTIKWSWLKAWAMNVAKRRGKQKAVVALARRLAVVMHRMWSDGTTFRWTRQQEQHRA

SEQ ID NO: 136024 - protein, 405 aa, unidentified
MEVIIERVCGMDVHKDNITACIMTPEGKEIQTFSTKTVFLIQLMDWIKSHGCTHVAMESTGVFWKPIVNLIEAEEMEFLVVNAQHMKAVPGRKTDVKDAEWIAQLLRHGLLKASFIPDRNQRELRELVRYRRSIIEERARQHNRIQKVLEGANIKLGSVVSDIMGVSSKDMLHAIAFGEDDPEKLAKLARRSMKKKKDDLILALNGYVNPHQRMMLKTILTHIDFLTEQIKNLDQEVAQRVSVYQENIERLDSIPGIATRMAEQILAEIGTDVEKQFESAARLCSWAALVPGHNESAGKRKSTRGKKGNKYLKSALTEAAHSVGASKNYLGALYRRTAARKGRKRAGIVVAHAMLRISYYLLTRKEMYVDLGEDYFDKQKQASIVRNSVRRLENLGYTVNISEAS

SEQ ID NO: 136025 - protein, 349 aa, unidentified
MRKHIKSADGYPMETIGIDLGDKMSRYCIVNRDGEVVEEGSFRNQVSSIETHFSGEPRRIALEAGAQSAWISRELKRLGHEVIVGNTRELKWITASDNKTDSVDARKLALLARADVQLLAPVEHRTAEQQAELAVIRSRDAIMRARTLLINSARGIAKGFGLRLPKSITTTFGQRAVADLPDGLRTALSGLLEQIDALSRQIGASDQQVGELAQRHPEVERLTSIPGVGKLTAVTFILTLGRPERFAHSRDVAGFLGLRPKQRQSGARDPELGISKSGDPYLRKLFVQCAHHVLGHWGPDSALRRWGLAKTEGGKKATLRAIAVARKLSVLLHHLWVTGEFFKPFPKMV

SEQ ID NO: 136026 - protein, 465 aa, unidentified
MQVLHPRCGGLDVHKDSILACARIATETGVAQHVETFGTTTSSLLKLSDWFAGYGVTHVAMEATGVYWRPVWHVLEGVFDLVLANAMHIKNVPGRKTDVNDAMWIADLLAHGLIRGSFVPPTSVQELRTLTRTRKQLVRERASHVQRIDKTLQDANLKLGSVLTDIMGQSGRAILAALVAGETDPEKLVTLVSNRVKAPRREILEALRGRVTPHHRFLLKLHLDQIATLEEAIAQVDAEVGNSLAPFRAAAERLTTIPGVSAVAAAVIVSEIGIDMTRFPTVGHLISWAGLCPQNDESAGKRRSTRLRKGAPWLKTTLVQTAWCATRAQNGCLRAQFLRLKARRGPRKAIIAVAASILTTTSDRPPWSGAIARRSPDGLSASSLSWASRSTSGTQHDAAVMFHTRSRALTGACERRGALEICPLMCCRRRSARSSPSSTQMGLADIMMNPTATSLRSAAAGYRVR

SEQ ID NO: 136027 - protein, 443 aa, unidentified
MKALPILDPNAAAIDVGSETLHASIAGDTPKVFGTFTADLEGLCAWFKVAGVRSVALEATGVYWLYLYEVLEAAGLAVVVVNGRHVRNLPGRKTDMADCQWLATLHAHGLLRGGFVPPADIRRLQDYQRLRGDHIIGAGSQVQKMQQALERMNIKFHDVISDLTGVSGLKVVRAILAGERRPGDLLALCDVQIQKKKADRVKESLRGCWKKEQLFALRQALELWETYQQKIADCDRELEALLQQLAGPEGLDGGVAVGPVALAPVKAPGKNAPVIERCQELLARLCGGRDVTQLPGFSTYLVLQLLSEVGTAMTRWPSEKHFVSWLGLTGGRQQSGKRKGNVKAHRNRAGRLFCAAARALAQSVDKALGGFYRRLRGRVGGLAANVALARKLALLFYRLLRYGLAYVEKGLKDYETKVLETETRLLRKLAKKQGFLLLPALAD

SEQ ID NO: 136028 - protein, 434 aa, unidentified
MKLEDKELEKPIRAWIGIDWADEKHDVSLYDMATGKQETLTIRQSPEALQEWLGQLRSRYEGGHIAVVLEQGRGGLLNALMGCEFLVLYIINPKSLSSFREAFYGSGATSDPVDAELMREMVRQNPSRFRAWQPDDVMTRSLRLLTEGRRNLVNQSTALTNQLTALLKGYYPQALAWVGNLNTAWACDFVEQWPTLQSLQASSRRQILRFYEKHPRASLDLNEQLKQIQTARALTQDAAVLESSALMVQALVSQLRPLLASIAEFDRKIAMIFRKHPDRLIFESFPGAGAALAPRLTAAFGTDRDRFQAAKEMQELAGIAPVTEKSGKKSFVHWRYACPKFIRQTFQEFADHSRRWCNWAKAHYELLRRRGKSHNAAVRALAYKWIRILFRCWKDRQLYQDEVYTKSLFKHGSPLSALLAESVENPLVVCEIRC

SEQ ID NO: 136029 - protein, 464 aa, unidentified
MKTPANSSATKRHVRNARKLQRQQRRCRSVAPPQSLDQLTPIHRRAAGIDVGSAENYVAIPSDGLAAGESAVRVFRVFSAEQDALVEWLQKHRITTVAMEATGIYWLSLYDKLEVAGIEVYLVDPHAVKAVPGRKSDWLDCQWLQKLHTYGLLAKAFRPELPIRRLRTLTRQRAELVLCGAAHQNHMDKALVAMNLHLHLVVSDLVGDTGLRIIRAILEGQRDPKELVKLRDVRCRKSTVAEMEAALIGSYDDEQLFVLRQSLAAWEFYQQQMEQCDQRIEKALAAIPKAAPATKSPARPKPLPVDAQASPTKQPKRPQKGNNAPTIDFSQALVRICGTDLMKVCGLNLLSVLMLIGEIGTDMRRWRSARAFCSWLGLCPGAKISGGKVLSRRTWKVNNRASTILRLAAWTAGKTETWIGRFYRRIKARRGPAKAVTATARKLACVIYHLITYQEHFVLLDNSA

SEQ ID NO: 136030 - protein, 356 aa, unidentified
MPETNPAEVIIGVDTHKHTHAAVALTALGARLGTITVPASRRGYQELEAWAGSFGPVRAYGVEGSGSYGAGLSRFLQASGHAVIEVNRPNRQLRYQHGKSDPLDAEGAARAVLSGQADARAKPGTHAVEMIRHLKVARDTAVKSRTQAMITLKALIVSAPAALREQLEGLAGKMALIRHLAALRPGTLTSPTASAKAALRALAQRWLALDAEIKAHEAHLDALTAACTPTLRTAYGMSTGTAAEMLILVGDHPDRIHSEAAFAKLCGACPIPASSGKTIRHRLNRGGNRQANAALYRVVIVRMRSHPPTLAYVRRRMSEGKTKLEIIRCLKRFVAREIFGYLCGAKTLPTAPMTAS

SEQ ID NO: 136031 - protein, 417 aa, unidentified
MQATGAGEKPLRFVGLDVHRRYATVAAVDSQQQVVLTARRVDFEDFEGWIHKHLRPTDAVTLEATNNAWYLHDLLVSLVASVTVANPIQVALIAKARVKTDPRDALALARLLAAGLLPSVWVPPHDVRELRALIAHRRRLVKQRTQARNRLRAVLFRHNLVAAPGEVFGPEHRSWWEGLNLPTSEQLRVRHDLTILDCLEALTKEVEAEVVHQSSLEPWAERVAFLVQLPGIGVLNAMLLLAAIGDIRRFAAAPKLVGYAGLGASVHSSGQEHYGGRITKQGRREVRSTMVEAAWVAVRSHPYWKAMFERLADRLGRPKAIVAIARKLLVVVWHVLAEQVADREAQPERVAGKFLDWSWKLGRANRAGLTTAAFIRRELERLQLGDEVTAVYRGKRTFRVAPPELSAQSSRVAAREQ

SEQ ID NO: 136032 - protein, 404 aa, unidentified
MSVHTAPVTSSTIIVAVDVGKTSAMLSVTDGARKRLLGPVEFVMTRSGLAAAAQQVVAVMPPFGQVKVGVEAAGHYHRPVLDYRWPSGWEVLEFNPAHVAEQRRVAGRRRVKTDAIDLEAITELALAGRGQVITEREVRIGELAAWANHRSRRVATRTATKNQLLGQLDRAFPGLTLALPDVLGTKIGRLVAAEFTDPARLAVLGANRLIRFAAARDVQLRRPLAERLVTAARDALPTRDAAVARRVLAADVVLLTDLSTQIEQAEDELAALLPLSPFVTLTSVPGWGVVRVSNYAAALGDPDRWPGPRQVYRAAGLSPMQYESAGKRRDGRISREGSVALRRALIDLGIGLWLTEPAAKAYASGLKDRGKHGGIIMCALAHRATRIAHALVRDHATYDPTKWT

SEQ ID NO: 136033 - protein, 403 aa, unidentified
MNSVGIDISKGRSTVAAMRPFGEVVISPFEVRHTDSELSELARQLKSLDGETRVVMEATGNYHAPVAKLLYDAGLYVSVVNAKLVHGYGNNDLRRVKTDKKDAVKLANYGLDRWLTLPRYVPEEDTRLLLKNCYRQYRQYSKVQTVLKNNLISLLDTVFPNVNRLFSSPIRGDGSEKWVDFAAEFWHCRCVSDKSEKAFANKYQRWCRKHGYNFSEAKAHIIHAEASGRIGVMPKSETTKLLVEQAVAQLRATSAALAALKQEMQSLASLLPEYPVVMDMFGVGPTLGPQLIAEIGDVRRFYSKKALVAYAGLDAPPNDSGDVTGRHKSMSKIGASSLRRTLFLVMSVYLLTAPLDEPVCQFMDRKRAEGKPYRVYMMASANKFLRIYYATVKAYLESLEHTA

SEQ ID NO: 136034 - protein, 354 aa, unidentified
MSNYITIGMDLGNEKHAVCALDQAGKVLWRRDVANTPEALRPFFKENAGATVAMETGLCCRWISALAKSCGCEVLVGNARRLAAIWQSKQKNDENDALMLARLARADRELFHPVELRDDERHEMVQILELREVAVSQRTQAVNSVRGLCKALGVFIPKCDASCFHRVAKDAIPADRAWKFKPMIRHLKEIAATVRRYDAMLEKYAQSHFGDEVELVRTMPGVGPVTSCAFVAVVGNAGRFGRARDVGPYVGLTPAQDQSGDRDAPMHVTKSGNALLRRLLVTSANYVMRKSSPDTALKRHGTRISARGGKIAKRKAKVAVARKIAVVLLAMLKSGRPYDDTAAGEASGASGAAV

SEQ ID NO: 136035 - protein, 345 aa, unidentified
MEIRTIGIDLGKTVFHLVGLNARGEVVVRKKCSRTQLLGFTSKLRECLIGMEACGGSHFLGRALREQGHDVRLMPAQYVKPYVKTNKNDYIDAEAIAEAVTRPTMRFVPIKTDDQLDLQSLHRIRERWVKGRTAVINQVRGLLLERGITMRKGRKHLEASLPQILEDAENKLSGALRVLLHELRREMQYLDQQVEECDKLIERIAGELEQCRRLMAIPGIGPVIATATIAAIGNGAAFKKGRGFAAWLGVVPGEHSSGGKQQLTGTSRRGNKYLRKLFVLGAHTVLLQRRKQSWGLSTWLASLVSRKRKQVAIVALANKMARMVWAVLCKGEAYRPPLVPQIDAA

SEQ ID NO: 136036 - protein, 316 aa, unidentified
MEAIFDNCCGIDVHKKTLTACIMIGREGKITKKEIRTYSTMTEDIEGLRDWLKSEGVTHVAMESTGIYWRPVYNILEEGFEIMLVNARHIKNVPGRKTDVADSEWLCRLLRNGLLNGSFIPPIYIRQLRDLTRYRSKLNNNIAAEKNRLQKYLEDASIKLSSVATDTFGVSGRLMIREIIKGNTDAEGLSELAKGRLKNKKEELKKSFNSRVTEHHRMLIEMSLKHIEYIESMMVKLEGKMDELIKKQDLAKDLELLDTIPGVDKIGATAIVAEIGADMSKFPTDAHISSWAGMSPGNNESAGKKKAQVPRMETYG

SEQ ID NO: 136037 - protein, 408 aa, unidentified
MARYYLGVDWADQSHQLYVSDESGRKIRELEVQQTADGLAELGRWLDESRSQGIELWAAIEKPEGRVVDFLLDHGVVVYPVNPKALDRARDRFRMSPSKSDGFDAYVLAAFLRTDHAHLRVLEPNSAEGQELKMLTRDHQRLGRQKTRLLNQIGITLKEYYPVPLEVFESLDTKIALDFLKAYPTPQALSKLTRRGWKRFAKRDHHLSEARRSELWDKLNKPQLAVPTHVVRAKAKLLAALVMQLEASVKAVDSYSQEVQSFFAAMPAAEIAKTLPGGKSGTTVASIWAELGDAPKRWNSFRHLQAEGGAVPVTKASGKSRMVQFRFACNKHLRQAMYWFSFNSLQRSEWAKKYYRNQQTKGHSKHESLRILGAKWLKIIFVIWQDHKPYDENYHLANIARQMMRQAA

SEQ ID NO: 136038 - protein, 322 aa, unidentified
MFLGIDISKKTFDAALLIEGSKPRHKAFSNDDSGRAALLGWLQEQGATSVQACLEATGTWATDTALALQAAGYRVSLVNPAQIHAFGRSGLKRTKTDKADALLIARFCQMHQPPAWTPLSLQVQQLQGLIRRLEHLEEMLLMEENRLTSGGVCGAVKDSLDEHIAYLQQQVEKTRRQIKVHIDGNPDLKNQAQLLESIPGIGASTAALLLAELGDIAQFNSARQVAAFAGLVPRIRESGTSVRGRSRLSKVGSSRLRKSLYFPAITALRFNPLIKAFGLRLSAQGKSKMLVVGAAMRKLLHLAYGVLKSQRPFDPAFCASTP

SEQ ID NO: 136039 - protein, 341 aa, unidentified
MDEVSTIGLDIAKSVFQVHGVDVAGAVVIRKRVSRAKVLEYFGELPPCLVGIEACPSAHHWGRELQRLGHTVRLIPPSYVKAYLKRGKNDANDAAAICEAVTRPSMRFVPIKTKEQQTALMLHRARQLLVRQRTMLSNALRGHLAELGIVSAKGRNGTAELLRIIADGRVSPAVCGILKVLARQYGAIGTEIASIDKSIMALHRGCEASRRLAEIPGIGPIGATALVAEIGDWNTFSSGRSLAAWIGLVPKQHTTGGKDRLGSITKQGNRYLRWLLVVGAMAVIRYARKHGTQKRPWLGRLTERRPTKVAAVALANKIARMAWAIMVRGERYKEPKLLLAA

SEQ ID NO: 136040 - protein, 348 aa, unidentified
MVHFVGLDVSVKATSVCVVDDGGKVILEQKIPTEPAEIIAVLTSLGVPFGRIGIEAGPLSQWLVNALVAADLPVICVETRHMKALLTAQQISKTDRNDARGIAQMMRVGLFKPVHVKTLVAQEQRMLLTSRKLLQRKLLDVESDLRGTLRNFGLKVGVVSIFRYEARVRELVEGFPRLAAIVEPLLSVRRVMRQQLAVLHKMLLDMVRGDPVCRRLMTAPGVGAVVALTYRATVDQPQRFVHSRAVGAHVGLTPRRYQSGETDYEGGVSKCGDALLRTMLYEAAHVLLTRGAKWSWLKAWGVRVAQRRGMRRAIVAVARRLAVVLHRMWVDGSEFRWRKDGTAVPAVA

SEQ ID NO: 136041 - protein, 390 aa, unidentified
MQIKTYPPEAPNAIRSDLDALFVSLELSRSTWLITSLSPGGGEKMSKHNVPAGDICALLARFSDLQRKAFARTGKSFPIIVIQEAGLDGFWIHRVLQKEGIESHVVDPASVATSRRRRRVKTDRIDGEALVRTLLAYKRGEPRVCAMVKAPAPEEEDRRRLCRERKVLTNERVLHVNRIKGLLFSQGVSGYEPLRRDRRQRLDELRTGDGRPLPPHLKTQISRELDRLELLIEQIKAVETERDALLDPAMKTEGAPAPQAMLLAIKGIGPEFAAVLWSEGLFRHFDNRRQVASYAGLAPTPWQSGSIDREQGVSKAGNPRLRTALIQIAWLWLRHQPQSALAQWFQERVRRNGGRLKKMTIVALARKLLVALWKYVIAGVVIEGAVMKGA

SEQ ID NO: 136042 - protein, 381 aa, unidentified
MNATTVAVDLAKQVFAVCVGDAHGHGGKTTVFKRAEFLAWLKTLPAGTPVAMEACGTAHYWARTLLALGLVPRIMAAEFVKPYRKNQRVKNDSRDAEAILAALHAPGMRFVTPKTEAQQQRLCWHRLREGYKEERKALLNRIRGLLAELGYLAELGVAKLRRTLAQMLTPDEDGALAPEPLREMIQGVLAQLTALDARIEECSAHIARQSRIDPSVAALQKCPSIGPLIADALVATVGDARHFKNGRQFAASLGITPSQNSSGGKNRLGKITRRGDSYLRGLLIHAAGAVLNAAIRKHTAQPEKLSRLQQWMIGVYQRAGYAKAKVVIANKHARQAWAMLTRGEAYNSEAWQAWQAAQGDVQAADHPQDDLPTAALAVASV

SEQ ID NO: 136043 - protein, 363 aa, unidentified
MQDYTKNDGRLSAGKYELFIGLDVDKCSISVSVRDNEDLLRSLKMPYDARNLLSFIERHYSGKRAIFVYEAGPTGFGLYDAIVRGGHSCLVVSPGSVPSAPNSRVKTNRLDSKKLAELLSGLQLRGIRVPPESIRHLRSLVHLRYTYMQDIRAYKCRIKAELLKEGIAFPKAPKGGQWSTKVVASLRRLDCAPVIGYKISSMLDQIEHLAKQMWLAEVTLKSHVNCDQDLKRCIEYLVSCPGIGWRIACYVLARIGDWRCLGGSKEAGAFFGLVPTEDSTGDRTQRGSITKCGDPRLRSMLIQGAWTAIRKDSELKAFYDRICASHSKKTGARVAIVAVARKLAERMHCVLKAQREYELRAAA

SEQ ID NO: 136044 - protein, 343 aa, unidentified
MQTVTTIGLDIAKSVFQVHGVDAAGQVVIRRQLKRRQVLAFFQKLPPCLIGIEACASSHYWSRELQVLGHTVRLMPPAYVKPYVKRQKNDAADAEAICEAVARANMRFVPTKTPEQQSCLMLHRTRHLFIRQQTAVINSIRAHLAEFGIVAPVGRKGVTELLHVVADPGDKRVPEVARACLAALGAQLLSLKEQILEFDRLIMAWHRSNQTSKRLHCIPGVGPMLATALVASVVDPRTFRSGRNFSAWIGLVPKQHSSGGRERLGGISKQGDRYLRSLFVAGALAVIRYAKIHGTGHRPWLTALLARRPTKVAAIALANKIARMAWAMMAKGERYKQPVALAA

SEQ ID NO: 136045 - protein, 399 aa, unidentified
MLDDGSQPTKLFNVDNNQLGAEVLVERIYSIAKEHCISDILIGTEATSMYDWHLLEYLAESKLALEFNLKLYRFNAKWIKNFKKSLAPKGKTDPIDSFAIAERLRIGRLPKEYVPDTKYQPLRKLTRFRFHLQQQIAREKDFFLANLFLKASAYSRVSPFASTFSATSLAVINDFFSVDELAAMPIEELTEFILEKGKAHFSKPGEIVDNLKRVARESYRLKPELAPTVNLILASTFNNIRCYKDQVKLVDSAIAENLKAFKHTLDSIPGIGPVYAAGILAEIGDVNRFPNDSALAQFAGLTWPKYQSGKFQAEETRMSHTGNQYLRYYLVEAANSVKRYDATYKAFYEKKYAEATKHHHKRALVLTARKLIRLVWTLLTRQVLYQPGYCSFENLSKIG

SEQ ID NO: 136046 - protein, 419 aa, unidentified
MTVDFEWYAGIDWASEQHRVCLLDGGSRRAGEREFAHSGDGLAELCAWLIAMSGCEPQKIAVAIETPHGPVVEMLIDQGFAVHSINPKQLDRFRDRFTVAGAKDDSRDAQVLGHSLKTDGHAFRRLVVDDPMIVELREWSRLGDDLKQERNRLANRLRQQLWRYYPQMLELGGDDIAADWLLALWDEAPTPAKAAEISTQVIAPLLKAHRIRRFEAADVLRILRQTPLTVAPGTIAAASAHIRILAERLRLVNRQVKETNRKLDRLCRKLGQAPESEAGNRPEQRDVAILRSLPGVGRINLAALLTEASEPLKRRDYHALRLMSGVAPVTRRSGKACLVIRRLACNARLARAVYHWARVASQCDPISQKRYAALRQRGHSHGRALRTLGDRLLGLACTLLRRQVLFDPDYHCKEVAAAA

SEQ ID NO: 136047 - protein, 353 aa, unidentified
MIIGCDFHPSFQQIAFVDQETGEYGERRLSHREEAVWFYGSLSGRRVQVGMEATGNDRWFRKLLSDAGHELLVGDASAIHASAPREQRTDKRDARHILRLLVENRFPAVWQPPADNEEQRQLLLHRCRLVRMRTRIKNQLDSIAKSEGLTGSRSWSRKRRQQIEGLALTGWYAERRADLLRLLDGLESGIKPLDRAVQLAAEQNSDARLLMTHPGVGPIVSLAYVLVLGDWRRFRRGKQVGSYLGLIPSEASSGKHQQRMGHITKQGNTLLRWLLVESAVKAQRHDPGWHRQYLRLSVAKHHGVAKVAIAHKLAVRLYWMLRSGQNYGQIMERGSHARQSACPVGRGLPPSID

SEQ ID NO: 136048 - protein, 482 aa, unidentified
MSGPAGSFVTTGVQVISNMLCEQIKEAPRVQELRLGIDLACRESHRAALADETGKILWSNRRLFTTSVDLQSLWTAVRAAGDVPVLVVMEPTRNAWVPVAAWLRARGADVRMVPPEQSADLRKYYNKHTKTDRLDCELLARLPLLHPDGLVATPGLGPAEALRRSVAHRQSLVARRTAGLQRLDALLELLGPAWTDVLGTDFGKAALTVLERYADPDALFRLGRARLTQVLIRASRGQWRQDKADELLDAAAQTRLLWAGGGLVFAELADDIAVEARLVRQLGAEIDQLDDRITTHYQDADPTGIVASAPGVGPVLAPLLLGRLGDAKRFRDLAAVRNYTGLVPKVNQSGTSDHTGGLTKAGDPLLREALFMAADHARKVDPTLAARYWRLRAADKHHNSALCTLAAVLVTRIAACWRNDQQYILRDLNGNPITETQGRAQCADLKPTPTAKAGTGRRNKESHSAPSTGPSTKQATKLRKSA

SEQ ID NO: 136049 - protein, 346 aa, unidentified
MMIIGCDFHPSWQQVSWLDTETGETGEQKLVQASGDAERFYRQVAAPALIGMEATGNCHWLVDLLSELGHELWVGDAAQIRASYVRQQKTDKRDAAHILKLLVEGRFPRIWMPSSEVRDLRQLLLHRYKLVIIRARVKNELQHLCLNKGVQRKRKLWSQAGQQILRELPLQLWAGRRRDDLLKLMAMLDQQIEPLDQAVKAEAQRDKMALLLQTQPGVGPITALAYVLTMGDVGRFPRGKQVASYLGLIPREHSSGGRQKLGAITKQGNRMLRMLLVEAAQIAVRYDPQFRREYLHRCHQKPKAVAKVAAARKLAVRLYWMLRTQQPYPAVVRIESSSRVPLVGAS

SEQ ID NO: 136050 - protein, 316 aa, unidentified
MAPSVTALPRILGCDVGKQEIVVYDKARNRLTRLPNQADALEAFAASLDPDCFVVCEATGGYELALLSALLCAGVPAHRADARKVKAFIRSFGTLGKTDAIDARALARYAEERRRDLPLWRARDEDRVRLQSFVLARRDLVADRLAYANRRDAPNAGPLRAHYDSLLREFEARIQALDAEIKALIEGCEPIAKTVKALVAIPGIGLKTAAALVGLLPELGSASPKRIASLAGLAPHPNQSGAADRHRFVHGGRPEVKRTLFMAALTARKHNPNLRVFYERLVANGKKPIVAITAVMRKLLTFANAVIRDHQTIQVS

SEQ ID NO: 136051 - protein, 343 aa, unidentified
MQIVRIGLDLAKYVFEVHGVNARGKAVMRKTLRRDAVSSFFANLPPCLIGMEASNGAHYWARALSELGHEVRLISPQFVKPYVKSNKNDRNDAEAICEAVGRPHMRFVPVKSAEQLALPAIHRVRSRLVAARTRLVNQARGLLAEHGFVIARDIAKLRRHLADIIGHSEGTLNGLVRGLLIEMQEEMAEIDRRVTIYDRRIRELYRSSEPCQRLGKIEGIGPLSATALIAAVGDQRCFKNGRQFAAWLGLVPKQQSSGGRARLLGISKRGDSYLRTLLIHGARAVLARAGKKEDPRSQWLRKLRERRHPNVAAVALANKNARIAWALLARGDVYDPRLSVAPA

SEQ ID NO: 136052 - protein, 388 aa, unidentified
MKPDPQMTLDRYFRQCVGIDISKDKFTACLYMYDRGSDVGCHTESIDFNNTKSGFNQMVKWSRKEAQKGFPLTYLMEPTGVYYESLAYHLHKIGQTIYVVLPNKARKFCESEGIKTKTDAMDARCLALMGCASRKLKPWSPPAPIYRELRQMTRFHADLSQIMTSVMNRMESLNHMEEADKTVRKNCQRLIEEIDRLMENNDKAIMQKVAEDKELEARVKRIARAKGLGLTTVVCIVAETEGFHLIENRKQLTSYAGLDVKARQSGKDDPKHVISKKGNAHIRAALYMPALVATRHNPQIKAAYGRICRKHPNEKKIGITAAMRRLLLLIYTLWKNGEEYDPTRDTTHTPIKKSKEKEQPEYVTEDCIGPNREPVDWNATDEHGNPPF

SEQ ID NO: 136053 - protein, 424 aa, unidentified
MKVTYQTCCGVDVHKSFLVATIVKTTGGIEPSYQKKRFSTFNNSILEFKQWLLDNDCHDVCMESTGKYWVPVFNLLEDEINVVIANPKWVKAVKGNKDDAKDSKWIGDLFRLGLVKGSYIPCKKVRILREYTRYRYKLVSCRSSEKNRYQNALTVCNVALDSVVSDIFGKSSTSIIDYLLEQSGSSINHEEIASKLLRSLKSKEDAVIESIEGYQMTDAQKYRMRLIRAHMDYITAEINDVDKMIENMISSNPDFKNAVQFLCTIPGVKRDSAITIISEIGTDMTQFSSSKRLCCWAGLTPGSNESAGKKKSVRITRAGVYLKPALVQCAHAAVKSDKSPYYKKKYDSLVKRRGKKRAIIAIARMILTAIYQMLSTGELWNPSDLYKIDMPVALVEKQKAKAIKQAKKLLQREGLLPPDKPLAS

SEQ ID NO: 136054 - protein, 433 aa, unidentified
METLFKVSAGIDVHQDTVVVSIRRRDEREREKVETRTFETFHDTLVQMVAWLDEHEVEVVGLESTGVYWKPVVRALKVGSPCRLVWLVNPAEVKKVPGRKTDVNDSQWLSKLVMHGLVSPSFLPPLEQEELRKLTRFRTRLVAERTSIKNRILKEMEAAGIKLASVCSEPLGKSGRTMLDALLAGTQTPAQIAQLALGALRTKIPTLERAVCGSFSEATRFVLKQMVAHLDQIQRDMKALDEQIQTRLAGYEKEADLLQPVPGLDRVAIAAIVAEIGGDMSVFGGADQLSAWSGLCPGSNESAGKSKSAPTRKGDKYLRTILVQVAWCAVRTRGCFWKQKFGQIVKRLGPKKAIVAIARKMLVAIYYMLRDRVPYQEPTAPVPSNAKAKRMVQQYTARLAALGFEVHLTPVVAPAPVASPVTEAPAPVAAPAT

SEQ ID NO: 136055 - protein, 416 aa, unidentified
MGKQRNKACGADIHKNKIVATILSSSGTKNQAEFGTTLPELLRFKAWLINYDCDIVAMESTGTYWIPIYTVLEGSMEVIVANPYMIKHIPGKKTDLIDADWLAELCLKDLIVPSRIFPKEDRALRSLTRAREGLVKIRTQLKNKIHRDLSSSHIKLSSVVADIFGKSGMHILRGMLDNCSIDEIIKSIPSGRVKKNADKIKESIENNLDPSQIFLIESSLDLMGDVQDKIDLIDADLKRKIRTRQNDLKIAMSIPGIEFISAATILAEIGNYRDFSSPEQLASYFGIVPFVNQSADKLHTGCITKHGSKHLRWIMVQVAHAASKKIGSKLRKFYLRVRARRGANVAIVALARKILCILHHLLMNQEVYEEPGSAKKTKPVKLDQSSSRKELTAQEMIDVLRRSGYEVRKIERGACG

SEQ ID NO: 136056 - protein, 389 aa, unidentified
MIYAGIDVAKDKHDCCILGSDGEKLIPIFTIPNNRSGFNEFFEKLFSVSKDVREIKVGLEATGHYSRNLLGSLIEHGLTTYVINPLHTNLYRKGLSLRKTKTDKVDASSIAMMLITDKTLKPYTSSSYHNEELKSLTRYRFTKVQERSKLKTSVSRLVNILFPELETLVPSLHLASIYALLSELPGASYIAECHLTHLTNLLKSASRGRYGRDKAILIRDTARNSIGLDSASKSMELKHTIHLIEEISKEIREIEQAIKKAMLSINSTIMSIPGISYRMGAMIIAEIGDFNRFENADQILAYAGLSPSTYQSGQLTSSHSRMEKRGSKYLRYALFNAAKYVCNWDPNFAAYLAKKRKEGKHYHVAISHAVKKLVRVIFALAKSGEPYKS

SEQ ID NO: 136057 - protein, 449 aa, unidentified
MGNGSGVSRGDRNRNARLERLRRLVPVTNAIAGIDLAGSKQMVVVTDHDSKVIARRVFRCRAWDLGAALDWAAGRAAAHGWAGVTVACEPTGHRWRVLGQLAADRAMPFVCVQPMATSWARRTEDLTCDKTDDKDAVLIARLTAQLRCYVPEPVDETWARLRHLGARREQLITETGGQIQQMRDLLECAWPAALDTARQPFRSQTWIAALSVITGRDGGDFARTRRLGMLRFERAVRREITRRGGRKPCLRIVRGLFTALADPAGVIAHRPGALERVQLLLEDWQLTKDRLAETERRMTAVLGELGLTGLATSMTGLSPVGAAAILAETGDPRRFATGRALVTHAGLAPREKLSGAFTGRTRLTGQGRPGLRLAAWRAVWGAQRANPVYRARYQHLTSRKQNKLTPTQAQTVIAAAILRQLHAVITTGQAWDPVTATHGTRRQTKALAA

SEQ ID NO: 136058 - protein, 409 aa, unidentified
MLFVGDDWSEDHHDIEVQDEAGRVLARARLPEGVAGIDRLHMMIAAHTGDDAVDLEATVGIETERGPWVQALLGSGYRVHAINPLQVARYRESHHISGAKSDAADAHVLAEMVRTEGHRLRSVAGDSERAGAIKIVARGHKSLIWERTRHTQRLRVLLREFYPAALQAFDDLSAAEALELLAKAPDPVSAARLSITQITAALQHARRRKVAAKAAKIQSALRSPQLRQPELVTAAYAAQVRAQVAILGTLNAQVEAMEEQVTTHFSEHPDAEIYLSQPGLAEILGARVLAEFGDDPDRYSDARGRKNYAGTSPITRQSGKTKLVVARYVHNDWLLDALGRQAFSALGSSPGARAYYQQLRDRRVGHHAALRQLGNRLVGILHGCLKTHTRYDETTAWSHRPTARLDSAA

SEQ ID NO: 136059 - protein, 409 aa, unidentified
MLFVGNDWAEAHHDIEIENGDGQVLARRRLPEGIDGLAALHALVGDHLAEDEEPEQVLVGIETDRGPWVQALVAAGYTVFAVNPVQVARYRERHGVSGAKSDPGDAHVLAEIVRLDRAHHRPVAGDTVTAQQVRLAARAHQSMIWMRQRSANTLRSLLRECYPAALTAFGGDLAGRDALAVLAAAPDPAAGRRLTQARVVGLLRRAGRQRNLESRAGEIVTALRSEQLPVAAELAVVNAASVSALVAVITTMVAQTEVLEEQVRLGFGQHPDSEVYLSQPGLGTILAARVLAEMGDDPDRYADARARKNYAGMAPITRASGTKRVVLARYARNRRLADALYQQALSALSASPGARAYYDRHRARGATHHQALRALGNRLVGILHGCLRHHTSYNEDTAWPAPTAEAAAA

SEQ ID NO: 136060 - protein, 411 aa, unidentified
MKALYERCCGIDVHKRIVVACLKCGKKQEIREFGTTTEELRSLTEWLSDSKCQMIAMESTGSYWKPLYNIFELSSLAAIVVNARDMRNVPGRKTDIKDAEWIADLLQHGLLRASYIPNREQRELRELSRYRKSLIEERARELNRLQKMLEGGNIKLASVVSDINGRSARNLLTHMLKRDTSLTKEEVSSLVRGRLRHKVESIMKALDGFLTPLQKQLMLKVVDHIDDMTKRIGEMDDLMNQYLTEYHEAIQKLDEIPGIGRQSAETILAETGLDMNRFPTAKHFSSWAGLAPGSNESAGKRRYGRTTKGNITLKTTLIQCAKAAVKKTDSFLSAQYQRLVVRRGANRATVAVAHTMLISIYHMLKNNVPFTDLGADYYNQFNTQSKIQHYLKKLKRLGWELDSATIPTAAV

SEQ ID NO: 136061 - protein, 341 aa, unidentified
MDDYIGLDVSMKETAVSIRRGGKRVWRGKCPSDPKLIADLIRKRAPSVKRVVFETGPLSVWFYHALSAEGLPAICIDARHAKAALDMAANKTDANDADGLAHLAEVGFFREVRVKSFDSMLTRTLVAARTRLVRIKTELSNQIRGLMKTFGLVVPAGKGSTFEKNVRSLLVGQDGLSAIVLPMLEAWRSLRIRAMELGRQLVASARQNQACRILMSIPGVGVVTATSFATAIEDPGNFKKSRSVGAWLGLTTRRYQSGEVDYDGHISRRGDRQVRGLLFEAATVILTRSSAESSLRTWGLQLRERVGFKRAAVAVARKLAVVMHTMLRTGEFFDRSASTAA

SEQ ID NO: 136062 - protein, 290 aa, unidentified
MLIMGCDYHPGFQQIAFLDTDGGEEGERRLAHREDAEQFYYKLKEQNLRVRVGMEASGCARWFERLLHSLEFELWIGDAAEIRTKRVRKQKTDRQDAQPLLRLMIEDRFPRIWVADAENRDLRQLLWHRHRLVQMRTRVMNQLHVVALNEGLRRKKALWRPAGRHELGSLALAPWASRRRQDLLDLLDQLTPKIQELTQALEAEVEKRPVTRRLMTHPGVGPLTALAFELVLGTAERFHCGKQIASYVGLVPEEESSGDRRRLGHISKQGNSLLRFLLVEAAQVTVRSQP

SEQ ID NO: 136063 - protein, 366 aa, unidentified
MKKSVIYVGLDVHKDSIVAAMATKKQPAVVVRRMLNDWGQLVRTLDDLGNKDRLRVCYEAGPTGYDLARRLNAAGIHCIVIAPSLIPVQPGQRIKTDRRDAKKLADLHRNGQLVEVRIPESETEAMRDLERARDDAKNAERTARQQLDKFLLRHGRSWSQTKWTRLHWAWIERQELPAEALRRVLADYLRAVKEATARLERLEKDIEELVEKWALAPLVKAFQALRGVRLITAVILAAEVGDYARFGTPRELMAYLGMVPSESSSGQQRRQGRITRTGNGHVRRILTESAWNYRFYPRASRAIRKRREPLPAEVVAIAEKAEVRLSKRYRHLIQKGKSSPKAVTAVARELAGFVWAIAREVTLKAA

SEQ ID NO: 136064 - protein, 368 aa, unidentified
MGEPITYVGIDAHQRELQLAMLIGDAAEAVSWTAPTDDDAIERLRRKLERAAPDAIECCYEAGPGGYALQRRLARGRVRCRVIAPSLIPRKPGDRVKTNRRDARQLAQLLRANLLTTVHPPTEAEEAVRDLCRARDDARRDLMRARHRLTKLLLRRGRIYVGTAWTKVHGEWLQRLTWTYAADRHVMTDYRAAIDQVTTRLTELDRLLAQIASEPPYAAAVAALRCFRGIDTVSALMLLAELHHVGRFPHPRALMAFTGLVPSEASTGDRHRRGAITKTGNTQVRRLLIEAAWHYRHEPRPSKRLRERRRDQPLAVITVATRAEQRLCRRYQRLSGRLKPKPLVITAVARELVGFIWAVLQLPSVAMR

SEQ ID NO: 136065 - protein, 332 aa, unidentified
MQLLAIDLGKQSFHIHGITNEGEVISKKVTRSKLAAAVQEYSPETVAMEACASAHHWGRQFEAQGYAVRLVHPRFVMPFVKGSKNDAVDAEAIYEAALRPTMRFVPVKTTEQQDLQMLHRTRDRLITQRTGLINHIRGLLGEYGVVIPVGAFRFRKDIRNAVAEAKLSALATENFNALIAEFEALDKHVAELDRKLIAICRTDERCKRLATLPGVGPVIATALIAAVDDGRHFSSGRALAAWIGLVPRQYTTGGKPRLGGIGKRGNQYLRRQLIHGARSVLIRIANRDDQRARWAQGLLARAGHNKTLVAIANKTARIAWAILRSGEGYKAA

SEQ ID NO: 136066 - protein, 374 aa, unidentified
MHKYIWVGLDVHKVTIAVAVAKGEEVPHSLGTIPNDPDAIAKLMRKLGPSARLRVCYEAGPCGYVLYRQLTAMGIDCAVVAPTLVPVRAGDRVKTDRRDALKLARLLRSGELTAVAVPDEAHEALRDLVRAREAAHKDLRRARHRLQKFLLRQGHRCPLRTKAWGVRYLAWVSGLRFAHAAQSVVHREYLAEVERLAARRTRLDRELEVALAQAPAAIQTVVRALQVLRGVAFVTAVTAVAEVGQFRRFTRARQLMAYSGLVPRESSSGDTVWRGAITKTGNAHLRRVLIEAAWQYRHQPRAGITIRQRRKGQAAALCAIAEKADHRLHLRYRRLLARGKSKGKVVTAIGRELLGFLWAVAVHAENGSTMPAAA

SEQ ID NO: 136067 - protein, 413 aa, unidentified
MAYTVAGIDIHKKVLMVVVAIAGDEVADPAGEAIEFECRRFGAVASERRHLVSWLQERNVTEVVMESTAQYWKPVWLDLEPHFAKLHLAQAHSNRAPKGRKNDFRDAKRLARRLLADELILSFVPDAEQRSWRTVTRGKHQLIRDRVRLQNQLEALLEEARIKLSSVISDLLGVSGRRILQAMADGETNPDLLAAMGDDRLQCSKRELADALNGSPEPIHRQLLKLYMERLHLLDQQIDKLDQMTAMALKQHQDAVIRVAEIPGFGVDSAQQLIAEMGVDAEAFPSAGQFTSWVGVCPGSDVSAEENHSSRSAKGNRFVRRILTQAAQAAVKKQGSHFQSLFRRFLPRLHYNGAIWAIAHRLGCLVWKILHDGIRYVEQGQETNPAAKKRRARKMVQALRKLGYAVALTPIAP

SEQ ID NO: 136068 - protein, 342 aa, unidentified
MPPPSSTLLKYVVGIDIAKDSFVACFGSLDADQRVCAGKPATFANDLQGFTALLHWVAARRASTAPLWFVVEATGVYYEELAYFLADHQQHLSVLLPNKVKHFAQSTEQKSKTDQLDARLLCRLGLERALPVWVPPTPALRRLRILERERQILTQQGARLKTRLHAYEHSYQPEERTLVRLATQQRLIQQQLHDVDADIAALLAAEPELQRKLALLTSIPGIGLTTAVVLVAETAGFSLTENERQLASYAGLDVVQRQSGTSARATTISRRGNVRLRTALYLPAISGLRCNPQLRVFYARLRARQPNGKPGVIAVMRKLLLLCYALWKRDQPYDASYAQVVS

SEQ ID NO: 136069 - protein, 342 aa, unidentified
MNITTIGIDLAKNVFQVHGTDERGKAVLTKVLRRAQMMPFFSQRAPCLIGMEACGSAHFWARKLRALGHTVKLMAPQFVKPYVKSNKNDARDAEAICEAVGRPSMRFVAIKTPEQQALLALHRARQGLVRARTAQGNQIRGLLAEFGCVIPKGRRHLEQHIPEILEDAENGLPGMSRELFARLLEHLRHLDVQVQGLEAQIKAWHREDAASRRLEAVPGIGPLTASALVASIGDARNFKNGRQLSAWLGLVPRQHSSGGKPTLLGISKRGDVYLRTLLIHGARAALQRMKSSEHWGAALAERRNKNLAAVALANKNARIVWALLAHGRDFQADYRATMRQAA

SEQ ID NO: 136070 - protein, 406 aa, unidentified
MYSVGLDWGSAVHTACAIDHDGAVIARVEVQHTAAGLRKLLSRLARIAPPEQLPVAIERPSGLVVDTLVDAGHPVVPIHPNQLKACRPRYRAAGGKSDPGDAYILADVLRTDGHRFRPLEPLSDDVRALRALVRSRDDLVAERVALANQLRALLDSFWPGAVAIFADIDSPIALAFLQRYPTPERARGLGPKRLAGFLARHAYCGRRSPAELLERLRSAPTGLAGPREQEAKGDAVLDLVSVLAILVERIRRLTSAVEHAVAQLPAGRLMMSFPRAGKLNAAQIVAELGDDPQRFPSERQLAAEAGVAPVTHASGKSRAVTFRWACNKRLRNAITTWANNSRHDSPWAHSIYSQARARGCDHPHATRILARAWIRVLWRCWHDQRPYDPARHGAARQLTQPSQCAA

SEQ ID NO: 136071 - protein, 346 aa, unidentified
MDITTIGIDLAKSVFQLHGIDSSGKVLIKKQIKRAQMAEYFVSLKPCLVGMEACGSAHHWARKLESFGHTVKLMPPQYVKPYVKTNKNDAADAEAICEAVTRPNMHFVPIKSTVQQAILSLHRIRQGYVKARTAQANQIRGLLAEFGLEIPQGIGYISKRVPDIIEDASNELPGILRIEIQSLLEHLNELDTRADSCEKKIVAWHKQSETSKKLEAIPGIGPLTATALIASIGNAKNFKNGRQVAAWIGLVPRQHSSGGKQNLLGISKRGDIYLRTLLIHGARSVIYRSGQKENPTDTQGWLNQLTERRNKNVAAVALANKNARIVWALLNHNRDYEDNHKMLLAA

SEQ ID NO: 136072 - protein, 374 aa, unidentified
MENIITYVGMDTHKKQHKIALHYPCQEEIVEFTINNTARDIKKMVNKIKKQAPGQIEFCYEAGVCGFALKRRIEDMGCKCEVIAPSLVPRKPGERIKTDRRDAKKLLMFFKAGMLTEVHAPDEQAEAARELTRLRETAKENLKRIRHQILKLLTRHGYVYRDGDHWTQKHIVWMRAIKFEEPMLTKVFENYFDGMIYCIGRLENLDREVELLAESEEYKEIVGLLCCFHGIRTLTAITILTEIFEFGRFESARHLMSYLGLTPSEDSSGEKQRKGSITKAGNKRVRRLLNETAWHYRHRYVPSKVLKKRRAGQPQWAIDIADAAGRRLTKRHRHLINNGKMSCKVNIAIARELAGFIWFAVTQYHARKNAKDAA

SEQ ID NO: 136073 - protein, 385 aa, unidentified
MKIVCGLDVHKDSVFCCILCANGEKIQHKFGVLTEELVTLRDLMVSEGVEECAMESTSIYWIPIWRVLEGSVKLHLVNPYFIKQLPGKKSDVKDAEWIATCLSKELIASSFVPDEKIQRLRQYDRRIFDLNASISRNLVKLDQCIQRCNIRISNYISTTDSKGYRSIVELISQGVTDAEVLVKKLHGRTINRHGRETLVKALTGVVNETDIDIINQLVEEIELQQRHKDEAQEKMTELCMECFPEELENLQTIPGVKERSATSIIAEIGTDMKHFQTPKKLVSWVGLRPRNEESAGKIKARGITHGNRFVRKTMIECSWGAARVKNSFFAEFSYRLCIERRKNKMKVQVAIARKMLVAIWYVLSQKTQYIKPTDHSTAANITAVS

SEQ ID NO: 136074 - protein, 413 aa, unidentified
MVDPTLPRYGTDVMKQAPPTVSDRLTGSALSDMRLKGGAMDTIYIGVDFHARQQTICYLKTETGELVICELKHQDKQEVQAFYAQFKGHVIVGLEASGYSPWFERLLEELGCEVWLGHATEIRRRARWRQKNDRRDAELILDLMLHDEFPRLHRPAVQSREVLRMLRYRQKLIKIRTMSKNSLQALALQAGLAKGSQLFSKAGAQELRTAVMSPVMQWQREHWLQLLEPLNQQLLETMVWCKAQSKGDVCVTRLRTHPGIGLLTSLCIVHTLQPVSRFRNQRKVAAYAGFDPVERSSAERKCFLGISKAGSRVLRYLLVEAAHTAIRKDEDLKRFYKRLAERRGRPKAKVAAARKLLIRAYIMLRDEIDYAEFRRRAVAARLARGGQRPNVPEVLIGQPASAECQELVHSSEK

SEQ ID NO: 136075 - protein, 341 aa, unidentified
MSICVGLDVSLRSVAMCVLDAKGAIIEEVSLPCEVEAITDHIREAGYVVERIGFEAGTMSQMLFHGLTAEGFEVGCMESRQVAAALSAMRNKTDKADARGIAQVLRAGWYTPVHMKTRESHDIRALLSARKALLSKCIDLENEIRGLFKAFGIRLPSHLSRLRFDEKVRPIIVADEALAFAMLPMLEARGVLYDAFRAMEKRVYAVSHKDPVCALLMTAPGVGPVTALAFTAANDDPARFTSSRLVGSHFGLTPRRFQSGEMDNPGRISRAGDRGVRVTLYTAANSLLLRSTRPSALKTWGLRLARTKGRRRALVAVARKLAVILHRMWVTNTPFLSEGAA

SEQ ID NO: 136076 - protein, 427 aa, unidentified
MNNTHPPLLFAATIGLDWADQKHDLWIQPTAGGKAEHLVIDQTPEALHEWIAKARARFANERIAIAIETSRGAVISALGAYDFIVLFPINPAMLCSYREAFCVSGAKDDRTDAMLLEEYLRLHSAKLRPLEPDTELTRKLAGLVENRRDLVDERTRLVNQLHSLVKTYYPLIQVLFDDLTSPMVAQFLLKWPDLASVKKAELPALRKFFYAHNSRSDKVMEQRLLDIGKARPLTTDPALIEPSALKAQALAGMLKALHQSIDKLQKKIEQTTDVHPDAALFRSFPSAGPTMAPRLLVAFGTNRDRFKSAQEAQQFYGIAPVKKQSGNTKVIHMRHRCPKFARQTFHENASHVVRKEGWAKTCYEQQRARKKGHHAAVRSVAFKLMRIYFSCWKHKQSYDPNRYEKALQKHGSPLAKLLKNKAKATGE

SEQ ID NO: 136077 - protein, 359 aa, unidentified
MVKDSMTYIGLDLGDKNSHVVILDSDGGLIEESRLPTTRASFERKFSRLPRCRVAMEVGAHSRWASHLLKELGHDVLVANARKLRAIYSNPRKGDRADAETLARLARLDPELLSPIHHRSPKAQADLAVLRARDAVVRSRSLLINHARAIVKSCGARLPSCSADSFAHKVAADIPETLRPALAPILETIAGLTQQIRGYDRTIEGLCSERYPETRQLRGISGVGPLTALAFVLTLEDPSRFRKSREVGPALGLVPRTDQSGDRDPQLGITKTGDAFLRRLLVGSAQYMLGPFGPDCDLRRWGLGLAERGGKNAKKRAVVGLARKLAILLHHLWKTGEIYDPFYQSHASAPYPRPASKAA

SEQ ID NO: 136078 - protein, 340 aa, unidentified
MIDYIGFDIHKKTISYCVKQGDGKILDEGVVGATRVSLTAWAGQRHKAWIGAMEATLFTGWVYDALKPYAVELKVAHPPMLKAIAASKKKNDRVDARMIADLLRCNLLPECYIAPAEIRELRRMLRYRNLVVSEAVRMKNRIAGLLMETGSEYNKQRLHGARYFSQLLENLEEVPESVLHMLTLSRASVDMFRSVERELRRRLLNHPHLSDRVELLQTVSGVGEILSLTWALEVGEVDRFPSIPHAVSYCGLCSAENSSAGIQHRGPISRKRNRHLQVILIEAAKVAPRWNPRLREIRDRERERGSRNRATLAVARRLVAYLVSVDRSGKPFRMEDRKVA

SEQ ID NO: 136079 - protein, 307 aa, unidentified
MHGGIGIDVSKATLDVAIQQSGETRSVANSAAGWRELARWLLPLQPRQVVLEATGGYERAALAALFAAGLPMVRINPRQARDFAKATGQLAKTDRLDARVLAQMAQALSLVPWQPRSAVQCRLAEWVLQRSHVVQMRVAERQRLAALSDPALRRLVQRHLGALTRDLAVLDETIGQQLDAAPALAPLRTVKGVGPVLLATLGCQLPELGRLDGKAIAKLVGVAPMARDSGTMRGKRTIWGGRHAVRAALYMAALSAMRYEPRLRDFYQGLRARGKPAKVAIVAVMRKLLVILNARMRDALKESAVIV

SEQ ID NO: 136080 - protein, 423 aa, unidentified
MSYRIAGIDVHKKMLAVVVADVEVQGEYEFERIRYGSNPEHLRLLAAWLIEHEVEEVVMESTAQYWKPVWGALERYWKPSCQKREGAVPMSGTLHLAQARSNRGRRGRKKDFPDAERLVKRLVADELILSFVPDAEQRLWRTVTRRKYQLTRNKVRLQNQLEALLEEAHIKLSSLVSDLLGVSARRMLKAIADGGTDPAALAALADKKLRATQAQLCDALGACTELQPVYRRLLKMFLEELHLIEQQIGQLDQEMAALLSQHPESVQRLSEIPGLGVDSAQQIIAEVGATAATFPSGKHLSSWVGACPGDEESAEVSQSHRSPKGNRHMRRILNQAANAAVKAKGTIFEIVYRRLVSRLGHNQTIGAIAHRLCRLIWIILHRGVRYEERGPSVSTKSRRQRTTRMIRELRSLGYRVEPVGTAA

SEQ ID NO: 136081 - protein, 450 aa, unidentified
MVRYVGLDVHKRVVEVCIVDQSGNVVHRERFALNRRTLELFATKILQPTDHVAFEATTNCWAVADALRPHVAKLVVSNPLATKAIAQAKVKTDKVDAHVLAQLLRCDFLPEVWQPDEATRRLREMTGRRSALVGQRTMMRNRIHSVLAMRLIEVSRKHLFDADGLEWLTTVEIDAQGRTLIDSDLRQLEDLQKEIDSLDLELAKRGHASEPVKLLMTLPGADVATAESLLAAWGDFTRFPDADHAASYIGLAPSTKQSAEHCYHGPITKRGNSQARWMLIEAAQHLDKHPGPLGHFFRRLLKKKTRNVAVVAAARKLAMIAWLMLKNNEPYRYAIPRSTETKLAKLRVKATGERRKSGPPKGSKGTAKLPGGSRTIKSLATICQSEGLPQPRALSAGERRTVASAGSEAFVAETAATQVVPRRSRRQQATAGSDGTGSSSLLQENGHGRD

SEQ ID NO: 136082 - protein, 432 aa, unidentified
MSSRKNEGGLQKMDIVYPVCCGVDVHKKFFVATIIKPTDSIKAKYIKERFSTFNNSIRKFKQWLIENNCYDICIESTGKYWVPLYNLLEDTIRVTVASPKWVKAVKGNKDDVKDSKWIGDVFRLGLVPGSYIPSKFIRVLREFTRYRAKLTANKSSEKNRFQNAFTVCNIALDSVVSDMFGKSASLITDYLLKSDNEFDPEYCKTLLQKSLKKKADEVIESIEGYSMTAEQKDRMLIVRDHLSYLVQTIEKIDMMLDEMIKPYESTITLLCTIPGIDRISAITIISEIGTDMSLFDNSKRLCCWAGLTPGNNESAGKKKSVRITRAGVYIKPALVQVAHAAVKSNKSDYYRIKYERIYKRRGKKRAIIAIARMILTAVFHMFTTGEVWNPSDLFKIDMPQDLKDKQKQKQINQALKFLLNNGVILPDAVIAT

SEQ ID NO: 136083 - protein, 343 aa, unidentified
MYFIGIDVSTKESALCILDGNGKIVRETKLPSDPEIIARFIADTGLAIERIGLETGCTAAWLFAGLQRYGWPVICIDARHAAAALQAGFRNKNDRNDARGIADLMRVNKYRPVWVKSPEAQRQGRLLTARATLQSQLVALENTIRGLLRQEGIGLTDRRTAFEAAVREVIAEDHLLHAAVHPLLETRNAVLCQRAALDRQILLIVRADPVCRLLMTAPGVGALVALTFKVAVDDPGRFSRSRNVGAHFGLTPREHSSGELRYQGRISKMGDHEVRRLLYVAASRMLRRDAALWCPLKAWAVRLAQRVGIRRARVALARKLAVVLHAMWSDGQVFQWRRTEASA

SEQ ID NO: 136084 - protein, 420 aa, unidentified
MSAVQMAELRHFVGEVQRPHTFGPRRAVWSHSGGGDITLARPIGPLRASCWGGRPPTASMCQNEVVADLRQKRPSVEQIIRIGMDTSKQIFQLHGVNAAEEVVLRRKLRRKEMVAFFEKLEATVIAIEACGASHHWARLLRSFGHEVKLIAPQLVKPYVKRGKNDAADAEALCEAMSRPTMRFVPAKTAEQQAALMLMGLRDQLIRRCTQLSNAIRGYAAEFGLTAAKGKAHLHSLLERIQDDESLPILARELFAMQAEAYRRVEAQIDTIDGKLAAWQKTDERCQRLMKIPGVGPIGAALMTMKTPVPELFKSGRQFAAWMGLTPKDHSTAGKVRLGVITRAGDEALRSVLVAGATSAIQHAQRSGKASPWLAALLKRKPPKLVAVALANKTARIAWKLMVTGQRYAEKSAPAAMASAA

SEQ ID NO: 136085 - protein, 348 aa, unidentified
MIIIGVDFHPEFQQMASVDTDTGEFQEKRLTHREEAEKFYRALIGKKVRVGMEASGHARWFERLLSELRFELNIGDAAEIRTKRVRKQKTDRQDARLILQLLIEDRFPRIWVPSGENRDLRQLLWHRHRMVQARTRIMNQLQAVALNEGLRCKKRLWRDAGREQLESFALAPWASRRRRDLLELLDRLTPTIAELTQAIEGEVEKCPEARRLQTHPGVGALTALAFVLIIGRAERFQCGKQIASYLGLVPLEESSGNRRRLGHITKQGNSLLRFLLVEAAQVTVRSDQEWRNQYFHLALRRGRKIAKVAMARRLAVRLYWMWRKGWNYEQLKKFGSHAGQLGTGDGVR

SEQ ID NO: 136086 - protein, 315 aa, unidentified
MDQEPIYVGIDVAKAQLDLAVRPTGQEWQSPNTPEGIAQIVGRLQALAPTLVTLEATGGLQLPLAAALAVAGLPLAVVNPRQVRDFAKAIGRLAKTDRLDAQVLAHFGEATKPQPRPLPDAQSQALRDLLARRGQLIGMLTAEKNRLGTTSAPVRPRLQAHIHWLQEELASLDQDLGDAIRQSPLWRAKDNLLQGVPGVGPKVSATLLAHLPELGILTRQQISALVGVAPLNRDSGLMRGRRRVWGGRARVRAALYMAALVATRHNPTIRTFYQRLLAAGKPKKVALVACMRQLLCILNSMLKHGCPWNPNFVAQ

SEQ ID NO: 136087 - protein, 418 aa, unidentified
MRKMRKRKKILDDQTLLVTVDVSKEKNTGYFRCPDGTEVMPFEFTNNRSGFNKFYDLIEWTKAEKQLFRVVVGFESTGPYAEPLTHFLRNKDVELVQVNTVHTKKMKEVYDNSPGKTDKKDPKVIADLIELNRILKVVVPEGISAELRRLTHARERYIKTRTSLVNQLYDLVFVIFPEFSQIIKDIQTKTAQYLLNHYPTPQEIVNLGVDQLEVILRKVSRGRFGREKAQALFEAAQQTVGIREGQVSIVKEIRNLLQAIFQQQHFVDECESDISENLSKIPWSRYLLSIKGIGEITVAVVIGEAADFNHFKTSGEIEKFAGLNLFEISSGKHRGRRRISKRGRWLLRKILYFASLNVVRKGGIFHDKYQSYLDRGMPKPKALIAIARKLLRVMFAIVRDHKEFDESYSKSIQLKEAA

SEQ ID NO: 136088 - protein, 370 aa, unidentified
MHEPSTLFVGLDVHKESIAVAHAGADRSSEIVYVGQIGTKEADIDKLLRRLHSKASRLVVAYEAGPCGYGLYRQLTEKGVSCLVVAPSLIPKKPGERVKTDRRDASQLARLLRSGDLTAVYVPRVEDEAVRDLSRAREASLGVLKDAKLRLKSFLLRHGHRYSGRANWNAAHLRYLAKVVCPTPAQQIVFQESLRAVTEQTDRVCRLEGELVEVASTWRLRPLVEAYQAMRGVQSHTAVTVAAELGEITRFDNPRQLAAFVGLIPSEYSTGESRRLGPITKAGNGHARRALVEAAWAYRYPAKVSAHLQKRIEQCPKPIQEISWKAQVRLCKRYRRMVARGKNPNIVVTAIAREILAFLWAIAREVPIGV

SEQ ID NO: 136089 - protein, 319 aa, unidentified
MKTPHHVGIDVAKDSMEITVHENQEKWSFTNDETGIAKLITRMKKLGPSLIVMEATGGYEVTVAAELQSMGFPVAVVNPRHVRDFARSVGILAKTDALDAKVIARYAATVKPEPRSLPAEETRRLGVIMMRRRQIVAMRTAEKNRLHQADAAVGKRIKAHITWLEQELDDINKDLKQKIESSPEWKEKNDILQSVPGVGQNLAMTILSDFPELGQLNRKQAAALSGVAPFNRDSGAMRGKRSIWGGRGVVRTAVYMSIVSSIRYNPQIKAFYQRLVAAGKIHKVAMVACMRKLLCILNVMLKNHTFWNYTAHQLTDPCH

SEQ ID NO: 136090 - protein, 415 aa, unidentified
MTEQIHVSAGLDLHKEFILATILTDAGHKEQRRFERTESGLFALKEWTIENSCDVIACESTSDFWVPVHTLMSGHVTVIVGNARDIKMFSHKKTDKVDSELIAQLALKGMIRPSRIFEQVHRDFRSLVRLRHKLVQKTTDIKNEIHHILDSELFRLSSVLRDLFGKSGLRIIEAIIAGSSMDEVMKTLPRNLRKKRAQLEEILKTTISTEAIFRLKHCLNILKCLTDEIREITARSLHYANANFRRDMKILKSVPGIGNIGAFTLLAEIGDFLDFSSGEKLASWLGLVPNVYQSADKLRTGSITKRGSNHARWILVQIAHAAARSKNTVFRQFYDRKKPIIGSGKSIVALARKIVTIVWHLITRNEFFNHEDRRANLSRNSVKVQIPASVSLDEVLTILRNAAITLKEPDPGLGD

SEQ ID NO: 136091 - protein, 310 aa, unidentified
MSEFPATPAGYARLLGWLTSFGTVCLVGIEGTGSYGAGLARHVTAAGIRVVEVDRSDRQDRRRAGKSDPLDAVSAARAAQSGRASGAPRGRDGAVEAIRALMVAKRTARAQRTQTINQARALILTGPDGIRARFTSHGPAELIAALAALRPRPGSMVRYHTLLSLRELGRRAQFLDGQLEQLDGLIIPLVTGRAPGLLTLYGVGPDTAAMLLIAAGDHPARLRSEAAWAHLCATAPIPASSGKVTRHRLNRGGDRQANHALWRIVITRMSSHPATRAYVQRRTAEGLSKKEIIRCLKRYAAREACPHLRG

SEQ ID NO: 136092 - protein, 379 aa, unidentified
MKKDIRYVGLDVDSEKLVVAVAEPNGELRSLGAVPYTAEAVRGLIKKLGPAKGLRVCYEAGPHGYGLYWQLTKLGVHCDVIAPTLVPVKSGDRVKTNRRDAEKLARCYRSGDLTAVWVPDAAHEALRDLVRAREAAKKDQLRARHRLGKFLLRRGLRAAAGVKNWSSGHLQWVKTLRFEQAAQEAAFLDYLHEVEHAAERVARLELAIDQAVEAAPAHMRALIAGLQALRGIKVVSAATIVAEVGPLSRFTRPKQLMGYSGMVSSEDSTGSSVCRGAITKTGNAHLRRIVGEAAWAYQHRPAMSPVLKKRQQGLSEEVKQIAWKAQHRLSSRYRRLTAKGKLRQKVVTAIGRELLGFIWAIGIQVEKEQPASNKRPRAA

SEQ ID NO: 136093 - protein, 407 aa, unidentified
MASMTSAIPTAQPDRVVIGGIDTHKDIDVAALLDCAGMVLGTAEFPTTRAGYRQLLGWMGSAGHLGRVGVEGTGSCGAGICRQLSAAGVEVVEVNRPDRSQRRRRGKSDALDAAAAAEAACGGQRLAIPKSPDGQVEALRVLRLTRASAVKAGTKALQLLQQLIVTAPEQLPDQVGELPRMELIGCCAAWRPHSHDAADPSVATRIALKKLARRYLQLAEEISDSDTLLDGLVTDLAPQLIAVTGIGTDTAGQFLLTAGDNPERVHSEPAFAMLCGVAPLPASSGKTQRHRLNRGGDRQANRALHVIATTRKRCDHRTQAYLKKKIAEGHTRREATRSLKRLIAREVYYLLNPAPHTPPVPPSRPASRRAGAVKVEPPTRGTTLTAPRPRHTIKNGGTGTLTNREAS

SEQ ID NO: 136094 - protein, 411 aa, unidentified
MDAFCGIDWAEDHHDIALVDRDGQLLARARISDDAAGLARLLELLAEHGDSPEEPVPVAIETPRGLLVACLRAAGRQVYPVNPMAVARYRDRHSVAGRKSDKGDALVLANILRTDLHAHRPLPADSELAQAVAVLARAQQDSVWDRTTAHNRLRSHLREYYPGFLAAFAAAKGGIMRPEARTILAAAPTPAGAAKLTLAQLRALLKKAGRSRGIDAEAQRLREAFRAEQMRQPPLVEDAMGRQSLALLRQLDAACTSADDLEAAATESFNQHPDAGIITSFPGIGPLTGARVLAEIGDDRSRFQDARGLKAYAGAAPVTRASGKTRSVTRRHVKNNRLAQAGYIWAFSALTASPGARAHYDRRRDHGDRHAAALRNLFNRLLGCLHHCLVTGQHYDETTAFPAQAAPRTAA

SEQ ID NO: 136095 - protein, 378 aa, unidentified
MPSENIVHIAIELSFSSWLVAARLTGAKKSRLHRIEGGDTGALLALIAELRSRALTQLGGAAEVACCFEAGRDGFWLHRLLTAHGILVYVLEPTSILVNRRSRRAKTDRLDAEGMLRVLAAWLGGDRQVCSMVRVPTPEEEDGKRPHRERERLVQEKLRIENRIEALLFTQGIRARPSLRSWERELTELRTGDGRTLPPLLRAELDRLRRRLVLILELIRELEAERAAALAAAPDEAMAQKITSLQRVRGIGANFSAVLVREVLYRSFANRRQLASYVGVAPMPYQSGGMDRDRSISRAGNPRARTTLIQLAWLWLRYQPGSALATWFRERVGTLQGRTRRIAIVALARKLLIALWRYVEAGVLPAGVEIRTGTVPAA

SEQ ID NO: 136096 - protein, 363 aa, unidentified
MAMTNVICVGCDSHEKTLVNMIGVNREAAQQWSVANTQGGRQRLIARLKEKAEEIGGARIVFGYEASSQGFVLHDELKAAGIECMVLAPTKIERSSKQKRNKNDKFDGQHILKIIRSHVLAGTELPAIWVPDAQTRDDRETVRMRHDVTEKQTVIKTQIQMLLKRHSIEKPVEVGKSGTKSYRCWLKALSESQAGAGFRSALQSLIRQLEFSEAELRRLDQDVNQLCEMPHLKPLVEALDQEAGVGRLAAVTYAVEVGDFGRFRRRQQIGAYWGLTPSSNESGEVDDRKGHITHQGSPRVRRMLCQSGWSRVKHDPGERAVYQRLVEKNPKRKKIAMVAIMRRLAIRLWHVGRKAQLEMTKAA

SEQ ID NO: 136097 - protein, 431 aa, unidentified
MLQPDSQPEPQEGEEPNFAAFVAIDWADQKHVWVLQKAGSQTREHGEIEQASETVEAWMQTLLQRFGGQPVAVCLEQSRGALVYLLMKYPMLVLYPLHPAAVGRFRAALYPAGTKDDPLDAELQLELLVHHRHRLRAWTPDTVETRSLQILAEHRRQLVDQRTGESNRLTQTLKLYYPQVLRWFEDVASPLVGAFLQRWPTLELAQKARPRTLRDFFYRHNCRNAKLIQRRIGEIGQAMPATQDLAIVRTCVLQVKHLIQSIALLRDSIAVLEKEIDKLVQSHPDFAVFDSFPGAGEVLVPRLIAAFGTQRERFSSAVDVQSFSGIAPVTCRSGKSERVHFRWACPKFVRQTFHEWASHSIGFCKWARVYYQQQRDKGAKHHAAVRSLAAKWIRIAYRCWKDRTPYDEQIYLDALRRHGSPLAAKLAPAKG

SEQ ID NO: 136098 - protein, 442 aa, unidentified
MNPIPNDPNPTSTLVAAPALPRPEPAFAAFIAIDWADEKHAVALQAAGHTQIERTTLEQKPEALTQWIAGLRQRFAGAKIALILEQKRGALLWALQPHEHLVLYPINPQMSAKFRQAFHPSGAKDDPLDADLQLDILLHHRARLTAWQPDEATTRQLSLLVEGRRRFVADQVRATNRLRDALKSYFPQALALVGEDLSSRMACAFLKKWPRLASVQAVKPAVLRQFYYAHHSRSAELLAERLQIQAQAQPLTTDEAILAAQSLLVQSLAQELATLHPVLARYDQQIAQLFATQADFAIWESFPGAGPALGPRLAVAWGTQRDRFADRQAMSAYSGIAPVKEASGKALWIHMRWACPKFLRQTFHEMAKCSLQRCAWALCYYRMQIERGKGHHAAIRALAFKWQRIMWRCWQDRTRYDDAKYVASLKRSASDLYARLSAAPAK

SEQ ID NO: 136099 - protein, 348 aa, unidentified
MRFYTQPHHYYCGVDLHTRTLSLCILDAAGAVRLEATLPPDRDRLTATLAPYRDGLVVGCECLFAWYWLADWCVEQGIHFVLGHALYLRAVHGGKTKTDAVDAAKLARLLRGGTFAEAYVYPKPMRATRDLLRRRTYLVRQRATLIAHLQTTFLQYNLPAPAKKLVYAANRAELDLSVFADPSTRSMLEADLAVAAALDTQIKRLEAELVRTAKVHDPQTFARLRSVPGIGPVLALILLYEVQSITRFGHEGQFLSYARLVGGVRESAGKSKGTGGRKIGNAHLKWAFGEAACLMLRESAKAKTWVTRKERKVGKPRALGALACRIGRTVYHLWRKQESFDAAKFLAS

SEQ ID NO: 136100 - protein, 331 aa, unidentified
MEIKETIGIDVSKLTIDVTIHSTQAYSKFENEPKGFKSMLKWVNKNTNYVSEEVLYVFEFTGLYSYQLGVFFTNENLSFLTVPGLEIKRSLGITRGKDDRVDSKVIARYAYRLRDEIQPTKLPSEKLRALKTLLSLRESKVKQRAGDKATLSEYKRVYKRKENKVVFEVLESSIKKMNQLILKLDKELLVIINSDSKLKEQFQLLKSIGGIGNQVALYTIVFTEAFTKFKTHRQYASYCGTAPFPNSSGTSLRGRTKVSNLANKKLKSLLDLGAKSAIQHNTELRLFYHNRVEVGKNKMSTINVVRNKLIARMFAVIKRGTPYVETMRYAS

SEQ ID NO: 136101 - protein, 455 aa, unidentified
MAKKNPTTRQSKGKVRQNILERINLHAAGIDIGANFHFVAVGEDCTEENVRKFDAFTSDLHRMADWLSEHHIETVVMESTGVYWIPAFQILEQRGLEVKLVNAAHVKNLPGRKSDVSDCQWLQQLHSFGLLNGSFRPKDEVCVLRSFLRLRDTLVKDSSSHILRMQKALTQMNIQVHRVITDITGYSGMAIIRAILNGERNALKLAQMKHPLVKAPTEVIVEALQGDYRTEHLFELQTALDLYDVYQRKILECEAQVEQHLQQWETKVDFEQALAQTAASQTRSASVRLELHRQAQLVSVCGVDLTRVPGLSTLAVRTIIGETGLDMNCWKSEKHFCSWLKLCPDNRISGGKVLSSRARRTRNRATAMFRLAAQSAMRSKTAIGAFIRRIKARLGAPIAINAGAHKLAQLFYRMLKFGETYVERGQTYYETKYKERLLRNLNRRAKEFGLQLAPL

SEQ ID NO: 136102 - protein, 324 aa, unidentified
MSDSLPTNVYVGIDVGKTYLDVAVGEQAAPWRVANDPAGLSELLARLRMAAPALIVVESTGGYEVPVLAELALAALPVAVVHPGRVRAFAKSLGQLAKTDQLDARLLARFAAAAQPRQYQLPSTDEIQIGAWLSRRRQLIEMSVAEQNRLETAPPLVRAHIQKHLAWLAAELAEVDHDLDQRVQQSPDWQAQDDLLRSAPGVGRVTAATLLAELPELGHLSPKAIAALAGVAPMNHDSGRQRGQRQVHGERAAVRRTLYMATLVAVRWNPTLKVFYEHLVNQGKHKKVALVACMHKLLTWLNAMLRDKQPWQPDRGCKNLLATP

SEQ ID NO: 136103 - protein, 427 aa, unidentified
MYCTQNEKINQVTENTLVVGIDVGSSTHYARAFNWRGIEFTKYLRFDNTREGFKVLDRWISELQKNHHLSEFLLGAEPTGHYWYALADHLKAKQNPLVLVNPTHVKQSKSLDDNNPSKSDKKDPKVIAKLVIDGRYSYPHIPEGVYAELRVANSNYVRLKTDIGRIKNKVQRWLKIYFPEYKEVFKKPFGEASIEVLARLALPSKIKKMDAQSINQIFRDVKIRAVGLKRAERLIEAAKGSIGRKTEPIAASMEIEILIDEYRMKEKQKEKVEQLMENLCKSIPSAEKLYPIKGIGPITIASFLAEVGDIRRFQSPKQIQKYAGLGIKESSSGDHEGKTEINRRGRKLLRTTLFQAVLSLVSNNEAFRALHQYNIKEKPNPMKKKQSIVALSCKLIRVFYAILTKGIDFDGEKMLEDIQRPSPLAAA

SEQ ID NO: 136104 - protein, 348 aa, unidentified
MNYIGTDIHISTLDFKVIGDSGKLKMANKVQTSELNFINFVKSVPKPRQVIIEEGPLAAWFLEMCVENREQLVITDPKQNHWIGRSGKKEDAIDAEKLAQLARGGYIKEIHHPSGQRRRFRELVQAYHNTNKSIVRVKNQIKAKFLQNGIACPGQTIYMPKQRTEWRNKLPQVPVLLVIVESYWKELDQIEVSLENILTEMKLEAKAYPEIKLIDEIPGVGFIIAATIIAILETPHRFADKRKVWAYSGFGINKKSSANKIYSEKLGKEYNRLLKCVVEQAALAAINADNDNAFRRNYLEMTINKGIAPQHAKLTVSRDIIATAWAMWKKEEHYNPDIERKLKTEVEA

SEQ ID NO: 136105 - protein, 973 aa, unidentified
MDQRLDRVPADALVFGGGNQRLHGRSADLDERLGGVPANALVFGGGDQWLHGRCTDLDERLDRIPANAMVFQGGHQRLHGTRVAYPAERPRGVPAKVSVAIFEGRHERLHGGGADLDERLGRVPANAMVFQGGDQRLHGRGADVDERLGRVPANAMVFQGGDQRLHGRGTDLAERLGGRCADEHALVSIFEGGHQGLDGRDTDVDKRTRGALASVLVFEGSDEGLHGGGADLDERLGRVPANVLVSIFEGDHKRLHGRRADAHTLVPLALGRPVGGSGLRAIWPPAESVERLGDSYAHIPVFEGGDEGFHGGDTDLDERLGRVPANVLVSFAERGDEGPDGRGADVDERLGGVLANVPVLVLEGADEGLHGGGTDIHERLGGGYTHDHALALEGGDEGLHGGEADMHERLGGGYTHEHALVLEGGDEGLHGPGVADLAERSGGVFANVLVSVLEGGDEGLEGGGADVAERLNSSLPHIPVFEGGDEKLRGRSADVAERLGRSYSHVALVIAQCFDQPRDVSLGLELLDVGRSEQRHRYVLLGISLTRPGRLWNLERSRGGGARRRAASGTGAECSTFGRQGVQVGLGLGGGGADSKRLLTGTMTAMERAPLVKPWVLNGTNHQEAHEMLYAGLDLSRQKLDVHILDETGRTVELLAVRPDADALRTLAERIGRYGQPVEAAIESMNGARFVHDTLERLGWDVEIADAAKARGLAPLAAKTDKIDARVLAELARRELVPAIWLPDPSVRAERERARFRLYLVRYRTSLKNRIHATLIAFGQSVPVSDLFGMRGRELLASLPIPEPWATTLTTSLRLVDELETQIDELEAELRATGAHHRYVPLLMTVPGISWVLAYTIAAEIGDIGRFAGPKRLTGYTGLCPRVYQSGLADRRGPLAKTGPKYLRWALIEAATTAARNPHYHDRYQRTKRRLGKQRGSKVARVELARELAGAIWYILTRQEPFRAGGPTSGLVA

SEQ ID NO: 136106 - protein, 354 aa, unidentified
MDSKKYIGMDVHKESISIAVMNGAGKIGMECVIETKASTILQFIDGLRGDVHVTFEEGTSAAWLYDLLKPHVTKLVVCDPRKNASMREGNQSDKIDARRLAELLRLNHLSPVYHGEHGLRSLKELVRSYLTITKDLVRVMTRVKAIYRSWAIPCTGKQVYAPRHRTEWIGKIGEPGVRRRAEFYYQLDALRTVRQEVRRELLAEAKKHQAWKLLCQIPSIGPIRAAVLLGILQTPHRFRTNRQLWSYSGFGIETHSSADHRSVDGQLKRAKKQSSIRGLNRNCNHDLKNLFKGAAIVASSKPGPFQEFYTVLLTKGIRPEMARLTLARKIATIVLIVWKRGACFDAQHLKPQTA

SEQ ID NO: 136107 - protein, 352 aa, unidentified
MVIVIGADVHKATHTFVAVDEVGRKLGEKTVKATTTGHEGALRWARAQFGSDLTWGIEDCRHLSARLERDMLTAGQEVVRVPPKLMAHARASARERGKSDPIDALAVARAVLREPDLPAAAHDELTRELKLLVDRREDLVGERTRQINRLRWHLHELDPELEVPIKGFKITRQRRRVAAWLAGREGLVAELAREILTDIDVGSTRIDELEKRITVLVEDRYPHLLAVPGCGALTAAKIAGETANVTRFRSEACFAMNAGVAPLPVWSGNTRGRVRMSRTGNRQLNAALHRIAVTQIRLDGLGRTYYRKRLDSGDSTVEALRCLKRRLARVVFHELHADQQPTADPANLPLAA

SEQ ID NO: 136108 - protein, 410 aa, unidentified
MDLQMQRACGLDVHQATVVACLLIVLGNGKVKKQIRTFGTTTRELVSLREWLQSEGCTHVAMESTGVYWKPVHAILEGAFELIVANAQHIHNVPGRKTDVKDAEWIADLLLHGLLKPSFVPPKPIRELRDLTRYRRKLVESRSAERNRLLKVLETANIKLASVASDVFGVSGMNMLAALAEGKATPAQMAELAKGRLREKLSQLEPALEGRMEDHHRRILKLQLRRMRELDKDLAELEADIEEKLKPYHLQLELLKGIPGVDWTLAAVIIAELGVDMKVFQTASQLAAWAGVCPGNNESAGRRKSGRVTQGNVHLKTALVEAAQAATRTKGTYLRDKFYRLKARRGAKRAVVAISHKILVAAYHMLSEQVSYNDLGDLYLDKLNKTHLTRNLVHRLERLGYRVTLEELAA

SEQ ID NO: 136109 - protein, 384 aa, unidentified
MEKSSTLYVGLDVHKESIEIATADAGRDGEVRHVSSIGGDLVALDKALRKLISKGHRLHVVYEAGPCGFVIWRHLIAQGLSCEVVVPSSIPKRPGDHVKTDRRDAMMLARLTRSGDLTAVRVPGAADEAVRDRVRAREDAVREQRNARHRLKALLLRNGIPYAGKTSWTAAHLRWLATLKLEHAAQQIGFQEYLHSITEAGARIARLEQAMRDTLPEWSLKPLVQALQAMRGVQLVASMTLVAELQDFLRFENPRQLMAYVGLVPGEHSSSPKRRQGSITKAGNSVARRMLVEVAWHYQHSPRVSPIIATRQDQLPKEVTDIAWKAQLRLNAKFKRLVARRVMKTKAGVAVARELAGFVWAIGQEVQTSGWQGIEIEPASSTTS

SEQ ID NO: 136110 - protein, 411 aa, unidentified
MSYKVAGIDVHKKVLMVVIMDAAEPDLEPVRRRFGSIGSELRQLADWLRGQGVQEVVMESTAQYWRPVWLELEPQFELLHLAQAFSNRAPRGKKHDFKDAERLARRQIAKELTLSFVPGGEQRMWRDLTRMKTHLTGDRIRLHNRIEALLEEMRIKLSSLISDLFGVSGVRILRALANGQTDPQQLAALGDERLRCTEAQLVDALTGSPQALHQAMLGMQLDRLQQIDDQIAKINQLVATAMKPYADNVARLAAVNGFGVDSAQQFISEVGPQAATFPSADELTHWVGTCPGQDESAEQNQSSRSPKGNKYLRRLLNQLAHAAVKTKGSHLQAVFRRLLPKLGYKGAIWAIAHRLCRLAWIILHKGVQFVERGEHPNPKARKQRAQSLARALRKLGYEVQLRPMRPAAAEA

SEQ ID NO: 136111 - protein, 343 aa, unidentified
MDHFAGLDVSVKETSVCIVDDTGKIVREVKVASEPEALLQVLKNPAYHFKRVGLEAGPLSQWLFSALAEAGLPVICVETRHMRAVLKAQINKTDRNDARGIAQMMRAGLYRPVHVKTLRSQKLRMLLTHRKLLQSKAISIDNDLRGTLRNFGLKVGVVGKVRFEARIRELVENLPDLAVLVEPLLTVRRVLREQFCILHRRLLAIVRNDEVCRRLMTTPGVGPVVALTYRATVDVPARFRKSKSVGAVFGLTCAKYQSGESERSGRISRCGDEMMRVMLYEAAQVMLTRTNKWSWLKAWAMQIARRRGMKKAIVALARRLAVIMHRIWVDGTEFRWTRDVATA

SEQ ID NO: 136112 - protein, 341 aa, unidentified
MEITTIGIDLAKDVFELHGVDGKGRIVLQRRLTRKRLLECLAKLPAACLVGMEACGSAHYWAREISQLGHEVRLMSPQFTRAYVKGNKNDVNDAAAICEAVSRPSMRFVPVKNQPQQDIAALHRVRAQLIKNRTALTNQIRGLLGEYGITVVQGIDRLRRALPVILEDEANGLSGMFRETLAEMAERLQWLDERCQRYERRIELVFRQDERAKRLGQIEGVGPLIATALVAAVGNAREFKSGRELAAWLGLVPRQHSSGGRSVLLGISKRGDRYLRALIIHGARAALRVAERKRDPRSIWISRIKLRRGPNVAAVALANKNVRVMWALLVRGDNYRTLAAA

SEQ ID NO: 136113 - protein, 335 aa, unidentified
MSPHHARKGPEWKENMGRQSNYAGIDVSQATLDMAEHATGQQWSFGNDDAGIAEAVAVLVNLKPALVVLEATGGIEVPVVTELVAANLPVVVVNPRQVRDFAKATGRLAKTDALDAQVIAHFAAAVRPELRPLPDTQAQEFSAIMARRRQLQDMLTMEKNRLRVARRLVRGRIKAHIGWLENELTHTNADLERSIRESPVWREKDDLLRSVPGIGPVTSCTLIAGLPELGMLGRKQIATLVGVAPLNRDSGTLRGKRTIWGGRAQVRAVLYMAALASTRHNPVIKSLYRRLCAAGKVKKVALVACMHKLLLILNSMVKHNIRWHYTTAELIGPCS

SEQ ID NO: 136114 - protein, 342 aa, unidentified
MTFVGCDLHTRMQQVAVLDTGTGEVSERQLTHDGSAIEEFYAALPGPVTVGIESTGYAVWFHTLMQRLGHTVLVGDAAKIRAMVVRKTKTDRRDALHLLDLLRHDRFPTIWVPDPATRDLRALLTHRMRLVRIRTMVKNGLHAIALNYRLARGSKLLRQAGLVQLHALALPPHTAQRRDQSLELLAGLTTQIRALDDAITTAALAHPDGPRLITHPGVGALTALATVVVLGPVARFHDSKHVVSYVGLAPTLNASADKYHLGHITKQGSPLLRFALGQAAAHAARMDADLKRTYFTLVHRRGRPKAKVAVARKLLVRLFIMLRDQIDYDEFRRRGRPAPASA

SEQ ID NO: 136115 - protein, 331 aa, unidentified
MTPAAPTPLFVGIDVAKATLDVASCTAAGAPAALAGPYPADPAGLAALVAACHAQPVALVVLEPTGGYEAPVVAALAAAGVPVAVVNARQVRDFAKALGRLAKTDRVDAAVLARFGARVQPAVRALPDATTRELDALLTRRRQLMEMLHAERQRAQQARTAAAPAVVREDVAAHVTWLQARLDAADAGLRALIEASALWRVQDALLQSVPGVGPQLSVTLLAALPELGRLDRRQIAALVGVAPHACDSGTHRGRRHVWGGRGDVRRVLYMAAHVAARFNPVLRAFHARLRAAGKPPKVALVACMRKLLTILNAMIAHQQPWQPRAAAAAGA

SEQ ID NO: 136116 - protein, 482 aa, unidentified
MKKKTIFPHQSQELNNMFEEAGSNSKVMCIPIDYAKKEHVVMFCNGHGNILRKPFPVKNSPAGLEYLTQQVLKSCQHRGIDPKYAFFGGEDVGSYAQNFVNTLRSGGWIVAGVNAHDAKKQRANMQASNDSLDLIGIASMLLNRRANCSPAQTGIYLNLRNLTRHRKKTVDMATEEKNRIHTVVDQIFPGFLDEKKVGITPFSPSSLYLMEDRFSPAQIRRRKRKKLIETLHRYGTVKPEVAADKLKHYATRVLNTPPEYLSALQVSLTQHVKHLKCLQDGVEQLEKEMALWLAQTQGAFLTTLRGIGIVLASGVTAEIGDPMKQSPVAKLVSYAGIIPRIKQSGGPDGKIRTGKVAKRCNRILKNYVVQSANHVGLHGPEDLMADYKRRETGGQHADFGIARRYIRASMCLMRTSQIYMPKRLRTKGVNPEERAGYFLMIWPSLKNKWSKLGALETAFSSNNPLGRWRNMVQELYEIKLKL

SEQ ID NO: 136117 - protein, 411 aa, unidentified
MKQQTATSMDILPQLDKACGLDIHKDKIVGFIACKDGSGQELKEFGTFTCELQKVKEWLQTNQVEHCLMESTGIYWMSLYTILTDCGISVIVANPTHIKQIPKRKTDRKDARWLCMLLMHGLVRASFMPTAEQRVLRDYCRSRLFYSRQQNKIQNRLWKILESNNIKLRSVISSICTKTAMSIIRLLSQGVTDRVQLAECSLGRAKKNKDNMLLALEGTLAEHHLKQLQMLLQDFDHIQKQVKTLNSLIDESIVKHYSVAFECLDTITGIAQRSAEIIISEAGNDMSRFPTADHFTAWCGLAPGNNESAGRQGNTSIKKGNTYLKTAIVSAAWAAVRVKNSYWHALFERMRKRMKAQKAIVAIARRMLKVVYNTMETLTHYKEKGVAYYQEMQEKAVAYRQAGKLWPSTNA

SEQ ID NO: 136118 - protein, 328 aa, unidentified
MDVIVGLDLHMKNTHGTIMKMNGEIVKQEKFRTRKEYLGRFLEGVPRGSKVALESLGFCWPWIDFLEELGFEVLLANPVKVKSRAEDVKTDKVDSELLAHLTRVDWLPTSYVPSRELRWLRNLLRHRAFRVKMSTAIKNRSRSEFRKRDISLRVDLRTRRGRNLASVLGVFEVCQNMELLEVIERQTCEIERMLRKKYGKLKPVRLLMSIPGIGFLTALTLYAEICDIRRFSHPDKLARYCGLVPRVHQSADHTRLGREVKANKWLKWILIEAAWSHLRFCPDGRLAKVFENAVRRKRDKKKAIKIVARKLVNVIWAVWTYERMFTVE

SEQ ID NO: 136119 - protein, 406 aa, unidentified
MWKEVVISTTRYFGLDIHKFYLVAIAVDADKQVVYGPRRVEWPQFEKWIEQTLSQKDRVVIEMTTNAWEVYDTLLPHVYNVLVVHPQHVKAIVNAQIKTDKKAAQTLAELLAAGLLHGIWVPDEYIRDLRMLTSQRKKMGRLGAAAKNRLHAVLHRHHILPPEGFELFHPKLRHYWEWLKVSAMEKVRIQSDLATLEFAQQQKAMLEEEMGKVAANDQRVPLLIQVPGVAMLSAVTIVAAIGTITRFPEARFLVGYAGLGARVHDSGERRTTGGITKMGRRDLRGAIIDAANAAVRHHPFWKKEFERLDYRLGRSRAIVTIARKLLITVWHVLREEIADKHHDPRDVACSFFKFAYAVKVRNLPDNLSALQFTRSQLDRLGIGADLHKIPWGTKTFKLPPSRLKQM

SEQ ID NO: 136120 - protein, 448 aa, unidentified
MSKSKNNNEVVKLISDLQVINPTVAGIDVSDSEMMVAYPINSTQIEVRAFGCFTRDLNLIAKTLKAVSITSIAMESTGVYWIPLFLLLQEYGFEVYLVNAKHVKNVSGRKDDESDAEWIQKLHRCGLLSASFQPDNMMRTLRSMVRHRKNLVRMSSGYINRMQKALEMMNIKLQTIISDIDGKTGKLIIEAILGGERNPEVLADLRDRRIKASREDIIKSLEGNWTAEHLFELKQCYKLYSYHQEMIDECDKEIEKQLIEQVASKNDGLILDLPKVKRKAVKKNKVDFELTTYLKELIGVDVTEVFGISEITALTIMSEVGTDMSKWKTENNFTSWLGLAPNTKISGGKIISSRIQKKKHHAGQSFRMAANSLHNSKSPLGDFYRRIRSRAGAAKAVVATARKIAIIYYKMVSNKEAFNSKAMEDFQKIYKEKKIIQLKKKLALLEAS

SEQ ID NO: 136121 - protein, 417 aa, unidentified
MKRMLERCAALDVHKKTVTACVRVVGEGGELVEQIVVFATMAADLLALRDWLKAFGVTHVAMEATGVYWKPVYYALEDDFELLLVNARHVKNVPGRKTDTTDAQWLCQLLECGLLRASFVPPPEIRELRDLTRYRKALISERQREANRLHKVLEDAGIKLASVASDVLGVSGRQMLDALLSGTRDPEILAELARGRLRAKLPELERALAGNFKPHHALIISHLLAHMDYLEQIIQALTEEVEQRLLPFAQKAELLTTIPGVGERTSHVIIAELGPDMARFSSDRHAASWAAICPGNNESAGKRRSGKTGKANPYLRTALIEAANAAAHTKNTYLRAQYEQVKRRRGHKKAIVAVAHSILIASYHILKDDVPYHDLGGDYFARRADPARITKRLIAQLERLGHTVTLQTSTAQEAVAA

SEQ ID NO: 136122 - protein, 340 aa, unidentified
MQVTTIGVDLAKNVFQVHGIAEDDIVVFNKPLRRAQMLPFFAKLEPCLVGMVSCSSAHHWARELTALGHDVRLTPPMYVKPYVKRGKSDAIDAEAICEAVTRPTMRFVAIKTVEQQSLLSLHRARGLLVRQRTQLINGLRGLVAEFGICIPRGLARVIGFAEDITLGEVLELPDIANEVILNLSEQLMALHKRIRWYEERLKQVAKEDARVHLLRTIPGVGAVTASAIIASIGDGHQFRNGREFAAWLGLTPANKSSGGKEKLGRIKKMGDQYLRSLLVVGMISLVRQTRSHPERASQWLTGLLERKPARVATVAMANKTARIVWVVLTRNEPYSPRAAV

SEQ ID NO: 136123 - protein, 320 aa, unidentified
MMTDDSIGIDISKDFLDAHRLNDGTAKRFPNEPAGFHALATWLGEGIPTRVVFEATGAYHTSFERAFSGKFPLVKVNPLQARRFAQACGTRVKTDAVDARMLANFGKALDLEPDQPLDDKQYELKELFSSRGGLIKDRTRLINRLKTQTLALVKRQTRARIDQITRQLKVLQKDINARVKDCPNRARANTILRSIPGIGEVAAATILIEMPEIGTLHKKGAASLTGLAPMTRQSGKWSGKATIQGGRKQLRDALYMPALVAAKHNPDMRKKYRRMIDQGKPQKVALTAIMRKLIELSNALVKADREWAPNGGVRQKRTSL

SEQ ID NO: 136124 - protein, 343 aa, unidentified
MDYFAGLDVSVKETSVCIVDDAGKIVREARVASEPEALLQVLTNTIYRFKRVGLEAGPLSQWLYSVLAEAGLPVICVETRHMRAVLKAQINKTDRNDARGIAQMMRVGLYRPVHVKTLRSQKLRMLLTHRKLLQSKAIAIENDLRATLRNFGLKVGIVGTVKYEARIKELVENLPDVAVLVEPLLVVRRVLREQVGILHRRLLAIVRDDDVCRRLMTVPGVGPVVALTYRATVDVPARFRNSKAVGAVFGLTPSRYQSGESDRIGRISRCGDEMMRMMLYEAAQSMLAHSAKWSWLKAWAMKIARHRGMKKAIVALARRLAVIMHRIWVDGTEFRWTREVAAA

SEQ ID NO: 136125 - protein, 341 aa, unidentified
MMIIGCDFHPRFQQIAFLDQESGEYGERRLQHRGEAEAFYRRLSGLPVRIGMEATGNYRWFRRLAEGQGHELVLGDASKIRACCVRKQKTDKRDARHILDLLLENRFPAVWQPDAANEDLRVLLMHRVKQVRLRTRLKNQLDGLAKSEGYLSPRVWSAGRQAELQALPLRGWLDRRRQDLLELHEELDERIAPLDEALREAANQDAAARLLMTHPGVGPVVSLAFVLTIGDVSRFARGKQVGSYLGLIPSEESSGQHRRLGGVSKQGNSLVRWLLVQAASRAQSSDASWHRQYMRLSMNKHHGVAKVAIAHKLAVRLYWMLRTGQNYEQLTVRGSHAGQSV

SEQ ID NO: 136126 - protein, 341 aa, unidentified
MKITTTISIDLAKNVFQVAVFNKHGNLKSNQAMSSRKMALLVAQHPEANICMEACGSAHHWGRKFTQQGHEVYLVPAHISAKYRSGNKNDPKDVLAIYAAAKRPDTHFVTVRTLEQQDLASQHKLRQGYVKQRTELANRIRGFGMEYGVKFPKGIEQLRRRVPEALEDGENELTTTARSLLSNLLGQLLSLDGQIAKITKTLVEHTKQVPACRELVRMPGVGWLVAGALYVRIGNGSAFGCGRDASASIGLVPAHNGTGGHNKLSGISKRGDRYLRTLLVHGARAAVSNIGDKQDGLSIWIRKQLITNHMNNTTIALANKLVRMAWAILSSGGQYQEPVAQ

SEQ ID NO: 136127 - protein, 364 aa, unidentified
MLIIGCDYHPGFQQIACVDTETGELNEKRLAHPEQAEQFYRELQQRGITVRVGMESSGHSRWFERLLRELQFELWIGDPAVIRTKRVRKQKTDRQDAQLILQLLMENRFPRIWVPDAANRDLRQLLWHRHRLVQMRTRVMNQLHVVALNEGLRRKKALWRTAGRKELESIALAPWARRRRQDLLDLLDQLTPKIQELTHALEEEVEKRPVTRRLMTHPGVGPLTALAYELVIGTPERFHCGKQIASYVGLVPEEKSSGDRRRQGHISKQGNVLLRFLLVEAAQVTVRSQPEWRSKFFHLAMRRGRKIAKVAMARKLAVHLYWMWRQGCDYGQLQKLGSHAGEPGNPDAEQSITDVMIGHPAPNN

SEQ ID NO: 136128 - protein, 410 aa, unidentified
MEVMFDRVAGLDVGKETLTVCVRIPGAKGRRRAETRTFKTMSGSLRVMRDWLVEAGVSIAAMESTSTYWKPPFYCLEEVMEVWLLNAAHMKAVPGRKSDVRDAEWIAQLLEHGLLAPSFVPPPEIRRLRMLTRYRTQLMGDRAREIVRLELMLEDASIKLSSVASSLKTVSARAMVGAMIEGETNPLTLANLAKGRMRRKIPDLAQALTGTFDAHHAQLARSMLQRLELVELALAELNAVIVQACRPWQHQIELLQTIPGVGETVAQVIVAETGVDMNRFPSAAHLAAWAGLAPAMHESAGRQTPAGKRHGNKWLTAMLVEAAGSVGRMHGKNYLAAQHARLLKRRGMGRAQVAVAHSMLISAYWMLKRDEPYHDLGADWHRRRSDEAHTRRLVAQLEHLGHKVSLNPAA

SEQ ID NO: 136129 - protein, 358 aa, unidentified
MKIIGCDYHPSFQQIAMLDLGTGEYVELRLLHAGGEAQRFYESLSGRVRVGVESSGNMLWFERLLQKLGHELWLGDAGVIRAKAPRKQKTDVRDARHLLQLLRENNFPRIWVPSVAERDLRQLLKHRHTLVQMRTRVKNQLQHIALNQGLQKKQKLWTRAGQELLRGLELDRWTARRRDDLLHLLEYLEKQMEALDQAVKAEAEQRAEVRLLMTHPGVGPVVGLATVLTLGEVGRFPRGREVAAYVGLIPSENSSGQRRRLGAISKQGSSFLRFLLVQAAASAVKGDAEWARAYKRLAHKKHHGVAKVAIARKLVVRLYWMLRTQTRYPEVVRMSGSPSHPVARLQAERLSGHPASPR

SEQ ID NO: 136130 - protein, 331 aa, unidentified
MDVHAGDAVVCVQYGDQLPKPPRRMEPGEVVEMAGELVRSGAKVWSCYEAGPCGYTLHRQLSAVGVSNVVVVPRRWDPEGGRVKTDRRDARALCDALDRHVRGNTTAFSVVRVPTPEQEERRALGRQRAALVKERQRCIVRGHGLVLLAGMQLAGGWWRSTSWAKLAPELPEGLRARVGVWAEQAQRLDAEVERWSAAVEQDGAKLVPKGVGVLTGGLIEREVLDWTRFANRRAVASYTGLCPSERSTGLSRRQGTINKHGNPRLRHLLVEAVWRLEQWQPDYPPVRRLMATTGARARKRAAVAAARRLAIDLWRINTGQCPAERLGLKLR

SEQ ID NO: 136131 - protein, 364 aa, unidentified
MATQLTANPKLYIGMDIHKKSWSVHLRTDISDHKTLTIPSRCEVLCEYVDKHFKDHDVSLTYEAGCCGFSASRYFLNLGWNVLVVNPADVPRMDKQNYQKTDKIDCRNLAKQLSAGQLRGIYIPDEAQDLLKSLLRQRAETSKQLRAIKSNIKALLLYHGIELPAEFDKPNWTKAFLQWLREIKWTHPTGKTYLESKLRMLDVIYQEHLQLANELRAYCRKYHKKDYDLLKSIPGVGGFLASAILAEIGDLRRFSSEAQFASYVGIVPTMRNSGGTEKIQGVTPRCRGLLMSYIIESAWVGLRMDPEMQAYYRKHIGKNPKSIIVKIARKLLNRMLSIIKTGEPYKSSYSLNNGKETKTKITTN

SEQ ID NO: 136132 - protein, 423 aa, unidentified
MEVMHERVAGLDVHKATIVACVRLGAGRKVTRECRTFDTTTDGLRTLLAWLEECRCSHVAMEATGVYWMPVWKILGEGDFVLIVANAAHIKNVPGRKTDLNDAMWIADLLACGLIKPSFVPEEEMQELRSLLRTRKQLGREQTRHVQRIQKTLAEANVKLDSVLSDIMGASGRRIIEAMIAGVRDPRRLAALANTRIKATPKQLYDALHGRLTDHHRFLLTLHLRQWDSLDATIREIDQEVEARIVGMDKEVKAGEAPFRDLIGLVCTIPGVSTLSGTTILSEIGRDMSRFPTAGHLVAWAGLCPGQNESAGKRKPARLRKGAPWLKTMLVQCAWAAKRKKDSYYKAQFFRLQARRGPQKAICAVAASILTAIYHILKNGTEHHDLGADHFNRRSTESQTKRLVAQLTRLGFEVQLQPIAEAA

SEQ ID NO: 136133 - protein, 407 aa, unidentified
MIFVGVDWAEAHNDVLVMDEGGVVLGRGRFSTGVTGLAQLHALVADCAEEPGEVIVGIEIDRGLLVDSLVGAGYQVYGVNPLAASRYRDRHTTSGAKSDAGDAKLLADLVRTDRHNHRLVAGDTEEAGAIRVLARAHQGLVWARQRQVNALRSALRDYFPAALEAFGTDLAQTDALAILTIAPTPERARGLSRTKIAAALRRAGRQRNVEQRATELQTALRTNQPEAPSQIAEAFGAASAARVVVLVSLNGQIAELERALLEHFDRHPDAEILRSLPGLGLVLGARVLGEFGDDPNRFTDIRGRKAYAGTAPITKASGRSLVVLARVARNRRLADALEWWAFCSLGPSPGARNYYDALRARGKTHSQATRQLANRWVGILHACLERHEVYREHVAWPEREEDLGVAA

SEQ ID NO: 136134 - protein, 344 aa, unidentified
MQITTIGLDLAKSVFQVHGIDATGQVVVRKSLRRSQMLPFFAKLPPCLVGMEACGTSHYWARELIKLGHEVRLMPPAYVKPYVKRGKTDAADAEAVCEAVTRPTMRFVPVKSPEQQAALSMHRTRDLLVKQRTQLINMIRGLLAEFGVNIPKGLERALLMARQIVDGKAPEVPFEAAKIVGTLSQQALDTHVRLREIDRDLAVCLRGNDVARRLMTIPGIGPVGATALAASVTDPHQFRSGRQFAAWLGLTPLQKSSGGKERLGRITKMGDKYLRKLLIVGMTSLVRRAKYNPGKIDPRLADLLARKPIRVATVAMANKTARVVWAIMARGETYRAGHRPVLAA

SEQ ID NO: 136135 - protein, 360 aa, unidentified
MAMKDDANTRTIVGGVDTHKDLHVAAVVDEQDRVLETRSFATTRQGYRQMLAWMRSFGDLQRIGIESTGSYGAGLLRFMQNAGVTVLEVTAPDRQDRRRRGKNDDLDAQNAAHAAFAGKRTVTPRSRDGMIEALRVLVACRKTAVMARRIALQMIQNTIVAAPDELRDLLRDMTRMQLVRTLAAWRPDLTSYREVEAAYRIAFKSLGRRYLELPDEIADLDTMIAAIVDELAPNLVTRNSIGHTGAAQLLLTAGGNPDRMRSEASFAALCGVSPVPASSGKTIRHRLNRGGDRAANTALHIIAIGRLRTDQKTKDYVARRVAEGHSKLDAIRAIKRYLAREVFSLIMQRQKEINATRIAA

SEQ ID NO: 136136 - protein, 316 aa, unidentified
MADQQTVEFKQMASRCCGLDVHKKEIVATVEGEGISKETRSFSSTTRSLTELKDWLLALGITHVAMESTGVYWKPVLNILEPGGFTILIVNARHIKYVPGHKTDKKDSAWICKLLRAGLLKGSFVPDQSQRDLRDLTRYRRKLVQNLAAEHNRLIRIFEDANLKLSSVFSDVTGKTCTAVIDNVTKGNTDPEFLASLCTHWRLKSTQEEIALAVEGKFREHHKFMLQAIRRSMENLTAEIKELDEEITRRMKPFEEEIARLCQIPGISKTSAKDLLAEIGVDMEIFPNAAHLASWAGVSPGNNESAGKKKLAHEPW

SEQ ID NO: 136137 - protein, 452 aa, unidentified
MREPQEVEDREDEQAVARVAAVDVAKASAVVCTRVPREGGPGAGRFVTRVWPVGATTNEIIELAAYLAGQQVEKVVLESTSGYWRPFFYLMEAAGLHVELVNARDVKNAPGRPKTDKLDAVWLAKLAGWGMLRPSFVPPAEIRQLRDYTRLRTDLTRERTRHWQRLEKLLEDALIKVTTVASRIDTMSVPDMVEALIAGERDPRTLAGLARGRMKAKRAALIEALTGRFDAHHGELAAILLAQIDGLTAQIDTLSTRIEELIAAIPGAQGVNADGTTGPQAGRGPDAAALPAIDRLQEIPGISRHAAQVIIAEIGLDMTRFPTAGRLISWARLCPRTIQSGASERPGKTAKGNPYLKGILGDAAAAAAKTTTFPGQRYRRLARRRGKLKALVAVARTLLIIIWHLLADRAARFEDLGEDYYLNTIDTDRRARSHIRQLQALGFTVTITPAAA

SEQ ID NO: 136138 - protein, 410 aa, unidentified
MEVLHPRCCGLDVHKETVVACVRLVIDGKPVKEVRTFSTTTAGLIELSEWLTETKCTHVAMEATGVYWKPVWHILADDGFQLVLANAAHIKNVPGRKSDVKDSDWISDLLAHGLIRPSFVPDGPTQEMRTFLRTRKQFVHEKGSHILRIQKTLEDANIKLDSVITDIIGVSGRKMIEALIAGERDPAKLASFADRRLKASQQTLRQVLRGRVTAQHRFLLRLHLDQIDALDAAIARIDREVEASIVPFRTAVEQVRTVPGIKSLAAQTILSEIGIDMSRFSSSGHLISWACICPRSDESAGKRRSTRIRKGSPWLKTTLVQCAWAATRKKGSYLQAQYYRIRARRGPKKAIVAVAASILTGIYHMLKDGTMYQDLGPNHFDAHAKERQKNRLLKRLADLGYAVQLAPLPN

SEQ ID NO: 136139 - protein, 395 aa, unidentified
MDCAAQTQEHCVIGARPEAIEAWAMQLRVRYGGQPIAVCLEQKRGPLIYALCKYEFLVLYSVNPQTVSKYRQVFTPSRAKDDPTDAALQVELLRKHRDKLTVWQPASPMLRKLQALVEWRRTLIEDIGRTTNRLVDVLKGYFPQAIDCFEHRDTMVFCDLLTQWSTLSAVQQVSDEQLQQFFCEHHSRYKDCNARRIECLRNGIPLTQDSAIVESSQLMVQALVSQLRSLLTSVRQFEAQIDREFNQLPDAAIFAALPHAGTNLAPRLLLAFGEDRTRYQTAQDLLQYAGIAPVTERSGKKCWIHWRWGAPRFLRQTFIEWANESRKASLWAKAFYQAQKQAGKTHQAAIRALAFKWIRILFRCWQDRVPYDEAKYLLALHQKGSPLAQQILSQA

SEQ ID NO: 136140 - protein, 388 aa, unidentified
MILVGIDVAKNKHDCLIINSDGEILVNSFTISNSLEGFQTLYSKICSCSTNDSEIKIGLEATGHYSNNISEFLLNKNFHVFIINPLHTNLFKKSQSFRKTKTDKLDTLTICSMLQTQKLTPYAPVSYHSLELKSLTRYRFRLVDECSKLKVSFSRLMTIVFPELEPIVKNLQVNSVYHLMRRYPSTKAISNCHLSTLTNLLIANSKGHYRQEKATIIREAAKKSIGTCTPMQSLELTQTIDRILLLRSQVAIVEEKIENIMKQIDSPMTTIPGISTQTAAVIYAEIGDFSKFSSAEKILAFAGMEPSIYQSGEYNSAHGKMVKRGSKYLRHTLFLAAENVTHWDPSFAAYLTKKRSEGKHYNVAISHVVRKLLRTIYAMEEKHQAYQP

SEQ ID NO: 136141 - protein, 430 aa, unidentified
MEIVYPRSCGVDVHKSFIVAVICISESVKPKYIKKRFSTFNNQLIQFRDWLIENNCQNVCMESTGKYYIPVYNALEGHISNVVVANPKWVKAIKGEKDDNKDAKWIADLFKFGIVRSSYIPEKDIRILREFTRYQYKLVNMRSSEKNRFQNALTTGNCKLDIVFSDIFGKSASAIVDTILSNNPYTSEDILSKVHAGCKASHEDILSAVEGIQLNQFQKARIRIVQKHMEYLDSLLDEIQHHIDLMVANYEEYIQLLCTIPGINRKSAITIISEIGTDMSQWSSHRKLAAWAGLAPGCNESAGKKKSVKISKAGVYLKPCLVQVAHAAVKDKNCDYYADKFNKITKRRGKKRAIIAIARKILIAVYHLLKTGEVFNPTDMADVETTKKQRIEYVKNNLRNAFNQLSRTGLSEAEILQLIRKESTNSPQIE

SEQ ID NO: 136142 - protein, 369 aa, unidentified
MQDRIRYVGLDVHKEGIVVAIAEGGIRGAVREYGRVANTATALDRLIRKLADGGARLRFCYEAGPCGYGIHRHVSKRGHECVVVAPSLIPRRAGDRVKTDRRDAASLARLHRAGELTAVWVPDAGHEAIRDLVRARLDAVHAVRRARQQLSGFLLRQGCHYSRPAWTKLHRRWLSGLKFEQAVHHLVLEDYVQAVEAAEARRDRLRAQIEAMLPQWTLAPVVAALQTLRGMALVNAATLIAELGDLSRFTDPRQLMAYLGLVPSEHSSGASVKRGSITKAGNSAARRLLIEAAWCYRFPARVSRELLLRQENQPKPIRDIAWKGQVRLCARYRRLARTGKPANVVTAAIARELTGFIWAIARRVPMPAS

SEQ ID NO: 136143 - protein, 477 aa, unidentified
MSRAKSTIPSLAQGEIRSTEGLPVVNPHAAGADIGAQEIYVCIPGPDQTQIVRPFGTYTADLHAIADWLVENGIQTIALESTGVYWIPLFEVLEGRGIHCCLISGNLARRLPARHKTDVLDCQWIQTLHSLGLLTESFRPDADLIALRSLLRHRAQLIEHRSPHILHMQKALIHMNIRLDQAVSDPTGDTGLRIIRAIVAGERDPHKLAALRHPHCKKSEAEIARALTGTWREEHLFVLNQSLELYDFYTRQIETCDAEIERTYSTIRPHWPDPDPNDQDPLPPNKRGSNSKNLPKNSPVNVRQHLRRITGIDLTTVDGLSLDLAQKIVAEIGTDMSRFPTVKHFTSWLKLCPNNQITGGKIIRSSTGKSHNRARQAFLQAAASVARSNCAFGAFYRRLKARLGPAQAQVATAHKIARAVYHLLKFKVEYSQMSAQEYEQQFRERETRYLQRKAARLDFVLTPTLSVSWQPWLCGLL

SEQ ID NO: 136144 - protein, 350 aa, unidentified
MSLYDLRLDWACGPETIKTHYFCPFWRIATITLSTVGVDISKDKFDAARLSAEGKYKHKKFTNNPAGFAAFVVWLASFGDEEIYIGMEATGAYSMPLAEFLAERGYAVSVINPARIHAFAKAGMGRAKTDKADAKLIAQFVQEKKPALWTPPPRNIRELQALLRRVEHLLEMRQMEQNRLDTASHTVAGSIKTILELLDRELEATRGRIRKHIDDDPDLRRRGDLLDSIPGIGEATLAHLLVALSDHYGFDNAKQAVAHAGLDPKIKESGKWTGKTCLSKSGDPMLRKALYMPALSAWRHNPAIRAFCERLKANGKNGKAVVCAAMRKLIHIAFGVLKSGKPFDPELNLA

SEQ ID NO: 136145 - protein, 360 aa, unidentified
MKKSNRGTEWKERPSQTVGIDLGDRFSHYCVLNSDGEVVEEGRIRSNEESFRLHFEGEPRQRIVIESGTHSPWISRLLKRLGHQVIVANARKVRAIWENESKSDHQDAEMLANLGYSNPKLLAPIQHRSQERQRDLNLLRARDTLVRARTMLINSVRGLVKSDGGRLPKCAADYFATRVTAAVPAELVVAVEPLLQQITALTIQIRRLDQEIEKLADRYPEIHVLRTAPGVGPVVAAAYVLTLDGVDAVEHSRSAGAFLGLRPGRSQSGDSDPERNISKTGNIYLRRLLVQAAHYVLGRFGPDSALRRWGLKLALGGKRAKKRAVVAVARKLAVLLHHLWKTGQPYQPFPQSVTASAVSC

SEQ ID NO: 136146 - protein, 334 aa, unidentified
MDKVTTVGIDLAKRVFVLHGVDAVGRVVLKKTVRREQLMEVVAGLLPCLVGMEACAGAHEWARRFAGLGHEVKLMAAKFVIPYRKNGKNDSNDAEAICEAVGRPNMRFVPVKSAEQQAVLALHRTRQGFITERTAVINRIRALLTEFGVVLPQSPEVVRRQALSGAEALPVLARRMIEDLRAHLALLDERIAVYDREIEVLAKQSEPTRRLMGIRGIGPLTAQAIVATVGNARDFKNGRQFAAWLGLTPRQHSSGGKSRLGHITKRGDAYLRGLLVQGARAVLHTAARHADRLSRWSISLQGRRGYRRAQVAIAAKNARIAWALLNKNQELRPA

SEQ ID NO: 136147 - protein, 459 aa, unidentified
MKKKSQKAKKLKNKVSIDPNWELINPNAAGIDLGSTEHWVAVPADRALQSVRCFGTMTPDLEAMADWLKECGITTVAMEATGVYWIAVFQLLERRGFAVLLVNARQLKNVTGRKSDVSDCQWIQRLHTYGLLGGSFRPADPYCVVRSYLRYRDELVATRSEQIQHMQKALLQMNLQLGQVLSDISGQSGLAIIGAILEGQRDSVKLAALAHHRVKSSRSQMAKALLGDYRAEHLFVLKSAYELYHVYEAKIGACDEQLAGELARLPDRVDVQAKPLPAKVKGKKIDEALRLGLYLKLGVDLTAVESIGPLVGLTVLSEVGPDLSRFKTEKHFTSWLGLCPNNRISGGKVLSSRTRQVVNRLSDVLRLAAKALEGSQSALGAYYRRMKAKLGAAEGVTATAHKLARIIYRLLKYGEAYVRQGMEEYERKYQERKLKSLKRTATSLGFELVQMQGPTPLVS

SEQ ID NO: 136148 - protein, 363 aa, unidentified
MNYVGVDIHKKYSVLCALDESGRKLREGRVEGNSARGFAQFFAGLEGPSKAVVEACWNWGLIHDELEELEPVEEVVLAHPYKTRLIADAQIKTDRLDAHALGTLLRGNLVARAHVPGRETRARKNLLRQRLYWARLRTMLRNRIHALLDRQRELELPQCSDVFGVRGLGFLRRLELAEPDATLLREQLALHDLIAQQMKAQEKRIAAEFKTEAVHQHLLSVPGIGITLAAVIGCEIDQIERFNSAEKLCAYAGVVPTTHASGGKTSHGRLLPFCNKWLRWALVEASWVAIGCSPYFGSLYRQHRARGKKANTAILIVARRMCRIIWQLLEQKRDFEKLAPRPKLYSFPGCSVLALTVNPALAS

SEQ ID NO: 136149 - protein, 977 aa, unidentified
MDHSTDTISTLRSDPDTNFVGMDLHLDNVVVVVTRNEITDKTLRSKTVLSKKFKTIGQPNIDELFKALEAYCQDKPHMAVVESTYNWYWLADEFEKRNWNLRLADPSTVSKAGFKYSDDYTDATYLAECVRNGSIRSTSIMPKDDRAERDLARYRMTVVEDRGRLKTILINMTTNHLSLKLTADKLLKEIDEAIEKAANEPDEHIAEGVLSTYYDNHQVRIKVNSLLSRIRFLTREVETLDAEMTELIKPNLYANSLQTIKGCGFVTSMIIGLEIGDIGRFNTHKDFVSYCRLAPTAKLSNGKSKGLGNAKNGNAYLSWALTELATFVVRFNPEAKRVYDRYYSRSRLRVKAIRSVAAKLARGIYMMLKNGEVFDMRTVVDHDCHFEVMTFDSKAGKETFWHTASHLMAQAVKNLYPEAKLARGPATDTGFYYDFEVEKPFTPADLEKIQAEMKKLAKEGYALERFELSADEAIKLMEERHEDYKVELIHKHDDKGEKLSFYKQGDFVDLCAGPHIMSVAPIKAVKLLSCTGAYWGKAEDGKQLSRIYGTAFPKASMLDEFLKQQEEAKLRDHNKIGRELEYFTTVDCIGQGLPVMLPKGARVIQLLQRWVEDVEQAKGCLLTKTPLFAKRDLYKISGHWDHYLDGMFILGDPYDEEKECFALRPMTCPFQYQVFLNRQRSYRELPMRLTETSTLFRNEDSGEMHGLIRVRQFTISEGHYILRPDQLEEEFKGCLELAKYFLDTVGLLDDCTFRFSQWDPANPKNKYEGTAEQWEHAQAAMKTILDDLGVDYDIGIDEAAFYGPKLDIQYKNVYGKEDTLVTIQIDMLLAERFGMYYVDKDGQKKLPYIIHRTSLGCFERTLAYMLEHFNGVLPLWLAPEQVRLLPIKEGHAEYAQKIADRMTAMGMRVTVDNRDENIGTKIKAARLERIPYMLIIGDNEVNSNTVTVRSRKEGELPAMPVDELIAKLDEEIKTKAK

SEQ ID NO: 136150 - protein, 408 aa, unidentified
MESQIIFGIDVSSKSSTVCVVNDRIKQGESFRISNDSFGYQKLYEQLNQYLITPLVVFEATGVYSLSLQAFLEDYHIKYLKLNPLKAKKLMDNNLRHNKTDKVDAYRLALIQFNAPQKLRDPQPREYHELQNASRYYEELTRSIVTTKNQLHRNLQSTFPQIEEILSHPSGRIYWALVSLFPHAGFVLEKNETQVTQMLNSISGIGQQRARYLTTRLYAFAREAYPYDSKDSIIVRAIQRNISNLFSLQQERDYVINYMEKLAKAVNARALSIYLSIPGVARITAVRLVAELGDLRRFSTSAQIDAFVGIDPGRYQSGEKDSSLGITKHGNHIARKILYRVIIQMETVKATQPCHITDYYDKKKRSSNSQGYKKIAIASVHKLIRTMFALIKHDQLYDYNIATKNKRL

SEQ ID NO: 136151 - protein, 387 aa, unidentified
MPQQLDDLSRSLTPLEQDSTIVAVIEMSQASWLVAGIVPGIERHPLKKLEPSEVELLRLLMRWRAEATQNGRTITRIAVAFEAGRDGFWLARWLRARGIEAYVIHPTSVAVSREHRRAKTDRLDTGLLKRVFLGWLRGEPDHCHMVAIPTLAEEDAKRPNREREGLVRERTRLVNRVKSCLVRFGVRTFKPTLRNAPDRLATLQTPEGVPLPPNTLLELRRDMARLRFVMDQIKEVEEARAQGLNQAPPDKTHVMVRLLARVIGIGLETADMLVQEVLARTWRDRRAVARYAGLTGSPDESGSRRREKGLAKAGNARVRRGMIQLAWRFLLFQKESALAQWYRARTADARGSTRKTLIVALARKLLIALWRMVTTGEVPAGVVLRAA

SEQ ID NO: 136152 - protein, 436 aa, unidentified
MRGCRCSMIMGFTKPIEHFNLQRKKVITMNTLYVGIDVSSKSNVVYLMLPNGDKHSNFSVANSHEGSTLLVKKIYSALTSHSLDTVLIGLEATSVYGDNLVYFLREDATLAPFNRKIHVLNPKQVKKFHDTYNDLPKNDYVDSFVIADCLRFGRINKEVYMGEYRYKALQNLTRARFFAVQNLVKEKQRFMNVLFKKYSTMTQEKVFSDAFSTTALAVYDEFESAEALANMDLHELTDFIMEKGKNRFPDPDAVAKAIQKAARSSYRLPKTMNDSVNQVLSISITSMKALESQIKEFDKAIIALMELLPNVLISIPGIGPVYSAGIMAEIGEIDRFNSQAALAKYAGLAWKQHQSGGFEAEVTRLIPSGNRFLKYYLCEAAFSLVRCDKEYSDFYHLKYKEVNRCQHKRALALTARKFVRLVFRLLKDNRLYCPAK

SEQ ID NO: 136153 - protein, 340 aa, unidentified
MGEVTTIGLDLAKHVFQVHGVDAEGATVLRKQLRRAQVLAFFSRLRPCLVGLEACATAHYWARELRAFGHEVRLMPAQYVKAYIKRNKHDAADAEAICEAVQRPTMRFVPVKTADQQAAVLLHRGRERLVRQRTGLVNALRGHLAEFGVIAPQGLRNVGKLIAIVRDEGDARLPDLARQVLQVLAVQIEQLEAAVAAIEKQLMAWHKSNPVSQRLASVPGIGPIIATAIAATVVEPSGFRSGREFAAWLGLVPRQNSTGGKHRLGGISKRGNQYLRRLLINGASANLLRSKATNADPWVIGLRQRRPSLVVAVALANKTARIAWAVMHRHENYQRVAAAA

SEQ ID NO: 136154 - protein, 345 aa, unidentified
MSVYVGIDVHRKRSQVAVIDQSGQVLANRNVPNGAEPILGVIGGLPPGTPAAFEAAFGWGWLVELLEDYGFAPHLVHPLQCKAIASARLKNDKVDAAILAQLLRADLLPEAWIAPPEVRQLRALLRHPAQLVRLRTLLRNRIHAIVADHGHDRPSGCWTGPGRAWLAALELPAISREVIDDDLALIDALEVVIGRLDWQVHQRARTDPRVKVLTQLPGVGPYTALVILAEIGDLTRFSSARKLAAWARLTPTVRGSDRTIRHGHISKQGSTWVRWVLCEAAQTAKRSPQLAATYQAIAKRRGRKIATTAIARKLLTRAWHLLTDAERQAPGHPAAAASVPAGSPP

SEQ ID NO: 136155 - protein, 400 aa, unidentified
MLSIGIDVSKGKSTVCGMKPGGEIVYAPFEVQHTREGMLELVSLLRSSGEEVRAVLESTGSYHCPVVAALLENGIFVSVVNSLRMKRFCSQSIRKVKTDRIDAMQIALYGLAYWQELQPTRLPEDTYRELQLLARQYYQMTSMLIKAKVDFNALCDQVLPGMQELMSDHAGRHKLSDFVLRYCHTTHILEMGETRFRKDYCKWAEKKGYRNCERMAALIFATAQNGIPVLPNAPSTQIVITEAIRVLHTVEASRDAILTQMQALAKTLPEYSLVREMPCIGDTLAPRLIAEIGDVRRFHSKRALIAYAGIDAPPYQSGKFCANNRHISKRGNRYLRKTGYEVMQSYVMHKPANDPIFTFIEKKRGEGKSGKLAMVAGLNKFLRVYYGKVTELYRSLPAIE

SEQ ID NO: 136156 - protein, 403 aa, unidentified
MGLTGGIDWASREHAVCILDAAGAVRSRFVVAHSAAGLGDLRRRLARFGAPSTLPIAVERPSGVLVDPLVEAGYAVVPIHPNALRATRSRYRAAGSKSDAEDAFILADLLRTDGHRYRALRPPSAATRTLRALVRTRDDLVAARVALANQLRELLASFWPGAAEMFAALDSPIALAFLTRYPTPASAARLGEQRLAAFLARHHYSGGREGAELLARLRAAPAGCAGQRESAAKGQLVRALVRVLEPLVAELQYLTAAVEQAVTSHPDGPLLMSFPRAGKVNAAQMLAELGDDRARFTSPEHLAAEGGVAPVTAESGKHRAVRWRWACNRRLRRSLTCWANNSRHTSPWAAAHYARAVARGCDHPHAVRILARAWARVLWRCWQDGSPYDPTRHSAAKPFLNAA

SEQ ID NO: 136157 - protein, 344 aa, unidentified
MTYYTGIDVSLRSVSICVVDDKGKVCLEAKVAAEINAIADRLRRFSSDVKSVGFEAGTLTQYLTYGLQAAGFEVICLEARQVSVTLAAMRNKTDRNDARGLAQILRTGWYSRVHVKSLHSHQVRALLASRKAILTKCVDLENELRGLLKVFGIRLPSRVGHGSFDAELRETVSTDEMLACALVPLLDARTVLYKTYLKLDNAVKGLVRVDPICRRLMSIPGVGPVTALTFKAAVDDPNRFKSSRTVAAHFGLTPRRFQSGELDNSGHISRAGDADVRSALYVAAHSLLTRNAQWSTLKAWGVGLAKTRGHRRAVVAVARKLAVILHRMWIDGSEFRWGPEAAST

SEQ ID NO: 136158 - protein, 433 aa, unidentified
MTNRLQAGIDFSQKKADFCLLFPDGQPLESHVSFANSTTGYASAKRLLLEALDTYNFDGVDVSGEATGYLWLPFFLQLSADPDLASRDLDLFLLNPRWVKWFKKCFAEDHKCDEKDPFYIAERTRTRRPDVTWSPPDCLSLRFYTRLRFHIVQNLAREKCYFSAFLFLKASSYRRLKPFSNVFGVTSRLVLTQQPTLDELAQLPVETLAAQLYELSGHHLPDPLHNARKLRRVAHESFLLDQSLALPVQRILDLSLDHIRFLETQLEQADDWIATELEAHPAITQLATIPGVGPVFSSGIGAEIGGIQRFLQPQKWDKRRKRYRSRNLRDAEDAVAKIAGLWWPRADSGDFQAQDRRLAKSGNRYLRYFLIQAANKMRQHIPEYADYYARKYAESTKHHHKRALVLTARKSVGLVVGLLHRNEPYRSKEDRRT

SEQ ID NO: 136159 - protein, 374 aa, unidentified
MNEDVYLKVWSLTDFRHHSAQYGMHKAPSDWRLHSMKYTPVGVDIAKHLIQVHFINEHTGEVVDKQLQRQDFLTFFSNRESCLIGMEACGGSQHWARELQKLGHKVRLMQGRFVKAFVMGNKNDVMDARAIWMAVQQPGKAIAVKTEEQQSVLVLHRSRRQLVKFRTAQINALHGTLLEFGETIHKGRSAMDRELPAALERLKTKLPPYLITVLEDQYHRLNELDILIDGLEKQLISVARQNETCKRLMNIPGVGPLIATAAIATMGEASAFKSGREFAAYVGLVPKQTGSGGKVRLLGISKRGDTYLRTLFIHGARAASLRAKEPGPWITELKKRRPAGVAIVAMANKLARTIWAIAAHERQYDKNHVSIRPY

SEQ ID NO: 136160 - protein, 336 aa, unidentified
MDGGNRRRHAQTGPRRCRPQRARHQLGSREIATTPAGYQSLLSWAQELGIPAFAVEGTGSYGAGLVRFLERAGVAVYECERPRRQERRRGKSDLIDAALAARRLVSDEGLSIPRGGGRREDLRLLLLERRSAMQAPNAALNQLSALLVTAPEHVREGLGALSGERLAQAAARLRPHPDVLNGVLRRLGKRVERLSNEAADAERALAALLAEVAPDLLEECGVGPVCGAQLLVSSDDPSRMRSEASFAALAGTSPVDASSGKQRRHRLNRGGDRQLNWALHVVTLARIRHHAETTAYYQRLLAAGKTTREARRCVKRALARHFYRRLIEVRTLPLTT

SEQ ID NO: 136161 - protein, 436 aa, unidentified
MSKKLPILDALAAFVDVGSEHMHVSVGGAAPAVFGAVTSQLHALRDWVLAQGVRCVAMEATGVYWLPLYAVLEAAGLEVRMVNGRQTRHAPGRKTDMADCQWGATLHMHGLLRAGFVPPADIRRLQDYLRLRAEHVGAAAGCVQLMQKALERMNIKLHDVIASLAGMSGLAVARAIVAGERSPQALLALCDVQIRRKKAQAVIESLRGTWCDEHVFALGQALQSWDHYQRLIAECDARIAAVLPAHDPSQPPLQRSAKRAGVNAPEIAKLREILAQMCGGRDLTRLPAHTHYGVLQLIGEVGTDLSVWPTEKHFTAWTGLAPTNHDSGKRKGRTRRGRNRAGQLFCMMAQSLVRSKDIALGGFYRRLAARRGGLVATKALARKLAAWFWRVMVKGDDYVERGLADYDERVRKTKERALRRLAKELGQQLVPANPTA

SEQ ID NO: 136162 - protein, 429 aa, unidentified
MNYTQNEKLLQVGEGNLIVGIDVGSNKHYARAFDWRGIEYSKKAFAFSNDAEGFAGFLEWVSLILEKSGKETVILGMEPTGHYWFDFAKFLQDNGMKPVLVNPLHVKRSKELDDHLPSKNDKKDPKTIAKLVIEGRYAYPYMPDGLYAEIRNASNMRFQVEAELTRCKNRIQRWFALYFPEYSEVYGSFNAISSMMILKQAALPCDIINFGAEKINQIWRDAKLKAVGKKRAQTLVEAAQRSIGYTEGLDTARIEMSLLLEDYERLQKRLEQIIELIEELVGKVPYAEKLLQIKGIGMKTVSGFIAEVGDISRFTSAKQLQKLAGLAIVENSSGKHNGKSRISKRGRKRLRYLLFEAVLSLTASNQEFKEIHRYYTSRKENPLKKMQSLMVLSNKLIRVFYTILKSGADYDPEKLISDIRRPEEVPTAA

SEQ ID NO: 136163 - protein, 341 aa, unidentified
MKKNLFFIGLDISKADFAASIYKTPGQSIITKEAIPNDRKGFEMLLVWLNDYQIDKTNCRICMEATGVYSQAIAYYLLFQGFPVSIEPPLKFKRAFDPVGHKTDPVDSKQIAEYAYRFQDELTSWKPRDEILEKIRQLLSVREQFTKQKVALDNSIQAYSKQRVQVALIKKAHQETLNQLKKQIARIDKELEKLIKQDPEIFQRANNLDSIPGCGMLLAAHLLVITENFTKIQQHKRLASFVGIVPYQHQSGTSVFKRSKIRHFEPMPSRKLLRLAAQSVSTHDVTFRDYYLRKLAQGKAKALVLNNIANKLLKIACTIIRNNTRYIKDYRSINPMYLKSA

SEQ ID NO: 136164 - protein, 385 aa, unidentified
MTIRTVSRAATHGETVRCLFAIELSKQSWVIGFITPLSSRISRRILSGGDWKGLLELIEEVRARVSREMGRTVEVMSCYEAGYDGFWLHRQLEAHGVRNYVIDPASLQVDRRVRRVKTDRIDTERLLRSLMAYLRGEPKVWSVVRVPSVAEEDARRLHRERDRLICERVQHVNRIKGLCALQGIYDYHPLRPQAVARLEQLRTAQGGALPPRLKSEIKRELHRLEVVVEMITTLEAERDAIVEDEASTHVNAEKIQALHKLKAIGPEFAAVLVGEIFHRDFNNRRQLASYVGYAPSPFQSGNVAHDQGISKAGNRKGRTTGIELAWLWLRYQPDSDLSVWFRARVGTVKGRIRRIAIVALARKLLVALWRYLETGLVPRGAVLKG

SEQ ID NO: 136165 - protein, 439 aa, unidentified
MRIPSSVPMPNEVPIEQEIVAYVGLDWADQQHVICWQAADSAAVQSAVVQQRPEELQAWVAELRQRFPQGLVAIALEQSRGAVIAALMHFDFLRLYPINPKSLARYREAFASSGAKDDPDDAALLLELLVKHRDRLTPWVPDDALSRELALRVEHRRQLVNLQTKLIQQLRSHLKVYFPQALDWVGELDSLQACDFLQRWPTLAAVQKARPSQLEKFYHQHHCRRPQLIQQRLEQIRQAQPLTQDSAIVPAYSQMVLALVAQLRVLIPTLQQWQQQISQLFAQHPDAALFASFPTAGPVFAPRLQAAFGSRRDRFGSAAEVLQFSGVAPVTKRSGKSRQVQRRWARPKFLHQSFVEFTGLSIPHCCWARALYQQLRARGHRHWAAIRVVAYKWIRILFRCWQDRVPYDEQKYLKSLERRNPTLWAAIQQLPAQPSRKEV

SEQ ID NO: 136166 - protein, 338 aa, unidentified
MNIVFLGIDLAKNVFQLCGLNQAGKPVYTKRTGRKELLQTLANIPACLIGIEASTGAFYWQREFEKLGHKVKVISPQYVKPFVRGQKNDGNDAQAITVALMQPTMQFVPPKSPEQQDIQALHRARQRIVNHRTATVCQIRGLLLDRGIPIGSAVSRARRAIPLILEDAENGLSSRMRRTIAELYDLFNDLGRRIHFFDKEIETVFRQSEACQRIAKVKDIGPKTATAVVAAIGKGTEFKNGRHFAAWLGLVPRQHSSGDRQVLMNMTKKGDRHLRTLFIHGARAVVRVATNNNDGHMNQWVNQLKERRGFNKTTVAVANKNARIIWSMLRNDTGYQVV

SEQ ID NO: 136167 - protein, 427 aa, unidentified
MNFTQNEKLKQLSERSIVIGVDIASELHYARAFDWRGVELGKVFKFENSAEGFKDFYAWIEHLKRQAQKDCTVVGAEPTGHYWFGLASYLKEQSIKLVLVNPFHVKRSKELDDNHPSKTDAKDPKTIAKLVIEGRYNEPYIPEGIYAELRIAMVCRMRIQKELNSIKNRIQRWLKIYFPEHETVFGKFDATSSMLVLQVAPLPKDIERLGVEGINRIWRDNKLRAVGMKRAKSLYEAAQKSIGCTEGESCSRMEIQLLLQDYHTKTAQYEAVTETIDGLCRQIPEVAKLLEIKGVGLVTVAGFLSEVGDIRRFNSPKQIQKLAGLALRESSSGKHKGQTTISKRGRARLRAILFQAVMPLVAKNAEFAEIHTYYTTRPKNPLKKKQSLIALSCKLIRVFYALLTKGIDYDPKKLIQDIHRPVEYLAA

SEQ ID NO: 136168 - protein, 409 aa, unidentified
MDVVHARCAGLDVHQATVVATIRVPDDRGGRQIVTETFGTMTPDLLALRDWLQAYGVTHVALESTGVYWKPIYYVLEDTFTLLLINMQELKHVPGRKTDVKDSEWLAQLLECGLLRASFVPPPAIRELRDLTRYRVQQVRDRSQEVNRLCKVLEDAGLKLTSVITDVMGTSGRAMLTALVAGTTDPTVLAELARGKLRKKLPELRRALQGRFRLHHAFLIEQVFAKIDFLDEALERLTVEIDRRLAPFEPILAALDTIPGINRTGAATIVAETGADMNRFATAGHLCSWAAMCPGHNESAGKRRSGKTRKGNRYLRAALIQAGLAATRKNRSALQARYHRIKRHRGHKKAVVAVGHQILEIAYYIMRDGITYRELGADYFDRRHAERAIRRHVRQLEALGFHVTIEKAA

SEQ ID NO: 136169 - protein, 400 aa, unidentified
MISVGIDVSKGKSTVCVLKPYGEIVCRPFEMQHVEKDLEAFHNLLQKLDGEIRIVMEATGIYHLPILIFFHNKGYFVSVINPFAMKKYAKDNSIRGAKTDKLDSIMIANYGIEKWFKLQRYEGDEEIYAELKLLGRRYRYYMELHVKALQELTHILDYVMPGIKKLFSSWNEANGKDKLSDFVERFWHFDLITSMSLETFTDEYLVWAKEKKYHRSRSKAETVYELASSGIPTLPSSTPSTKMLVQEAISVLRTVDSSLSLIVTRMQVLAKSLPEYSTVREMGGVGDVLAVKLIAEIGDVRRLHSAKALIAWAGIAPPPYESGQFIGSKRKITKRGSSTLRKIGYEVMRVLKSHPAPKDDAVYNYILKKEGEGKSKKHAKIAGLNKFLRIYYARVIAVYQ

SEQ ID NO: 136170 - protein, 339 aa, unidentified
MYYSGIDQHKRDSFITTYDSDGTVVKQARVRNSPLLIQSYFAEFPGHHKAVVESTGSWYWLADLCEKMNVELTLAHATRLKAISAAKVKTDKVDSDVLATLLRANLIPEAHQISKAMRGPRDLMRTRLRLISKCAACKNSIARLCEKFNVAGISELNDLYQLQAKAHLDQIDLLEEQIHTIETTLHPHLIPNEDIQRLLWIPGIGKVNAFTIYAEIDDIDRFPSASRFFSYCRLVPGADNSAGKKRHRSGSKVGNCYLKLAFSHAATRAIQYYPEIKAFYKTKLKRKPIRIARTLVALEIARIVYQVLKSNEDFNGRFKNRQLSRRKQSQWPRLASPPA

SEQ ID NO: 136171 - protein, 352 aa, unidentified
MSAATKGHAVITIGIDPHKRSLTAVALDPHSRPLGQQRLAATSQAGTQLLAWAKQWPERRWAVEGASGLGRPIAQRLVAAGEPVVDVPAKLAARARLLGTSSARKTDLADAASVAAAAIHHWQLRPVALEDHTVIFRLLSDRRDDLVAERTRTLSRLHVLLADLQPGGAARELSATRAAALLRRIHAITVVDVERKRIARELLADVRRLDRQVKTASQAIRTAVGEHGTTLTQLYGVGPVLAAKLLGHTGDITRFPDRDHFASYTGTAPVEASSGDVRRHRLNRGGNRQLNTALHLIAVCQIRDLSPGQAFYQRKLAEAKTPEEARRSLKRHLANVVYGHLVTDHRHRTRGC

SEQ ID NO: 136172 - protein, 337 aa, unidentified
MNYIGLDVHKDNTVACAISAGGKAVMSAEVRTSDVGLGELHARMNGSEYAVMMESSTYSYVVYRFFERLGIETHVVHARSLRMITDSDKKTDRRDAEWIGRCLRLWKNKEIELSMSYFPTEAEAELKDLCRYKEELSNKLGDEVRRIRSHMHRNCLELPSQFHDLSAKRSREFISTTYSNDYTLLKRVSGYAALLKESEQVAKEIERRGNDDRNVELLESIPGIGRQTAVQLMSMIVDVRRFVDPEKLCAYFGMAPRVRDSGGKEHHGRMTRSGDPMMRSIMERVTLSHIRYCDSTITAYFRRKSTEMGIKKALMSAARKMLAMIHAVLRRGTPFTA

SEQ ID NO: 136173 - protein, 485 aa, unidentified
MGNTYRRCCGIDVHKKKLSVYVLPPEGQTGARALEREFRTFTRDLCRLREWLQQCHVNEVVMEATGQYWRPVWNVLEGEIPGLMLVNPQHVKALAGRKTDRIDSRRLARYLERGELEGSFIPPRPIRELRDLTRGRVHLVEEVNRVKNRISGLCETGNIKVASVATDLFGASGRQMLQAIVTGERDARWMAGCAQGRLRQKRDQLELALEGHFTEHQRWMLREELGHLKSLEERIARVEAEIKDRMKPYEDQVRHLITIPGVNRIVAWTIVAELGPDMKVFPDAQHAASWAGLCPGNRESAGIQRSGRTRKANPYLRRDLCQAAWAASHTKGTYLMALYRRFRIQCGGHNKAIFAIAHQILIAAYHMLLRNEDYREQGADYFDRQNKPRVVNRLVGRLTGLGYYVTLQPAEESLEAPTIDASPFEALNHACPEQPAHSLAQLRDGRRRGRGRPCKCAARGIQCKHKYGGLPRLQEYKTNKPQQLT

SEQ ID NO: 136174 - protein, 400 aa, unidentified
MLYLGIDQHKAQITVNLRNEQGNVVLERQVSTDHAKIDDFFGKLKKQAGKARGFMAILEVCGFNHWLIKKLEEYGCKEIVLMQPEKTSNKKTDRRDANALCELLWNNRKRLQNGERPNGIRRVVWPTPEDAEVRQLAGLRRHIVKQRTVCINKIRGCLRKHNLEQDCPTKTFKTQKAKEWLKTLELPLSDRLEIKVHLAVWKTLDTELLKVENELAKRSETDKNVLLLVSIPGINHLGAVALLSRVGDIGRFPTPDSLANYFGVTPGCHSTGDKKQHTPITKAGSSLARSLLNTAVNHVVRKDKAMRDWHKNIKKRKGSKTAHVAVMRRLATIVWHVLKRKTTYQFHYDPIAMARAKTKPRKKSRSGFVRHGNNAVCIAKGKAAIKTPSPPKRRTKAKSP

SEQ ID NO: 136175 - protein, 326 aa, unidentified
MTDSNQGILGIDISKAKFDVALLVAGKVKKTHVFENAPDGFKALSNWLLKQGVTSASACMEATGCYGDALATWLHEQGFVVSVVNPAQIKSFGGAQLKRAKTDKADARLIAQFYQQMSPAHWTPPPLHVRELQALVQRLSALMQMERQERNRMDTAPAVVRPSIATMLATIQAEIKTVEAMIHDHIDRHPDLKDQSKLLESIPGIGQATICRVLAFIGDVQRFDHAKALAAFVGLNPTVHQSGSSVRGKPHLSKKGNAVIRRALYMPAIVARRYNPVIKAFADRLKKAGKPNMVIIGAVMRKLLHIIYGVLKSGMPFDPAWSANHA

SEQ ID NO: 136176 - protein, 423 aa, unidentified
MEHPRIYAGVDTHSDTHTLALIDEYGRPLATQTFTADPTGYERLAAMIGDPDACLGIGVEGTNSYGAALTRRLVEAGYDVYEVLRPKRAVRRRDGKSDPVDALAAARSVLAGDGTSVPKSADGWVEALRALNAERAQLVTAMTALSNSATGLLTTAPEHIRERYRGLRTPTRMRRLAACRPSGNMVEQGMLVALKAAGKAWKALKEQADLLEKNMRLILEEHARPLLDIYCASTVTAATLAIVAGDNPERIRSEAAFAKLCGACPIPASSGKTNRHRLNKGGNRQGNSALHHIAIVRMRYHQPTRDYVNRKTGEGKGKMEIIRCLKRFIAREAYRALISIRRGRTPLNKPPAERGRRLRELRVAHGITQQQIGDALGVHSSRISEIERGTRNLPELERRATLWIQTITTPNQPTQHTETLDNV

SEQ ID NO: 136177 - protein, 352 aa, unidentified
MIIIGVDFHPEFQQIASVDTETGEVQEKRLAHQEEAEAFYRALAGQKVRVGMEASGHGRWFERLVAELQFELWIGDAADIRTRRVRKQKTDRQDAQLILRLLLEDRFPKIWVPSWENRDLRQLLWHRHRMVQARTRIMNQLQAVALNEGLRCKKRLWRVHGREQLESFRLAPWASRRRCDLLELLDRLNPTIAELSQAIEQEVEKCPAARRLMTHPGVGPLTALAFVLIIGEADRFHCGKQVASYLGLVPLEDSSGNRRRLGHITKQGSSMLRFLLVEAAQVTVRSLPEWRSKYIHLVMRRGRKIAKVAMARRLAVRLYWMMRQGWDYQQWVKFGSHAGQPGHRHGVQSNTE

SEQ ID NO: 136178 - protein, 320 aa, unidentified
MNFYTNTHPYYCGIDLHTRLLYVCIIDNENNILVHKKIDDSPDKLLALLTPYLGNIVVGVECMHCWYWVSDFCEAHNIDFILGHALYMKAIHAGKTKNDKIDALKIAKLMRGGNFPLAHAYSKEHRSIRDALRRRTHIMRMSAQLKAHVASTVSQYNLPALETRLDLRNSPDREKMRHFFPDEAVQKSMDLNLNIIETMVSELYKIEHYVKTQAQTHCATDLHILKSFPGIGKILALTILYEVGDIKRFPSVQKFASYSRLVKCKAESAGKTHGTQGNKIGNAHLKWAFSEAAVLYLKGNDNAKRYPQIQIISAPLMVKR

SEQ ID NO: 136179 - protein, 353 aa, unidentified
MKYVGVDWAYRQAQWCALAPGGEIAGEGRIAADRDGLARLVLELGDEVKACLEMMSGALWVRDQLVACGWQVEVADARKVKTVAPLAAKTDKVDARLLAELCRRELVPGLWLPSLDERALRERLRRRMHLVRLRTSAKGRIFGLQTQWGVRVSLARLRRADGLTLLERAGVPEVWRRSVGECLALIDFLDARIAPLDAELRPFAKADPRAVLLDTIPGVAELLALTIAVEIGEINRFTRPEKLVSYGRLAPRVRQSGDGRARSGPLSKSGSRLLGWAAVEAAQQAWRETNPWHELYLDVGHRSRNTNAAKAAVARKVLIAAWHMLSRNEPFKPAPRTTAGTSVPASSRLALAA

SEQ ID NO: 136180 - protein, 340 aa, unidentified
MMNFSNQLLNRKSKVMKNIIIGIDISSKTIDICIKDQMELKYLTIENKTTVIKRFFKSYNAENVIVGMENTGRYNWNLFEVLENFSFKVYVISPLHLKKSIGLTRGKNDKIDALRICSFIEKNYKEMQIWTPCAQSIKKIKILLTERASRIKMKKQLKAQQHDYKLMKNVGLDKQLKSLNTQMINSIENQIKIIEGSIENIISSDQKLHQQQKLIKSVPGVGKVLSWTLLSKTEGFTTITDPRKMACYSGVAPFDFQSGTSVKRRPAVSMLADKAIKSILHLAAMSAIRLDNDLSKYYIRKVAEGKNKMSVLNAVRNKIIHRVFAVIKNQIPYQKDLVLS

SEQ ID NO: 136181 - protein, 345 aa, unidentified
MLGVDTHGEVHVAAVVSPLGKILGTESFPATVAGYRRLLVWARRRGTVRRAGVEGTGTFGAGLSRYLLTQQIQVFGVNRPDRTARRLLGKSDPLDAQAAARAVLSGRTRAQAKSGDGPVQGARIYKLAKDSAVKARTQAINQLKAVLVIADPALRERLSSLGNAELFRTCATLSPPDGGGDEDAVVQATHMTLRMLAERIEQLTGQINELNQRLTRLVERHAPQLLLPVGIGPDSAVTLLITMGDNPERLNTEASFAALCGDSPIEYSSGRRSTRRLNYGGDRQANAAPHRIVFTRLRHDPRTQAYYERRTREGKTRREIIRCLERYAGREVFNRGRPVSRTPAL

SEQ ID NO: 136182 - protein, 427 aa, unidentified
MTDRVQHTSYGSWMAIDIAKDFNVVMVETADGHTRRFRMANSGQDHQRIVELAHSLPQLCRIGFEATGNYHRTLGYRLVAEGLDVCLISSLASARYREIMFNSWDKNDPKDTFTLLQLLKQGITQKYIDPVASGFHDIQELSKTYWHITMSRTRLQHSILTHYLPLYFPEMGRWWSSTRCEWWIQYLLRFPTPEAITKLDLNSFINIASPIVGRKVNKAVKLIELYRLAQQSIGLPCAEDSLACQTFQLQLQRLLELNQMRQKLERQAHALLSGRCDYQILLSIPGIGPIIALTILAEAGDLRRFNHHKQFLKYCGLNLAKCQSGNARGQDSLSKRGNARLRQAFYLAATIAVRQRENSFRNKFQRYTQQAPNDADRKRKAMTAVMAKLARVTYALVKSETLYESYREVLPSGSISLTGAVGAIWTP

SEQ ID NO: 136183 - protein, 433 aa, unidentified
MLKLNYMSTLFVGIDVSSKTNAVYAMDFEENKYISSSFGNNQPGADKLVNMIAECMHKHKNLNTILIVLESTSVYSVHISNFLSASEVLMPYRPYVFCVNPKATSNYRKSYIGMEKTDPTDAYLIADFGRVGRTKKLEPWRGGQFISLKRLTRHRMHLSECITREKTYMVSNLYLKFSELQLLEGDDKPFGSLYGATSSAVLTEFLSPQEIIDMPEEDLLTFLAGKSRNRISDLSKTSELLRKAARDSYRLDKCMYEPLSISLASSFNCIHAYQKEIKLIEQAIEKCINGMNPNALLILQSIPGIGPIWASGILSEIGDITVFHSSDALAKYAGLYWPKGDSGDFTSEDNKMSKAGNPYLRCYLGEAANSVRKHIPEYADFYARKYAEVTKHQHKRALALTSRKLVRLVFGLLVKNQLYTGEKLDTEYNIESN

SEQ ID NO: 136184 - protein, 449 aa, unidentified
MKKHDLKQRGLPVIHDYAAGIDIGSRFHVVAVPADLAKESVQTFQAFTADVERMANWLVNLGITTVAMESTGVYWIPVYEILEAHGLQVVLANARDARAVPGRKTDVNDAQWIQRLHACGLLRASFHPDREISALRSYLRLRERHLDYAAAHIQHMQKALTHMNLQLHHVVADITGLSGMRIIRAIVAGERSPSSLAALSDKRCKAGIDVIEAALVGNYQPEHVFALTQALSMYDAYQAQLLVCDQQIAQTLIKLSQEKTLPAEPLPKPRHNTRQPNALNFDVRTLLYQLVGVDLTQIHGIGPYLALRLVAECGTDLSRWRTCHHFTSWLTLAPGCRISGGKVLSAHTRKTKNRVTAHLRLAAVTVGRTNTALGAFYRRLAARIGKAKAVTATARKIAILFYNAMRFGMNYQDPGADHYEQKYRERVVKGLHRRAAEFGFTLQPVEGVS

SEQ ID NO: 136185 - protein, 341 aa, unidentified
MIYVGMDVSSKSFVIHALNERKKLVWKGEIEPTREGLRKLMRDLGKETKLVVFEAGNQMKWIAETLKKIEGVHVHVVHPNEVKWINQSSGKTDKVDAKKLAELARGDLLPRKVHVVEGAVRELRELVSARDQLLRKRVALINTLRGYVKQEGQRLPAKFFQGELWKERLGRLPLSRPLKLIIESFQASIEALRDSEIEITRRILEIEDKRIDLLESIPGIGKLTSRVLVGAIDEVKRFDGKKALAKYGALTPRIYQSGEVTQLGRINRDGRHEVRGMLLQCAHTVGRMKTAGSKPLREFYERIERRRGKKIAVVALARKLLTTSYGVLKSGTMYDPAKLAA

SEQ ID NO: 136186 - protein, 398 aa, unidentified
MVGYDVVIGVDVGKHTHHACALDVEGERLLDQEVDASETAMREVFESACRYGEALVVVDQLHSIGALAVTLAQSMGLDVAYLPGLSMRRLADLHPGKSKTDARDAFIIADAARTAPQSLRRLTLPHEAQAELSMLLGYDDDLAGQVTAAINRLRGLLVHIHPSLEKALAENISHEAVLHLLIKTGGPAGMTSWSKTRIDKQLAKHAPRMHARLAEDIWAALQSQTVTVPGTSAAAKVIPGLAEQILQLRNQRAAINRDVERVLDDHPLTQILTSMPGIGVKIAARILAETGGTITAFPTAAHLAAYAGLAPVTRRSGSSIRGEHVNRGGNKRLKNALFMAAFTSLRADPTSRAYYDRKRAQGKRHNAALICLARRKTDVLFAMLRDHQPYTPSIPAAA

SEQ ID NO: 136187 - protein, 332 aa, unidentified
MRYIGLDIHKKHTQACVRNEHGNILSSERFRTESEDIAEFFARQEASGPLSVVMEATGFYFWIHDCIAARGHRVMVVHPARIKPLMKAKAKNDRNDASMLAELLRSGCLQGIYVPPPEIREMRDLTRHRESLVRKKGDLKREIVSSLDQHGVKTPSDYRVNFTKKYIEWLRSLNDFVVSEKLDMLEMTVGKIKNVERLIEERWGEDEDVQIIRSVPGVGLVTATVLKAEIGDVARFPSAENLAAYVGVSPTTFQSGEKEWSGPARHGNNRVKHVLIEAALVHTRSCPDSKISRYHLRKRDSIGRKKANVATGRKLVEAIYFMLVRRQTFHAH

SEQ ID NO: 136188 - protein, 387 aa, unidentified
MYYIGIDISKFKHDCAVIDDSGEIVTPSWSFTNDAEGFSQLKLLLNSLDTETRIGLESTGHYGMNLKLFLESNNFSFMEFNPLLINRFVKSKSLRKTKSDSIDCMMIAHYLMTVEYKPYPSSFYHTEKLKSLTRFRDSVIRLRSRQLVELTNILDKVFPEFKPFFGSRFSVTALYILSNYSSPEKIANMNSKSYEALRKLSRGRFSTVDFAKLKQLAKNTIGTTEDYLLLQMQIVLDIYRQLDSKVDETEVSIKECVSDMNPPMLSVPGIGIESAAVILAEFGDFSKFKNASQMLSFAGLEPGYFQSGTSETTGKMVKHGSSYLRYALMNCAQTVVNYEPTFAMFYSKKRAEGKPHRVALSHVVKKLLRVIYTLQTKNIAYDADFVR

SEQ ID NO: 136189 - protein, 555 aa, unidentified
MKKSTALHRITAEMAVNAGTFFISALLPMKGGKMASFDNNTMRGFRKEGKYTSSELSSSTLDDGTKVVTAPITNIKRRICGGIDVHKSVLMACACVTDKETLSAVFYVRQFTSSNSEIRRMAEWFAEYGVKDVCMESTGKYWIPVYDILEQNGMKPVLTHPKYVKQAKGRKTDFRDAIHIANLFRMDLVVASFIPPADIRDLRELCRYRLKLTYIRTSEKNRFQNSMTISKIRLDSVFTDPFGKSASRIMEYLINTPEDKVQDEKILSLVDRRVKASSEEILDSIHGYEFIGVQRDKLEIISKHIDDVNKCIDLIDKKLDYYRSKYASIINHLCTIPGVSTESALYILGEIGADMSVWNDSKSLASWAGLSPANNESAGKKKSTKIGKGGHYLKPLLVQCALASIKSTKKQPYFFRKYQTLKKRRGHKKAVIAIARKMLVSIYHMIKEDKDFLPIDYEQVMEQKQNDRELNLKNVILFLGERGVDDKVIRMIESQCSKEELSEGKAAETKPKKTAKEKQPESNTTAKPVKKRGSRKSSTRTKKETPSVQSSAATA

SEQ ID NO: 136190 - protein, 353 aa, unidentified
MRIVCALDVHRRQITYAIVDVRSGEMSRGRITPATRESVREWLARFDGVDEVGFALEGTTGWRFVVEEVERAGHRAHLADPAETAAKRGRKRRAKTDRADCDLLLRLLSARELPESWIPPAQILELRTRVRLRKTLIDERTAWQQRLQAQLFHQGVPRGLRPRTRAGREALAKVELSPAGLELVALALRMIDTIDDELAPLDRALSLYARHQPGCRALIARLYGVGPVTATAIVAELGDARRFGCSDDAVRHCGLDVTVHQSDRKRAPGHLSHEGPQLLRWALFEAAQQACRPASPDYEYYRQVARRIDHNRACLSVARKLCRRAYHILRELGDEALAPIETPDREEVIAAAA

SEQ ID NO: 136191 - protein, 332 aa, unidentified
MMIQKEVYVGLDTHRENIHGTALDKDGNVVQAYEFGNNEEELKNFFRNFDPSKTFIALEACNFWRGCYRILKEISFSAELADPVKTSQISKQKKTDWVDSRILADLIRTNYLPKIFIPTEDILALRDLTRMKIRLTRICVKVQNSIKACLSRNGIAYEKDIWNRKGIEWLNSLKNEEVDSFLRIYIETDREEKITKKKIEATAILNEDAVKLKSIPGVGYFSALMIVSEIGDINRFPDVKSLHAYVGLVPGIYQSGTKTRGSKRKNVNYWLKFIIGQCSGRAITVKRNNKIQRTFLRMEKKKGYKVARRVAARKLLTIVWHILKEKIPYHES

SEQ ID NO: 136192 - protein, 340 aa, unidentified
METTIKFYLGIDVSKSWFDVSVLKVVNHEKQPMLTEQFLNTKEGISSFQKWLEQLGVPFDENTLIVIENTGIYHRPLWEFCSKHNLPLHIGNAAHIKWSLGITRGKNDQIDSKRLCNYCYKQSDELKATPVLNPVFMNLKDLMTSRTRLVAQLQATKSYVKELLCTNDKALLKTLEKAHKAAIDGIEKSIAQIEKAINDLIEADEKIYRNYELIKSIPGIGSITAIYIICCTNNFANKPSGKQLASYAGVVPFEHSSGSSVRGRNKVHKMANKELKKLIHMCAVSSIRYSSEMKAYYDRKKAEGKPGLSVVNAIKNKLLLRVVAVVNKQEKYVENYQKVG

SEQ ID NO: 136193 - protein, 354 aa, unidentified
MEKQNKILDFTGYKLYIGIDVHLNQWTVTIRLRDLVLKTFSMNPNPQQLKQHLMKYYPHGQYYSVYEAGFCGFWAHRELTKLGVKNIVVNPADVPTTHKEKTQKRDKRDSRKLARELADGSLEAIYIPTKPQESLRLLSRLLVQLSKRNRQLKSRIKQFLHTQGIILPKRSEMSHWSGRFIHWLKSLEFEYDDARYYLDELLIDLEQARKQKTQHLRKIRTRIKGNKIIQLLRTVPGVGLVTAFTFYTEIMDIFRFQKLDHLIAFIGFIPSVEASDKKEKIIGLTNRCNKYLRYLLIEATWVAVRKDPALTLAFNNLLKTKSKQRAIIRIAKKLVNRMRYVWKNQQQYVIAVIE

SEQ ID NO: 136194 - protein, 432 aa, unidentified
MLEDTYRWYVGIDWATQSHQVCTVLPDRRVLDQRVVEHTGLAIAGFIAWLTDLTGGDPASAAIAIETPRGAIVEGLIERGFHVYALNPKQLDRFRDRHTVAGAKDDRRDAFVLADSLRTDRPCFRLVRADDPTTVELREVARIDDDLREELNRLTNRLREQLHRYFPQMLQVCPSTDEPWLWALIDRVSRPEQVSGLRVAEVQKILKSHRIRKVAAAAIVEALKAPPLRVAAGTVEAATAHIALLLPRLRLVHQQRAECGRRIEALLAQLPHEDTSGQKVEHRDVDILLSLPGVGRVISATVFAEASLPLKDRDYHAFRTLAGVAPVTKQTGKQGQPGSRRKVAVQMRYACNGRLRNAMYHWARVSAQKDDDSRTYYAAMRKRGHSHGRALRGSADRLLRIFFAMLRSRTLYQPGFRHNATNEAPSAQLAAK

SEQ ID NO: 136195 - protein, 321 aa, unidentified
MAKITLGIDISKAKFDAAVLLADNKVKTKKFDNKINSFLALIEWLDKIGIQDFHACMEATGNYGQALATYLDELGYQVSVVNPAQIKGFSQSGLARNKNDRADSILIARFCRAINPKPWKPAPLHIQELQSWVRRLEALQAMEQQEKNRLGVASAHVKASIETVIKHLGQEIKAVQERIKGCIEEHQELRDNQALLETIPGIGQATISRVLAFIGNAADFRNAKHLSAFLGLSPRQHQSGSSVQGRTRLSKTGNGGLRKAFYMPAIVAKQHNPIIRAFCEKLKKAGKSMMVIIGAAMRKLVHLIYGVLKTGKAFEAKLSGV

SEQ ID NO: 136196 - protein, 401 aa, unidentified
MKEFNPNEHRTETMSALDTVMQASVIGQYPAYIGLDVHKESIVISVARAGRDAPEPRGEIANKPKKIKKLVERLNQEFDGEVLLFCYEAGPCGYGLYRQLLELGHDCHVVAPSLVPKKSGERVKTDKRDANKLAKHLRGGDLTAVWVPDEEQEAMRDLTRARGDMKQQETKARQQLNGYVLRHGHAWPSNKTRWTQTHYNWLESLRFAHDWQQIVLQEYIDAVKAASQRVADITAQMERVLPTWSLAPIVKSLVALRGIDKLSAMVLLAELGDISRFDSPRQLMAYLGLVPSEHSSGGRRRQGGITKTGNSHARRMLVESAWSYRFQARQTAHLKRKAAGASDEAKRIAWKAQKRLCGRYRTLIQAGKNTKQTTVAIARELIGFVWDITCVEMQKIQHAAK

SEQ ID NO: 136197 - protein, 354 aa, unidentified
MRAKNIDFTGKNIYIGLDVHKKSWSVTILLDELEHRTFSSPPVPEFLNKYLRKHFPGGRYLSAYECGFSGYVHHRKLNELGIENIVINPADVPSSNKEKTTKTDKVDSRKIAKGLRNGELKGIHVFDRVHEEFRSFVRQRTIFQKDLRRSKQRIKSSLMYHGIEIPEDFDEASWSNSFEDWLSGLEMSTTNGTQVLENLYQNYLFNKNQIRILAIDIKKYARRHYKEDYFLLRTIPGIGQLTAVAIISELGDITRFKNLNHLASYVGLMPMSYNSGESEQSRGMTYRANNWVRTMLVEASWQAIRKDPAMMQYYLNHAGKINGKKAIIKVSRKLLNRVRFVLKNKQPYELSVQD

SEQ ID NO: 136198 - protein, 457 aa, unidentified
MWRNRELAECENGSGLVSPPVYLQRKSPTTQTMSGRQSADASSRLRNAGRGWGTQFADIGTLTPAACNARIWAGWRGLMGWSIGLGPRRHRACSWRRGALQTRGDHPVNARTIAIDLAKNVFELAIADEAGKIVDRKRLSRSQLRRYFENYGAAHVVMEACGTAHYWGRWFSERGMQVSLLPPHYVRAYIRRNKTDRADATALLEASRANDIIPVCVKSVEQQALQGMHRVRSAWRGTLTARLNALRGLCREFGIIAPVGARRGLAELVQRVADESSGLPRIIRTVLQGVIEEVRAIQERLRQLELELAAIAEQSAVCQRLRKIPGIGLIGATAFAGSIGDIRSFRSPRRFAAWLGLTPREFSSGNIRRLGSISKRGDGYLRMLLVHGARAVLYSANAAQRAGRPLDALREWGLRVSSRSGHNKAAVAVANKLARIIWASWYRQRDFESRPPSPATH

SEQ ID NO: 136199 - protein, 409 aa, unidentified
MERVVERGCGLDVHKKSIAACVRIPDERGQRRQQVRTFGTVAAELLALRDWLEAHGVTHVAMESTGVYWKPIFYVLEEAFTCVLVNPVHMAQVPGRKTDVQDCVWIAQLLEHGLLRGSFVPPTPIRELRDLTRYRKTITQERSRAINRLHKTLEDADIKLASVATDVLGVSGRAMLETLVRGNTDPDVLADLARGALRKKLPALREALSGRFRPHHAFLVGQILAHVDYVEEAIEAVSQQIDVVIAPFTSALERLSTIPGVKKRTAEVILAEIGPDMSAFPSAAHLASWAGLCPGNNESAGKHRSGRTRKGTPWLRTALTEAALGAIRHGRGALATRYRRIMRHRGHKKAVIAVAHAILVVVYHLLTRQTTYHELGDGYYDRRHAERAKRRALETLERQGYRVVLEPAA

SEQ ID NO: 136200 - protein, 408 aa, unidentified
MEVLYPRCAGLDLAKDTLVACVRIHGRPVQQETRTFGMTTRDLLTLATWLAEHGVTHVAMEATGSYWKAVWYLLEETFTLTLANAAHIRNVPGRKSDVKDAAWIADLLAHGLIRGSFVPPAPIQEVRDLTRTRKQLVREIAQHTQRIQKTLDTANLKITGLVSNIIGVSGRAILRALIAGQTDPVQLVDLARGTLKNKRAALVDALTGQIRPHHLRLLKLHLDLIEQLERAVADIDTQLGEALAPFREAIARIDAVPGIDTVVAQAILGEIGLDMTRFPTHQHLIAWACLCRRLDESAGKRKSTRTRTGACWLKTVLVQAAWAAVRTKNSYYRAQFLRLRARRGPKKAIVAVAASMLTAIYYILRDSAEYRELGGQYFERLDRTKATQRLVKRLRDLGYRVQLEEVAA

SEQ ID NO: 136201 - protein, 424 aa, unidentified
MTRRGLVILYRFHGVTTETRLGYGAVVVNGIARRQPLRPISQTTTQKLSHCRPDDATLYASLELSRATWLVTALSPGSEKMSKYSTLGGDGAALLGLLRRLQARAERLAGGPVDIVVIQEAGLDGFWVHRLLNAHGIQSHVVDPASIAVPRRRRRAKTDAIDGETLLRTLLAWQRGEPRVCAMVVPPTPEQEDRRRTSRERAVLLQERVRHVNRIKGLLASQGITDYEPLHKDRRARLAALHTGDGQPLPLRLKAELLREIELVELLIRQIAEVEVERDIAAELDVEGNQSPVALLARLKAIGPQIAAVLYLEGLYRSFANRREVAAYAGLVPTPWRSGTIDREQGISKAGNRRLRHIMIELAWLWVRHQPDSALSRWFRARVGTERGRIRRIAIVALARKLLIALWRYVKHGEVPEGAVFKAA

SEQ ID NO: 136202 - protein, 420 aa, unidentified
MKMIAMTSIVKQERQLLVCVDVCAASLDVHARVERADGQCFALIDQWANRTGPIRAGLAEVLAVARTHGYAQLKVACEATGSYEQGLLREARQMGCAVAYVSGEAVAKARVIESNDSGKTDTKDPRVIRVVAEQKCLVARELPPGYAQLRELNRIFEQEGGLVAQLKNQLQAQIRRQFPDLRRLPDLLDKRLAEVLAEEYAWNPHRIVADTWEQFVQRVKGRLPRTRWEVLEHVYADAKSSALHLVAEADVALGEQRVRELWADYQQHLERKEGYRQQRVAVYQTLPEAAKLAPLGLSASLLAGVIAETGPLRDFGNARQLLRYAGLNLRERSSGTYKGKVRLSKKGRAPLRQALYKLVMFGMSGSHGMWNQLLQEKKKELANGLKAVVLLMRKALRMLFGLAKSTAAFDPRRIPQAKAA

SEQ ID NO: 136203 - protein, 470 aa, unidentified
MNDRRLVGIDLGIATAHTVRVLDGEGSIVAKRKAWPTAESLIAVETAALAGCLAGTQLEVVIEPTGPAWLPIAVFFSARGHRVFRVSSQKAADLRRFLSRHAKSNGIDADTLARLPLFDPAGLRPLQLPGAELAALDRRVRATDRLTRAGAEHKRRIRDLARQLLPMSPLSGELGAADLAILERYADPRALARAGQARLTAVITKASRNHQGTERARQWLDAAQASLELYAGHPAADFASLAAEVATEVRLLRAIQAELAAHAAEREARYQAVDPAGLARSLPGLADVGGPALAACMGDPARFSNGKRFRSFTGLTPKASETGETDRKGQPMSKAGSSLLRTTMVRAADTARKQDPQLAAIYYLQMTERGKDHLGALCVVAAHLAERAWTVMRRGTPYIICDTNGRPVTPAEAKAIITERWTVPPQVRARRRSKKTGKAPQKVPEGQCTRGSLPRGTTPPPHGRPVKTNP

SEQ ID NO: 136204 - protein, 438 aa, unidentified
MSTAVVRYVGLDVHKRVVEACIVDQAGKVVHRERFALNRSTLETFATEILRPTDHVALEATTNCWAVSDALRPHVARVLVSNPMATKAIAQAKVKTDKVDANVLAQLLRCDFLPEVWQPDEATRRLRELTGRRSALVGQRTMMRNRIHSVLAMRLIVTPARLFNAAGLSWLAELELDDQARLLVDSDLRQLQFLQQEIDALDDELARRGQASAEVKLLMTLPGADVATAEALLAAWGDVKRFPDGDHAASYLGLVPSTKQSANQCYHGPITKRGNSHARWMLIEAAQHLDTHPGPLGHFFRRLAKKKNRNVAVVAAARKLAAIGWQMLVTGAPYRYAVPRSTETKLSRLRVRATGRRRKSGPCKGSKRIAKLPGGSRTIKALAEVCRAEGLPQPKGLSPGERRTVDEADCAAFVAAIAAAQVVPRRAGRKVKEAATHG

SEQ ID NO: 136205 - protein, 322 aa, unidentified
MNKYKETFGVDISKDVFDVHGSNKGHDRYGNDGPGFKKFLGHLPKGSLVVMEATGYYHYRLAQFLYKNGVMVSVVNPLSVKRFIQMKLAKVKTDKSDAKAICDYALVNEVPLYDALTDSQSECLQLFRLLDMYLKQRTATKNKIHGEDVLGVPSKFVYRSLVRNRKQLDKEVTAIESKILSLVKGDQQEQLTLLMSIPGIGQKTALFLIVVTDGFSKFETASQLCSYVGITPTIRESGSSVRGRPRISKVGNRKLRNLLFLCSFNACKHNTACKEVYERIVNKGKSKKLALIAVANKLLKQSFAIAKSGRPYDESYVSVLPG

SEQ ID NO: 136206 - protein, 421 aa, unidentified
MLGAGIDWAEEFHVVALGRPGEGVIEVLRVEHRPQAVAALMARIAGLEADPAEVRVVIETRHGLLVEALVEAGYTVLPVNPQLVSRRRGPARKKDDAEDARICCLIALDRHAGLRRLIPHGELAGELRSIARGDERACRDERRLLNRLRADLLVTFPAALAIAGEDLGATRILRLLERWPTAAALAAASREEIIEFGRAQRTGYLARFADRIAAALAEDHFTAPGHLVRAKAGTIRLTARQLLLLDAQRRAWEKRMGELLLGTPGQPAEDQPGQAFPGGEIYLSFPGLGRRLAARIAGEAGAHIEQFTTPNSLQCYAGRAPVTRRSGKRDLVVARRLACNRYLADAVHKWAFASLRRSAWARDFYDTQRARGKNHHAALRALGNRWLEVLWHCLTHDVPCDEAVHAANRNRALAAVTSSAA

SEQ ID NO: 136207 - protein, 385 aa, unidentified
MRTDLGQSQQREDWSMTHCIKTRFVGLDVHKESIVIAVADVGREAARVIGTIPHEYKSLRKELDKLGPRSMVYCCYEAGPTGYGLARSLIAAGWACDVIAPSLIPRKSGQRIKTDRRDAMKLAQNHRAGELVAVFIPDEQTEAIRDLERARGAAKKSERAVRHQLSKFLLRHGKRYPGATNWNSAHLAWIAKQTFVQPAQQYVLADGVAAVEAATLRVGQLTERLRQLVQGWHQAPLVKALQAMRGVELVTAVTLAAEVGDFRRFATATDFMGYVGLIPSEQTSGDHRRQGPITKTGNAHLRHVLIESAWHYQRQPRISRALRLRSMGVAPQVCAIAWKAQKRLHHRLQRLIGRGKNPGEAVTAVARELAGFVWAIAWEEKLLTS

SEQ ID NO: 136208 - protein, 342 aa, unidentified
MTFVGCDLHTRMQQVAVLDTDTGEMSERRLDHDGMAVEEFYAALPRPVTVGIESTGYAVWFHAVMQRLGHTLLVGDAAKIRAMVVRKTKTDRRDALHILDLLRHDRFPAIWIPDPATRDLRALLTHRMRLVRIRTMVKNGLQAIALNSRLAWGSKLLRQAGLVQLQALALPPHTEQRRDQSLELLAGLTSQIRELDKAITTAALAHPDAPRLITHPGVGALTALATVVVLGPVARFHDSKHVVSYVGLAPAVHASADKAHLGHITKQGSPLLRFVLGQAAAHAARMDPDLQRIYGALAHRRGRPKAKVAVARKLLVRLFIMLRDQIDYDEFCRRGRAARAAA

SEQ ID NO: 136209 - protein, 389 aa, unidentified
MKIYVGIDIAKLNHFAAAISSDGEIILEPFKFTNDADGFQLLVSKLESFDKNSIIIGLESTAHYGDNLVRYLVAEFYQVCVLNPIKTCQMRKNNVRKTKTDKVDTFVIAKTLMMQDDLRFITFFDLDMMDLKALGRFRQKTIKQRTRLKIQLTTYVDQVFPEIQYFFKSGLHQNAVYALLKEAPSPKEIASMHMTHLANLLKVNSHGHFTKEQAKKLRVLAQKSVGANDSAISIQITQTIQQIELLDSQLEKIEAEMTDIMKFNDSVIMTIPGIGYINGGMILGEIGDIHRFSNPNKLLAFAGLDPSVYQSGNFQAKTTRMSKRGSRVLRYALVNAAWNVVRNNATFKAYYDAKRAEGRSHYNALGHCAGKLVRVIWKMLTDEVEFNLK

SEQ ID NO: 136210 - protein, 389 aa, unidentified
MQIAHQPEASSAIRSDLCAIFVSLELSRSTWLISSLSPGAGEKISKHSVPAGDIGALLARFSEFKQKTFARTGKSFPIIVIQEAGLDGFWIHRVLQKEGIESHVVDPASIATSRRRRRAKTDRIDGETLLRALLAYKRGEPRVCAMVKAPTPEEEDRRRLCRERKALIAERVRHVNRIKGLLFCQGVSGYEPLRSNRRQHLGELKTSDGRVLPDHLKAQISRELDRLELLLGQIKAVDAERDALFAAAKAAAPTPAPVTMLLDIKGMGPEFAAILWMEAFFRSFANRRQVAAYAGLAPTPWQSGSVDREQGVSKAGNPRLRTTLIQLAWLWLRHQPQSVLALWFKERVTRNGGRLKKTAIVALARKLLVALWKYVTAGVVIEGAVMKSA

SEQ ID NO: 136211 - protein, 326 aa, unidentified
MNSVRMHIGVDVGKNCLDICFPDGKKEHLKNNKPGRARIIHAAKKLDAIVCFEATGIYEEDLANECLAAGVRAARLDAWKTRQYAKSRGRIEKTDRLDCEMIRDFASSLEDGKMPFVKPRSAAHSLIKEYAKIRGNLMKARVVVSSQLEFVRDKSARKSIVAIVEKIEQEIARLEDECGKAVGEDERMSSLSRRFLEVKGVGPCLVRAIFAECPDIGSFSKKGIAKFCGKAPIASKSCTIEKQSRMRRGRQGLRQAFHMAALSASRHNHVLRETYRRLMSNGKSKMTALGAVGRHLAILLNNIAKYPDFKISHESEAGKRKLHATC

SEQ ID NO: 136212 - protein, 364 aa, unidentified
MAVSGLSPKELTKEAPNIMLHVGLDLSRRRLDFDLLCEDGSRIERGAAPPDADGLRGLVRRVDVYQEPVCAAIESMNGARFVHDRLEELGWQVELADAQKVKGLAPLACKTDRIDAWVLAELSRRDLVPAIWLPSPTVRQERERARWRLHLVRHRTALKNRVHATLIAFGKPCPVSDLFGSRGRQLLARLDLPDPWAQTVSASLSLIEDLDVQITDCERELRVLGADHEYVPLLMSAPGIAWVLGYTIAAEIGDINRFASPTKLCGYTGLCPRVNQSGEHDHRGSITKNGPKYLRWALIEAAVHAVCSPVYRERYQRTATRLGRQRGKKVARVDIARKLAEAIWYMLTRGQSFAPAGATTPLAA

SEQ ID NO: 136213 - protein, 408 aa, unidentified
MERTVARGAGIDVHQGTMVVTVRVPGEDGGRQVTTHTFGTMTTDLLGIRDWLQACGVTHVAMESTGIYWRPLYYVLEGQFTVLLVNMQHLKHVPGRKSDVRDSEWLAQLLEWGLLRSSLVPPQPIRDLRDLTRYRKRQIEDRAQEVNRLVRLLEDAGLKLASVATDVMGVSGRAMMAALLQGQTDPVALAELARGRLRRKLPALRQALQGRFRAHHAFLLTQILAKVDFLEEAIDQLTAQIDEHLRPFEADIARLMTIPGLARRNATTVFAETGGDMTRFPTAAHLCSWAAICPGQNESGGKRRSGKLRDGNRHLRGALIEAALAATRARGTALHARYSRIKRHRGHKKAAVATAHQILEISYHLLRDHVTYRELGADYFDRRDRDRTLRRNVKQLEALGFKVTLEAA

SEQ ID NO: 136214 - protein, 366 aa, unidentified
MQKISTMQAFSNEILKEQKLTIGVDLGDRSSAYCILNEAGKIVFEHKLATTPEAMKQVFGSMPRCRIAMETGTHSPWVSRLLTELGHEVIVAHAQKVRLITKSRRKDDRLDARTLARLMRIDPELLSPVKHRSAQSQLHLTEIRARAVLVSARTALVNAARGLVKSYGERLRKCGTEQFRRETTSGLSAGLREALEPLLQEVESLNERIQEYDRRIEHMSKKTYPETALLKQIKGVGNLIATTYVLTIEDPHRFRKSRDAGCFVGLQPGRRNSGESEPQMHISKEGDEYLRTLLVQGAHYILGPFGEDSDLRRWGRKLSARGGKTAKKRAVVAVARKLAVLLHRLWVSGEVYEPLRNSQTAMNAAA

SEQ ID NO: 136215 - protein, 351 aa, unidentified
MKYYKTTTEYNCGIDLHTRQMYICVMDREGNILVHRNIRNNDFAFFLKLVEPYKDDLTVTCESCFVCFWLADACEDAGIKFVLAHAYYVKSIAANKHKNDKEDARELAECLRTSRIPPAYVCPRDLRPVRKLLRRRNKYVKNRAVLTGHSTCEVMAAGNQPLTISANSKERWQEGIRSSFDNPVDSFTAEAELFMIESYDRIIMQMEQRIEKHARDFKQQDYRLLRTVPGIGKILALTILYETIDIKRFPSEKDFISYSRLVCGTNESGGKDFGGKGRKMGNPYLKWAFMQAAILCKRADPKLNAYFEKLNRQKGKHTANAVIAAKIARAVYFMLDRKTGFSNEMLIRGRR

SEQ ID NO: 136216 - protein, 344 aa, unidentified
MWITIAPFVTGIDLAKNVFAVHGVDQNGKTVLVKSRVTRAALPGLIAGLPPCVIGMEACSGAHYWARLFLQYGHEPRLMAAKFVSPYRMAGKSGKNDAADAQAICEAVRRPHMRFVPVKDESQQAMQCLHRTRQGFIEEKTATYNRLRGLISEFGVIAPQSTDALRHMVSAQKSSLPLQVQQCVDDLLEHVDRIEANITEYDRILSRIAKTDHRSQRLMKLKGVGPTTACALVACIGNAHDFKNGRQLAAWLGLTPSQYSSGGKSKLGRITKAGDSYLRTLLVQGARSVLIGAEKRTDSFSRWVCSLVERRGYWRAVVAIAAKNARLCWASLHYGDDFRLYSAS

SEQ ID NO: 136217 - protein, 347 aa, unidentified
MRFYTKQHKFYCGIDLHAQKMYLCILDAEGEVRLHRNIKTDREVFLKVIEPFREDVVVAVECMFTWYWVADLCTEHGIPFILGHALYMKAIHGGKAKNDKIDSRKIAVLLRGGMIPQAYVYPAKMRATRDLLRRRNHLMRKRAELYAHIQNTRSQYNLPEPLGCIAKPQNRDGIVERFEDTSVQNMIATDLAVITAYDPIIAKVERYIIKTAKHHDPVAHALLNTIPGIGRILSLVILYEIENINRFPAVQDFASYSRLVKCAKESNGKKYGSSGKKIGNAHLKWAFSEAAVLFLKGNEPGKRYLDRLANKHGKGKALSILAHKMGRAVYFMLKNKKPFDQNMFLGL

SEQ ID NO: 136218 - protein, 374 aa, unidentified
MADYSEVFVGIDTSKLRNAVAIAEGGRNGEVRYLGEIETTEGATSKLVKKLAAQHRRLTFCYEAGPTGYGLHRLIKTLGHECVVVAPSLIPKKPGDRVKTNRRDALNLAKLLRAGELTAVWVPDARHEAMRDLVRTREAALDDLKSKRQQVLSLLLRLGRHFMGKRTWTRAHMNWLVSQKLAHREQRIAFEEMLLAVRQADERVIRLERAIAAAVPDWSLAKVVTALMAVRGLDLISATIFLAEIGDLSRFASPRQLMAYLGLVPGEESTGDRVWRGGITKAGNHRARRILVECSWSYRHPPRVGKKKLAKVEAAPAAVQEIAWKAQARLTARYRALARRGKRPTLVVTAIARELSGFIWAVNRAVGAPATPAV

SEQ ID NO: 136219 - protein, 315 aa, unidentified
MNNTVEIFVGIDVSKATLDVALWQPKQAWQVRNDIEGVGKLLQRLQELRPNLVVIEATGGYEKLIVAELVLAKVAVSVVNPKRVRDFARSVGQLAKTDKIDARILAQFAQAVRPAPRPLRTEEEERLSALISRRRQIIDMLTAERNRLAVAYLATRKRMEKHIEWLQQELADIEADIDQFIQGTPLWKQKDELLRSVPGVGEVTAYTLLADLPELGTLDRQGIAALVGVAPLNKDSGIKRGKRRVFGGRETVRNVLYMAALSAARFNPTIKTFYDRLIKAGKEKKVAIVACMRKLLVILNSILRHQRPWQPNFHA

SEQ ID NO: 136220 - protein, 338 aa, unidentified
MNYVGIDHHRQYSHMTVMDQMGQVLRSGRVPNLQDEIGKFLEGFEAVEAVIETGRSSYTMVDVLEEMGVTVKIAHPNEVKAIARAKIKTDKRDSEVLAHLLRMNMVPEVYRRSVENRQSQRVLRQRAFYVRAMTALKNRVYAFLSQQREEVREEVARETNIFSERGQKVLLGLKLVPGEKRLLDALLKTYRHLEKRTKESATFVEKLYEENREAQLIRTIPGFGKYLSVLVAVEIADLSRFADAAHLHAYAGVIPSVHSSGDNTYYGKIIRAGNRWLRWAAVEAVWPAIRADFDLRCFYERLARRKGANKAKVAAARRLLTIVYKVWKEQRNYVPYRR

SEQ ID NO: 136221 - protein, 335 aa, unidentified
MCGLHKGSHTAAVLDGDEELLGELRVDAGRDQRDRLLVFAAPFEPRTWAIEAATGWGALLAQQLVAAGEAVVDVPPGLSARARLLDTGSNSKTDRHDARSAAIVALRHRRLHVVEAVDHRAVLRLLANHHRDLTALRTQAICRLHSLLCLLIAGGQPRGLSATAAGGALRSVRANNPVDIERKTMSTNLLADVRRLDNQIKALKVRIGAAVAIADTTVTDVYGVGPVVAAILIGHSGDIARFPSAGHYARYNATAPIDASSGPRVRHRLNPRGNRQLNHALHMAAVTQIRYDTAGRAYYLRKQAEGKSRKEALRALKRRISNAVYRQLLADARRR

SEQ ID NO: 136222 - protein, 342 aa, unidentified
MNSTTIGLDIAKNVFQVHGVDAHGKVTLRKQLKRSQVLAFFANLPPCRIGLEACSGAHYWARELIKLGHDARLISPQFVKPYVKGNKNDANDAEAICEAVGRPSMRFVPVKSIEQQDIQMLHRVRSGLVKERTALANRTRGLLGEYGLVVGLGLTQLRRRLPELLEDAGNNLTVAARQLFSDLYDRLVELDQQVAVYGDKIQVLHRSSPVSQALASVPGIGPITATALLASLGDGKAFASARQVAAWLGLVPRQASSGGKAKLLGISKRGDVYLRTLLIHGARAVVKAAAKKDDAQSRWINELVKRRNANIAAVAVANKNARIAWALLTRAESYHAPVVAGI

SEQ ID NO: 136223 - protein, 365 aa, unidentified
MSTSVLDTQPVGQVVIGVDTHKHVHVAVALDVVAGRLAELSIATDQGGYDHLARWAESLGHVLAFGIEGTGSYGAAVASFLRRRGHKVVEVNRPDRRVRRQRGKSDPIDAENAARAVLAGIATATPKSGQGNAEMIRVLKVARDQAVTDRTRAIITLKALLITAPAELRDQLRSLTGRHLVRTCAALRPGPVTTPSAAAKHALRALARRWLVLDAEVAEHDQVIAALVQHAAPALTQAFGIGVDTAAEILIVVGDNPERIHSQAAFAKLAGVAPVPASSGMHQRHRLNRGGHRQLNAALYRAVIVRMRFHAPTNAYVTRRTAEGKTKREIIRCLKRYLAREIYQILITGHTRALPPAHEPAPAAG

SEQ ID NO: 136224 - protein, 370 aa, unidentified
MSVDRYTYRKEHPSSMNHAKYIGMDVHKETISIAVMDSAGKLVMESIIETKAGTILQFIQGLRGSLSVTFEEGTWAAWLYDLHKPHVTQVVACNPRKNALLKDGNKGDRIDARKLAELLRGNHLKPVYHGETGVRTLKELCRSYLTISKDLMRVMSRLKALYRSWGIACSGTGVYTPRYRSEWLNKIAEAGVRRRAELFYQQLDALQVLRREARRDLLAESGKHGATKLLRQIPSIGGIGAALLVALLQTPYRFRSKRQLWAYSGLALETHGSAEYCYWEGQLRRSKKQVTVHGLNDNHNHDIKNVFKSAATQASICAGPLHDFYESLLAKGMRPEMARLTLARKIATITLMLWKKGACFDAERVKAQAA

SEQ ID NO: 136225 - protein, 323 aa, unidentified
MSTKATKKRRHFIGIDVAKKFLEIGVHQSDYHFRCPNDPKNFPALIAELIPLRPARIVLEATGGLERALLQALHGVGLPVVVVNPRQVRDFAKALGLLAKTDRLDARVIAHFAAAIQPPVRPVKAQQETELDALMGRRTQLSDMLTQEKNRRGSAATKATREDIDEHIEWLEERLQELDEKLKEQLKCSASWQQKDKILQSVKGIGFVTSMSLLADCPELGQLNRHQIAKLVGVAPLNQDSGQQRGTRHISGGRAQVRCKLYMATLTATRCNPVIKSFYQRLIARHKPKKVALIACMRKLLTIVNALVRQNKLWNVSVQPLSA

SEQ ID NO: 136226 - protein, 445 aa, unidentified
MKQARKRYVGLDVHKDEVEYCILDAVGKKIDGGRILCEQSVLQRFATTTLSPKDHVALESTWNTWSIVDILEPHIAKIVVGNSMKTKAIAEAKVKTDKVDAMILAQLLRCDFLPTVWIPDAKTRVLRRLSSFRKSLVQDNTAAKNRIKGILNHLLIKHAVVWSKTGLDELKKLELPSHERTIMDCEIAVLEHLWLQIEKVESEIKKLAYEEDNVRLLMTLPGVDYNTATAIVAAFGDISRFKDADHAASYLGLVPKVKQTGNSCRHGSITKTGASLARSLLCEAAQCLSRNEGPLGVFVRRLLQKKTWNKAIVAGARKLATIAYHMLKNKEPYRYATVARTREKLRYLRKSVTGKKFEPPRYRYDEALREHIETNSDVVVRFLPPLSDVYEKEGLPPRRSLDELSFGEQRAIKEMGLTEQVRKAETVQVIVKPKKAPVSPRVKVE

SEQ ID NO: 136227 - protein, 347 aa, unidentified
MTKTATEVQVFAGVDVSARELSVAMRSATMDREEVQSFSNNAAGHQALLGHLLRGKGRARVCLEASGNYSLDLALTLHANRRAEVSVVNPRRARRFAESLGERNKTDPVDAHVLCQYAVRMPWEPWVPPSALALRLRGLTRAIEALGVTQTQEKNRQHSLRASRALPTFVIRELQRHLEYLQLRITRLRREALRLIARDPELDRRFRLMLTTPGIAETSALQILGELAALPATLDARQWVAFAGLDPVRFSSGTTVDKKPRISRGGSRHLRRALYMPALVAIRHEPHLRAFFQRLVAHGKAPLQAIVAVMRKLLHAFFAMFRSDHSYDGSRLCLVEVASNPVAMCAA

SEQ ID NO: 136228 - protein, 391 aa, unidentified
MYIVGIDCSKYKHDCFIATETGEVIRDTFTFDNSGTGFAQFFSILETLDCPKNQIKVGFESTSHYMVPLMKHLSVKGYEFILLNPVIVSRFRRSTTLRRIKTDKIDAKSIAQVLASSDYESYHMQVYHFPELKSLTRLRDRLVKQRSYYLVMLTNVLDEVFPEFKEFFDDSLKSKTAFYLLDTYKIPSRMANMNSNSFDNLKKVSYGHFSYAKFVKLKELAKNTIGSSSEADELEISSLLNIYKTINDEICRVESKIEEIMTIIDSPTVSIPGVGLMSAASIIAEFGDLSRFANADKMLAYAGLDCGRSQSGTTDYKGKMVKHGSSYLRQALMNVVETMMIHAPVFYDFYHKKRDEGKAHRVALSHLARKLVRLIYKLETSHTRFDLNNSK

SEQ ID NO: 136229 - protein, 308 aa, unidentified
MQFYTGQHRYYCGIDLHARQMYVCIVNQEGAILVHRNIKTDPTGFLELIAPYRDDLAVAVECIFTWYWLADLCAREGIPFVLGHALYMKAIHGGKVKNDRIDSQKIALLLRGGMLPQAYVYPERMRATRDLLRRRMHLMRFRADLLAHIQNTASQYNLPPLAEQASKKSERPAIPAHFPDPVVRQMIQLDLDVIAHLDEQLRVLEQDLALKAKAHDAFAYHLIRSVPGIGRILTLVILYEIERIERFATVGQFASYARLVKCAKESAGKRHGYSSKKIGNAYLKWAFSEAAVLFLRNNPPAQQGCDSK

SEQ ID NO: 136230 - protein, 325 aa, unidentified
MNYIGLDIHKKSFTGTVLDEKDNLVVQHKCPYTMDGIKSFFGQFHPGRTKVAMEACGLWRGYYRILTALGYNVVLANPVKARERSNRKKTDPVDSHTLAELLRTGFIPLVYVPEEDVLKLRDIARHRARLVRMQTRTKTMIKAYLMRDGIEFPERLWNRSGLAWLSTRDDPSIGNLVNVYQCLHSEIKEVSGRVRKMAVNRKVTNILMSVPGIGEFTSVLMAAEIGDVKRFGNPKSLVSYAGLCPGVYQSGDTVRTQRNAFYNHWLKFAVYESSGRAVMLGSKYARHYARVKRRRNWKIARRSTARRMLTDVYWMLRNEEPYRAS

SEQ ID NO: 136231 - protein, 344 aa, unidentified
MNSMHYIGFDIHKKVIVFCEKQADGSIIDHGSIPATRHNLQQWAKKRAAPWIGAMEATLFTGWIYDFLLPHAEQLKVAHPEMLKAITAAKKKNDAADAEKIADLLRCDLLPECYMAPEAHRNLRRILRYRNFLVREAVKMKTKTASLLMEIGAEYSKSRLHGARYFQQLLEDLDYVPVSVLNLLQMTRTGMESFSKMEKQLIRALRSNPQISGRVELLMTIGGIGEITALTWVLEIGDIDRFRRIRDAVSYCGLCSAQKESAGKTYRGPISKKRNKHLQTVLIEAAKLAPRWNPQLAEVHERELAKGNRNRATLAVARKLVAFMMAVDKKQTAFIPKENLAQAA

SEQ ID NO: 136232 - protein, 388 aa, unidentified
MNVGADKSEPLTAVHTDLGAIFVSLELSRSSWLITSLSPGGGEKMSKHSVPGGDFPGLMERFAQLQEKTRRRTGQSFRIIVVQEAGLDGFWIHRALQNEGIESHVVDAASIATSRRRRRAKTDKIDGETLVRALLAYKRGEPRVCAMVKVPTPGEEDRRHLCRERKALTAERVRHVNRIKGFLFSQGVSGYQPLRRDRRQRLEELQTGDGRAFPPHLKALVNRELDRLELLLKQIKTVEAARDALLAVEQTAKPGPAAMLLDIKGIGPEFAAILWSEGLFRHFENRRQIAAYAGLAPTPWQSGAVDREQGVSKAGNPRLRTTLIQLAWLWLRNQPRSALSVWFHERVSRNGGRLRKTTIVALARKLLVALWKYVTAGVVIEGVTMKVA

SEQ ID NO: 136233 - protein, 458 aa, unidentified
MVQTKRPRSRREMPAVHPDAAAIDVGATMHVVAVPPDRDPEPVRTFGTFTADLHRLADWLRACRIKTVVMESTGVYWIPIFEILEQKGFDVQLVNARDAKHVPGRKTDVSDAEWLQRLHEHGLLRGSFQPKGEVKALRSYLRQRERLLDSAATYIQHMQKALTQMNVQLHHVVSDITGVTGMRIVRAIVSGERDAATLAAFRDSRCKEPVETIREALIGNYREEHVFALTQALELYDIHQKKVAECDKRIETVLKQLKATRPTPAKPLPAPRHKTKQSNAPNFAARDALYAVLGIDLTQIHGLGPYLALKLVGECGTDLSAWPSAKHFTSWLSLAPRNKISGGKILSSATRRSNNRAASLLRLAAVTVGRTETALGAFFRRLSARIGKAKAITATARKIAVLFYNALRHGMKYTDPGAAYYEERYRQRVLSNLQRRAKAFGYVLQAAAPQAPQAVGVS

SEQ ID NO: 136234 - protein, 344 aa, unidentified
MDYFGGLDVSVKETSICIVDDTGKIVREVKVASEPEALLAVLNNPAYHFKRIGLEAGPMSQWLFSVLVEAALPVICVETRHMHAVLKAQINKTDRNDARGIAQMMRVGLYRPVHVKTLRSQKLRMLLTHRQLLQSKAIAIENDLRGTLRNFGLKVGMVGKVKFEARIKELVENLPDLAVLVEPMLIVRRVLREQIVILHRRLLAIVRDDEVCRRLMTVPGVGPVVSLTYRATVDVPARFHKSKSVGAVFGLTCAKYQSGEVDWSGRISRCGDDMMRSMLYEAAQAMLRSKKWSWLKAWAMQIARRRGMKKAIVALARRLAVIMHRIWVDGTEFRWTREQAAAAA

SEQ ID NO: 136235 - protein, 341 aa, unidentified
MDEVSTIGLDIAKSVFQVHGVDAAGAVVIRKRVSRAKVLEYFGELPPCLVGIEACPSAHHWGRELQGLGHTVRLIPPSYVKAYLKRGKNDANDAAAICEAVTRPSMRFVPIKTKEQQTALMLHRARQLLVRQRTMLSNALRGHLAELGVVSARGRNGTAELLRIIADGRVSPAVSGILTVLARQYGAIGTEIASIDKSIMALHRGCEASRRLAEIPGIGPIGATALVAEIGDWKTFSSGRSVAAWIGLVPKQHTTGGKDRLGSITKQGNRYLRWLLVVGAMAVIRYARKYGTQKRPWLGRLTERRPTKVAAVALANKIARIAWAIMVRGERYKGPKLLLAA

SEQ ID NO: 136236 - protein, 353 aa, unidentified
MSKEKYVGLDVHKATIVIAVLNAVGQMIMQTVIATDAQMLREFFKGLSGTLRVALEEGTQSAWLYALLRPLVKEVVVCNPRHNKLIETGNKSDQIDAEKLAQLLRMGALKAVYKGNQEQRQLKDLARAYQNLVSDSTRVMNRIKAIYRGRGIKCDGHNIYKTDQRQSWLDQLAEEGARFRARLLFEQLEKLSELRQAAKQEFLAHGKRQPEYPLLCGVPGIGPLRASVLLAFVGPPQRFRTKRQFWPYCGLAVITRTSADQQVVNGTISKRRKVIATRGLNPLHVPELKQVCKDAALTAARREPCQSWQQARSAQGMRPEMTRLALARRLAAVTLTLWQRKEKFEADQFSTFL

SEQ ID NO: 136237 - protein, 367 aa, unidentified
MPVFRILNEERFMEKGSFFDKNRLIMNKTKMVVGIDISKDEFHACIKVLTESGIVKIKGTRTFANDYQGFELFLRWVLDRQKGVGSLSFVMEATGVYFEDLAYFLHSKDKLVSVVLANKVKNYAKSLNVKTKTDKVDSKIIAGLGIERSLEQWKPMSPQYKKLRDYSRELLSMKKELTRAKNQLHALNSSHSKPKGLLEIKEKQIMFYQDSIAQIQSLLHKAVDQDLELKEKLEKIQTIKGVGFETSVHIISETNGFELFKNIRQVVSYAGLDVEHRESGTFKGRTKISKKGNSRIRQALYMPAMSAARTNKPIKALYERVCEKNPNIKRKGVVASMRKLLILIFVLWKKNTTFEMNYQWAPIEIGE

SEQ ID NO: 136238 - protein, 277 aa, unidentified
MNIAVLGIDLGKNSCSIVGLDSSGKVVLRRRMQRKTLVTMAAKLSPCIIAMEACCGAHHLGRILVAQGHTVRLMSPEYVRPYVKAQKNDDRDAEAIAEAATRPTMRFVTLKSEEQLDMQSLHRARDRVVVERTSLMNQLRALLLERGIIVPQGRAKLRYRVNELLAQTCNELSPRIRVLIEDMMARWQAVDNRIAAFDTEFAAEVKQNEAARRLISIPGICALNATALVAAVGDARTFARGRDLAAWLGLVPRQATTGVNLACSGSPNAAVSTCARC

SEQ ID NO: 136239 - protein, 388 aa, unidentified
MNLNRDKLLSTNIPNTQDGAAIIESKLCDLLMKHSLSKIVVVLESTGVYSAHLATYLSNSKFLSIYDSKVFIINPKISKNYRRSFSDMDKTDPKDAFVLADIARVGRTDGLTPFKGAQRLALERLTRHRLHIAELLSTEKTYALNNVFLKFSEFESLFTNNFGKTAIDLLLEYHTTDDIIQSSLEDLTAFIIKSSKNRYADSEAIATKIKAAARASYRLDKLAYDPINFSLASSINVINCYDVEIKEIDKAIIRQVAGFNQNHYDVLLSIPGIGKVYAAGILAEIADINQFESDDALAKYAGITWRKTQSGKFEADDTQMTKTGNKYLRYFLIQAANMARLYIPEYRDYYQKKFDEVTTHQHKRALALTARKLIRLIYGLLSTNRLYQ

SEQ ID NO: 136240 - protein, 407 aa, unidentified
MKLLIGIDWSKDHHHVCFMAANGSQQASFEIPHTVEGFARLDAERAQFGVSAKECLVALETAHNLIVDYLWSRQYQVYVIAPTVVKGSRGRYGVSGAYTDASSALLLADLLRTDLTRFIPWCPDGELVRQMRAKLSLIDALQRDILRWSNRLLAVLLRVYPHPVGLFSELTTQIGLHFLIAYPTPQVAQGLSYEDFESFGRQHGYPTGKLPELYARLQSPKPEPDPAALQAYQEEIPFLARTLLPLVQHRLQLIRQVKELFGQHPDHFIFESLPGAGDLLAPSLLVKFGDHRERFPSAAMAQALAGTCPYTKRSGKRRAILFRTACDHDFRRIAQQFAIESVKQSVWAATYWQEAYARCQSKSQAYRCLANRWLAIIWKMWQTRKPYDEAYHLKQRLLRRQPRPRKY

SEQ ID NO: 136241 - protein, 356 aa, unidentified
MICHTYVVLKFIVGTMSDYSYFCGIDLAKNHFSLHAVDQNGKVILNKSVTRSKLLTTIANMPLMRIGVEACGGAHYWARTLNKLGHDASIMAVKYVVPYRTKGKNDLNDAVAIYEAVQRPSTRFVPVKSPEQQAILSVHRMREHWVRERTALMNRMRALLSEFGLIIPVGRSSLMKQVPLMLEDAENELPHLARTVIADAYHHLGELNQRIADKEQVFDSFAKVSANVQRVIKVRGIGPQTATAILASIGNGSQFDKSRDFSAWLGLVPKQYSTGGKPRLGRITKHGDKYLRTLLVHGARTVIANLGDKQDKLSQWCRGVLERRGMNRAIVVLAAKNARIIWSLLHNQTEYENHAA

SEQ ID NO: 136242 - protein, 322 aa, unidentified
MSTSPVFAGIDVSKAHLDVAVRPDEIEWRSPNTDTGAREAANKLKGLDPDLVVLEATGGMEIPAASALAVLGVPVVVVNPRQVRDFAKSTGRLVKTDALDARVLAHFAEAVRPEPRPLPDEQARQLSALLSRRRQISEMLTAERNRVQSADSTVRRRLKVHIRWLERELSDIDNDLGGAIKASPLWRGKDDILKSVPGIGPVVSITLLSELPELGQLNRKEIAALAGVAPLNRDSGTLAGRRTVWGRRARVRAALYMAALVASHYNPVIKDFYLRLCARGKPKKVALTACMRKLLLILNSMVKNEEKWNASNTRGRGVLISA

SEQ ID NO: 136243 - protein, 368 aa, unidentified
MDSPIADGIECAKLEESTTSNQHKGGVIMKGTTMGIDLAKNVFEVYVEAESGAVIERKRLSRKKLLSWFANRPPALVGMEACGGAHYWARELEKLGHTVRLMAPQYVKPWVQTNKSDQADARAICRAMQEPGMRFVALAGEAQQAVQAVHRVRSRYLGNRTALVNQIRGILLEYGVAIPQGVGAVRKALSLLLTEERWSPLVRQFLLEQQAELTDWDTKIEVVTARIKRENATQPICHRLEQARGIGPLGASALWVKAAGQPYQHGRHFAAALGLVPKHTGTGGKIRLGGISKRGDRYLRQLLIHGARAVVRQVGEKPDRLSEWIRRLVARRGMNKAIVALANKNARMAFALISKDQPYDVAKMCEAV

SEQ ID NO: 136244 - protein, 342 aa, unidentified
MYYVGIDYHKSVAVACIIDGKGKELETIELPSTPEGMDMLIGKMGKKKFKVLGEAFTYSIDLHNHLIGKGVSSELVRPTDLKLITHSKKKTDKNDAATIAWYLRMKETDQIKLNYSFILKDKQLEFRSVCRLREKISDLKGQMSQQIKSHMRCNGEYLPVKEFGDNPKMSVKRVQKYIIENFDGDFTLQEYLREYIYLEERSKEVEKEMTRFEFDKEAVRLLETIPGIGELSAMELMSMIEDISRFPSSDVMRAYFGMAPKVRDSGDDVNHGHVTKQGDPMMRHVADRVVRLHLMHSDGSVIRKSYESVRKRSNHGVAMMAASNKLLDVIFSVLSNKKPYYC

SEQ ID NO: 136245 - protein, 343 aa, unidentified
MPLQLKGVHKMLYVGVDAHKATSQIAVMEQDGRVIRRRRVCSRRADVHEALGRYRRPMKVVLEAGYNWGPMYDWLGEIADDVVLAHPAKVRAIADARIKTDAIDSETLAHLLRADLIPEAYAPSKDVRAIKRVLRQRMFFVRVRAMLRNRVHALLAQHSVEQPKVSDIFGNGGLRWLRGLRLPDPDGAVLQEDVGLFEVLTERIGATEELIKELSAGDEAVDYLKSLPGIGEFLSVLIRYEVDDIKRFREPKKFAAYTGLVPSTYASGNRMVHGRLTKRGNKWLRWAFVEAVWPAVRKSPWLRGYYERIKKRRGVKDAKVATARKLAELAHTVWTQRRYYEER

SEQ ID NO: 136246 - protein, 354 aa, unidentified
MTVTIVEEARPVTCRTAITGGVDTHADTHVAAALDPVGGLLGVEEFPATAAGYARLLGWLGGFGTVCLVGIEGTGSYGAGLARHITAAGVRVVEVDRSDRQDRRRQGKSDPLDAVSAARAAQSGRARGAPKGRDGAVEAIRTLMVARRSAAGERTRTINQARALILTGPDDLRARFARHTAAALIAGLASLRPRPGDVAGHATRVAVRELGRRAVFLDGQLERLDELMIPLVSARAPGLLALYGIGPHTAALLLIAAGDHPGRLRSEAAWAHLCGAAPISASSGKVTRYRLNSGGDRQANHALWRIAFTRMGSDPATRAYAERRTAEGKSKAEIIRCLKRYVAREVYPYLRPAG

SEQ ID NO: 136247 - protein, 373 aa, unidentified
MSTNLRYLGLDVHAETIAVAVAEPGGEVRPLGIIPNVPEAVAKLVRKLGPREQLRVCYEAGPCGYVLYWQLTKLGVQCDVVAPTLVPTKPGDRVKTDRRDAAKLAHCYRAGDLTPVWVPDAAHEALRDLVRAREAAKQDQLRARHRLGKLLLRHGRRPPEGVKPWTQRHRRWLDALHFELAAQQATLADYLYEVDHAATRLERLEAALDEAVQAAPAPMRAVMAALQTLRGIRQVIAATIVSEVGSLSRFPHPRELMGYSGTVPSEHSSGSHVHRGAITKTGNAHLRRVLVEAAWAYRFPPKCAKGLRQRQRGQPEAITALAWKAQQRLCSRYRRLLARGKPTPHVITAIARELVGFIWAIGVAVEREQTMAA

SEQ ID NO: 136248 - protein, 326 aa, unidentified
MTPLDSPPVSPVFVGIDVAKDKLDLARSDTGEFLTLGNDRQGIAQIVQTLLSARPACIVVESTGGLERPLVEALLEAGLPVALVNPGRVRHFAMGLGILAKTDPIDAAVLMEFARRAEPRLTQKRSAHQAQLDALITCRRQITCARTAQANCRLTTSSGDALKAIDAVLKTLDKQIELLDKKIRKLIDADDDFKHLDRLLQTVPGVGAVLSATLIAELRELGTTDRRQIGALVGVAPFNRDSGAFHGKRSIHGGRAAVRCVLYMAALAAMRFNPLIRNFAARLGKTGKCAKVIIVACMRKLLILLNAMVRDNLTWEQLSVVKALDI

SEQ ID NO: 136249 - protein, 404 aa, unidentified
MRFIGLDVHRDFCEVAISEGSKARSAGRVATTPQALTKLGRRLSSQDKVILESTGNALEIARCLEPFVAEVVIANPMHVRAISHAKVKNDQFDARTLAELLAADLVPRVWIGDEHTRMLRRLTSRRAQLVRARTRPKNEITAVLVRNLKGRCPASDLFGKQGRAWLTALPLPADEQDTVQACLRQVDFLASEIRHVDRQLAAHALSSPEIRRLMTIPGIGVTTAATLIAAIGDIDRFPSAKKLVGYLGIDPRVRQSGIAPARQGRISKQGPSACRHVLVEAAWSAIKTPGPLRAFYQRTRARRGAQVAIVATARKLAALCWQLLTKREDYAFKRQTVVERKLRALELLAGAPTRNGAQHQPGAPTVKQRALIERQLTEQAELAYQRLIQDWTATNNTHSPEPNP

SEQ ID NO: 136250 - protein, 356 aa, unidentified
MSRMRDTSQVVIGGVDTHADTHQAAVLDEHGRLLDVNRFPATPAGYEQLLAWMRGYGTIRQVGVESSGSYGAGLTRHLHTAGVTVVEVNRPHAHTRHRRGKNDTIDAEAAARKVLAGECTAIPKDTSGIVEAIRQLLLARASAVHARAAALHQFGQLVVTAPAQVRQSLTAKTLAGKATQAARWRPDPARLADPPQAARMALRSIGRRIHTLTDEVKHLDIQLSTLVRRAAPKTLALLGVGIIHAAQMLITAGQNIDRIHSETAFAHMCGADPIPASSGKTERHRLNPGGDRDANRTLYLIAVVRLRYCPKTRAYANRRTTEGKSKKEIIRCLKRYIAREIYYTLRADLKNLAPTP

SEQ ID NO: 136251 - protein, 388 aa, unidentified
MQTVADRPEAPSAIRSDLGAIFISLELSRSTWLITSLSPGGGEKMSKHSVPAGDICVLLARFSEIRQKAFARTRKSFPVIVIQEAGLDGFWIHRVLQNEGIESHVVDPASIATSRRRRRAKTDRIDGEALLRTLLAYKRGEPRVCAMVKAPTPEEEDRRRLCRERKILIAERVKHVNRIKGLLFCQGVSGYKPLRRDRRQRLDELRTGDGGLLPKHLKAQIGRELARLEQLLEQIKAVEAERDALLAAQRVTARAPPAMLLDIKGIGPEFAAVLWSEGLFRHFDNRRQVASYAGLAPTPWQSGSVDREQGVSKAGNPRLRTTLIQLAWLWLRNQPQSALALWFKDRVSRNGGRLKKTTIVALARKLLVALWKYVTAGVVIEGAIVKSA

SEQ ID NO: 136252 - protein, 414 aa, unidentified
MKQQEVAAWIGLDWADKKHSIHLEVREGKREHRMLEQKPGIIHEWVAELRQRFQGQRIAIAIEQRKGAVVHALMMYDFIVLYPINPKALARYREAFRTSGAKDDPSDSELLLDLVSKHGDKLRAWIPDTVVARKLQLLCEQRRKIVNHRVALTNRITSLLKQYFPQAIEWVGDVASIQACDFLSNWPTLASIQRARKETLRKFYRQHNCRKASVIDERISQISNAVPLTNDAAIIEPLSLSVQIYAVQLRSLIRAVQQFDKQIVETFAQHPDHDVFDSFPGAGQVCAPRLAAAFGTDRSRWQSAVEMQSPSGIAPVTERSGDSKWIHHRLACPKFMKQTFHEFADQSIRFSKWARVYYDQMRARGNDHHAALRALAYKWIRILFRCWKDGKPYDEEKYVKALRQRGSALIEKFA

SEQ ID NO: 136253 - protein, 361 aa, unidentified
MGDGTWVGLDVHARSVVAGLIDEETGECRVVGAPHDTRELTAWVQQLPGPVRVAYEAGPTGFGLARALEQAGVGCLVAAPSLIRRAPAARTRKRDATDAELLARTLRAGELVAVRVPEPDTEAARDLVRAREDVRADLMRARHRLSKLLLRHGLVYDGGRAWTGAHHTWLGHIRLGEPAARAAFEDYLGAVLAAGLRRDRLDAQITQMAVSPPYARLVGRLECLRGVGTLTAFALCVEIGDWHRLSGGTIGAYLGLVPSESQSGVRHSRGPITKAGNRHARRLLVEAAWHHRRPLRTSLPLERRRAGQRPEVRARAELASRRLHARWDHLERRRGLRSTLVATAVARELAGWCWSLAVMDD

SEQ ID NO: 136254 - protein, 386 aa, unidentified
MQTAADRPEAPTAIRTDLGAIFVSLELSRSTWLITSLSPGGGEKMSKHVVRGGDVAALLERFAQLRKKTRARTGKVFPFVVIQEAGLEGFWIDRVLRNEGIESHVVDPASIATSRRRRRAKTDRIDGEALVRALLAYKRGEPRVCAMVKAPTPEEEDRRRLCRERKVLIAERVRHVNRVKGLLFSQGISGYEPQRRDRRERLDTLQTGDGHLLPDHLKAQVCRELDRLELLLEQIKAVEAERDVLLAAQQVTAPATMLLDIKGIGPEFAAILWSEGLFRHFDNRRQVASYAGLAPTPWQSGSVDREQGVSKAGNPRLRTTLIQLAWLRLRHQPQSALALWFEERVRRNGGRHKKTTIVALARKLLVALWKYVTAGVVIEGAVMKAA

SEQ ID NO: 136255 - protein, 347 aa, unidentified
MKHLFIGLDVHKKSWSVTIQEGQVVLKRFSMEAKADSLIYYISKHYKGYLVECCYEACCCGYHIYRDLTKAGWTVLVVNPGDIPRINKQSTNKSDKIDSSYLCHHLASGHLRGISVPEEKQEQFRSLFRRRADLVKSLKRIKCHIKSMLLYYGIDLPQNYDNVNWSKAMTHWIEKLKWLYPTAAATMKSRLDEYHFLRGEYLGVCNELRSYARKQYKKDYYLLRSIPGIGPFIAIAVLSEVGDIRRFKGIDRLSSYVGLVPSVHSSGEKSYSRGITYRSKNLLRSYLIEGAWIAAKKDEELMQYYQQRKGCDHRKIIIKMAAKTLSRIYHVLKTGKPYQTMQVRMAV

SEQ ID NO: 136256 - protein, 401 aa, unidentified
MESPIVSIDVSNGNSHYMCFIKNNKRFGKVKKIDHDIEGFKRLLEDIQKLEAETNEKVCAVFEATGVYTKPLERFLNKNSIKTYMINPLESARKRKEEIHNKKTDKLDPISISKVYYDKEEMMELKKKDETYNWLRKKNRLYEDQLNHLRKYKVTFQNQLSICFPGYLDLFKDGYSDIPMTILKKYPHPDLLKNKKAETVARYLEKNTCHTHKVSLEYALKIIEFAKKTYPGCEKDDVEVEIFIILLDKVIETQRECEKTLNEMITVASTLEEYRYISSIDGIGPNLAARIIAEIGDIEEFKSREALVAYAGLDPHIYQSGDQDGKHLKISKKGNKYLRCLLFLAVGCSIRGAKDNPVNRFYQKKKQQSNPLNSKAAKTACTAKLLKIIYGICKNKTTYER

SEQ ID NO: 136257 - protein, 398 aa, unidentified
MGSRDNAVYIMLPDGSRHSSFMVQNNLGGAKTLSDKVVSALTEENLIHVVIGMEATSVYGDNLMCFLREDGALGQFERKLHILNPKQVSKFKEAYSDLPKNDPVDAFVIADNLRFGRITTAIYMDDYRYKALQTLTRARFFAVQNLTREKQRFMNYLFMKCSGLAQEKAFSDNYGVAALAFFEEFDTPDEIADMDVEELAAFISVKGKNRFPRPDEIAKAVQTAARGSYRLPKTVSESVNQVLSISISSMRAMQSQIKALDKEIARQFDNIPNTLTSVPGIGPVFSAGMIAEIGDINRFKGESAVAKYAGLAWNQYQSGTFEAQNTRLIKSGNRFLKYYLCEAAHSLVRCDTEYRRYYNLKFKEVNKYQHKRALALTARKLVRLVFRLLKDNRLYIPV

SEQ ID NO: 136258 - protein, 346 aa, unidentified
MVTLLGIDPHKVSHQAVAVDANGAPLGQLQVKARPAGHAELLGWARREFPGPRLWAVEDERNMAGQLLRDLLAAGERVVTVPAHIAADYRKQGRRRGKSDAIDATAVARAALRKQLPDLVLDEASRDLKLLTDHRTSLVEERVRLQNRLRDLLHQLDPDLAAEIPSGGLTRYCWLDDIIAAYTGQPGVSAAIVVDLAQACRALTEKIKKLERQLKPLVAQAVPALLAMPGCGVLIAARIVGEVAGVHRFRNEAALATYAGIAPLDASSGQQQHHRLNRHGNRLLNAAIYQMAITQLRNHPPARAYLERRISAGNTWKVAMRALKRQLIRAVYNTLTRQTTPTPQAA

SEQ ID NO: 136259 - protein, 312 aa, unidentified
MIEQCFVGIDVSQDRLDVLLLPQTTGFSVANNEAGWNALIARLRDLPVAAIGLEPSGGYERGVIRALLTASLSVRRINPNRLRQFARARGALAKNDRLDARLIAAYVATMPTHVVRHDPAAARIAEIVTVRRQLCDEHVAVENQAAQLEDAMLRRLAKRRLARIETDIRLLDKRLAEMIAAEADLARRYACLTSMPGVGPVLAFTLIALLPELGRMSRKQIAALVGLAPYDFDSGKLRGHRSIYGGRMPVRNVLYMAALSACRYNPALKTFHNRLAAAGKKPKVILVAVMRKMITTLNAMLRDGASWQPQAA

SEQ ID NO: 136260 - protein, 346 aa, unidentified
MTIVETRAITGGVDTHADVHVAAALDPVGGLLGVEEFPVSPAGYARLLGWLGGFGAVALVGIEGTGSYGAGLARHLACAGVRVVEVDRSDRQDRRRQGKSDPLDAVSAARAAQSGRARGAPKGRDGAVEAIRALMVAKRSAAGERTRTINQARALLLTGPDDLRARFAKHAPAALVTGIAALRPRPGAAAGYATRIALRELGRRAVFLDGQLERLDELIVPLVTARAPGLLAVYGVGPNTAALLLIAAGDHPGRLRSEAAWAHLCAAAPIPASSGKVTRHRLNPGGDRQANHALWRIVFTRMGSDPATRAYVERRTKEGKSKAEIIRCLKRYVARQVYPHLRPAGD

SEQ ID NO: 136261 - protein, 339 aa, unidentified
MNEVSIVGLDIAKKVFQVHGVDAAGVVKVRRSLRRSQVLRWFAKLAPCLIGLEACATSHYWARELRKLGHEVRLIPPAYAKAYVRRNKNDAADAAAICEAVSRPGMRFVAIKTEAQQAIGGVHKVRALLLKQRTMLINHLRGLMAEFGHVVAPGPQHVGELLAILADPEEAGLVEPLGGALLGMTEVLRGLERRIEAIDRQIVAWGRSNTTYRHLITIPGYGPILASAVAALVTDPTTFRSGRDFSAALGLVPRQEGTGGKVKLGPISKRGNGYLRRLLVNGAMSVLGSKRARQDPWIAKLLASKPRKLAAVAVANKLARIGWAIMMRQEDFHTQPAAA

SEQ ID NO: 136262 - protein, 338 aa, unidentified
MTQYKYFVGVDVASASFVACVGTSPWRLVLKPVDFENQEDGFISFMNWLKTNQIQPDHSLVCMESTGVYSEGLAYFLCAQGYVVAVEPPLNISRKFPVNASKTDWNDCQYIAEYASRYVDKLSIWQPRNEILEQVKVLLTPRQQFSEQITAHKNALHAVNRKRVTSAVAQKAHTDIIVEITRMIKNIDQEIRRLIESDPTFNQKLLLLLSIPGIGLQLAAHLIIMFEQTMDPRKLAAFAGISPIQHQSGSSIYSGPTSRHYGPPALRKLLYLAACSLRTHRAEFTKYYLRKTAEGKPGKLVMNNIENKLIKIACAVVRSQKPFIANYVSVNPLVLKNA

SEQ ID NO: 136263 - protein, 446 aa, unidentified
MADRVRPPALEVAHPNAAGIDIGSGSHFVAVRADAEERPVREFLSFTEDLEALAQWLTQCGVEVVAMESTGVYWIPLYELLESRGFTVNLVNSRHVKNVSGRKSDVLDCQWLQQLMSYGLLSGAFRPQEEICVLRAVARQRDMLVQYQAKHIQHMQKALTQMNVQLDNVISDLVGVTGQKIVRAILAGERDALTLAKLRNGGIRASEADIVKSLQGNWRAEHLFALKQAVNLYDSYQSSIAECDAQLAQVLGRLAVHDDAPEPPKSGRGRPVKVEKFDLRKALYRACGVDLTRIEGIDVGTALTMIAEVGPDLSRFKTVKHFASWLGLCPGTKISGGKVLSSASKRTANRLAQALRMSAVAAGRSHSALGAYYRRLSARLGKAKAVRATAHKLARLIYTLMTKGEAYVDQGQDYYEQQHQQRVMKNLKKKALAMGFSLTPVAAAVA

SEQ ID NO: 136264 - protein, 395 aa, unidentified
MFIVGIDIAKRSHEAIIIAEDGQVVRKAFSFRNNCTGYNLLLEQVRRLTLVKSQIVFAMESTAHYWLALYARLLKDGYAVMVLNPIQSHSLRELYIRKAKTDTRDSLIIADLVRFGRCKASNVPQDKILALRELCRSRAYLVDMAADLKRKLIALLDRIFPEYESLFDSVFSKASIAVLSKYSTPQKVKNANLRKLTDILMESSNGHFGEWKAHQLKEVACSSFGIDDSGGVYSTLLGMFLEQILSLTAQADSLEKQISVFFQEFNNPLTSIPGVGTVLAATILSEIGDITRFSSADKLLAYAGLDPSVKQSGEFKSNQNRMSKRGSPYLRRAIWLASTVAVHRDPMFQTYYEKKISEGLHYMNVIGHVSRKMTAVIFAVLRDGQPYQPILQSAG

SEQ ID NO: 136265 - protein, 322 aa, unidentified
MSQPNPLCVGIDVSKATLDIAASNAIEQFSVANDADGFDSIIAELRQHDVALVLMEATGGLEAAVACALQAEGFEIAVVNPRQARDFARAMGYLAKTDRIDARVLAQMAEVINRHPERSRFIRALPDAERQVLNAMVVRRRQLIAMQVAERNRLYPAHPQSRKSINIIIKALEDELARIDEDMSNHIQRHFKELSERLSSVKGVGTMTAAALLAEAPELGSLSRRQISALVGVAPVNRDSGTMRGRRTIFGGRAGVRTVLYMATLVATRFNPVIKAFYTRLVAAGKPKKVALVACMRKLLTILNAMLRKNEEWNELYHHVAP

SEQ ID NO: 136266 - protein, 321 aa, unidentified
MNKDKEIYGVDISKDVFDVYSITSGHKQFKNDAKGFRILVKYLKKDSLVVMEATGYYHYRLAQYLYKQGVLVSVVNPLSVKRFIQMKLAKVKTDKSDAKAICEYGQMNEVPLYTALTDVQSECLQLFRLLDNYLKKRTATKNKLHGEETLGVPSKFVYRSLKRDLRHLNKEVTGIEERLLELVKQEQQHQLTLLKSIPGLGVKTALFLIVVTDGFSKFEKASQLCSYVGITPTIRESGSSVRGRSRISKVGNKKLRNLLFLCAFSACKHNKACREIYERIVNKGKSKKQALIAVSNKLLKQAFAIAKSGIPYDENYVSKLN

SEQ ID NO: 136267 - protein, 355 aa, unidentified
MNQEKYIGMEVHQATISVAVMDGKGKLIMECILETKADTILEFVHGLRGTVSVTFEEGTSAAWLHDLMKPHVTHLVVCDPRKNALLKDGSKSDRIDARKLAELLRGHQLHSVYHGEHGVRTLKELGRSYQTLTKDVTRVMSRSKALYRSWAIPCSGTTVYAARHRAEWLAKIPQPGVRLRAERLYQQLDLLQPVRQEARRDLLRESRKHEAVKRLQQIPAIGPIRAALLVALLQTPHRFRTKRQLWAYSGFAIETHDSGEYRYVRGKVQRNRERITVRGLNDNHNHDLKNLFKGAALSASTQPGPLHDFYTALVEKGMRPTMARLTLARKIAAITLTIWKKGVSFDAQQLHRQAA

SEQ ID NO: 136268 - protein, 312 aa, unidentified
MMTAGIDTSKAKLDIALHGRAERWQVDNTSRGWRRLAADLATAQVARIGIEATGGYERGVVCHLREQGFSVLVLQPIQVRAYARVHLRRAKNDKLDAVLIAACTAAVEPTGAAPDARLAALADQLTFVEQVEEDIARLKTRLEHIAEPRLRKLILADIAGLKARRRAELLRIGKALRRNPDLARRLDLVLSVPGIGERTALALVIRMPELGRVSREQAAALAGLAPFDDDSGKHKGKRHIAGGRGRLRRSLFAAALPAAFRWNPALIALYARLTARGKAHNAALVACARKLLIYANTVVARGTSWLQTPLPT

SEQ ID NO: 136269 - protein, 446 aa, unidentified
MERSGAFEVVRPRCAGLDLGSREHYAAAPAGLADPEVRRFGCFTQDLLDMGAWLLSLGVEDVAMEATGVYWVPVYEALSSLGLRVALVDGRAAKALPGRKTDVQDCQWIRDLHTHGLLRPCVVPDAQALELRAYWRLRRRLVEQRSEQTLLMHKALEQMNVQLHKVLSDLTGASGLAMVRAMVEDGERDPERLADLARGPVKASRQTLVKSLRGTWAPHHLFVLGDALEQYEFLGERLKEVDARLDEAMREMNGQGPEPPPPSASKGGSRRKNQPHFALEARLGEALGVDPTSIPGIDATTAMTLLTEYGKDLSRFPTEKHFASHLGLCPNNKVTGGKRKSGRTKKVSSRSATALRVAAQSLHRSQSALGAFFRRLRARLGPQKATTATAHKLAVAYYRLVVHGELYQDVGARTYESRLDEERLKALRRQAAKLGLTLVHAAPQTP

SEQ ID NO: 136270 - protein, 399 aa, unidentified
MLTSQSLQLRVGVDVGTQSHSVAVGLTDGSLLEAFEIPHTAAGFEDFFARIEGHARRYPDPIAVAMEGYNGHVRPLDSLVKVRGWQLFNVNNLKLARFKEIFPAAAKSDRIDSAKTLELFQLRDHLPMARDVLQEVMATPAENDILKRLSRRRRRLVNERTRVINSLHADLQAVAPGLLQITRYVGNLWFLSFLTCRRDIRKLARLRRATLLKLPGIGATYAGRIQAWQQGAFFGPDARLVGDMIRQDAERVLELNRQIKALEDEMAHIAATSAIACQLASIPGCGSVCSAELAGEIGTIARFQSEASLALYLGMATLDNSSGKFRGSKSPKHVNVRAKAAMMAAVDHHRKRVPQSHRFYERKRAEGKKHNQAIRALGRHLCRVIFKMLSQERPYRIDP

SEQ ID NO: 136271 - protein, 464 aa, unidentified
MALTLGIDVACRAAHQGTLARDGAIVWRGRKFWTRPDDLERLWSALGCVDPAELTVVLEPTRNAWIVVAEWFRRRGARVVMVPTTRSADLRKYYSKHTKNDRIDSELLARLPLLHPEGLREYSGQGPADPLRRLVKQRSTMVKRRVAVYARLDALVELLGPAWYAVLGSNYGLAALEFLARYADPNTVIRLGQGRLSRFLIARSRGAWRADHAAGLLVAAKETLALWGPDGMNFAELAEDIAHEAEQALFLTRQIKQIDERVANLYADVDPDGIVASAPGVGPVISAVIAGRIGDAHRFNSLAAIRAYTGLVPKVSQSGTSKVESNITKAGDPLLREMLCTAADQARKIDPQIAAKYQRLMAGDRHHDSAICHLATLLVTRIATCMRDRQPYILRDVDGTPITEAQGRMIVQERYQIEPRRRDNIRHQRMRDRRKQAAGQESQESPSAPTSQPAKRKPTSRQVA

SEQ ID NO: 136272 - protein, 359 aa, unidentified
MLTQSNKIDFNGQHFYVGLDVHLKSWKVSIMAEKLTLKTFSQDPRPELLHHYLVKNFPNGTYHSAYEAGFCGYWIHNKLTALGIDSIVVNPADIPTTNKEKVSKTDKRDSKKIAKCLRNGELKGIHVPSLKTLEDRCLVRTRGTLVKDLSRNKNRIKSFLYFHGIEMPEKFKQMSTHWSNRFMNWLRSIELSEYSAKKSLTLIIDESEHLRLIILDATKGIRELSQSETYANHVQLLRSIPGIGILTAMIVLTEIEAISRFNNFDNLCSFIGLVPTTHSSGDKDIIGEITIRGNNFLRSAIVESAWIAARKDMVLNKCYHDYCRRMEPNKAIIRIARKLLNRIRYVLKNNQPYVYSVIK

SEQ ID NO: 136273 - protein, 427 aa, unidentified
MPYKIAGIDVHKRMLAVVVSEVEVYDEYQFERRQFGTSPAQLRSLAVWLLEQQVEEVVMESTAQYWKPVWGALERHWQPQCRERAQARPTSGGLHLAQAQSNRGPRGRKHDFADTERLVKRLVAHELRLSFVPDPTQRLWRTVMRTKYQLRCNQVQLQNRLEALLEEAQIKLSSLLSDLLGASGRRMLKALAEGETDPQALVALADSRLRATPEQLRDALGACQDLHPIYRRLVKTALEEWQGLEKQIRQLEEEMAALLGPHQDQVQRLTEVPGVGADSAQQIIAEVGATAATFPSAGNLSSWVGACPGDDESAGVNYSSRSPKGNRHLRRILNQAANAAVKLKGSIFALLYRRHVTRLGHNKTIGIIAHRLCRLIWKILHQGIRYEERGPAVSQKSKKNRAARMIRELRSLGYRIELDNSSSRAPA

SEQ ID NO: 136274 - protein, 491 aa, unidentified
MTFLPPRSPDDLSPRYLGLDLAKRESQLAVLQADGQLIASRRFSTSRANITQLASELTAQDVVAFEVTTNSYPIARLISSSPARIILSNPIKTRTIAEAKIKTDKIDARVLAELARANYLPAVWMPDPDTEALRHLFCDRRSLVDRRTELKNTLHSILHRNLISYEFKDLFGKAGRLWLENICSGQTSVDCDALDRLRLRALLVELDRLEASLCDVEGVIAAFITERAHLRANLDRLLSIPGVNLVVGAGLLAAIGDITRFASAKRLASYFGLVPSTYQSGDTRARHGRITKKGRSEARWLAVEAAEHLRKAPGPLRALFTRVSKKRGHNVAVVAVARKLAELVWHLLTKQQDYLYEKPHRSMDKRSNVRKLARRKTNRVQQSAAPVWEGRPVLYGSGLAGKSVKGKIAKLAAQEAEAIYEAVVTSQKSGPGGEHITGGFDPRRPTQIDWHELLSVFAEKVAQGQTVGAGFGGRVRKEGASKRGTRLRRDQ

SEQ ID NO: 136275 - protein, 405 aa, unidentified
MDIIVERGAGLDVHKKIVVACVMGTGMKKEIRTYSTMTSDLFRIKAWLQECCITQVAMESTGVYWKPVFNILEDAFEVILVNARHVKNVPGRKTDVLDSEWLCKLLRSGLVRGSFIPPKEVRELRDLTRYKRKLIQTITSEKQRVEKILEDANIKLSSIASDTFGASGKRIIQELLKGELEPGAMAELSKGRLRNRKEELKEALVGHVEEHHKRMIRTSLEHINAMEEIFLSVEQKIQEQIELHFKEAYELLKTIPPVKDNASVLIAEMGVNMDLFPTEAHLASWAGMSPGNHESAGKKKSGKTTHGNNYLRSILTEFAWIASKMKGTYLCAKYQSLVGRKGKKKTLVAVGHKILISCYYILKYRVPYKELGANYLDERKKDRIARSYVKRLTTLGYAVTLKEVA

SEQ ID NO: 136276 - protein, 359 aa, unidentified
MLATLRVENTNAGYRELRAFVRKWPSRRWAVEGARGVGRQLAQRLVADGERVVDVPAKLSTRVRVLDTGHGSKNDPADAHAVGVAALRHHDLVELTVDDETVALRLLSDRRRELVHSRTQTLNRIHRLLSELIPSGAPKRLSATKAKALVATVKPRDVAGRTRRAMVVDLIDDVVTLDRKIKTVTKQITDAVAATGTTLTDIVGIGPVLAAVILGEVGDITRFPTRHHFASFTGTAPLEASSGDIVRHRLNRLGNRMLNHALHTAAVVHIRYDSRGRAYYERKKAAGKGSLGALRCLKRRLSDAVYRALVADHAAKSPGGQVGASVQSSATDLIPMAGTSEQPLSGLTADLTPAAAAVS

SEQ ID NO: 136277 - protein, 346 aa, unidentified
MNHIGMDSHITTLDFAVINEAGGLIKAKSVATSVNGFMGFVKTVPPPRTIYMEEGTLAAWALETCVRFKEKLVITDPKKNHWIGSSGQKDDPLDALKLAQLGRGGYIKEIHHPVGQRRRFRELTIAYHDTVRSTTRIKNKIKARFRQNGIQCTGATVYLETYREEWKRKLPQEVTLLLILDGLWRQLEQSEQTEKELLAAARAQAKHYPEIKHFEALPGIGFISAATISAMLETPYRFANKRKVWMYAGLGIMTRSSGGKTYSEKLSTDYNRLLKYTMKQAAEAAIRDKDNPFRQKYLDMTLLHGIAPHRAKLTIARDMLATMWAMWRKGEKYNPEIREKAAYKQG

SEQ ID NO: 136278 - protein, 472 aa, unidentified
MAKVTVFEAINVPSCGLDVHKDIIQACVIDECGEKHRKTFNTMRASLYALRDWVLSLNCFHVLMESTSVYWIPIYEILEEVTGMDVGVGNAQKMKQVPGRPKTDRSDADWIARLCMVGLILKSFVVGRKFRELREYTRYHKKLVQERARQVNRIEKLLQINGFKLSSVLSSITGISGLKLLRILCDKGFVTLLDVQQALHKRVKKSPEEIEIAINGHMKLSSRLLLGKMLQRLGSCDQEIAEIYSMMVESSEDYRPHIELLTGIPGIGELSAIYIIAEISTDMTSFMTANHIAAWAGLAPKDKESAGKIKTSKTHKANIYIKSVLIECAWAAIKVRNTRISNWYWRNVNRIGQKKAITAVARKLIVYIYAMLKSGELYNDRLDVADTEKNKAEKLDSARKIVEHRSNKAAAQKHQSDIEQDSFEPTTSVSQTKIDVDIHTGADHAAEPGLKRKRGRPRKVAVEDKQAELQLA

SEQ ID NO: 136279 - protein, 415 aa, unidentified
MYERVAAIDVGKKMVAVAVRTPGERAGKRRQQVRKYNTFHQTLAEMVAWLTAEGVTHVTMEATGIFWKPIFHALCEAERPMEVLLVNARHVKNVPGRKSDALDAVWLAELTECGLLRGSFIPPPQIAAIRELTRYRKKLIEQRSSELQRLAKVLEDSGIKIDSVASTLTTLSARDMIEALIAGERDPAVLADLARGVMRKKIPELTLACAGRFGAQHALMCTLHLEHIDHLADMIARLDTRVDEATLPFVQQTELLATIPGIGERAAQVVISEIGVDMARFPTAAHLASWAGLCPGNNESAGRHRSGRTRKGNKELCQILTECAWAAGRTSTYVGAQFRRFHRRFGKKGGRKAAIATAHTLIVIIWHVLAEDTAYRDLGSDYFTRRFDNSDARRRRLVHELEALGHKVTIEPAVA

SEQ ID NO: 136280 - protein, 346 aa, unidentified
MDQIIRIGMDTSKHIFQLHGVDAAERPVLRKRLGRKQMVAFFAKLAPTVIGIEACGAAHYWARVLGEFGHEVKLIAPQHVKPYVKRNKNDSRDAEGLCEATGRPTMRFVPVKTAEQQAALMLAGLREQMVARRTQLSNAIRGYAAEFGIGAAKGLDKIEPLLAQIAQDEGVPALARVSFAVQGRQYAQLQVELKAIEARLRAWHRANADSRRLAQIPGVGPIGATALVMKTPDPRAFPSGRQFAAWLGLTPKDHSTAGKTRLGKITRAGDERLRSVLVAGATAVIQQAKHGRGHPSPWLIALLKRKPPKLAAVALANKIARIAWKLMVTGESYDGARMLGASALAA

SEQ ID NO: 136281 - protein, 456 aa, unidentified
MNNYLGIDVSKGYADFALIDEQKQPMVKNFQLDDTPDGHNKFGDFIRTLFNQHQNLTVVATAESTGGYENNWLDCLKKLQRCYDIKIARINPKGVHHYQQAKLNRAITDAISARLIAEYTLSHGEIIQFDQPDQAYWLRKQWTLIKLLSKQKTQLLNQLNNLVYQSNPELMVYCRHSWPAWLLQLLENYPTAKHLAQANIDQLLKIPYLNTVKAHKILNQAQQSVASATNPVSGEMIKTIIAEINHKNELITRCKQSLIENCSLQDVELLTSIPGIGKFSAVGLIIEIGTWLRFASAAKMASFFGLHPILKQSGDKNRVARMSKQGSSEVRALLFMCALVAITRNPVIKDLFVHSLAKGKSKMSALGICMHKLLRIIYGVLKSGRAFDPAIDQANRDRKPYLQKPGKQQIRQLQPVDVNAPVSARQNKKRKEQSQSQGELVTKCEIKAPALSHCAT

SEQ ID NO: 136282 - protein, 351 aa, unidentified
MIIIGVDYHPSDQYIAFVDTETGEYGERQLKHSDREAEKFYRVLAARGVRVRVGMEATGYSRWFERLLAELGIEVWIGDAAEIKTKRVRKQKTDREDARLMLRLMRENNFPRIWVPSPENRDLRQLLWHRHRLVQMRTRIMNQLQALAMNEGQRRKKKLWSEQGRAQLEKLPLATWASRRRKDLLELLDRMNPTVEELTRAIEQEAKKWPEVLRLMTHPGVGPLTALAFMLIIGTPERFKCGKQIGSYVGLIPCEDSSAGHQRLGHITKQGSSLLRFLLGEAAQAAARWDSDWRRRYIHLAMRRQRNIAKVAMARRLAVRMYWMWRNGWEYAEWVKFGSHAGQLGTRHGVN

SEQ ID NO: 136283 - protein, 339 aa, unidentified
MQVTTIGLDLAKNVFQVHGIDDHGEVAFNRALRRAQVLAFFERLEPCLVGIEACGTSHHWARELIKLGHNVKLIPPAYVKPYVKRGKSDAVDAAAICEAVTRPTMRFVEVKTPDQQAILSVHRTRDLIVRQRTQTINMLRAQLAEFGVVLPQGIYHVLQFAKDCINGEPLNLPKDAQEVVFDLCDELLFLHAKILRHSRHMTQIAKSEKRVALLRTIPGVGAITASAIVATVGSGKQFNNGREFAAWLGLTPLNRSSGGKERLGHISKMGDQYIRRLLVLGMTSRIRSIRLEPEKFDPWFADILSRKPSRVAAVAMANKTARMIWAVLTRNEPYQVRTV

SEQ ID NO: 136284 - protein, 372 aa, unidentified
MYPLEMPALCPAAEHQDGIGEDRMFAGVDTHKDTLAVAVIDHAGRVVRQLELPNQDSGYVRLLALLSSYNVARVGMEGSGNYGWPAAIYLLEHDLNVVDVPPLMTSRERSSRPGQGKTDPVDAVAIARITAREDALPPVRPMTGHAADLRVLTDYRDQLVKERTATANRVHTDLLWLRPGYQHQLPHLTNMAHLHAALELLDGDDSVRAAVTRARLDRMLTLTEQLRELRAQIGSLVHSTGSTLPEVYGVGPVVAATIIGHVSDVRRYPTRHHFATANGTAPIPASSGRTVRHRLNRGGNRQLNRALYTIAITQIRADTEGRAYYQRKRAEGKTSREALRCLKRRLSDLIYRTLRADLANAAQPTPTLSIAA

SEQ ID NO: 136285 - protein, 460 aa, unidentified
MNSKRSKSRNSSKMPMVHPNAAAIDVGATMHMAAVRADRAPDPVRSFGTFTADLHRLVYWFTECGVETVVMESTSVYWIPIFELLDARGFTVFLVNARDAKHVPGRKTDVSDAQWLQRLHSFGLLRASFRPKGQIAELRAYVRQRERLLEYAASHIQHMQKALTEMNLQLHHVVADITGATGLRIIRAILAGERDPEALACLRHYSCHSSAETIAKALTGSYRAEHLFALEQALALYDSYHEKASACDVRIEAVLKELSIHRGHGHGSAPRASRRRNRTDQANALAFDVREALFALLGKDITTIDGLGPYLSLKLIAECGDDLSSWPSAKHFTSWLGLAPSNKVSGGKMLSSRTRRSGGRAAALLRLAAVTVGRTDTALGAFYRRLSARIGKAKAVTATARKIAVLFYNAVRYGMDYVDPGASSYETRYRTRVVNNLHRRAKAFGFVLQPLEPKVGAAVS

SEQ ID NO: 136286 - protein, 318 aa, unidentified
MASVVGVDVAKLKLAIVLVTPAGKTLHKSCANTTAGHADFVRWLTRHAGGPVAVGLEATGGYQDAVALALHDAGHRVSLLNPQAIAAYGRSQLRRAKTDPTDAALIADYVRTQAPPTWTPAPLEARQLQALVRRLDALLAMRTQETNRLELAAPIVHPSIAGTVAHLTTEIAAVKRQMAAHIDQFPTLRQQRDLIESIPGIGATTAAIVLGELLDIQRFAGVRQLAAFAGLVPQIAQSGTSVRTRGRLTPHGARRLRKALYFPALTALRCNPILQRFGARLRAAGKPPMVIITAAMRKLLHQIYAVLRSGREFDPLKA

SEQ ID NO: 136287 - protein, 347 aa, unidentified
MRFYTKQHAYYCGIDLHARSMYVCILDGKGEVVVHKNLRTDPAAFLELIAPFRPDVVVGVECIFTWYWLADLCDGEGIPFVLGHALYMKAIHGGKAKNDRIDAHKIAALLRGGMMPQAYVYPREMRATRDLLRRRLYLVRKRGLLLAHIQNTNHQYNLPAIPAKLNYPSHRVGFTDRFVDPCVRKSMEVDLALIAQLERLIRDLELYILRRAKEHDADTFLLLRSIDGIGKVLALTILYEVQDVDRFERVQDFVSYARLVRCAKESAGKRKGTSGKKIGNVHLKWAFSEAAVLFLRSNPEGQKYLDRLSRKHGKAKALSILAHKLGRATYYVMKRRRTFDMKKFLAA

SEQ ID NO: 136288 - protein, 317 aa, unidentified
MTDDDKIQSALGLDVSCDSVTLFDSMTGQTVTIENNREALRSALAAYGGRPDMLAVCEATGGYEDRVLAVLVALAIPAHRADAAKVKAYIRSFGKRAKTDAIDARWLAQYGLDRSQALVRWQPPEVNQSEVRLLTARRTDLVAMRVQEKNRLKAPRSGMIAADIKDHIAELDRRIAAIEVQIEALIRSDRSLRRRERALRSIPGIGSTIAALLIAAMPELGSINRRQAASLAGCAPHPRDSGKMNGYRAVSGGRRHIRPALFIAALTAIRGDNPLATAYKAFLATGKPKRLALGAIMRKIITIANARLREVEMMANN

SEQ ID NO: 136289 - protein, 344 aa, unidentified
MEHFAGIDVSLKDSSVCVVDAAGRIVREAKVASEPEALVAWFGGLGFAVTRIGLEAGPLSQWLHAGLSGAGFEAVLLETRHVKAALSAMVVKTDRKDARGIAQLLRMGWFRPVHRKSAGAQEVRALLIGRKLLQSKLRDVELSIRGILRGFGLKVGEISKSRFAARIRELVAGHEMLETVTGAMLAAREALLAEFMRLHRRMLAIVRADAVCRRLMTAPGIGALVSITFRTAVDDPGRFRSSKAVGAHFGLTPKRYQSGETDVIGGISKVGDAMVRTALYEAANAVLSRPTRFSTLKRWAMEVARRRGLKRAKVALARKMGTVLHRMWIDGTEFRWGKEAPVAA

SEQ ID NO: 136290 - protein, 338 aa, unidentified
MSSITVIGIDLGKSTFHLIGHDETGREQLRKKLNRTKLIEFLSNHKPIVIAMESCGGAHWLARKCQEFGHQTKLIPPQYVKPYVKTNKNDFIDADAIAEASTRPSMRFVSVKSEEAQILAVIQRIRSGYIKERTACMNRIGSILLEFGLSFPRGHIHMKKLFDWLSQQPSRIPKLLLQELVEIHEYYVLLNERIKQQEKKLLNIVERDERAQLLKTIPGIGDLVASQCISSISNVHDFKNGRHMAAWIGLVPHQYSTGGKTKLLGISKRGDKSLRTLFIHGARAILSRLDRAEKYFGHWIVELRARKPFNVAVVALANKIARIAWSVLMYKRPFEIIK

SEQ ID NO: 136291 - protein, 347 aa, unidentified
MLHVGLDLSRHRLDVHALDDEGETVEVVASPPDAAGLRSLAERPWARGQRVRATIESMNGARFVHDQLELAGWEVAIADAQKVKGFAPLACKTDRIDAWVLAELTRRDLVPEIWLPSPEVRAERERARWRLHLVRHRVALKNRIHATLLAFGKPCVMSDLFGVGGRDLLERLEFPEPWASNLDAALTLIDDLSDQITDCERELRRLGADHTYVPTLMTTPGIAWVLGYTIAAEIGDIDRFASPKKLVAYTGLCPRVHQSGGSDHRGPLAKNGPKYLRWAYIEAATHAARHPAYRDRYQATKARLGRQRGAKVARVDIARRVAEANWHMLTKGEPFAPAGPARSALVA

SEQ ID NO: 136292 - protein, 445 aa, unidentified
MSESLISAASEPEWAAFAAIDWADQKNFWRLVPAGSQRYEQGELENTPEAVEIWAADLQQRFGGRPIALCLEQSRGALVYMLTKYPHLVLFPVHPTTAARYRQTFCPSGAKADPSDTASLLDLLIRHRERLRPLQPDTVETRLLHFLVEERRRTVEEKTRQSNRLTDCLKMYFPQILRWFDDVTTALVGDLLERWPSLEQLQRAHPGTLNRFFHEHNCRSQKLLEERMAAISQAIPATQDQAVLEAGMMMAGGLVKLLATLRGNIASFDERIAGLVRAHPDYALFASLPGAGPVLIPRLIVAFGTRRDRYQDADEMERYSGIAPVKVASGKSMLVHFRYACPKFLRQTFHEFASHSIGQSEWANAYYQHLRNDEKKDHHPAVRALAFKWIRIIFRCWKDGKSYDEQVYQKSLRRRGSLLGAALASATGVGWKTVAGFQKLSENNT

SEQ ID NO: 136293 - protein, 340 aa, unidentified
MTIIIGIDPHKATHTAVAIGSDESELATVTIRATRQQTDKLLSWAEPFEERTWAIESAGGLGYLLAQQLVGAGEQVLDVPATLASRVRVLGSGRSNKNDPNDARSVAIAALRSPGLRAVSIADHAEVLRLLAKRNGDIGDHRTQVVCRLHALIAALEAGGIAKELNASDANGLLGTFEPSSPAEHTRHQLALELLADVRHLDGQLAESKQRIKVAVSASGTSLTEVFGIGPVLACSLIGYTGDVCRFKSRDQFAAYNGTAPIEVSSGGRVAHRLSRRGNRNINHAIHMVAICQIRHTHSEGRAYFDRKVAEGKTKREAIRSLKRQISNTVYRHLVADAAR

SEQ ID NO: 136294 - protein, 410 aa, unidentified
MAHNIAGIDIHKKLLVVVIVEAGKPDVILHSRKFGTGAAELGHGSAWLSQYAVEEAVMESTAQYWKPVWLELEPHMRLHLAQAQSNKAPKGRKSDMADAQRLVRRFVAGERMLSFIPEPEQRAWRMVTRGRLQLTRERVQLQNQIESLLEEGRIKLSSVITDLLGASGRRILRAMAKGETDPQVLAALGDDRLKCGVPAQVDALTGVRGDIHCRLLAQHLDRIELIDGQIGELDQLAATQMQTYQDVVRRLIEIPGIGATAAQEILSEIGPEAAAFPSAPQLASWIGVCPGSNESAGENHSGRSAKGNRFLRRLLCQAAQAAARTNGSHLQSVFKRLIVRLGYVKAVWAIAHRICKIVWKVLHKGARFVEFSEARNPKAIQRAINHHLKALRRLGYTIPAAPQDAVATPA

SEQ ID NO: 136295 - protein, 379 aa, unidentified
MKIITQNEKNLYVGIDVHKDTYSLCCFDFQRNELSDEITIRATTKGVIKYLEAIRKKHREEVLFACGYEAGPTGYGLCRGLQKAGYGCVVMAPTTMSNPDGERRIKTDRIDARAISRILAYKSYSQVHLPSEEIEALKEYTRARYAKKRMLKKAKQELLSFLLRNGKTYPESGNYWTEKFFNWIKTVQFSKKWMQEAFNEYLAEVYSLKAKIERMDMKIREIAGLEIIKDKVDKLVCFSGIDVSTAVETVVEINDFTRFATAAQFVSYLGLCPGQDSSGKRKTMLPLTKAGNCRVRTLLCESAKAIKRTNPYGQKSGRILERQKNASPEIVAYADKATKRIRTKMKNLEECGKNYNVSSAAGARELACFVWGMMNGKIA

SEQ ID NO: 136296 - protein, 339 aa, unidentified
MDEYDGRQFVGIDLHRQRSVIVRQTEAGEQLSAVRIVNNAVALQLELERAGADPEVVLEATYGWYWAVDVLQASGARVHLAHPLGVKGFRYRRVKNDVRDAGDLADLLRMGRLPEAWIAPPATRELRELVRYRAKLVAIRSGLKAQVHAVLAKAGVLIAVSDLFGVGARKRLAKVPLGGAYAERVRSLLELIDTLDNHEARFVGLIAKRLDADRGYQAIQQVPGIGPTLAAVFVAEIGDVHRFAGPAQLCSWAGLTPRHRESDTVVHRGHITKQGSKLVRWAAIEAVQRHQTTTKIAADKDRIEARRGKNIAKVAAARKLLTLVYYGLRDGHIRALDRA

SEQ ID NO: 136297 - protein, 343 aa, unidentified
MLTITTIGLDIAKSVFQVHGVDAGGQAIIRRQLKRRYVLTFFQKLSPCLVGIEACASAHHWSRELQALGHTVRLMPPAYVKPYVKRQKNDATDAEAICEAVTRANMRFVPTKTPEQQSGLVLHRTRHLFIRQQTSVINAIRAHLAEFGIVAPVGRRGVEELLNVVADPNDRRVPEIARACLSALGAQLRRMKEQILEFDRLIRAWHRSNEMSMRLEEAPGVGPVLATALVAAVADPKSFRSGRNFSAWIGMVPKQHSSGGKNRLGNISKQGDRYLRGLFVAGALSVIRYAKIHGTKHRPWLTALLARRPTKVAAIALANKIARMVWAMMARGERYKEPVALAR

SEQ ID NO: 136298 - protein, 322 aa, unidentified
MCKIIGIDISKQTFDVGFNDGSNWHHLVLDNNEKGFKRLLKELSNNDWVVMEASGPYYLKLATFFYGKGYNVCVLNPLIIKRYSQTRLIRAKTDKKDAQTIAEYGAQYRLKQWKPEPTNISKIKQLYTVLELLNKEVHQSERQLEALTATGVMDKDLKSILQGIVSYLTCKRNKVEKQIEEIAQSVYKSTLDRLKSIPGIGTKTAIMLTVITGNFENFETHKQLIAYVGFSPRIYQSGTSVKGKGHICKMGKSQIRKLMYLCSWSAKRCNKDCVDMYERLLEKGKPERVIKIALANKLLKQAFSIAKNKTYYDENFNKKTCF

SEQ ID NO: 136299 - protein, 343 aa, unidentified
MDHFAGLDVSVKDTSVCIVDEVGKIVREVKVASEPDALLAVLRNATYRFKRIGLEAGPLSQWLFGALAEADLPVICVETRHMRAVLKSQINKTDRNDARGIAQMIRVGLYRPVHVKTLRSQKLRMLLTHRKLLQSKAVAVDNDLRSTLRNFGLKVGIVGAARFEARIRELVADLPDLAILVAPLLVVRRVLREQIAVLHRRLLAVVRDDEVCRRLMTVPGVGPVVALTYRATVDVPARFRKSKSVGAAFGLTCSRDQSGERDRPGAISRCGDEMMRMMLYEAAQTMLVHVKKWSWLKAWAMQIARRRGMKKAIVALARRLAVIMHRIWVDGTEFRWTRDAAAA

SEQ ID NO: 136300 - protein, 433 aa, unidentified
MPETQELGTAEDLVERVAAIDVAKASGMVCMRLPHETRTGRRVQEVWNVPSTTTAILELGDRLVCQGVTRVVMEATGAYWKPYFFLLEARGLECWLVNARDVKNVPGRPKTDKLDAVWLAKLTERGMLRPSFVPPKPVRQLRDLTRLRAVLNQERCRHKQRVEKILEDAQIKVTGVLTDLFGASGRDMLAALIPGERGPRVLADLARGNLVRKKAALADALTGQFEDHHSFLCQTLLDSVDHLTGQIARLDGQITAAVQDLPGPQEHTRPGPSLVERLDAIPGVGLTTAHILLAELGPDMAVFPTADHLASWAKLTPRTTQSGAKRGSSPTGRGNPWLKSALGEAASAAARTDTYLGARYRRIVKRRGRKKALVAIARSILIIAWHLINDPDTTFRDLGSDYHQRLIDPKRRTRDLVRQLNALGHDVTLAPAS

SEQ ID NO: 136301 - protein, 390 aa, unidentified
MDVLYQSCAGIDIHQANIVVCILHGPLTSTRPKRETATFDTTTKGLRACHDFLSQFHVEAVGMESTGVYWRPVWHALCDDFKLILAQPAHMKAIPGQKTDKKDAHWIAKLTRIGLLPRSFVPDETIQELRELTRQRKHYVESRNRETNRIHKILQSGGIKLTTYIEDIMGLSGRNLLQLLVDGTPITPRIVHQSVYTSLKKKVPQLLEALDGYFSDHHRFMLKQSLEIYDFYQKQIELLEERMNVYLSQYENHVEILDSIPGIDVITASVIISEVGVDMSQFPTAGHLASWTGLCPGNNESAGKKRSTKIRHGNSYLKKCLCQAAFAVKKQKGSPLADRFYQIQSRRGSQKATIALAHQLLKIAYILLKEQITYPEFLAQKKTTRDELVA

SEQ ID NO: 136302 - protein, 449 aa, unidentified
MREPQEICDVEHEQILERVAAVDVAKASGMVCLRVPQAGRPDRRRSLVWEVPATTNAVMELADHLARERVQKVTLEATSDYWRIWFYLLEAAGLDVQLVKAHDVKQAPGRPKTDKLDAVWLAKLTERGMLRPSFVPPTEIRNLRDYTRLRTDLTRERTRHYSRLEKLLEDALIKVSVVASKLDTLSVRDMIEALIAGKRDPQALAGLARGRMRVKHHALVEALTGRFDDHHAELARMLLDQIDSLTGQIGRLTARIEQLIADIPAAQGVDPDGTTGPAAGLAEGAPVLPAVDRLDEITGIGRNAAQQIIAEIGLDMTRFRTPGHLVSWAKLSPRTIQSGAKSRSGRTGKGNPYLKGVLGEAAAAAARTDTFLGERYRRIVKRRGKLKALVAVARSILVTVWHLLSDPDARFRDLGAGYYNSRTDKDRKARNHIRQLEALGFTVTLAPAA

SEQ ID NO: 136303 - protein, 350 aa, unidentified
MEVVYEHCCGLDIHKKTVVACVVVSGSGKQPHKEIRTFNTMTADLLELADWLTAQRVTHVALESTGVYWKPAWNVLESSFTLLLVNARHIKQVPGRKTDVKDCEWIADLLRHGLLRASFVPDRPQRELRELTRYRTTLVRERSAERSRIQKTLEGAGIKLGDVASDVLGASGRQMLEALVRGVTDASLVADMAKGSLRGKRLRTAQVFLAEIGTDVKRFPTAAHLASWAAMCPGNNESAGKRKSGRTGKGNQWLRTALVEAAHAVSHTKDTYLYSQFHHVAARRGKKRALVAIGHSILRIIWHLLEHDCEYVDLVSRYLEQRDRQQIQRRLVRRLEDFGYKVKLEPASAA

SEQ ID NO: 136304 - protein, 474 aa, unidentified
MAARRLLTRGPNPLEPPEAQPQTVPVGKRTALKVQEKVAPRRAGIRATCRSCSAAARARSEGGELVRYYLGVDWADQTHAVWVVDEAGTKLTARAVPHTAEGLSEWGRELDEWRAQGIELWAAIERPEGRVVDFLLDHGVVVYPVNPKALDRARDRFRQSGAKDDPFDARVLADFLRTDHAHLHALQPSSEAAQELKLLTEDYHRQVRQQTRLVNQLTITLKAYYPRALEVAESTTALAREFLKAYPTPEAVTALTKRQWQRWARAHHLSETRTRALWEVLQQPQLPVPAHVVRPKARLMRTLVAELAAVVAAVGEYREAIEDFFASMPTAQWVRTLPIGDHGITAPTLWARLGDAPERWESFRHLQAQAGAVPLTKRSGKQRIVQFRFACDKALRYVVDQVAFLSLRSCEWARAYYDQQRARGHSHRQALRALGAKWLKIIFVMWQRQASYDDQYHLASMARQQLRQPQKKIA

SEQ ID NO: 136305 - protein, 343 aa, unidentified
MKISRVGIDLAKNVFQVHGVNEQGELVWKRSLKRSTWLGVFFKTVEPGSEVAMEACTGAHHWARELQARGYQVKLIPPQFVKPFVKSQKNDANDAEAISEAMSRPAMHYVAIKTVEQQDIQAVHRVRSELMSHRTAKANQIRGLVAEYGLVAPQHLGPLRAAIPCWLEDAENGLTDRFRALLQGLWEDLANLDQRVKALDTEITAIASTHPDAKRLQQLRGVGPLVATALVAKFGDATHFKQGRQAAASVGLTPRHHGTGGKNRIFGITKHGDPYLRSILIHGARAVVSQAKQRDDRLSRWTTELAQRSHMNVAAVALANKTVRMAWAMLNRDVDYAPITMAA

SEQ ID NO: 136306 - protein, 469 aa, unidentified
MGDRGRKPGAGQRERSKRHREMEEFLEEVNLDAAGVDIGARAIVICVPKGRDAEGRHLRTFSTLMPDLRKACEWLKQCGVETVAMESTGVYWIPFYELLEEQGLKAQLVDARKVKNVSGRKKDETDAEWLQKLHRYGLLGSAFRPEGAICILRGYQRQRSMLVKMAATHIQHMHKALSQMGLQLHHVLRDLMGATGQKIVRAILAGERDGRVLAKFRDPNCKNSEETIAQALEGNYREEHLFSLRQAVELYDYYQEKLRDCDREIERKLREFEPRARAEDLPKARQQKSRGNEPHFDLRSRLFEMTGVDLTRIPGLNSYTALQAVSETGVDMSPWEDEKHFASWLGLSPNHRESGGKILGRSTRSNANRAATVFRLAARALYNADNALGAFYRRVRTRRGAPKAITATAHKIAVIYYSMLRYGTEYVEKGQQWYDEQYRSRVERNLRRRAATLGFHLVPSGEAATCPPA

SEQ ID NO: 136307 - protein, 337 aa, unidentified
MIVIGVDVHKHSMSAVAVDDVGRQLDCLETSDVEELVAWSKRVGRRRLWALEDCRHVTRGLEGRLVRERQRLVRVPPRLTAPERRRGRVRGKSDLIDALAVARAALREPVLDSPRREEPRLRELKLLVDHRDDLVDERRRCQQRLRWHLHELDPSLRVPLGALDRVVWLERLNRQLSRRERTTQVRIARELVGRCRSLTRSITELDRELHAQTTSLAPRLLELPGCAALTAAKLLCEIGPIDRFRSDSQLARHAGVAPLDASSGKHQRHRLDRGGNRQLNCALHRIAVTQGRVHAPAKAYLERKQAEGKSRREALRCLKRQLARTIYTTLKNQPLLT

SEQ ID NO: 136308 - protein, 401 aa, unidentified
MESPIVSIDVSNGNSHYMCFIKNNKRFGKVKKIDHDIEGFKRLLEDIQKLEAETNEKVCAVFEATGVYTKPLERFLSKNSIKTYIINPLESARKRKEEIHNKKTDKLDPISISKVYYDKEEMMELKKKDETYNWLRKKNRLYEDQLNHLRKYKVTFQNQLSICFPGYLDLFKDGYSDIPMTILKKYPHPDLLKNKKAETVARYLEKNTCHTHKVSLEYALKIIGFAKKTYPGCEKDDVEVEIFKILLDKVIETQRECEKTLNEMITVASTLEEYRYISSIDGIGPNLAARIIAEIGDIEEFKSREALVAYAGLDPHIYQSGDQDGKHLKISKKGNKYLRCLLFLAVGCSIRGAKDNPVNRFYQKKKQQSNPLNSKAAKTACTAKLLKIIYGICKNKTTYER

SEQ ID NO: 136309 - protein, 392 aa, unidentified
MMISVGIDVSKDKHDCFIFSSEGEVLSDVFTIPNTMDGFHSLLQQIWKCSNSQDKIKVGLEATGHYSYNLLGFLLDNGLATYVLNPLRANLYRKSLSLRKTRTDRVDARTIASMLLSDAGLKPYTDTAYHNEELKSLTRYRFDKVKERAKLKSSIARLVCILFPELEKLVPSLHIASVYALLEEFPGAKQVAAAHLTRLKALLETASKGRYKRDMALEIREVARNSIASPLPAKSLELQHTIRLIRELDNEIAEIEEQIQSIMDELHSPITTIPGLGFRMAAMILAEVGDFTRFDSPDKLLAYAGMSPSTYQSGQLKNCYPHMEKRGSRYLRYALYNATKYVCHWDPTFADYLAKKRAEGKHYNIAISHAAKKLVRLIFAMEKSRQPYCSAA

SEQ ID NO: 136310 - protein, 367 aa, unidentified
MKKVSTAATKPSRNFSQPNLTIGLDLGDRSSCYCVLDETGRMVMEQKVSTTAKGLQAALGGMPRSRIALETGTHSPWVSRLLSKLGHEVIVAHARNVRLIGESRKKDDRLDAQTLARLARIDPELLCPVKHRSARAQADLTVIRARAGLVRARTALVNTARGLAKSYGERLRGCNVRNMNPEKAEGLSPELQAALQPLLAALESLSERIAEYNERIEKLAQESYPQVALLKQIKGVGTLIALTFLLTLEDPHRFRKSRDVGCYLGLQPGRRNSGRSEPQMHISKEGDPYLRTLLVQGAQHILGPFGVDCDLRRWGLKLAERGGRNGKKRAIVATARKLAVLLHHLWVSGEVYEPLHNHRATTVAAAA

SEQ ID NO: 136311 - protein, 478 aa, unidentified
MTVICRRCAGLDVHRDKIAVCVRIRSNGKYEEHHEVFGSFNCDLKKLARWLKEHKVRRVAMESTGVYWMPVWNVLEQYRFGFDLLLVNPAQVRALNGHKTDRIDCARIAEFLQHGRLAGSFIPPVAVRQARALERRRVNLQQDRNRVTNRIGKLLQTANVKLSSVLSNIVGVSGEKILRALAAGERDGEKLAGLVHYSLAGKREAIVRSLEGRFDGHFRYLLTELLSELDHLDRKLESTTARLALYMAPHQDLFLRLCTVPGIDKIVAWTILAEIGADVSAFPDAKHLASWAALCPGNNESAGKRKSGRTNKGNKYLRRALIQAAWAAGRSKNTFLSALFLRITRRHGMKKAAVAVAHRMLVYIFHIIRDGGSYVEKGGDYFDRRNPERAASRLLARLDALDYDTSGIIRKVHKPEQPAELRSGRGRPCKCAERGFPCPHPPRLFRTLPGPKQPPPEGQLCRKCNRWGIACIHLVPKK

SEQ ID NO: 136312 - protein, 343 aa, unidentified
MRKLYVGLDVSKNETAICVRDDIGGVVLATKVITDPGAIMQAFKTVDGEIARIVMETGRASNWLYAGLLAQEMPVVCVDARQAHAILSQMHNKTDANDAAMLAELARTGFYRAISVKSMASQRMRALLRAREVAMKARMNVENTIRGLLASFGIQIAKEHKTFAMRVLSAIEDDNTVSDIVRPLVHLRADILRGLAALDRQLRTYVRNDATCRRLMTAPGIGAISAFAFVATVDDPARFRRSRSVGAYIGLTARRHQSGALDISGRISRRGDTLLRTVLYEAANSLLTRARAGNGAQLKEWAQALKARIGHKKAVVALARKLAVLLHRLWVDGTEFQAMEQAA

SEQ ID NO: 136313 - protein, 413 aa, unidentified
MQVVYEHCCGIDVHKQTVVACAIVPGPAGQPLKETRTFATMTGDLEALANWLAGLGVTHVAMESTGVYWKPVYNLLDERFAILVVNAEHIKALAGRKTDVQDAEWIADLLRHGLLKGSFIPSEVLRELRDLTRYRTKLGDERKSEVNRVQKVLEDANIKLASVASDVMGVSGRAILAELVNGQTDAATLAELAKGRLREKQDLLLKALSGRVRPHHRFMLAQHLSHIDFLDEAIGQLDQQIAEQMRPFAAALATWDSLPGINQRIAEIIVAEIGADLAPFEDAEHLASWAGMCPGNNESAGKRKSGRTRKGSPWLRRALIEAAHGAAHTKHKYFQSLYRRLAARRGKQRAAVAVGHSLLVTGYHLITRQTKYEDLGGNYFDERDREAVKRRAVKRLEKLGYRVDLAPFATPAG

SEQ ID NO: 136314 - protein, 330 aa, unidentified
MKSWNVILGVDVSKLTLDISCAERNLHIRIDNCSKGFTEFNKWCKTNSIDLKETLVVMEYTGGYEYRFIQYCDSKAIAFCRVPGMEIKQSMGMVRGKNDKADAFRIGRYGEEKRERLIPSKPLDEKILALKQLLSFRKRIVREKAGLQSTSKEREHMYEVKNTDTIMHIARAKIKADEGYINEVEQQIRELIKSNATLLQNYRIITSIKGIGEVNGWMTIAYTENFTSFTNARAYGVYVGVIPFGYDSGTSIKSRKRVSHLANKELKSELSQAAKTAMTHDKELHEYAERKLKNKDYGVVINNVKFKLILRMFSLVKRGEMYVENYKRAA

SEQ ID NO: 136315 - protein, 415 aa, unidentified
MRVMYSRCCGLDVHKKSVSACLLAPDESGEMKQELRRFGTMTRNLLELSDWLAAHKVTHVAMESTGVYWKPVWNILEAQFTVLLVNAQHVKAVPGRKTDSKDCQWIADLLQHGLLRGSFVPPNPIRELRDLTRMRATLRQDHTAVANRMQKVLEDANIKLASVATDWLGVSGRAILSRLLEGETDPEQLANLCRGRLREKLPEMQLALEGRMNHHHRWMLRHLQEQLEFLEKQIATLDAKIQEQTRVYQDVICLCTTIPGIEDVAAANLIAEMGFDMEQFGSAPQLASWAGMCPGNNESAGKRLSGKARNGCVWLRRSLCQAAWAASHSKNTYLAAQFRRIAARKGKKRAIVAVGHTILVILYHMLKNRQPYRDLGADYFDRRDADQVKRSLMRRLERLGFQVTIKEVAALSTPE

SEQ ID NO: 136316 - protein, 438 aa, unidentified
MSNKVIFNLDDLFISVGIDVGADFSWMSIALPNQQFVGKPYKILHNSIDSLTTAVSKIKEAEELYSLESRIFLESTGIYHYPLFCYLRDKGFNCSVINPIITKNSTNINIRKVHNDRFDSKKAALVGLKPDLKVSLMPSDLALNCRNLCREYYDLMDNRSAYVNKLQGELRIAFPQYLGIFSKVTINTSLTLLETYTSPSAFLKADKQEIIDIIKSTARFGLTYAQNKYNAIIQAATDANQFGYIIDSNIKRIRLYISFIRKYDEEINSILESLHELVDANEDSDFVKQIHLIETFKGAGFLSAVSIMGEIGDFSAFSKPKQLFAYFGLDPAVKQSGKFEGTKVQMSKRGSAIARRVIHTLTLQSISISRNGEAKNPVLREYYLKKCDSKPKLVAMGAVSHKVCNMIFAILRDNKSFEIITPQEHIKQYNSAKCDIAA

SEQ ID NO: 136317 - protein, 401 aa, unidentified
MISVAVAGSWLVRRTRWSLDWIRHQSAHGVIDRGLHKHQQGSIMHRNSAQGAGQIIGQMGGLQVIGLDIAKSVFQLHSVDMATGEIVNLQLKRAKVLEHFANRAPCVIGIEACGGAHHWARELTAQGHTVRLIHAKAVRPFVSGNKTDATDARAIWLAVQQPGTKFVGMKTLAQQATLTLHRQREMLMKMKVMQINALRGLLYEFGATFARGRNALFSEIEATLESLANSMPQYVADSLREQVQRIKQLGADIKAVEVRLTAVLRTDTDMRRVAQIPGVGLLTATAAIATMGQAKAFKSAREFCAWLGLVPKQRGTGGRVNLLGISKRGDTYLRTLLIHGARSVLTHAKEPGPWLEQLKGRRPANVVIVAQAAKMARTIWAVTARQQDYQRGYQSIRRQAA

SEQ ID NO: 136318 - protein, 362 aa, unidentified
MTKTSHLAFDVHAATIALGLLDEGAAKPEVWEIANEPAAIRKVIQRVRKGRELRCCYEAGPCGYVLQRQLTAMGIPCEVIAPSLIPQKPGDRVKTDRRDAAKLARLHRAGELTAIGVPTEDQEALRDLVRAREDARRSRTDARHRLTKFLLRYGLRFPASNWTIKFWTWVRSLSFSRPEQAKVFEHYVDVVLYHDRQIEDLEKHIDAVAEREPYKMMVERLSCLRGISTLAAMVILSEVYDLCRFTTARQFMAFLGLVPSEHSSGQKQRRGGITKTGNGHVRRILVEAAWAYRHHPGIGSRQRKLLTHQPAVVADVCRKADLRLTRRYRRLEARGKRSQVAMTAIARELAGFVWAIARVQPA

SEQ ID NO: 136319 - protein, 410 aa, unidentified
MTETSIAQNAPILVAIDIAKARHEVFIAIPGKKRRRRLTILNQLNDFERLVASLTGYDLPVRVAFEATGNYHRAITYHLAAAGFEVKLVSSVSLARTREALHNSWDKNDPKDAQVILHMMQIGNTQFYHDPLQCGTNDIQELSKTHDIVSKSKTELWHRVLTHYLPLYFPEADRFHRSSRGDWFFAFLERYPSPHLISAIDRDAFIAEAWDVVGRKVAKERLLIDIYETAKTSVGLPVGPDSDAVGMFRLVLGEGRGLIAQRNQIERRAVELLKDLPDYQLLTSVPGIGPINALTILAEAGDLRRFKHHRQFLKFCGMDLATIQSGTFRGQTKLSKYGNARLRRTLWMAGQVAILQKTNSFRDKFERYIAKDRHNTHLRRKAYTAIAAKMARTVHGIIKNGEPYRPFFEG

SEQ ID NO: 136320 - protein, 356 aa, unidentified
MSVYVGIDVHRKRSQVAVIDQEGQVLANQNVANGVETVLSVIGGLPPGTPAAFEAAFGWGWLVELLEDYGFAPHLVHPLQCKAIASARLKNDKVDAAILAQLLRADLLPEAWIAPPPVRQLRALLRHRAQLVRLRTLLRNRIHAVLADHGQDRPEGCWSGPGREWLASLRLPAVSREVIEDDLALIDALQVPIDRLDWEVRQRARSEPAVKVLTQLPGVGPFTALVLLAEIGDVTRFGSARKLASWAGLTPTVRGSDRTVRHGHISKQGSAWVRWILCEAAQTAKRHPDFAATYQAIARRRGKKIATTAIARKLLSRAYHLLTDASNGAPTDREGSPAPGELAKSHEPASKPRSMT

SEQ ID NO: 136321 - protein, 365 aa, unidentified
MRNSSLCIDVSKASSFATPFTSLNHTFDNTFCFDHSVSGFKKAQSVLFNLEVASGSKPDVVLETTGNYSKPLVTTFYNLGYNVVVLNPLQTSHIKSKSIRKIKTDPIDTLRIAKVYYTNDCSYYSPNSSALEELKTFSRQWVSLNHTYSELQLKYLSLLELVFPNFKKVFTKTCCPTALKLINDFPDPKLILMAPINHLLSILKESKHSDSWCRAKLDDLLNYSRECLAQDATSLCLKTYIRLLLDFQEGLHQARDHMVSYAQTLPEYHLLISIPGVGELTAITILSEIGDIKKFTNDKQLTAFAGLDASIFQSGSYNSSRNKISKRGTPYLRQALYQATCAAVSNRPKGRINPILAEYYLKKVS

SEQ ID NO: 136322 - protein, 337 aa, unidentified
MISLRSVSICIVDDDGAIQYEGKAASDVSDIVNCLKRFDPSIDSVGFEAGALTQYLAYGLQEAGYEVICLEARQVSAALAAMRNKTDKNDARGIAQILRTGWYSRVHVKSMESHLIRALLSSRKTVLKKCVDLENEIRGLVRLLGIKLPSPLKHGAFDTEVRQAIDANTTLVHSLIPLLDARLALYRTYLQLDNQAKALVRDDPICQRLMTVPGVGAITALTFKAGVDDPTRFRRSRTVAAHFGLTPRRFQSGETDNLGRISKAGDPDVRAALYVAAHALIVRSTAWSSLRAWGVQLAKTKGHRRAVVAVARKLAVVLHKMWVDGNDFRCGPAQPAS

SEQ ID NO: 136323 - protein, 366 aa, unidentified
MKKNSTVATRRKQIFREKRLTIGMDLGDKFTYYCVLDEAGEVMVEQKLPTTQPAMKQAFGRIPRSRVALETGAHSPWVSRQLTQLGHEVIVAHARNVRLIGESSRKDDRLDARMLARLARLDPGLLSPVQHRSAEAQVHLTVIRARAALVGARTALVNAARGLAKSYGERLRKCGTQQVNQDLAAGLSAELKAALEPLLAEVESLNQRIAEYDRRIEQMAKEVHPEVSLLKQVKGVGTLIALTYVLTVGDPHRFRRSRDVGCYLGLRPGRRNSGHSQPQLHISKEGDGYLRTLMVQGAHYILGPFGQDSDLRRWGLKLCERGGSNAKKRAIIAVARKLSVLLHKLWVSGEVYEPLRNHSAVASAVA

SEQ ID NO: 136324 - protein, 317 aa, unidentified
MQEPVLCIGVDVSKAELVIATDPERRPSSIANTEASILRWLREIPSHALIAMESTGRYHGLLAQLACEAGFKVFVLNARDVFFYARALGTRAKTDGVDAGVIARYLQEHHAHLHPWKPSTPLQQRLHELLTRRAQVVTHQCALRQVFVGINTQGVETKKLQEAFEILLVSIDEQVQQLIASDEQMAQGCKRLQTITGIGAQSSALLATLLSRFDFANADALVAYSGLDPRPNDSGTKRGRRRLSKKGPPLLRRQIYLAGFAASHSKALGPLYRAIRDKGFSSTEAMVILGRKLLRVAFAIWKGTEVFDPTKLMPKSA

SEQ ID NO: 136325 - protein, 369 aa, unidentified
MMIIGCDFHPRFQQIAFIDQETGECGERRLSHPEEAERFYRSLAGRQVRIGAEATGNFRWFRQLMEELGHEFLLGDPSAIRAASPRRQKTDKRDARHILNMLVEDRFPAVWQPPVENEDMRQLLLHRCRMVRMRTRINNQLDAMAKNEGLLSKRVWCAMRRKQIEALPLSGWNVERRRDLLALLEELNKRIERLDEAVLKAAEENPEARCLMTHPGVGPVVSLFYVLTIGDWQRFPRGKQVASYLPPQRRRPVAGDRGLGLIPAEESSSDKRRLGHISKQGNTLLRWLLVEAASKAQRYDASWHRQYVRLSMNKHHGVAKVAIAHKLAVRLYWMLRSGQNYKQVMERGSSPQRRRPVAGDPGSHAGQSV

SEQ ID NO: 136326 - protein, 338 aa, unidentified
MAMYCGIDLHSRDCWLAILDDELKVVREAKVGNDLEAILEVLEPYREDLGGIAVESTFNWYWLVDGLEAAGYQMHLVNTWAVKQWEGLKYSDDRHDARWLAHLLTLGILPEGYIYPKQERSVRDLLRRRAFLVRKRTSFLLAMRGAFECRTGMRTTSNEVKQWTAEDVESYLDDPAAALGITCLLEPMKALDGQIRIIEKEALGRARLRNEFAPLLSVWGIGKVLGLTVMYEVGEISRFKKVGNFASYCRLVKTARLSAGKRKGSGNARNGNPYLSWSFSEAAHFAVRYHPRAKQYFQRKMSKTNGIVAIRALAHKLARASYYVMKDQVDFEPEKVFG

SEQ ID NO: 136327 - protein, 379 aa, unidentified
MTSTEVAAEARETVYAAIELSKKTWVLGIAFPDRDRPSIHRVSGGNVAELVSRLRVAARNERRILVCYEAGYDGFWLARVLAKIGIECRVLDPASIQVNRRARRVKTDRIDVLALLRALIAIDRGERHVCAIVRIPSVEEEDARRSHRERQRLIRERTGHINRIKGLLFAQGIRDIKPNLRRTRIDFAALETAEGRPLPDRLRRELEREYARLALIETQLREVEKERDMADAQDPTVERKRQMLVALQGVGGTSAAILAREVFARPFASRRQLGSYLGLTPSAYDSGSVTRCQGISKAGNSWARRILIEVAWLWQKHQPVSPLSHWYTQKTSGQSSRIRRIMLIALARKLAITLWRYVETGLVPEGVVIAEPEPRSAPA

SEQ ID NO: 136328 - protein, 463 aa, unidentified
MRKKVQRKNSGRTNKPKVDWKALDIVHPNAAGIDIGGSEHWVAINPEVDQQPVRCFDCFTADLQQMADWLIERGVRSVAMQSTGVYWIPVFEILQQGGLEVYLVNARHTKNLPGRKSAIAECQWLLKLHTFGLLNNSFQPSDEVRRARTLWRHRGGIVAQASSAIQRMQKALTEMNIQLSNVLSDLSGVSGMRIVRAILDGQRESRVLAALADPQVKASKEVIAKSLEGNWRQELLFVLGQEVEMYRMYQERIAACDLELQQHLRVRASKVDLQAQPLGPRPKGKRARGNAPKFDLRTELYRISGVDWTQVDGIDVPVAQSVIAEVGVDLDAFPREGNFASWLGLCPTNDSSGGKVLNRKTPKVVNRAKVAFRQAASSLIRSQSYLGAQYRRLRTRLGAPKAITAMARKLACLFYRLLKQGQQYVDKGTEYYEERYREQQVRFVIRRAKQLGIEVVGPAPTNA

SEQ ID NO: 136329 - protein, 367 aa, unidentified
MKKVSTRAAAQSRNISQQKLSIGLDLGDRNSWYCVVDEAGQIRLEQRVRTNAKALREVFGAMPRSRIALEIGTHSPWISRLLSELGHEVIVANARKVRLIGESRKKDDRLDAQTLARLARIDPQLLYPVKHRSVQAQADLMMIRARASLVRARTGLVNTARGLAKSYGERLRGCNVRNMNPEKAESLSPELQAALEPLLNTIEALSERIVEYNERIENLAQQSYPQVALLKQIKGVGTLIALTFLLTLEDPHRFRKSRDVGCYLGLQPGRRKSGQSEPQLHISKEGDPYLRTLLVQGAQHILGPFGIDCDLRRWGLKLAERGGKSGKKRAIIATARKLAVLLHHLWVSGEVYEPLHNSRRKTVAAAA

SEQ ID NO: 136330 - protein, 355 aa, unidentified
MHAITSDAVVIGVDTHKDVHVAVAINGLGARLATASFPVTSAGYRQVAAWAAEHGVVHAFGIEGTGSYGAGLTRALTAMGLRVIEVGRVNRQLRRRHGKTDTVDAESAARAVLAGEAAHEPKLGDGTVEMIRHLKIARDTALKARTQAMVTLKTLLVNAPQELRERFIGITGKMTLIRAIAALRPGAPVSTTASAKLALRALANRWLAQDAEIRGHDAVLEQLVRARAPALMEVPGVSTGTIAEMLVVLGDNPQRIRSEAAFAKLCGVCPVPASSGKTSRHRLNRGGNRRANAALYRVAVVRMRYHRPTREYIQRRTSEGKSPREIRRCLKRYIAREIYRHLCSGAAPVRDAKTA

SEQ ID NO: 136331 - protein, 411 aa, unidentified
MEVVYEHCCGLDIHKKTVVACVVVSGSGKQPHKEIRTFNTMTADLLELADWLTAQRVTHVALESTGVYWKPAWNVLESSFSLLLVNARHIKQVPGRKTDVKDCEWIADLLRHGLLRASFVPDRPQRELRELTRYRTTLVRERSAERSRIQKTLEGAGIKLGDVASDVLGASGRQMLEALVRGVTDASLVADMAKGSLRGKRPQLERALTGEFGAHQRFLVGQQLAHLDGLDVLIDQLSQEIGERLRPVQDKIERLDAITGVGLRTAQVFLAEIGTDVKRFPTAAHLASWAAMCPGNNESAGKRKSGRTGKGNQWLRTALVEAAHAVSHTKDTYLYSQFHHVAARRGKKRALVAVGHSILRIIWHLLEHDCEYVDLGSRYLEERDRQQIQRRLVRRLEDFGYKVKLEPASAA

SEQ ID NO: 136332 - protein, 367 aa, unidentified
MIVIGADTHKSTHTLAAVDAATGRVVATKTISAGKEGMLAAWRWAHAFDGERVWAIEDCRHVSGRLERCLIGQGERLVRVPPKLMGQSRRGERRPGKSDAIDAVAVARAALREGVDALPSAFLDEAAMEIRLLADHREDLVAERTRMQNRLRWHLVELDAQFEATLPARSLDSQRWSGRIARRLARMPQTARVRVARDELRRIRELTRAERALERELTDAIRAVRPDVLAEPGCGPLTAATLIGRTAGAERFPSDGHFARQAGVAPIPASSGRRDRVRLNRGGDRQLNCALHRIAVTRARTCPTTRAYLQRKLTEGKTKPEAYRCLKRHLARQFWRLLSRHRQSTPNTPTRRPAIRVHAPIPLACLT

SEQ ID NO: 136333 - protein, 373 aa, unidentified
MPRYSTAFGMDVHLRSTTVCALDAETGETVTRRFRGNPWGEVAEWMSGFPGPSLAAYESGYLGFAPQRELSGLGVDCVVAAVSKVPRSAADFSSKNDRNDAARMAKAILSHDISPVWVPSPEIEGLRDLAGAHDAATARLAAAKQRLLAFLARRGYAYGGTTPAGNPRKYWTYDFLRWLDKVRPADDGGIRALAALRSEVEAASETRDDLLAEYRAAVAAGPLSAEVEALQSIKGCGFALAAAFASEVGDFSRFRSGRQVTSYFGLAPKQRSSADSVRLGGISGAGNALVRRLAVEGSWSYVQASHQPKLMPKGSGVPLEVRMHGRKGSERLLRRREEMLARGMPQAKANAATAAELVRWLWALGAMCREATE

SEQ ID NO: 136334 - protein, 317 aa, unidentified
MEQCDVSTKIAGIDVGKYWLDAAIDGQSTPLRVVNDAAGIKTLSSWLKSHGVGRVGMEASGPYDRRVRADLQAVGLEVVLHQPMEVKLFGRIRRQRAKNDRLDARLIAAATAGIERQPLKHDPRLAELAERLTVYEHVADTIAGLKSLLESVGLEDLHRAVTGQIEQLTAFKSQLAEAAMATIKAQSDLRHRLGLLMSLPGFGPIVATSMLVRMPELGDMQHGQPACLIGVAPHDRDSGTHAGTRFIAGGRSRPRRMLYIAALAAKRCDPDLKAFAQRLEANGKPKKLVLVALMRKLIEAANIVLKRNAPWVIKQPN

SEQ ID NO: 136335 - protein, 358 aa, unidentified
MGIIQAQTVIGMDIGRHYSWCEARETASGALLKEARVPNTPDEFHAFVEELPRPIRLVMEATGNWQYLYECWADLAEEIQMAHPLKTKAIASARIKTDRIDKRTLAHLGMADLVPQAYIPPREVRDLREVLRHRAFLVALQTRIKNRIHSYLWKLGLEHDGTDLFGKAGLAWLQSVELREPFQGLLRQDLTVLETLQQEIKQATQTIERLAQEDPRVALLLPIRGIGKYSALLIVAEIGDIARFPGPKQLVAFAGLCPSTFQSGKVSYHGRLTKQGSKWLRWILVEAAQRYAKVPGRLGTLYRRLERRKGSKTARTALAREMLVAIYHCLTKGVAFQEHPPKRVNTIEPHHAPLISGR

SEQ ID NO: 136336 - protein, 339 aa, unidentified
MTVVTVGIDLAKNVFAVHGVNAAGKAILVKPLVRRAKLLELIATLPACLIEMEACSGAHYWAREFQKMGHTARIIAPQLVSPYRMGGRHGKNDAADAAAICEAVARPNNMRFVPVKSIEQLGQLFVHRAHQGYVSERTTLINRIRGLLSELGIVLPQAFKAFLSGVAQVLEDFPGYCNQVIGDLLNELFHIEEKIKNSEKLIQQLARDNSAAQLLMQFRGVGPMTATAIVASIGNGHDFRNGRQFSAWLGLTPRQQSSGGKARLGRITKAGDSYLRTLLVLGAKSVLLGAAKNDDPVSKWALQLKERRGYGRALVAIAAKNARMCWAMLHLKDEFRFPV

SEQ ID NO: 136337 - protein, 345 aa, unidentified
MTGTVYCGVDFHARMQTIAFCSLGDGEVQIAELDHRRDDIRGFYSQFTGEVIVGLETGGYSSWFEAMVEELGHTVWLGHAAEIRRRGNWRQKNDRRDAELILDIMLRGDFPRIHRHNRESIEVVRMLRHRQRLVKMRTMMTNSMQAVAISCGASQKTPMKNLARQQQLKSARMSVAQKHQTDDLFLLLAPLNERISGINAWLKQQANNDERVRLLMTHPGVGLLTGLGVVHTLEPFERFTKQRSVVAYVGLEPMERSSAERKRYIGISKAGSRLLRHCLGEAAQTAVRYDSELKEFYHRIAKRRGKAIATVAVARKLLIRCWIMLRNNIDYSEFRRRGVEARLAR

SEQ ID NO: 136338 - protein, 422 aa, unidentified
MLTTTQDNEEIIERVAALDIGKAEVMCCVRVPDEDHPGKRLQEVQAYPTMTRSVLGLADHLASLGVTRVVMEATADYWKPVFYLLEAAGFETWLVNAKDVKHLPGRPKTDKLDAVWLCKVAERQMLRPSFVPPPPIRKLRDLTRYRADLVAARTAEKQRAEKLLEDACIKVSAVIADIFGVSGRDMLTALAAGERNPKVLAQLARRSMRAKITVLEEAFTGHFTDHHAFLLRTMLGRVDAISADIAALDDRIAEQAAPFADAVGRLDEIPGISLASAYVILAEIGTDMTRFPTAGHLASWARLAPGIKESAGKKKGKGSTGHGNAYLAAILGNAAAGASKTDTFLGDKYRRIARRRGSKRAIVALGRSILVIAWHLLSDPDAHFYDLGPGYYAARIDPERRKRSHIRQLEALGYTVTLEPAA

SEQ ID NO: 136339 - protein, 457 aa, unidentified
MATRHKKVPSKRQPRSLSTVQPNAAGIDLGSREHWVAGPPLPDGSSNVKRFGTTTPELVRLSEWLEQQQIATVAMESTGVYWIPLFEILDSRGFDVHLVNARQISHVPGRKTDMIDCQWLQLLHACGLLRGSFRPGDDICRLRALIRERNTVVDQRSDWIRRIQKSLDQMNVCVHHAVSDISGVTGMAIIRAIVGGERDPRTLARLRDRRCQKSEDQIAEELTGNWRPEHLFNLGQALKVYDQLCAVIADYDTEILNSIDSVQPPESKGSSAPPPASKAKACKFAQRGQEPMRQALYRMSGFDLTTIDGIGVDTAAAVISELGPDLSAFADEGHFVSYLRLAPNISISAGKKVQGKFKAVTSTRVCNALRMAATTLRNSKTALGAYYRRISWRKGASVAVFATARKLAQIVYRLMRRGQAYVDTGSDVYEAHYTQRRLVSYARALKEMGYKIEPMAA

SEQ ID NO: 136340 - protein, 370 aa, unidentified
MLDTTTFVGLDVHARSIKAVSLDVMTGEVRCATFGYDAGAVAAWVRSVDPRARCVYESGVTGFDLQKRLSGLGVDCVVGAVSKMIKPSADRRRKNDRNDAEFLARMLSVGNVVEVWVPDDECEAARDLTRALEDARDDLSRSKQRLSKFLLRHGFVFDERTPTGRRKGNWTRAHWSWIESIRFAEGADEEVLAYYVDAVRRAAEEKARLERLVEGEARKPRWRRRVDSLRCLKGVDTASAADLVFEAGEFSRFRNARSFAAWVGLTPSEHSSGESDRRGAITKAGNKHLRKTLVEAAWHYLTCSGRPKDLAKGQAPDRGARRHAAKGVRRLVERREALLARGVHGNKANVATARELACWVWAVGLMAEEA

SEQ ID NO: 136341 - protein, 381 aa, unidentified
MDRCCGLDVHKDSVFACILDSQGEKVFEQRFGTLTSELSKLRDLLIDYNCGRVAMESTSIYWIPVWRTLQSDFSLKLANPYFIKQLPGRKSDVKDAHWVGECLQKELIKGSFVPDEVLQQMRQYTRQYRRLTKSKARLEQQMDNQLQRCNIRFSNYVSNQGNNVSLRKVVNAIIGGERSPTVLGKLVHGRTKNRHGEQVIIDSLEGVINDTDVEMLKQCMEQIDLYEKQQAACLTHLEELADAYYAREISLLSTIPGIQKLSALCILSEIGNDMEVFGKASNLVGWAGLRPRNDESAGKIQSRKILHGNRYLRQTLVEISWCAARSNKSFLGRKYYSLSKRMKSQKALLSITRKILVIIFNVLKSGQPFDSSRNMQASMPD

SEQ ID NO: 136342 - protein, 416 aa, unidentified
MEIEHTHCAGLDVHKKTVVAAIIVPDGQGGLRKEVRTFGTMTADLLGLSDWLLSFGVTHVAMESTGEYWKPIYNILEENFEVLLVNARHIKQVPGRKTDVMDAEWIADLLRHGLLRSSFIPPVGQRELRELTRHRTNFVRERATVVNRIQKTLESANIKLASVASNVMGVSGRAMLEAIVTGTANATEMGGLAKGRLREKREQLDKALEGRVKPHHRFVLAELLCQVDSLDESIARFDAEIEKYCRPFEEAVELLDTIPGVAQRIAEVIVSEIGSDMSRFPTADHLAAWAGVAPGNNESAGKRYSGTTRHGNRALTAALVQAAHAAAHSRNTYLSAQYHRLAGRRGKKRAIVAVAHSILVISYHIIQRKEPYRDLGGDYFDQRRPEATAKRLLKRLQQLGYDTSRIEQPLALPTAA

SEQ ID NO: 136343 - protein, 441 aa, unidentified
MAKPKNKLSVVNYNTAGIDIGSRKIFIGIAGKPAQSFGTFTDDFLQAVTYLKENNISSVAMEATGVYWVSLYDILDQSGFDVILVKSSQAKAIPGRKTDVADCQWIQQLHSYGLLRSSFIPPQQIRVLRSFVRQRRVNLQLASDHIRRAHKALELMNIKLQNVITQINGKSGLAILQAIINGNHNPEELALLCDNSILKKKKDAVIKSLKGNFSQENIFLLKQAVDAYLFYMQQVDDCDKQIEKHLSLLTDEIPAPEKIKKPKPIRHHKPNIDELHLKLMKMTGGKDASQITGLTDSTLLQIISEVGTDLSRFPTEKHFTSWLGLAPNSHQSGLTNKKKRFKRHTSAGQVFRLAAQAIAQSKHLALTSFYHRIKARKGSLTAIKATARKIAVIFYNVMTKGIEFAEEGIKMYEQKVKERQLKYLHKQAKRFGLTLSPQLQV

SEQ ID NO: 136344 - protein, 318 aa, unidentified
MPEAVFIGINVSRDTLEIGSSTARSTWQYANDSDGIEAMTAELAKLAPALVVLEATGGYEFEAACALQAAGLSVAVVNPRQARDFARAMGTLAKTDSLDARMLAAFARVLHQHPQRERFIKQLPDAQLQRLQALVLRRRQLVTMLTAERARLTMAHASARPSIEQTIKFLKSQIDDVEHDCADHVRTHHAELAQALSSVKGIGPATVATLLAELPELGSLCRRRIAALVGVAPLNRDSGQMRGQRTIWGGRAEVRRALYMATLVAVRHNMVFKSFYARLTALGKPKKVALVAAMRKLLTILNSMAKSGSHWDDSLHLA

SEQ ID NO: 136345 - protein, 351 aa, unidentified
MTTVTPARPLVTGGVDTHRDEHVAAGLDQNGGLLGTAAFPTTAAGYAALLAWLLGLGELVAVGVEGTGSYGAALARHLTYHGVKVLEVSRPNRQVRRRYGKSDVVDAIAAGRAVLSAEATATPKTHDGPVEALRALKSLPRSANKARTQALKQLRAVLVTAPDEVRARLRDLPRGELLATCAAFRIRADDDSVAAITRLTLRELAARVAFLDAQLKSTVARLRRITTELAPDLVAKHGVGPNTASTLLLTAGDNPDRLHSERAFASLVGSSPVAANSGQIQNRYRLNRGGDRQANAALWRIAMVRLSCDQPTRDYVAKRQAEGKTKSEAIRCLKRYIAREVYNALPISAVT

SEQ ID NO: 136346 - protein, 386 aa, unidentified
MQTLNNLSRSLIALEPASTLIAVIEMSLSSWLVAGIVPGIERQPLKKLAVDESALLRLLHRWREEAEKVGCRIERIVVAFEAGRDGFWLARWLKARSIEAHVIHAASVAVSREHRRAKTDRLDAELLKRAFLGWLRGERNHCKVVAIPTLKDEDAKRPSRERESLVGEQSRIVNRMKAALIRLGIRGFNPKLKRAAGRLDSLRTPEGEPIPPNTLAELRRDMERRRLISNQIRQIEEARLKHFEQAPNDGPHAMVRLLARVIGVGIETADMLVHEVLSRNMHDRRAIARYAGLTGSPDESGRKRREKGLARSGNGRVRRGMVQLAWRFLTYQKESALAQWYRARTENARGARKPMIVALARKLLIALWRFVWQGVVPDGVVLRPAQ

SEQ ID NO: 136347 - protein, 365 aa, unidentified
MKNTIVHHEGAASLEVVATKLKPKAAVIKIGLDVHIRLYVAVAQYDHLLPKAARRLRPNEFVPWVEALLGRGHSVHVVYEACGFGFTLYRQLIALGAHCYVIAPRKLDDECTRVKTDPRDATTLCQRLSRYLEGNTRELAVIRVPSEAEEQARYVSRQREQLVHHRQKLEAQGRSLLINHALPAPAHWWKEQTWNRLGKHLPEWMRLRLQVARPALLSLQQQIDALTSELETAAPLNIPRGLGKLTTVVLTREICDWKRFNNRRAISSYTGLCPGERSSGSKRIPGSVTKRGNPRVRAALVECAWRMVRFQPQYPPVQKRLAVLAKGSRALGAVRKKAIVAVARRLAVDLWRIHTSRKTAAQLGL

SEQ ID NO: 136348 - protein, 356 aa, unidentified
MRGRNQGERVAVRGKEVFVGIDVHKESWQVTVRTEGEEVFHGRIPSQYHALQKILDRFRGSKIKVAYEAGPCGFGLHDQLKEDGVEGIVVPPSLIPIESGNKVKTDKRDSRKLARLLEGNLLKRVYVLTQEDRADRELLRTRRQIVEHRNDVARQIKSKLLFYGIRSPFSAKAGWSKKFIRWIKDLNLEWGSVKVSLQSLTELYEYLTRQIVGLNRKVGELSRSDKYRGRVKLLRSVPGIGILIGMEILVEIQDMARFQRADELASYIGLTPSEFSTGQYVRQGRITRCGNKRVRTCLVESSWHLITKDPWMRRKYDRLKQWKGGKRAIIAIARNLIIRIRRILLNQEPYVIGAVA

SEQ ID NO: 136349 - protein, 370 aa, unidentified
MKKNNTVKQSPKRAAARSKGPITIGMDLGDKISRYCVLGGDGEVQWEGSVGTNRKAMAQKFSGTRRCRIAMEVGTHSPWLSRLLSGLGFEVIVANARQVQLISASSRKNDRMDAHMLARLARVDPQLLRPIRHRSEQAQADLMTIRMRAVLVEARTGLVNAARGFSKALGERLPSCDTDALGVEKLAALPAGLRARLQPLMEEIESLTEQIKKLEANIEQIARIEYPETELLRQVSGVGTLIALTFVLTVEDRERFQKSRDVGCYVGLRPRQSESGQSQPQLRITKEGDRYLRTLLVQGAHCILSRRGPDTDLKRWGLKLAARGGKNGKKRAIVAVARKLAVLLHRLWVCGEVYEPLRNSRIAATAKQAA

SEQ ID NO: 136350 - protein, 416 aa, unidentified
MFAVGVDVANGRSMVAVLDGMRNIVAKPFEVVHTAQGFATLVEKLRQLDGEVRIVMEHTGRYYESFAMRMHRAGFFVSAVNPLLIKNYQGSISVRKVKTDKADAQKIAQFALDKWTILPHYTPMDTIRYNLKTLHRQFQLASKTKTALSNNLIALLEQSYPGANRYFDSPVRADGRQKWVDFVDTFWHVDCVARSSEHAFVERYRKWCKRHGYIFSEQKAIQLHADARQKFPLVPRSDTCKLLVREAVSQLNAVSRTVETYRAEMDRLASQLPEYETVMGMTGVGKSMGPQLMAEIGDLRCFAHQKSLVGFAGTDPIKEESGDKVSQSAPSSKRGSPYLRKTLFVIMTILLQLQPQEDPVYQFLDKKRSEGKPYYVYMTAGGTKFLRVYYGKVRDCLKAKGLWEVPASASQEVNPG

SEQ ID NO: 136351 - protein, 349 aa, unidentified
MNIAFDSHKRYTFCSIANVDGHVVREQRIEHERGALVSFLSSYPSDSRVAVEAIGNWYWIVDEIEQAGMIPQLVHARKAKVMVGCINKTDRLDARGLNRLQQAGTLPTVWIPPGEIRDRRDLPRTRMYLVNQRTCLKNRVYSTLSKYALEIRGVSDIFGRRSRTLLRQRIASLPPQTQYAADCQLQQIDALGKVIRGFDARMREEFDETEEVKLLRSMPGIGFIFGIVVSTEVGDVERFPGAAHLASYAGTTPRVHASGGRVRYGRLRSDVNRYLKWAFCEAANTVCINQKLWAQRHVAQLYTRIRHRKGHATAIGAVARHLAEATYWILTKKEEYRDPSLKQILPTEA

SEQ ID NO: 136352 - protein, 332 aa, unidentified
MSLPILGIDVSKESLDVCLIIENQSKDAVFDNNHTGHKRLISWLDQHSDQVHACMEATGMYAFPVAEVLYNTHHRVSLVNPARIKAYSTSLLTRNKTDRLDAAIIADFCRTQSPPEWHPPRQELRDLQALVRLLEDLTATRQLRSIVSKAVSAPRMWLMCLKILLILSITRSKGLSNSLGPLLIEMMISPAKSNYFSVFLGLVKKQLTRSLGNSFSWIPLKNARQVAAYAGLNPRQRLSGKFKGHSSISKTGNAHLRKAMYFPAIVAKGCNPVIRDFCARMKDNGLVPMEVIVAAMRKLLHMAFGVLKNDAPFDPLYEMRLQVSLHLPVSST

SEQ ID NO: 136353 - protein, 367 aa, unidentified
MFLGIDVSKNTLDVALLGANAKPQHNAKPQHKVFANNATGHTQLLAWLQAQQAQQAQQAQQAQQAQQAQQAQQAQQAQQAQQAQQAQQAQGVASVHACLEATGTWAEEVALALHQAGHRVSVVNPAQIHAFGRSGLKRTKTDKADALLIARFCQMHQPPAWTPLSPQVQQLQGLVRRLEHLEEMLTMENNRLTSGGICGPVKESLDEHISYLEQQIEKTRRHIKDLIDQNPDLKSQAKLLESIPGIGAATAALLLAELGDIAQFRSARQVAAFAGLVPRLRESGTSMRGRSHLSKVGSSRLRKSLYFPAITALRFNPLIKAFGLRLSAQGKSKMLIIGAAMRKLLHLAYGVLKSKRPFDPAFGSPTA

SEQ ID NO: 136354 - protein, 397 aa, unidentified
MYIVGIDIAKRKHEAAVIDGDGTVIIKPFSFTNNCSGYNRLLAMLAKAKLPLDEVSFAMEATGHYWLALFTRLQKEGFRVQVINPVQTNSIRSFYIRQAKTDPRDALLIAEVIRFGHFSESTLHPENIYELRELCRGRHAIVSMQADVKRKVVALLDQVFPEYETAFTNMFSDTSMAILQTCPTPKELSEMPLEELCHLIEVSSHKRFRMAKAQELQELARNSFGFAMAGDVFSTMIRLYAKHLDFLKQQVREMDRKIAEIMETLDTPITTITGIGLTLGAYILSEIGDISRFSSAAKLAAYAGIDPTMRQSGEYNGVRNRMSKRGSPYLRHAIWLAASSAVLHDPALKFYFQKKRDEGKPYMASVGHACRKMVSIIYAVMRDNKAYTPCIPNEISA

SEQ ID NO: 136355 - protein, 344 aa, unidentified
MSKHSVPGGDFAGLMERFAQLQEKARLRTGQSFRIIVVQEAGLDGFWIHRALQNEGIESHVVDAASIATSRRRRRAKTDKIDGETLVRALLAYKRGEPRVCAMVKAPTPGEEDRRQLCRERKALTAERVRHVNRIKGLLFSQGISGYQPLRRDRRQRLEELQTGDGRAFPQHLKALVNRELDRLELLLKQIKTVEAARDALLAVGQTGKPAPAAMLLDIRGIGPEFAAILWSEGLFRHFENRRQIAAYAGLAPTPWQSGAVDREQGVSKAGNPRLRTTLIQLAWLWLRNQPRSALSVWFHERVSRNGGRLRKTTIVALARKLLVALWKYVTAGVVIEGVTMKVA

SEQ ID NO: 136356 - protein, 377 aa, unidentified
MKNVRFVGLDVHAESIAVAVAEADGEVRSLGVIPNRAEAIGRLIRRLGKPEQLRVCYEAGPTGYVLYWQLSELGVKCEVVAPTLVPVRAGDRVKTDRRDAQKLARSYRAGDLTAVWVPDAAHEALRDLVRARLAAKRDQLRARHRLSKFLLRHGRRAPEGVNAWTDKHLQWIRRQVHFEHLAQQITLEDYLHEVDHAAERIARLERSIDAAIQQLPVKMFAVVQALQSLRGIAQLSAVSIMAELGELSRFEHPRQLMGYSGAVSCEHSSGERIRRGAISKAGNAHLRRIAIEAAWAYRHRPALGKTLAARQRHSSAAVTALAWKAQQRLHQRYAHLQRRGKNRQQTITAVGRELLGFIWAIGVHVEREQSAPLPQAA

SEQ ID NO: 136357 - protein, 310 aa, unidentified
MENIIVGIDVSKDRLDVAVRPGGEVFAVERNAAGLELLVARLKELSLHIVALEATGGFETVVAAALAAAGLPVVIVNPAQIRDFAKAIGQRAKTDPIDAAVIAHFTEATKPEPRPLPDQATRLLADLVARRRQIIEMIVAERQREKRIAIPRLKKSITRLLKALEKELATVDTDIDDAVRGSPAWREKEDLLASVPGVGPAIARTLIAELPELGQLGRKEIAALAGLAPFTRQSGQWRGRSFIGGGRTTVRSAVFMGAMVGKKHNPVLKAFFDRLIAAGKPKMVALIAVARKLLTILNAILRDNRPWQIA

SEQ ID NO: 136358 - protein, 313 aa, unidentified
MSEPIYVGIDVGKDTLHVAACPTPIHACLPNTAEGHRQLCRMLQKHTVALVVMEATGGYERPVAAELLAEALPVVVINPRQVRDFARGMGQRAKTDAIDAQVLASFAQIVKPAPKPQFKAKTAELAELVKRRRQLNDLRTQENNRILMIHHHKVKKSIAKMIKTLDFQIAEIEQLIRDYIDADDDFKTKDGIIQSAPGVGPQTAAMLLSHLPELGQLNRQEIASMAGLAPWDHASGKSAGKAHIWGGRKEVRNVLYMAALAARRCNPVIRAMAERLTHAGKPFKVVMTACMRKLLIILNTMIRNQTSWTPKLN

SEQ ID NO: 136359 - protein, 342 aa, unidentified
MTFVGCDLHTRMQQVAVLDTGTGEVSERQLPHEGMAVEEFYAALPRPVTVGIESTGYAVWFHALMQRLGHTLLVGDAAKIRAMVVRKTKTDRRDALHVLDLLRHDRFPTIWVPDPATRDLRALLTHRMRLVRIRTMVKNGLHAIALNSRLACGSKLLRQAGLAQLHALALPPHTARRRDQSLELLAGLTTQIRELDDAITTAALGHPDAPRLITHPGVGALTALTTIVVLGPVSRFHDSKHVVSYVGLAPALHASANKYHLGRITKQGSPLLRFVLGQAAAHAARMDPDLQRTYGALVHRRGRPKAKVAVARKLLVRLFIMLRDQIDYDEFRRRGRPAPASA

SEQ ID NO: 136360 - protein, 357 aa, unidentified
MDGFKSLLQTIQDCSQKSDKIKVGLEATGHYSYNILGFLLDNDLPVYVMNPLHTNLYRKSLSLRKTKTDRVDAKTIATMLLSDVDLKSYTDTAYHNEELKSLTRYRFDKVQERAKLKQSVSRLVTILFPELEQLVSSIHGTSIYALLSEYPGAKQISEAHLTRLANILVKTSRGHYRKDKATHIRDAARTSIGSVMPAKSLELKHTIKLIQELTSEINEIEDAIRKIMDELKPPILSIPGMGFHSAAMILAEVGDFSNFNSPDKVLAYAGCSPSTYQSGKLTNCYAHMEKRGSRYLRYALYTATKYVCYWNPVFTEYLTKKQAEGKHYNVALSHATKKLVRLIYALQKSGKAYLAVT

SEQ ID NO: 136361 - protein, 411 aa, unidentified
MIASSTTTQNGTFVAIDVAKLVHEVLVEPPTGRRQRWRIRNCQPDYEALRDRLRAVETPVLIGFEATGNYHRPLAYYLGQCGFELRLISSLAVARTRDALYNSWDKNDPKDTQVLLHLLKTGVSQRYHDPLVHRMNDLQELAQTHSQISLRKVQVQHSIMTHYLPLYFPEAERYYTNSRAQWFTQLLHRFPCPAAITRYSQDVFEHEAWTVVGRKVNKRGFLADLYATASQSIGLAVAEDSEAIQMFRVMLAEHQHLCATRAAIEHQADQALQSHPDYHRLRTLPGVGPILALTILAEAGDLRRFPHHRQFLKFCGFDLSTQQSGQFRGMSRLSKHGNARLRYAFWMAANGAVRMRQNTFREKYARYIKADPQNPDRKRKALCAVAACVFRPKPATDSDASRPPIPMERGH

SEQ ID NO: 136362 - protein, 408 aa, unidentified
MNAVGIDVSKGKSMVAALRPMGEVALLPQEFLHTGVGLEQMAYAILALGEDTRVVMEATGRYHEPVAAALHEYGIYVCVLNPLYIKQSGGGSIRKVKSDKADAMKIAKYGLDNWVDLREYTPMDTVRQQLKLCSRQYNLYMKTVVSLQNNLISLTDKTFPGVNELFSSPERADGHQKWVDFVMTFWHCDCICRVSEKAFTERYQKWCKRKGYHCSVEKALDIYASSCGHFTTLPKNDNTKLLIVTAAQQLLAGKTTLAALRAEMTRLASQLPEYETVRAMYGVGETTAAQLMAEIGDVRRFPHRSSIVGFAGIDPAVNQSGKHETQSTSTTKRGSPHLRKTLYQIVCTYLRKAPADEPVYQFLDKKRAEGKPYFVYMTAAQNKFLRIYYARVKECLEAFDAQQDIAQS

SEQ ID NO: 136363 - protein, 377 aa, unidentified
MSNVRFIGLDVHAETIAVAVAEPDGEVRTLGVIPNHPASIQKLVKKLGPPAQLRVCYEAGPTGYVVYWQLTALGVRCEVVAPTLVPVKPGDRVKTDRRDALKLARSYRAGDLTPVWVPDATHEALRDLVRAREAAKKDQLRARHRLGKFLLRHGRRPPTVMKAWTQAHLTWVKRAVHFEHAAQEATLLDYVHEVDHVIGRLERLERAIDEAVKTAPEGMRTVVAALQALRGIAQVSAVTIVAEVGAFSRFATPRQLMGYSGAVASEDSSGPRTRRGAITKTGNAHLRRIIIEAAWAYRHRPSVGATLRKRQAALDAEVIAIAWKAQHRLHARYRNLTARGKSKQSAVTAVGRELLGFIWAIGMAVAPERHDARPVAA

SEQ ID NO: 136364 - protein, 346 aa, unidentified
MPIVGGLDIHRKQITFDYLDTGTGQVQRGQVSPADREHLRAWLARFHGRDDVAFATEGCTGWRYVAEELAAAGVAAHLAEPADTAFARGRKRHAKTDKTDCRHLRMLLAEGRLPECWIPPARILECRALLELYHDLRAEHTAWVQRIHAVLFHQGAPALGEGTLRTEQGVAALRAVTAEWLSPAGQLQVATALEILEALEARLHMLRHQLTDAARHLTGAKVLAARLYGVGPVTALAMTCWLGGKDRFSSSRKAVRFAGLDVTVYSSDRKGPPGRLSRQGPPVLRWAVYEAGKTHARSSAPDYRYYAQVKDRCNGKRAALSEARKILRQACHILAELGDDALAPAA

SEQ ID NO: 136365 - protein, 383 aa, unidentified
MRIIHYIGMDVHTTNYTLCDLSRRINPISGDVEDRMGCPITIAPDYKLVVKFVDKLRSMNPADDVSFVCGYEAGCLGYSLYRQLTDCGIECVILAPTTMAVSRDSNVKKNDKRDAAVIAKCLAFSTFKSVHILSEQDDQVKEYIRMRDDHKQQLKENKQQIMAFCHRHGMTCEHANWSQKHLKWLKEYSLSPIYRETLDEYLRTYAYLTDKIESLDQRIKEFAQTPEYKSRVDKLVCLVGVQEHTALATIVETGDFSRFPTANHYAAYLGLIPAERSSGNKQGLYSITKAGNAHIRTLLTESANCFSRRKTGQKSASLKARQSRNSREVIAYADKANERLRRRFQHLVFSGKKHNVAKVAVARELACFIWGLMTDHIDLLGVG

SEQ ID NO: 136366 - protein, 414 aa, unidentified
MNKIYDNCCGIDVHKKLLVCCFIQGEKRTIREYGATTEEILALCAWLTEGNCEIVAMESTASFWKPVYNILEASDLKAIIVNASHIKAVPGRKTDVKDAEWIAELLQHGLLQPSYIPDKDQRELRELVQYRRSLVGEQTRELNRLQKMLEGANIKLSGTIKDIRGKSARALINEIIEGNKVSLERLQELRKQKLIANNLKATDEQLVRDLEGVLSPLQKRMLKELLQHLEELSEHIKNLSDEIDNFMKPEEKQAAKAIEDVTGIGKISAQQIVAVLGADVSRFPSAKHLSAWAGLCPGNNESAKKRRNARSRKGNSLLRTSLIVCAHSAVKVKNSYFYAQFKRISSHRGSKKAYVAVAHSMLIAIYMILKNGVVFKDLGANFFNQFNKERKIHSYLKKLEALGWTPETAAVAGA

SEQ ID NO: 136367 - protein, 402 aa, unidentified
MQVDDIDVFIGIDVGKSEHWATALTTAGECLHDRPLPNDEARLREVYEHLGEHGRLLVVVDQPATIGALAVAVAQDMGITVGYLPGLSMRRIADLSPGSAKTDQRDAAVIASAARTMPHTLRSITSSDEDAAALSMLTGFDLDLARQVNQVSNRIRGLYTQIHPALEGVLGPWLEHDSVLEVIATWPTPAALRKAGRARIDAKLKANGCRRHAAWAQAIVEALSKQTVTVAGTDAAGVVLPHLARQLIALHTQRADIAAQVEALVEAHPLYPVLTSMPGIGVRTAAVFLAGTLGKTFTTGAHLASYAGLAPVTRRSGSSIRGEHVSHGGNKRLKQAMFLSAFASLRTDPVSRTYYERKRAQGKRHNQAILALAHRRILTLHAMIRNGTLYNPQPAQPLTTTA

SEQ ID NO: 136368 - protein, 415 aa, unidentified
MERMHRCCCGLDVHKQTVVACLLRTDTAGRRSRELRTFGTMTDDLLTLADWLRAADCTQVAMESTGVYWKPVYNLLEGQCTVLVVNAQHIKAVPGRKTDLKDAEWIADLLQHGLLRGSFIPDRPQRALRDLTRTRTTLSDERIAVINRVQKVLEDANIKLAGVASNVVGVSGRAMLAALLTGTTDPATLAELAVGKLRKKRDVLTRALSGRFGDHHRLLLTTHLAHIDFLDEEIDQLSAAIAERLRPFEEELNRLDTIPGVDRRTAEVLLAEIGADMERFPTAGHLASWAGMCPGNHESAGKRKGGKTRKGSKWLRRALVQAAHGAARTKQEGRTRLAQRYRQLVVRRGKQRAAVAIGHQILVTAYYLLQRQEDYNEVTPAALDERRRTQARLRAVQQLRQLGFEVTLAPAEAAA

SEQ ID NO: 136369 - protein, 356 aa, unidentified
MIAMKYYTSTTEFNCGIDLHARQMYVCVMDRTGKKLVHTNIRNNDFAYFLKLVAPYRHDLTVCAECMFGWYWLADACQAANIHFVLAHALYLKAIHGGKNKNDRIDSEKITHLLRTNLIPPGYVYPAAKRPLRALLRQRLLYVWNRSELLSRIQSHQLAHNRPTTRQTLYNREPWEKHLLASEPNPVRQLALQNDLALIGHYDAQLASLEKELLQLTKQTAGRDFTLLKTTPGIGDYLGLTILHEIGDIARFPSVKDFLSYCRLVKGTVASAGKIKGLRGAKLGNPYLRWAFGEAAIIAKRDALLGPLAQRLEARLANKFKANTVLAIKLARAVYFMLKTKTVFDPERLVAALSHN

SEQ ID NO: 136370 - protein, 366 aa, unidentified
MQDILTCAMGLDVHRDIIVACLVKGAVDAEPEAETRTFSTLIPEMQKLRDWVIESECRNIAMESTGIYWQPIYEMLESCFDGEISILVVNARHMKNVPGRKTDMKDAQWIATLLRAGLLKGSFIPDKAFRELRHLTRYRKSVVHDITAQKNRIDKFLQSSGFRFTVFLSDTFGASGRNIVRHLIEHGSIDREALDKCLKTKTRNRIDEILVALNGSLSEHQRRFLNMVFRHLEDLEAHKHTVEDEITEEVLKHTDALNLLCSIPGIDVTAAAAIIAEIGTDMSSFPDSQHICSWVGLSPGNNESAGKRKSVHINKGNPFRHFLHGFIHTDLKGVIRKVADLRRRKIDNLFKPRLGSFFLRGKQVID

SEQ ID NO: 136371 - protein, 409 aa, unidentified
MKIVHTHCAGLDVHKKQVTVCALVGEATAEPVKHLRTFRTMTESLEKLEEWLNRMGVRQVAMESTGSYWKPIWAVLEGKFELLLVNAAHIQSVPGRKTDVKDAEWIADLHRHGLLRGSFVPPQEIQDLRDLTRYRAQLTGERTAASNRISKILETANIKLGSVASEVMGASGRAMLEGLIAGEQTPEELADLARGQLRTKMPELREALRGHVRPHHREMLGLLLDQWLYLTTQMARVDAALEERMDPFQWAVSLLKTIPGISRLAAWTILAETGVDMEQFPSAGHFASWAGLCPGNNESAGKRLSGTTPDGNRWLERVMCQVAWAASHTRASYYASQFRRLAAKRGTKRATIAVAHSLIETIYHILQRRQPFEDLGGDYFERLHGENYQRYLVRKLEERGYKVILEPAA

SEQ ID NO: 136372 - protein, 343 aa, unidentified
MQTVTTIGLDIAKSVFQVPGVDAEGRVIVRRQLKRRYVLAFFQKLSPCLVGIEACASSHHWSRELKALGHTVRLMPPAYVKPYVKRQKNDAADAEAICEAVMRPTMRFVATKTPEQQSCLMLHRTRHLFIRQQTAVINAIRAHLAEFGIVAPVGRKGVDELLDVVADASDQRLPELARGCLAALGVQLRMLKTQVLEFDRRIMAWHRSNEMSKRLDEVPGVGPALATALVASIADPKAFRSGRDFSAWVGLVPKQNSSGGKDKLGSISKQGDRYLRSLFTAGALAVIRYAKIHGTKHRPWLTALLARRPTKVAAIALANKIARMTWAMMTKGERYREPAALAA

SEQ ID NO: 136373 - protein, 644 aa, unidentified
MTTMTSISQSRPFVVGVDTHARNHVYAILVPTTGALIDTRSFPVTAAGINRAIAWVARRTDADADTLWVIEGAASYGASLAGAVTAHGYTVAEAPRMSAKNRHGIGKTDALDAHRIAATTLALNEDRLRYPRADHGLRQAVRILVTAREAMTKDRTRSVNALNAVVRGNELGIDARKKLTSAQIFEIARWRSRKEELSVQVARREAVRLAKHIIDCDEQIDTNEQRLEELVQASEAAPLLPEKGFGPVSAAKCLTAWSHHGRVRNQAAFASLAGVNPIPASSGNTVRYRLNRGGDRSLNAALHMVAISRMTHDPETLQYVEKRRAEHKTDREIRRCVKRYLARRVFRILNSATGSVGLFGLAEIFLLAEKRFRYKTSEGKLSRVLPTTKDWIDTRWAILRASILGFFIGIVPGGGGTVSSIVSYGVEKRFSKNPERFGKGAIDGLAATETADNASSNSSFIPLLTLGLPPNAVLGLIFGALVMHNITPGPRLMDDNPDIFWGVIASMYIGSIFLLIINLPMIRVFVQILKVPGPILMPIVVAVAVFGVYSVNNSFFDIGLAIVFGIVGYFFKKINIGAGPLILGFVLAPMIESHWRRTLLMSNGSLAILFERPFALALIAIMVAFIGFTLIKNLRARYQQRKIN

SEQ ID NO: 136374 - protein, 329 aa, unidentified
MSNDITYIGVDIAKDKFDICVHSGSSSSLVYETYSNNLDGFFSFLSLIKSKCSLENVRVGFEATSTYMTQLQIYLDKAKIKYILINPKQIHHYIKYKNYESKTDKLDSYYIADYITTLEDKKFNSSHSKVKFEYKTIQAYTNLIIKTQTHIKGLESSILSDDFTNEDMKQDLLDFKSLLKKQKNKYEIEQVKLAKQAMPEYEYIKNDLQGVGDKTLCAVLPLIYDTSTKYTQKQIQSFLGFNVVYKDSGSSVNKKQRMSKSGNSYARRMLYMSAVSSVQTNSFLKDKYNRLIENGKPTKVALVAISSHILRAIVTKLNYYKSLNDDKNR

SEQ ID NO: 136375 - protein, 350 aa, unidentified
MDKIITIGLDIAKQVFQVHGVDAAGGLVLSRQLRRGEVLKFFAKLPGCVVGMEACASAHYWAREIVALGHEVRLMPPTRVKAYGRRGRKNDRADAAACCEAVTRPSMCFVPIKTPDQQAALMLHRARQMLIEQRTRLGNAIRAHLGELGIVARKGAGGLAALLQMLETAQDERVPAAIRPILQPLVEQWRGAAAQIAGLDRQIAAWHASNEASRRLATIPQIGPLIASALLATAGNAARFKNGRQFAAWIGLVPSQNSTGGKERLGAITKAGDRYLRQLLVVAASGMIRRVRANPLLSPWLAQLLARKPAKQAAVALANKLARIAWALLATGQTYRSQTYRTPTAAAAKA

SEQ ID NO: 136376 - protein, 409 aa, unidentified
MDVIVEHPAALDVHKEQVTACVRVPGPGGVRSEEVVQFQTTVRGLLTLHDWLAAHGVRQVAMEATGVYWKPVWAILEDEFECLLCNARHVKQVPGRKTDVSDAAWLCQLLEAGLLRASFVPPKPIRALRNLTRYRKTQIAERQREANRLHKALEDTGIKLDCVASDILGVSGRAMLDALVAGTTDPDVLAELARGRLRQKLPALREALEGRFDPLHAVLIGAILAHLDFLDEQIERLSEAIQDQLRPFAPAVELLRSIPGVETRTAQTIIAEIGLDMSVFASERQLASWAGQCPGNDQSAGKRRSGRTRKGSKWLDQALKDAAMAALRTNDSYLQAQYQRLRPRIGHGRALGAVKHTIICACWHMLTTGELYHDLGGDYFRRRNPERQTRRLVAQLEALGHTVTLQEAA

SEQ ID NO: 136377 - protein, 408 aa, unidentified
MGRSIGLDACRDFCEVAIADGGRARSAGRVATTPEDLGLFADSLASDDRVVLEATGNALAIARILAPHVGEVVLAHAKQVRAISHARVKTDKVDARVLADLLAADLIPRVWIGDERVRMLRRLVSRRRGLVKRRTQVKNEISAVVHRNLKGRPPASDPFGRKGRIWLAAQELPADERLTVDAALRQLDFLSEELAQIDRLVAVEAQGDEDVRRLLTIPGVDVTTAVTLVAVIGDISRFPSSRHLVGYLGLHPRVRQSGNEPARHGRLSKEGSAAARHVLVEAAWMAARSPGPLHAFAARIAARRGRQVATVAVARKLCVLCWCLLSRGEDYVFARPSLVRRKLRRLDLTAGAPHLKSGPRADPVWNRDTELAERRLAEQAERVYERLVTDWKAAQARAGAGATPGRAS

SEQ ID NO: 136378 - protein, 366 aa, unidentified
MAPIYIGVDFHSRQQTICYLKTETGELVISELQHHDKEQVRAFYQQFQGQVIIGLEASGYSPWFEALLERLGHEVWLGDATEIRRRARWRQKNDRRDAELIWDLMVHNEFPRLHQPLPASREVLRMLRYRQKLIKLRTMSKNSLQAIALQAGLAKGKQLFTAAGQAQFKAAEMSAVLQWQREHWFALLKPLNQQLLETMVWFKTQSKDDVRIQRLRTHPGIGLLTSLCLLHTLQPISRFRNQRKVVAYAGLDPVIRSSAERATQLGISKAGSRLLRYLLVEAVHTAIRYDEDLRRFYKRLAERRGRPKAKVAAARKLLIRAYIMLRDEIDYAEFRRRAVAARLARRGQGPTKVPVVLIRQPTSPGA

SEQ ID NO: 136379 - protein, 389 aa, unidentified
MQPAHTQDSTSANSILTVALELASKHWKVALQDDTHARPAVHTTKQEGAAERLDEAVALVEDAKRQWRLPSSCRTVVLYEAGQDAFWIARALQEKGYEVVVVDPASIPVERQARRAKTDRLDAIRLMSCLRGWLRGERDRLHAVRVPTAEAEDMRHLVRDRGQLQKEVGQHRDRICKLLRTVGCWIRIGPGFAEQLERNAITCHNGVALPQYLRQRLILECQRLALAARQLKELEASLPQQLPPAAAQSATTLQRLRGIGPVGAHRLVLELFWRHFDNARQVGSCVGLVPQPYDSGQSRIDQGISKQGNRRVRALLIEMAWMWIRHQPGSALTRWFLRRTGSGSIDPAAGKRGKRVGIVAVARKLVIALWRYLKDALVPEGAELKAKMV

SEQ ID NO: 136380 - protein, 319 aa, unidentified
MSQATLGIDVAKRKLDVALLTTDKTYTKQFENSPSGFQALQAWLGSFSLPALHACLEATGTYGEPFAAFLSERGHVVSLINPLRIKGYAAAKLQRNKTDKADARLIAEFCATQTPPPWTPPAPEIRQLQALTRRIETLTEMRQMEKNRRDSAPAETHASLDRIITALTEEITKLQQQINQHLDQHPQLKAQHDLLLSIPGIGEKTAQLLLSELDFARYDDARQVAAAAGVTPRKQESGTSLKRTNLSKLGNGRVRKALYFPAIVALRHNQIIKEFASRLKKNGKTPMQIVCAAMRKLLHQAFGVLKHNCSFNPNLAFAG

SEQ ID NO: 136381 - protein, 337 aa, unidentified
MGLYCAIDLHSNNHVLTVIDEADRRVYERRLPNDLAVTKAALEPYRAELLAVAVESTFNWYWLVDGLMEAGYAVRLVNTAAVRQYEGLKHTDDEHDAFWLAHLMRLGILPTGYIYPKSGRGLRDLARQRMRLVQHRSSLITSVQNQVWRSTAVRLCADTIKGRGKKPWPELPDPDLALSVKAGRAAIDTLTVQIERLEKLILKRVDLSPQFRLLKTVTGIGPILAMTIALEVGDIGRFAGVGEFASYCRCVDSQRLSNGKKKGEANRKCGNRYLAWAFMEAAHFAIRILPAAKRFYERKRRQRHALLAVKALAHKLARACFYILRDQVPFAPERLFV

SEQ ID NO: 136382 - protein, 343 aa, unidentified
MSLFAGLDVGGKRTAVCVVDDAGKIVWQGMVDTHPEMMASALQRFRGKLAKVGLESGPFTPHLHRSLAAQDFPMVCMDARRTADAIKSRRIKTDKNDAQALAEMLRAGWFTAVHVKTADSHRIKTLLGARDQLVKVKRSLGNQVRGLLRPFGIRLPSRVGTKKFAEAAHQATQNDAIMHASIKALLEALVSIDAQVGRLDAELRELAGHSEVAWRLMSVPGIGPVTAMAYIAAIEDPNRFKRTRDIGAYLGLTAKRYQSGETDVRLGISKQGDSMARHYLYEAANVLLTTVKKRFALRSWGLQLMKKVGPKRARVAVARKLAVLMGRMWKDGTHFEAAMPVAM

SEQ ID NO: 136383 - protein, 365 aa, unidentified
MLYLAIDQHRKQLTINLRNENGDVLERRQVSTEWAKVRKFFEDLRERAGAEGGFVTILEICGFNDWLVKLLLEYGCHETVLIQPEKKDKHKTDRRDANTLGELLWTNRQRLLSGQSLQNVRRVRLPSEEDCANRQLTELRKKTVDARTRTINRIHHILHKHNLHHSCPTKGLQTKAARKWLQELRLPVIDRLEMNQLLASWELQDQHLKGQDAEIKERQSRHAVAKVIATIPGASAFISLALACRLSDGIHRFDRGGSLANFWGLTPGCRNSGESGQRLGSITKAGSRLARRLLGHLVLHVLRKDPWMRKWYQAIKGRRGSKISLVAVMRRLSAIIRRMVKHHEPYCCGGPSQVTKQRGIVRTLA

SEQ ID NO: 136384 - protein, 418 aa, unidentified
MNEDGDTRGSRRYVALDIHKKYCIMGGVDREGRVVLHAVRVEHADLEGWLKKNLRSTDQVVFESTTNAWHVYDLLEPLVERVVVANPAKVKQIANARVKTDVRDTFILARLLAANLVPEVWVPPGHVRELRQLLSQRRQLVETHTQIVNRMHSVAHRHHLQHARGKRFNEKNTVWQKDKRLSRVEQFQLELEMENRAYIEKQIQRIGREVAKMCHQKPWADSMTYLMQLPGFGVITGMTVLAAIGQVQRFESAKHLASYSGLTGGLDQSGTHLVQKGITKEGRKELRWALVEVAQRAVKSDPHWKRKFQEMEKRMHRNQAIVAVARQLLELVWYVLTRRQPYRHFSQQRIAYKYLTWAWQMDEAARDGLTRQQFTRYYLMRLGIGHDLTRIALDPKHPRKIASEAELLALRPELNHIE

SEQ ID NO: 136385 - protein, 386 aa, unidentified
MRPTLLCNGGLVACASSFNPRMAFGQSVAQPEPRTPCAPNSNRCQSVGYHRQLVYVRMSPNTIITMQTIPVTVYAGVDVAKTTLQLHLQGSQAEFTNQPAGLIQLCQQLKTIPHVHVVCEATGGYERLLVQAMHRAQIPVSVTNPAQVRAAAQAQGKRAKTDRIDAALLTDYGQRYQPKPTPPTTSSQDQLVALTQWLTQLVQAQALAKTQAEHHEAVFVRGRHARLMTHYQTQIVAVEKQIQALLAQDVPLQQRVDCLDEIKGVGPRTAWLVLAHMPELGQLNRQEVAALAGLAPWTRESGAMKGMRRIGGGRPEVRVALYMAALSAARCNPVLLPFYERLRAKEKPAKVALTAVMRKLLVYMNHQLKVLQATQAVTETNHAKTP

SEQ ID NO: 136386 - protein, 315 aa, unidentified
MEDQGVVVGIDVSKAQLDTGFGADSEVAGFSNDEQGISQLLERLGTVRPSLVVMEASGGYETAAATAIAAAGWRLAVVNPRQVRDFARATGRLAKTDRIDAAILSAFGKVIEPQVTRLPDEDAQALQALLLRRQQLVGMRAQERQRLEHAQALMRKQIKKHIDWLDQEIGKLDVDLTAGLRKSPVWRAKDELLRSLKGIGPITSGTLLVALPELGYLDRRTIAALVGLAPFNRDSGKMRGRRSIYGGRARIRNLLYMAATSAIRSNPVIRAFYERLKSRGKPHKVAMVACMRKMLTILNAMVRESTPWTPEMKPA

SEQ ID NO: 136387 - protein, 316 aa, unidentified
MKNYIGIDISKSSIDVYDGKKSYKFDNNENGFKKVISLVEDIKEVIFIFEPTGVYSYALTSFCSKRNISVVMVGPKESRDFARSLKVRSKTDKIDAKVLFKYQSHVEPSMVKVPKLNHHSIKIQEMLNIYEGIQASKQRFKNQLESTNKTYKDLIRTLNRIISDLEMEATKLFNKIELLLLKDEETKERYNAICTIPSIGQKSALYLTAFFLKYPTANAKQMTALLGLDPVMKDSGLFRGKQRISKHGGQQLRNLLYLPTLCSIQHNPRIKVFYERLIAQAKTKKLAVIASMRKLILLAFSIFKTKQHFQPLKAII

SEQ ID NO: 136388 - protein, 357 aa, unidentified
MLSSNVKYIGLDVHKEAIAIAVLNGAGKSVMESIVETKSSTVLDFLHGLRGELHVTLEEGTWAAWLYDVLKPHVREIVVCNPRRNALLKEGSKSDKIDARKLAELLRAGMLRAVYHGENGLQTLRELARCYLTISKDLKRVKNRLKALYHSWGICCAGKQVYAARHREQWLSKIAQVGVHRRAELFYQQLDGLLVLRNTVRGELLSESRKHQAVKILRQVPSIGPLRAALLLALMQTPHRFRSKRQLWTYSGLAVVTHDSAQHRYVDGQLQRSKKPQQIRGLNQNHNHAMKEIFKSAALNASRCAGPLQDFYARLLARGMKPDMARLTLARKIAAIALALWKKGGSFDAEHLKSQAA

SEQ ID NO: 136389 - protein, 343 aa, unidentified
MGEVSTIGLDIAKSVFQVHGVDATGAVVMRKRINRSKVLQFFDELSPCLVGLEACPSAHYWSRELQALGHTVKLMPPNYVKAYLKRSKNDANDAAAICEAVARPSMRFVPIKSEQQQSGLMLHRTRQLLVRQRTMLSNAIRGHMAELGIISAKGRNGTAELLQIIGDVADDRIPPVARFCLDLLARQYLSLSAEVASIDKRIHAWHRCCEESRRLEEIPGIGPIVATALVAEIGDWSTFRSGRNLAAWIGLVPKQHSTGGKERLGSITKQGNRYLRWLLVAGAMAVIRYARQHGTKRLWLTRIMDRRPTKLAAVALANKIARMAWAIMVHGERYREPKLLMAA

SEQ ID NO: 136390 - protein, 337 aa, unidentified
MTLYCGIDLHSNNSVVAVLDEQDRTVYERRLPNDLETITEVLCIYQSELDACVVESTYNWYWLVDGLMDAGFPVRLAHTSALPEYSGLKYSNDFSDARQLAHLLRLGLLPTGYIYPKEERALRDLLRRRLLLVRQRSLHHVSLQSLVARHSGQRLNTLQIKQLTKGRLADYLQGHALLGGEITQQARCWLEEAVRKIEQELQRHIKPREDYQLLQTIPGVGSVLGTTIALETGTIERFASPGNYASYARCVKSEKISNKKYKGQGNKKNGNKYLAWAFMEAGHYGAIWNPRIKRFYQRKKAKAHILVAKKAVANKLARACYHMLKRGEEFDVNRAFS

SEQ ID NO: 136391 - protein, 412 aa, unidentified
MKDLLEISCGLDVHKEKIVACILTGPLGKPTRSEIREFSTLIPDMIALRNWIVSKNCHHVAMESTGIYWMPIYEILEDAFSGDITLLVVNARHMKNVPGKKTDMRDSEWISTLLRAGLLNGSFIPEKKIREFRDLNRYRKSVIRDITSQKNRIEKFLQSSGFRLSSFISDIFGASGRNIILHLVEHGQIDKTALDSCLKTKTRNRIDEILMSVNGTLSEHQKAFLRILMTHYDSLKKHLAEIETSLEEDMAPFALQVEQLNSIYGISTTASCAIIAEIGIDMKPFKTAEHICSWAGLCPGNNESAGKRKSTSVTKGNPYIKSMLCEIAWVIAGKRNTYLSAWYWRIKQKKGAKKAIVALARKLLVIIYTMLKQGTLFDESCFETRRKHCEQKQLSRYIRELEKHGYHVEAQS

SEQ ID NO: 136392 - protein, 352 aa, unidentified
MNATTVAVDLAKNVFELAVADEQWRVAERHRLTRTQFERWFNNREVKLVVMEACGSAHHWGRVLRARGIEVRLLPPQYVRAYVKRNKTDAADAAALLEAARAADIKPVAVKSVEQQALQALHRTRSGWMASRTGRINMLRGFCREFGLVVPEGAARGLAQIARFLADERSGLPGMLRGSMRLLLEEIRLMEARIQQLELDLVELAQQSPACQVLQSVPGIGLLTSTAMVAAVGDPRSFDSGRRYASFFGLTPREYSSGQHRYLGRISKRGDRYIRMLLTHGARSVLRAATVARRCGRQLDRLRNWALAVQARTNHNKATCALANKLARIAWAVWVKHEKYQTEPAFTAQPGA

SEQ ID NO: 136393 - protein, 451 aa, unidentified
MPAGKDNSMHYNKLPQVPGSTYLSVGLDVGADFTWMSIALPNGSFHGKPFRVVHDDPRSRETAVAKIKEAQEAYSLESRCFLESTGIYHIPLLCFLRDKGFDCSVINPIITKNSTNMNIRKLHNDKFDSKKAALVGLNASLKTSIIPDGDIVDLRNLVRDYYYFKDLQSAIVLKLNAELKVSFPAYLHVFSKVTTKTSLKLLAEYPLAADVLAAPKDKIVSVIKSTARFGEKYALARYDSLCTAARDAAEFARALPSNAIRIRLYIETYRMYQGHLDSILEELHKATDRLQGTPVYDRICLLQSLRGIGFLSAVVLMAEMGSFDLFPSPKKLYAYFGLDPAVKQSGKFSGDKVHMSKRGSGLARRILHMAALNNLKVGKGTGSPVNPVIYDYYRRKCASKKKKVAVGAVMHKICDIIFAMLRDNKPFEMITPQEHCRRYAAGHPVSSDNAA

SEQ ID NO: 136394 - protein, 404 aa, unidentified
MPYQIAGIDVHKKMLAVVVADVEGEGDCQFERHKVGTSPAELRALAGWLVERQVDEVVMESTAQYWRPVWEALELHWRPQRRTRDGANPLSGTLHPAQAQSNRGAVGRKKDFPDAERLVKRLVAQELTLSFVPDAEQRLWRTVMRRKYQITRSRVQLHNRLESLLEEAHIKVSSVVSDLLGTSARRMLQALADGERDPTALSALADSRLRATPDQLRNAFGACADLHPVYRRLVKLTLEELRVIEDHLAQLDQQMAELLGHHHDAVHRLAEVPGLGVDSAQQIIAEVGASAATFPSPKHLASWMGACPGTEESAGKNYSHRCPKGNRQMRRVLNQAANAAVKAKGTIFAIVYRRLVPRLGHAQAIGAITHRLCRLIWKILHQSVRYEEHGRPSASRPRRSARAR

SEQ ID NO: 136395 - protein, 405 aa, unidentified
MQGSNVCTPTVGHVGTIFVAIELSQKSWLMTIHSPDRDRISRHKLTGGDHAGLLGLLETIRTRASHKLGSAPAIVSCYEAGYDGFWLHRLLTAAGIRSHVFDPASIAVEQRGRRAKTDRIDGELLLRTLMAYCRGEPRVVRIVRPPSPEQEDARRETRERDRLVQEQGGHTNRIKALLRLLGMAVGNPRRRDWLAWLMRQRDWQGQAVAPQIKAEIEREHARLMLVREQLAALEQRSAQAQPTPAAAEMARRRGILFQLKGLGPAFSGTLAAEVFYKDFDNHRQVGAYVGLAPSPWKSGGIDREQGISKAGNPRARLAAVELAWLWLRHQPNSALTHWFLARTANASKRVKRIAIVALARKADGGAVALSHDRPGAGWGGAQAGGGIIAQPTRRAAALPRSARDG

SEQ ID NO: 136396 - protein, 350 aa, unidentified
MLHVGLDLCRPRVDVHVLDADGRRVLVTRASPDADGLCRLAGRVEFTGRPVRAAVESMTGARYVRDVLTGCGWEVVVADAQKVKGLAPLACKTDKIDARVLAELSLRDLVPAIWLPPIEVREDRERARFRLHLVKHRGMLKQRVHSTLMTFGIRVPESDLFGLAGRNRLAGLLAGLELPEPWAGNVAASLRLIDTLDADIDACERQLRALGASHPYQPRLMSVPGISWVLGYTIGAEIGDIDRFASASKLVGYTGLCPRVYQSGGTDHRGPLTKAGPKYLRWALVEATTHACRHPAYRARYQHTSKRLGRQRGPKVARIELARDLATAIWYMLARDEDFAPAGAGPVLAA

SEQ ID NO: 136397 - protein, 341 aa, unidentified
MMIIGCDFHPRFQQVAFVDQDTGEYGERRLNHPEEAERFYRELAGRPVRIGAEATGNFRWFRHLLEGLGHEFLLGDATAIRAASPRRQKTDKRDARHILNMLVEDRFPVVWQPSVENDHLRQLLLHRCRLVRMRTRIKNQLDSIAKNEGLLSSRVWSPKRRSAIEALPLPGWYAHRRADLLGLLDELDQRIRPLDKAVCEAAEGNAEACLLMTHPGVGPIVSLAYVLTIGDWRRFPRGKQVGSYLGLIPAEESSGDKRRLGHISKQGSVLVRWLLVEAAVHAQRHDASWHRQYVRLSMTKHHGVAKVAIAHKLAVRLYWMLRSGEDYSKVMERGSHAGQSV

SEQ ID NO: 136398 - protein, 406 aa, unidentified
MRLFIGDDWAEDHHDVEVMDAGGRVLAKKRLPEGAAGMARLHELIGIQLGEDAQDAEVLVGIETDRGPWVAALVAAGYVVFPVNPLQASRYRERRGVSGAKSDGADAHVLADMVRTDSHQLRPAAGDSAQAGAIRALARMHKTLIWDRTRQLQRLRHQLREYFPGALEAFDDLAAPDALELLAKAPDPARAARLTRAQVSAALKRARRRNIADKTVAIISALRSAQLGQPPAVTSAYAATVRSLIAVITALEEQVTVLQVQVEAHFGQHPDAEIYLSQPGLGSLLGARVLAEFGDDPHRYASSKARKNYAGTSPITRASGKKKTVMARYIRNDRLIDALMAQAFTALNASPGARAFYDQQRADGAGHNDALRRLANRLVGILHGCLKTQTLYNEATAWSHRRKLAA

SEQ ID NO: 136399 - protein, 366 aa, unidentified
MDSVVQAAGPIHLGLDVSKDKIAVGILRWEERVPDTEMIFNDEASVRRLVNRFGDPAGLRVCYEAGPTGFGLYRLLRSMGVACDVIAPALIPKAPGDRVKTDRRDCRRLARLHRAGELVVIRVPTESEEAVRDLCRARAAVVGDRTRIRHRVSKFLLRHDRIWRQTAWTLAHEQWLTGQRFDEPALRTTYAHYRAMLCAREAELAALEADLAYWYTHGPFVEAVARLAAYRGVALVGALSIASEVGDWRRFPAARTFMGFTGLVPSEYSSGAAVRRGHITKAGNTHLRTQLIESAWAYQHRPNLGVTLRRRQEHVDAATIARSWTAQQRLCGRFRRLAAHKNNRNVVAVAIARELAGFLWAEMTAA

SEQ ID NO: 136400 - protein, 339 aa, unidentified
MKEVSTIGLDIAKQVFQLHGVDAEGAVVTRRALRRRQVLAWFAKLPRCLVGMEACATAHYWARELAKLGHEVRLIPPAYAKAYVRRNKNDPADAAAICEAVGRPSMRFVAVKSERQQAAVGIHRVRDLLMKQHTMLRNQLRGLMGEFGVVAAKGRCGMGELLTILADPEDPRIPSPLREALLLMAETLRGIDRRLEAIDRRIVAAGREDANYRRLITAPGYGPILSSAMAAIVIDPAAFRRASDFAASLGIVPRQEGTGGKVRLGPISKRGNGYLRRLLVNGATALMNSKRAKQDPWLARLLATKPRKLVAVALANKMARIGWVLMTRQEDYRNMPAAA

SEQ ID NO: 136401 - protein, 339 aa, unidentified
MNVKRIGVDLAKNVFELYGVDESEQRVLSKTVRRGQLLATFAQLPPCLVGMEACGSAHYWAREFRKLGHEPRLMAPQFVAPYRKNDKNDRNDAAAICEAAGRPNMRFVPIKEIEQQAVLTLHRARALLVSERTALVNHIRGLLSEYGLVIAQGVAKVRAALPQILEDGDNALPALAREVFADLQERLRGCDERIGEYDRRISALARSSEPAQRLMRVEGVGPLTATALLATAGDGRQFRNARQFAAWLGLVARQRSSGGKARHGRITKRGDVYLRTLLIHGARALMRHLDGRQDRKSQWVLALKARRGFNKATVALAAKHARILWALLTRGTTYQVAGA

SEQ ID NO: 136402 - protein, 412 aa, unidentified
MQIIHPCCCGVDVHTKTVVACLIKQGKKQVRTFSTMTDDLLAMSDWLVAEGCTHVAIESTGVYWKPVFNLLEGVLEVILVNARHVKAVPGRKTDVRDCEWLADLLRHGLLKASFIPPLYIREIRELTRYRQTLVKEQTAVANRVQKLIESGNIKLGQVATDVLGVSGRQMLRALADGEHDTEKIADFARGQLKKKKNELQRALEGRLTKAQRFVLGELLKRIDELTAAIVRVNEELRAEVSRSTDPFVAEAVSLLETIPGIGQRIAETIISEIGVDMSRFPTDAHLASWAGMCPGNNESAGKRLSGKTNKGSTYLRDALIQAAWAATHTKQTYLAAQFRRLVRVKGKKRALIAVGHSILVIIYHVLKQRASYQELGGDYFDKQNTEKLRARLIRKLESLGVKVTVEMMAEAA

SEQ ID NO: 136403 - protein, 427 aa, unidentified
MNEIKTTRVDEFRQFKRHIRGSKDYLVVGLDIAKRKHHGFFGDANGRTLLKGLIVENNAEGFRHLLTQVRFYMDREGFDRVVFGLEPTSVYHKPLAEHLIEQGHLVVYATNEAIKKNRSLLDGRWDKNDTKDSANVADLVAQGKCHYYDLPELRLRDLRSLLLYRRRLKKQLHSCRVRIRNNLVAQYFPELDPFWKNAEAENLAIVRWFLDPACIRQLTCEQFIAKVRTHNGGLRQQRRLRHIWEAAGQSIGCRPGPAMALEAELVVEALKSVEGQLDRVEEAIEQLAEGFEEYRYLKSIPGFGPYVSAMTLAAIGNPHRFENRAQLIRLAGLDLSASRSGEKSKSAVPVISKKGKADFRYALYQAALVASSLTSHFRAYYHRLLEGRQREVGIRTKMLVKIAAKMLIIAWTLMKRKESFNPAHIQV

SEQ ID NO: 136404 - protein, 347 aa, unidentified
MIAIGADVHKQQCTLAVQRPDGKLSMLPSMDNTRENWLNLLTQLPPEAQIALEVSTSGHFVMSVLEEAGWRDRAHWVHTAGIDSLRKQKTDRLDAKRLARKLSVREQDPLPEAWFPPRPIRELRLRARQRCWVAVLRTRVKNRVRSLLQMSGLRGTNPFTASGRTWLKQQKLSEATRESVEQLLRFHDFLTTEREKSETSLRGMEKDFPEIARLQTLPGLGHTLSAVIWSEIGDLKRFDSPRALVNYTGLAPSLYESGERSVRGGITRQGPVWLRWALITAVNAATHGHNAFARRYRRLRRHKLPNVAKTAVARSIARCAYGVLKHGVDYQEQRWGRKAGIEMEQEA

SEQ ID NO: 136405 - protein, 396 aa, unidentified
MLYFASEEFSGWLGQMRPERLSIGNQFVGQMDRPSTSLNSIRSEMARATSACVVTRSSYGKGMPITNSPNKIIRRFLMKYYIAIDVSKEVLSVFDGKKDLTFKNERGLRALKSYLREKFETFDDVVIIFESTGPYSNYLKDFCATNHIKTCIINPKRSSNFAKAIGNRSKTDKIDAKTLYAFKNLINPSDIKVPEIDKDVEVLSAYLSSYEFIIKVRVSISNHIKALKYNANAPKGLLITLKHELERNKQLEKELLDKITEYIEKNEELKKDYYNLLTIPGIGKISAIALLYLFKNYKDTNRSQITALVGLDPTRKESGTSISGRRKISKNGNGTVRKILYFPTLNAIRYNKKIKTVYERLVENHKHKKLALMAAMRKLVLIAHAVYKNKVEFSIV

SEQ ID NO: 136406 - protein, 341 aa, unidentified
MNISVISIDLAKNVFQICVLNQAHKVVLNKKVKRDDLLNQLRQYEPTKVAMEACYSANYWGREIIKLGHSVDLIPAIKVKPFVQGNKNDANDALAIAEASFRPNIHFVRPKSLEQQDIQCLQRIRERHVKQRTAISNQIRGFLADYGIIIEKKIHKIRAALPEILEDVNQPITVIARQFINDLYQEMLIKDQQVKATEEQLHSLLLINPDYKRIQQVPGVGPVVAAGTIAAIGDGKQFKNGRQFAAWIGVTPKQFASGENDYHGGITKRGNRQLRTLFIHGARALMNWCYKYNDRFNLWIQSLMETKPASKVIVALANKLARMTWAVLAKNEDFKTPSYAI

SEQ ID NO: 136407 - protein, 335 aa, unidentified
MKVFYLGVDVSKKKLDLCLRSNGKDILYDVIPNDLSSIKSWLTRTFEKFFLSEDSLVVCAEHTGQYTYPLVCATKSIGVYLCLEDAAKIKYCHGILRGKNDKIDACRIAMYAERYNDCLQPYTASELIIQKLKNLSTERSMLVADRAKYQSQLKDQVDYMEHSIYIAKCNRVEGIINTFTDYIAQIDLEIKELINQAPVIAHQMDLLMSVDGVGERVALKMIMETDAFTSFTDPRKFCCHAGVVPFVYVSGSSQRSKNRVSNRADKSIKHLLHMAALSVSQVKNSPLKKYYDRKVEEGKNKMSVLNAVRAKLVTIMFAVIRTDAFFSRNYQNSLA

SEQ ID NO: 136408 - protein, 412 aa, unidentified
MKDLLEISCGLDVHKEKIVACILTGPLGKPTRSEIREFSTLIPDMIALRNWIVSKNCHHVAMESTGIYWMPIYEILEDAFSGDITLLVVNARHMKNVPGKKTDMRDSEWISTLLRAGLLNGSFIPEKRIREFRDLNRYRKSVIRDITSQKNRIEKFLQSSGFRLSSFISDIFGASGRNIILHLIEHGQIDKTALDSCLKTKTRNRIDEILMSVNGTLSEHQKAFLRILMTHYDSLKKHLAEIEASLEEDMAPFALQVEQLNSIYGISTTASCAIIAEIGIDMKPFKTAEHICSWAGLCPGNNESAGKRKSTSVTKGNPYIKSMLCEIAWVIAGKRNTYLSAWYWRIKQKKGAKKAIVALARKLLVIIYTMLKQGTLFDESCFETRRKHCEQKQLSRYIRELEKHGYHVEAQS

SEQ ID NO: 136409 - protein, 395 aa, unidentified
MIYVGIDVAKDKHDCFITHSDGEALFNSFTISNNREGFETLFQRIESVSDDLTKVKVGLEATGHYSYNLLGFLLDKGLPTYVINPLHTNLYRKSLSLRKTKTDKVDSRTIATMMMSDMNLKSYSDTSYHNEELKSLTRYRFDKVKERAKLKSSVSRLVCILFPELEKLVPTLHMASVYDLLSEFPGADAVAAAHLTRLSNLLSESSKGRYGKDTAVMFREAARSSIGSHMPAKSPELKHTIKLIQELTIEIDEIETAIKRIMDEEIQSPILTIPGISYRMGAMIIAEIGDFSRFDSADKILAYAGMSPSTYQSGQLDNCHSHMEKRGSRYLRYALYNATKYVCHWDESFGTYLEKKRSEGKHYNVALSHAAKNFQGTTISEMPSGNSFKNFYFRP

SEQ ID NO: 136410 - protein, 424 aa, unidentified
MAGVVIGIDPHKGSHTAVALDVHEKQLGRLRVRASSRQVDGLLEWASGWPRRRWAIEGARGLGQLLAQQLIASGERVLDVPPKLAARVRLLDSGQINKNDPNDARSVAVAALRAHELPELAAEDHAMVMRVWARRYHDLARLRTQVVCRLHAVVCELVPGGVRKYLRASQATDVLDRIVADSPVAQAKLELARELVADLERIDAQRREAKGRTARAVAATRTSINDVYGVGPIVAGTVLGYVRDIRRFPTRDRFASYNGTAPIEVSSGDRKIYRLSRRGNRQLNHAIHMAAISQIRHHDSEGRAYYEKKIAEGMTGKTALRALKRKISDALYARMIDDARRLAAKDPGGHTGNDSASSAAGSHPETPALRKSHSRATANSKTGTDQRPLTLRPAPDRRRTSRRAAGVQVEPRPGPHRGRRQDRP

SEQ ID NO: 136411 - protein, 353 aa, unidentified
MRKMQNWVVQGKRVFVGLEDAKRTWKLCVHCEGMIVDETSMPAAYDNLRTYLHKRYPECEIQVMYEAGFAGFWLYDRLVEDGIGCIVTPPHTVTQRKVNKVKTDKIDARRLAKTLEAGDYQACCVPDRELREDRQISRTVTQMQRNIVAVKNRIRRFLDFHGLNGDLPAGKWSQSAYASLKVLTLSRPLQVSLNALLRLLDELEAIKAELVAELGGLCEKERYRRHVEIKQSCPGVGWLSAIRFTLEWGNLTRFGSDKQMASFTGLTCRENSSGEEIHRGHITRQGNGQVRAWLIQCAWRAIRLDPALLTKYRSVWGNSGSKKKAIVAVARKLAVRMRALELAQQSYVIGVVR

SEQ ID NO: 136412 - protein, 338 aa, unidentified
MQTYAGIDLHSSNNFIGVINEKDKILYGKRHANRLDDVLRALDPFKDSLQGVVVESTFNWYWLVDGLQEHGYSLHLANPSAIQQYEGLKHTDDPWDSFWLAHMYRLGILPEGYIYPKEHRAVRDLLRRRLLFVRHSTAHILSLQSMISRNLGFKMSNNEIKKLKPADIESLFDCSNLVFMANNSLAAIEFLKKITKGIEKKVKSQVKMRKEFEMLLTIPGIGNILGLTINLEVGDIGRFPKVGDYSSYCRCVESKRLSNGKKKGENNKKNGNRYLAWAYVEAAQFCRRFCVKAQSFYQSKEAKTKPVVAIKALSNKLSKASYYIMRDQVAFDEEKLFG

SEQ ID NO: 136413 - protein, 389 aa, unidentified
MKKNTIASAIPKHLEHINLWAAGIDIGSTSHFVAVPEGCADKTVREFKTFTTGLNELADWLKQCGIKTVAMESTGVYWIPIFELLEERGFDVKLVDSRQTKNVSGRKSDVLDCQWIQQLHTYGLLNAAFRPAGDVCELRAYVRQRSMLIESASRHIHQMQKALTQMNIQLHHVIKDITGETGMKIIREIVAGEKDPTVLAKNRHPRCKSSIEDIKAALTGNYRAEHLFCLKQSLELYDIFQEKIQACDHSIEDKMAKFVTDPRAIDITENALNPNKKQTNKNSPNFNLGKELHRLAGVDLLAIPGVNTVTALQILSEIGFDMTRWRNAKQFASWLGLCPGNKISGGKILSSKTKSSNNRAAATLRMAASTLYRSPTGLGAYLRRLKSRK

SEQ ID NO: 136414 - protein, 439 aa, unidentified
MRKIRKNAAGIDIGAKKVFVYIEGQKVKSFYTFTEDFDILCKYLLKHNIKTVAMEATGVYWSILYEMLEEAGIDTWLVDGRQTKQVPGRKTDVKDCQWIQELHSLGLLNRCFVAKDDVKELRSYNRLREDHIRTASMHVNHMQKALTEMNIRLKEVISQIHGVSGIKIIEAILNGERNKTALLNMCDARIIKNKKKEVLKSLNGRYTTTGIFALRQAFDGYNFYQGQIKQCDKEIETIIHRMGKGGLNNKLPTKRKAIRHNKPEVDNLGANLINIFEGRDATIISGITDYSWMQLLSEVGTDLSRWPTEKHFSSWLGVAPGQHWSGKMNRNKKKLGHPKAGQIFRQIAQGLLASKNIALGSFGRRIRSRKGPAKAIKAMARKLAVMYWRVMVKGVDYAELGIKKYEEQLLAQKQKSIKRMARELNLQLVNIQPSKNSCH

SEQ ID NO: 136415 - protein, 345 aa, unidentified
MPIVGGLDIHRKQITFDYLDTVTGQVRRGQVSPADREHLRGWLARFAGREDVAFAVEGCTGWRYVAEELAAAGVAVHLAEPADTAFARGRKRHAKTDKTDCRHLRQLLAEGRLPECWIPPAHVLECRALLELYNDLRAEHTAWAQRIHAVLFHQGAPALGEGALRGEQGLAALRAAAAAHLSPAGQLQVATALEVTAALEARLHALRHQLLDAARHLTGAKVLAARLYGVGPVTALALTCWLGGKDRFSSSRKAVRFAGLDITVHSSDRKGPPGRLSRQGPPVLRWAVYEAGKAHARSSAPDHRYYATVKDRKNSKRAALSEARKIIRQACHILTELGDDALAAA

SEQ ID NO: 136416 - protein, 350 aa, unidentified
MLIIGCDYHPSFQQIALVDIETGEVQERRLKHREEAEQFYRTWAKAGNKVRVGMEASGHAGWFERLSAELNFELWMGDAAKIAAKRVRKQKTDRLDAQHILKLMLKDDFPKIWVPSWENRDVRQLLWHRHRMVQTRTRIMNQLQAAALNEGLRYKKTLWREAGRQQLESLSLAPWASRRRHDLLEVLDRINPTIAELTRAIEQQAEKCPEAQRLMTHPGVGALTALAFVLILGETERFGCGKQIASYLGLVPEEDSSGERRRLGHISKQGNSLLRFLLVEAAQVTVRSDQRWRNRFFHLAQRRGRKIAKVAMARRLAIRLYWMWRRGWNYEQLESFGSHAGQPENRHGVQ

SEQ ID NO: 136417 - protein, 442 aa, unidentified
MAMRKREDGPEVFPNAAGIDIGSSSHWVAVPRTADDGPVREFGTMTDDLNAMADWLLACGVDTVALESTGTYWIPVYEVLERRGLAVWLVDARQMKYVPGRKSDVQDCQWLQKLMSLGLLRAAWRPGDEVCVVRAVARQREVLLTEQGSWVQRMQKALVQMNIQLTEVLSDIMGTTGQAIIRAIVAGERDPKVLARFRHGRIRRSADDIARALTGNWREEHLFVLKQALAMYDDLARHLGECDTRLQTLVDERGGHHVDLGKAPKAGTRLRINFNERQRLANWAGVDLTRINGLGVSTVLTLLSEIGPDLSRFASVKQFCSWLGLTPGTKISGGKVLSSATKRSANRARQALKMAAMTLSHSDSALGAFYRRLCARMDKPRANTAVAHKLARMVYFMLTRGEAFVDQGQQRYEEQQHQRSIAALKRRAAKLGFRLESVPVTT

SEQ ID NO: 136418 - protein, 343 aa, unidentified
MEVVIGIDPHKASHHAFAVDEREVELAQLSIRATRSQTQRLLAWAEPFERRVWAIEGADGLGYLLSQQLVAAGERVVNVPATLAARTRVLGSTRSNKTDPNDARSVALTALRHDDLREVQAVGHSEVLRLLAKRNIDIGDRRTQVVCRMHALLVELAPGGIAKEINASDVDGFLTTLSPASPVEQIRFDLAVELLAEIRSLDAQLKVSHKRIEVAVRASGTTVTDLFGVGPIIAAMLIGFTGDVRRFANSDHYAAYNGTAPVEFSSGGRTVHRLSQRGNRNLNHALHMAAICQLRQPHSEGRAYFERKLAAGKTKREGIRALKRQISNAAYRQLLIDARRSSV

SEQ ID NO: 136419 - protein, 395 aa, unidentified
MYSLLVGVDVSKDFFSAAGLDEEGKEHFSGTYEMNSHGFSEFLKALSSHGERLDQMIVAMESTGCYHINLFSFLSSQGIRTVVVNPLLISNFAKLSLRKTKTDKKDALTIARFVLDHHEEISQLSISQDHQDLRDLSRERESLCHLIAATKVEIKRVLRTTFPELESIGNLYTGAMLRFLQQYPSARLVRGAKRVAIAKALRGPYVGDKLTFTAEDIIKAAQSSVAVVSPAKEIIVQGKIATLLHLKERLEELTKLLTDLCKATRVEDLKILQSIKGVGPNTAVPFLAEVGEVKNFTSSKKLIAFAGLDPSIHQSGKFLGASKLSKRGNRHLRRAIYLMTTSVVSQNVFFKAYFLRRKKEGLPPQKALFAVAHKLIRVIFAMLSQRTCFNVKEAI

SEQ ID NO: 136420 - protein, 297 aa, unidentified
MFTLMPEGETFVVARDGKGLAELVERMGTLGPERIAVEATGGFEIIVAAALAGASLPVVVINPAQVRHFAQALGRRAKTDPIDACMIARFVEATKPDLRPLADEATQLLADLVARRRQIIEMIVAERNREKRVAVMRIRKSIARLIAALEKELAEIDAEIDASVRGSPAWREKEDLLASVPGVGPITARTLIAELPELGTLDGKRIASLAGLAPFTRQSGQWKGKAMIAGGRKSVRSALFLASLVACRHNPVLKAFRQRLIDAGKPKMLVAIAAARKLLTILNAILRGKQPWRTENA

SEQ ID NO: 136421 - protein, 407 aa, unidentified
MDVLHPKCAGLDVHQQTVVACARTGAGKAVTYDVRTFGTTTAELLALSDWLTAHGCTHVAMESSGVYWKPVWHVLEGHFELVLANAMHIRNIPGRKSDVNDATWIADLLAHGLIRGSFVPPEPIQELRDLTRTRQQLVREIAQHTLRIQKTLENANINLTAVLADVLGSSGRAILRALARGERDPERLAELASDRVKASRAELVAALHGRVPPHHRFMLTLHLTQIEALEAAVREVEARLGDALAPFRAALDRLITMPGVSETVARVIVAEIGFDMTRFPSAGPLVSWAGLCPRLHESAGKRLSNRTRSSNPWLKTTLVRAAWAAARKKDSYCRAQFLRIKSRRGPKKAVLAVAASMLTAAYYMLKHGIDYRDLGADHFDRRDKAKLAKRLIARLHDLGLTVEVRAA

SEQ ID NO: 136422 - protein, 351 aa, unidentified
MEEFIAFDSHKRYTLVEREDVKTGKTNQFRVEHCPGAIGQCLGGREKGTPVAVEATGNWYWIVDEIEQAGLEPKLVHPRKAKLMMGMINKTDKLDVHGLNRLQRNGTLPTVWIPPRALRDQREITRARMVMTAHRTRLKNRIQATLNKYGWAGTEASDPFGKKARKELEQAIKELPPQTAYITEALLKQLDFVQGQIEEIESRMRELVQETPEMDLLRSLPGVGWILSAVTGLELGSIKRFGSAERYASYSGTTPRVHASGDKIRYGRFRPDVNRYLRWAYIEAAHSVALHRGTYPSRHVSRLYERIRTRKGHPKAIGAVARHLAEATYHVLTRGKPYRDPVMKKGRSREV

SEQ ID NO: 136423 - protein, 416 aa, unidentified
MKEWKEITHYAGFDWARDHHVVVIVNQQGQIVADFEFEHSVEGWKSFGEKTAGFANLAVAIETSQGAAVDQMLQRDYTVYPVNPAAAASYRQRKAPSGTKTDHLDGWSLADALRVDGQGWRALQPADELSTQLRLLCRDEVALIAQRTLLVNQLQQALVEYYPAALEAFEDWVSPATWDFVLEFPTPEALTKAGKRRWEKFLHTHRLWRPETVEKRLAIFSQADQFKASAPVTKAKSQLALSLCKLLRTLQQQLDQYREQIEALFKNHPDHDLFGSLPGAKKMLAPRLLAAIGSDPGRYGTFQVLQSFAGTAPISFESGKIHKARIRWNCDKFMRHTMHLWADCFHRVSPWGQAYYRKKRQEGMTHACALRCLGQRLLKILFRMISDKKPYDAELHARNQKKHGSCVLALIEKPAV

SEQ ID NO: 136424 - protein, 439 aa, unidentified
MIGIDLAEDKQALAVIDHDVRVLARKTVRVKAFRLGEALDWAVGQARAKGFAKVTVACEPTGPRWLQVQRLCAERGLPLVCIQPLVSHIAREQQDYTTHKTDESDCVMIARLAVELHCYIPEELDETWAHLRHLGRRRAQLITLATASAQRIRDFLSVAWPTVMETCAEPLESRTWLAALEVVTSRGGADPGKLAAMGEEAFITLVRAAVGGWDAKKAWGPIIGRVFAALTATEGVVVSSRRGLLRRVADELGDLQRTRAQRRQAEADMVAVLDELGLSRLAGIPALSAVGAAAILAETGDPGRYDSSSSLVKHAGMSPSDNASGAFLGDARISRRGRPGLRLTVWRAVWPMLQFNPVMAAKYRAMTQGADDAADAAEAGSRQASAAAAAARTRRAKARVACAASLLRWIYCLVVHGTSWDPDAASGPAGRRPGLAQAA

SEQ ID NO: 136425 - protein, 366 aa, unidentified
MGWMAPSRHRSAKMVVVKDHQQREPSMGEITTIGLDLAKNVFQVHAVDEAGSVVMRKRLRRGQVLAFFAEIPSCLVGLEACATAHHWARELIALGHEPRLMPPTYVKAYVKRNKHDVADAEAICEAVRRPSMRFVPIKTVEQQSALMMHRARDLLIRQRTMLVNALRGHLAEFGLIEAQGLHKVARLIAIVMDEKDGRISDIARQVLKVIVNQIEDTQTRIAGLERQLLAWHKNNPVSQRLATIPGIGPIIATAIAATVADPSIFRSGREFAAWLGLVPRQNSTGGKARLGGISKRGDSYLRRLLVNSAHTVLLCSKQAKTDPWLTSLLSRKPRLVVAVALANKTARMAWAIMNGQDTYRRAPLAA

SEQ ID NO: 136426 - protein, 492 aa, unidentified
MKPKPKRKSVYRSQNATLRALFERAGDPRKVICVPLDYAKRKHVALVCDGHGDILKGAFPVENNPVGVAWLIEQISATARHRKIPKKQIFLGGEDEPAYVANFTAALREAGYLVMRVNAHEAKENRENHAASTDQLDLIGIAKTLLSRRARSSGDASPENPAYHHLRELARCRRSLVRQQTATGNRIHALVDQLFPGFLDDSKTGLTAFCEASIELMKDRFSAPEIAKRKPLALAKTLRRLRVHHPDEAAAKIITLARSVLPPAPHRVATLQRALTVTVDLHQCLSRNANELRTDAALTLATTPYALLTSIRGIGFVLAAGVAGELGDPATLGTTDSLCCYAGIVPKTLQSGGPDSPPVQGHVSPRCNRILKDWVVQSAQKIHLYGAPEHKDRITRWNAEGRSGLYAGARHYLRLLRSLVKNQVPYLAPAGRTRGAAPEELAAAAQDTWKVMQNKWRTIPGGLDLMLEEAHPLGFWRRVVKETHDIQLPTRP

SEQ ID NO: 136427 - protein, 358 aa, unidentified
MITSGSRKYIGMDVHKESISIAVRNAAGKVVMESVIEAKANIILQFIDGLRGEIHLTFEEGTWSAWLYDLLKPHVSKLVVCDPRRNALLKQGNQNDRVDARKLAELLQNNQLHSVHHGDHGLRTQKELVRSYLTITKDLSRVMTRVKAIYRSWGIACGGTQVYSARHRSEWLEKIREPGVRRRAEHYYQQLDALTLLRPQVRKDLLAESKKHKVWKQLRGIPSIGPIRAAVLLGIVQTAHRFRAKRQLWTYSGFGVEGHSSANHEVVRGQLQRKKKQIEIRGLNKNFNHDLKNLFKGAATLASSKPGPFQEFYAALVAKGMRPEMARLTLARKIATIVLIVWKKGVCFDAKHLKPQTA

SEQ ID NO: 136428 - protein, 331 aa, unidentified
MQQVVVGIDVSKKYIDAAFRTESGEFHSARFHGEPAKQYLEMEGTLKQMNFKPLKFVMEATGVYHLPLAYFLVKKGHKVYVDNALKFKRYAQMRLSRAKTDKSDARLIAEYGATQTIREFQPPSVNQTHLKQCVQAIEDLQQIKTDIISRIEALSIHPEPHKFLLDLWKQELINLKDKIKAVHKEMLELAERHKPETLDLLLSVPGIGPLTASAIIGQFGNFETFSNAGAVVAYVGLNPSPYQSGSSRYSHKGISKQGHAYIRRLLYMGAWMAKECNEPCKQLYSRLLLKHGSKKKALVAVAHKLIRQAFGVVKNGIAFEPDFADKNSPFT

SEQ ID NO: 136429 - protein, 429 aa, unidentified
MKSKAYRGTAVNRVEAQKVSRGHVGEALTIGVDIGKYRLVAVGRWPKGAFERPWLVNNPQQLPEFLALLENLRGQHALVVAMEPSGTYGDPMRQALTDKGIAVERISPKAAHDYAEIFDGVPSQHDGKDAAVLAELAALGKGTPWPYAAAESWEQELVYWVEWLEAQRQISAVWLGRLEGLLARHWPELTRWLRLSSATVLRLLVEYGSPAGLAADTQAAARLQRWSRQLLSAEKVQQVLASAQSTLGVRLGDFERQWLQECAQQASAAQREVRRSRRQLRRLASVQPVLQIQGRAVGLATACVLWASLGDPRQYSSGPAYRKAMGLNLVEQSSGTYQGELRISKRGQPRVRRWLYLAVLRLIRREGVRDWYRAKKQQGPKATKKALVGVMRKLAVALQRITVSGIAFEPRRLFPGASPKDRNASGSNR

SEQ ID NO: 136430 - protein, 400 aa, unidentified
MIDTGDVDVFLGLDVGKGEHHGTALTRAGKRVFDKRLPNSEPKMRAMLDKLTAKHGTVLVVVDQPASIGALPLAVARDAGCRVAYLPGLTMRRIADLYPGEAKTDARDAFVIADAARTMPHTLRGIELTDETIAELEMIVGFDDDLAGEATRIANRLRGLLTQIHPHLERVLGPRIDHPAVLALLERFGSPTALREAGRRRLLGVARPLAPRMFERLVEDILVALDEQTVIVPGTEAAALIVPSLAGSLRAVLDQRRLLEKRIQELLDEHPLSQILTSMPGIGTRTGARVLIDVGDASAFPTAAHLASYAGLAPATRSSGSSIRGEQPSRRGNKQLKRAFFLAAFASLGDPASRAYYDKKIGQGKRHTQALLCLARRRTDVLFAMLRNGTLYESRPAAAT

SEQ ID NO: 136431 - protein, 428 aa, unidentified
MSNQDIIRHELFCQIVKEIHKSNEYLIVGIDVAKDKHHAFMGTTTGKLLLRKLIFGNNINGFSRLMKTVEAIKVQNGLSKIVYGLEPTGNYHKPLARHLIRYDCNVVLVAGQAVKYNRQILDGRWDKNDTKDAANVADLVSRGKCLYYDCPSQTIIDIRVLLSLRRLLKKEEHSLRMRIRNNLLANYFPELDTFYSACESETLSIVGWCLTPDTIASMEFSKFFQMVTKTRRGTAQTLRLRKIHGLAMESIGCPVGSASKYEAELLVEKLKQVRNQIKETNDLIEDFCLKFPEYNYLLTIPGFGPYISARVLASIGDPFRFKNQKQLIKMSGYDLCANRSGKTSDTAIPVISKKGNSELRYALYQAAKVATAKVDLFRAYFTRLLTGRERERGIKTKMCVKLAAKMLVIAWTLMKKREVFNPDYITIE

SEQ ID NO: 136432 - protein, 349 aa, unidentified
MIIIGVDFHPEFQQIALVDTDTGELEERRLHHPDEAEAFYRALVSQGKTVRVGMEASGHGRWFERLMSELHIELWVGDAAEIRTKRVRKQKTDRQDAQLILKLMLKDDFPKIWVPSWENRDLRQLLWHRHRMVQARTRIMNQLQAVALNEGLRCKKRLWRTERPRLESFQLAPWASRRRRDLLELLDRLNPTIAELSQAVEQEVEKCPEAQRLATHPGVGPLTAMAFVLIIGQADRFQCGKQVASYLGLVPMEDSSGNRRRLGHITKQGSSILRFLLVEAAQVTVRSLPEWRSRYFHLMMRRGRKIAKVAMARRLAVCLYWMMRQGWDYQQWVEFGSYAGQPGNRHGVQ

SEQ ID NO: 136433 - protein, 361 aa, unidentified
MKKVSRELPKMEAGIAKPEMTVGLDLGDRYSHYCLLNSDGEVVEEGRVQSTEAALRRHFEGEDCLRIALECGTHSPWVSRLLNALGHQVIVANARKIPAITGSESKNDRNDAEKLARFAAFDPKLLSPLEHRSEERQVDLNLIHARSTLVRARTMIVNALRGLVKSAGGRLPACSTEFLPARALAAIPPALSAVATPLVEQIGMLNAQVDGMDKQIEKLSAKYPEIVLLRTAPGVGPIVAAAYVLTLGQPDAASNRSAGAFLGLRPAQSQSGAADPQRRISKAGDSFLRSLLVQSAQYVLGRFGPDSELRRWGLKLAATGGKRGKKRAIVAVARKLAVVLHALWRSGQRFQPFPQQAAVAA

SEQ ID NO: 136434 - protein, 428 aa, unidentified
MKKRTYRKVSIKSISSEQVLRLLGGGQRLVLAVDVAKVDMVAALVNPQGQLGAQVLLTLSWKHPTEQPLLTGLLRALQEQAVVVEAVIESSGSYGDALRAQLRGLGIEVYRVSTHRSHDAAEVYDGVPSVHDAKSAHILAKLHLDGASQLWPLPSEAQRVSAAAITALDHYNEQHQRDINRLEALLARHWPELLLLMQLGTATQLGLLAEVGGPAQVSADSARALKLMERISHGLLKPEVAQAVVDSAQHSIGLELIDAELQLLQTLCTHALATLSDQQLAAHRLRALAKADVQTQAMAKTVGVTTAVVLMHDVGRPEAFSSAGAYLKAFGLNLREKSSGKHKGRLKLSKRGPGRARRYLWLAALRLLQHDPVMRAYYHAKLKGNGARKSSAVVALMRKLAKGLYASVRSGQAFNSTKLFDTLRLQLA

SEQ ID NO: 136435 - protein, 334 aa, unidentified
MARSTLPVAPLAVADTAVTGGVDTHLDVHVAAALDRIGGLLGTASFPTTPEGYEQLLGWLRGFGPVVQVGVEGTSSYGAGLTRTLQASGVLVVEVDRPNRQKRRRVGKSDTLDAVAAARAAMAGEALGLPKSKSGNVEGIRLVGVARQSSIKARTQSMNQLRSLVSTAPAELRERLRALPISQLVKTCAALRPATDHTVDTMTKVALRTLARRVQYLDEEVAELDARRTALVQQTAPELLRAFGVGPHTAATLLVTVGDNPERLANEASFARLCGVAPIPAGSGKTDGYHRLWAVTQFLRAGVTQCPTGSVCRSYFVGASLGWCDARAGRLRGR

SEQ ID NO: 136436 - protein, 423 aa, unidentified
MSYKIAGIDVHKKKLAVVVADVEVEDEYQFERRWYGSNPEQLRVLSEWLSEQQIEEVVMESTAQYWKPVWGALERYWKPRCQSREGAGRMSGTLHLAQALSNRGRRGRKKDFRDAERLVKRLVSQELVLSFVPDTEQRMWRTLTRTRYQRTRDKVRLQNQLEALLEEAHIKLSSLVSDLLGASARRMLKALADGETDPAALAALADQRLRATPAQLHDALGACRELNPVYRRLVKMTLEGLQLVEQQIGQLDQEMASLLRPHQDAVERLAAVPGLGVDSAQQIIAEVGAKAATFPSAEKLSSWVGACPGEEESAGVNRSRHSPKGNRQMRRVLNQAANAAVKHKGSIFEIVYRRLVPRLGHNKTIGVIAHRLCHLIWIILHKGARYEERGPAVSEKSRQRRTARMVRTLRILGYRVEPLANPA

SEQ ID NO: 136437 - protein, 406 aa, unidentified
MHLYIGIDWSLTKHDAVFMNDAGATVLYVPFPHSVDGLAYFDDARQKLGVQPDECFVGIETAHNLLIDFLWDRSYSKIFVIPPSMTKANRSRFTTSGAHDDQRDGTVLADILRTDRSRLHPWSPDTMRTRQLRAQVGFHMYLTREVVRTGNRLRSVLLRYYPAALLVFSDLTTQIALAFIQAYPTPAAARALSYSDFAAFAQQHHYRQAKRLPQCYQRLQAPQPEASLETVIVYEKQAQQLAQLLLTSVQAKDTAGDELSRIFADHPDRDLYLSLPGVGAFLAPALAAKMGEERARYPTAASVQTLAGTCPVTEKSGKSKTIHFRWACDHEFRDIAQKWARSSLRDSGWATSYYGQHMARAESKSQACRSLANRWLAILWHLWQTRQPYDEEHHLHDATERMRPRR

SEQ ID NO: 136438 - protein, 444 aa, unidentified
MVKMVEEIPDEDHEQVVQRVCAIDVSKASGMVCVRRPGSDGRRVSRTWTVPATTPAVTDLAAHLLAEQVEQVTVESTSDYWRIWFYLLEAVGLRVQLVNARDVKNVPGRAKTDKLDAVWLAKLTEKGLLRPSFVPPAPVRVLRDYTRMRVDLTRDRTRYYQRLEKLLEDALIKVSSVASTLTTLSARDMIEALIDGERDPLILAGLARGRMRSRNSDLIEALTGRFDAHHGELAGMLLAQIRALDTQIDQLTERIEALVAGLPAPPAAGPDDPPSPGASSGTDAAARLSAIPGISPEIAHLIIAEIGLDMTRFPTPAHLVSWAKLCPRTIQSGPRTRGAKTGKGNGYLKGALGNAAGSVSRGTSTFFYARYQRIVKRRGKNIALVAVARSMLTVIWHLLADPTATYTELGWDWHERTINTQRKTTSLVRQLQALGHTVTLTPAS

SEQ ID NO: 136439 - protein, 431 aa, unidentified
MDIVHPRVAGIDVHKKVAWVAVRLPGEAPGERKVITKRFKTFWRPLQKMAAWLAELGVTDAAMESTGVYWWPVCHALAGAGIEVCVCNAAHMRNVPGRKRGIADCRWIAELREHGLPRPGFIAAAEVAALRQRTGYRKRLIEQRTSQGQRLSKVLGDAGIKIGSVASRLPGVSGREMIEALIAGERDPGRLADLARGVLRRKTEDLQMACDGRFTAAHAQMCRLHLDAHDHLTAAIAELDALIAEAAAPFAAVIARLMTIPGIGQRTAEVIVAETGGDMTRFAASARLAAWAGLAPGDNESAGKRKHAAARKGNQHLRAAMTEAAWATARTRTRPGARFRRLARRFGKGHEKKAAVAVAHTLICIAWAVLSRGEDYAEAGEDYYEQRDRRNREHLIRHHQQALARLGCQVTLTPPGDGPPPADGPGQQPAA

SEQ ID NO: 136440 - protein, 360 aa, unidentified
MAKARSLVGLDVHATKIVAAVLDAETGQLQCFMLGGETESTAAFCEQLPGPVRVAYEAGPTGYGLARELMKRRIECVVAAPSKIPRAVGDRVKTDRRDAEHLVRLLMAGKLHPVRVPGREEEALRDLVRARESVRMDLMRARHRLSKLLLRHGHRFDDGNAWTDRHRQWLARIDLGRPAAQTTFLDCRGAIDALCLRRDTLEREIVAILPSSPWTVQAGRLRCLRGVDTLTAVGLCAEIGDFERFAKPEQLMSYIGVVPSEATTGQQRRLGAITKTGSAHARRLLTEAAWHYRPRPNLGKALTERQQHQPPAAVAIAWKAQLRLHRTWTRLEARNKRRTLIAVAAARELAGFCWAITQIE

SEQ ID NO: 136441 - protein, 460 aa, unidentified
MTSRKKKQRKFCGDETLPEIRQNTAGIDVGATEHWVSVPSDRDPEAVRCFGGFTRDLHAIADWLKACGIDHVVMESTGVYWIPLFEILEERGFEVALVNAKHLRNVAGRKADWTDCQWIRIVYSRGLVSASFRPPDQITALRSYLRHRKMLVEYAASHVQHMQKALAQMNIHLHHVISDLTGVTGTKILEAILTGNRDPQSMAQLRDRRIKSSPEVIAKSLEGNYRPEHVFALKQAFDLYQTYRQQIDACDQQIQRHLQELDSKVDPDHNPLPPSRRQRRISKKRNEIRFDCRRETYRIAGVDLTTIDAIDESTALLVLSEAGSDMSPWKTEKHFASWLNLSPNHQISGGKILNRNTRKQKNRLRDALRICGQSLLHSQSALGAYCRRICSRIGHPKGIIATAHKLACLIYRMLKYGGAYVDKGQQHYEQRYEERIVKNLARNAKHHGYQLIPLVEAQVP

SEQ ID NO: 136442 - protein, 390 aa, unidentified
MEARVVNNLSPAAAHDGAVRCLLAIELSKKSWVAAVNTPLSDKISLYKLKPCDWKELLQLIERIRKRVSEELKKPVEVISCYEAGYDGFWLHRLLEAQGVRNHVIDPASLQVDRRARRAKTDGIDVGKLLRSLMAYLRGEPRVWSVVRVPTIIEEDDRRLHRERSRLINERIQHVNRIKGLLAIHGIYDYEPMHPERIQRLERLRTADRHSLPLRLKAEILRELQRLELVLGMIQTIETERDAIVSAKSKSQQTSAKKIKHLVKLKSIGPEFATVLVGEVFYRTFNNRKQIGSYVGLTPSPFQSGSTSRDQGISRAGNAKARTTMIELAWLWLRNQPDSPLSVWFRERVGNRKGRIKRIAIVAMARKLLIALWRYLETGVVPEGAVLKSK

SEQ ID NO: 136443 - protein, 426 aa, unidentified
MDTVAGLEPIAFVGVDWASEEHAVCVLGTDGRKSSSYAVAHSRDGFEQLVRRLASLGPVAQVPVAIERPDGRLVDALLEAGHPVVAVSPNAIKAWREPEVLSGAKDDPGDAEVIAEYLRLRAHKLSVLAPFSAETRALRAVVRARDDLVDQRVAAHNQLQACLDAFWPGAKAVFADICSEIALAFLERYPTPASARALGEKRMAAFLTKHGYSGRRPAGELLERLRAAPEGIADGPEAEARRDAVLGYVRVIRALNTSIKSLDRSVAAHLGEHPDGEIFASLPRSGRINAAQMLAQWGDCRQAYDRPEAVAALAGVTPVTKKSGKYEAVHFRWACDKRFRRAVTTFADNSRHDSPWAADIYQRAIARGCDHPHAVRVLARAWIRVIWRCWVDRVAYDPAKHTAAARLLANSERATGPAVGTDQQAA

SEQ ID NO: 136444 - protein, 366 aa, unidentified
MSVYVGIDVHRKRSQVAVIDQGGEVLANRNVPNGTEAILGVIGGLPSGTPVAFEAAFGWGWLVELLEDYGFGPHLVHPLQCKAIASARLKNDKVDAAILAQLLRADLLPEAWIAPPPVRQLRALLRHRAQLVRLRTLLRNRIHAVLADHGHDRPAGCWSGPGRDWLASLPLPAVSREVVEDNLALIDALQVPIDRLDCEARQRARSDPRVKVLTQLPGIGPFTALVILAETGDITRFGSARKLAAWAGLTPTVRGSDRTVRHGHISKQGSAWLRWILCEAAQTAKRHPDFAASYQAIARRRGKKIATTAIARRLLTRAWHLLTDAGQPQHLKPPLPHPHPPRPSSGETRSQTGRGSPSPGRARKTA

SEQ ID NO: 136445 - protein, 354 aa, unidentified
MKLITNDVKLVIGCDFHPSFQRIAILDRETGELSKKTLLHGNGEARRFYEGLRGQSVVVGIESCGNTLWFEQILAEMGHRLVIGDAARIRAHVVRRQKNDDRDALNILELLETERFPALWVPSPEERDLRALLLHRFKLVQMRTRIKNQLQHIALNYGFQKKRKLWSQEGRKFLQELELPTWTGRRRDDLLKMLEPLDVTIAELSAAVEKAVEKDARSQLLKTHPGVGPITALGFVLIIGPVERFARSRQVASYLGLIPTEDSSGGRHRWGHISKQGNTFLRTMLVEAGQTAARKDPELRRAYQRLKHKKQFSGIAKVMVARKLAIRLYWMLRTNQPYLPARMQGSPSHSVVEV

SEQ ID NO: 136446 - protein, 376 aa, unidentified
MAKNTRYVGLDVHAGSISVAIADGKRQGEVRYLGTIPNSQEGLRKLVKKLGNKTKLQFCYEAGPCGYEVYWQLVGIDCDVVVVAPTLIPLAPGDRVKTDRRDAEKLARFLRSGDLTPVWVPSKEHEALRDLVRAREAAKKDQLRARHRLSKFLLRHGRKPLVRMTSWSARHMVWLEGVKFNEFAAQATMIDYLHEVQQATARIVRLEKSVDEALELASPQTKHLVAALQALKGVAKIVAVTVATEVGEMSRFGSATQLMSYAGLVPSEHSSGGPGKSNRGAITKTGNSHLRRVLVESAWAYRHRPGVKGRLKKRQEGVSEAIKNISYKAQHRLHGRYKRMAASGKPSPKIITAIARELLGFIWDIGITSSREVASS

SEQ ID NO: 136447 - protein, 347 aa, unidentified
MTQAQIYIYGIDLGKNWFHLVAMDRMGHVLTKQKLTRSQLKQFISTTPPCRVAFEACPGSQYWGRLFQQAGFEPKIIPAQFVKPYLKSNKNDFNDATAIAEAGSRGTMRCVPLKSHEQLALQATHRVRQRFIVERTATVNQMRALLLEYGLTVPVGRKVFERSLPTILEDAENGLSDFIRALVLRLRERWQQLDIQIDDMSLMLGQASSASCLCQKISTVPGIGPIVSTALIAAIGNGSQFKKARDLSAWLGLVPKQYSTGGKSSLGGISKRGNSYLRQMVIQGAKALKIHMKRDKSSLGEWVARLEAGHHHHVVLIALANKIMRICWKVLTSGRDYQPYPNASAAV

SEQ ID NO: 136448 - protein, 364 aa, unidentified
MKRKVYVGMDVHKETIRIANLTNNTKEIVKEQQIKHNEVQIKKFVNKLKSEWNEIHSCYEAGVTGYPLYRYLKSLGVNCILVAPGKIPRQSSDKIKTDKRDAIKLAKLLRSGELESIHVPSEEDEAVRDYLRSRDSLRLDLGRNRQRLMKFLLRKGITYSKTKYWTVSHNKWLNNLQFNNEILQETFNDYYSRVRVQEENLKAMDKRIQEIAESEPYREKVGILRCFRGVDYLTAMFLLCEVCDFKRFKTAGSFMSFLGLVPGEYSSGSKRKQTGITKTGSPRLRRILTEAAWQHRFPGTGSKVVTARRSGQPALVVALAEKASLRLHKKFRNLQQRGKTPQVIITAVSRELSGFLWAAMNLVA

SEQ ID NO: 136449 - protein, 314 aa, unidentified
MTPGRFVGIDVAKRQLDVAERPSGERWSVSNDVAGIAGLVERLRGGGPVALIVLEPTGGYEMAVVAALTAAGLPVVVVNARQVRDFARAVGQLAKTDTIDAAVLAQFAEAVRPELRALPDDMTQALHGWLARRRQLVDMLRAEEQRLPVASPGIRPQIQRHIEWLRAQLRDVDTELQSLIRQSPVWREQENLLRTVPGVGPVLATTLLADLPELGRLNGKQIAALAGVAPLNRDSGQHRGARHIWGGRAQVRAVLYMATLSAIRCNAVIRAFFTRLMAAGKPRKVALTACMRKLLTILNAMMHRRVAWQPPLAA

SEQ ID NO: 136450 - protein, 344 aa, unidentified
MKEVITIGLDLAKNVFQVHGVDGSGDTVMRRQLRRSQLLPFFKKQRPCLVGMEACATSHHWARQLIELGHGVKLMPARYVKPYVKRNKNDAVDAAAICEAVTRPTMRFVAVKSAQQQSVLMLHRTRELLVRQRTMLVNAIRSHMAEFGIVAPVGVPRVKELFVVIADADDDRLPAIARACLEGLANQFLSLHEEIATAERRIHAWHRSNEASRRLETIPGIGPITATALAATITDPSVFTSGRELAAWIGLVPRQSSTGGKERLGRISKQGDQYLRWLLVAGAMSVIRHAKRRGTTSLPWLANLITSKPTKVAAVALANKIARIAWAVLRQGGTYQKPATAAAA

SEQ ID NO: 136451 - protein, 365 aa, unidentified
MNDSITSATRIQPDDCDLFVGMDVDQRSIALTWVNRLGIEKSLKMPHDAEVLLGWLRNQQVGRGVGLVYEAGPTGFGLCDALTRSGYTCLVVSPSSVPTARGKRVRTNRLDSRKLALQLRGGGLEGIRVPSERYRQLRELVHLRRIQIGEVAKAKQRIKALFLRNGLSFPRVTVGGYWPQALICELRQMECPGALGYKLGCLLDSLEFFRYQAASTQMAIRQMVESDDELSDSVRLAMSIPGIGWIVASYAVARIGDWRLLKSSNEMSSFFGLVPSEDSTGEEPDRGSITKTGDPSLRSMLIEGAWMAIRKDAELAEFYKRTYSTHPRHLAARVAIVAVARKLAARLHCVLKERREYQVRAKARA

SEQ ID NO: 136452 - protein, 466 aa, unidentified
MKHNTTKPSKKSDRGNVVKYTTSLPKQHPHCAGIDLGAREHWVAVPPDHSETPVRSFGCCTPDLQAMGAWLRECGITSVAMESTGVYWVPVFQILETFGLEVKLVDAHHVKNVSGRKSDVSDCQWLQQLHSVGLLAAAFRPEDSICVLRSYCRHRESLVQGCAQQIHHMQKALEQMNLQLHKVISDISGVTGFKIIRAIVAGERDPQVLAQHRHPNIKCSTEKIMDALTGDYRPEHVFALQQAVELYDIFQCKVQQCDEQIQAHLSTFERKAQAGSIPAHRNKTKGKRRKNEPYFDLRKSLYEVAGVDLTQIDGIDALTAQVILSECGHDMSPFPTEKHFASWLGLCPNNRKTGGKIRSRHTRHVQNRIANALRVAAHSLHHSKSALGAFYRRMKGRLGPAKAIMATAHKLACQIYRMLKFGQEYHDIGAQAYEERFLEKRRRALINNAKDLGYDLVDGKTGELVS

SEQ ID NO: 136453 - protein, 338 aa, unidentified
MKLYGGIDLHSNNSVIHLIDKSGSNVLKKRLSNNLPMILELLEPYSDVIEGLVVESTYNWYWLVDGLMEAGYKVHLANTAAIQQYSGLKYGDDDSDANWLANMLRLNILPEGYIYPKEARMVRDLLRKRLQLVQQRTLNLISIQGLYTRHLNKRLNSSKIKQLTPQIIAQDFCDPNVQLAVNGNLAVQQCLTQQIKNIEKSLKQQLKLKDEFIQLTSIDGVGLILALTIMLETGSITRFEKVGNYASYCRCVSGGRYSNGKKKGTTNAKNGNKYLAWAFVEAANFAIRHNETIKKFYQRKLAKTHMMVAKKAVAHKLARACFYVLRDHVEFDTKKAFG

SEQ ID NO: 136454 - protein, 317 aa, unidentified
MEVTSIFVGIDVSKARLDVVIRPTGERESVANDKAGIKGLVKRLAKIQPTLIVLEATGGFERQIMHALVSAELPVVVVNPRQVRDFAKATGQLAKTDSIDADVLARFAEAVRPALRPLPDAVTLELRALIARRRQILEMIGAENNRLAMASKPVRKRIDAHIRWLEQELERADKDLDRSIQQSPIWRENEELLRSTPSIGPVTSRTLLAELPELGALDRKQISALVGLAPFNRDSGTLKGRRSIWGGRASVRKSLYMAALVATRHNSVIRDFYKRLTAKGKVFKVALVACMRKLLTILNSMIKHKTSWSKTFSLQTT

SEQ ID NO: 136455 - protein, 393 aa, unidentified
MFYLGIDIAKNTHVASLMDEKGKTIFKGFSFSNSTDGGKSLLEIIKKHSEFTNVTVGMEATGHYWLSIYSFLYDYDFHCIHVINPIQTDGWRKSAEIRKRKNDTIDSVLIADLIRYGDFVETTLSNADLYSLRNICRMRNYLIQSAGDLKRKVICVLDQVFPEYQTIFSNTFGTTSKQLLLDYSSPSDFEELSVENLTEILENLSRKKVGQSTAEKLINSAKNSFGITFSKESFTFQLKLLIEQIKFIDNQVKDCETEIKKLMKKINSPITTIPGIGPVLGAVIISEFGDISRFDKPSKLVAFAGIDATVSQSGEFEGTHNVMSKRGSPYLRKALFQAALVASNTDPVLKEYYQKKRAEGKHHKTCIGAVARKMCNIIYAVLKNNTTYEVPKQ

SEQ ID NO: 136456 - protein, 354 aa, unidentified
MYYANRVDFTGQPIYIGMDVHKKSWTVSIFMEHLEHKTFTQPPDVETLVSYLRRHFPGANCTAVYEAGFCGFWIHDQLQAHGIACRVANPADIPTRDKERRRKGDRSDSRKLARGLRSGEIEGIYVPARAAVEDRSLIRTRQAMVRKQTRCKNQIKSLLHFYGIPAPEDSRGWSRNFIRSLEALRLERPSGTLALNAHLEELLQLRQIVARLNCDILALSCTDEYRGRVELLRSVPGIGTLSAMVFLSELGDLSRFASLDKLCGYVGLTPDTHASGEKAGIGDITRRCNPVLRSLLIECAWTAARKDPALALAYHSFCQRTRKTKAIVKIARKLLNRIRFVLNNRCRYVSSLAA

SEQ ID NO: 136457 - protein, 347 aa, unidentified
MKSKQIKTYVGADLHKDCTHFIAQDKAGKEIASRKMDNNGVMFREFLSGLPQPVKVIVESTSNWAWFCQEVKAGGHEVMVAHARETSAKSETREKNDPLDARLLATLLRGNLLKKECWQAPPEILRTRERLRYMQFLSRQKVSNKNRIHSILIRLNIKCPHKDVFCKGGRKFLRSLDIAPEYKAGITRSLELIERIEASLSEDLEFCRRMAQEDTLVGILTTMPGVSAQLACMIRFETGDVDRFERAEAYVNYTGLVPGKRSSSEHSKEIGVTKEGSFWLRWAFVQAAQTADRQKKGRLSAFFWKQYRKTRNRNKAIVATAREMAVIAYHMMRRKQEYYEPAMFVCQ

SEQ ID NO: 136458 - protein, 312 aa, unidentified
MVEHCYGGIDVSKDRLDVQVLPQGRCFSVANTSAGWSQLVDRLRGLSIAALGIEPSGGYERGVIRALLAAGLSVRRINPNKLRQFARARGVLAKNDRLDARLIAEYVAIMPTRVVHRDPAAEQLAAVVTMRRQLSDEHVAVENQTAHIEDAMLRRLNKRRLARLEADILLLDNRMAEIVASNANLARRYDLLTSMRGVGPTLAFTLIALLPELGQMSRKQIAALVGLAPYDFDSGKLKGHRCIYGGRIPVRNVLYMAALSAARYNPALKTFHNRLAAANKKPKVVIVAVMRKMITILNAMLRDNVAWQPKSA

SEQ ID NO: 136459 - protein, 442 aa, unidentified
MIVIGSDPHKRSYTSSAVDAGTGELRSSETVPATSAGHERLLGWARGVDRERVWAIEDCRHVSGKLERFLLARGERVVRVPPKLMAGRRRGSREAGKSDPIDALAVARAALEEGIQTLPVAALAGPAREVKLLLDHREDLIAERTRIQSRLRWLLHDRWPELELPTGCLDRPLWLDRLAGRLARSSQDADVRVMRAQVRRIKELTREANALERELRLLVAGLQPHLLDLPGVGPLTAAKLIAEIAGIERFPTPAKLARLAGIAPIPASSGNRTRVRLHRGGNRQLNAAFHRIAVTQMRVHQPARDYIARRLSRATWWLTRHAAPPSWRRPQAELDESARAAALEAAVDLHTFVPSELEAMAVRAGAADVTTKCEELTAAWFGWPVRTFEAAVPREKLGWQWATFAMRSWQRLSTVDRALARIVPKDFYYNAEITGTKPCTHS

SEQ ID NO: 136460 - protein, 342 aa, unidentified
MKDTMIGVDLAKRVFQVHGASMTGHVKFRKKLSREQFRKFMAEQSGCVVVFEACGSASYWAREMEKLGHEAKLIAPQYVRPFVKRQKNDVADAEAIVIAAQRPEMRFVSPKSEDQQAKAVLFRARERLVRQRTEGVNALRAVLYEYGHVFPVGLAHLKRIEALVEDPGCDLPALVVTECQDLLAQIAEKTERIGCKTKTLKALAAETDTARRLQTMPGVGPLTALAIEAFAPDLAQFSSGRDFAAWLGLVPRQHSTGGKERLGRMSKAGQSDIRRLLIIGAMSRIVGRARHKIPAESWIERMLARKPKMLVGIALANKMARQVWAMLMKKEDFRDPALAAAA

SEQ ID NO: 136461 - protein, 436 aa, unidentified
MRGCRCSMVMGFTKLIEHFILQRKKVISMNTLYVGIDVSSKSNVVYLMLPNGDKHSNFSVANSREGSTQLVKRILSALTSHSLDTVLIGLEATSVYGDNLVYFLREDATLAPFNRKIHVLNPKQVKKFHDAYNDLPKNDYVDSFVIADCLRFGRINKEVYLGDYRYKALQNLTRARFFAVQNLVKEKQRFMNVLFKKYSTMTQEKVFSDTFSTTALAVYDEFDSAEALANMDLHELTDFIMEKGKNRFPNPDAVAKAIQKAARSSYRLPKTVNDSVNQVLSISITSMKALESQIKEFDKAIQAQMELLPNVLISIPGIGPVYSAGIMAEIGDINRFNNQAALAKYAGLAWKQHQSGGFESEVTRLIPSGNRFLKYYLCEAAFSLVRCDKEYSDFYHLKYKEVNRCQHKRALALTARKFVRLVFRLLKDNRLYRPAK

SEQ ID NO: 136462 - protein, 398 aa, unidentified
MLSIGIDVSKGKSTVCGMKPGGEIVYAPFEVQHTREGMSELVSLLRSSGEEVRVVLESTGSYHCPVVATLLENGIFVSVVNSLRMKRFCSQSIRKVKTDRIDAMQIALYGLAYWQELQPARLPEDTYRELQLLARQYYQMTSLLIKAKVDFNAICDQVLPGMQELMSDHAGRHKLSDFVLRYHHTTHILEMGETRFRKDYCKWAEKKGYRNCERMAVLIFATAQNGIPVLPNAPSTQIVITEAIRVLHTVEASRDAILTQMQALAKTLPEYSLVREMPCIGDTLAPRLIAEIGDVRRFHSKRALIAYAGIDAPPYQSGKFSANNRHISKRGNRYLRKTGYEVMQSYVMHKPANDPIFTFIEKKRSEGKSGKLAMVAGLNKFLRVYYGKVTELYRSLPQ

SEQ ID NO: 136463 - protein, 384 aa, unidentified
MRNQSAWLDRSVTPPKLSSALRLVPFSSSTENGDDMITLGIDAHKRTHTIVAVDEAGRQLGVRTTAATTTEEHLALVRWADQFGSPRTFAVEDCRHLARRLERDLLGAGERIVRVPPKLMAHARDAARTYGKSDPIDALAVARAALRQPDLPIAQLDGPSREIRLLVDHREDLVAERTRILNRLRWHLHELDASWDPPVRSLTRYVQLEKVAQRLRGCEGTVARIARELVERARQITVAERALTREIETLVTCVAANLLSMPGVGVLTAAKIVGEVADIRRFSSKGAFARHNGTAPLPVWSSNHERFRLSRTGNRQLNCAIHRIAITQARCYEPAKDFLARRAAMGNTAREARRALKRKLSDVIYRTLLLDSTNSETMALEWAA

SEQ ID NO: 136464 - protein, 414 aa, unidentified
MEIVHSRCAGMDVSKRDAKVCVRVAGRGRRKTVETVRTWGSTTNAILALREHLINEQVSLVVMEATGDYWKPFYYLLEDADFEVMLVNARQVKNLPGRKSDVSDAAWLAQLGAHGLVRGSFVPPAPIRQLRDLTRARTAMTRERGREIQRLEKLLEDAGIKLSSVASDITCVSGRLMLQALIDGQHDPAVLADLAKRRLRAKIPELTEALTGRFSDHHAFLAGMYLESIDQRSQQIAELTARIEVVIEPFRAFCDLIGTIPGIGERSAEVIVAETGADMNIFPTAAHLASWAGTCPGSNESAGRVKSTATRPGNPYLKAALGAAALSIANTRDTYLAAKYRRIAARRGPKKALVAVEHTILVAIWNMAHTGALYDDPGADYYTHRDPARARRNAVNQLQRLGYQVTLTPAVASA

SEQ ID NO: 136465 - protein, 430 aa, unidentified
MKSNTQNAKIEAITEKTLVLGIDVGSEMHYARAFDYRGIEYSKKPFKFSNTEAGFVTFKEWILDLKERHEKDKVVPGMEPTGHYWFNLGKFLQDNEMKPVLVNPHHVKKSKELDDNNPTKNDRKDPKVIAGLVREGRYMIPYLPEGVYADLRTASNIRFQLQAELTRIQNRISRWFNIYFPEYKTVYGKPDAKSGMLILKAAPFPEDILTLGINGVNQIWRDAKLRAVGKARAKTLIEAAEHSVGSKEGAVSARMEIRMLLEDYESRNIRLQEVMTLIEGLVKQIPMAEKLLEIKGVGIRTVSGFLAEVGDISRFNNPKELQKLAGLALVENSSGKHKGETTISRRGRKRLRYLLFEVAMSLVSKNQEFRELHNYYTTRRLNPLKKMQSLMAIAAKLIRVFYAMLTKGVDYDPKKMVSDIKRPAVYLQAA

SEQ ID NO: 136466 - protein, 371 aa, unidentified
MGESSKKLFVGLDVHKDTIAVAYAPEDRGADVESVGAIGTRQCDIDKVIRRLESKGATLVFVYEAGPCGYWLHRYLTRQGFSCAVVAPSLIPRKAGDRVKTDRRDAMTLARLLRSGDLTSIYVPTVADEAIRDLSRGREDAVGDLKRSKVRLKAFLLRQDIRYEGRANWNAAHLRWLARVVCPTPAQQIVFQEYVHTVTEQSERLRRLESELHTAVKTWRLYPVVEAVQALRGLDLTGAGTLIAEVGDLTRFDTPRKLMSYLGLTPSEYSSGAHRRQGGITKAGNGHARRALVEGAWAYRYPAKVSRHLQLRLEHVPPEVRAIAWKAQVRLCKRYRLLSARGKHVNQVVVAIAREMAAFAWAIARTVPVAS

SEQ ID NO: 136467 - protein, 374 aa, unidentified
MENTITYAAMDTHKKQHKIALHYPGREEIVEFAVNNTAADIKKMVNKIKKQAPGNIEFCYEAGVCGFALKRRIEQLGWRCMVIAPSLVPRKPGERVKTDRRDAKKLLVMFKAGLLTEVHAPDEHQEAARELTRLRETAKDNLKRVRHQLLKFLTRHGYVYRQGRHWTQRHIAWLRSLEFTEPMLKDVFESYFNQMIYCAGRLENLDKEVALLADSKEYKELVGLLCCYHGIDTLTAITIITEIFEFGRFESPRHLMSYLGLTPSEDSSGDKQKKGSITKTGNKRIRRLLNEASWHYRHMYVPSAALKKRRKGQPKWAIEIADAAGRRLSKRHRYLIHKGKMPCKANIAVARELAGFIWFTITQYHARKDMVDAA

SEQ ID NO: 136468 - protein, 429 aa, unidentified
MNCTQNKKIEQVKETTMIVGIDVGSEKHYFSAFNWRGIELTRKPVAFSNSMEGFNSFYNTIVELMQKSELEEALVGIEPTGHYWFDLGQFMGEKDIKFVMVNPHHVHKTKELDDNSPSKNDRKDPRVIAGLVRDGRYFYSYMPTGAYAELRNASNRRFVLVEEQTRAKNRLQKWIAVYFPEYKGIYTHIDAKGGMLVLKKAPTPEEIVRLGVEGIIKIWKDAKLRGNGHKKAMLILAAAMRSIGLKAGLTEARMEIQDLIEDYELQTKRLERVNDLIKGLCQQVRYADKLLEIKGIGITTVAGFIAEVGDITRFDSTKELQKLAGLELVADSSGKHNGKTKISKRGRKRLRYLLFEAAISVVGKNEEFKEIHRYYTTREKNPLKKMQSLIVVACKLIRVFHAILTKGIRYDASKMLKDIRHPGEQLKAA

SEQ ID NO: 136469 - protein, 390 aa, unidentified
MTKDTLYIGLDTDKKCIDVGVAGPLPGGEVRYFGKITNEAAALDRVIKKLRGNGRRLMVCYEAGPCGYGIYRRLSSKPGVACQVVAPSMTPRRPGVRVKTNRRDCLMLAKLLRAEELTPAWVPDAAHEAMRDLIRARATVGADLLRCRQRIASFLLRQEIRYVGKPWTQKHRIWLGRLEFGASAHQPMFGEMLDALDQATARRKRLQDHIAELVPSWSLAWLVDALQALRGYRLINAVTLVAEIGDPRRFDSPRKLMGYLGLVPSEVSTGDSVRRGSLTKAGNRCARKALIEAAWTYRRPAQAPRAEPQPQSAAVRAIADKASHRLSGRYRRLVARGKLANVAIAAVARESLGFIWAIAHAAAPQPSPQSTSIAPGSRRQGRCAPPPAVA

SEQ ID NO: 136470 - protein, 353 aa, unidentified
MKCDKYMGMDVHQAMTVVVVLDADGKVILETMVATEAAPIIRLVQSLSGPLHVTFEETTQAAWLHDVIRHFVTEVVVCDPRRNKLLAEGSKTDKVDARKLADLLRTGMLRSVYHGHEVTRKLKELVRAYETLSGDSRGTMTRIKAIFRGRGIRTAGRGVYQPKQREQWLEMLTEPGIQQRAAWLYEQLDQLRVLRRKAKQVMLEESRKHRAVGLLKTIPELGCIRAAFIVATVDTPHRFRTKRQFWSYVGLAVVTHMSSEYEMKAGQVVRRRKPLATRGLNHNCNHRLKEVFIGAATSASQHKSYESVRERLNHNGMRAEMARLTLARKIAAIALMVWKKGVEFDPKKLNATT

SEQ ID NO: 136471 - protein, 414 aa, unidentified
MEVIVERCAGLDVHKDTVMACVRRPGSGTRRAQEIREFRTWTSSLRELRDWLAAEGVTQVAMEATGVYWRPVWTELEALETVEVLLVNAQHVKNLPGRKTDVNDACWLAQLLECGLLRGSFVPPPVIARLRDLTRYRTKLVQDRAREVQRVQKLLETAGIKLDSVVSDVMGKAARRMLDALIAGQRDPEVMAEMALTRMRPKIAELRLALEGRFDDHHALMLSLHLGHIDQLTATIERLDAEVVREIDPFVEQVARLCTVPGIGQRIAEVVIAEIGVDMTRFPTAAHLASWAGLCPGHHESAGKKRSGKARKGDAALRVALCEAAWSAARTKDTYLAAQFRRFSRRMGKRNEGKAIFAVAHTMIVIVWHLLANGVDYDELGGDYFDRRDTTAETRRHVAALQRLGHTVTLDTAA

SEQ ID NO: 136472 - protein, 387 aa, unidentified
MVQVNDLSRSLTAFDPISSLVVVVEMSKASWLVSGAVPGVERQPLKKLEPDATALLRLIERWRNEAVRAGRPISRIALAYEAGRDGFWLARWLIARGIEAHVIHSASVAVSRERKRAKTDRLDAAMLMRVFLGWLRGERGHCGMVAIPTMEEEDARRPSRERESLVDERSRLTNRMKSALARLGIRGFKSHLRKAPERLAGLRTAEGTGLPANIIEEFRRDMARLALVREQISSIEKTRAERLERAPDTGPHAMVRLLARVIGIGIETADMLVREILSRKLRDRRAVARYAGLTGSPDESGLKRREKGLAKAGNARVRRGLIQLAWRFLMFQKDSALAQWYRTRTEGPSGARKTTMIVALARKLLIALWRLVTTGEVPDGVELRPAA

SEQ ID NO: 136473 - protein, 277 aa, unidentified
MVFDVTDSNGNYYQFKNSASGFKKYVKLLDINSHCVMEATGYYHYQLAYFLLESGIKLFVENPLLVKRFIQMKLSNIKTDKSDSKLICEYAKQVELKLWKGNFKHQTECLQMTRLLSVYKKQSTMLKNKLHGEVVLGNPFKAVVQCLKRSLKHVQKEMKNLEDKLMVLVKESHQDVLIRLKTIPGTGNKTAVMLVVLTDGFDRFTSGSELCSYASLTSIIRQSGSSLKGRPRISKMDNQKLRNLLVMCSFNVCKPACRLADIIRCVGIFMSDLWPKE

SEQ ID NO: 136474 - protein, 413 aa, unidentified
MDILHPCCAGLDVHKEKVVACVRKLQGGSVRQEVRTFRTETNALLEMADWLTDEGVTHVAMESTGVYWKPIWNLFEGLFEMLLVNAEHIKQVPGRKTDVKDSQWIAELLQHGLLKPSFVPEKPIRQLRDLTRQRVQLIRQKVQVANRIQKTLEDCNIKLGSVASDVLGASGRDMLKAIIAGENDPITLAELARQRLRKKIPQLQEALCGEIEDHHRFLLKVLMEQVEFLEAQIDKMSARIGEVLPAPFAQAIDRLDTIPGIDRRAAENIIVEVGADMERFASAAHLASWVGICPGNNESAGKRKSGRTTKGNKWLRVVLVQCAWAASRSKGTHLRQLYGRLVGRRGKKRALVAVAHRLLVIVYNVLKKGQVYVEPVQTAPNRQQDKERLKQRLLKRLEKLGVTIPQEMTKTVA

SEQ ID NO: 136475 - protein, 337 aa, unidentified
MKFCGIDLHSNNSVVVVTDETDRVLVSRRCPNELTPIIALLDPHRDELAGVVVESTYNWYWLVDGLMAAGLNVKLANPVAMKRYDGLKHSDDRDDAVFLAHLLRLGILPTGYIHPPHERALRDLARKRIQLVRTRTQHILAVENIAARQFGHSFSCNEIKGFSAASVDRLGLPIDVALAMKANVVVIQALEAQIAELDARLLQQAKLQPEYLLLKTMPGVGEVLATIIMLETGDIDHFAEVGNFASYARCVKSAHYSNGKKKGEGNAKNGNAYLIWAFIEAANFARRFSDDAKRFFEKKKAKTNSVVATKALAHKLARASYHILKEKQPFDAKRCFA

SEQ ID NO: 136476 - protein, 418 aa, unidentified
MENQYAVWVGIDWADKKNVYAVQVAGSERVKIGSFIQTPVGIDEWVQSLRKLAKGGKVAIALEQKKGALIFALMKYDFIVLFPLNPNSFAKYREVWAPSGAKDDPTDASFILDMLVHHHKKLIAWVPEPVEVRLLQRLTEQRVKVVHNLKRVGNRLTSTLKEYFPEVLEIFSTISRTIVCEFLLVYPTLEIAKNASEQELHSFFRSHSSGSAKLTAKRIAIIKNAAPLTTDFAVISSNALLVKGLARELKVLNQTIAEFQTEIEKIYCSLPDSKIFDSLPSAGEVSAPRLLAAMGTDRSKFNSAEELACFLGIAPVVERSGSQCWIHTRYKCSKPLKQAFVEWTFLSLRSSYWAEELYKKIRAKGKAHSVAIRAIAFKWIRIIFRCWKDRTTYCEVNYLKALKKAGSPLTSAQLQLAV

SEQ ID NO: 136477 - protein, 355 aa, unidentified
MSQEKYVGMDVHQATISVAVMDASGKLIMECLLETKAATIVEFIQGLHGTLALTFEEGTSAAWLHDLLNPHVSRLIVCDPRKAALLKEGNKSDRIDARKLAEMLRTNQLKSVYHGEHGLRTLKELGRSYLTITQDVTRSMNRIKALYRSWAIPCSGSTVYAPRHRAEWLAKIEQPGVRIRAERLYEQLDSLQPLRLQARCELLRESHKHAAVQLLRQIPSIGPIRSALLVALLQTPHRFRTKRQLWAYSGFAVETHDSGEYRSVRGKLQRNRERITVRGLNDNHNKDLKNLFKSAAISASTRPGPLQDFYVALVAKGIRPTMARLTLARKIAAITLTMWKKGVSFDPKQLHRQAA

SEQ ID NO: 136478 - protein, 409 aa, unidentified
MKGCVVMYQNTCITIDVSQNISHIQGFIGPNKPLCKARTMRHSNQGFQFILTLKDIIESKSNETPLIIFEFTGIYHKSLEKFLISQNLKYHIVAPLRAAKARNSEIREQKTDAKDCLTLSKLFYTHSLGIFYSENQTYSSLRKLNRYYDTCMKHLIKIKVNFRETLAVIYPNYNKLFTSVYSDESLTFLKLFPHPSLYTSKSEDEILTILNEKWNHLESWSSSKVKKITPLVDETISGCSITEPETLILLSYITQIEYYLNQIKATIIKMNQLASKLPLYNLVHSLPGIQDILTCKFIAELGDISRFTNYKQIVAYAGIDPMIRQSGDKDGLHLKMSKKGNKRLRTILHLMVSSLIKANRKPNAIKTKYQKKTHQLNPLKPKVASMACANQLVRIIFYMHKTSSTYQYK

SEQ ID NO: 136479 - protein, 415 aa, unidentified
MEVMHPRCAGIDVSKRDAKVCIRVQGSNGRKTSSTVTTWGAMTNQILALRDHLAAQRVTVVVMEATGDYWRPFYYVLETDFEVMLVNARSVKNVPGRKTDVSDAAWLADLGAHGLVRASFVPPEPIRQLRDLTRTRTHITQERTREVQRLEKLLESAGIKLSSVATDITGVSGRLMLQALIDSQGAADPAVVAELAKRRMRSKIPVLIEALNGYFTAHHAFMTRMFLDRIDVHTRDITTLSERIDELMKPFLPARDLLESIPGFSQTVAEIFIAETGGDMTQFPTPEQLASWAGVSPGSNESAGRVKSTKTRPGNRYLKGALGVAALSAARSKSTYFSAKYRRLASTRGPMKALVAVEHAMLNAAWNMLTNGEFYREPGADYYTRQDPAKTTARAVRQLETLGYQVTIQPVQQAG

SEQ ID NO: 136480 - protein, 414 aa, unidentified
MDVFVERIAAIDIGKAVLSVTIRTPQPDSGRRRQVTRSYTTMTNALLTMADWLADEGITRVVMEATSDYWKPVYYLLEASGRFEVWLVNAYHVKGVPGRRKSDNIDSAWLAKVGECELVRPSFVPPEPIRRLRDLTRYRTSLVRERTREAQRMEKTLEDAGIKLTVVASEILGASSLAIITALITGERDPRTLADLAKARLRTKRGDLVEALTGRFTDHHGFLCQQMINHIGHLDQQINILDTQIEQATAPYRQRLDQLQTVPGISTTTAQRLIAEIGVDMTVFPTPEHLTAWARTAPRPRSSAGKTRHGSTGKGNRALAAVLGEITATIARSPTFLGTRHRRLAARRGKRRAIVATSRHLLVIAWHLLTDPTTTFHDLGPDYHLTRLDPTKRTRNLIHQLEQLGHKVTLEPVT

SEQ ID NO: 136481 - protein, 349 aa, unidentified
MAVVGIDAHKRSHTFVAIDDSGRKIGQKVSDTNSLGHLAAIRWARSRFGADITWAVEDCRNVSRLLEQDLLAAGYTVIRVPTRLMARTRASARTVGKSDPIDALAIARAALREPNLPTAYTDQTSRNLKLLVDRREDLIHQRNATTCRLLWRLHELDPDRIIEPKALSSRVNRDTTASWLTGQQGLVAEIARDELADIDRQSEDARALEKRIQDLVEQAAPRLLAVPGCGPLSAAKIVAETAGVQRFPTEAAFARFAGVAPSPAWSGSTRGRWRYVKTGNRQVNAALHRIALTQIRRDGAARAYYRERIEAGEPPMPALRRLKRRLARVVYSRLRADALSQPTRLGPVS

SEQ ID NO: 136482 - protein, 319 aa, unidentified
MNTWVGIDVSCKTLDCAWFDDGKKKHIKVNNDLNGFKRIYEESPKDAAFVMEATGSYYLNVALFLDEKQRYVSVVNPLRVNGFMKADLCRSKSDKADALAIARFGAEKQPTAWKAPTKEMAEMQQLRTLADKLASQIVQLTNEEHAFTQSVLASPDAVLSIRYAVRALKEEKERVEVRLDEIAEKTFPKEVELITTITGVGRATAIRVIATIGDFTRFQSCRQLVSFLGLSPTLKQSGTSLHSRGHISRLGGPRIRSALYFCAIAASRFNAQCKQMWDRMTEKNKPGKVILMAIENKLIRQMYAIVISNKPYDPHFAEI

SEQ ID NO: 136483 - protein, 276 aa, unidentified
MSASPLFVGIDVAKAELVVALGPSRDLVAVPNDESGIRQVLEHLQAASPALVVLEATGGYETAVVAALAAAGLPVVVANPRQVRAFAKAMGILAKTDNIDAHVLALFAERVRPPIRPLPDEALRVLDALLTRRRQLIEMLVAERNRLAHALPPVEKSLKQHIRWLERRLADVDSDMDQAIQQSPVWRAKEDLLRSVPGVGPIVSRTLLADLPELGALNRKQIAALVGVAPLAKDSGTLRGKRMVWGGRAPVRQELRDERQSVAALLAGCRHHRRLL

SEQ ID NO: 136484 - protein, 330 aa, unidentified
MPTTSISVPTVPTVNVGIDTSSTHLDGHALPVNKTFRVTNTPAGHRKLIEDLLPLAVLPSDIRVVIESTGGLELPVALALEQAGIQIAIVKPERVRYFAKAHGQLAKTDAIDARMLAMFCRDVKVPIIPLPPEELRHFRDLLDRRGQLVEMRTMESNRRASTHFEKALESLEKHMAWIDSEIKDIEIELDRRIAANEQWSEIDRILQSTPAIGPQTSRMLIGYLPELGKVDRKAIGQLVGVAPIANDSGTTEGARHIVGGRKQVRTALYMAAVASLRWNEVCKALYKRLTKSGKKPKSALIAVAHKLLTIVNAMVAKKTLWRDSNLAVSS

SEQ ID NO: 136485 - protein, 347 aa, unidentified
MVMIGTDSHKRTHTFVAVDDLGRRLGECTLRANTDGHLQLLAWAARYEAVTFALEDCRHLTRRLESDLLRAGQRVVRVPTRLMAGARRGARSPGKSDPIDAEAVAIAALRHRDLPVAELDGPAREVKLLSDHRRDLVMQRTRACSQLRWHLHELDPDLPVPTRSLRQANTRARVQDFLDSQVGVVARLARTLLARIADLSVEITAIEKELKALVTAQAPTLLAVPGCGVLSAAVTIGETAGVHRFRDKDAFARFTGTAPVPVWSGSSAGKVRLNRGGNRQMNYALHMIAVTQARGIGPGRAYLLKQQGRGKDRTAAVRLLRRRLSDTVFTALRADQIHAPTARPHAA

SEQ ID NO: 136486 - protein, 404 aa, unidentified
MWYAGIDWANAHHDVVVIDDASRQVGSLRVAHSPEGLSQLNAFLEQITGKTRKDQMACILETSRGLLITSLLEAGWHVYPVHPKTVDRRRAASGAKTDAIDAYLLAKHGRAELADLRQLQPDSAIVAELKALTRDQDSLIQSQTRLVNQLTACLKAYYPVALQWFAKLQQHSTLIFLQTYPTPQQAMSAQFPEIEAALRAGGHSSPTKTATKIFETLHTPHLQADPITTRTKSRLMLVLLRQLLPLVEEIAQYDKAIEELFFTHEDKEVFSSLPRAGKRLAPRLLAEIGDDRGRYRDAASLAARASTSPVIFQSGTYAKAHRRYACSKPLRNALHQFAWQTTQQEPWARDYYQRKRTEGKSHTEAVRALSNVWVRIIFAIWSKHESYDPATFQAAKLAHAPRAA

SEQ ID NO: 136487 - protein, 321 aa, unidentified
MSHILGIDVSKAKLDVALRRPDGTLRSKVVENTPAGFGVLSAWLASHGVDAVHACLEATGTYWEAIAQYLADAGHTVSVVNPAQIKAFGGAGLTRTKTDRVDAKLIAAFCAAQCPPPWQAPPASVRTLRALVARREALEGMRTQERNRLPVADAVVRTGIEVHLTHLEQAIADIDMAIRQTLDDDPGLRTQGELLDSIPGLGDRTVAALLAYYGGPLRFESAKQAVAYAGLDPRQHQSGSSVRGKPRLSKVGHARLRKALYMPAMVATTRTAWGRALKQRLAAAGKPPMLILGAMMRKLLCVAYGVLRSGRPFDPALHQMA

SEQ ID NO: 136488 - protein, 336 aa, unidentified
MNGSTGCWVGIDVAKSKLDVALLDERGKVKSHVFANDAKGHAALIAWLHQRRGSPELVRVCMEATGCYSEAVAVALVDAGWSVSVVNPARIKGFAQGELLRNKTDRADAALLARFGLALQPEPWVAPPLELRQLRAMVERLQSLKEMHQQEANRLEAAMNQAGMRESIEGHMQWLQDSIRKLERQINDHIDGHPGLREDAKLITSIPGLGNTTAAKVMAYLGDVRRFRNAKALAAFIGVTPRLKLSGSSVRGRSMISRSGHAAIRHSLYMPALVALKHNPIIKTFGARLKATGLAPKAVVAASMHKLVHLIYGILKSGTPFNPNFMAARLDIQDGI

SEQ ID NO: 136489 - protein, 408 aa, unidentified
MQVTFGIDVSKSTSTVCELIDESKNELTITNDRPGFVQLLKELSAFSKHPQIIFEATGVYSRRPQTFLEDYDYDYIILNPLKAKKEMDLGLRYNKTDKTDAYHLALIQKLHHHPVNQIQSQTYKQLNSLSRFYDQLTSDLVTAKNRLHQALQSTFPEIETLFCSAKGKNYWQIVLHYPHCDLVRKNDKKQIINWLMRLKGVGFKHAQKTTDKLIELANKAYPVVSCNSVEAEQVQYYAQSLLNLSDQREKLIERMVKLAKSLPNHDLENLESIPGFAQTTAVRVLAELGDLRRFSNPNKINAFIGIDPGRYQSGEMDSNLSISKHGNAVARKLLYRAIGQIDNASKTNPCHIADYYESKKLSSQTKGFKKIAIASIHKLIRTIYALIIKDQLYDYNVATHNQKGFSRN

SEQ ID NO: 136490 - protein, 358 aa, unidentified
MKADNNKVSFFENILLFIGIDVHKSKWVVTIRTYELELKTFSMKPSAEELEKFLLKNYPGADYRIVYECCFSGFWIYDYFAERGYKIIVTPTNRIYKDGSIIKTDKIDSRKLALQLSRGLLREVIVPAKTIREYKYIFRIYDKQKMRQGQILRQIKAFLEQKNHPLKWEKWNKRLVEKMKGLKFEDKLFDLKFGNLLKEYDYVTSQIKDSEKIIEKIEEDQGLGRRIQILEKINGIGIISAVRMSVYLFDRKERFLSSEKLNHYLGLTPSERSSGEKITRGRSGMCGNRQLRSIIIQLAWKTVRKDGALLDKFNRVYSKSGSKQKAIVASARKLMTKIYAAVKKEEEYRINIREVKAA

SEQ ID NO: 136491 - protein, 349 aa, unidentified
MSPKLNSGIAVIGIDIGKNSFHVVGLDRHGAIVLRQKWSRGQVETRLANLPPCLIGMEACVGAHHLSRKLTLLGHNARLMPAKYVRPYSRGQKNDFRDAEAIAEAVQRPTMKFVATKTAEQLDLQALHPVRQRLVSQRTGIINQIRAFLLERGVAVRQGLRFLRAERPRILATPCDGLSPRMVRVLEELACDWRRLDERIEGLSSEIEVLARRDAGCKRLMSVPGIGPIISSAMVAAIGTGDTFTKGGDFAAWLGLVPKQISTGDRTILGKISKRGNRYLRVLFVQAAWAVLIKPKSWARHGLKPWLEAAKKRLHHNVLAVALANKLARIAWSLLAYGRVFEATKIQAA

SEQ ID NO: 136492 - protein, 359 aa, unidentified
MTTQSNKLDFTGQNIYVGFDVHLKSWRVTIMTDHLTHKTFTQPPSSETLHQYLSKNFPGGIYHTAYEAGFCGYWIHNELKSLGVNSIVVNPADIPTTDKERDQKDDTRDSRKIARSLKNKELQAIYVPSLRTLEDRTLVRSRSMLVKDITRYKNRIKSFLYFHGIKIPDSFIKSSTNWSNNFIYWLENIDMTEKSGKESLNLLITTMKNLRISLLQITKQINELSKTESYKNDIALLRSIPGIGFITSITILTELENINRFQNIDNLCGFIGLLPSKYSSGEKDITGDITKRGHSVLRSAIIESAWVAARLDPALLLSYNSYCKRMEPNKAIIRIARKLLSRISYVLKNKKPYVYAVVK

SEQ ID NO: 136493 - protein, 353 aa, unidentified
MVVVGSDVHKRTHTFVVVGEVGRKLGEITVKADPKGHDKAIRWARERFGDEVLWAIEDCRHLSARLELDLLDAGERVVRVPPKLMAEQRRLARTRGKSDPIDALAVARAALREPDLPVAAHDEASRELKLLVDRREDLVGERTRMVNRLRWHLHRIAPGDPVADPPAQSLNRAKTRQQLADWLVDQSGIDARLARDILADIDRVTPVINDLEREITALVTAAAPELVALPGCGALSAAKILGETAGVGRFAHEAKYAMHAGVAPIPVWSGRTAGRVRMCKSGNRQLNAALHRIAVTQIRLDGLGREYYRKRLAAGDSTTEALRALKRRLARVVFNILKNNPSTASATGLAAAA

SEQ ID NO: 136494 - protein, 404 aa, unidentified
MNNVAGVDVSKGKSTVSVLRPFGEVVAKPFSVGHTGSELKELANYLKSLDGETRVVMEHTGRYYEPMARFLHEEGIFVSAVNPKLIKDYGNNSLRKVKTDKADAQKIARYGLDNWMELRQHTPMDTIRMQLKTLNRQQRLYSKTKTMMKNNLIALLDQTYPGVNDLFDSPVREDGSQKWVDFATAFWHVDCVRSMNLAAFTERYHKWCKRHGYNFSQSRAIEIHTEAQDLIAMLPKDALTKTMIRQAIDALNAVSASVERLKAEMRALAAQLPEYPVVMAMRGVGDSLGPQLMAELGDVTRFTHRNAITAFAGVDPGADQSGVHEAKSTRASKSGPPELRRALFLVMDCLLKTMPQDDPVYCFMDKKRAEGKPYLVYMTAGANKFLRIYYGRVKEYLASLEYAD

SEQ ID NO: 136495 - protein, 416 aa, unidentified
MKIVRPICCGMDVHKNIIVATIGITNKKTRITEYIQETFSTLNPDLLNLKQWLINHKCFDACMESTGKYWIPIFNILEDEINIYLAHPKYVKAIKGKKTDKKDSKWICDLFKHDLIKFSFIPPKEIRALREISRYRYKLVGMRSSERNRYQNCMTVSNIGIGSVFSDPFGKSAQAIMKEVLESDIIEDEKTLKCIHGSCKNKDKILDSIKHCNIETDQRFKMNESMTHMEELQVHINNCEIEIMKRAAPMFDQFMHITQLPGISTLSAILIISEIGVDMKQFESDKQLTCWAGLAPANNESANKKKSVRISKAGQYLKPLLVQCALGAIKDKEGYFGIKYSRIKKRRGHKKAIIAIARMMLVSIYHMILTGETFNPSDYESFRNPKPPIKQQVLTEESAIEFLKKSGFDVSKLTKP

SEQ ID NO: 136496 - protein, 393 aa, unidentified
MRPPRGALRIAWRHHPGTVAHPRTRCRPSRRRRIAAINEATGRVIADLSLPATHRAFEDALVWARGLDDADRVWAIEDCRHVSGALERFLLAHGEPVVRVPPKLLAGARNSARERGNSDLLDAVAIARAAIREGLDTLPVAQLAGPELDVRLLVDHRERLVAQRTALINDLRWQLHDLWPEDEVPPRALITSRWQNRVGRRLGRCDQTARVRIARDELRRIRDLARAITELEHELATLVARLAPRLLAERGCGVLTAAKLIGEIAGVSRFQTDAKLARTAAAAPIPASSGRTDRHRLDRGGNRQINWALHRIAVTKARVDPETAAYLTRKQAEGKSRPEALRCLKRHLARRVFKLLQPAPPPTPTPLGHRTPTTTTRGVMSHCNTPVGTPALT

SEQ ID NO: 136497 - protein, 360 aa, unidentified
MEKITRAMTCGEATRVGVDLAKRVIQVHAVNAVGKVLTTRALRREQFMEWCVRLPAGCMVAMEASSSAHHWARKLNAMGLDARIISAQLVSPYRLQGHSGKNDANDAAAICEAASRPQMRFIPVKSVEQQSMLCVHRLREGIKEDRTACINRIRGLLAEFGLVVAQGADELKGVLTDLLEDAGNELGTLARLTLQRAQAQWHELNAHLAWCDERIAAHAKTNPAVRAAATLMGIGPVSASAAVATVGDFKQFKSGAQFGAWIGLTPRQHSSGGKNNLGGITKRGDTYLRTLLIQGAKSTVLTAHKRQDRISTWALALRERSGWQKAVVALANKNARILWAVMTKGDAFDANHLSVKPTGT

SEQ ID NO: 136498 - protein, 343 aa, unidentified
MSVIIGVDPHKASHTAVAINGTEVELDRKKVRSGAEQVNQLVAWAQPLGARSWAIESARGLGYLLAQQLVAAGERVFDVPATLASRVRVLSSGRSNKNDPNDALSVAIAALRSGKLREVVPVAHSEVLRLLAKRNTDIGSQRTRLVCRVHALVSELVAGGIAKKIKVCDVDAVLAGVQPTNPVEQLRCDLIVELLDDIRRLDAQLKASHARIADAVAASGTSLTELFGVGPIIAGMLIGYTGDVARFANRDSFAAYNGTAPVEFSSGGRVVHRLSQRGNRALNHAIHMAVISQLRQPHSDGRAYFDRRVAEGKTKKEAIRALKRQISNAVYRCLIADARKARS

SEQ ID NO: 136499 - protein, 331 aa, unidentified
MFPVGIDVSKNTLDLCMLYDGIKGRIKTRNIQNNRHSVENILRWLRLQHCSPEDVHVVMEATGVYHERLATELHDAGFRVSLANPHRSREFARGMGIMTKTDKVDAYMLACYAFLKKPHRWEPPAPEIRYLGALLRRRDVLLGDALREENRLEKYLSTDTPADIISSCRRMAQLLREEVSNIERQIKAHIKASPALRRDYTLLTSIKSVGPQLGMHMLVVLRSHNFVSAEQAAAFLGVVPIEKRSGTSVRRRPRMSKIGPPQLRAKLYMSALCGKIYNKRMRNIYDEMCLRGKPKMVAIGALMRKLVHWCYGVLKTGTVFNDESLKQVMST

SEQ ID NO: 136500 - protein, 334 aa, unidentified
MTMEILAIDLGKQSFHLHGIDADGVVISRKVSRAKLENAVTELDPAIVAMEACASAHHWGRRFSASGRQVRLVNPRFVKAFVRGSKNDAIDAEAIFDAASRPTMRFVPVKTTEQQDLQSLHRVRERLVVQRTSLINHARGLLAEYGVVLPKGPWRFRQQVPAAVAEADLSNLARELFTELMDQLTDVEARLAKLDAKLVSICREHEACRRLAALPGVGPVIATALVAAVDDGRHFRSGRELAAWIGLVPRQYTTGGKPRLGGIGRRANHYLRRQLIHGARAVISRLAAKDDGRSVWLKGIVARAGFNKALVALANKTARLALVLLARKEDYLPA

SEQ ID NO: 136501 - protein, 403 aa, unidentified
MVAVCGACGQRGMRWETLKAFSTASTPVCRRQIVHKSTDLPLVSEWQLVRAWGYFQARWIAWSATPISQKQPERLLGPISPHFARMGMNERTVERFVGIDVSKSTLDICIDLPSEELHVDYDDKGIKAVCTRLKSIQPTLIVMEATGGLEMRLACELAALGLNVAVINPRQARDFAKATGELAKTDKVDARVLAAFAKAIRPKVRPLKDEQTRELDDMVSRRRQLVANRVQEALRLDTAASKPLQKSLKAHIAWLDKRIAEIDEDLSHRLKASDVWRAKDDLLRSIPGVGAVTTVTLLAKCPELGTLNRHEIAALVGVAPLANDSGKHHGKRFVWGGRADVRVVLYMATISAVRCNASIKEFANRLKQNGKPAKVVIVACMRKLLTIMNSILKNNEPWSTKNA

SEQ ID NO: 136502 - protein, 459 aa, unidentified
MNNHEELIGIFKSVGHEKTIFIGFDIGKYYHVCQICNGYKEPLMSAFKFNSTESGYKEFKLVFDDILKINMPDYMIFGCEPSGTYYLNLMNQLSIDYPNADFRLVNPLATSAQRKMEMEHNKSDPIDVNAILELMLQGLSYPLPIQDQVYDEIKEYVRYYDKLSSQLVGLRNRILLCIDELYPGFRIPNSTYFNSQAGKQFLRVLPDPRLLKSMNLVDILKYFEEAGEHLSAQMATRFSLAAKDILIPDKPVIKAKINTLKGVIKQYELTEELKMQTKLEIEQIASQFTFSKEILKLVGLGPLTLGRIIAYLNNPYRFSNGDQVAKYAGLVPRHSSSGIYSGKESLTHMGHPQLRSVTVQLTQHLISSTGYFTAFYNHLVIDKGKDINLAIVATVHKVLRVIYHMMIFNEKFNHPSARNSELSSNKIERVTKQKLKQRNRKGTVIPLTQINSEKYHTRV

SEQ ID NO: 136503 - protein, 415 aa, unidentified
MALKIVYKTCCGIDVHKTFVVACIASTNNKGVTTYESHRFSTYTKGLKNLLQWLLSRNCRDVCMESTGKYWIPVYNVLENHCTIVLAHPKYVKAIRGKKTDRKDAKWIADLFKHDLVAGSFMPPADIRQLRDLMRYRFKLTCFKSSEKNRLQNCLTVSNIQLGNVVSDTFGKSAQAILDKLLENPSDTSFDLEPLVFKSLKKKLPELRDAIDGYITPEQAGKLKVIKAHYEDLESRKAELEELILALAAPYQQEISILQTAPGISSDFTAIGIISEIGTNMEAFPSAKHLCSWAGLTPTNNESAGKKKSVRVSKAGCYIKPLLVQCANAVVTSKKHPEIRNRYLRIKKRRGHKKAIIAIARMLLTALYHMLKNGENYNAELYKKSDLPSVDREITVEQAIIIARNQGYKIKSATA

SEQ ID NO: 136504 - protein, 373 aa, unidentified
MPKYSTAFGMDVHLRSTTVCALDADTGEAVTRRFPGNPWGEIAAWMDGFPGPSLAAYESGYPGFAPQRELAGLGVECVVAAVSKIPRSAADSASKNDRNDAARMAKAILAHDISPVWVPSPEVEGIRDLAGAYDGATARLATAKQRLLAFLAKRGFAYGGTTPAGNPRKYWTYDFLRWLDKVRPEDDGGVRTLAALRNEVEAAAEARADLLSEYRAAVDASPIAAEVAALQSIKGCAFALAAAFSAEVGDFTRFRSGRQVTAYFGLAPSQRSSGDSVRLGGISGAGNALVRKLAVEGSWCYAAARHQPKLMPRDTGVPLEIRMHGRKGSERLLRRREEMLARGMPQAKANAATAAELVRWLWALGMMCREGAE

SEQ ID NO: 136505 - protein, 344 aa, unidentified
MKTTTMGIDLAKSVFQLHGVDARGHEVVRRSLKRAQMRAYFARLEPCLIGMEACGSAHYWARELAALGHTVRLMAPQFVKPYVKSQKNDAADAEAICEAVARPNMRFVAVKTVDQQAVLALHRSRAGFVKARTAQANQMRGLLGEFGLVVPQGIASLYRTLPAILEEADNSLPGPMRALLRRLLEHLKGLDLQVAELEAEIVAWHRQNEASRALAEIPGIGPLGASALVASVGDVHGFARGRQMAAWLGLVPRQHSSGGKSVLLGITKRGDSYLRMLLIHGARAVIRAFERKANPPEGWLKRLLARRHKNVAAVALANKMARIAWAVLAHGDRFRPDYSAAGAA

SEQ ID NO: 136506 - protein, 353 aa, unidentified
MNHQSNAHDVILGVDTHLDIHIGVLINSMGQWLGELPVDTTTTGYLKLLTWAQSFGKLTRAGVEGTGTYGAGLVQVLRDYGVIVYEVNRPDRSRRRLQGKSDPMDAENAARAVLAGRATAIPKEQSGVAEALRIACIARRSAVKAKTQAINQLRALLVSAPADIRARLWRSKPEACVAICARLRTLGDTPRLQVLAATLRSLAQRWRALADEVDEHDKTLDALTKQHAKRLRNQFGVGPQTAAVLLSVAGDNPERLKSEAALAALCGASPLPASSGNTIRHRLNRGGSRTANNALWTIAMVRMRSEPRTRAHVERRMGEGLSTKEIHRCLKRYIARELYPLILADLAESARVP

SEQ ID NO: 136507 - protein, 404 aa, unidentified
MRFCGIDWANDHHDALSIDENGQRLEAIRVAHSPEGLSQLDSYLHRMAGAGGREQLACIVETSHGLLIAHLLEAGWAVYPVNPRTVEKRRAPSGAKTDRIDAYLLAKTGRADFADLHRLNPDSEQVQELKTLTRDQDGLIQMQTRLVNQLTACLKAYYPLALDVFGKLQQPCTLAFLRAYPTLQAARAASLEELTTLLKQARYPGASQKAQQIVQQLEQPTLHANEVTARTKSRLMLALVAQLEPLLKQIADYDKEISRLFLSHADSELFQALPGAGARLAPRLLAELGEDRSRYESASSLQALAGTSPVLFQSGTYQKAHRRLGCIKPWRNALHQFAWQSTQQEAWAKAYYQRKRAEGKSHTVAVRALANVWARILYAVWKTNKPYQSATFEQAQLAHAPRIA

SEQ ID NO: 136508 - protein, 355 aa, unidentified
MNSSKYIAMDVHTQTISVAVRDAAKKLVMESVIETKASTILQFIRGLRGDLYLTFEEGTWAAWLYDLLKPHVTNIVVCDPRRNALLQEGNQNDRVDARKLSELLCANLLRPVYHGENGLRTLKELARAYLTISKDLARVMNRVKAIYRSWGIPCAGKSVYHPRHREEWLRKITQASVRRRAELYYEQLDALVLLRKQARQELLAEGKKHKAWNLLRSIPALGPIRVAVLMAIVQTPHRFRTKRGLWKYSGFGVVTQSSADHRYVNGQLERSKKPALVRGLDPAHNHQLKDLFKSAAIQASTRKGPFREFYEALVAKGMRPEMARLTLARKIAVIAFTVWKKGVAFNEKYLKPQTA

SEQ ID NO: 136509 - protein, 365 aa, unidentified
MIVIGADTHKQSHLCGAVNANNGAVLGELEAPARKRGFAALLDWSKELAEERIWAIEDCRHVSGSFERFLVAQGERVVRVPPRLMGASRRSERRRGKSDSIDAFAVARAALREGPETLPAAHLDEAALEIKLLVDHREDLVRARTQDQCRLRWHLHDLWPELQIPAGGLDRPKWLERVAGKLTRAPQGARVRIARELVREVKARTRLIKALEAEIAALVGEEAPQLLEIPGCGVLTAAKLLAETAGIERFSSDAKLARLAGVAPIPASSGNSTRHRLDRGGNRQLNAAFHRIAVTQGRQHPDAQAYLARKQAEGKSRREALRCLKRLLVRVIWKALRDTREPQTAISISPNFQKFQILSSAPSLT

SEQ ID NO: 136510 - protein, 424 aa, unidentified
MSNKIEAVVALMGLDWATDKHDVQLLETGTEKPEHLVLKHSAESIEKWVGKLRERFGEEARIAVCLELAKGPIVSALEKYDMFVLYPVNPASLAKYRQTWAPSRAKDDPSDALLLLELLRRYPDKPKPLKRESTELRTVARLVEVRRSLVDDRVRLTNRLTASLKCYYPQVLEWFDDKNTLVFIEFIARWPSLDAVKKARDSTLEKFFFDHSVRHKRVIDARINAIRESIPLTNDPAVLVPEILNVQTLVEQLRIQSTAVRKVDAELEERSAKLPDYNLFASLPGAGPALAPRLVVAFGEHRDRFPSAQAVAQHVGIAPVTERSGQKAWVHKRNLCNKFLRQSLVEWAGQTIPRSFWAGAYYRQQRAKGASHQVAIRALAFKWIRVLFRCWQDHKPYDESTYLSALKRSGSPLIAFIAKDSVSA

SEQ ID NO: 136511 - protein, 504 aa, unidentified
MTFPPWEPAFWLAIPLRKSVNPFGGDLCFGWLGSLRLYLYKPLGCVSTLWKWMPAGKDITMHYQKVLKMPESIPYLSVGFDVGADFTWMSIMLPNGILIGKPFKIIHSDPQSRELAISKIKEAQEMYSLESRCFLESTGIYHIPLLCFLRDKGFDCAVINPIITKNSTNMNVRKLHNDKFDSKKAAKVGLDASLKASIVPDDAIIDLRNLVRDYYYFKDLQSAIVLKLHAELKVSFPAYLNVFSKVTTQTPLKLLEAYPLAADMLAAPKDELVEIIRSTARFGETYALARYDAICTAAKDAAVFGRALPSNALRIRLYIKMYREYQAHLDSILEELHQAVGKLEGTPDYDRISFIQTLHGVGFLSAVVLIAEMGSFDLFSSPKKLYAYFGLDPGVNDSGKFHGDRVHMSKRGSSLARRILHMVAINNLKVDKATKTPVNPVIYDYYTRKCASKKKSVAVGAVMHKICNIIFAMLRDNKPFELITPEEHRERYAAEHPESVNTAA

SEQ ID NO: 136512 - protein, 374 aa, unidentified
MGCQAGGEAASLTTMITDDKTETNKSYETIKLGIDAHAKWYYVARQLDGATPQPVQKMTFEALLRFVAKQQALAGEVHTCYEAGAFGYHLHRKLEALGVSNLVVQPQDWDERSKGVKTDRIDALALCQRLDRYVRGNRKAFSVVRVPSEEEERERAFSRQRQQLVRERQRLQAMGRSLLAMQGIHVRGKWWKGQTWAAICREAPAWVVERLEVFMKLIEPVEVEERKLTEGIQKVGRKSRIPKGVGPLSFEVLRREVGDWSRFNNRREVSSYTGLCPREHSSGGKRRGGSVNKSGNPRVRAMLVEMVWRMMRWQPGYHALRKWMAVLGDASRSAAVRKKAIVAVARQLAVDLWRLFTGQTTAEKLGLIYLPEAS

SEQ ID NO: 136513 - protein, 351 aa, unidentified
MAGSKRLVIGGVDTHCATHHAAVIDRNGRLIADAEFSATPVGYASMLTWMRSKGKLGQVGVEGTGAYGAGLARYLHQQGIEVLEVPRPDRRLRRQRGKSDPIDAEAAARTVLAGKASGAPKLADGPIEAIRMLRVARNGAVKARTAALNTLRSMVITAPEPLRTQLRSLSSAQLVTACARLRPDPTNLLDPAQSAKQALRSIAQRAQHLDTETRSLRKQLDDLIQTAAPATAAIFGLGPDTVSALLVTIGDNPDRLRSEAAFAHLCGVAPIPASSGKTHRHRLHRGGDRASNSALHIATVVRLRYDPRSRAYADRRTTEGLSMPEIIRCQKRYLAREIFHSLRADYAQLST

SEQ ID NO: 136514 - protein, 407 aa, unidentified
MSAVMIGIDPHKGSHTAVAIGAAEEPLGELRVCASAAQAGTLVAWAAPWPERTWAVEGAGGLGHLLAQQLVAAGERVLDVPPKLASRVRLLQAGDTNKNDPNDALSVAVAALRSKARRQVLAEDHAAVLKVWAKRHRDLARSRNQVACRLHSVLCELLAGGVSKEITAALAARILEQVTPSGPVGTARHELASQFLEDLRGLDAQLRDTKKKLAAAVRTSGTSLTEVFGFGPVNTGTVIGDVTDVTRFPSRDHFASYNGTAPVEVSSGNRKIYRLSLRGNRRINHALHMAAITQIRHAHSDGRAYYDRKIAEGKTHKEALRCLKRRISDAVFARLQADAQQATATAAAKGPGGQPGNDSDSSAAGSHPVNRLFGQATPGPSPTLRPATPASRTMPPEPRSKKIRRSP

SEQ ID NO: 136515 - protein, 366 aa, unidentified
MEKSITPIGTPVGIDVHKRRCKVVELQKGKVQVRKSIANTREDWLELLTELPPDAEIGLEVSTAGYFAMSVLEEAGWRERSHWIHTAGIDSNRRQKNDRLDAERLARKLAAHHLDPLPEAWFPPPEIRMLRLRARARCWLVALRTQCKNHLQSLLGMQGLQAPGSDPFGAAGETWLAEQKLPLPLTESIPQIQRLLKVLQEEIKTSEQYVRAVEGQFPEIALLRTIPGIGPILAPLIWSEIGTMERFHSAKALANDTGLVSSFYDSGDVQVSGGITRQGSRWLRWAFVTAASVAMQYSNPFARRYHRLRRGKKPNVAKAAIAHSLARCVYGVLKHNCPYREDRWGRKVGALEQETRAGARSTKTVV

SEQ ID NO: 136516 - protein, 487 aa, unidentified
MQRIEQSRPKAQKAQEATPSPTRRGWHEMNRKQRRELTRRIQAEDLSLEVVHPDAGGIDIGNETHYVGVPPGRDSQPVRRFGCTTAELKAMAAWLKQCGVRTVAMQSTGVYWIPVYDILEEAGLEVYLVNARETKNLPGKKTDVQECQWLMKLHTYGLLRNSFRPVQEIRMLRNYWRQRNDLVQSAGRHIQRMQKVLTQMNVQLANVITDLSGVTGQAIIKAILDGERDPSALAAWRDGRVKASEEEVARSLEGNWQEDLLFLLKQEQEGYEFCQKQMVECDTRLEDYLEKRPDRSAGASLPEETRKGRRKAKRGNTPRFGLREGLFRMTGVDLTRIDGIDVMTATTVISEAGWDMSKWATEDHFVSWLRLCPDNRISGGRVIGKGHLGTNNRLTVALKMAASSLLKSRSYLGAQFRRLRARLGAPVAIKAMAAKLARLVYRMLRYGMQYVDQGASFYEQKHRQHQIRSLERKAAELGFQLVEAPAA

SEQ ID NO: 136517 - protein, 310 aa, unidentified
MTNLCGVDVSKAWLDVWIETAGHRRFANTARGVAELGAHCRAHQVALVVMEASGGIEQAAFLALWQAGQPCAIAHARSVRQFAQAMGYLEKTDRIDAMMIARFAEAKRMVATPPPSAHQQELTALATRLRQVTGDLGVQKQRLHSARDPFAQASLRQAIAFFTEQANALAARIAALIDRDPLWTALDRTFRQVKGVADRTIAYLLAELPEIGTLTNRAVTKLVGLAPLPDDSGQRRGRRSIRGGRAGLRSILFLVADIARRFDQSLTDFRQRLLAKGLSKMQVRIALARKLLVRLNAKARDTRAALPLQA

SEQ ID NO: 136518 - protein, 385 aa, unidentified
MTNQDQETTFVPRDYDIFGGLDVDKKSIAVTFKDHGIMRKSLRLPYSANQLLNYTRKHFPGQRVAFVYEAGPTGFGLHDELTAASHPCLVVSPSMVPTVARKQVKTNRLDSNKLSDGLRGGQLRGIHVPPLSYRELRHLVQLRDTQVAQLRASKCRIKSLLLYEGIPFPTANGKWSAQVLRQLEALPCNATVRFKLDQLIDALQFHFLAAAKVQKQIRYFCQNDPELRRCISFLVSLPGVGTITATHALARLGDWRQIKDVRQIAGFLGLVSSEHSTGDKENRGEITRIGDSRLRNKLIQCAWTAIRKDPELRAFYRRIYERQPKKVAARKAIVAVARKLTTRMYAVLKEQRPFVIRADSSIAPLTAEETGGPRERLDAAQNEQP

SEQ ID NO: 136519 - protein, 404 aa, unidentified
MGLDVHRDIIVACLVKGAVDAEPEAETRTFSTLIPEMQKLRDWVIESECRNIAMESTGIYWQPIYEMLESCFDGEISILVVNARHMKNVPGRKTDIKDAQWIATLLRAGLLKGSFIPDKAFRELRHLTRYRKSVVHDITAQKNRIDKFLQSSGFRFTAFLSDTFGASGRNIIRHLIEHGSIDREALDKCLKTKTRNRIDEILVALNGSLSEHQRRFLNMVFRHLEDLEAHKHTVEDEITEEVLKHTDALNLLCSIPGIDVTAAAAIIAEIGTDMSSFPDSQHICSWAGLSPGNNESAGKRKSVHINKGNPYLKSMLCEVAWIMASHRKLYLSGWYWKVKQRKGAKRATIALARKILSIIYTMLKTGTPYNEECFEQRRLRCERKRANRLVNELQKLGYVVVAPD

SEQ ID NO: 136520 - protein, 330 aa, unidentified
MSDVPGIDVAARKLDVARLSETGSVQLRQFEQSPAGHQKLVAYLRKHKVEAVVMEATGIYYLDAAVALYNAGIPISVINPRAAHHFAKVMLQSSKTDRIDAQLLAEYARRMTLKPWRAPNEDWLALRDIARRINQLTGMRTAEKNRLHALQAQQHTRKTMIDELLAHIEQLEHSIERLTKAAVDVIGQDPVLTRYDACLTSATGIARASAVALLGELCLLPTQLRSSQVSRQAGLDVRLTESGSSIDQPGRLSKAGNTYLRAGLYMPSLSLVRHDPRAKAHYNALVARGKKKMQALCAVQRKMLTGLWACMHANEPFDSAKLFAIEPDQA

SEQ ID NO: 136521 - protein, 400 aa, unidentified
MNPVVGLDVAKGESQVQAFLDQSKPYGKSFSMKHIKEELDHFLEFLKEIEEVTGQMPMVILESTGHDHSPVIQYLEEQGIPYILLNPIISYQAKKSSLRKVKTDAIDAYQLCVLYYKEDLEPHKIRGIQLLDLRNLSRQQEIVTNMYVEAKLQFHTILDQVFPEYRKVFGDLYSRVSLLILKEYPTSEAVLTAGESKLAESVIEFCPSRSGQWAWEKAKKIMDSASRNPFQINVYQSHVINLRMYIELLFHYQGHLSELEDRIVALANELEEYKIIQSIPGIGEKIAATIISEIGEIDRFNHPKKLVAFAGVDPSVHSSGKFTATINRITKRGSSRLRHSLYLAVLCGIRSSRNKKLKSFFDKKKSEGKPAKVAIVACMNKLLHWVYALLKRKEAFLDLS

SEQ ID NO: 136522 - protein, 341 aa, unidentified
MKVSTLGIDLAKNVFQLHGVDHEGHTILRKKLTRAKFVQFVIQLEPCLIGMEACSSSHYFARLFTLYGHEVKLIPPQYVKPYVKTNKTDAADAEAICEAVTRPNMRFVQIKTEEQQAVLALHTERGILIRERIACANSLRATLAEFGITIAAGQNHLTRELPAILEDGENGLSPFVRTSIYRQSKHIRELEEQVKQVEEALASWYRTQEACQRMAKIPGVGMLTATYVVAAVGNARQFSTAKQFASWLGLTPKEHSSGGKQQLGGISKRGDGYFRYLLVHGARALTAWVNRNGAVEKNSWLQGLLERKHYNVAVVAMAAKTARIMWSMLSHNTEYQPRQLA

SEQ ID NO: 136523 - protein, 341 aa, unidentified
MNVTTIGIDLAKTVFSIHGTNQHGKVVVRKRLNRPKLLAFFAQLPPCLIGMEACSGAHYWARELTKLGHDARIIAPRFVAPYRKSSKNDDNDAEAICEAVSRPNMRFVPVKTEDQQAVLCLHRIRRGLTKERTAQINQIRGLLAEFGLIIPQGRYHARHRIPEILEDAENGLPMLARRLLNNINQRILQLDEEILAYDREIEAMARRDEQAKRLMAIPGIGPQTATAILASAPDPRQFKSGRHFAAWLGLVPRQYSTGGKPRLGRITKRGDKYLRMLLIHGTRAVIAKLADKHDQLSEWAKELVERRGYKRAAVALAAKNARIIWALLMNQTEFKTQPMEG

SEQ ID NO: 136524 - protein, 343 aa, unidentified
MQIRSVGIDLGKTTFHLVALDDNGKVLLKRKFTQKQLITFTANLQTSLIGMEACAGAHFLGRALRAQGHDVKLIPAQFVKPFVKSNKNDFLDAEAIAEAVDRQNMRFVPIKTDDQLDLQALHRVRDRLIARRTSVINQLRAFLLERGLVFAKSPAKLREGMPEILENADEDLTPRMRNLLALLWSEWKDLELQIEEMNDEVERIASSDAACIRLRQIPGIGPLVATAIVAAIGNGAAFHKGREFAAWLGIVPRQYSTGGKARLYGISKRGNNYLRKILIHGARAVVLRSKRDRITMGAWMTALEARAPRNVLIVATANKLARIAWAVLSSGQNYRAAKNPALA

SEQ ID NO: 136525 - protein, 398 aa, unidentified
MLSIGIDVSKGKSTVCGMKPGGEIVYTPFEVQHTREGMSELVSLLRGSGEEVRVVLESTGSYHCPVVAALLENGIFVSVVNSLRMKRFCSQSIRRVKTDQIDAMQIALYGLAYWQELQPTRLPENTYRELQLLARQYYQMTSMLIKAKVDFNALCDQVLPGMQELMSDHAGRHKLSDFVLRYHHTAHILKMGETRFRKDYCKWAEKKGYRNHERMAALIFATAQNGIPVLPNAPSTQIVITEAIRVLHTVEASRDAILTQMQALAKTLPEYSLVREMPCIGDTLAPRLIAEIGDVRRFHSKRALIAYAGIDAPPYQSGKFSANNRHISKRGNRYLRKTGYEVMQSYVMHKPANDPIFTFIEKKRSEGKSGKLAMVAGLNKFLRVYYGKVTELYRSLPQ

SEQ ID NO: 136526 - protein, 339 aa, unidentified
MNRLYAGIDLHSNNSVVVVADEEDRVVYRKRLPNELDAVLGALRPFEKDVAGVVVESTYNWYWLVDGLKEHGYRLHLANTGAIQQYSGLKHGDDDKDARWLAKMLCLGILPEGYICPKQMRGVRDLLRKRGYLIRHRTSNILSIQNLIARNTGRRVSGDGIKKLTDSAVTDMLPNPDHALAAQTSVAAMHCLTTQIKKIEKVVLERVRLRQQFKNLKTVNGIGDILGLTIMLEVGEIGRFATVGNFASYARCVNSTRLSNGKKKGTGNTKNGNRYLGWAFMEAAGFAFRYDETIKRYYQRKLAKAHVMVARKAVAHKLARACYYILRDQTVFDVNKAFG

SEQ ID NO: 136527 - protein, 419 aa, unidentified
MSNIVNPNAAGIDISTKEHYVAVSEERSKESVRCFQSFTRDLHDLANWLKECKVETIAMESTGVYWYHLYTVLLDYGFEVYLVNAYHVKNVPGRKSDVSDARWLQQLHSFGLLRGCFQPDNLTRSLRNYVRQRKQLITQMSREVQRMQKALEQMNIKLNNVIRDIMGKTGMAIISSILDGERDPQVLAQYRDPRIKTSKEKLIKSLEGNWREEQIFNLKQAYEHYFFLQGQLAECDKECERLVNDMSDEDIPKKEIKSGTKQKNNPDFNVSQHLYNAMGVDVTQIYGMKSTNALTVFSETGPGLKEKFPTEKQFLSWLNVVPDNKITGGKVISSRVKRKKNKAGLAFRDAANALWKAQNPLGDYLRRKKAKSGGRQAIVATARKIAVIYYKMVTENVEFDPQVLKFKTQEYLEKKTEIP

SEQ ID NO: 136528 - protein, 421 aa, unidentified
MQEIQDHEEIIARVAALDIGKAELVCCLRLPGPGGSGRRVQEVSTYSTMTRSLQGLADRLRELGVTRVVMEATSDYWKPPYYLLEAHGFEVWLVNAKDVKHLPGRPKTDRLDAVWLCKVAERQMLRPSFVPPKPIRRLRDLTRYRVALVTDVGAEKNRVEKLLEDAQIKLSVVASDIFGVSGRDMMAALVTGERDPKVLAQLARTRMRVRIPQLEEAFVGHFDDHHAFLLTQMLDRIDAMTANIDTLDARIEEQIAPFADAVARLDQIPGVGATAAAVIIAEVGVDMTRFPTPAHLASWARFAPGVKESAGRKKGNGATGHGNRYLARVLGEAAVSASKTDTFLGERYRRIARRRGKKKAIVAVGRSILVIAWHLLSNPDTLFHDLGSDYYENRNGTRAATLNHVRRLQALGYRVTLEPVA

SEQ ID NO: 136529 - protein, 414 aa, unidentified
MVALLEPLSSRSSGVCLEDLVAVPIDVGKHSAMAKVIDFTGAELAKPFEFSLDRSGVDLLVRRTRSAMPATAAMVRVGLEAAGHYHLPLAGGVLPADWELRVLNPGHVAMQRKVNGSRGVKTDKIDLTAIADLLLAGKGTIAPPFADPIMTLTGWVAHRRRRSLVRRRTIQQLTTHVDRCFPGLGRAVWSVALSKAGRLIISELPDPARVARLGAGRLRQFAANRDVRMTTPMANKIVEAARLVLPVPGAEVSRRLLAADLELLDSIEAQIAEADTHINALLPLTPFGVLTTTPGWGPARVGNYGAAVGDPERWPSHRQLYRASGLTPRIYESAGHRRDGRISREGSVPLRVALVDLGIGLWHTEPASRAYGQALRDRGKPGGIIVCAMAHRANKIAYAMVRDEQPWEPARWVT

SEQ ID NO: 136530 - protein, 368 aa, unidentified
MMGWMAPLRHLGAKMPVGQKPPANREASMNEITTIGLDLAKHVFQVHGVDAEGRTVLRKQLRRAQLLAFFSRLPRCLVGMEACATAHYWARELSAFGHEVRLMPAQYVKAYVKRNKNDAADAEAICEAVLRPTMRFVPAKTAEQQAAVLLHRGRERLVRQRTMLVNALRAHLAEFGVIAPQGLRNVGRLIAIIRDEEDTRLPGLARQVLQVLATQIEQIEAAVTGLEKQLMGWHKSNPISQRLATIPGIGPIIATAIAAMVAEPSGFRSGREFAAWLGLVPRQNSTGGKNRLGGISKRGNQYLRRLLINGASANLLRSKATNADPWVIGLRRRRPSLVVAVALANKTARIAWAVMHRQENYQRMATAA

SEQ ID NO: 136531 - protein, 430 aa, unidentified
MHNKNYISVGIDVGSAFSFMTILAPDETVILKPFKITHNNKDSLERAVSEIKKAEELYSLESRTFLESTGIYHFPLFCYLVDCGFNASIINPIITHSTKNGNIRKVKNDKIDSKGIAKLGLSKDIPVSQFPAKLVLELRSLTRKYYDLTDERSAHINKLKGDLHTVFPQYLDVFRDVTGKTSTMILRQYGTPDKILRGHKKTMIEKISKASRKGLAKASERYEKLCAAANAAKTFGCQIDSIYFNIFLTLDLVEKLDSALDSILNRIRQLITFNKNEKFIQQIKLLNTIPGVGFLTAVTIMCEIGDFSAFRNPKQLFAYFGLDPEVNESGKFVGTQLHMSKRGSRIARRAIFAVALASIRTKRNGEGINPYLRKYYELKSGQKPKMVAIGAVMHKVCNIVFAVLRDEKAFELRSPEEHCKQYQRPALAAA

SEQ ID NO: 136532 - protein, 364 aa, unidentified
MYDSMTTVAVGLDVHARSIRLAAVRADELLEERTLPYDEEAVARALRRWPAVRCCYEAGPTGFGLQRYLVERGVECQVVAPGLVPRRPGDRVKTDQRDARKLARLLAGGLLEPIHVPTRELEAARDLVRAREDARLDRMRDRHRLSKFCLRHGRLLPTSSWTIARRTWLSEQRFELVAQQQTFDTYVHTVDLVDRRIEALESAIRETAAQEPWQALVARLRCLRGIDTLTALALVAEIGDFGRFRSAQELMAFVGLVPSERSSGEQRRQGSITKVGNSHVRRLLVESAWHARRRPTVGYELARRQRGQDAIDVERAWRCQQRLYQRWQRMAARGKPPQKIVVACARELAGFVWAIATEQPLRNA

SEQ ID NO: 136533 - protein, 421 aa, unidentified
MMEEVAQWFVGVDWGREAHHVCVLDAAGAIVGERAFTHGGAGLADLCDWVVASTGAEPAAIAVAIEVPHGPVVETLLERGFQVCAVNPKQLDRFRDRFTVAGAKDDRRDAHVLGDSLRTDRHCFRSLAATDPVVVELREWSRMSEDLQQERTRLANRVREQLWRYYPQALDVAGGDVAAEWFLDLWSLVPTPAKAARVRESSVGRVFKKHRIRRLDAAEALARLRRKPLTVAAGTTEAAAAHIGTVVQRLKLVNRQIKQAHRRLDALCDALAGGGEDETPEPSDGPSDVAILKSLPGVGRIILSALLAEASEPVRARDYRALRTLSGVAPVTRRSGKRCIVVMRNACHGRLRNAVYHWARVAIQHDAVSRGRYAALRKRGHSHGRALRSVADRLLAVACAMLTHRRLFDPNHATREVTEAA

SEQ ID NO: 136534 - protein, 462 aa, unidentified
MKSKTPKPKKQKQKISIDQAWEMINPKAAGIDIGSREHLVCAPPGASPNHVRSFGTFTADLEALADWLKECGVTSVAMEATGVYWIPVFQILEARGFQALLVNARQTKNVAGRKSDVQDCQWIQRLHTFGLLQGSFRPKDPYCVLRTYLRYRDEQISARSTQCQHIQKALQQMNVQLTQVLSDVMGVSGTAIIEAILAGEREPAKLAKLVDARVRASQTEIKKALQGDYRPEHLFVLKEAFDLYGIYEEKIAACDEQIVRECGQLPEKIAPVRSPLPPRKAGRPAAKDQMQGQDMRGMLFAKLGVDLTAIEGVGVTTALVILTEVGPDLDRFKTEKHFCSWLGLCPDNRISGGRVLSSHTRRVINRASDALRMAAVTLERSQSALGGYYRRMKGRLGAAEGITATAHKLARIIYRLIKHGEAYVTKGLEDYEKKYQNRKLSALKKTASLMGFELLAKQPATA

SEQ ID NO: 136535 - protein, 348 aa, unidentified
MKFYVKQHKYYCGVDLHARSMYVCIIDEKGAIVKQKNMEAGPAEFLSFIEPYREDMVVAVECMFAWYWLADLCRAEGMPFVLGHALYMKAIHGGKAKNDRIDAHKIAALLRGGTIPMAYVYPSEMRATRDLLRRRNHLMRKRADLLAHIQITNHQYNLSPFHKSICYKGNREGIAERFGDECVSKSIEVNLSLIDHYDKLLRKLEYYIDKKAKVHDPEALFRLRSVPGIGHTLALIILYEIHDMQRFPRVQDFVSYSRLVKSAKESAGKRYGSSGAKIGNAHLKWAFSEAAVLMLRESAEVKKYKAKLVKKHGKAKALTILAHKIGRAVYYMLKRKEVFNLETFLKKK

SEQ ID NO: 136536 - protein, 400 aa, unidentified
MRFYTRQHRHYCGVDLHARSMYVCILDAEGAVLVSKDIAAAPEPFLALIAPYREDLAVAAECMFTWYWLADLCEREGIVFVLGHALYMRAIHGGKAKNDRIDAHKIAALLRGGMLPQAYVYPRPMRATRDLMRRRNHLMRKRAELLVHIQNTNSQYNLPAFGVRIAKPHLRREAASHFGEAAVRKSVELDVSLIDHYDRQLPELERYIESSAHGHDPVALALLRTVPGLGEILGLSILYEIERIERFPRVQDFLSYGRLVKPTKESAGKILGHSGRKIGNAHLKWAFSEAAVCFLRGNRRAQALRVRLAAKHGKGKSLSIIAARLARAVYFMLKRTTPFDPERFFAHSGSAGTKGSSLNVPTGAALEGVRPERSSTKPTVPASTKPELGRHRMRLATQRH

SEQ ID NO: 136537 - protein, 359 aa, unidentified
MNKNSMYFVGLDLGDKFSYITIVDQDGELIEESRLPTTKASFQRKFSTLQPCRIAMEVGAHSRWASHLLTELGHDVLVANARKLRAIYHNPRKGDRADAEILARLGRLDPTLLSPIHHRSPQAQADLAVLRSRDAIVRCRTLLINHARDIVKASGSRLPSCSADSFAHKTAPHIPDPLRPALAPILDTIASLTKQIRAYDRQIATLCQENYPETRQLRSIDGVGPLTSLAFLLTLESPERFTRSRDVGAALGLVPKRDQSGDRDPQLRITKTGDAYLRRLLVGSAQYILGPFGPDCDLRRWGLKLAERGGKNAKKRAVVAVARKLAILLHCLWKNGTTYDPFFQSKKNVIASAAVTATA

SEQ ID NO: 136538 - protein, 346 aa, unidentified
MRFYNQQHQYYCGIDLHVKTMYVCILSATGEVLEHRNIRSTPDALRPLLAPYREGLVVAAECMFTWYWLGDFCAAEGIPFVLGHALAMKAIHGGKAKNDRIDSRKIAGLLRGGLLPQAYVYPPEMRATRDLMRRRLHFVRKRAELLGHIRNTRAQYNAPAITQNLRLRTVRAHMSLRFANPSVRTSIDADVSLLNHYDTVIADLEQYIGVEARRHDAAALHRLQSVPGIGEILGLTILYEVHDISRFPRVQEFASYARLVKCARESAGKITGTRGAKIGNVHLKWAFSEAAVQFLRHTREGKHVLRQIEQHHGKRKALSILAHKLGRAVFYILSRDVSFSMDRFVA

SEQ ID NO: 136539 - protein, 369 aa, unidentified
MVWTAPYGIDCARMRLLRSQTREPSVNQIIRIGMDTSKHIFQLHGVDATEQVVLRRKLRRNQVLEFFAKLPPTVIGIEACGAGHYWARELRKLGHEVKLMAPQHVKAYVKRNKNDGRDAEGLCEAMSRPTMQFVPVKTEEQQAALMLAGVRQQMIARRTQLGNAIRGYAAEFGLTTAKGLDKIEPLLAQIAQDETLPEMARELLAFQGRDYARLQIELKAIEAKLMAWHRANPDSRRLAQIPGVGPIGATALVMKAPDPRLFPSGRHFAAWIGLTPKDHSTAGKTRLGKITRAGDEMLRSVLVAGATAVIKQAKHGRGSPWLLALLKRKSPKLAAVALANKMARIAWKLLTTGESYDGARMPRASALAA

SEQ ID NO: 136540 - protein, 391 aa, unidentified
MIYIGIDVAKDKHDCFITNSDSEVLFKAFTIFNNLDGFNDLYQKIESVMDDVTKVKVGLEATGHYSYNLLGYLIDKGLPTYVINPLHTNLYRKSLSLRQTKTDKVDARTIASMLMSDVNLKSYSDTSYHNEELKSLTRYRFDKVKERAKLKTSVSRLVCILFPELEKLVPTLHMASVYALLSEFPSAKHVATAHLTRLTNLLSESSKGRYGKDTAITFRDSARASIGSNMPAKSLELKHTIKLIQELDSEIDEIENEIKIIMDEINSPILSIPGINYRMGAMIIAEIGDFNRFDSPDKILAYAGFSPSTYQSGQLDGAYAHMEKRGSRYLRYALYNATKYVCHWNPTFAAYLAKKLAEGKHYNVAISHAVKKLVRVIYHLEKTKQQYIKAA

SEQ ID NO: 136541 - protein, 452 aa, unidentified
MTDVDKISMEIVNPRAAGVDIGSRSHWVAIGQGPNDFKEFGVYNEDLFAIAQWLKENGIKTVAMESTGTYWQSLYAVLMSEGFQVILCNGKFTKNIKGKKTDIQDCQWIQKLHSIGLLSGSFLPDESTEQLRTFCRHRSNLLASAASASKKMQKYLRLLNLRLDVVVNDICGLTGMAIIKAICNGEKNPERLADLRHHNCRKSKEEIAKALHSNGRQDYLFTLKQELEMYELFQAKIALCDIEIEKMLNETIDNDENKKQHYIEKKAYKKINKNTPKNIDLNLMAYQHFEGVDLMAIEGMSYSTVLSLISEVGVDGIKRFPTAKHFANWLRLAPNNKISGGKVLSSKVPKGSNRLKIALRNAANAIGNLKDSTPLRDFFQRINFRNGRVSAISATARKLAVIIWNMVVKGVPYHNPEEYLFRDQKKKLGLLKRIQKQITKFELESTDFQFSS

SEQ ID NO: 136542 - protein, 333 aa, unidentified
MNMHPQGGVAKRDQRPNAGIDVSKQHLDACWDAAEQRLVNDATGWDALIAKFKDDGVDLVVLEATGGYERGLVCALQGAGIAVARVNPRQARDFAKSLGVLGKTDRVDARTLRDFADVLARHPDRSKYLTPLGDAQRQELAALTTRRRQRMDMRVAETNRLDQTASARAVRSIKSLLKTLDKQIADLDRDADSHLDRHFQEQRTVLDSVKGVGPVTILTLTAALPELGQLQRRQISKLVGVAPLADDSGPRKGVRRIWGGRSAVRSVMYMATLSAIRHNPAIQVFHSRLIAAGKPKKVAIVACMRKLLTILNAMLRDQAMWDAAKHLQTPKTA

SEQ ID NO: 136543 - protein, 345 aa, unidentified
MKQITTIGLDLAKHVFQVHCADAEGSPVFSRKLRRAEVLRFFQKTPPCLVGMEACGGSHYWAREIAAFGHDVRLIPPIYVKPFVKRGKTDAADAEAISEAVTRKTMRFVPVRSAAQQAAGMVLKTRALLVRQQTQAINALRAHMSEFGIVAAIGPAKASALIAIVRDETDARLPKAAHFALAEVADQIDALMRQIEKLEREVVAEAKRDEDMRRLVTIPGVGAITAASMKALVPDPHGFKSGRHFAAWLGLTPKPHSSGGKERLGGISKMGNPMLRSLLILGATSVLRRARGDANAAQWLIALLARRPFKVVAVALANKMARIIWALLTKGGTYRNTGAATAASA

SEQ ID NO: 136544 - protein, 338 aa, unidentified
MEEVSPIGLDLAKNVFQVHGIDAAGKVLVRRQLRRGEVLSFFARLEPCLIGMEACATAHYWGRELIQLGHTVKLMPPAYVKPYVKRGKTDAADAEAIAEAVTRPTMRFVAVKSMDQQAILMLHKVRDLLVRQRTMLINALRGHLAEFGVVTARGPAGVKAAIVELHAMQDNLPPLASMAFHRLIGRLEAIGDEIRKVEREIVAWCRHNDASRRLMTIPGIGPITASAIAAAVPDASLFRSGRQFAAWLGLTPRAHSSGGKERLGGISKQGDGYIRRLLVTGATAVIRMARQGNPSKVWAARLLERKPARLVSVALANKTARIVWAVLTRHQSYMAPAM

SEQ ID NO: 136545 - protein, 451 aa, unidentified
MARRLPRRDCLPPQLEQVHLNAAGIDVGSESHFVAVPADRDDQPVRQFGAFTADLAALADWLTECGIETVALESTGVYWIALFEFLEGRGFQVLLVDPRRLKSVPGRKTDVVDCQWLQQLHTFGLLSGAFRPAEQVCVLRSYMRQRAMLVQYASQHTQHMQKALQQMNVRLDKVLSDITGVTGMSILEAILEGERDPAKLAQLRDSRCQKDEATIAKALQGTWREEHLFALRQALTLYKVYRQEMAECDRQIEAHLESFAAQTEESLPPRGRGRKPSRNQLKFDARAQVHRVTGVDLTKIDGIDEHVALKVLSEIGTDMSRWPTVKHFTSWLGLCPGTKRSGGKTLSGHTKPCANRAAAALRLAANALYRSKSALGAYLRRMKSRLGAPKAITAAAHKLARLVYNALKYGSNYVDPGQDWYERQYQDRILHSLTRKASELGYQLVPVAPTQ

SEQ ID NO: 136546 - protein, 397 aa, unidentified
MKLIGIDIGKNKHFFCVMDQQTGEIIFQPVSFSNDKEGFDFLVQKIKSYPKDSILIGMEDTGHYHFALLKYLLDLQYTVALINPKTTDFNRKMQGGITKNDKLDTINICDVLDTPERKKQYRITKVNSFDLYEQKQLTRHHHNLKEEENVYKNRLQKCIDIVFPEFNKLFNSKYGIVYMNILKMFGSAENIANTDIRTIRKCFEIEGRGNRTSLTPERLKECARSSIGISSSAEVIQIKHLTAQIELIEEQLTEIDKKIEEFSIQNNSPILSIPGISHFSGTSILAELGDISNYSKPSQIIKFAGVAPLHYESSQFNAQHTAITKKGSKYLRKTLYQIILLILPVIRHNPVFNKYYQLKISQGKGHRCAQGHCVRKLLRIIYRLLKTNQQFDPQLLR

SEQ ID NO: 136547 - protein, 391 aa, unidentified
MSMYFIGIDISKYKHDCCIISAANQKVVSKVIIKNNKAGFNELLTIIHSLANPADIRIGFESTAHYALNLELFLENSLLTFMEVNPVLISVYKKSKTLRRTKTDSVDCESIARWLMTVEYKPHSKGFYHAYSLKSLTRLRDKLIRQRSFYLVKITNVLDHTFPEFKPFFNERFSKTALYLLENYGSAEKMARMNSASYEKLRSLSRGKFSPQQFLKLKALAANTVGVNNSIFDVELNSLLSLYKSLTKEIDTIEKEINKLIEEVHPHYMSIPGIGSLSAAVIYSEYGDISNFSNPGQMLAFAGIEPGVNDSGTESHGGRMVKRGSSQLRYTLINCCLPLIRFDMTFATYYSKKRGEGKPHRVAITHVAKKLIRVIYALERLDIDFNTQKLH

SEQ ID NO: 136548 - protein, 403 aa, unidentified
MNAVGIDVSKGKSMVAIMRPFGEIVSTPFEIKHTTSDISSLVDLINSIEGESRIVMEHTGRYYEVLAHQLSNANLFVSAINPKLIKDFDNDSLRKVKSDKADAVKIARYALDKWQNLKQYSVMDELRNQLKTMNRQFGFYMKHKTATKNNLIGILDQTYPGVNTYFDSPARSDGSQKWVDFASTYWHVDCVRKMSLNAFIAHYQKWCKRKKYNFSQTKAEEIYGKAKELVPVLPKDEITKLIIKQAIDQLNSASTTVEELRTLMNDTASKLPEYPVVMEMKGVGPSLGPQLMAEIGDVTRFTHKGAITAFAGVDPGVNESGAYEQKSVPTSKRGSADLRKTLFQVMDVLIKTMPQDDPVYQFLDKKRTQGKPYYVYMTAGANKFLRIYYGRVKEYLSSLPDSE

SEQ ID NO: 136549 - protein, 368 aa, unidentified
MKKHNSSGKNLKQEQKTWKGPLTIGMDLGDRTSRYCILDGNGDVVYEASVGSTSAALKQVFGQVRKCRIAVEVGTHSPWVSRTLKALGHEVIVANPRQLKLITESSRKDDRVDAEMLARLARVDPKLLRPIRHRGEEAQMDLMMIRARAALVEARTSLVNAARGFSKTVGERLAGCDADQMGVEKASELPKELQEVLRPLLEQVEALTARIKECDRKLEQIAKDKYPETTLLRQVGGVGILIALTFILTVEDKDRFTRSRDVGCYVGLRPRRSESGESQPQLRITKEGDRYLRKLLVQGAHHVMSERSPDTDLKRWGMKLAARGGKNAKKRAIVAVARKLGILLHRLWVTGEVYEPLRNADRQLRKAA

SEQ ID NO: 136550 - protein, 479 aa, unidentified
MNCKQKRTENQALINSTAKNVFSMEEIEKRITVIKENLKASTWKELETQGKFDKNDKLSFISDNMLIVGCDIGSETHYVRAIDTRGRELSKEPFSFSNSKEGFESARRWMLELAAINNKDQIVMGLEPTGHYWFCIACWMISHGISVVQVNPYAVKQTKEIEDNSQRKDDRKDPKPIANLVKDGNFGIPYIPEGLYAEIRGLSSLRDQLMEGRIQAVNRLHKQLKVYFPEYKDAFGKMDGAFTLEVLMNAPFPADIIRLGTEGIKELWHKAKLRGAGYRNAERIVSYAENSVGLKDGDKAAKEAVRWFTQQITEIQKELSKIEDELHQKCHEIPNVENVLEIEGLGENILSGIIAEMGDISRFDDVKEIQKISGLGLVECSSGKHKGQTKISHRGRKKLRTWLFQGAKSVVVHSEAFKSLHEHYTTRAENPLKKMQSLIVIACKLLRVVYTLLLTGRKYDSMRMLSDIHYPETPRAEAA

SEQ ID NO: 136551 - protein, 367 aa, unidentified
MKMYIGLDVHSKQTTFCAQDCEGTVIKEGRVPTSNEGFEDLLERLDAPEGAAIGLETGTQANWVARRLSMLGMNPVVIDAREVRLKARRVGQKSDRRDAFEICDGLRRGIYTGIVYVPSPEVERLRRIISRRRHFIKVRTGQVNAVKYQLRSLGLGDKAKTLTTVAAWEKLLAQTLPDWLGQHIALHFQVWRVVQENIEELEEELKQALGPFAEEMRLLSSAPGVGPITAATFIAVIARPERFAHSGKVVSYCGLAPSTYDSGGRERHGRITKRGSAELRSMLCEAAHHAGKPQHPLNPYFVRVCARQGYKRAIVAVAHRLARILYRMWLNREEFDESKLNVTYEKKEKTRTVYYRIRKPGELARQA

SEQ ID NO: 136552 - protein, 308 aa, unidentified
MIAVGVDTHKDTHVVSALDQLGQLLGELTIEASAVGYGELVAWTRALGEDVVIGVEGAGSYGAGLCEHLKHKGLRVFEVERPRRRERRAGKSDRIDALAAAKRVLAGEGLSTPRAGGIRRGLGALLAVQRACVGERTRLLNQLQALCVTAPPALRERIGRGGGEQLQRRIARMRARPAADAEERVVFELDATLLDEPGVGPISAAKLLVADPARFKHEAAFARCNGTAPLPASSGKTIRHRLNRGGDRQLNNAIHTIALSRSLHHPETQAYLKRRMTEGKTKREAMRSLKRHLSRRLYKRLITVPLTP

SEQ ID NO: 136553 - protein, 372 aa, unidentified
MRHHSEAFIGIDTSKSHNAVAIAEGVRGGEVRFLGEFPAIEAGMRKLIAKLAAKYNRLTFCYEAGPTGYGLYRLIKSLGHECIVVAPSLIPKKPGERVKTNRRDAISLAKLLRAGELTEVWVPDERHEAMRDLSRARLAANKDLQGKRQQISSLMLRLGRCYPGKTTWGPAHMKWLMSQKLEHREQRMALEELLHGIRQEGERVERLEQAIREAVPEWSLAEVVTALQAMRGINLIAAVAILAEIGDLSRFQNPRELMAYLGLVPSESSTGDTVRRGGITKAGNGRARRILVEAAWSYRYPARVGREKQPKVAAASRRVREIAWKAQTRLCGRFRALLRKGKLPTVAVTAIARELSAFIWAINREVVANRQP

SEQ ID NO: 136554 - protein, 349 aa, unidentified
MTVYVAVDFHAREQTVSYCDLADGEIHRRKLRHQHDDVRAFYQQFTGEVIVAFEASGYSAWFEQMLAELGHTVWLGNPAEIRRKAPRRQKNDRRDADLMLDLLLKGDFPRVHGFSEESRTVLRQLRYRHKLVKVRTIAKNSLHAIGINAGLPLKRRLLTEQGIAQLQALSLSPVLTQQRDEWLELIGSMNERIATVEAQLQQRAKDDAAIALLQTHPGIGLLTSLALRYTLLPTSRFSTTRQVTAYVGLDCMEDQSAERRRMGSISKAGSKLLRFLLNEAGHTAARHDPELKQFYRRLLHRRDKPKAKVAVARKLLVRSFIMLRDQIDYAEFVRRGVAARVAREAHSLP

SEQ ID NO: 136555 - protein, 313 aa, unidentified
MSELYVGVDVSKEHLDVASSDGTSLRVGNDAAGHQELVTRFSAAPPALVLMEATGGLERALAVQLSAAGVALRIVNARHVRHFAKATGLLAKTDRLDAQALVHFAQTLKPEPRAIQPEQTLALQALIVRRRQLVEMLTMERNRLRTAHRGVRKDLQSSIRWLEKRLAGVDDDIDGALRECGVWREKVQLLESVPGIARVISVNMLASLPELGELNRHQISALAGVAPFNRDSGRWQGRRSIYGGRPLVRSALYMAALVGARHNPVLRTFYQRLRAAGKPAKVALTACMRKLLVILNTMLKTGQPWGGHLSAHA

SEQ ID NO: 136556 - protein, 410 aa, unidentified
MEVLHPICAGLDVHKETVVACVRHMSGGKVKTEVRTFATTTGALLELSAWLGTGQVTHIAMEATGVYWKPVWHILADGDFELLLANAAHVKNVPGRKTDVKDAEWLADLLAHGLIRASFVPDQPTQQMRDLLRTRKQLVRERISHTQRIQKALEDANIKLDTVVTNILGLTGRRILQRLIDGETLPQALATLAHRNIQASPDRLEAALRGRVTPHHRFLLKLHLDQIDALDAAIASIDKEVEGNLEPFRAAIELLSAIPGISQLSARVILSEIGLDMSRFETAGHLVSWAGLCPRNDESAGKRRSTRMRKGAPWLKTILIQCGWAAMRTKGSYFQAQYYRLRSRRGARKAVCAVAASLLTTIYHMLNNGACYQDLGANHFDQRAKTKHVQRLVNRLESLGYDVKILPKAA

SEQ ID NO: 136557 - protein, 331 aa, unidentified
MFPVGIDVSKKNLDLCMLYDGIKGRIKTRNIQNNRHSVENILRWLRLQHCGPEDVHVVMEATGVYHERLATELHDAGFRVSLANPHRSREFARGMGIMTKTDKVDAYMLACYAFLKKPHRWEPPAPEIRYLGALLRRRDVLLGDALREENWLEKYLSTDTPADIISSCRRMAQLLREEVSNIERQIKAHIKACPALRRDYTLLTSIKSVGPQLGMHMLVVLRSHNFASAEQAAAFLGVVPIEKRSGTSVRSRPRMSKIGPPQLRAKLYMSALCGKIYNKRMRNIYDEMCLRGKPKMVAIGALMRKLVHWCYGVLKTGTVFNDESLKQVLST

SEQ ID NO: 136558 - protein, 403 aa, unidentified
MNSVGIDISKGRSTVAVMRPFGEVVTSPFEVRHTDSELSELARRLKSLTGKTRVVMEATGNYHAPVAKLLHDAGLYVSVVNAKLVHSYGNNDLRRVKTDRKDAVKLANYGLDRWLTLPRYVPEENTRLLLKNCYRQYRQYSKVQTVLKNNLISLLDTVFPNANRLFSSPIRGDGSEKWVDFVAEFWHCRCVSEKSERTFTNKYQRWCKKHGYNFREAKAHTIYAEASGHIGVMPKSETTKLLVEQAASQLRATSAALAALKHEMQSLASMLPEYPVVMDMFGVGPTLGPQLIAEIGDVRRFYSKKALVAYAGLDAPPNDSGDVTGRHKSMSKVGASSLRRTLFLVMSVYLQNAPLDEPVYQFMDKKRAEGKPYRVYMMASANKFLRIYYATVKAYLESLELTA

SEQ ID NO: 136559 - protein, 478 aa, unidentified
MAASNKKKNVMGAPAPLAGPAQPGGEATEVAEERVEVVTYAAAIDVAKASGMVCTRVPGSRSDRKRQTVWQVDATCASVIALMDHLRCEGIQRLVLESTSDYWRCWYYLAEAVGLEVWLVNAKDVKHLPGRGKSDRKDCVWLCKLNERGMLRRSFVPPEEIRDLRALTRTRSRLAQDQVRHQNRAGKVLEDALLKISGVISGLFGTSGRRFLDALVAGQRSPAALAALGGRRLKASPQRLADALTGRFRDVHAFEIATHLRLIDTINDEIARLDERIEQQLAAIAGVAPACTACGLIGGGHAPGSASDGTPVLSLIERLDEITGVGVRNAQVIIAELGTDMSVFPTAGHAAAWARLTPRTFQSGNTTRPGRTGKGDPCLRGALGQSVMAAARTDTRTGEQYRRTARRRGKQKGIVAVSRVICEIAWLLISDRGARFTDLGPDYSSIRSPHSQTRSRIREIERLNPGMKVTLTPAATAA

SEQ ID NO: 136560 - protein, 390 aa, unidentified
MIYVGIDVAKDKHDCCILDDDGRKLYPVFTISNDKVGFDEFFSRIEEVTSDKTEIKVGLEATGHYSNNLLASLVDKGFPTVVINPLHTNLYRKGLSLRKTKTDKVDASSVAMMLMTDRTLKPYSETSYHNEELKSLTRYRFDKVHERSKLKSSLARLVNILFPELEKLVPSLHLNSVYTLLEELPGADYIAGCHLTHLKKLLESSSKGRYSRDKAIEIRNAAINSIGTPMDAKSMELRHTIHLIWILSEEIEEIEASIKAIMDEIQSPIITIPGISYRMGAMILAEVGDFERFDNADKILAYAGLSPSTYQSGQLDSSHSHMEKRGSRYLRYALFNATKFVCKWDESFGTYLGRKISEGKHYNVAVSHAAKKLIRTIYRMELTGQAYSPS

SEQ ID NO: 136561 - protein, 354 aa, unidentified
MSNDKFVGLDVHAATTTYAVLDDKGKLVMQGVVETTREHLLSLVKGFSGRIQLTFEEGTQADWLYQMLEPYVAKLVVCNPRKNKRREENKNDRIDAIQLARWLRSGDLSPVYHRDHGTRTLKELVRGYENAVDDSTRSKNRLKAIYRSRGLLTPGRDVYNPEETEEWLSKLNSVGLRTRAEWLYTQIASLDALVKAANQAVEREARKHRGCKLLRSVPGIGWIRSATIVGHVRDPRRFRTKRQFWTYCGFAVVMVSTNDWKSTEAGFKPKNVPKSTRGLNNQYNRHLKVVFKGAATTSCSARGIFRPHFDFLVASGMRESMAKLTVARKIAATALVIWKKGEKFDLGKAVIRTE

SEQ ID NO: 136562 - protein, 355 aa, unidentified
MDDKKYIGLDVHQATISVAVLDASGKLVMECVIATQAATILEFLGGLRGSLYLTLEEGTWAAWLYDLLRPHVAQLVVCNPRKNALLKEGNKSDRVDARKLAELLRAGLLSPVYHGENGVRRLKELARSYLALSKDLARVMNRLKALYRSWAIPCSGQTVYAPRQREAWLAKLPESGIHRRAERLYEQLDQLRKLRLQARQELVAESQKQGAAKWLRQVPYIGPLRAALLIALLQTPQRFRTKRQLWAYCGLALRTRSSADYRYQAGQLQRSQKPPAPRGLNANHNHDLKNLFKATASAAVGGSGPFQEFYAALIATGKKPTLARLTLARKIAAITLSVWKKGARFDPGQLKRQAA

SEQ ID NO: 136563 - protein, 340 aa, unidentified
MDTIGLDLHKRESQLCVLTEAGEIVERRIVTSRERFAAVLGGRSRARILLEASTESEWVARHLESLGHEVVVADPNFAPMYATRRRGVKTDRRDARTLAEACRLGAYRRAHRASDEQRHVRAELAVRDALIRTRTRYVALTKALVRRDGLRLPSGAPAHTDAKLAALPLPPALAAELAPLRALWEPVNTQIAAADARLAHVAAGDPVVGQLMTAPGIGPVTAVAFVATLDDVTRFASAHQVAAYLGLTPREYSSGEQQRRGRISKTGNARMRYLLVEAAWRVLRTKDPAAAPLRAWAATIAQRRGRSIAAVALARRLAGILYAMWRDGKDYRAPPSAAVA

SEQ ID NO: 136564 - protein, 348 aa, unidentified
MLADQLDYVIGVDPHRDSHALAVVHVVSGAVVFEATVAASSDGYAQALKLVDQHAPGRRVFAVEGTGSFGAGLTRFLTVRGEQVLEVGRLRRERCSGGKTDALDAIRAARSVLAQKRPATPRAGGERQALQALVAAREGAVNAKRAGLCQLRDLLITTPEPLRSELRPLTRARLLQRLAATRPHSRHDAELRGSMLALRSIARRVPQLTAEERELAAEIETITRKLAPQLLDQPGVGPHAAAQLVLSWSHRGRIESEAAFARLAGAAPIPASSGQTIRYRLDRSGDRKLNRTLHMILVTRKRSHPATIAYIQRRIQEGKTKREANRCLKRYLARSLYRLLEHGAPLAT

SEQ ID NO: 136565 - protein, 385 aa, unidentified
MEEPLTVKRYYMGVDWGDRLHQVYVGDQEGKKVKEIKVPETVEGLTEFGRWLDEKRAEGFELWAAIEKPAGRIVDFLLDHGVEVYPVNPKAVDRVRDRYRMSGSKSDAFDAYVLAEFLRTDQAHLRVLRPSSEKAQELKMLCRDQRRVGRHKTRLLHQLTTTLKEYYVRPLETFEDIETEVALDFLTRYPTPAHLQALKPKEFKRFATKQHHLSQQRCEELWEKLSQPQLKVPEHVVRAKAQLLEVLIDQLRAAIKAVNTYNHKVESFFASSPAAQIAKTLPGGKSGTLVAAIWAELGDAQGRWESFRHLQAEAGAVPVTKASGKSRVVQFRFACNKHLRYAMYWFSFVSLNHSEWAKLYYRQQRAQGHTHPEALRALGGLRLSL

SEQ ID NO: 136566 - protein, 323 aa, unidentified
MNHEYILGIDVAKAKLDIALRLPNGKFRSKVVPNTLDGFNKLSEWLNKQGAGNVHACMEATGVYWESSAEFLADAGHTVSVINPALIKAFGAASMVRTKTDKQDARLIARFCAEKRPSPWEAPPETLRELRALVARRDALEAMKTQERNRQHVARAAVLEGIEKHLEYLKNEIDNIDSEIKQKIDDDPELKKQRKLLDSVPGLGMKTIPVLLSFFGGILRFNNARQVAAYAGLDPRQHESGSSIYRKPQISKMGHVLLRKSLYMPAMVTVNKTEWGRAFKARLTANGKAPKVIICAMMRKLVHVAFGVLRSGEPFNAALHNAA

SEQ ID NO: 136567 - protein, 292 aa, unidentified
MQAVTTIGLDIAKMVFQVHGVDAEGKVIIRRKLKRRYVAAFFQKLPPCLVGIEACASSHHWSRELKALGHTVRLMPPAYVKPYVKRQKNDAADAEAICEAVTRANMRFVETKTPEQQSCLMLHRTRHLFIRQQTAVINAIRAHLAEFGVVAPVGRNGVEALLDVVADSSDKRVPEIARACLVALGAHLRVLKTQILEFDRLIMAWHRSNETSKRLDEIPGVGPALATALVASVGDPRAFRSGRDFSAWIGLVPKQNSSGGKEKLGSISKRGDRYLRHGRRAGSDPLCQTPWR

SEQ ID NO: 136568 - protein, 340 aa, unidentified
MGDITTIGLDLAKSVFQVHAVDAMGSVVMRKRLRRSQVLAFFAEIPPCLIGLEACATAHYWARELIALGHEARLMPPNYVKAYVKRNKHDVADAEAICEAVRRPSMRFVPIKTAEQQSALMMHRARDLLVRQRTMLVNALRGHLAEFGLIEAQGLHKVAKLIAIVTDENDGRVPYIARQVLQVMINHIEDIQVRIVGLEKQLLAWHKSNPVSQRLATIPGIGPIIATAIAATVADPNTFRSGREFAAWLGLVPRQNSTGGKARLGGISKRGDTYLRHLLVNSAHTVLLCSKQAKTNPWLTSLLSRKPRLVAAVALANKTARLVWALMSRQDTYRHAAATA

SEQ ID NO: 136569 - protein, 310 aa, unidentified
MAQDDVFVGIDVSKARLDVCLWPAGEWLVFGNNGKGVRSLVRQLAKVGPVAIGLEASGGYERDVLAMLCAAGLPAHRLNALRVRRFAQSCGILAKNDRIDAAVIARFVACVPQRQAVHAPAAARLAELVTARRQLVEELTRCTNQASRTAHGVLRRIAARRIARLKADILLIDQATAEAVAADEHMAQRNRLLRSVPGVGPVFAHTLLALMPELGTLTRRQAASLVGVAPFDCESGTMRGQRRITGGRKPLRDAAYMAALVAGQHNPTMKAFRQRLAEAGKPPKLILVAIIRKLITALNAMIQRNQTWTA

SEQ ID NO: 136570 - protein, 311 aa, unidentified
MLPPNASKIEVALLVTDKIKNKSFQNSRDGFEALALCLRKWGAEKVHACLEATGNYGEDLAIFLHEAGHTVSMVNPARIIGFAQSELIRTKTDRIDAGIIPRFCLAMKPDPWIPPSPEIRALRVLVRRADSLIDMLTQEKNRLDTAHESVIPLIQEHLDYLGKENEKVKDQIADLIDRNPDLKRKKDLLASIPGIGKATIATLLAELDDLERFKHVRELVAFIGLAPKETQSGSSIKGKPRLGKTGHARLRKALYMPALVSIRYNPLMIAFYQRLKEKGKNGKVIVCAIMRKLVHIIFGVLKSGKKLRPKL

SEQ ID NO: 136571 - protein, 346 aa, unidentified
MHYIGMDSHISTLDFAVVNESGRLVKASRVATSVNGFVEFVKTVPPPRTIYMEEGTLAAWALETCVRFREKLVITDAKENHWIGSSGQKNDSIDALKLAQLARGGYIKEIHHPVGQRRRFRELMIAYQDAVRSTTRIKNKIKAKFRQNGIQCTGTTVYSEAHREEWKGKLPQEATLLLILDGLWRQLGQSEQTEKEILAAARAQAKHYPEIKHFEAITGIGFISAATISAILETPYRFADKRKVWMYAGLGLMKRSSGGKTYSEKLSTDYNRLLKYSIKQAAEAAIQAKDNPFRRKYLDMTLLHGIAPHRAKLTIARDMLATMWAMWRKGEKYRPEIREKAACKQG

SEQ ID NO: 136572 - protein, 428 aa, unidentified
MNNQELIRRKQYCQIVKEITRSDQYLVVGIDVGKDKHHAFMGSATGKSLFRKLIFENNLDGFSRLLKTAEAIKSQNSLSKIVYGVEPTGNYHKPLARHLIRCDCNVVLVSGVAVKRNRELLNGRWDKNDTKDAANIADLVSRRRCLYYDCPLPSIIELRALLSLRRRLKREEHGLKMRIRNNLLAQYFPEMDKFYNACESESLAIVQWILNPDTISAMEFGEFFHLVTTTRRGVAQTLRLRKIHGLAAESVGCPMGPAGEYEADLLVEKLKQVRRQIQKTAALIEDFCLEFSEYSCLLTIPGFGPYISARVLASIGDPFRFENRKQLIKLAGYDLCADRSGKTSAKAVPVISKKGNGELRYALYQAAKVATARVDLFRTYFTELLRGRERERGIKTKMCVKVATKMLVIAWTLMKKREVFDPAHLNIE

SEQ ID NO: 136573 - protein, 338 aa, unidentified
MTLYGGIDLHSNNNVVALSDEADQVVYRKRLSNDVETVLAALAPYQDAIGGLVVESTYNWYWLVDALMEAGYGVHLANTAAIVQYSGLKYADDDSDAAWLAKLLRLGLLPEGYIYPKAERAVRDLLRRRLSLVHQHTANLLAVQNLFSRNRGRSLSANETRRLTPESVAELVTDPNLALAIQSTVLAMRAQQAAIDLLEREAWRQTKATQVWQPLLTVSGIGRILGLTIALETGPIERFAGVGNYASYCRCVGSTHVSNGKQKGKGNTKNGNKYLAWAYVEAANFAVRYNPQIKRYYQRKRAKTKGVVAIKAVAHKLARACYHILRDGSAFDVNRAFA

SEQ ID NO: 136574 - protein, 374 aa, unidentified
MKYVGVDLHKHVIRLCVVSRAGQRRKVVDRRRFDCQDTAAIRAYFKHLGRFQAALEATAAYEWFFLLIEDLADRVVLAHPKKLRVIAESTRKTDKIDAEVLATFLALDMIPEAYRPSPRIRQHRVLVRHRCWLQRRITSIQCKLRNTLAHYNADIAELFTQRGNAYLAGLSLSAADRFAVLALEEPLALFQRQLRDADQQLREFAGLGALAEQEARAILATIPQIGPVTIDVVLSEMGDWRRFRSQKAAVAFAGLDPGVRQSAEKRRDLPISKEGSRLLRWVLIQAAWRLAGRSARWSVTFHSLEKKTGSKKKAIVAVARRLLCVMFSMLQSGQAYRLAAGENTVEEKARKQRPRRSRRCGPRSRQLVGSGRSA

SEQ ID NO: 136575 - protein, 313 aa, unidentified
MSERYIGVDVSQAHLDVASSDGLELRVSNDDQGYRVLLEEFERSAPTLVLMEATGGLERALAVELSAAGIALRIINARHVRHFAKATGLLAKTDRLDAATLVKFAQRLKPEPRPIAPEQTLALQALILRRRQLVEMLTMERNRARTAHRGVRRGVQANIRWLEKCLAEVDTDIDQALRECGVWREKVELLESVPGIARVISVSLLASLPELGRLNRRQISALAGVAPFNRDSGRWQGRRSIYGGRSVVRSALYMAALVGARHNPVLKAFYQRLRGAGKPAKVALTACMRKLLVILNSMIRSGQRWQNTIGQLT

SEQ ID NO: 136576 - protein, 331 aa, unidentified
MINKAAQFAGIDVGAEELVLVVRKNATSMKAQKFANVPADRTRLVAKLAKLPGLRVCLEATGAYHLELAVALHDAGVELNVVNPKAAHNFAKALMKHSKTDAIDADTLAQYAERMPFTVWVRPSPQALTLRSFARRINALTRQKAMTKNHLHALSFGPDLPKAVLADAKLAIAQLEKRLASLSHEAQVFIDKHEDLKRIFTLLLGIKGIAETSAIALMGELLLLPKGLTHKQWVKYAGLDPRAFDSGKSVHKAPRLSKAGNRHIRQALYMPALSAKQHDPYVKAFFQHLIEKGKKPLQALCAVMRKLLHAIHGMLRDNQPFDNTRFYATAA

SEQ ID NO: 136577 - protein, 432 aa, unidentified
MLDQVIIGVDPHKLSVTIEARDNREILRATGRFGTDTRSYHQLLKAARQWPERTWAVEGANGIGRPLAQRLLADGERVLDVPAKLAARARVFDTGQGRKTDATDAHAVVMVALRDKGLRELRIDPELMVLRMLCDRRDELSRARAQALNRMHRLFLELLPGGAPVKKSVSQYQVLLATVRPRDLAGKTRRRMAAEELDDLHRLDAKLKAMKAELKAAVQATGSHLMDIHGIGPASAARILADAGDIARFPDRGHFASWTGTAPIDASSGQHLRHRLSRAGNRRLNHVLYMAGIVQLRHDTPGRAYYRRKRAAGKTSMEAMRCLRRRLSDAVYRQLVTDAAARDAGPGGHSGATLSSSAAGLPPGTGTSDQPLPGPAPKTLPPPPEQLKTPAAPAAATSRQRARGVNVQRPTGRTTLTPTSAVAHSTAQGPRT

SEQ ID NO: 136578 - protein, 344 aa, unidentified
MKITTVGIDLAKNVFQIHAVDERGKTALKKQLKRGQVVEFFANLPVCLIGMEACGSAHHWARKLAGFGHTVRLMAPQFVKPYVKTNKNDAADAEAICEAVSRPNMRFVPIKNIEQQSVLALHRVRQSFVKARTAQSNQIRGLLAEFGLVVPVGIANIAKRVPELIEDATNELTGSVRLLIARLMDHLKELDRQVDELEAQIKSWHRASDASCKLEKVPGIGPITASALVATIGDAKNFDGGRQMAAWLGLVPRQHSTGGKSNLLGMSKRGDTYLRTLLIHGARSVIFRAQQKVDKAGWLNELVQRRNKNVAAVALANKNARIIWALLANDREFQSNYKTVRMAA

SEQ ID NO: 136579 - protein, 317 aa, unidentified
MGQENGWVGIDVSKESYDVFIQRRKESFHTGTKSADVRRLVKQLIQERPEGIVVEATGGWERRLVQALGQASLPVVVMNPRRVRDFAKAAGRLAKTDRIDAEILALFGEKMKPDIRPLLSAEDENRRALLERRGQLTDMLTQERNRLELTPKALQAGVRKHVEWMEKELRELGQRIKQEMAKDPVWTAKDKCLREVMGVGPVLSLALIGSVPELGRLNRQQIASLVGVAPFNCDSGGRRGQRHIFGGRRHVRAMLYMGTLCAIRCNAVIRAYYQNLCGRGKRFKVALVACMRKLLVHLNSLMRQHLALHVSASPVPA

SEQ ID NO: 136580 - protein, 418 aa, unidentified
MKFTWKLRETICNDPQVCRIVDLPVYYELETNNGNRDYRIQIGGHYMNYNTVYVGMDVHKESFTLCSCRYEDEKASHYQRTPASYKNVLRYLAFLRTIYGEDTRFVCGYEAGCLGYSLYHQLENFNVECVILAPTTMLEQRSKRRIKTDKRDAEIIARSLAQHNYSPVHIPTETDNQTKEFIRMRDDHKAELKKIKQQILSFCLRQGYQYDGSGNWTAKHVKWLRSLKPAGLYKEILDEYLLTYTILTDKLNRLDQRIEELASKEEYKESVSKLTCFLGIKIHTALSVIVEVGDFQRFVSARKFAGYLGLVPGQHSSGDDRNGLGITKAGNTHVRRLLVESAQSYTRGKIGYKSRVLRSRQAGNSPQVINYADRANERLRRRYYKMVLKDGKKYNIAKTAVARELACFIWGMMTDNIY

SEQ ID NO: 136581 - protein, 355 aa, unidentified
MTRRCFGLDVHREFAQIAVWEDGLVRQVGRVPATPEGFRLFADSLVATDEVAVEATCNTHAIAKLLESRVARVVVSNPQKTRAIAESKVKTDKVDAQVLAQLLAADFLPGVWLADEETHALRRQVARRANIVRQRTRLKNQVQAILHRNLVPRCPAADLFGLKGRAWLTEQELPADERQAVEALLRQLDFHGQELAIIDAQLSQIGLASDDVKRLMTIPGVDATVALSIVAAVGDFSRFRDPGQLVSYLGLNPRVRQSGGLPAAHGRITKQGRAHARGMLVEAAWSAARIPGPLRAFFERVRSRRGMQIAIVATARKLTCLCWHLATKREDYAFARPSLTAQKLRRLELRLSRGS

SEQ ID NO: 136582 - protein, 364 aa, unidentified
MEPYIVGLDVHSRESVFVMQTAPGRVVAEGKVPTTETGFRQWQVTYAVPPGTRVFLETGTVSFHVAHLLAAQGLVPVVVDAHEVRRRAQRPTQKSDRGDAFELCDGGRRGLYRAVVHLPAPATHALRQTLARRRHFVQAASREILAARHVLRAAGRAAPTGCLNSHPAWERLLAALAAEPELRGPLEPHYALWQAAHAQVTALDAALHALPRALEPAVTRLQTIPGVGPIVARTIVAALSDVSRFPSAKHVGSYAGLVPTTHQSGRVDHHGHITKRGSRELRAMLCEAAQHAARPAHPLNAFYAPLCVRHGRKRALIAIAHRLARIAFAMLRDGRDFDPTRLGLEAGRFTRTTTRRYRRRRRAA

SEQ ID NO: 136583 - protein, 409 aa, unidentified
MNMNAVGIDVSKRKSTVAILRPGGEIVKKPFDVPHLSSNFRSLTRLIQDLDGETRIVMECTGHYYEPIARRLSQAGFFVSAVNPHIIRNFQGHDNPLRKVKTDKADSVKIARYTLDSWGNLKQYTLMDELRSQLKTMNRQFSFYTKHKTAMKNNLIRLIDQTYPGANTYFNSPVREDGCQKWVDFVYTYWHVDCVRGKSLSAFTEHYRKWCKHKGYNFSAEKAEKVYEASCALIAVFPKDDNTKMLIRQAVAMLNTASETVENLRIKMDETASALPEYPVVMAMNGVGSTLGPQLMAEIGDVTRFTHREALTAFAGVDPGKNDSGKHVQKSVRTSKKGSPHLRRTLFQIMDGLIKRSPIDDPVYVFMDKKRAQGKPYYVYMTAGANKFLRIYYGRVREYFASLPETGEN

SEQ ID NO: 136584 - protein, 415 aa, unidentified
MEVLYPHCAGLDVHKRTVVACIAHTDGRGHVTWTTQTWGTTTPDLLALQAWLVTAHVTHVAMEATGAYWKPVYNLLDGVFTTWVVNPAHIKQVPGRKTDIQDAEWIADLLRHGLLTPSFIPDRPQRELRDLTRQRTQWLAERSREVNRVQKVLEGANIKLSSVVTDVLGVSGRRMLEALVAGTTDPATLAALADPRLRATPAVLQAALTGAMGAHQRFLLGQLLQHIDELTAHVAALDGEITRRVAPQEATMALLDTIPGIDRRTAEAIVAEVGMDVARFPSADHLAAWAGLAPGPHESAGKRRQAATRKGNPALRDALVLAAWAASHTKTTFLGALYRRWVKRMPAKKAIVALAHRILVIVYHVLTTREPYHELGATYHDARDRTQIVHRAVQRLTRLGYRVTVEPVAPAADSA

SEQ ID NO: 136585 - protein, 345 aa, unidentified
MDKHCVIGLDLAKSVFQVHIANGAGKKIGGKKLKRSEVMAWFTQQERCKVGMEACGGSHQWARQLVALGFDVKMMAPQHVKPYVQGNKTDARDAAAICEAAARDRVPHVAIRSVDSQQMQAIHRTRELWMKQRIATMNQIRGLLVEFGEALPTTHARFRQAVQAWLGHETDLQIMHQLVTSLMEHWDSLDKQIEVLEVQIKQLHRDNSASQLIESIPGVGLLTATATIAAFGDCQQYDCSRQFSCALGLTPREHSSGGKQVLLGISKRGNGYVRKLLVHGARAVLSARLSNPAHAEDWEVKLAKRRGVNIAVVALAAKNARRIWAMLHSGEWFRTPQTQSAPACA

SEQ ID NO: 136586 - protein, 374 aa, unidentified
MSSNVCHQIIYLAIELSSSSWVIAYRLPANDKAKVHRLEAGDGAGLLAFIASLRHRLDPSDDPSTFVVSCFEAGGDGFWLHRLLSAHGVINHVVEPTSILVTRGARRAKTDRLDAFGLLRVLAAKFAGDPDACRIVVVPTVEEEDAKRPHREREFLVQERVRIENRIAALLATQGIRGRPSLRSWDADMRALRTGDGHPLLTHLVAELNRLRRRLSLTLELIRELDAVREQSLEAQHDSASRTVKALCTIRGIGVNFASVLTREVFYRTFDNRRQIANYLGLAPTPFQSGGMDRDRRINRAGNSRARKTLVQLAWLWLRYQPESSLARWFRDRVGSLQGRTRRIAIVALARKLLIAIWRFVMLGLAREGAIIAA

SEQ ID NO: 136587 - protein, 346 aa, unidentified
MGKSSTDVSAVTTVGLDLAKHVFQVHGIDATGRVVVTKAIRRAKLLEFFASLPPCVVGLVASGSAHHWARELVKLGHDARMMPPAYVKPYVRRQKNDASDAAAICEAVTRPSMRFVGVRSLANQASLMRHKVREMLVAQRTQLLNGLRGHLAEIGVIAAQGPRYARALADRIETGDESIPLAVSDALAPLVLQLRNLDEAIASCDRAIAKMVETDATARRLMSIPGFGPVTASAMAASVQDAASFAGPREFAAFLGLTPRQNSSGGKPKLGRISKMGNRYLRKLLVVGAHAVLFHRARHTDPLRTWAKKLLENKPFKLVAVALANKMARIAFAILRGRTIYREIPA

SEQ ID NO: 136588 - protein, 337 aa, unidentified
MIVIGVDVHKQSLTAVAVDEAGRALAESTASAACDLLAWASSLPGERSWAVEDCRQLTRALERALLAAGESLVRVPPKLMAPQRRAGRARGKSDPIDALAVARAALREPRLDHPRPGEQPLRELKLLVDHRDDLIDERRRAQQRLRWHLHDLELGLTVPLGALDRGVWLERLGRRLARLEQTVQVRIARELVARCRSLTRTILELDRQLQAAAAQTAPALLALPGCGAVSAAKLLGEIGPIERFDSDAQLARHAGVAPLEASSGKHRRHRLDRGGNRQLNCALHRIAITQGRVHPPARAYLERKQAEGKSRREALRCLKRQLARTVFNTLKASPALT

SEQ ID NO: 136589 - protein, 394 aa, unidentified
MILVGIDIGKNQHTFSIVDKNSGEILSNPSLFNNNQDGFLFLIKKLNSYSKSDLLIGMEDTGHYHFSLLKYLLDIRYTVALINPTTTDLTRKLQGGITKNDPLDSLTICDVIGSNQRKKPYRIIKVNRFDLYEQKQLTRHHHNLKEELNIYKNRLQKCIDIVFPEFNSLFRSKYGIVYMNILKTFASAENIAAADIRTIRKCFEYDGRGKRITLSADQLKTAAKTSIGIPSVAEEIQIRHLVRQIEMIEEQLSEIDKKIEEFSLQNNSPILSIPGISHFSGTSILAELGDICNYTKAAQIIKFAGVAPYHYESSQFTAQHTAITKKGSRYLRKTLYQIIFPVINHNKVFTTYYNKKLAEGKGHRCAQGHCIRKLLRIIYHLLSTGQTFDPALLI

SEQ ID NO: 136590 - protein, 346 aa, unidentified
MKTITAVTTIGLDIAKSVFQVHGIDEQGEVTIRQQLKRARVLSFFEKLPSCLVGIEACASAHYWGRELTALGHDVRLMPPAYVKPYVKRQKNDAADAEAICEAVQRPSMRFVPIKTPDQQAGLVLHRTRHLFVRQLTAVSNSIRAHLAEFGLVAPVGRHGVDELIAVIKDTKDHRIPDLVRTCLFALAIQLDALKQQLRILDRRLVGWHRANEVCRRLDAIPGVGPALATALVASVADPKVFRSGRDFSAWIGLVPKQNSSGGKEKLGNITKAGDRYLRSLFCAGALAVIRRVATHGSKHRPWLSKLLERRPAKVAAIALANKLARMTWAVMATGKPYKEPIALAR

SEQ ID NO: 136591 - protein, 350 aa, unidentified
MIIGVDYHPSFQTIAFFVEETGECGEQELNHSDGHAEKFYRDLKQRGISVRVGMEATGYSRWFERLLAELGLELWIGDPAEIKAKRVKKQKTDRNDARLLLRLMREDNFPRVWVPSPENRDLRQLLWHRHRLVQMRTRIMNQLQALAMNEGYRWKKKLFSEQGRAQLEKLALAPWASRRRQELLELLDRMNPTIEELTAAVEQEARKRPEVQRLMTHPGVGPLTALAYVLIIGTPERFHCGKQIGTYVGMIPSEDSSAHKQRLGHISKQGNSLLRFLLVEAAQAAARINPAWRRRYIHLAMRRHKSIAKVAMGRKLGVRLYWMWRNGCAYSPSFEFGSYVGQLGIGHGVK

SEQ ID NO: 136592 - protein, 411 aa, unidentified
MDLLFPACAGLDVHKDLIVACAVLTPPSGAATYHEAQFGTTTAELLRLSDWLGGLGVPQVGMESTGVYWKPIYYILEGSLSVWVLNAQHVKNVPGRKTAVQDARWVSEWLRHGLVQPRFVPPPPQRELRLLTRERTNFVRQRATLINRVQKLLEDANIKLGSVVSDMSGVSARAMLAGLLAGQATPAELAELARGRLREKRGALAAALAGRMQPVHRLVLTELLAQMDNLEETIGRLTSEIERRTASQADIVAQLDAIPGVGRGVVEGILAEIGTDMGVWGSDRRLAAWCGVAPGNNESAGKRRSGKTRPGNKWVRTLLIQAARGAVRTKGSYFAAQYRRLVPRLGDKRAIVAVAHAIIVAIYHMLERGTKYVELGGDYFVQRAPAATAKRLARQLEKLGYTVTLAEPSPA

SEQ ID NO: 136593 - protein, 351 aa, unidentified
MSDLSVAIDLAKNVFELAVADESGAIVERRRLGRTQFLRFFENRSFKRVVMEACGSAHHWGRWFTARGFEVSLLPPHYVRAYVRRNKTDRADVTAILEAAKATDIIPVRVKSVEQQALQSLHRVRSAWQATRTARINTLRGLCREFGVNAPLGAKRGIAELGQQVADPDSAVPDLLRRALGQLVAEIRSIDEYMQAIEAELAQIARQSEVCERLRKIPGIGLIASTALVGAVGDIGCFRNGRRFASWLGLTPREHSSGNIRRLGSITKRGDKYLRTLLVHGCRAVIFSANAAKRAGRPLDAFRQWASEIRVRCGHNKAVIAVANKVARIIWASWYRQRDFEFRAPGAAVAA

SEQ ID NO: 136594 - protein, 316 aa, unidentified
MGEAVYVGVDVAKRSLEVGLRPSGESFSESNDGPGCARLAQRLARLHPALVVLEATGGYERGLTGELGTAQVPVVVVNPRQTRDFARALGRLEKTDKVDALMLAEFAERVRPAVRQLPDPQALALAAVMARRRQLVEMLVAEQNRLGQAPAVLKHDLRSHIDFLRKQLHRLDQDLDQLLHESPVWREQEDLLKGVPGVGPVTCATLLADLPELGGLSRRAIAKLAGLAPLARDSGPVRGRRTIWGGRAKVRAALHMAALSAVRHNPVLKVFYRHLLAAGKPHKVARVACTRKLLTILNAMLKNRTRWSPPCLVEPA

SEQ ID NO: 136595 - protein, 359 aa, unidentified
MKKGYHLPKPDKMKVLLKQTVGIDVAQNELVVSLGRMDEQISIEVYAYKVFPNTRKGFSSLVSWVNKQTSITTEVRYVMEATGVYHESLAYYLCSINKQVSIVLPNKISNYARTLDIKTITDKSASQAISRFGLERQLEVWQPPLKIFNDLRQLCREREQLVHERTMLKNQLHAERTSETSSESSVKRTKKRIALIDSQEKEIREEIAILIKGDEVLLEKMNMVSSIPGIGNLTAVTIIAETNGFELIKNKRQLVSYAGLDVREKTSGTSVKSKPRISKRGNRNLRKVMHFPALAAIRTDERFRDIFLRIVSRHGIKMKAIVAIQRKLLELTYILWKSNAYYDSEYERKIISSEVITLP

SEQ ID NO: 136596 - protein, 427 aa, unidentified
MNNRETGTEEYAALIGMDWAAEKHDVWVRDTATGESRHRVVEHTPEALTDWLGELQAQYPWQRVALCLEQSRGALIYALMGHAFLALYPINPATLSRYREAFSPSRAKDDPSDAKLLAEILRLHRDKISVWKPDDEQTRTLTFLNEERRKAVDLGTKFVLRLQATLKLYFPQAIEWAGSGLNSPLACDWLSKWPTLEAVQKAKPQTIRAFYYAHNCRRPDQVEGHLKAIAAAKPLTQDAAVITAYRLTVQMLVKQLRTLQGSIAEYDRQIAQLFAKHPDAFIFKGLPGAGDVLAPRLLSAFGTDRERHPTPKDMQTYAGIAPVIERSGKQCWTHWRWNCPKFLRQTFHEFAKNSIPYSAWAKAYYELQKKQGKGHNAAVRSLAFKWIRVLHRCWKDRKPYDEALYLQTLKQRGSELANLIAQRPQEA

SEQ ID NO: 136597 - protein, 316 aa, unidentified
MESIVGVDTGKSHFDLHYWEGGEKERIDNRPRSIDALLERLPAASVIALEATGTYHEELLDRALRRGFTVYLINGQRLRAYAEATGLRAKTDPSDAELLARFVYYERAQLRPQRLIGADQRRLRRLLKRRALLVEMRTRLRQSSDATAQLKQYFAEVIEAANRAIAHIEHELRALVRRLGWEAEVQLCRSIPGVGELSAIALVESYQRGPFKSIDAFIAFQGLDVRVRQSGRWVGRRKLTKMGDAETRRLLFNAARAAVQRSALHAAYYERLRARGTPTTGAYVAVARKLARQAFGVLRSQTPYRCDLGSTACAAA

SEQ ID NO: 136598 - protein, 351 aa, unidentified
MNMNAVGIDVSKGKSMVAILRSYGEIISKPFEVKHTVSGIRSLIEQIQSIDGESRIVMEHTGRYYEPLVRELSKADLFVSAINPKLIKDFGDNSLRKVKSDKADAVKIARYTLDSWTELRQYSLMDEIRNQLKTMNRQFDFYMKHKTAMKNNLISILDQTYPGANTYFDSPAREDGSQKWVDFSATYWHVDCVRKLSLNAFIDHYQKWCKRRKYNFSRSKAVEIYEASKELVSILPKDDLTKLIIKQAVEQLNTASQTVEQLRTMMNEAASKLPEYPVVMAMKGVGKSLGPQLMAEIGDVSRFTHKGAITAFAGVDPGVNESGSYEQKSVPASKRGSSTLRKTLFDIVNIG

SEQ ID NO: 136599 - protein, 341 aa, unidentified
MLYAGVDIHLKWWAVCVLNESGQRVLHKRVRDRADLIRSLTELGDQLSICFEASCGYGYYHELFSRIAERVVVAHPGHLRLIFRSKRKRDSLDAEKLAKLLLLDAVPTVHVPSAHMRAWRELIVFRQRLVHKRTRAKNAARALVRHQGISIPTRPGLWTRRGLAWLRGLEFTQSAQALQRDLLVDEIETLSRQICRVERELGTYSQRHPGIALLRTIPGVGLRTAEAIVAFVDDPRRFQHSKEIGAYFGWVPCQDQSGDRNRLGHITRDGSPVVRQLLTEAVWQGIRRSPTIRAYFERMQRDDPQRKKIALVATAHYLSRVMWSMLLHNRVWEERGMATAA

SEQ ID NO: 136600 - protein, 356 aa, unidentified
MSHDVKYIGMDVHKEAIVIAVLNESGKLVMESVIETKASSILQFLHGLRGELHVTWEEGTWAAWLYDLLQPQVQHMVVCNPRRNALLKEGSKSDKVDAGKLADLLRSGMLRPVYHGENGLRTLRELGRSYQTISKDLTRVMNRLKAVYRGWGIACAGTQVYAVRCREEWLSKIPHAGVRRRAELLYQQLDGLQVLRRELRPEFLAESRKHKAAKLLRQIPCIGPIRAARLIGLMQTPHRFRSKRQLWTYSGLGIETHDSAQYCFVRGQVQRSKKPQQVRGLNRNHNHEMKEIFKSAATRASCGTGPFHDFYTGLLAKGMKPEMARLTLARKIAAITLTLWKKEERFDVEQLKTQAA

SEQ ID NO: 136601 - protein, 407 aa, unidentified
MPKPNRYIGLDVHKYYLIAIAVDADLNKVYGPQRVELSRLGEWIEKTITKQDAVVLEMTGNTWQIHDELVSHAQSVTVVHPPHVSLIVRAQVMNDKIAAMQLARLHAKGLLVSIWVPPQEIRDLRTLTAQRHKMAQLKTQAKCRLQATLHRYHILPPEDVKLFSKDNEMWWKELPVSTLEKVRIASDLATLAFAEGQIQSLEKQMAEWAAKEADVTRMMQVTGIGLVTSITLMAAIGDIRRFPSANQLVGYSGLGAKVHDSGMTTRTGGITKAGRKDIRAALVEAAQTAVIHDPHWKAELKRLEPRIGRSKAIVAIARKLLVVVWHLLSKHVLVHEADSDRLARKFLEFAYSMGKEERGKSAQEFVRERLDLLGIGEEMEFIRQGRRRIPLHKSNLPVEKVSGVPST

SEQ ID NO: 136602 - protein, 344 aa, unidentified
MDHFAGLDVSVKQTSICIVDDTGRIVREAKVTSEPEALLAVLKNLAFHFKRIGLEAGPLSQWLYSALAEAGLPVICVETRHMRAVLKAQINKTDRNDARGIAQMMRVGLYRPVHVKTLRSQKLRMLLTHRKLLQSKAIAIDNDLRGTLRNFGLKVGMVGTVRFEARIRELVENLADLAALIEPLLIVRRTLREQFCILHRRLLAIVRDDEVCRRLMTTPGVGPVVSLTYRATVDVPARFRKSKSVGAVFGLTCSKYQSGEVDWSGRISRCGDEMMRVMLYEAAQSMLRSKKWSWLKAWAMQIARRCGMKKAIVALARRLAVIMHRMWVDGTEFRWTREQAAAAA

SEQ ID NO: 136603 - protein, 325 aa, unidentified
MTHLDKNINKEFVGVDIAKDKYDVCYNDGSRKIFSNNATGHKKFIKSLRKSDNFLVTMEPTGGYEQSLIFALQDAGHDVILASGFRVKNYANAMGYIAKNDKIDAQVIQEFSKEMYGKGKLEILMIKSANFRKIEQWLNRRAQVIKLLTAEKQRHEKCIEKVIKTHLKKSIAFHEKELKLIDEKIEKLSQKEELAKRANKYQKIKGIGNVGANALVIYLPELGHYSNKVISALVGTAPYCRESGKYKGKSKTKGGRNKLRSILYMGVLAATTHNSIIKKFYDRLIRQGKHHNVAMIACMRKLLCILNAMERNNTEWDDNYGVANN

SEQ ID NO: 136604 - protein, 364 aa, unidentified
MKKSSKKQQGATVAESKPTQVVGLDLGDRHSHYCVLSSTGEAMEEGRIQTTRASMEKHFASEPRMRIALEAGTHSPWVSRLLKSYGHEVIVANPRKIPTLTKSESKNDRNDAEQLARMAAFDPKLLHAIEHRSPERQQDLNLIHTRSVLVRARTMLINSARGLVKSAGQRLPACSSEVFPEKAPAAVPPALKAACTPLLEQITLMNQSIAAMDKQIDQLDKKYPEITILRTVPGVGPVVAACYVLTLDSPQAMETNRQAGAYLGLRPRQQKSGDSDPQCKITRMGNTYLRSLLVQSAQHILGRSRPDSELRRWGLKLAASGGKRGKKRAVVAVARKLAVLLLSMWRNHKKFEPFPQSVAQLTTA

SEQ ID NO: 136605 - protein, 429 aa, unidentified
MICAAVERCAGIDVGKEFLAVCVMTGPLQGEARKQTRRFGTIIAELERLRDWLKQEEVTHVVMESTGSYWKPVFNVLEDTVKVYVANPQEVKVRKGHKTDNKDGWWLAHLLRHAMIHPSFIPPRAIRELRDLTRRRKKLLGAGTGEKNRVQKVLEDANVKLGNVLSDVFGVSGQLMLDALLKGDAKPAEMAQFAQRRAKRKIPQIIAALEGHRMSDHHRKMMGYSLEHMRFIEDQIGKLDEDIVAKIQEAGLEREWQLIQSAPGLQETSAANVLAEIGPDMSQFPSAKHISSWGGVCPGNNRSAGKNKSSHTTGGNPWLRAALTECAWAAAAKKGCFLKEKFWRITTKSGGKKAPAIVAVAHTLLGLVYEALRTGEPYQETKVADLNPGQRDRMIRHHVKRLGKLGVQVRSNPLKRQTKVVKTKNAKRT

SEQ ID NO: 136606 - protein, 424 aa, unidentified
MNLTQNDRLKQVTSDTLIVGVDVGSQTHFCRAFDWRGFELSRRVFKFSNTGMGFLTFLRWTEELMNKTEMKKVIVGCEPTGCYWLTFQKFLQDHDIQLVTVNPFTVNRSMELDDNSPEKSDLKDPKTIALLVKDGRFSTSYLPSGVYAEIREASVCRDQIMKQHVRLSNQIQGWIQKFFPEYLECYADWDSTSGLMLLKEAPLPQDILKIGAGGINQIWRNAKVRAAGIKRAKTLVEAAQNSVGLEAGEAARLEIWVLVNDYILKAEQLKRLDEYLEEKVKEVPNVEKLLAIKGVGMSTVIGFIAEVGDIGRFTDPKQIQKLAGLEIVKKSSGKKKGQPRISKRGRRKLRRTMYESARALMTWNPAFQDVFLYYRNRTKNPLGGMQAKIAVACKAIRIFYVVLQTGCDFDEEKFRKDIIRPEAA

SEQ ID NO: 136607 - protein, 338 aa, unidentified
MDPVVRDIPNDAKVIRRTFQRLAKEAYELRCCYEAGPCGFELHRQLTAMGIACEVIAPGLIPVRAGDRVKTDRRDATKLARLFRAGELTSVAVPSADLEAVRDLVRLRDSIRRDLTAARSRLQHFLLRHGRSYRSGQGWTKSYWIWLRAQAFDRECERLTFESYVHEVEHQMARRADVDAEIERVARSEPYAVPVARLSCLRGFATLSALALLAEIGDFRRFQTPRELMSFVGLVPSERSSGASVQRGRITKTGNSLVRRILVEAAWHYRHRPVFGPLARKAVEGQTPQTVEYVRKAHTRLHRRYTRLVSRGKKSQVAVTAIARELCGFTWGLMVAIP

SEQ ID NO: 136608 - protein, 355 aa, unidentified
MRYHTCTTKYHCGIDLHARQMYVCVMDSQGNKLLHMNIRNNDFEFFLRKIAPWRHDLTVCCECLFCWYWLADACHKAGLEFVLAHALYLKAIHGGKNKNDRIDSEKLAHLLRSNYITPSYVYPADKRPVRALLRQRMDYVWRRSQLLQRVTTMQMAEGKQPVARRNDNREQWLEGLLEAHSEPRHRIALQHDVAMVVHYDHAVKDLEKELLKITRRTASRDFALLRTVPGIGKTLALTILYEVEDIKRFPSVQRFCSYCRLVKGTVASAGKIKGLRGAKLGNPYLRWAFGEAAVLGKRHDEHIAQYCQQLEAKKACKFKVNAIVANKFARAIYFMLKNKSGFDVAKLTGKPVPSK

SEQ ID NO: 136609 - protein, 400 aa, unidentified
MRAVFGIDVSKTSSEVAILVNGEKVHGYTILNDTIGFNRLLGDLKTVHNPEIIFEATGVYSRRLQAFLEEYSYAYTRLNPLEAKKQLDSLRVRKTDKIDAEKLAKSQLVHNRKPTYVQEEVYQHLRDLSRFYQNMTEDLVRAKNRLHKVLQVTFPELENLLSTPTGEQYWNLVMAFPCKEFVLSLSQSNLCEIIRQSTSKRISEKRIAYLTDKLIKLAKQSFCAVKKTSPMLEEVRYYAQELLRLSERRQVVLNDMVALAQPLPEYDILRSIPGIAEATATSIIGELGDIRRFQSTNQINAFIGIDLRHYESGNFLAKEHITKRGNPYARKILFKCIHNIASASHTNPCHIADFYEKRKRQSTIASTKPHTIASIHRLIRTMYYLITHNKLYDYSLTQNR

SEQ ID NO: 136610 - protein, 343 aa, unidentified
MSKINVIGLDLAKNVFQVHGINEDGDVVVRKQLKRAEVLRYFAKLPPCLVGMEACMSAHYWAREISKLGHVVRLIAPAFVKPYVRGNKNDRNDAEAICEAVQRPNMRFVAAKTPEQQAVLHLHHARQLLVQQRVALNNHLRAVLLEYGVSLPVGVKVLSQALPGLLEDGDNALPMLTRHLLAELKTAHDALNKHIQMIENPLQAWHQSNPVSQRLAQIPGIGLLTATALAATLGDIHVFKNGRHLAAFLGLVPKQHSSGGKDKLLGISKRGDGYVRGLLIHGARAVMRHIQRRIKLGQASGNRWVEQCLKRMHVNKVIVALANKMARMAWALLAHQQDYRAAA

SEQ ID NO: 136611 - protein, 374 aa, unidentified
MGTQGITFVGMDAHKKAINVAMLLPGQLEPVEWQVANEPAAIRRLVKKLEREAPGEVRCCYEAGPCGYVLMRQLEAAGGVVCEVVAPSLIPVKPGERIKTDRRDAHKLARLLRSDDLTMVRPPTAADEAVRDLCRCREDARRDLLRTRHRLASFLVRRACLYTLTRRTWGQPYRAWLQGLTFEHAPDQVTLADYVTGIEQIEQRVGSLDQQLAALAEQAPYREPVAWLRCFRGIDTGTAIALVSELHDFRRFETARALMAYLGLVPSEYSSGEQRRQGSITKAGNTHVRRLLIEAAWHYRHRPHVGVGLRQRRQGQPSAIIAIADRAQHRLYHRFHKLMNRGKPSPKVVVAIARELVGFVWAALYPAASGASAR

SEQ ID NO: 136612 - protein, 343 aa, unidentified
MYYIGLDVHKKTISYCVKDAAGHVRREGKIGSTRRELDAWIQTLPQPRMMAMEATIFTGWIYDYLLPHAEKVKVAHPLMLRAIAASKKKNDRIDAGKIADCLRCDFLPECHMASTEIRDRRRTLRYRHLVVRQVVQMKNRISGLLMESGVSYDKQRLHKMGYFTELFSTNEEISDSIRPLLRLGREHILRGQRLDRALISSLERDPLLSERLRRLRTIPGVGTITALTWALEIGDYTRFPSVKQAISYCGLCSAEKSSADKVMRMPISKQRNKHIQHVLVEAAKLAPRYSHELALLRDKEIQRGNKNRATLAVARKLVAYMLAVDRRKQDFVPAEELAAKTVA

SEQ ID NO: 136613 - protein, 326 aa, unidentified
MPHDSSSSDPSLPTVVGIDVAKATLDCYLDPSGQRLTLANDDNGIAQLLTHLRGLAVQLVLIEATGRLHRQVAAELLQAEIPVALVNPQRSREYARSTGRLEKTDRVDAKVLAEFARGVKHQLLQKRSEKQVELDDLIARRHALVQMRVAEKNRLAEQQPKLAKAQSKQLLRLIDQQIQDLDRAVAKLIDGDDDWKRKSDIITSIPGVSTGSANQILADLPELGEMNRQRIAKLAGVAPLANDSGPRRGQRTIQGGRQSVRNALYMAAFNAMRYCERFKRFAKRLTDAGKPFKVVVTAAMRKLLITLNQMVKTDRVYQPLLLGSFS

SEQ ID NO: 136614 - protein, 404 aa, unidentified
MWYAGIDWADSHHDIVVIDDTGRKVGSRRIAHTPEGLAELKEFLLSISGSERKEEVACIIETNHGMLITLLLEAGYPVFPVNPKTVDRRRAPSGAKTDLIDAYLLAKTGRADFVDLRKLEPDSPLIQELKTLTRDQDHLIQCQTRLVNQLTACLKAYYPVALDLFGKLQQRSTLTFLQTYPVPQAAMAASIDDLEATLRKTGYPNPTKAARQIFERVHQPHLQADEVTTRTKSRLMGALVAQLLPLIEQIAAYDKEIENLFLAHKDHDLFESLPRAGQRLAPRLLAEIGDDRARYADATRVQALAGTAPAPYESGNYSKVHQRYACSKPLRNAFQQFAWQTTQSEPWARDYYQRKRKEGKSHSMAIRALANIWVRILFAIWQKRESYERTTFEKAKLLHAPRAA

SEQ ID NO: 136615 - protein, 365 aa, unidentified
MKNITNWIGIDDHADKWTIAHYEGMSEEPTREWELMPSESGYRKLIGWLKSLEGQVRVVYEAGPCGYEMYRRLRQKGVGCEVAAPSLTPRKPGDRVKTNRRDARKLARLHRARELTLIVVPDARQEAARDLVRAREAALEDLTAARHQLSKLLLRYGHRYRDGNQWTRRHWVWIGQIHLAEAASNEVLKQLVRTIEVRADVVTNYERLIAELAASAEYAPLVAALSVLRGVDRLTAMTILVELGDLRRFGTAPQMMAALGLVPGENSTGDKIKRLSITKTGNAHVRRVLVEAGWQYQRVVRNGARIKRRRTGQAAELIAIAEKCDVRLHRRFTRLTSRGKRSVVAVVAVARELAGFIWAIGQKMY

SEQ ID NO: 136616 - protein, 364 aa, unidentified
MEASGRFVGIDLGKRTYDMCLVEPKGKITRTNGKTDFTGIDKLCEKLGADDLVAIEACNLAMRIERRIRQTVGCKVYILNPGKLAVIYMSTRKTDKEDALKLAKLLKNHDEEELPIVAPPTDEEWERRKLLSEYKSLKGARTREVNKLHAIFEHAGYTQFKRKDMCCEKNRNNILPLLKGYEQEEAERLIERLALLEKQIEQLLQKINAEVEKDDKVQLAMTVPGIGPITALAYVAYMGDLNRFENPHQVSNFLGFVPKIDHSCTIKRNGHTTKNGNALLRSLLVQAAWATVRSKDGGALRDKYKYMSSTKGMAKGKSIVTTARKLGELLYMLLKQNKSYEPQKFRTPEYHISKLADEALAANM

SEQ ID NO: 136617 - protein, 334 aa, unidentified
MPNANDMSRCLTALEQDSTIISVVELSLRNWLVAGMVPGLQRHPLKKLQPDPVELLLLLQRWREEASKAGHTINRIAVAFEVGRDGFWLARWLRKKGIEAHVIHPTSVSVSREHRRAKSDRLDTRHLQRAFLGWLRGESDHCRMAEIPTLEQEDAKRPNREHESLVGERTRVINRMKGCLVRLGIRGFNPKLRKSPELLAGLRTPEGTPIPPNMQAELKHDMARLQLIRDQIIEVEKARFARLHVAPRTEPHAQVRLLCRVVGIGIETADMLVHEVLWRKLRDRRAVARYAGLTGAPDQSGEKSYEKGLAKAGNPRVRRGHGPTRLAVRQVPAG

SEQ ID NO: 136618 - protein, 323 aa, unidentified
MAQGYVGIDVSKDTLDCHLMHGGRRQYREVGNTKDGFRRIHKWLKKQCGRERPHVCLEATGQYSDGVAEHLYDLHYPVSVVNPTQPKRFAQSMMRRNKTDKADAQVLALFCQATSPALWAPPPAHVQELRATTRRLDSLKEMRQQERNRLGAGELPDLVIESIVVHLELLNEQIAVLDHAAQEQISQHEDLREKRKLLVSIPGIGNLTAAKLIAEIPWNIEFESARQLAAYAGVTPSNHESGSSVHRRAYISKKGNVHLRKSLYMPALVAKTHNPLIAAFYERRIENGLSNKAAIVACMRKMLHIVYGVLEHGKPFDPNYGSE

SEQ ID NO: 136619 - protein, 410 aa, unidentified
MEVVHARCAGLDISKRDAKVCVRIAGAGRRKTTETVTTWGSMTNQVLALREHLVAEQVTCAVMEATGDYWKPFYYLLEDAGFELMLVNARYVKNLPGRKSDVSDATWLAQLGAHGLVRASFVPPEPIRQLRELTRARTAITRERGREVQRLEKLLEDAGIKLSSVASDITGVSGRAMLRAMVEGQRDPVVLADLARRRMRSKIPALTEALTGRFTEHHAFLAGVHLDLIDRHTAAIEEITARIEVVIEPFQPFRQLICTIPGIDTLTADVVIAETGADMSRFPTASHLASWAGTCPGSNESAGRIKSTTTRAGNPYLQGALGAAAMTCARTDTYLGARYRRIASRRGPQKANVATQHKMLTTIWHMGTTGTLYDDPGADYFTRAHPERAKNRAIHQLEAMGYRVTLDRAS

SEQ ID NO: 136620 - protein, 343 aa, unidentified
MQAITTIGLDIAKSVFQVHGVDAEGTVVVRRQLKRRYVLAFFQKLPPCLVGIEACASSHHWSRELQALGHKVHLMPPAYVKPYVKRHKNDATDAEAICEAVSRPNMRFVETKTPEQQSCLTLHRTRHLLMRQQTSVINAIRAHLAEFGIIAPVGRNGVEQLLGVVADSNDKRLPEVARACVAALGAQLQMLKAQILEFDRMIRAWYRSSEASKRLDEIPGVGPVLATALVASVADPKAFRSGRDFSAWIGLVPKQISSGGKERLGNISKRGDRYLRSLFTIGALAVIRYAKIHGTKHRPWLTALLARRPTKVAAVALANKIARMAWALMAKGERYKEPVALAA

SEQ ID NO: 136621 - protein, 353 aa, unidentified
MNSLTDLREVVDVVIGVDTHVHTHSAAVVDAATGGVLDEITVDATAQGYAELVEFANSHATLRAWAIEGTGGHGAGLSRHLLEMTEIVIELDRPKRAARRNGAKSDPLDAIRAAREAMARPRLGTPRSGGERQALSVLLAARRSAINASTEAQQQVFSLVIAAPEPIRLRFRGQKLAAMLNTAANLRVHASWDTETTSTVVALRTLARRAHAMLKEAREQQKAIVAIIRSWRPDLLEEFGVGPIVAATVLCAWSHPGRIHSEAAFAMLAGVAPIPANSGQVTTRYRLNRYGDRQLNRALHTVVQIRIQYQPATRDYVARRTAEGKTSREIKRCLTRYVARDLYRLLENGAAAA

SEQ ID NO: 136622 - protein, 412 aa, unidentified
MEILHRSCCGIDVHKQFLVACLLTVDEAGRQHKEIRRFSTMTGELLACVDWLQQAQCSAIAMESTGVYWQAPYNLMEGRFAQVMIVNAQHLKRVPGRKTDKKDAEWIAELLQLGLLSPSFIPPRFQRELRQLTRVRTTLGQERTRLINRLHKTLEDTNLKLSSVLTDIRGQTGQHILGAVVRGEDDPIVLANMALRRAKSKRDALELALRGQVTDHHRLLLQELLEMIQQHDQAIVRLDAEVAERLRPYEEQIQRLDAIPGLNRRCIEVLFAEVGWDMSPFPDAAHLASLVGICPGNDESGGKRRSGRIRKGNRYAKAILVQAAHAAARTKNTYLSAQYHRIAARRGDKRAAVAVGHSILVIYYHMLKTGQPYQEKGGSYFSELDRQHAERRLTKQLERLGYQVTLTPAEIA

SEQ ID NO: 136623 - protein, 316 aa, unidentified
MQGFLGIDIAKHKFDVVLLVGESSRHKVFDNDESGFQALIVWLADQAGSLHAGMEATGGLGDDLALFLHERSITVSIVNPLRIKAFGQSEMVRTKTDKVDAGVIARFCRSQSPAAWVPPSPRMRDLRALVRRCAALKAMRVQELQRRAQGTSSGMVADSLDRLIAGLDIEINTISEAVAALIRDDDHLRQSHELLTSIPGLGSQSAAVMLAEIPDFRVFGHNKQITAFVGLNPQDHQSGSSVRGRARISKIGNARLRAILYMCALSARHHNPTLKAFADRLKEAGKAPKVVLVAVARKLLVVAYGVMKTGRPFETA

SEQ ID NO: 136624 - protein, 317 aa, unidentified
MTQTSTLTAGIDTSKEKLDITVHGQSGCWEVANDQPGWRKLAQLLTEAGVRRVGIEATGGYERGVVEHLRAASFIVLVLQPIQVKAFGRARLRRAKNDKLDAALIAAFAASLDEVRDAPDSRLAELTEQLTFLEQIEEDIKRFKTRLEHIDKLGLRRFVLDDIARLKARRLSQIRHIAKQIRAHHDLAVRLDLVLSIPGIGERTALALLVRMPELGRVSREEAAALAGLAPFDNDSGQYKGQRRIAGGRARLRRSLFAAALPAAFRWNKAVMALYARLTAAGKAHNAALIACARKLLIYANTVVQRGTPWAEKPIGV

SEQ ID NO: 136625 - protein, 366 aa, unidentified
MKKIITVAKNRNEIFKQQQLTIGVDLGDRISHYCILDETGNVILEESVPTTPKGMQHVFGKISRSRIALETGTHSPWVSRLLTQLGHDAIVAHARNVRLITESSRKDDRLDARTLAKLARIDPGLLGPVHHRSAQAQIHLTVIRARATLVSARTALVNAARGLTKSYGERLPKCGTEQMNRETAKGLSPELRDVLEPLLGEIESLKERIAEYDRRIEQIAKDVHPEVALLKQVKGVGTLIGLTYILTLDDPYRFRRSRDAGCFLGLRPGRRNSGMSEPQMHISKEGDAYLRTLLVQGAHYILGPFGQDSDLRRWGLKLAERGGKNAKKRAVIAVARKLAVLLHKLWVSGEVYEPLRNNHEVVTAVA

SEQ ID NO: 136626 - protein, 604 aa, unidentified
MLPQHAPASPAPTCADLPPTRIGVGIDTARYGHYAAFLRPDLQPAAAELLFAESGDGYGELRQRLERIAQRHGPVHFVVRLDAAGQYADNLLHFLYSLRTPDAPGADPLRLAAFTISCGDPQRNKNYRAALFGAKKSDPVEARAAARYALSERPAHTPPLPAELRLLRQVAGRLQATVRQRTRAINQFHHLLALAFPELALLVKDVSIGWVLELVHRYPTATLLAAAAPADLAAIPYLPDRHIEPLLARARASVASTAGPTMEELLRDQVRQLRDVHARQKRLENTMIQAYRRLPAPNYSDTIPGIGEVTAAVLTAFILDIDRFETVNKLTAYFGVIPYEMSSGVDRDGQARGPRRYVMSNRGNDLVRRYLWMAALSAVRFNPAARALYARVVAKHPTRKAVAVGHVMRKLLHLVFALWKSGKPFDPNHYAWEPPAAAAAPSDKALSPEAGGDDALSGNEQAAGHKPDTKPVEEVVTAACVPTVAQSEIGAESLAIDFAHLKQQLPLARVLEHLGLSARLARGDGPQRRCACPIHRGDGRGRTFSVNLDANVFHCFAKECGAKGDVLDLWSALHHLTLREAAVDLVQTFQLEPAPTPGTEKRNG

SEQ ID NO: 136627 - protein, 309 aa, unidentified
MNNVLGIDVSSQQLEACIRSGESEKPFFRSFSYNPRGCKNLLAWSNAHGVRRAVMEATGGYERNIACFLAQSGIETHVVNPMQVRNFARGHGKLAKTDRIDAEVIAHFGADVRLDALIPVSPDQVLLKQLVIRRVELKKILQSERNRLHTAPKVIRKSIESLGKHIQKEIENIEKQINLISEESPEIKKKVKILCKQKGVGMVTAVNLIALVPELGRLDRRKITALVGLAPFPRDSGKMKGKRFISGGRFEARRSLYMPALVAMKYDPKTRVFYERLIRRGKLKKVAIVAVMRKLLVRLNAGMKCHLAA

SEQ ID NO: 136628 - protein, 353 aa, unidentified
MNAVSPYIGVDVSKEKLDFFIPGAGKSRQVPNTVGGCRQIVGMAEKLGLRVCCEPTGGYEQTLLRACWNGGVEVSLADAWRVRHFAKGRGILEKTDAIDARVIALFAAENGPRPFPRPSEAQRRLRDLTRAMESIDKQIQIAHGNLEHCGGDAEIATLWKRNLAFLERSRRDLEAKRLATVWDDERLRGLFERFQLVKGIGPATALAMLAEVPELGVVSDKAAAKLLGVAPIPDDSGKMNGKRVIQRGRFAARTALYMAAVVAMRFNPVLKAFHTRLVKERGKPQKVVIVAVMRKLVTLLNRMAADETFIPAEAGAKQRQKAATPHHKAVGTLAATPLPSSPASPPEPLFHPC

SEQ ID NO: 136629 - protein, 369 aa, unidentified
MSKIVKYVGLDVHKDSITIAIADEGRNGNVRVYGKIHNDLGQLDKVMRKLISQNVELHCAYEAGPCGYTIYRHLKSKGIDCVVVAPALIPKKVGDRIKNDRRDATNLATLHRSGDLTPVYVPDEADEALRDLVRTRKDIQIAFRKVKQQINAFILRQGISYPGKSKWSKAHLNWLNSLKMPHPAQQIALTEYLDAMETHEARIKRLDKAIVASCQTWRLLPVVEALQALRGISLLSAVTVIAELGDLNRFDQPSQLMAYLGLVPSEHSSGPSIKRGPITKTGNTHARRTLIESAQAYRLPARKSTAIRKRQEGLPKEILDIAWNAQLRLCHRYRRLIAKGKNHNVVVTAIARELAGFIWAIARAVAIAV

SEQ ID NO: 136630 - protein, 392 aa, unidentified
MRIVYQRCCGMDVHKDSVTTCVLLIDEYGEWRSEKRKFRTMTRDLREMATWLASLRVEAIAMEATGIYWKPAWNILEAEKKFHLLLVNAHHIKQVPGRKTDQKDSEWIADLLQHGLLKASFVPPQTIRRLRDLTRMRVKIRQMLATFANRIQKVLEDANIKLGSVASDVLGVSGRHMLHALVEGQQDPEQLAALAQGRLREKRAELQLALEGHQKSPLQTVVELWDTIPGVDELTATTLVAEMGANMDQFPSAGHAAKWAGMCPGNKESAGKRLSGKTPKGSVWLRRALCQAAWAASRTKNTYLAAQYNHLIVRKGKKRTIVAVAHTMLVMAYYMAKRQCTYQELGGDYFDRRNADTMQHRLVKKLKNLGYEVTLTPINAPPTAQEPSAQCC

SEQ ID NO: 136631 - protein, 422 aa, unidentified
MLAESHDEEQIIARVAALDIGKAELVCCVRVPAPAGGRRRLQEVSTHSTMTRSLVELANRLVEMGIERVVMEATSSYWKPVFYLLETHGLAPWLVNARDVKHLPGRPKTDVLDAVWLCKVAERQMLRPSFVPPWPIRRLRDLTRYRTDLVSARTAEKNRVEKLLEDACIKLSVVASDIFGVSGRAMLGALVAGERDPKVLAQLARARMRGKIDRLEQAFDGHFSDHHAFLLSRMLSRIEALDADIAAVDVQVEAQLAPFAEAAARLDEIPGIGPVAAAAIIAEIGVDMSRFPTAGHLCSWAKFAPGINSSAGKTKRSASSGHGSPYLARVLGEAAVGTSKTNTFLAARYRRIARRRGQPRAVVAVGRSILVIIWHLLKDSDARYQDLGADHYQRHVDSAVKKRGHIRQLEALGYTVTLTPAA

SEQ ID NO: 136632 - protein, 356 aa, unidentified
MTKVKTNFSFHTVDVGLDVHKRSWNAAVFLDGMYVRNVHQPPSPKALHSFLTSNFPAGNYRCAYESGKFGYGIQRELTAMNIECLVVNPADIPCTHKDEVYKTDVRDARSIGQALAAGQLKGIYVPLCEQEADRNLLRHRKRLWRDLVRCKNRVKGFLAYCGIDIPPQFDNPHWSHNFISWLQQLSFEHSSNRITLNYQVREVIVLRKELLSISNDIRKLMRSKKYKDRYYLLRTITGIGPLTAAALLTEIGDINRFQNFYHLNSFIGLMPMEHSSGEKELKGRITVRKHRQLRSDLIECAWAAKRNDPALALYYNEQIKRGKNGKAAIVKVARKLLSRIRYVWLTGKPYETAVVQ

SEQ ID NO: 136633 - protein, 348 aa, unidentified
MESVAGLDVGVKHSSLCVVRRDGWSMKPVSRHRTVTTPTAIGEWLAMQGVGRVGLEAGAQSAWLARELGQRGLEVTVMETRRQRAFGSYSKIKTDERDARLIGEALATGLYTKVHVRSTWSQEVRALLGARLQVKRQAQQSRQFIRGQLRAVGIELGRVSGKKWLAAAEAAVAERDGPLGVALKALLASCRALAEQVALLDKEIRVLARQDAACRRMMTAPGAGLLTSLALRASLDDAERFQQSAEVGPYLGLTPARWQSGALDRRGGITKQGDSLVRAYLYEAAVALLERQKRDCPLRRWGLQQQTRLGKRRTRVAVARKLAVLMHKLWRSGQSFDWNRGMEAPQTH

SEQ ID NO: 136634 - protein, 437 aa, unidentified
MADAEVTEPAEELVDRVAAIDIAKASGMVCMRLPHPSRPGRRTQEVWNVPATTNGILQLGDRLVCQGVTRVVMEATGAYWKPFFFLLEARGLECWLVNAREVKNVPGRPKTDKLDAVWLAKLTERGMLRPSFVPPKPVRQLRDLTRMRTVLIRERTRHKQRVEKILEDAQIKLSSVATDIFGVSGRSMLEALIAGQRDPRALAELARGNMVVKKAALAEALTGQFEDHHAFLCRTLLDTIDYLGGKIETLTARTTTTLQTLPCPDTEGNLRAGPGPDLVEKLVTVSGVGFRTAQVLLAELGPDMRVFPTAGHLVSWAKFAPRTIQSGGKNISGPTGKGNPWVKNAVGEAALSASRSSTFLGARYKRIVKRRGRKRALVAVGHSLLVIIWHLLNDPATPYMDLGSDYHQRLLDPDRRTRDLVRQLKALGHDVTLTPVA

SEQ ID NO: 136635 - protein, 457 aa, unidentified
MRQRGKRTKGVEEAHPFAGMSQVNQDAAGVDIGAEEIVVCVAGDEQTQIVKAFGNYTVDLQNIGKWLQAHRVKTVAMESTGVYWIPLFEELERQGFECLLISSRSLRRVAGRKSDIQDAQWIQTLHSYGLLESSFRPQGDLVALRTLLRHRSQLVEHRSPHIQHMQKALLQMNVQLSQALSDVTGETGLRIIRAIVAGERDPQRLAALRDRNCKKSEEEIGKALTGTWREEHLFVVKQSLEMYDFYTQQVEDCDVEIERLYALTRPDWKSDDLKPLPPKKRNSHSKNAPQKQAEIRQHLKRISGVDLSVVDGFGVSLAQTVIMEVGTDMSKFPSEKHFCSWLGLAPKHEISGAKVLKNKTLKTKNRAGQAFRMAAQSVKQADCVFGSLYRRLKSRLDKAQATVATAHAIARVVYRMLKYKVEYEQISVEEYEQKYKEQQIKYMKKRAQKLGFQLIPA

SEQ ID NO: 136636 - protein, 418 aa, unidentified
MSEALLSTVRIGVGIDTARYGHYASFIGEDRQTAARGFTFPESREGYQQFQAALERLAKRHGGDVHFHIRLDAAGQYAVNLEMFLRQLPFPTTISVGEPKRNKDYKNAHFPKRKADPVDSLACARFAIVERPPASHDTPAEFIPLRDLAGALESQSKQTTRGINQLHAHLARVFPELAALAPNIAAEWVLKLLDKYPTPERIAAAHLDSLVKIPYVTRERALALQAAARSSTGSLRGPLAEQLVRHLVDEVRQSRDAEQTLGKLLEQAFHALPTGAHQQLLTIPGIGPRTAAALVAKIVSIDRFQSPEALVNYFGFFPEQNSSGVTSPRQTRRCGPGTLRAEAAALRVRRVEDQSTVRPRAIRGAFRPGTTDAEPGSGASSPSPHTGRTGSERGCRGPQGVEPQSDSGHRGQHSLWNP

SEQ ID NO: 136637 - protein, 596 aa, unidentified
MSTDMPLDRIGVGIDTARYGHRVSFLRPDRRPAAKPFTVLENRTGYQALHERLQQLHQQHPQAHFHVRIDAAGQYAANLEHFLRGLNLPMTLSIGEPKRNKDYQKAHFPKRTSDDTESQAMARFAVVEQPAATTATTPAMVLLREVAGRLQAKVKQSTQAINRLHNLLARVFPELATLTDNVASAWLLQMLDKYPSAERIAQARLHALEKIPYLSPELAQQVQLAAQQSVASLRGDIAEALVRDLVTQVRHTQQTEQSMRQLLTAAFADLPSSAHVQVVTIPGIGTATAAVLVAKIVDIERFATPEKLVGYFGAFPEQDDSGVDKYGKPLPSGRQHMSHKGNDLARHYLWNAARSALQHNPAIRALYRRLRAKGTRGDIAMGHCMRKLLHLVFAVWKTNRPFDAKHFPWEPTGDIAMSVAPSATAGGIPTTATSATTDVLSTSNDKAVGHKRDKPAAEVVTTAVTTVAPTPVPVNPDPPRQRTPPCKVDFAFLRQQVTLEQLLNHLGLRDNLRGRGLQRRGPCPIHSRPDDPQRTFSAHLGKNVFRCFHADCGAHGNVLDLWVAVHHLPLYEAALHLAETFQIRRNREEEPVTGTR

SEQ ID NO: 136638 - protein, 402 aa, unidentified
MNAVGIDVSKGKSMVAIMRPFGEIVSAPFEIKHTASDIHSLVELINSVEGESRIVMEHTGRYYEALAHQLSQANLFVSAINPKLIKDFDNDSLRKVKSDKADAVKIARYALDKWQNLKQYSVMDELRNQLKTMNRQFGFYMKHRTAMKNNLIGILDQTYPGVNTYFDSPARSDGRQKWVDFASTYWHVDCVRKMSRNAFIGHYQNWCKRKKYNFSQLKAEEIYGKAKELVPVLPKDDITKIIIKQAVDQLNSASTTVESLRTLMNEIAAKLPEYSIVMAMKGVGTSLGPQLMAEIGDVSRFTHKGAITAFAGVDPGVNESGTYVQKSVSTSKRGSSSLRKTLFQVMDVLIKTHPQDDPVYQFLDKKRAQGKPYYVYMTAGANKFLRIYYGRVKEYFASLPES

SEQ ID NO: 136639 - protein, 335 aa, unidentified
MQIKHFIGIDVSKDTLDLSVVVNGIVLSHYCIGNNSKEIKSTVNKIMKSVDGSFDDTIFCMEHTGLYNRPVVQWLHKNQGKMWLESGVHIRRTLGLVRGKNDKVDSSRIAMFAYTNRHQVKLWAPPRHVIERIGALLSQRSRLVKAKKQLTTANKEQKKFLDKSIMHSLNKYTNRAITVIDKQIEDIEKEITGIIKDDDKLKRMYQIITSINGIGLVTASYILVTTNEFINISDPKKYACYSGVVPFEHTSGTSVRGRTRVSHIANKSIKSLLHLAAISTLNTPGEIQDYYNRKIAEGKNKMSIINAIRNKLILRIFACIKQNREYENNYCYKLA

SEQ ID NO: 136640 - protein, 531 aa, unidentified
MVTTGKTRTRRNRSRSQKFKKAVLGRPQGIIQKRVQAVGPEKFGVVAIDCAKARSTWRLTDFYGNVLTQSASVEHNRNGLQLAVLTLKQVVEKHDIKDLIVAVEMTGTYHKPPMRAFRDAGYETRLVHPFASSFYRQPEHGDDKTDDHDLDAIFRAAVNGFGLLEKPVDAIHQQLQILARHRRDLVKKKSRLQCQIRHHLEQGLPGFGALFNGDDMWTQVTPVPLLEAIAAHGGTVDVIKQAGQKGVTKWLEDAKIRFHKATIERVVVWAANAANADPMATFHTRVWMSQLADWEQKNQQIHDTERDLAAVVARTPYVLLLSHPGINVVSAAELAGEMGPIENYATARAVCGRAGLFPSRYQSDEVDRSGKLTRFRNAKLRAAWMMIADNMCKCNRYWMVKAEKWKSEGHKSHDIRCRIANRMTRIVFKMVSGRELYKHPSRLDRGYVMDKLLTFLREHNTAPAVIVRDLKHAAEQLPKSGQLEEGAKLQEAALKARRSRQKGPQELGTLLVAVLARLGIAAKDDDGLKST

SEQ ID NO: 136641 - protein, 428 aa, unidentified
MDFTQNQRLMQITENTLIIGVDIAKRKHVARAIDDRGRDLVKRLVFENTLPGFKDLLTWVETLRHVERRSDVIIGMEPTGHYWLNLAYYLQDLGFKVVVVNPLKVKRSKEMDDDSPTKNDTKDAKVIAQLIKDGRFNEPTLPEELFAELREGMKLHDMIQEDLSSIKAQVHNLLDRYFPEFLTVFKDWTGRSALHLLTEGYFPVDIINTSEDVLLEEVNKVTKRSIGMKRIRALKTAAENSVGIRVGLKMARQEMAYLMDQYHGLAERLASLENELVTLVMEVPGAEEMMNIKGIGAMTVVAFFSEVGDITQYRDPRQIIKLAGLNLKMNQSGLHKGRTSITKRGRKRLRNILYQVAIPLAKHNAAFSQLHDYYRTRANNPLTGKQSFIALARKLIKIFYVIGTRKCAFDPQRMMQDIPSLQGVQEAA

SEQ ID NO: 136642 - protein, 315 aa, unidentified
MTTSSGKFVGIDVAKDKLDIAVLGETKASQVGNDEVGITKLIKKMKALKPALIVVEATGGYQRAVALGLYEAGLPVAVVNPVRVRQYARASGLLAKTDKLDAFNLAEFGKQMKPRKFEAKSESERHVSALLVRRRQLEEMLKAEKSRLRTVPVAMRSSVERMIEMLKEEIKRLEKELDRFMKENADWREQEEILTSAQGVGRITATTLLAELPELGKLDRKKIAALVGLAPMNFDSGKKRGYRKTKGGRMEVRNVLYMSTLVATRYNPLIKVQYQELQRRGKVKKVALTACMRKFLTILNAMMRDRVPFRHSVLV

SEQ ID NO: 136643 - protein, 467 aa, unidentified
MTPHKDYCLAPPPPVPTPMLPESSVLSDTLQVCHPHAAGIDIGEAEPWVAVPPGCDPQPVRRFGTFTVDLDAVADWLIDCGVTTVAMESTGVYWIPLFELLEARGVQGLLIDPRQAKRVPGRPKTDRLDCKWLQRLHTYGLLAGAFRPEAHVCVLRSYLRHRQMLLTYAAHHIQHRHKALEQMHRKLTQVVSAITGVTGMAILKAILAGERDPQHLAKLRNPHCHHDEDDIAKALQGTWRAEHLFALRQAIELYDFSHQQMTQCDQQIKAHLAPFDDKSAGRPLPPKARRHKKTNEPRFDARTPLYHLAGVDLTTIEGIEEGTALVILSEIGTDMHRWPSVKHFWSWLGLCPQHKISGGKVLSRRVRPGAHRVTVALRLAARTLHHSQSALGAFFRRMKARLGAPKAITATAHKLARLVYSLLQHGSAYVQQGLDAYEAQYRERKVTTIAKQAKALGYTLVPLAAQG

SEQ ID NO: 136644 - protein, 315 aa, unidentified
MFDGLYRPREEDRPTMNASKEHPPMTAGLDLGDKYSYLCLIDQESGEVVEEGRLRTTPEVLRQRFASEQQLRIAIEAGTHSPWASRVLEECGHEVLVANARKLRLIYANKRKTDETDAENLARLARLDPKLLYPLKHRSEASQAHLALIRSREALVGCRTQLVNHVRGAVKSFGARLPKCPAVSFHKKAPEHIPEALWPALGPILEQIGSLTERIRQYERKLEAISKEHYPETELLRQVEGVGGLTALAFVLTLEDPHRFEKSRSVAAYLGLVPATDRSGERDPQKRISKEGDEMLRRLLVSGAHYVLGPARTRI

SEQ ID NO: 136645 - protein, 401 aa, unidentified
MRAIGLDIHRGFCEVAVHEGGESRSAGRVKTTPEALEVFASSLGPEDWVAMEVSGNAAEIARIIEPHVARVVVVSPSDTGIRQARAKTDRLDARTLARLLAAGSLDAVWMPDERTRVMRRRLARRSGLVEARTRLKNEIHAVLIRRLIAQPDVSDLFGQAGRRWLGKLELPVEERETLESSMRQIEFLDSEIGEVERVIALDALQWPDLRRLMSVPGVNVICAASFLAATGPIERFKNPRKLVGYLGLDPKVRQSGPGPGTSGRISKQGSSSARWALVEASWSAVAQPGPMRAFYQRIRARRGHQVAVVAAARKLACLFWCLLTREEDYAYQQPSLTRKKLRRLEIAAGSPKYQGHSNIWSTNLAMRQAERALAEQAELAYRNTVRDWHAAQAKRTQTARP

SEQ ID NO: 136646 - protein, 334 aa, unidentified
MEQITTVGIDLAKSVFSLHGVDSAGREVLRRTVRRDQLLDAVTRLSPCLIGMEACSGAHEWGRRFQQQGHTVRLMAPKFVAPYRKSGKNDGNDAEAICEAVARPNMRFVPVKSIEQQALLALHRVRQGFVVERTAIINRLRGLMSEFGVVLPLRSVTVRRQAAAAAEALPELARRVIGDLLEQLRLLDERICSYDREIEAQARLSEPAQRLMKIRGIGATTALAIVATVGNAREFKNGRQFAAWIGLVPGQYSTGGKPRLGHISKRGDSYLRNLLVQGARSVLQTAGAHQDRMSRWVLDLLPRRGYYRTLVAIANKNARIAWALLAKNEALRPT

SEQ ID NO: 136647 - protein, 342 aa, unidentified
MADIVTIGLDIAKSVFQVHGVDATGQVVVRRQLRRFHVLKFFAGLAPCIVGVEACATSHYWSRELRTLGHSVKLMPPSYVKPYVKRQKNDMADAEAICEAVTRPTMRFVETKTPEQQSVLMLHRIRLTLVSQRTMLSNTIRAHMAEFGIVAPIGRNGLDQLLAVLSDLDDQRVPALARDCLVAVAEQLLLVKGKILDMDRRIAACHRASDMSRRLAEIPGIGPLVATALVATVPDPRAFASARNFAAWIGLVPKQNSSGGKERLGGITKQGNRYLRSMLTVGALAVIRYAERHGTKRPWIVKLLARRPTRVAAVALANKMARMAWAIMAKGERYREPVLAAA

SEQ ID NO: 136648 - protein, 433 aa, unidentified
MRIIGLDIHRAFAEAVAWEDGRLRRLGRVDMRRDLLAAFAAKLSPNDVGVIEATGNATSATAVVAPHVKKVGIGNPKQVRIIAYAKIKTTIEADVLAQLYASGFLPEVWIADEPTQALRRQVTRRNQIVRQRSRLKTVIQSILHSHLIASCPHADLCGAKGRTWLIEQVVPQDERLAIDRHLREFDRLGEDLQVIERDLARSALDDEGVKRLMTIPGVDITVALAMKAAIGDVSRFDDPQKLVTYLGLNPSVRQSGQVRPTMGGSPSRAVVMRAACSSRRPGRPLVLPDRCEPSPCGVRARRGQHVAAVATARKLSVVIWHLLMKGESYAWARPSLHAKKLARCGTQGREQGCARPKGSRARLQHKEPPGRRAPLGGAGRGRLCTPRRRLEPTRSEEGRHGCRKRGATIEAARQGSHLGPCSSPRGRPCATGE

SEQ ID NO: 136649 - protein, 346 aa, unidentified
MTTVDATRPVTGGVNTHLDVNPAAALDAIGGLLGVAEFPTTPAGHRRLAEFLASFGTLTRVGVEGTGSYGAGLSRYLRSTGVEVVEVDRPNRQSRRRTGKSDPVDAIEAARAALSGRAQGAGKSRDGNVEAIRALVVAKRSSRSTKIQTLNQIRHLGFTAPEELRSRLKGISRQHLGAEAAALRPRAGGDPVVFATKTALSLLGHRVLVLDAERERLNLLLGELVEKTAPQLLEIHGVGVDTAATLLVTAGDNPGRIRSEAAWAHLCGVAPIQASSGKVSRVRLDRGGDRQANSALWGVVITRLRSDPRTQAYMERRLKEGRSKPEVIRVLKRYVAREVYHRLPRA

SEQ ID NO: 136650 - protein, 405 aa, unidentified
MKKCFAGVDWASEEHACCVVDEDGRIIEGRRYRHDERGITALCRRLVDLGVELVAIERPDGLLIERLLDAGLRVIAIHPNQVAAMRPRFSAAGGKSDSFDSFVLGELARTDSHRYRVLVPNSDQTKALRALSRAREDLVGTRVALANELRAQLQCFWPGAAGVFAEIDSPIALVFLKRYPTPAAARGLGEQRMAQFLARHSYSGRKSPRELLGRLHSAAQGRAEALESEARRQIVLALIAALEPIVAKIAELTSEIRGALAEHDDGATFRSLFKDPKSAITAATMLAEIGDCRERYPTKQALSADGGQSPVAVESGKSKRARFRWACDHRLRNAIGTLADTSRHHNPWAADIYQRAIARGATHPHAIRILGRAWCGVIWRLWQDHTTYDPAQHTALQRLIASTTT

SEQ ID NO: 136651 - protein, 410 aa, unidentified
MDVFLERCAGLDVHQASVVCCVLIGAPGRKPQKLLRSFGTTTRDLETLRAWLAEHGVTHLGMESTDVYWKPVYAVLEGHVDLTVGNAHHIKNVPGRKTDVKDAEWIAQLVRHGLVAKSFVPPPAIRDLREMVRHRRTLIETRTAVRNRVLKLLEGANIKLSGVASDVFGVSGLAMLEALAAGTNNASEMAGLARGRMRRKHAALEAALDGRMREHQCFLLGMHLRNLKAIDQDLEALDARIGTQLEPYQMQHRLLMQIPGVDWVTAASIIAEIGTDMDVFASARRLAAWAGVAPGNYESAGKPKGAGTRRGNVFLKSALFAAASAAVRTKGSYYRDKYNRLRARRGSVRAIMAVAHKLLLAAFHMLSTGEAFRDLGEGYLDQVARKRSTTKLVQRLSNLGYNVMLVPKAA

SEQ ID NO: 136652 - protein, 416 aa, unidentified
MDTMYERCCGLDIHKKTIEACFRSGKKKTHMSFGTTSAELRKLTMWLVENDCQSVAMESTGSYWKPIFNILELSGTDMEIIVVNARHMKNVPGRKTDVHDAEWIAELLQYGLLRPSFIPDREQRELRELSRYRKSLVGERAREINRLQKMLEGGNIKLTSVVSEVTGYSSRRLLDRLLRSDEPMTEEVISELVHTSLVGKSKELEIALDGLLSELQKELLIKVLDHIDDMSRRIADLDDFCRKQMKKYEDALDKLDEIPGIARRTAETILIETGLDMSRFPTAKHFARWAGLAPGNNESAGKRSSGRTTKGNPTLKSTLIQSAKVAARKKDSFFKARYQKIAARRGANRASVAVAHSMLIAIYHILKSGERFKDLGEDYYNQFNKEKKKKYYLKKLTKLGVNLKEATLSISIQTAT

SEQ ID NO: 136653 - protein, 413 aa, unidentified
MAVSCGIDWSEEHHDVAVVDADGRLVAKRRIGDDAAGFGQLLEVLAEAGDRPEAPIPVAIETTRGLLVACLRATGRPIYAINPLAVARYRQRHAVSGKKSDHADAVVLANILRTDRAAHRPLPADSELVRAIAVLARAQQDAVWDRTQAHNKLRSLLREYYPGLLAAFRTTRGGIMRPEARALLAAAPTPADAARLTRPELVGLLRQAGRQRRLATHAARLYAVFAASCLRQPPLVEQAMGRHALALLGALNTACANADELATATRQAFDQHPDAKLITSFVGLGQLTGARVLAELGDDRSRFAAAKAVKAYAGAAPVTRASGKSLLVTHRRVKNQRLATAGYQWAFAALTASPGAHAHYQRRRAAGDAHAAALRNLFNRLLGCLHHCLQTQQPYQEHAAFAPPGWQHRPASA

SEQ ID NO: 136654 - protein, 387 aa, unidentified
MEVRVVNTPSAGRNNDPVHCFVAIELSKSNWVVGFQTPLTDKASRHQVKAGDAKGLIELIERVRMRVGRQLSRPVEIVSCYEAGYDGFWLHRVLEAHGIHNHVLDPASLQVSRRARRPKTDRIDAERMVRALIRHLRGEPEACSVVCVPNVEQEDAKRLHRERRRLIAERVQHVNRIKGLCATQGIYDYSPLRKDRLARLDGLRTGDGRALPTRLKAEIVRELKRLELVIEMIATVEAERDAILTNPASTHVNAGKIKMLAKLKAIGPEFATTLVGEVFYREFANRRKLGSYVGLGSSPFCSGSVDRDQGISKAGNSTARSMMIELAWTWLRYQPGSALSVWFRERVGNLKGRPRRIAIVAMARKLLVALWRYLETGLVPTGTALKA

SEQ ID NO: 136655 - protein, 360 aa, unidentified
MKKRIYRRMPVNDFHAETISPAELGGKLVFAIDVAKVDMVAAVACADGRVLHTICWKAPAENPAVLSILRGLRAGGVTVEVVMEPSGTYGDVLCHQLKLDDFSVFMVSGKRTHDAQEIFDGVPSLHDAKSAAIIARLHADGLSTRLADEVPQRRQLKAALAIMDLHQERYLQLVHRLESWLARHWPELPAVIELTSSSLMALLARIGGPADVAAHPEEATRLLLGISHRLIADEKVAAVIASAKASVGVPLVGLEREALMAIAGDAYRAHRAFAVAKTKVDQLASLTPAVTLAPAIGHTTAAVVYAEVGDARAFPSARAFLKAMGLNLKEKSSGTIQGQIKITKRGPSRVRQYLWLAVFR

SEQ ID NO: 136656 - protein, 416 aa, unidentified
MDDELYYERCAGIDVHKDILTVCLRIGRKPTVREFGTLTKDIREVVTWLKANGCQMSAMESSGSYWKPVYNIFEQEGLPAMVCNAQHIKNVPGRKTDKNDARWISKCLSFGMLNPSFIPDREQRELRDMTRFRKSQVEERARNVNRLQKFLEGANVKVGSWLSNVNGQSATQLLELVIEKPDFTQKDVAVRMHKKLKSSSEELYNSLEGYMTEMQREFFAHIMSVIREQTAQIEKTEAMIQRRLDENYKAAIKAIDEIPGIGRVSAEQIVVEIGIDMSRFKNQNALSKWAGVCPGNNESAGKRKSGRTPPGNATLKSTLTQCATAAKKNKNSFFGAQYNRLVTHLGKKRATMAVAHSILIAIYFVLSGNEFKDLGADHYTKFNREKKINSHMKQLSKLGVTFPDEVLLNATLLSSA

SEQ ID NO: 136657 - protein, 370 aa, unidentified
MQQVLYIGLDVHKESISVSTAEEGRDGQVQFLGPIPNISTDIEKLAKRLSKNSHRLEFCYEAGCCGYVIYRQLVSLGHSCTVIAPTKIPVRSGDRVKTDRRDSQRLAMLHRSGELTAVWVPDELHEAMRDLVRARSDATAQLMRSRNQLLGFLLRHGRAYTEGSHWTKRHYRWLHTQTFEQEAHRIVYQDYLESVLTARDRKDALIKRIEMMIPIWSMGPLVEALRGLRGIDTVTAATFVAAVGDLGRFDNPKQLMAYLGLVPSEHSSGSSVRRGGITKTGNSEARRLLVEASWCYRYPARVAKNKGEVILELPKAVRDIAWKAQIRLCERYRRLNAKGKKPTVVVTAIARELVGFIWAIGQEVRPLAAS

SEQ ID NO: 136658 - protein, 340 aa, unidentified
MGEYIGLDVSLKETAISIRRGGKRVWRGKCLSDPAIIAALIRKHAPAAERVVFETGPLSVWFYHALTAEELPAICIDARHAKAALDMAANKTDANDADGLAHLAEVGFFREVRVKGFDSMLSRTLVAARSKLVRATLDIANQIRGLMKTFGLIVPRGIGGKFEGNVRSLLADHAELARIILPLLEAWRSLRIQAAELGRQLLAEARGSEQCQLLMSIPGVGAITATAYLTAVEDPANFSRSRSVGAWLGLTTRRYQSGEVDYDGHISRRGDTHVRSLLYEAAVVILTRSHADSDLRRWGMKLREKVGFKRAAVAVARKLAVIMHAMLRSGELFTRTAAAA

SEQ ID NO: 136659 - protein, 402 aa, unidentified
MNPHSIRVAVDVGSTRHRVAVGLPDGKILDEFDIDHDKRGFNEFFRHIERIEKQHALPVAVAMEGYNGWARPLDGQILRHGYRLYSINNLKLARYKEIFPAPAKTDAIDARRMLELFRLSEHLPLAGDALHEIAPVPAENERLKRLTRRRKQLVWERVRILNRMQSDLQAVCPGLLAITPRAENRWFLNFLTCRGDLVKLSRLRRASILAIPCVGNAYAARILAWQKEAQFAPEIEWVGEMILQDAHRILALSKDIAAMDQQIISLSACSTLAKIIGSIPGFGKISMAELAGEIGSIDRFESEASLALYIGMAALDHSSGKKNGAKTPRQVNTRAKAAMMVAVARHIEYTPMSRAYYDKKRAEGKRHNQAIRALGRHLVRAIWSMLKQGRTYEVREKQRKNT

SEQ ID NO: 136660 - protein, 400 aa, unidentified
MTYDYVIGMDVGKYFHHACILDSGGNQVLSKRVNQHEQSLRKLFNCYATNEAKTLVVVDQPNNIGRLTVAVAQDIGVDVRYLPGLAMRQLSRIHAGNSKTDVRDAYIIAYAGKYLPESLRQVDRVEEAFIQIKVLNGIDEDLTRSYTRLINQIRSALVGTYPEFEHVLRGQIIHRKWILHLLAKYGGPSKIKRLGKARVNAFARKHRARNPEPVTDAIFAAIAGQSVQIAGAKYAELGVAMSAKDALLKLEHRKEIEAEVTELIDEIPQTQLLLSMPGIGPRSAAQILMTVGDMSDFPTAGHLASYAGLSPKTNQSGTSIMSNSLNRAGNKKLKNALWQSSFASIRFHERSRQFYERKRNEGKRHNAAVVALARRRLNVLFAMMKNHEFYREPQSEVAAA

SEQ ID NO: 136661 - protein, 422 aa, unidentified
MDENSRLTEFRQMKNEIRGSSRYLVVGIDVAKERHHAFFGRSDGRTLLRNIVFDNTKEGFEKLLFHAEITKKRHMLETVVFGMEPTADYHKPLAGYLIEKGYLTVLVAGTAVKRNRELLDGRWDKHDTKDAANIADLVAQGKCLFCEFPSPQIQQIRALLSLQRRLKKSERGCMVRIRNHLIAQYFPELDRYWKYAEGRAVIGNCFDPPHITRLSLEEFITLVASRRGSAAQRVRIREIWHAARRSIGSAAHQAAVFEATLLTRQLQTIQAMIRETDARLHEICSPLPEYPCLVSIPGFGPEISAMVIGAIGNPHRFENARQVLKTAGLDLSSSRSGKRSETPYSISKGGKAHLRYALYQAARIASTRNRCFMQYFANTLTGRQRERGIVTKMRVKLAAKMLVIAWTLMKKKEVFDPGHITI

SEQ ID NO: 136662 - protein, 343 aa, unidentified
MELSRVGVDLAKNVYQLHGVDRFGKTIWKRRLKRHQWLEVLLDKTEPGCVIGMEACASAHHWGRELQSRGYTVKLIPPQYVKPYVKSNKNDAKDAEAICEAMSRPNMRFVAVKTVEQQDIQATHRIREELKVRRTAKANQIRGLVAEYGLVAPKSLGSLRAAIPCWLEDAENGLTHYFRSLLQGLWDDLLMLDDRMCEMDKTIKRLAKGNEECVRLQQLRGYAPMIATALVATVGDARQYHKSRQMAAAIGLTPRQNSSGDKHRLLGISKRGDVYLRMLMVHGAKSVVTRAKHKDDRLSRWVTEIATRRHPNVAAVALANKNARMAWAMLRNKTDYDPEYAIS

SEQ ID NO: 136663 - protein, 354 aa, unidentified
MENESHEGVVHMQATTIGIDIAKNVFQVHGVDGQGRVVIARQLRRKLLIEFFSKIPPCLVGMEACGTAHHWARELAKFGHTVRLMPPSYVKGYVKRSKNDAADAAAICEAVSRPSMRFVPVKTAEQQAALMLHRARDLLVRQRTQLINALRAHLAELGLVAEKGREGVAELAAMVSDKSNSCALPSAMKQALQVLLDQLAALQQQVATLDRGIHAQHRANDMSRRLETIPGIGVIGAAAIASTIADPSAFKSGRDFAAWIGLVPRQNSTGGKEKLGGISKQGDRYLRRLLVIGATAVIQHARRHPARHRWIISLLAKKPAKLVAVAVANKTARIAWAIMAKGGTYRAPELAAAA

SEQ ID NO: 136664 - protein, 318 aa, unidentified
MKTTAIGIDVAKDRLDIHARPTGETWRVAHTPDQFPALIARFKELDAERIVIEATGGLEVLLATQLAAAGLPVVVINPRQARDFAKAAGQLAKTDQVDARVLAHFGEALQPPVRPLPDEETRALEALLTRRRQLVDMLVAEKNRHAALSRRPELQENVAEHITWLNRHIADLDDQLKQQIERSPIFCREDRLLQSVPGIGDVTSRTMLACLPEIGKLTDKQIGALVGVVPFARQSGRWQGEAHIRGGRSEVRTVLYMATLSAIRCNPTIKTFYQHLLAKGKKKKVALTACMHKLLTILNAIVRHQEEWRTPQTSAATS

SEQ ID NO: 136665 - protein, 343 aa, unidentified
MHVNTIGVDLAKNVFQVHGVDNAGKVVITRQLRRKQVLDFFSKLPGCLVGMEACGTGHHWAREISKLGHTVRLMPPSYVKGYVKRSKNDAADAAAICEAVTRPSMRFVPIKSTDQQALLMLHRTRDLLIRQRTQLINALRAHLAEFGLVAETGREGLAQLGAVITDESNHESLPSAMKQALQAIVDQLAALELQVGALDRAIHVHHRANDMSRRLETVPGIGVIGATAIASTVTDPSGFKSGRDFAAWIGLVPRQHSTGGKERLGGISKQGDRYLRRLLVIGATAVVRQARLHPQKHPWIMRLLAKKPAKLVAVAVANKMARIAWAIMAKGGYYRAPEFAAAT

SEQ ID NO: 136666 - protein, 347 aa, unidentified
MSEYIGIDLHKAKSFVTRVDQRGRVLEQVELRHAAGELQRYVEKIPGDTRIVVEATGNWMWLYELIEARHPDLVLAHPLKTKAIASARIKTDKIDATTLAHLLRADLVPAAYIPPRAVRDTREILRFRASLVRLRTQVKNKIAAILSKTGIVTPTKTAFGVKSRQFLATVAVRPCYRLVLDGYLRQLAHLTDEITQAAQTIEAQAQADPQAQLLCTMPGIGAYSALLILSEIGNVHRFPDSRHLCSYAGLVPSVHASGGKTRLGRLTKQGSTWLRWILIELSMHAIKGAPQFRQLYQRVARKHGRNAGRTAVARAMLKTIYAMLKHQEAFRPIEQGSTGQRLGAMAG

SEQ ID NO: 136667 - protein, 368 aa, unidentified
MSASIIAYERSTLVDREKYIGLDVHQATISVAVMDETGRVVMECILETKAATILEFFAGLRGVVSVTFEEGTCAAWLYDLLKPHVARLLVCNPRKNALLKVGNKSDRIDARKLAELLRGNQLRAVYHGETGVRMLRELCRSYLTIVKDLSRVMNRLKALYRSWAIPCAGRDVYYSRHRAEWLEKIREAGVRRRAEHLYQQLDMLQHMRQQARRELLAESRKHPVSAQLRQIPYLGPIRSALAVALIQTPHRFRTKRQLWAYSGLALETRISAEYNYDRGQLRRSKKTISIRGLNKDHNHDLKGLFKGTATMASVRPGPFRDFYERALAKGMKPTMARLTLARKIAAITLTIWKKGEPFNADKLKLQAA

SEQ ID NO: 136668 - protein, 351 aa, unidentified
MKKIFIGIDFAKEKFDAAIIEACGLKEFGDRQFGTFCNDSKGYRQFIKWVKGIAVASSREEWLFCGEDTGSCSQGLSKWLYGKGYDMWIESAYVIRHSNGIQRVKTDRADASMIAEYAWRHQDKAVLFEPLSDSLTQLRELFLYRHKLVQQRVAMDVRKQDKESSDKTKALSFINRKSKHLIAEIDKAIKECDALIDRTIESDEELRENYAIVTSIKGVARQNGACLLIFTNNFKRFDLDARKIACYYGVAPFAKESGTSVHSPARTSHFANKLIKSLLSQAAQIARIFNPEIKEYYDGLIKRGKKHAVALNNVKNKLLRIIVALVRKKTLYDPDAYKFYRDRLNCQFSHS

SEQ ID NO: 136669 - protein, 440 aa, unidentified
MRPVEEVTDEPLYRDRVCGIDIGKAEMHVTIRVPSDTNPQRRMSETRAFATTKRGVVALADWLRSWQVPAVVMEATGTYWMGPFFRLEAEGFECVLADARQVKNLPGRPERDPSDSSWLAQCFERGAVRACFAATEEFRVIRLHTRYRRDLINERTREKNRTGKLLETAAVKLSSVITDLHGRTGRDIMDHLIAGQRDPKVLAQLARTRARAKITELEHALEGAEFFTARHARLLKTMLGRIDQIDDQIDELTAVIEELLAPYEEQLQQAEPMPGWGRRSAGDAVAGTGVDITRFATGGHLVSWAGRAPLDKQSGKRKGQARHKKGNTYLGGVLGETAISAGRTQTREGARYRKLARSRGKDKACVAVGNTQLKAYHKLLSNPGMRYQDLGPDHYERQAATRRKISRLVREIEAEGFEVTLCRPEPGPAEDNPAGTRHLA

SEQ ID NO: 136670 - protein, 436 aa, unidentified
MENVEDEPLFAERVAGIDIGKREIMVTIRVPSDTRRGRRQQETREFRAVRKDLLALADWLRAWGVTKIGMEATGDYWKPVYFLLEREGFDCVLYHAAQVKALPGRPKTDKLDSVWLAKITERGSLASSFVPPEEIRRLRTHTRYRRHLVQARTAEKARCEKLLEDAHLKLSSVITDIHGVSGREMLAAIIAGQRNPKVLAQMARTRMRGKITQLEEALDCSFFTEEHAFVLAMMLANIDHLTAQIKELTGKIEALCQPYLHQIAQLDAIPGFGVITAQDIIAEIGVNMAVFPTAGHLCSWARQAPQVSQSGGKRKGKNATGRGNPYLGGALGESAVNAGRTQTFLGTKYRRLVRHMPKKKAQGAISRTQLVICYELLSDPEAVYQDLGTDHYERRANIRREVRSHARAIERRGYKVILEPIEPGLDPDILPVTKAS

SEQ ID NO: 136671 - protein, 335 aa, unidentified
MQIKHFIGIDVSKETLDLSVVVDGKNLQYFCIKNRTVEIKSTINKIMKGLGATVDDTIFCMEHTGMYNLPLVKWLQIHQGKMWLESGVHIRKTLGVVRGKNDKVDSSRIAMYAYTNRHQIKFWNPPRKLIERIAALLSQRARMNKAKKQLNTANKEQKRFLDKDIMKSLNKYTQKTILVINKQIGAIEKEILGLINDDVKLNRIYKIITSVHGIGFVTASYILVTTNEFININNPKKYACYSGVVPFEYSSGSSVRGKNRVSHMANKNIKSLLHMSALSAIQMQGDLQEYYKRKVSEGKNKMSVLNAIRNKLVLRVFACVNQNREYEKKYEYTLV

SEQ ID NO: 136672 - protein, 413 aa, unidentified
MTDANKFSPNQVLIAIDIAKQSHDAVIAWPSGRTQAVKIANSLAGYERLIRCADTDPHSLCVAFEPTADYHRNIAYWLQAHGVRCFLVSSLACARAREMLFKTWDKHDRKDAHVILYLMQQGLMQPFYDPLVAETMDIQELSNTYHQISLARTRCQHSLVNHYLTLYFPEMERYLHNSRSEWFCRLLLNYPTPRSITRYKQSTFVKRAWEVVGRKVAKQRFLEELYETATSSIGLPIDPTSLAASTFKLQLERYLTLSLQRSELEKTADNILLQRDDYRLLRTLPGVGPVIALMIIAESGDLKRFRHYRQYLNFCGFNLSAVKSGQQQGRYQLSKRGNARLRYAYWLAAVSATRQRENSFRYKYERYIRNDPDNADLKRKGRVAVATKMARVAHALVKQNTNYRGFYEFGHGT

SEQ ID NO: 136673 - protein, 315 aa, unidentified
MQVGKLIVGADVAKAELVIHHDDRDEIIKVKNTKPEIKKWLKQQPLNTAIAVEATNVYHLDLVELAHSLGFEVYVIDGFQLSNYRKSVGVRVKTDPTDARLLSRFLRNEGEDLRPWTPPPAVYGKLQSLLRRRAALVTARTAMTQSWANEALLKAAFQTFVKSIDRLDLLIQKKIKEVLREAGLHEQVARCQAVEGIGFLTATALVMAFMRGEFKSSDSYIAFLGMDLRVIDSGQKNGRRRLTKRGCSEIRRLLHNAAMSASRTATWKGIYEQHRNAGKATTQALVILARKLARVAFALMKNQDEYVTKGGKAAC

SEQ ID NO: 136674 - protein, 375 aa, unidentified
MSSIRFVGLDVHADTIAVAVAEPGQEVRSLGTIPNRPECVRRLVHRLGPAEQLRACYEAGPTGYVLYWQLTALNVRCEVVAPTLVPVKSGDRVKTDRRDALKLARCYRAGDLTPVWVPDAAHEALRDLVRAREAAKRDQHRARQRLGKFLLRHGWHRPLHLKTNWTKRHLEWVKTKVHFEQRAQEIALADYVHEVEHVAVRIERLEEAISEAARSAPPKMRAVIEALQAMRGIAEIGAITIVAEIGEISRFRGAQQLMGYSGLVPSEYSSGERRRQYAITKTGNAHLRRVVVEAAWAYQFRPWCGGYLLKRQKNLSDEVKAIAWKGQIRLNARYRALLANGKNKRQIVTAVGREMLGFIWAIGVKIEAEQRRLAA

SEQ ID NO: 136675 - protein, 431 aa, unidentified
MNSSLNNDPTQNIYAAFIAIDWADQKHTFSLQVAGQAKKETGTLEQKPEIIGPWVAKLRERFGGRPIAVAVEQSRGALIHALLAYDFLVLYPIHPTTVAKFREAFKFSGAKSDPLDTDQILEILTKHLELLKPLKPDTEETRLLGRLVEDRRKSVHLRTSHIQALLASLKEYFPQAIELVSGNLTSRLAGDLLKKWPTLESFQQAKPSAIKRFYYGHNVRSPEVIETALKLAISAQPLTTDSAIIESSRRVSETHSQMIQALNPVIDAYDQRIEKVFHDHPEFPLFSQLPGAGPVMAPRLLAFFGTDRSRYAEAENAQTFCGISPVTKSSGKTRVVYFRRACPKFQRQSFHEFARLSVAKCQWARNYVDYYTGKGKKHNTIVRALAFKWIRILFRCWKDRKPYDDNKYMEILKKRGSIFATLHLEQKNENC

SEQ ID NO: 136676 - protein, 350 aa, unidentified
MPQRNMPRAAAVYGIDIGKNIFHVVGLGIDGVPVQKVRFRRDTLLQFFERAAPAIVGMESCAGSQWIARKIQALGHKMRLIPAQFVKPYVKSNKSDIIDAEAIAEAATRPTMRFAALKSEEQADLQALHRVRDQMIGTRTRLINQMRAFCLEYGIALRQGAGLFKVDLPQAVEDQSNDLSSAMRKLLADLFADLRQLERRIGDVTREIEAVANREDVARRLMTIPGIGALGATALLAAIGNGRQFQKARDLAAWLGLVPREYSTGGKQKLLGISKRGNRYVRKLLVHGARSCFRHLDRTRDRLGNWLDGLQARMHPNKAVVALAAKMARIVWVVLTKPGALYERRDPAFT

SEQ ID NO: 136677 - protein, 354 aa, unidentified
MSQKLNSAIAVIGIDIGKNSFHVVGLDERGAIVLRQKWSRGQIETRLANLPACLIGMEACVGAHHLSRKLRALGHDARLMPAIYVRPYSKGQKNDFRDAEAIAEAVLRPTMKFVATKTADQLDLQALHRVRERLVSQRTGIINQIRAFMLERGIAVRQGLRFLRAELPGILASRTDLLSPRMVRVIEGLADDWRRLDERIEGLSAEIEAVARKDVGCERLMSVPGIGPIISSATVAAIGTGDVFSKGRDFAAWLGLVPRQISTGDRTILGKISKRGNRYLRVLFVQAAWVVLIKPQSWERHGLKSWIEAHKKRLHHNVLAIALANKLARIAWAVLAKGRDFEMTRVDSAVVLPA

SEQ ID NO: 136678 - protein, 298 aa, unidentified
MENVNAKYYGSIDVDDNNFNVALIETASNELLHFKCNSNVSAMVKKIKQKNIHLQDIQLCYEATYLGYTLYRDLKTRGIKCEVIAPSLIPKTPGRKIKTDRLDCIKLARYYLKGMLTPVHIPDEEDEKVRDLIRSRRLLVDQVKKIKTHIISLSKRMGLDYRKQRGITNAAYWTQIHCKWLEKEINQLPESSPLRLNLSGLLSTCRNTETFISYYDEQISLIAQRPKYKDKDKVKALNCFRGLKDLSSLTLTTELGDIRRFPHPSKVSAYSGLSIREYSSAQEEKNSALELQNRETAY

SEQ ID NO: 136679 - protein, 425 aa, unidentified
MMNTSNTYPLHPKMTRTYAAVDSHKDSHTIVILNCFHEKLGEITIGSAPSEFSKFLKRIKKYLQPNTTWAFGFEDTSAFGRSFVKFLVEKGYLVKHVEASKVATERGQVLHKTDSFDAECACRVLINQFDNLPNANPLDKYWVITNLVTRRNALVKINVMVKNSLHRVIADHYPHYKKFFSCVTRDSALAFYEAYPSPHHLDHVTVETLSNFLHAASKGRLSNSKAEIILMHVQRDNVLKLEYQDSQDFTVRSLVRQVRTNLTELKAADKEIEKLLKEFNYPLTTITGIDNLTAAKIIAEIGDIARFKNAKALAKYSGISPVTYSSGMTNLQRANARGNRKLNEIFFKIALTSITPIGKNNVLLNPICYEYFHKKISEGKTKNQAIKAVQRRLVNIVFSVMKHQRPYNCPDIAYLHDYKNEATAV

SEQ ID NO: 136680 - protein, 351 aa, unidentified
MLIIGCDLHSRYQQIAMADDRTAELLLERRLDHESGEAHAFYRALQGQVRVGIEATRPVHWFERLLGELGHELWIGDSSRIRASEVRKQKTDQRDAALILDLLLAKRFPRIWAPAPAERDLRQLLWHRHKLVRMRTMLRNQLHSLAMSQGLCRKQKLFTKKGRAELQSLSLAPWASRRREELLKLLTQLESPICELDQAVLEEAQRRDDAVRLMTHPGIGPVNALAFLLSIGPVTRFAGSRKIASYLGLNPTEESSGDRRRLGAISKQGNTMVRWLLIEAVQHAVRQDPVLRQDYQRLKFRRGHAVAKVAIARKLAVRMYWMLRSGADYAQLVRRQDSSRATLMNVSSSTL

SEQ ID NO: 136681 - protein, 371 aa, unidentified
MSVYVGIDVHRKRSQVAVVTEDGQVQLNKNVVNGSEPMLRLIGGLPSGTPVAFEAAFGWGWLAQLLEDYGFEAHLVHPLRCKAIASARLKNDKVDAAILAQLLRADLLPEAWIAPPAVRQLRALLRHRASLVRLGTQQRNRIHAVAADHGYDRSASYWTGPGRGWLAELDLPPASREIVTDCLAVIDGLAPVIERIDGELHQQAKADPRVKVLRTLPGVGEFTALMMLAEIGDITRFPSARKLASWAGLTPTVRGSDLTVRHGHISKQGSAWLRWVLNQAAQTAKRSPDFAAPYAAIAKRRGKKIATIAIARKLLTRAWHLLASMQDTTATTPAAGAASVAAAPQDREVAKLRARSPLRHEPGRQSPRSIF

SEQ ID NO: 136682 - protein, 337 aa, unidentified
MTPEQLPGAPTPYDKPGDFIMTQFMRFVGIDVSKDHLDIHCLPDGLALRVANSGEGIGLLLQRIGALEGVAFGCEATGGYEDLLLIRLGQAAVPGYCLHPSDVRAHSRLTGKRAKTDRLDARAIAGALQVAVATRKPAIRAASLSAIKELTTLRRRLIAGVNELKSLRARMGDAGVLGTIDAMIDQHVKAVKALQAQIRSALAGHPEQAQRARRIASMPGAGPVLTAELIGSMPELGTLSARQAASLTGVAPHPRQSGNTGGRGRCQGGRAAIRRVLYMAALSVIRSQKQPLAAFYAKLRAAGKPFKLAIVAIMRKLIVTLNAMIKNDQDWQPETQS

SEQ ID NO: 136683 - protein, 430 aa, unidentified
MKSNTQNAKIEAITEKTLVLGIDVGSETHYARAFDYRGIEYSKKPFKFSNTEAGFVTFKEWILDLKERHEKDKVVPGMEPTGHYWFNLGKFLQDNEMKPVLVNPHHVKKSKELDDNNPTKNDRKDPKVIAGLVREGRYMIPYLPDGIDADLRTASNIRFQLQAELTRIQNRISRWFNIYFPEYKTVYGKPDAKSGMLILKAAPLPEDILTLGIDGVNQIWRDAKLRAVGKARAKTLIEAAEHSVGSKEGAVSARMEIRMLLEDYESRNTRLQEVMVLIEELVRKIPMAEKLLEIKGVGIRTVSGFLAEVGDISRFNNPKELQKLAGLALVENSSGKHKGETTISRRGRKRLRYLLFEVAMSLVAKNPEFRELHNYYTTRRLNPLKKMQSLMAIAAKLIRVFYAMLTKGVDYDPKKMVSDIKRPAVYLQAA

SEQ ID NO: 136684 - protein, 342 aa, unidentified
MAIVAVGVDLAKNVFAVHGVDETGKVALLKPKVKRADLLPLLRSLPACLIGMEACSGAHHWARELIKAGHDARLMAAKLVAPYRDGGKNKKNDAADAAAICEAVQRKTMRFVPIKNEDQQGRLSVHRARQGFVEQRTATINRIRGLLSEVGIVMPLKAETVRKTAREHLEDLPGYLNQVINDQLDELARLDERVGEYDVMIKQMAHSNERSKRLMQICGIAETTSSAIEATVGNGHDFKNGRQFSAWLGLVPRQRGSGGKTHLGRITKAGDPYLRTLLILGARAVLNAAEKKKDRMSQWALEVKARRGYGKALVAIAAKNARIAWAVLSKGLDYRQAEQLEA

SEQ ID NO: 136685 - protein, 325 aa, unidentified
MTDLPPLGLDVAKSKFNACLIRESGKLRHSSFANSPAGFVQLSQWLAKLGAGTAHACMEATGTYYEALAAYLHQEGHTVSVVNPAAIKAYAQSRLSRTKNDRVDAELIAGFCAERRPAPWRPPAPELRELQALVRRLDSLREMRTMEENRLSSGLTVAAVRASLEDSITYLTTQIRKTEALIRSHIDNHPGLRRQRELLDSIPGIGETTAAALLAEVPDIKQYRSARQVAAFAGLVPRERQSGSSIRGRVRLSKIGNARLRKALYFPAVTALRCSPFFQAWAEGLRQRGKSKMAVIGAAMRKLVHIAYGVLKTGRPFDPEWVKRA

SEQ ID NO: 136686 - protein, 410 aa, unidentified
MRGSEKHLIVGIDIAKEKHHAFFGTATGKTLCKQFTFPNSREGFELLLSKTETVRLQHHLQQVVIGVEPTANYHKPLADYLVRQGLQVVQVSGVAVKQNRELLDGRWDKHDRKDAANIADLVAQGKCQFYEYPSPAIRELRELLHLKHTLKKEEHRVKTRIRNNLLAQFFPEMDQFVTTCQQNSLAVIGTCCSPEQIAALDYESFFEKVVTVYKGKQQEEHLLRIWQCARTSIGCQAENAPIYEGKVLIDQLFHLRQIIKDLDQQIAALCSGFEEYPYLLSIPGIGPAISATILAALGNPYRFDTAKQVIKLAGLDLSASRSGRPALKATPVISKRGNPELRYALCQAALVAGSRNTFFRCWFARKLQGRERERGIMGILRVKLAVKLLVIAWTVMKKKEMFAYERVNSC

SEQ ID NO: 136687 - protein, 344 aa, unidentified
MKIAVLGIDLGKNVCSVVGLDPSGAVVLRRRVRRDTLIDLVAKLPSCIVGMEACCGAHHLGRLFAAQGHDIRLMSPEYVRPYVKAQKNDDRDAEGIAEAATRPTMRFVEMKTEDQLDMQTLHRSRERLVGERTALINQLRAILLDRGIVVPQGKRKLEQYLVILMNEHNGEGLSARMRMLVADIRAQWQELDRRIGEFDAEFVRWAKENEDARRLVTIPGVGVTTSTALIAAVGKAETFEHGRDLAAWLGLVPRQSTTGGKPRLMGISKRGNKYLRKLLIHGARAALPYVAEKDTALGRWAKSLLSRVHQNVAVVAFANKLARICWAVLRSGQRFAAKGEPLVV

SEQ ID NO: 136688 - protein, 365 aa, unidentified
MNKCHLNTELSSHEGTRCQFNGGTGAIKLGIDVHQDFYVVVMQEGGANPKPPQRFWKQAFLHWVAKLARSGSEVHAVYEACGFGFTLQRQLSALSIRCYVVCPQKLDEQNRRVKTDGLDAKALVLKLDRFVEGNRSALALVRVPSEGEEQKRAIHRQREQLVKARKQLEAQGRSLLVNHGFEPVKSWWKQRTFAALQLPAWMKELLLANTQPLLLALQEKIGALTVQLQSAADPKQPRGLGLMTSVIIDREIGDWNRFNNRRQIASYTGLCPGEYSSGNTRLQSCVTKHGNPRLRAALVELAWRLVRFQPNYKPIFKWRRLLAKGAFATGAARKKAIVAVARQLAVDLWRVRTGRCKAQALGLFI

SEQ ID NO: 136689 - protein, 418 aa, unidentified
MRNSWTPYKFTFGGTRMYNAVGIDVSKGKSTVAVLQPAGVIIRKPFNVNHTSSELDELAKYIGSLEGETRVVLECTGRYHEPVVKTLSEAGLFVSAVNPHLIKNFGNNSIRKVKSDPADAKKIARYTLDNWIELRQYSSMDNTRTQLKTLNSQFSFFMKQKVAAKANLIALLDNTYPGVNKLFDSPVRDDGSEKWVDYAYSFWHVDCVRKIGLKTFTERYQAFCKKHHYNFQPAKPAELFLASKDLIAVFPKEASYKLLIQQSIQQLNLASSHVEELRSKMNELASTLPEYATVMGMYGVGKTFGPQLIAEIGDISNFSHREALTAFAGVDPGVDQSGTHNSKSNKASKCGSNRLRKTLFQIMSTLLQTAPEDDKVYQFLVKKRAEGKPYYVYMTAGANKFLRIYYGKVKECIRNLEQ

SEQ ID NO: 136690 - protein, 429 aa, unidentified
MNYNTQNAKIASITEKTLIIGIDVGSETHYARAFSWRNYEYSKKPFAFSNDEAGFAAFKEWMDDIAEKHEMEVIIPGMEPTGHYWLNLGAYLQEQGMKPVHVNPHHVKKSKELDDNNPSKNDRKDPKTIAGLVNEGRFSYPYIPTGIYAEIRNLSNLRIQTQEEITRIKNRMARWFSIYFPEIKDVYRNPDAVSGLMVIKQAPMPCDIRELGVEGVNKIWRDARLKGAGIKRATTLVTAAEHSIGNTEAPRSARKEIRNLLEDYEGYKKRMDELMEEIEKTLSEIPYIDKLMKINGIGIKTVSCFIAEVGDIGRFDNPKQVQKLAGYAIVADSSGKHNGESRISHRGRKRLRYALYESAISVIGKNKEFKEIHSYYRTREKNPLKKMQSVIAVACKLIRIFYTILTKGVDYDGQKMLNDIVRPEIQPAA

SEQ ID NO: 136691 - protein, 440 aa, unidentified
MKMKSTYENDMMKRTEAEGSDFAAFLGVDWGSQEHALCLHDCTTGQRETSTLKHTPEAIAQWAATLAQRFPNGKIALCLEQAKGALISSLMAYPFLVLYPVNPATAARYRQAFKTSRAKSDPSDAQVCLELLLHHRDKLTPWRPDDSQTRALARLLEQRRGTVDLRTLLTNMLRDALKSYYPQALALAGQDLFAPLACQFLLQWPSFQELQKARKETVRKFYYAHNCRRQDVINKRLDAIASMIPLTSDQAVLEPAKVHVTMLARQLLQLSAALKEYDSRITQLFASHADAAIWESFPGAGPTLAPRLCCAFGSERSRYQSAAAIQQYSGIAPVTERSGKNQHWVHRRWARPHFAHQSFFEYANQSVLHCAWAKLFVQEQIAKGKKHPTAVRALAFKWQRIMYVCWRDRVAYDEIAYLNTLKRRGSPLAHKLELHLAQAA

SEQ ID NO: 136692 - protein, 433 aa, unidentified
MEEVTDEPLYRDRVCGIDIGKAGMAATIRVPSGRDRSRRAAETRSFGTTKREVLALADWLRSWQVPAVVMEATGDYWKGPFYRLEAEGFECVLADARQVKNLPGRPKRDPSDSRWLAACFERGAVTACFVATPEFRVIRLRTRYRRELTEERTREKQRAEKLLESAAIKLSSVVSDLHGVTGRDIMDHLIAGEHDPKALAQLARARARRKIAQLEEAVEGAEFFTADHAALLKVMLARIDRVQRETGRLTAVINRLLAPYEEQLQQAESMPGWGRRAAQDAVAETGAGMTRFRTGGHLSSWAGKTPLDNQSGTRTRRAKSKKGNRYLAAITGETAAAVSKTQTREGARYRRLARRRGKAKALVATGNTQLKVYHKLLSNPGMRHQDLGADYYERQRDTRRQISHHVGKLGALGFEVTLCRRPDPDGSDTTQAA

SEQ ID NO: 136693 - protein, 356 aa, unidentified
MKVTTIGLDLAKNVFQVHGADAAGTPVLRKQLRRCQMAEFFAQQRPCVVAMEACGGAHHWGRKLRALGHEVRLIAPQYVKPYVKSQKNDAADAAAICEAATRGHMRFVSLKTVDQQSVLALHTVRSGFVKQRTALSNQIRGLLAEFGLVLPQGLSKLSGQLPVAVADQHNELPDTMRDLFRMLHAQLARIDDLVARLERQIRVWANQDEAAKRLQQIPGVGPITASALAASVGDARQFEDGRQMSAWIGLVPRQHSSGGKSVLLGITKRGDKYLRTLLIHGARAALKAYQRAPGKIPEHLAQLLQRKHPNVVCVALASRNARVAWAMLSRREHYQGGHAVKSHALPEVPALPAALA

SEQ ID NO: 136694 - protein, 312 aa, unidentified
MAPRCPRIENSPVALATAVVEAGSEPEVVLEATWGWYWAADVLEEAGARVHLAHPLGVKGFENRRVKNDDKDATLLADLLRMGSLPESWIAPRSLRQLRELVRYRHKLSQLRTGLKSQVHSVLGKEGVVPSLTTLWGPGGAWFLDDTPLGEAYEYRIESLRDLIISYDREITELDQRIHLRVRDDVGYRAIQQLSGVGRVFAAVFVAEIGDISRFPHPKRLCSWVGLTPRHRESDDKVHRGSITKQGSALVRWAAVEAVARWRGGAPIRDSYRRIAERRGTNIARVAAARKLLTLVYYGMRDGEIRCLQEAA

SEQ ID NO: 136695 - protein, 340 aa, unidentified
MDITTLGIDIAKSVFQLHGIDADGAVIVQKKLRRGAVLNFLGNVGPCLIGMEACATSHYWAREIAALGHEVRLIPPAYVKPYVKRQKNDAADAEAICEAVTRPNMRFVPIKTEEQQSVLVLHRARDLLMRQRTMILNAIRGHLAEFGIIAAQGPRQVMGMIARLRDDGDASLPEIARSALLALGAHLEALAGEIRTLERQLMVWHRADPTSQRLETIPGVGLITATALAASVSDPSVFKSGREFAAFLGLVPRQNSSGGKDRLGRISKMGDRYLRKLLVVGATSVIRRAGSNSTKTGAWVRSLMERKPARVVTVAMANKTARIAWAVMTRGEAYRASPIA

SEQ ID NO: 136696 - protein, 369 aa, unidentified
MKKDSTFVAIDDSKRTLMLGILRPGADEPETRSIPNESRHVRRLFARLTREGPVLVCYEAGPSGYDLYRQLTALDVPCQVMAPALTPRKPGDRIKTDRRDAVKLVRLFRAGELTAITVPDEAGEAARDLLRCREDVQEDLLRWRHRLGKFLARHGRVYREGRNGTQRHWTWLRSQQFTLPTLQRTLVEYRCAVEQLLARVADLNREIAALAETAPYREPVGWLRCFRGIDTLAAMTLLAEIGDFARFPHPRQLMAYLGLVPSEHSSGDRTQRGSITKAGNTHVRRLLVEACWSARHPPRLGAALARRSQGQPPAIRAQAWQAQCRLHRRYRHLLGHGKRPPVAVVACARELVGSLWAALTQPEAVALAA

SEQ ID NO: 136697 - protein, 425 aa, unidentified
MGSSKQSREKMNTHLLSSEHAEASIKYVCGIDIGSQSCSSCVTRPDKSVVVKPITFVNTQQGWKVLEEKLAQLDAAPDQIVIGMEATSRYHENLYHELEQRGYQMRLLHPGQTHHFHQQRGLRAKTDRLDAMTIARVLLSGEARMGYIPGEQVATYRELVRLHTQLSEEAARYQNQIQVLVVVLFPEFNQVFADPCGQGALAVLKAYPHAQAVAEAGVEAVYQVLRVIPATHFGRPTAQKLVAAAQTSSSSGRALSGRASSLRILCDQLEHTQANLTRLEEELEQLITTDPGTKGLQQMPELGPKTIAVLRAELGEVDRFACTDQAVAYAGMDIRIKESGKFKGKAKLSKRGSGLLRQILYLAALRSIRLEGSAFGAYYRHLVGRGLKKMSALMAVMRKMVAVTTHLMQTGEDYDPSKVWVGGTS

SEQ ID NO: 136698 - protein, 314 aa, unidentified
MIISPHCVGIDVSKRMLDIFDDAVGRPERIANTLQAITERVAGWRCGNVFVVFEATGVYDRELAEALRQADIRFARINPARARDFARADGRLAKTDAIDARMLAIFARKMMPAVEPAPEPARSALASLAKRRDQLVQIRAQEKNRRSEATDRTTIEGIQRHLDFLNGEIKAIEASIKTLIKAEPDISEQARLMRSAPGIGPVACMQLLAKMPELGCLGSKQVAALAGLAPFNVDSGSYRGKRAIGGGRKRVRDALYMAALNAVRRDLTMKAFYQKLRTVGKPAKLALIAVARKLLTTLNAMLRDRKAYVRPQPT

SEQ ID NO: 136699 - protein, 426 aa, unidentified
MPHSPTHQPATVLPATKLPELPPGGLTAGVDWATADHAVAVVNDKGTVIEQYLVDAGGAGLRELVGRLRRAGVAEVAIERGDGQVVDALLAAGLTVVVISPNQVHNLRGRYGSAGNKDDRFDAFVLADTLRTDRARLRPLIPDTAATVQLRSAVRARKDLITHRVGLANQLRAHLEFFHPGPVRLFADLDGITSLRFLARFTSQDDTDWLTPSRLATWLRSVGYTGRKDPAVLHAHLRTAPPGATGDAGAAAASVTRALVAALTALVTQIHALDAHIAALLRQHADAHIFLSLPRAQALRAARLLAEIGDCRARFPTPESLASLAGVTPSTRQSGKMKTTSFRWSADKQLRDAVCDFAADSRHANPWAAHLYNAARARGHRHPHAVRIVARAWLHVIWRCWQNHQPYDPTRHRALQNLLHPDTAAA

SEQ ID NO: 136700 - protein, 330 aa, unidentified
MLDTETGEVIEKTLQHEGEQVRKFYAALPHPVRVGLEATGSMFWFLQLLEELGIEYRVGHPAAVRTAETRKQKHDRRDAALIRRLLEQDRFPSIWLPTAEQRDLRTLLLHRHQLVRLRVMTQNGLQAVALSQGLRRGSSLWSPAGQQALESLPLADYAATRRRELQEIRRELQRRILELDQRVSEQAQQRTVARRLMSHPGVGPITALATEVFLGDASRFANGKALASYAGMIPSEHSSAGRQRGGALSKQGNPLLRFLWVEAARQAVRRDPRLKQFYRRKLVQKGLGKAVVATARKLGIRLWIMMRDQIDYQEFCQRHSRTAGCPCGNA

SEQ ID NO: 136701 - protein, 356 aa, unidentified
MSYDVKYIGMDVHKEAIVIAVQNESGKLVMESVIETKASSILQFLHGLRGELHVTWEEGTWAAWLYDLLQPHVQHIVVCNPRRNALLKEGSKSDKVDAQKLADLLRTGMLRPVYHGENGLRTLRELGRSYQTISKDLTRVMNRLKALYRGWSIPCAGTQVYAARAREEWLNKLPQAGVRRRAELLYQQLDGLQALRREVRPEFLAESRKHKAAKLLRQIPCIGPIRAARLIGLMQTPHRFRSKRQLWTYSGLGIETHDSAQYSFVRGQLQRSKKPQQVRGLNRNHNHEMKEIFKSAATRASCGRGPFHDFYAGLLAKGMKPEMARLTLARKIAAITLTLWKKEERFDVEQLKTQAA

SEQ ID NO: 136702 - protein, 403 aa, unidentified
MTMRRRAWVGIDVGKTSHHACAIDETGKVVWNQKVSNEQRAIEQLVTRACKGAEQVRWAIDLTSPMALMLITVLLCAEQSVVYVPGRTVNTMTHAFRGEGKTDAKDARVIAETARLRNDLSNVVLPDELVVELTQLTGYRADLMADWVRGINRLRALLGSIFPGLEAAFDYSTRTPLILVSGLCTPAEIRAAGIDGMTAFLVDNHAWPTGIVKSAATAAALANEQPLALPGEAGTAALVKRLACRLLELDREIKDIDKTITARFRDHPYARIIESLPGFGPGLGAEFLVVTRGDLASFATAGRLASYAGLVPVPKDSGRITGNLRRPKRYNRRLRRVFYLAALSSLRADGPSRRFYDRKRAERLIHTQALLALARRLIDVLWALLRDDREFTPEKPITATAAA

SEQ ID NO: 136703 - protein, 439 aa, unidentified
MFGAARQIVTAPWLVSSLVPLNLFEPRIAKRFEAGAEEDRAVAQALKLGCRLAPPSHLRLVKPNRIQRKIYRRKSAHTSMSPTPGVLEKPDASKERPINQNEKTKGNQKMNSICSSTDRVTVAVPVLGLDVAKKSVQAELRNSSNKVRFGFANNAKGFAQLARILKEHDVPKVWAGLEASGPYSQALALWLYAQGHRVSLLNPRRVKHYARSAGNRNKTDLLDAAVIADFVCAHQPVAWQPPTLEVAQLQALVRRREELSLMLQAEKNRLEGIAPNVRSSLEHVIATLSTEKARLEKLITQHVLSHQQLSRDHQLLCTIKGIGSLTAAILLAEMARPGQVERARQAAAHAGLVPRREESGTSVRRNRGLGKEGNRYLRKALYMPALVAIKYNAPLRHFASRLRAAGKPKMSIVCAIMRKLIHIAFGVLKHQKPFNPSLA

SEQ ID NO: 136704 - protein, 402 aa, unidentified
MNSIGIDVSKGKSMIAVMRPFGEVAVSPFEVRHTDSELCELAKLLRSLPGETRVVMEATGNYHLPVAWLLNDSGFYVSVVNAMLVHGYGNNSLRRAKTDKKDAIKLANYGLDHWLALPRYVPEEDTRLMLKNCYRQYQQYSKVQTMLKNNLISLLDTAFPDANRLFSSPPRADGSEKWVDFVATFWHCECVCGSSEKVFVAKYQKWCKKLGYNFSEDKALDIYASACGHFGVMPKTDTTKLLVEQAVSLLRVTSTALASLKQEMQSLAASLPEYPVVMKIFGVGPALGPQLMAEIGDVRRFHSKKALVAFAGIDAPPYQSGQMDVYSRSISKRGSSSLRRTLFLVMGIYLQNAPPDEPIYQFMDRKRSEGKPYKVYMMASANKFLRIYYATVKAYLDALDEA

SEQ ID NO: 136705 - protein, 342 aa, unidentified
MQIAVLGIDLGKNSCSVVGLDTTGRVVLKRRLHRDGVLKLAASMPSCVMAMEACCGAHHLGRILRDHGHEVRLMSPEYVRPYVKAQKNDDRDAEAIAEAATRPTMRFVELKSEEQLDMQSLHRARDRLVGERTALINQLRAFLMERGIIVPQGRRKLELHLDMLMAAEQVTLSARTRLLIEDQKAEWNELDRRISAFDEEFALHARTDATSRLLTTIPGIGPLNATALAAAIGDVQTFGRGRDLAAWLGLVPKQMTTGGKPKLLGISKRGNVYLRKMLIHGARAALPTLSQKETALGGWLRGLLSRAHVNTVVVALAAKLARIIYAVLRSGQAFEMKVAAAL

SEQ ID NO: 136706 - protein, 362 aa, unidentified
MPKMIWLGMDVHAASITVAQYEDQAPTATVQTIANDPAQVRRLVRRLPAGSDVRACYEAGACGYGLHRQLTALGVHCDVIAPALIPRRPGERIKTDRRDAEKLGRFYRSGELTTITVPTPSQEGVRDLVRAREDVRRDRTAARQRLAKFLLRHGHRYPGSHWTKRHWEWVCGHTFDGPARTVFVHYCDHVLALNERLAHLEREIRTLAESAAYQPVVTRLSCLRGLATLSALVLIAELYDLRRFRTPRELMAYLGLVPSEHSSGARERRGRITKTGNALARRLLIEAAWAYRHPARQTRRVHQALTTQPPEVHAISDRALHRLTARYRRLLSRGKTPHHAVTAIARELCGFVWAIALVPDLA

SEQ ID NO: 136707 - protein, 468 aa, unidentified
MPSKKSPKKRELDELAWVFPNAAGLDIGSAEIVAAIPPDRDAEPVRVFQTFTPDLHALVAWLLESGIDTVAIESTGVFWIPIYELLEAAGITPYLVNARQVKTVPGRKTDWTDAQWLQKLLALGLLAASFRPDAEIRTLRTLVRYRAELIERRAPHINHMIQALKHLNIQLNLVLTDITGKSGLAILRAIVAGERDPQQLACFRESGCKHSEAEIAKALPGTWDDAQLFILEQALEIFDYYTAKIPGCDDKLEQQYQAMGSRAEKDAALPDLPPAKKASRSKNALSFKARAQIARVIGVDLVAVMGLSAVTVQTIISEIGTDMQLFPTVKHFCSWLGLAAHNDKSGGKVLRSRTMKVRNRANQAFRQAAQSVAQSDSSFGAYYRAMRARLGPKQAIVATAHKIARTVYHLLKTREPYQEESAAEYDRKRRERELKHLARRAQKLGYTLTAAQATAPASPPEPGGEGRF

SEQ ID NO: 136708 - protein, 354 aa, unidentified
MSQKLSSAIAVIGIDIGKNSFHIVGHDQRGAIVLRQKWSRGQVEARLANLPPCLIGMEACVGAHHLSRKLQMLGHDARLMPAKYVRPYSKGQKNDFRDAGAIAEAVQRPTMKFVATKTADQLDLQALHRVRERLVGQRTGVINQIRAFLLERGIAVRQGLRSLRSELPGILATRTDVLAPRMLRIIEDLAGDWRRLDARIEDLSSEIEALARQDKGCERLMTVPGIGPIISSAMVAAIGTGDVFSKGRDFGAWLGLVPKQISTGDRTILGKISRRGNRYLRVLFVQAAWVVLVKVKCWERYGLKSWIEAAKKRLHHNVLAIALANKLARIAWAVLNKGRAFECVKTEETASLPA

SEQ ID NO: 136709 - protein, 384 aa, unidentified
MQKQDSYDYYVGIDCAQNKHDFAMKNNQDKFLIKKGHFSNTLQGYEKFLNTVLSKCLDKDKILFGMEVTGIYGTNLYERLKSDGYHVVMIFPDSVKNYRDYKRLNKTDKFDSACIAELLLNGDAQIVHAEKNGYIDLKAYIRRRNALKVTCTQETNRFLAKVCLYFPDLLKVFPSGRATLKAIFSIYPTPYSIIEADFNELVSVLQKASKNKFGVDKANELIHAARNSIVVRKSISDGELYNIHSLIDSIDSLESEIRNLEKIIDSKAEEFPAYHVLLTLTGCGKITAATIVAEIGDISRFHKASQIVSLAGLYGDNSKSGSSVNKRGKISKKGSRYLRHAIYMVAEFARRNNPIFKAYFTKKDTFNKLGYKAKINTHTTSYIN

SEQ ID NO: 136710 - protein, 403 aa, unidentified
MEGPLISLDVSKGKSNYRFFENETDRKGKKGVIRHDIQGFDSIRDEAEKMEERLRIKPSVILESTGVYSDVVEKYFTDKGFDVYVISPLLSASMRKEGVRPAKNDSLDTLSIAKVFYSRDDLRKCSENDKNAERLREMSYELDMMNRRIRPMKCQFLRLLDKVWPCLDEVSDYSSRFMLDFIIAFGHPENIKTVKGVLSVIRKSETGTAGRKDKIAQDLFDYCHTHLSALSKDSSYVELLKRMAIELKAMAKKKSELIDRMAEEARSKDEFVRLLTIPAVAKTTALKIMARVGDISRFRNAGALVAYCGLDPRVYQSGKMTGEHRTITKKGDCILRSTLFLAVKLMVMLYPDTKVARFVAAKAKNGLPYKQAVVAGSAKLARIIYSMLTHHENYVEFNANIVA

SEQ ID NO: 136711 - protein, 412 aa, unidentified
MDIVHYRCAGLDVSKRDAKVCVRVQAPDRARATSTVTTWGSVTNQILALRDHLITEHVTLVVMEATSDYWRPFYYVLEDGPFEVLLVNARHVKNLPGRKTDVSDAAWLAQLGAHGLVRGSFVPPEPIRQLRDLTRTRTAVVRERGREIQRLEKFLEDSGIKLSSVASDLTGVSGRAMLDALVAGERDPVVLADMAKRRLRSKLPELTEALTGRFNDHHAFLVKVHLNLIDEHSKAIEEITERIEEAMVPFASARDLLVTIPGVSTKVADVIIAETGADMTRFPTAGHLASWAGVCPGSNESAGRVKSTRTRPGNPYLKGALGIAAMVAARSKDTYFSAKYRRIASRRGPIKAVVALEHATLVAVWNMLETGETYHDPGGDYFTRRDPERAKRRALEQLQHLGYTVTLEPSAA

SEQ ID NO: 136712 - protein, 338 aa, unidentified
MVLIGIDSHKATHTAVVVDDDERELARIKVRSDRSQVAVLLEFAEAYRPRRWAIESAGGLGFLLAQQLVRAGEDVVDVPATLAARVRLLGSGRGSKNDPNDALSTAIAALRDPHLRTVVVEDHAMVLRLLADRHQDLTSLRTQAVCRLHALIAALVPGGVGRRISADGALSQLQAVRPSTVVETARRDLALDLVADIRRLDAGIAAVKASTAVAVAASATTVTDVFGVGPVVAALLIGHTGDITRFPTPGHYASYNGTAPIEASSGKVVRHRLNQRGNRQLNHALHMAAVTQIRFDTPGRAYYLRKIEEGKSAKEARRALKRRISDAVYRQMRADALG

SEQ ID NO: 136713 - protein, 376 aa, unidentified
MNCVNDIRLEQFLQLKKEIRGSEKHLIVGIDAAKEKHNAFFGTARGKTLVKNLVFDNTLEGFQKLLAYVERIKVQDSLAAVVFGIEPTANYHKPLAEHLIKCGHMVVLVGGVAVKNNRQLLDGRWDKHDVKDAANVADLIAQGKCLFYEYPLMTLRNVRILIALKRRLKKREHSICVCIRNNLLAQYFPELDQHYGPSETLTVVRECLDPSEIAGMEYDDFCRTVAPGKMTLAKGRRVGTIWRAAVDSIGCTMGEAASFEAQVMVDSLKQIRQTIKSVEDKLEDACLEFPEYTYLLSIPGFGPDISSKVLGAIGNPHRFTSAKQVLKMAGLDLCADRSGKKSNSAIPVISKQGKADLRYGLYQAAFIASLRRTALA

SEQ ID NO: 136714 - protein, 467 aa, unidentified
MTPHKDSFLDPRPLAPTPTLPQSPMLAEALQVCHPHAAGIDIGEAEHWVAVPPGCDPQPVRRFGTFTADLEALADWLIDCGVTTVAMASTGVDWIPLFALLEARGMQVLLIDPRQAKRAPGRPKTDRLDCQWLQRLHAYGLLAGAFRPDDQVCVLRGYLRHRQMLLTYAAHPMQPMHKALEQMHLKLTQVVSEITGVTGMAILKAIIAGERDPQHLAQRRNPHCHHPEDDIAKALQGTWRAEHLFALRQAVELYAFSHQQITQCDQQINAHLETFGDTSAGQPLPPKARRHKKTNDPRFDARTPLSRRAGVDLTTLEGIAEGTALVILSEIGTDMTRWPSVKHVWSWLGLCPQHNISGGKVLSRRVRPGAHRVTVALRLAARSLHHSQSALGAFFRRMQARLGTPKAITAAAHTLARLVSHLLKHGSASVQQGLENYEAQYHERKVTTMAQQAKALGYTLVPLVTQG

SEQ ID NO: 136715 - protein, 376 aa, unidentified
MSKVRFVGLDVHADTIAVAVAEPDGDVRSMGVIPNQAESIRKLVNKLAPVEALRVCYEAGPTGYVVYWQLTALGVTCEVVAPTLVPTKAGDRVKTDRRDAEKLARCYRAGDLTAVWVPDAAHEALRDLVRCREAAKKDQLRARHRLGKFLLRRGRRPPATMHAWTQTHLAWVKTVHFEHAAQETTLLDYLHEVEHVAERIERLERAIDEAVKTAPTRMRVVIEALQAMRGIALVSAVTIVAEVGELSRFAKPRQLMGYSGAVSSEDSSGPRIRRGAITKTGNAHLRRVVIEAAWAYRYRPAVGAALRKRQTPVSAEVTAIAWKAQHRLHARYRHLLAKGKCKQEVVTAVGRELLGFIWAIGVKVEAGERTGPSAAA

SEQ ID NO: 136716 - protein, 344 aa, unidentified
MGEITTVGLDLAKRVISLHAEDGAGRVVERRTLRREGLLEWFAQRPACVVGMEACASAHHFARELAALGHQSRIIAPEFVRPFRLSGKNDANDAAAICAAVRQPQMRFVTVKSAEQQARLAVHRLRQGLQEERTAALNRLRGLLAEFGRVYPNSASAALAGGRAALADEHLPERLRQCLSRQLGHVRELETHLADCDRDIARDARGDPRAQRLVRLSGIGPLTASALAATVVDPQQFRCGRQFAAWLGLTPRQYSTGGRPRLGRITRRGDAYLRTLLVQGARSALQAALRVAPTRRTPLAAWIAATYARIGYHKTLIAIANKHARLVWVLLTHDEPLRAQAAAN

SEQ ID NO: 136717 - protein, 320 aa, unidentified
MSATLVVVGIDVAKAQVDVSVLGAMLEAQRFDNEAEGHSALAAALAPLGVALVVMEATGGYEAALACALQAAGLAVAVVNPKQARDFAKSMGKLAKTDRIDARMLAEFAAVLVRRDDLAHFIRPLANSEQQALAALVTRRRQLLTMLLGERQRLQLAMALVRPSIEAMIQAIRAQLDDVEAQMVDHVREHFAELDQLLQSASGIGPVASATIIAELPELGRLNRREIAALVGVAPTANDSGTSRGRRHVQGGRFEIRRVLYMATLSAARHNPSIKAFYDRLLAAGKFPKVALVACMRKLLTILNAMVKHNKPWDQSLHNA

SEQ ID NO: 136718 - protein, 401 aa, unidentified
MKRLSGGIDVGSASHHIIILDEEDNVLYNKKISHRINEFTENIKLFRKIEKKEGGKLSFALEGKNGHSAPLDRILLDEGFTLYNVDNLKLKRFRQAFAGEWRDDQRDALMLSKMLKLKDHINSEREKVFVEIEKPSPLTESLKLLSRHQQTLISERVRLINRLRKKLLEVCPQILELGKAKSKKLIAILAKYPDFSKYKKITLKSLLKIKGIGKKRAPFLLKRLDNIEYIPGLTDIYKTIILSHAKRISELQKEIKDIDKSLDGIGEKNKEVNHLKTIPGVATKLASRLIGEIGNINRFPSEKELAVYCGIACVDDNSGKVTKAKAVYKANKICKQTLITMAGGSIRLSPQCKAYYLKKRAEGKSHNHALRCLARQLIKVIHKMLNEDRDYMVKKELKKVA

SEQ ID NO: 136719 - protein, 463 aa, unidentified
MRKKVQRKNSGRTNKPKVDWKALDIVHPNAAGIDIGGSEHWVAINPEVDQQPVRCFDCFTADLQQMADWLIERGVRSVAMQSTGVYWIPVFEILQQGGLEVYLVNARHTKNLPGRKSAIAECQWLLKLHTFGLLNNSFQPSDEVRRARTLWRHRGGIVAQASSAIQRMQKALTEMNIQLSNVLSDLSGVSGMRIVRAILDGQRESRVLAALADPQVKASKEVIAKSLEGNWRQELLFVLGQEVEMYRMYQERIAACDLELQQHLRVRASKVDLQAQPLGPRPKGKRARGNAPKFDLRTELYRISGVDWTQVDGIDVPVAQSVIAEVGVDLDAFPREGNFASWLGLCPTNDSSGGKVLNRKTPKVVNRAKVAFRQAASSLIRSQSYLGAQYRRLRTRWGAPKAITAMARKLACLFYRLLKQGPQYVDKGTEYYEERYREQQVRFVIRRAKQLGIEVVGPAPTNA

SEQ ID NO: 136720 - protein, 324 aa, unidentified
MTDAVLGIDVSKNTFDTNLGAGTKARSKSFANSPAGWHHLIAWLGEHKVGQVHACLEATGRHGLGIALALHEAGHVVSIVNPAQIRDFARTKLGRNKTDQVDAVHIREYAELFKPRPWTPPSPAMRRLCELQTIRAGTVAGLTEWKNRRGSGIMDDLALSLAKTTIQHFTSQLEAVDQAIAETIDNDVELSAKRDLLVSINGVGEALAGIVLAELPGPDILGSSAAVTAYAGLNPQQHQSGISVNRPVRISKIGNAVLRTALYMPALSAMRYNPAVAALADRLKAQGRLKGKQIVIAAMRKLLVLCFGVLKTGKEFDPAMAMGK

SEQ ID NO: 136721 - protein, 316 aa, unidentified
MPCLEGEVILGVDTHRDSHAAALVDLLGRLVSIETFPATRRGARALIKWAQQHGTIRCAGVEGTGSYGASLARRLQLEGVEVIEVTRAARVGRRHVGKNDTRDAEAAARSVLSGQATARPKGRDGIVESIRVLRNARASAIKARVQAILHLKNLVVTAPDELREPLNDLTSRQLVERCARMHRPSQLDTHGATRAALRTLARRHQALNAEIAELDAMLTSLTAQAAPRLLKQPGIGPEIAARMLLVAGDNPTRLRNDSALAALCGASPIEASSGKTTRHRLNRGGDRQANSALWLIANNRMIHHPQTRAYVTRRTA

SEQ ID NO: 136722 - protein, 351 aa, unidentified
MNEVIRVGVDLAKNVMQIHGVDRFEKVAVRKALQRAKFLEWFANRPPCIVAMESCSTAHFWGRKLRAMGHDVRLIAPQFAAPYRKGGTATKNDAQDAEAICEAASRPNMRYVGIKTAEQQSTLVMHRMRSGYVEERTALVNRLRGLLVEFGVFLPQGITKFRGRFVESLEDATNDLTGPARIVLMRAAAQLRVLDDEIDWLDRCIVEHAKADPRAKRMMEMFGVGPLTASAATATVADARQFRNGRQFAAWLGLVPKQNSSGGKERLGRITKQGNAYLRTLLYQCARVTVTASSNRHDRLSRWIVQLRARVGISKTLVAVANKHARVLWAVMAREEGFDPDFASNVKRVVV

SEQ ID NO: 136723 - protein, 388 aa, unidentified
MPANVTAAQNDANQADFSTTLFVSLELSRLRWLVTTLSPGREKMSKHVVNGGDGNALLDLLARLKGEAERRIDVPVKIVVIQEAGLDGFWIHRLLVANEIESHVVEAASIAVPRRHRRAKTDTVDGEMLLRTLKAFKRGEPRVCSMVVPPSPHEEDQRRLSRERQTLIKERIEHSNRIKGLLAAQGIRGYRPLRRDCRDRLNDLKTGDGRALPPWLKAAIVRELDRLELVKRQIKAVEIARHELLQSATTNATVSPAKLLMDLKGVGPAFATVLWLEGLFRNFTNRRQLAAYAGLAPSPWQSGDTKREQGISKSGNPRLRTTMVELAWLWLRYQPDSALSQWFQARAQHERGRVRRILIVALARKLLIALWRYATKGEMPQGAILKTA

SEQ ID NO: 136724 - protein, 344 aa, unidentified
MQVITFGIDLAKNVFQIHGVDAAGHTVVKKQLKRDQLAPYFANAAPATIGMEACSSAHYWARKLQSLGHSVKLMAPQFVKPYVKGNKNDANDAEAICEAVARKSMRFVPIKNVEQQALLSLHCVRQGFVAERTAYANRIRGLMGEFGFVIPQGIHHISERVHDLIEDASNELPGLFRVTMEWLLEHFKELHRQVRELELQIQAWHRSNDASRKLEAIPGIGPITASALIASIGDAKNFKSGRELSAWLGLVPRQHSSGGKQNLLGISKRGDMYLRMLLVQGAHAVINACCRKGVEASWLAGLLKRRNHNVAAVAVANKNARIVWALLARERQYETGYIRDTALA
